United States Patent Application Publication US 2016/0281171 A1 - sequence listing, part 2

SEQ ID NO: 23964 - DNA, 80 bp, Homo sapiens
tatgtagtctactttgtggtcttccccttcttctttgtcaatatctttgtggctctcatcatcatcaccttccaggagca

SEQ ID NO: 23965 - DNA, 77 bp, Homo sapiens
tttgtggtcttccccttcttctttgtcaatatctttgtggctctcatcatcatcaccttccaggagcaaggggataa

SEQ ID NO: 23966 - DNA, 82 bp, Homo sapiens
cccttcttctttgtcaatatctttgtggctctcatcatcatcaccttccaggagcaaggggataagatgatggaggagtgca

SEQ ID NO: 23967 - DNA, 85 bp, Homo sapiens
ttctttgtcaatatctttgtggctctcatcatcatcaccttccaggagcaaggggataagatgatggaggagtgcagcctggaga

SEQ ID NO: 23968 - DNA, 85 bp, Homo sapiens
tatctttgtggctctcatcatcatcaccttccaggagcaaggggataagatgatggaggagtgcagcctggagaagaatgaggta

SEQ ID NO: 23969 - DNA, 84 bp, Homo sapiens
tcatcatcatcaccttccaggagcaaggggataagatgatggaggagtgcagcctggagaagaatgaggtaatgacaattggtc

SEQ ID NO: 23970 - DNA, 79 bp, Homo sapiens
tcaccttccaggagcaaggggataagatgatggaggagtgcagcctggagaagaatgaggtaatgacaattggtctaaa

SEQ ID NO: 23971 - DNA, 78 bp, Homo sapiens
tccaggagcaaggggataagatgatggaggagtgcagcctggagaagaatgaggtaatgacaattggtctaaagtggg

SEQ ID NO: 23972 - DNA, 79 bp, Homo sapiens
atctaggggatttgaatttgtgctaataaccatgactttcttgcagagggcgtgcatcgacttcgccatcagcgccaaa

SEQ ID NO: 23973 - DNA, 79 bp, Homo sapiens
atttgaatttgtgctaataaccatgactttcttgcagagggcgtgcatcgacttcgccatcagcgccaaacctctcacc

SEQ ID NO: 23974 - DNA, 80 bp, Homo sapiens
atttgtgctaataaccatgactttcttgcagagggcgtgcatcgacttcgccatcagcgccaaacctctcacccgctaca

SEQ ID NO: 23975 - DNA, 84 bp, Homo sapiens
ccatgactttcttgcagagggcgtgcatcgacttcgccatcagcgccaaacctctcacccgctacatgccgcagaacagacaca

SEQ ID NO: 23976 - DNA, 82 bp, Homo sapiens
tttcttgcagagggcgtgcatcgacttcgccatcagcgccaaacctctcacccgctacatgccgcagaacagacacaccttc

SEQ ID NO: 23977 - DNA, 79 bp, Homo sapiens
agggcgtgcatcgacttcgccatcagcgccaaacctctcacccgctacatgccgcagaacagacacaccttccagtacc

SEQ ID NO: 23978 - DNA, 78 bp, Homo sapiens
cttcgccatcagcgccaaacctctcacccgctacatgccgcagaacagacacaccttccagtaccgcgtgtggcactt

SEQ ID NO: 23979 - DNA, 78 bp, Homo sapiens
atcagcgccaaacctctcacccgctacatgccgcagaacagacacaccttccagtaccgcgtgtggcactttgtggtg

SEQ ID NO: 23980 - DNA, 75 bp, Homo sapiens
aaacctctcacccgctacatgccgcagaacagacacaccttccagtaccgcgtgtggcactttgtggtgtctccg

SEQ ID NO: 23981 - DNA, 77 bp, Homo sapiens
ctacatgccgcagaacagacacaccttccagtaccgcgtgtggcactttgtggtgtctccgtcctttgagtacacca

SEQ ID NO: 23982 - DNA, 76 bp, Homo sapiens
cagaacagacacaccttccagtaccgcgtgtggcactttgtggtgtctccgtcctttgagtacaccattatggcca

SEQ ID NO: 23983 - DNA, 75 bp, Homo sapiens
acaccttccagtaccgcgtgtggcactttgtggtgtctccgtcctttgagtacaccattatggccatgatcgcct

SEQ ID NO: 23984 - DNA, 76 bp, Homo sapiens
agtaccgcgtgtggcactttgtggtgtctccgtcctttgagtacaccattatggccatgatcgccttgaatactgt

SEQ ID NO: 23985 - DNA, 83 bp, Homo sapiens
gtgtggcactttgtggtgtctccgtcctttgagtacaccattatggccatgatcgccttgaatactgttgtgctgatgatgaa

SEQ ID NO: 23986 - DNA, 82 bp, Homo sapiens
ctttgtggtgtctccgtcctttgagtacaccattatggccatgatcgccttgaatactgttgtgctgatgatgaaggtgaga

SEQ ID NO: 23987 - DNA, 84 bp, Homo sapiens
tccgtcctttgagtacaccattatggccatgatcgccttgaatactgttgtgctgatgatgaaggtgagaggagagaggcacaa

SEQ ID NO: 23988 - DNA, 87 bp, Homo sapiens
ttgagtacaccattatggccatgatcgccttgaatactgttgtgctgatgatgaaggtgagaggagagaggcacaagagccgactga

SEQ ID NO: 23989 - DNA, 86 bp, Homo sapiens
attatggccatgatcgccttgaatactgttgtgctgatgatgaaggtgagaggagagaggcacaagagccgactgagccccagcga

SEQ ID NO: 23990 - DNA, 75 bp, Homo sapiens
taccttaaggctgtgattctttctctcttcttttttcttcctggcagtattattctgctccctgtacctatgagc

SEQ ID NO: 23991 - DNA, 77 bp, Homo sapiens
tgtgattctttctctcttcttttttcttcctggcagtattattctgctccctgtacctatgagctggccctgaagta

SEQ ID NO: 23992 - DNA, 77 bp, Homo sapiens
tctctcttcttttttcttcctggcagtattattctgctccctgtacctatgagctggccctgaagtacctgaatatc

SEQ ID NO: 23993 - DNA, 77 bp, Homo sapiens
tttttcttcctggcagtattattctgctccctgtacctatgagctggccctgaagtacctgaatatcgccttcacca

SEQ ID NO: 23994 - DNA, 78 bp, Homo sapiens
tcctggcagtattattctgctccctgtacctatgagctggccctgaagtacctgaatatcgccttcaccatggtgttt

SEQ ID NO: 23995 - DNA, 77 bp, Homo sapiens
tattattctgctccctgtacctatgagctggccctgaagtacctgaatatcgccttcaccatggtgttttccctgga

SEQ ID NO: 23996 - DNA, 76 bp, Homo sapiens
cctgtacctatgagctggccctgaagtacctgaatatcgccttcaccatggtgttttccctggaatgtgtcctgaa

SEQ ID NO: 23997 - DNA, 78 bp, Homo sapiens
tatgagctggccctgaagtacctgaatatcgccttcaccatggtgttttccctggaatgtgtcctgaaggtcatcgct

SEQ ID NO: 23998 - DNA, 74 bp, Homo sapiens
tgaagtacctgaatatcgccttcaccatggtgttttccctggaatgtgtcctgaaggtcatcgcttttggcttt

SEQ ID NO: 23999 - DNA, 74 bp, Homo sapiens
tgaatatcgccttcaccatggtgttttccctggaatgtgtcctgaaggtcatcgcttttggctttttggtatgt

SEQ ID NO: 24000 - DNA, 74 bp, Homo sapiens
ttcaccatggtgttttccctggaatgtgtcctgaaggtcatcgcttttggctttttggtatgttgctgaatcct

SEQ ID NO: 24001 - DNA, 73 bp, Homo sapiens
atggtgttttccctggaatgtgtcctgaaggtcatcgcttttggctttttggtatgttgctgaatccttccca

SEQ ID NO: 24002 - DNA, 76 bp, Homo sapiens
ttctttccttttctgatgttcctatgactgaattcatttggcagaactatttccgagacacctggaatatctttga

SEQ ID NO: 24003 - DNA, 78 bp, Homo sapiens
ttttctgatgttcctatgactgaattcatttggcagaactatttccgagacacctggaatatctttgacttcatcacc

SEQ ID NO: 24004 - DNA, 78 bp, Homo sapiens
atgttcctatgactgaattcatttggcagaactatttccgagacacctggaatatctttgacttcatcaccgtgattg

SEQ ID NO: 24005 - DNA, 78 bp, Homo sapiens
aattcatttggcagaactatttccgagacacctggaatatctttgacttcatcaccgtgattggcagtatcacagaaa

SEQ ID NO: 24006 - DNA, 78 bp, Homo sapiens
atttggcagaactatttccgagacacctggaatatctttgacttcatcaccgtgattggcagtatcacagaaattatc

SEQ ID NO: 24007 - DNA, 81 bp, Homo sapiens
actatttccgagacacctggaatatctttgacttcatcaccgtgattggcagtatcacagaaattatcctgacagacagca

SEQ ID NO: 24008 - DNA, 82 bp, Homo sapiens
cctggaatatctttgacttcatcaccgtgattggcagtatcacagaaattatcctgacagacagcaaggtgaatggcttata

SEQ ID NO: 24009 - DNA, 82 bp, Homo sapiens
aatatctttgacttcatcaccgtgattggcagtatcacagaaattatcctgacagacagcaaggtgaatggcttataagatc

SEQ ID NO: 24010 - DNA, 83 bp, Homo sapiens
acttcatcaccgtgattggcagtatcacagaaattatcctgacagacagcaaggtgaatggcttataagatccatgtctgtaa

SEQ ID NO: 24011 - DNA, 82 bp, Homo sapiens
attggcagtatcacagaaattatcctgacagacagcaaggtgaatggcttataagatccatgtctgtaagcttggccctgga

SEQ ID NO: 24012 - DNA, 76 bp, Homo sapiens
taaatcaccataatgttcctaattatatgtttccttttggtccaccagctggtgaacaccagtggcttcaatatga

SEQ ID NO: 24013 - DNA, 76 bp, Homo sapiens
ataatgttcctaattatatgtttccttttggtccaccagctggtgaacaccagtggcttcaatatgagctttctga

SEQ ID NO: 24014 - DNA, 77 bp, Homo sapiens
taattatatgtttccttttggtccaccagctggtgaacaccagtggcttcaatatgagctttctgaagctcttccga

SEQ ID NO: 24015 - DNA, 78 bp, Homo sapiens
tgtttccttttggtccaccagctggtgaacaccagtggcttcaatatgagctttctgaagctcttccgagctgcccgc

SEQ ID NO: 24016 - DNA, 83 bp, Homo sapiens
caccagctggtgaacaccagtggcttcaatatgagctttctgaagctcttccgagctgcccgcctcataaagctcctgcgtca

SEQ ID NO: 24017 - DNA, 82 bp, Homo sapiens
tgaacaccagtggcttcaatatgagctttctgaagctcttccgagctgcccgcctcataaagctcctgcgtcagggctatac

SEQ ID NO: 24018 - DNA, 82 bp, Homo sapiens
tggcttcaatatgagctttctgaagctcttccgagctgcccgcctcataaagctcctgcgtcagggctataccatacgcatt

SEQ ID NO: 24019 - DNA, 81 bp, Homo sapiens
aatatgagctttctgaagctcttccgagctgcccgcctcataaagctcctgcgtcagggctataccatacgcattttgctg

SEQ ID NO: 24020 - DNA, 79 bp, Homo sapiens
ttctgaagctcttccgagctgcccgcctcataaagctcctgcgtcagggctataccatacgcattttgctgtggacctt

SEQ ID NO: 24021 - DNA, 79 bp, Homo sapiens
ttccgagctgcccgcctcataaagctcctgcgtcagggctataccatacgcattttgctgtggacctttgtgcagtcct

SEQ ID NO: 24022 - DNA, 76 bp, Homo sapiens
cgcctcataaagctcctgcgtcagggctataccatacgcattttgctgtggacctttgtgcagtcctttaaggtaa

SEQ ID NO: 24023 - DNA, 75 bp, Homo sapiens
taaagctcctgcgtcagggctataccatacgcattttgctgtggacctttgtgcagtcctttaaggtaagaggta

SEQ ID NO: 24024 - DNA, 75 bp, Homo sapiens
tcagggctataccatacgcattttgctgtggacctttgtgcagtcctttaaggtaagaggtaccagcaaatcctc

SEQ ID NO: 24025 - DNA, 75 bp, Homo sapiens
ctataccatacgcattttgctgtggacctttgtgcagtcctttaaggtaagaggtaccagcaaatcctctctgag

SEQ ID NO: 24026 - DNA, 74 bp, Homo sapiens
actgcaggttgttgagcttgggtgctgcttttctttgattaacgtcttatctctgctttccttccaggccctcc

SEQ ID NO: 24027 - DNA, 76 bp, Homo sapiens
tgttgagcttgggtgctgcttttctttgattaacgtcttatctctgctttccttccaggccctcccttatgtctgc

SEQ ID NO: 24028 - DNA, 72 bp, Homo sapiens
gtgctgcttttctttgattaacgtcttatctctgctttccttccaggccctcccttatgtctgccttttaat

SEQ ID NO: 24029 - DNA, 73 bp, Homo sapiens
tttctttgattaacgtcttatctctgctttccttccaggccctcccttatgtctgccttttaattgccatgct

SEQ ID NO: 24030 - DNA, 73 bp, Homo sapiens
taacgtcttatctctgctttccttccaggccctcccttatgtctgccttttaattgccatgcttttcttcatt

SEQ ID NO: 24031 - DNA, 77 bp, Homo sapiens
tctgctttccttccaggccctcccttatgtctgccttttaattgccatgcttttcttcatttatgccatcattggga

SEQ ID NO: 24032 - DNA, 80 bp, Homo sapiens
caggccctcccttatgtctgccttttaattgccatgcttttcttcatttatgccatcattgggatgcaggtgagctggta

SEQ ID NO: 24033 - DNA, 80 bp, Homo sapiens
ctcccttatgtctgccttttaattgccatgcttttcttcatttatgccatcattgggatgcaggtgagctggtaaatcaa

SEQ ID NO: 24034 - DNA, 76 bp, Homo sapiens
ccttttaattgccatgcttttcttcatttatgccatcattgggatgcaggtgagctggtaaatcaagggcccggtg

SEQ ID NO: 24035 - DNA, 78 bp, Homo sapiens
taattgccatgcttttcttcatttatgccatcattgggatgcaggtgagctggtaaatcaagggcccggtgggggaca

SEQ ID NO: 24036 - DNA, 78 bp, Homo sapiens
tcttcatttatgccatcattgggatgcaggtgagctggtaaatcaagggcccggtgggggacagctgttacccagata

SEQ ID NO: 24037 - DNA, 76 bp, Homo sapiens
atttatgccatcattgggatgcaggtgagctggtaaatcaagggcccggtgggggacagctgttacccagataatc

SEQ ID NO: 24038 - DNA, 75 bp, Homo sapiens
acacatcacacagcttggtaatgctcactgttttctgttgtttctctcctcaaggtatttggaaacataaaatta

SEQ ID NO: 24039 - DNA, 72 bp, Homo sapiens
ttggtaatgctcactgttttctgttgtttctctcctcaaggtatttggaaacataaaattagacgaggagag

SEQ ID NO: 24040 - DNA, 75 bp, Homo sapiens
aatgctcactgttttctgttgtttctctcctcaaggtatttggaaacataaaattagacgaggagagtcacatca

SEQ ID NO: 24041 - DNA, 73 bp, Homo sapiens
tttctgttgtttctctcctcaaggtatttggaaacataaaattagacgaggagagtcacatcaaccggcacaa

SEQ ID NO: 24042 - DNA, 72 bp, Homo sapiens
tttctctcctcaaggtatttggaaacataaaattagacgaggagagtcacatcaaccggcacaacaacttcc

SEQ ID NO: 24043 - DNA, 70 bp, Homo sapiens
gtatttggaaacataaaattagacgaggagagtcacatcaaccggcacaacaacttccggagtttctttg

SEQ ID NO: 24044 - DNA, 69 bp, Homo sapiens
acataaaattagacgaggagagtcacatcaaccggcacaacaacttccggagtttctttgggtccctaa

SEQ ID NO: 24045 - DNA, 70 bp, Homo sapiens
aaattagacgaggagagtcacatcaaccggcacaacaacttccggagtttctttgggtccctaatgctac

SEQ ID NO: 24046 - DNA, 71 bp, Homo sapiens
agagtcacatcaaccggcacaacaacttccggagtttctttgggtccctaatgctactcttcaggtacctg

SEQ ID NO: 24047 - DNA, 69 bp, Homo sapiens
aaccggcacaacaacttccggagtttctttgggtccctaatgctactcttcaggtacctggatgcgtaa

SEQ ID NO: 24048 - DNA, 72 bp, Homo sapiens
acaacaacttccggagtttctttgggtccctaatgctactcttcaggtacctggatgcgtaactgtcatagc

SEQ ID NO: 24049 - DNA, 85 bp, Homo sapiens
ataggatctgcagagctgctcctgctaaccaaaatgtctcttgggctcaggagtgccacaggtgaggcctggcaggagattatgc

SEQ ID NO: 24050 - DNA, 84 bp, Homo sapiens
agctgctcctgctaaccaaaatgtctcttgggctcaggagtgccacaggtgaggcctggcaggagattatgctgtcatgccttg

SEQ ID NO: 24051 - DNA, 80 bp, Homo sapiens
ctaaccaaaatgtctcttgggctcaggagtgccacaggtgaggcctggcaggagattatgctgtcatgccttggggagaa

SEQ ID NO: 24052 - DNA, 80 bp, Homo sapiens
aaaatgtctcttgggctcaggagtgccacaggtgaggcctggcaggagattatgctgtcatgccttggggagaagggctg

SEQ ID NO: 24053 - DNA, 84 bp, Homo sapiens
ttgggctcaggagtgccacaggtgaggcctggcaggagattatgctgtcatgccttggggagaagggctgtgagcctgacacca

SEQ ID NO: 24054 - DNA, 84 bp, Homo sapiens
agtgccacaggtgaggcctggcaggagattatgctgtcatgccttggggagaagggctgtgagcctgacaccaccgcaccatca

SEQ ID NO: 24055 - DNA, 82 bp, Homo sapiens
aggcctggcaggagattatgctgtcatgccttggggagaagggctgtgagcctgacaccaccgcaccatcagggcagaacga

SEQ ID NO: 24056 - DNA, 80 bp, Homo sapiens
aggagattatgctgtcatgccttggggagaagggctgtgagcctgacaccaccgcaccatcagggcagaacgagaacgaa

SEQ ID NO: 24057 - DNA, 81 bp, Homo sapiens
ttatgctgtcatgccttggggagaagggctgtgagcctgacaccaccgcaccatcagggcagaacgagaacgaacgctgcg

SEQ ID NO: 24058 - DNA, 78 bp, Homo sapiens
cttggggagaagggctgtgagcctgacaccaccgcaccatcagggcagaacgagaacgaacgctgcggcaccgatctg

SEQ ID NO: 24059 - DNA, 79 bp, Homo sapiens
agggctgtgagcctgacaccaccgcaccatcagggcagaacgagaacgaacgctgcggcaccgatctggcctacgtgta

SEQ ID NO: 24060 - DNA, 77 bp, Homo sapiens
cctgacaccaccgcaccatcagggcagaacgagaacgaacgctgcggcaccgatctggcctacgtgtactttgtctc

SEQ ID NO: 24061 - DNA, 76 bp, Homo sapiens
accaccgcaccatcagggcagaacgagaacgaacgctgcggcaccgatctggcctacgtgtactttgtctccttca

SEQ ID NO: 24062 - DNA, 78 bp, Homo sapiens
atcagggcagaacgagaacgaacgctgcggcaccgatctggcctacgtgtactttgtctccttcatcttcttctgctc

SEQ ID NO: 24063 - DNA, 75 bp, Homo sapiens
agaacgagaacgaacgctgcggcaccgatctggcctacgtgtactttgtctccttcatcttcttctgctccttct

SEQ ID NO: 24064 - DNA, 78 bp, Homo sapiens
aacgctgcggcaccgatctggcctacgtgtactttgtctccttcatcttcttctgctccttcttggtgagcaacattg

SEQ ID NO: 24065 - DNA, 77 bp, Homo sapiens
accgatctggcctacgtgtactttgtctccttcatcttcttctgctccttcttggtgagcaacattgtgcttttgcc

SEQ ID NO: 24066 - DNA, 80 bp, Homo sapiens
tggcctacgtgtactttgtctccttcatcttcttctgctccttcttggtgagcaacattgtgcttttgccttgctatgtg

SEQ ID NO: 24067 - DNA, 70 bp, Homo sapiens
agctctgctttaggtttcccctaacccctcttcttccccttgcccttcagatgctcaacctgtttgtggc

SEQ ID NO: 24068 - DNA, 71 bp, Homo sapiens
ttaggtttcccctaacccctcttcttccccttgcccttcagatgctcaacctgtttgtggccgtcatcatg

SEQ ID NO: 24069 - DNA, 74 bp, Homo sapiens
taacccctcttcttccccttgcccttcagatgctcaacctgtttgtggccgtcatcatggacaactttgagtac

SEQ ID NO: 24070 - DNA, 76 bp, Homo sapiens
ttccccttgcccttcagatgctcaacctgtttgtggccgtcatcatggacaactttgagtacctgactcgggactc

SEQ ID NO: 24071 - DNA, 78 bp, Homo sapiens
ttgcccttcagatgctcaacctgtttgtggccgtcatcatggacaactttgagtacctgactcgggactcctccatcc

SEQ ID NO: 24072 - DNA, 77 bp, Homo sapiens
atgctcaacctgtttgtggccgtcatcatggacaactttgagtacctgactcgggactcctccatcctggggcctca

SEQ ID NO: 24073 - DNA, 76 bp, Homo sapiens
tgtttgtggccgtcatcatggacaactttgagtacctgactcgggactcctccatcctggggcctcaccacttgga

SEQ ID NO: 24074 - DNA, 73 bp, Homo sapiens
atcatggacaactttgagtacctgactcgggactcctccatcctggggcctcaccacttggacgagtttgtcc

SEQ ID NO: 24075 - DNA, 71 bp, Homo sapiens
aactttgagtacctgactcgggactcctccatcctggggcctcaccacttggacgagtttgtccgcgtctg

SEQ ID NO: 24076 - DNA, 73 bp, Homo sapiens
agtacctgactcgggactcctccatcctggggcctcaccacttggacgagtttgtccgcgtctgggcagaata

SEQ ID NO: 24077 - DNA, 78 bp, Homo sapiens
tcgggactcctccatcctggggcctcaccacttggacgagtttgtccgcgtctgggcagaatatgaccgagcagcatg

SEQ ID NO: 24078 - DNA, 77 bp, Homo sapiens
atcctggggcctcaccacttggacgagtttgtccgcgtctgggcagaatatgaccgagcagcatggtgcgtaggccc

SEQ ID NO: 24079 - DNA, 77 bp, Homo sapiens
cctcaccacttggacgagtttgtccgcgtctgggcagaatatgaccgagcagcatggtgcgtaggcccctcggccgc

SEQ ID NO: 24080 - DNA, 76 bp, Homo sapiens
acttggacgagtttgtccgcgtctgggcagaatatgaccgagcagcatggtgcgtaggcccctcggccgccccagc

SEQ ID NO: 24081 - DNA, 76 bp, Homo sapiens
gtttgtccgcgtctgggcagaatatgaccgagcagcatggtgcgtaggcccctcggccgccccagcggggcccaga

SEQ ID NO: 24082 - DNA, 77 bp, Homo sapiens
gtctgggcagaatatgaccgagcagcatggtgcgtaggcccctcggccgccccagcggggcccagagcaaaggtctc

SEQ ID NO: 24083 - DNA, 75 bp, Homo sapiens
aatatgaccgagcagcatggtgcgtaggcccctcggccgccccagcggggcccagagcaaaggtctctggagttc

SEQ ID NO: 24084 - DNA, 73 bp, Homo sapiens
agcagcatggtgcgtaggcccctcggccgccccagcggggcccagagcaaaggtctctggagttcccagggaa

SEQ ID NO: 24085 - DNA, 70 bp, Homo sapiens
taggcccctcggccgccccagcggggcccagagcaaaggtctctggagttcccagggaagaggctggaat

SEQ ID NO: 24086 - DNA, 72 bp, Homo sapiens
gccgccccagcggggcccagagcaaaggtctctggagttcccagggaagaggctggaattggagccacccaa

SEQ ID NO: 24087 - DNA, 73 bp, Homo sapiens
agcggggcccagagcaaaggtctctggagttcccagggaagaggctggaattggagccacccaaatgcctgcc

SEQ ID NO: 24088 - DNA, 74 bp, Homo sapiens
agcaaaggtctctggagttcccagggaagaggctggaattggagccacccaaatgcctgcctgttacagaagga

SEQ ID NO: 24089 - DNA, 72 bp, Homo sapiens
aggtctctggagttcccagggaagaggctggaattggagccacccaaatgcctgcctgttacagaaggaaag

SEQ ID NO: 24090 - DNA, 74 bp, Homo sapiens
ccagggaagaggctggaattggagccacccaaatgcctgcctgttacagaaggaaaggagattcctcttgattg

SEQ ID NO: 24091 - DNA, 76 bp, Homo sapiens
ggctggaattggagccacccaaatgcctgcctgttacagaaggaaaggagattcctcttgattgtggcccatagaa

SEQ ID NO: 24092 - DNA, 75 bp, Homo sapiens
aattggagccacccaaatgcctgcctgttacagaaggaaaggagattcctcttgattgtggcccatagaagaggc

SEQ ID NO: 24093 - DNA, 76 bp, Homo sapiens
acccaaatgcctgcctgttacagaaggaaaggagattcctcttgattgtggcccatagaagaggctctggtatcaa

SEQ ID NO: 24094 - DNA, 77 bp, Homo sapiens
ctgttacagaaggaaaggagattcctcttgattgtggcccatagaagaggctctggtatcaagccagtcaccaagga

SEQ ID NO: 24095 - DNA, 76 bp, Homo sapiens
aaggaaaggagattcctcttgattgtggcccatagaagaggctctggtatcaagccagtcaccaaggacttctgta

SEQ ID NO: 24096 - DNA, 77 bp, Homo sapiens
agattcctcttgattgtggcccatagaagaggctctggtatcaagccagtcaccaaggacttctgtatcctcctttc

SEQ ID NO: 24097 - DNA, 77 bp, Homo sapiens
tcttgattgtggcccatagaagaggctctggtatcaagccagtcaccaaggacttctgtatcctcctttcccctctc

SEQ ID NO: 24098 - DNA, 75 bp, Homo sapiens
atagaagaggctctggtatcaagccagtcaccaaggacttctgtatcctcctttcccctctctttccttctgtga

SEQ ID NO: 24099 - DNA, 72 bp, Homo sapiens
ctctggtatcaagccagtcaccaaggacttctgtatcctcctttcccctctctttccttctgtgacagggtt

SEQ ID NO: 24100 - DNA, 71 bp, Homo sapiens
tatcaagccagtcaccaaggacttctgtatcctcctttcccctctctttccttctgtgacagggttttccc

SEQ ID NO: 24101 - DNA, 71 bp, Homo sapiens
acttctgtatcctcctttcccctctctttccttctgtgacagggttttccctttgtgggctggtctcatca

SEQ ID NO: 24102 - DNA, 73 bp, Homo sapiens
ctttcccctctctttccttctgtgacagggttttccctttgtgggctggtctcatcatccagtcctcacctca

SEQ ID NO: 24103 - DNA, 77 bp, Homo sapiens
ttctgtgacagggttttccctttgtgggctggtctcatcatccagtcctcacctcagattatttgggctcagtccca

SEQ ID NO: 24104 - DNA, 75 bp, Homo sapiens
ttttccctttgtgggctggtctcatcatccagtcctcacctcagattatttgggctcagtcccaagagaactttc

SEQ ID NO: 24105 - DNA, 77 bp, Homo sapiens
tttgtgggctggtctcatcatccagtcctcacctcagattatttgggctcagtcccaagagaactttccaataatct

SEQ ID NO: 24106 - DNA, 78 bp, Homo sapiens
tctcatcatccagtcctcacctcagattatttgggctcagtcccaagagaactttccaataatctttttctgccaatg

SEQ ID NO: 24107 - DNA, 72 bp, Homo sapiens
agtcctcacctcagattatttgggctcagtcccaagagaactttccaataatctttttctgccaatggttag

SEQ ID NO: 24108 - DNA, 72 bp, Homo sapiens
tcagattatttgggctcagtcccaagagaactttccaataatctttttctgccaatggttagtggactcctt

SEQ ID NO: 24109 - DNA, 71 bp, Homo sapiens
tatttgggctcagtcccaagagaactttccaataatctttttctgccaatggttagtggactcctttgagt

SEQ ID NO: 24110 - DNA, 69 bp, Homo sapiens
agtcccaagagaactttccaataatctttttctgccaatggttagtggactcctttgagttatcagggg

SEQ ID NO: 24111 - DNA, 69 bp, Homo sapiens
agaactttccaataatctttttctgccaatggttagtggactcctttgagttatcagggggtttgacaa

SEQ ID NO: 24112 - DNA, 66 bp, Homo sapiens
aataatctttttctgccaatggttagtggactcctttgagttatcagggggtttgacaagggtttt

SEQ ID NO: 24113 - DNA, 75 bp, Homo sapiens
ttagtggactcctttgagttatcagggggtttgacaagggtttttggccagctggacatctggccaccatgatca

SEQ ID NO: 24114 - DNA, 75 bp, Homo sapiens
tttgagttatcagggggtttgacaagggtttttggccagctggacatctggccaccatgatcagtgactgtgttt

SEQ ID NO: 24115 - DNA, 75 bp, Homo sapiens
ttatcagggggtttgacaagggtttttggccagctggacatctggccaccatgatcagtgactgtgttttctctt

SEQ ID NO: 24116 - DNA, 78 bp, Homo sapiens
ttgacaagggtttttggccagctggacatctggccaccatgatcagtgactgtgttttctctttctcgttcctctcaa

SEQ ID NO: 24117 - DNA, 80 bp, Homo sapiens
tttttggccagctggacatctggccaccatgatcagtgactgtgttttctctttctcgttcctctcaacagatacagttg

SEQ ID NO: 24118 - DNA, 82 bp, Homo sapiens
tggacatctggccaccatgatcagtgactgtgttttctctttctcgttcctctcaacagatacagttggatataactctgaa

SEQ ID NO: 24119 - DNA, 78 bp, Homo sapiens
gccaccatgatcagtgactgtgttttctctttctcgttcctctcaacagatacagttggatataactctgaaattatt

SEQ ID NO: 24120 - DNA, 76 bp, Homo sapiens
catgatcagtgactgtgttttctctttctcgttcctctcaacagatacagttggatataactctgaaattattttt

SEQ ID NO: 24121 - DNA, 62 bp, Homo sapiens
attttttaaaaaccaaacaagttgttcttccaactgttcccttaaatatttgtggattttta

SEQ ID NO: 24122 - DNA, 66 bp, Homo sapiens
aaccaaacaagttgttcttccaactgttcccttaaatatttgtggatttttattacatggaactaa

SEQ ID NO: 24123 - DNA, 67 bp, Homo sapiens
caagttgttcttccaactgttcccttaaatatttgtggatttttattacatggaactaaattaaatg

SEQ ID NO: 24124 - DNA, 67 bp, Homo sapiens
tccaactgttcccttaaatatttgtggatttttattacatggaactaaattaaatggtaggaattgg

SEQ ID NO: 24125 - DNA, 67 bp, Homo sapiens
cccttaaatatttgtggatttttattacatggaactaaattaaatggtaggaattggtgaagataac

SEQ ID NO: 24126 - DNA, 70 bp, Homo sapiens
tgtggatttttattacatggaactaaattaaatggtaggaattggtgaagataacttctttactgtctct

SEQ ID NO: 24127 - DNA, 70 bp, Homo sapiens
tttattacatggaactaaattaaatggtaggaattggtgaagataacttctttactgtctcttttgctgt

SEQ ID NO: 24128 - DNA, 70 bp, Homo sapiens
catggaactaaattaaatggtaggaattggtgaagataacttctttactgtctcttttgctgtttagtag

SEQ ID NO: 24129 - DNA, 73 bp, Homo sapiens
taaatggtaggaattggtgaagataacttctttactgtctcttttgctgtttagtagttctgaagtgatagcg

SEQ ID NO: 24130 - DNA, 75 bp, Homo sapiens
taggaattggtgaagataacttctttactgtctcttttgctgtttagtagttctgaagtgatagcgtgccttcta

SEQ ID NO: 24131 - DNA, 76 bp, Homo sapiens
aagataacttctttactgtctcttttgctgtttagtagttctgaagtgatagcgtgccttctaggctctagagcag

SEQ ID NO: 24132 - DNA, 78 bp, Homo sapiens
ttctttactgtctcttttgctgtttagtagttctgaagtgatagcgtgccttctaggctctagagcagggattggcaa

SEQ ID NO: 24133 - DNA, 78 bp, Homo sapiens
ttttgctgtttagtagttctgaagtgatagcgtgccttctaggctctagagcagggattggcaaactacatcccatgg

SEQ ID NO: 24134 - DNA, 77 bp, Homo sapiens
tttagtagttctgaagtgatagcgtgccttctaggctctagagcagggattggcaaactacatcccatgggcaaaat

SEQ ID NO: 24135 - DNA, 80 bp, Homo sapiens
ttctgaagtgatagcgtgccttctaggctctagagcagggattggcaaactacatcccatgggcaaaattcagcccattg

SEQ ID NO: 24136 - DNA, 77 bp, Homo sapiens
ttctaggctctagagcagggattggcaaactacatcccatgggcaaaattcagcccattgtctgtttttgcaaataa

SEQ ID NO: 24137 - DNA, 72 bp, Homo sapiens
agcagggattggcaaactacatcccatgggcaaaattcagcccattgtctgtttttgcaaataaagttttat

SEQ ID NO: 24138 - DNA, 79 bp, Homo sapiens
actgccccgctaacccaccccatcccaactcaccaccctccatgagcagtggccgcatccattacactgagatgtatga

SEQ ID NO: 24139 - DNA, 83 bp, Homo sapiens
taacccaccccatcccaactcaccaccctccatgagcagtggccgcatccattacactgagatgtatgaaatgctgactctca

SEQ ID NO: 24140 - DNA, 86 bp, Homo sapiens
atcccaactcaccaccctccatgagcagtggccgcatccattacactgagatgtatgaaatgctgactctcatgtcacctccgcta

SEQ ID NO: 24141 - DNA, 85 bp, Homo sapiens
aactcaccaccctccatgagcagtggccgcatccattacactgagatgtatgaaatgctgactctcatgtcacctccgctaggcc

SEQ ID NO: 24142 - DNA, 87 bp, Homo sapiens
atgagcagtggccgcatccattacactgagatgtatgaaatgctgactctcatgtcacctccgctaggcctcggcaagagatgtccc

SEQ ID NO: 24143 - DNA, 85 bp, Homo sapiens
tggccgcatccattacactgagatgtatgaaatgctgactctcatgtcacctccgctaggcctcggcaagagatgtccctccaaa

SEQ ID NO: 24144 - DNA, 84 bp, Homo sapiens
attacactgagatgtatgaaatgctgactctcatgtcacctccgctaggcctcggcaagagatgtccctccaaagtggcatata

SEQ ID NO: 24145 - DNA, 81 bp, Homo sapiens
atgtatgaaatgctgactctcatgtcacctccgctaggcctcggcaagagatgtccctccaaagtggcatataaggtagac

SEQ ID NO: 24146 - DNA, 78 bp, Homo sapiens
aaatgctgactctcatgtcacctccgctaggcctcggcaagagatgtccctccaaagtggcatataaggtagaccacc

SEQ ID NO: 24147 - DNA, 74 bp, Homo sapiens
tcatgtcacctccgctaggcctcggcaagagatgtccctccaaagtggcatataaggtagaccaccccttcctt

SEQ ID NO: 24148 - DNA, 72 bp, Homo sapiens
acctccgctaggcctcggcaagagatgtccctccaaagtggcatataaggtagaccaccccttcctttgctc

SEQ ID NO: 24149 - DNA, 78 bp, Homo sapiens
tttttgcctgctgtttcttttttctctttcacacagaggttggtcctgatgaacatgccagtagctgaggacatgacg

SEQ ID NO: 24150 - DNA, 78 bp, Homo sapiens
ctgtttcttttttctctttcacacagaggttggtcctgatgaacatgccagtagctgaggacatgacggtccacttca

SEQ ID NO: 24151 - DNA, 80 bp, Homo sapiens
tttctctttcacacagaggttggtcctgatgaacatgccagtagctgaggacatgacggtccacttcacctccacactta

SEQ ID NO: 24152 - DNA, 83 bp, Homo sapiens
tttcacacagaggttggtcctgatgaacatgccagtagctgaggacatgacggtccacttcacctccacacttatggctctga

SEQ ID NO: 24153 - DNA, 81 bp, Homo sapiens
aggttggtcctgatgaacatgccagtagctgaggacatgacggtccacttcacctccacacttatggctctgatccggaca

SEQ ID NO: 24154 - DNA, 83 bp, Homo sapiens
atgaacatgccagtagctgaggacatgacggtccacttcacctccacacttatggctctgatccggacagctctggacattaa

SEQ ID NO: 24155 - DNA, 80 bp, Homo sapiens
agtagctgaggacatgacggtccacttcacctccacacttatggctctgatccggacagctctggacattaaaattgcca

SEQ ID NO: 24156 - DNA, 76 bp, Homo sapiens
acatgacggtccacttcacctccacacttatggctctgatccggacagctctggacattaaaattgccaaaggtaa

SEQ ID NO: 24157 - DNA, 77 bp, Homo sapiens
tccacttcacctccacacttatggctctgatccggacagctctggacattaaaattgccaaaggtaagcttagctta

SEQ ID NO: 24158 - DNA, 74 bp, Homo sapiens
acctccacacttatggctctgatccggacagctctggacattaaaattgccaaaggtaagcttagcttaggaag

SEQ ID NO: 24159 - DNA, 73 bp, Homo sapiens
acttatggctctgatccggacagctctggacattaaaattgccaaaggtaagcttagcttaggaagggaggtg

SEQ ID NO: 24160 - DNA, 71 bp, Homo sapiens
ctgatccggacagctctggacattaaaattgccaaaggtaagcttagcttaggaagggaggtgggaaggag

SEQ ID NO: 24161 - DNA, 78 bp, Homo sapiens
gttatttctgggtctattctatttattagtaatttatcttattctaggtggtgcagacaggcagcagctagactcaga

SEQ ID NO: 24162 - DNA, 79 bp, Homo sapiens
gtctattctatttattagtaatttatcttattctaggtggtgcagacaggcagcagctagactcagagctacaaaagga

SEQ ID NO: 24163 - DNA, 77 bp, Homo sapiens
atttattagtaatttatcttattctaggtggtgcagacaggcagcagctagactcagagctacaaaaggagacccta

SEQ ID NO: 24164 - DNA, 81 bp, Homo sapiens
tagtaatttatcttattctaggtggtgcagacaggcagcagctagactcagagctacaaaaggagaccctagccatctggc

SEQ ID NO: 24165 - DNA, 82 bp, Homo sapiens
ttattctaggtggtgcagacaggcagcagctagactcagagctacaaaaggagaccctagccatctggcctcacctatccca

SEQ ID NO: 24166 - DNA, 87 bp, Homo sapiens
tgcagacaggcagcagctagactcagagctacaaaaggagaccctagccatctggcctcacctatcccagaagatgctggatctgct

SEQ ID NO: 24167 - DNA, 84 bp, Homo sapiens
acaggcagcagctagactcagagctacaaaaggagaccctagccatctggcctcacctatcccagaagatgctggatctgcttg

SEQ ID NO: 24168 - DNA, 82 bp, Homo sapiens
actcagagctacaaaaggagaccctagccatctggcctcacctatcccagaagatgctggatctgcttgtgcccatgcccaa

SEQ ID NO: 24169 - DNA, 78 bp, Homo sapiens
tacaaaaggagaccctagccatctggcctcacctatcccagaagatgctggatctgcttgtgcccatgcccaaaggtt

SEQ ID NO: 24170 - DNA, 78 bp, Homo sapiens
agaccctagccatctggcctcacctatcccagaagatgctggatctgcttgtgcccatgcccaaaggtttgggtcttc

SEQ ID NO: 24171 - DNA, 78 bp, Homo sapiens
atctggcctcacctatcccagaagatgctggatctgcttgtgcccatgcccaaaggtttgggtcttctcctgggtatc

SEQ ID NO: 24172 - DNA, 76 bp, Homo sapiens
cctcacctatcccagaagatgctggatctgcttgtgcccatgcccaaaggtttgggtcttctcctgggtatccttg

SEQ ID NO: 24173 - DNA, 85 bp, Homo sapiens
cattatctactccctgttcaccatcatgccacatttgtgtttctagcctctgacctgactgtgggcaaaatctatgcagcaatga

SEQ ID NO: 24174 - DNA, 88 bp, Homo sapiens
tccctgttcaccatcatgccacatttgtgtttctagcctctgacctgactgtgggcaaaatctatgcagcaatgatgatcatggacta

SEQ ID NO: 24175 - DNA, 88 bp, Homo sapiens
ttcaccatcatgccacatttgtgtttctagcctctgacctgactgtgggcaaaatctatgcagcaatgatgatcatggactactataa

SEQ ID NO: 24176 - DNA, 84 bp, Homo sapiens
acatttgtgtttctagcctctgacctgactgtgggcaaaatctatgcagcaatgatgatcatggactactataagcagagtaag

SEQ ID NO: 24177 - DNA, 85 bp, Homo sapiens
tgtttctagcctctgacctgactgtgggcaaaatctatgcagcaatgatgatcatggactactataagcagagtaaggtgaagaa

SEQ ID NO: 24178 - DNA, 88 bp, Homo sapiens
cctctgacctgactgtgggcaaaatctatgcagcaatgatgatcatggactactataagcagagtaaggtgaagaagcagaggcagca

SEQ ID NO: 24179 - DNA, 87 bp, Homo sapiens
actgtgggcaaaatctatgcagcaatgatgatcatggactactataagcagagtaaggtgaagaagcagaggcagcagctggaggaa

SEQ ID NO: 24180 - DNA, 86 bp, Homo sapiens
aaatctatgcagcaatgatgatcatggactactataagcagagtaaggtgaagaagcagaggcagcagctggaggaacaggtgaaa

SEQ ID NO: 24181 - DNA, 86 bp, Homo sapiens
aatgatgatcatggactactataagcagagtaaggtgaagaagcagaggcagcagctggaggaacaggtgaaagtcaatgccagca

SEQ ID NO: 24182 - DNA, 85 bp, Homo sapiens
atcatggactactataagcagagtaaggtgaagaagcagaggcagcagctggaggaacaggtgaaagtcaatgccagcatgctaa

SEQ ID NO: 24183 - DNA, 83 bp, Homo sapiens
tactataagcagagtaaggtgaagaagcagaggcagcagctggaggaacaggtgaaagtcaatgccagcatgctaagtgggtg

SEQ ID NO: 24184 - DNA, 66 bp, Homo sapiens
aactccgtagtcattggaattctttccttcttcttccctctttttacccagaaaaatgcccccatg

SEQ ID NO: 24185 - DNA, 70 bp, Homo sapiens
attggaattctttccttcttcttccctctttttacccagaaaaatgcccccatgttccagcgcatggagc

SEQ ID NO: 24186 - DNA, 73 bp, Homo sapiens
tttccttcttcttccctctttttacccagaaaaatgcccccatgttccagcgcatggagccttcatctctgcc

SEQ ID NO: 24187 - DNA, 79 bp, Homo sapiens
tccctctttttacccagaaaaatgcccccatgttccagcgcatggagccttcatctctgcctcaggagatcattgctaa

SEQ ID NO: 24188 - DNA, 80 bp, Homo sapiens
tttttacccagaaaaatgcccccatgttccagcgcatggagccttcatctctgcctcaggagatcattgctaatgccaaa

SEQ ID NO: 24189 - DNA, 81 bp, Homo sapiens
aaaaatgcccccatgttccagcgcatggagccttcatctctgcctcaggagatcattgctaatgccaaagccctgccttac

SEQ ID NO: 24190 - DNA, 83 bp, Homo sapiens
atgttccagcgcatggagccttcatctctgcctcaggagatcattgctaatgccaaagccctgccttacctccagcaggaccc

SEQ ID NO: 24191 - DNA, 79 bp, Homo sapiens
atggagccttcatctctgcctcaggagatcattgctaatgccaaagccctgccttacctccagcaggaccccgtttcag

SEQ ID NO: 24192 - DNA, 81 bp, Homo sapiens
tcatctctgcctcaggagatcattgctaatgccaaagccctgccttacctccagcaggaccccgtttcaggcctgtgagta

SEQ ID NO: 24193 - DNA, 78 bp, Homo sapiens
tcaggagatcattgctaatgccaaagccctgccttacctccagcaggaccccgtttcaggcctgtgagtagcaccaaa

SEQ ID NO: 24194 - DNA, 76 bp, Homo sapiens
agatcattgctaatgccaaagccctgccttacctccagcaggaccccgtttcaggcctgtgagtagcaccaaaaca

SEQ ID NO: 24195 - DNA, 75 bp, Homo sapiens
taatgccaaagccctgccttacctccagcaggaccccgtttcaggcctgtgagtagcaccaaaacatccctggca

SEQ ID NO: 24196 - DNA, 79 bp, Homo sapiens
tagtggcatgactgtccctcattacctctggatttgacattgcttttcaggagtggccggagtggatacccttcgatga

SEQ ID NO: 24197 - DNA, 75 bp, Homo sapiens
actgtccctcattacctctggatttgacattgcttttcaggagtggccggagtggatacccttcgatgagtccac

SEQ ID NO: 24198 - DNA, 75 bp, Homo sapiens
attacctctggatttgacattgcttttcaggagtggccggagtggatacccttcgatgagtccactctctcccca

SEQ ID NO: 24199 - DNA, 76 bp, Homo sapiens
atttgacattgcttttcaggagtggccggagtggatacccttcgatgagtccactctctccccaggatatattcca

SEQ ID NO: 24200 - DNA, 75 bp, Homo sapiens
ttttcaggagtggccggagtggatacccttcgatgagtccactctctccccaggatatattccagttggcttgta

SEQ ID NO: 24201 - DNA, 74 bp, Homo sapiens
agtggccggagtggatacccttcgatgagtccactctctccccaggatatattccagttggcttgtatggaccc

SEQ ID NO: 24202 - DNA, 75 bp, Homo sapiens
agtggatacccttcgatgagtccactctctccccaggatatattccagttggcttgtatggaccccgccgatgac

SEQ ID NO: 24203 - DNA, 76 bp, Homo sapiens
ttcgatgagtccactctctccccaggatatattccagttggcttgtatggaccccgccgatgacggacagttccaa

SEQ ID NO: 24204 - DNA, 73 bp, Homo sapiens
actctctccccaggatatattccagttggcttgtatggaccccgccgatgacggacagttccaagaacggcag

SEQ ID NO: 24205 - DNA, 77 bp, Homo sapiens
aggatatattccagttggcttgtatggaccccgccgatgacggacagttccaagaacggcagtctctggtgaatgca

SEQ ID NO: 24206 - DNA, 78 bp, Homo sapiens
tattccagttggcttgtatggaccccgccgatgacggacagttccaagaacggcagtctctggtgaatgcatgagtta

SEQ ID NO: 24207 - DNA, 78 bp, Homo sapiens
ttgtatggaccccgccgatgacggacagttccaagaacggcagtctctggtgaatgcatgagttatatgacctcaaaa

SEQ ID NO: 24208 - DNA, 76 bp, Homo sapiens
ccgccgatgacggacagttccaagaacggcagtctctggtgaatgcatgagttatatgacctcaaaactacttcct

SEQ ID NO: 24209 - DNA, 73 bp, Homo sapiens
aatgagatggaaccaagtcccacaagcttggctgtgtgtttatttccaggagccagaggttagtgaattaaaa

SEQ ID NO: 24210 - DNA, 73 bp, Homo sapiens
ggaaccaagtcccacaagcttggctgtgtgtttatttccaggagccagaggttagtgaattaaaaagcgtgca

SEQ ID NO: 24211 - DNA, 74 bp, Homo sapiens
acaagcttggctgtgtgtttatttccaggagccagaggttagtgaattaaaaagcgtgcagccctctaaccatg

SEQ ID NO: 24212 - DNA, 75 bp, Homo sapiens
tgtgtgtttatttccaggagccagaggttagtgaattaaaaagcgtgcagccctctaaccatggcatctaccttc

SEQ ID NO: 24213 - DNA, 73 bp, Homo sapiens
tttatttccaggagccagaggttagtgaattaaaaagcgtgcagccctctaaccatggcatctaccttccttc

SEQ ID NO: 24214 - DNA, 73 bp, Homo sapiens
agccagaggttagtgaattaaaaagcgtgcagccctctaaccatggcatctaccttccttcggacacccagga

SEQ ID NO: 24215 - DNA, 77 bp, Homo sapiens
tagtgaattaaaaagcgtgcagccctctaaccatggcatctaccttccttcggacacccaggagcatgcgggatctg

SEQ ID NO: 24216 - DNA, 77 bp, Homo sapiens
taaaaagcgtgcagccctctaaccatggcatctaccttccttcggacacccaggagcatgcgggatctgggagggca

SEQ ID NO: 24217 - DNA, 78 bp, Homo sapiens
cctctaaccatggcatctaccttccttcggacacccaggagcatgcgggatctgggagggcatcttctatgccacgtc

SEQ ID NO: 24218 - DNA, 81 bp, Homo sapiens
atggcatctaccttccttcggacacccaggagcatgcgggatctgggagggcatcttctatgccacgtctgactgtggatc

SEQ ID NO: 24219 - DNA, 79 bp, Homo sapiens
tctaccttccttcggacacccaggagcatgcgggatctgggagggcatcttctatgccacgtctgactgtggatcccca

SEQ ID NO: 24220 - DNA, 77 bp, Homo sapiens
ttcggacacccaggagcatgcgggatctgggagggcatcttctatgccacgtctgactgtggatccccaggtaaaaa

SEQ ID NO: 24221 - DNA, 78 bp, Homo sapiens
gcatgcgggatctgggagggcatcttctatgccacgtctgactgtggatccccaggtaaaaagcaaccacctacatta

SEQ ID NO: 24222 - DNA, 77 bp, Homo sapiens
atctgggagggcatcttctatgccacgtctgactgtggatccccaggtaaaaagcaaccacctacattaatgcagtg

SEQ ID NO: 24223 - DNA, 77 bp, Homo sapiens
agggcatcttctatgccacgtctgactgtggatccccaggtaaaaagcaaccacctacattaatgcagtggcatccg

SEQ ID NO: 24224 - DNA, 73 bp, Homo sapiens
tttcaatcgttaatccataccttgtgtttctctgggggcttgtatttccaggtggtgacagaccctagctcca

SEQ ID NO: 24225 - DNA, 75 bp, Homo sapiens
taatccataccttgtgtttctctgggggcttgtatttccaggtggtgacagaccctagctccatgagacgttcat

SEQ ID NO: 24226 - DNA, 74 bp, Homo sapiens
ttgtgtttctctgggggcttgtatttccaggtggtgacagaccctagctccatgagacgttcattttccactat

SEQ ID NO: 24227 - DNA, 73 bp, Homo sapiens
gggcttgtatttccaggtggtgacagaccctagctccatgagacgttcattttccactattcgggataagcgt

SEQ ID NO: 24228 - DNA, 74 bp, Homo sapiens
tatttccaggtggtgacagaccctagctccatgagacgttcattttccactattcgggataagcgttcaaattc

SEQ ID NO: 24229 - DNA, 74 bp, Homo sapiens
tggtgacagaccctagctccatgagacgttcattttccactattcgggataagcgttcaaattcctcgtggttg

SEQ ID NO: 24230 - DNA, 73 bp, Homo sapiens
ctagctccatgagacgttcattttccactattcgggataagcgttcaaattcctcgtggttggaggaattctc

SEQ ID NO: 24231 - DNA, 73 bp, Homo sapiens
ccatgagacgttcattttccactattcgggataagcgttcaaattcctcgtggttggaggaattctccatgga

SEQ ID NO: 24232 - DNA, 73 bp, Homo sapiens
tttccactattcgggataagcgttcaaattcctcgtggttggaggaattctccatggagcgaagcagtgaaaa

SEQ ID NO: 24233 - DNA, 73 bp, Homo sapiens
ctattcgggataagcgttcaaattcctcgtggttggaggaattctccatggagcgaagcagtgaaaataccta

SEQ ID NO: 24234 - DNA, 71 bp, Homo sapiens
aagcgttcaaattcctcgtggttggaggaattctccatggagcgaagcagtgaaaatacctacaagtcccg

SEQ ID NO: 24235 - DNA, 71 bp, Homo sapiens
aaattcctcgtggttggaggaattctccatggagcgaagcagtgaaaatacctacaagtcccgtcgccgga

SEQ ID NO: 24236 - DNA, 72 bp, Homo sapiens
tggaggaattctccatggagcgaagcagtgaaaatacctacaagtcccgtcgccggagttaccactcctcct

SEQ ID NO: 24237 - DNA, 72 bp, Homo sapiens
aattctccatggagcgaagcagtgaaaatacctacaagtcccgtcgccggagttaccactcctccttgcggc

SEQ ID NO: 24238 - DNA, 72 bp, Homo sapiens
agcgaagcagtgaaaatacctacaagtcccgtcgccggagttaccactcctccttgcggctgtcagcccacc

SEQ ID NO: 24239 - DNA, 72 bp, Homo sapiens
aaatacctacaagtcccgtcgccggagttaccactcctccttgcggctgtcagcccaccgcctgaactctga

SEQ ID NO: 24240 - DNA, 75 bp, Homo sapiens
ctacaagtcccgtcgccggagttaccactcctccttgcggctgtcagcccaccgcctgaactctgattcaggtga

SEQ ID NO: 24241 - DNA, 76 bp, Homo sapiens
cgtcgccggagttaccactcctccttgcggctgtcagcccaccgcctgaactctgattcaggtgaggaggtcttca

SEQ ID NO: 24242 - DNA, 78 bp, Homo sapiens
ttaccactcctccttgcggctgtcagcccaccgcctgaactctgattcaggtgaggaggtcttcagtgtccagctctt

SEQ ID NO: 24243 - DNA, 82 bp, Homo sapiens
ctccttgcggctgtcagcccaccgcctgaactctgattcaggtgaggaggtcttcagtgtccagctctttcatcaggcagtg

SEQ ID NO: 24244 - DNA, 79 bp, Homo sapiens
ttggtcagagtggacagagttataaccaagtgcttttgtcacctctcacaggccacaagtctgacactcaccgctcagg

SEQ ID NO: 24245 - DNA, 78 bp, Homo sapiens
tggacagagttataaccaagtgcttttgtcacctctcacaggccacaagtctgacactcaccgctcagggggcaggga

SEQ ID NO: 24246 - DNA, 76 bp, Homo sapiens
tataaccaagtgcttttgtcacctctcacaggccacaagtctgacactcaccgctcagggggcagggagcggggac

SEQ ID NO: 24247 - DNA, 77 bp, Homo sapiens
ttgtcacctctcacaggccacaagtctgacactcaccgctcagggggcagggagcggggacgatcaaaagagcgaaa

SEQ ID NO: 24248 - DNA, 79 bp, Homo sapiens
tctcacaggccacaagtctgacactcaccgctcagggggcagggagcggggacgatcaaaagagcgaaagcatcttctc

SEQ ID NO: 24249 - DNA, 77 bp, Homo sapiens
ggccacaagtctgacactcaccgctcagggggcagggagcggggacgatcaaaagagcgaaagcatcttctctctcc

SEQ ID NO: 24250 - DNA, 78 bp, Homo sapiens
ctgacactcaccgctcagggggcagggagcggggacgatcaaaagagcgaaagcatcttctctctcctgatgtctccc

SEQ ID NO: 24251 - DNA, 80 bp, Homo sapiens
tcagggggcagggagcggggacgatcaaaagagcgaaagcatcttctctctcctgatgtctcccgctgcaattcagaaga

SEQ ID NO: 24252 - DNA, 79 bp, Homo sapiens
agggagcggggacgatcaaaagagcgaaagcatcttctctctcctgatgtctcccgctgcaattcagaagagcgaggga

SEQ ID NO: 24253 - DNA, 81 bp, Homo sapiens
acgatcaaaagagcgaaagcatcttctctctcctgatgtctcccgctgcaattcagaagagcgagggacccaggctgactg

SEQ ID NO: 24254 - DNA, 79 bp, Homo sapiens
aaaagagcgaaagcatcttctctctcctgatgtctcccgctgcaattcagaagagcgagggacccaggctgactgggag

SEQ ID NO: 24255 - DNA, 81 bp, Homo sapiens
tcttctctctcctgatgtctcccgctgcaattcagaagagcgagggacccaggctgactgggagtccccagagcgccgtca

SEQ ID NO: 24256 - DNA, 80 bp, Homo sapiens
tctcctgatgtctcccgctgcaattcagaagagcgagggacccaggctgactgggagtccccagagcgccgtcaatccag

SEQ ID NO: 24257 - DNA, 78 bp, Homo sapiens
tgtctcccgctgcaattcagaagagcgagggacccaggctgactgggagtccccagagcgccgtcaatccaggtcacc

SEQ ID NO: 24258 - DNA, 76 bp, Homo sapiens
aattcagaagagcgagggacccaggctgactgggagtccccagagcgccgtcaatccaggtcacccagtgagggca

SEQ ID NO: 24259 - DNA, 76 bp, Homo sapiens
aagagcgagggacccaggctgactgggagtccccagagcgccgtcaatccaggtcacccagtgagggcaggtcaca

SEQ ID NO: 24260 - DNA, 77 bp, Homo sapiens
aggctgactgggagtccccagagcgccgtcaatccaggtcacccagtgagggcaggtcacagacgcccaacagacag

SEQ ID NO: 24261 - DNA, 80 bp, Homo sapiens
ggagtccccagagcgccgtcaatccaggtcacccagtgagggcaggtcacagacgcccaacagacaggtgagcgcagaga

SEQ ID NO: 24262 - DNA, 80 bp, Homo sapiens
cccagagcgccgtcaatccaggtcacccagtgagggcaggtcacagacgcccaacagacaggtgagcgcagagaggaagc

SEQ ID NO: 24263 - DNA, 81 bp, Homo sapiens
aatccaggtcacccagtgagggcaggtcacagacgcccaacagacaggtgagcgcagagaggaagccagtctacagcagaa

SEQ ID NO: 24264 - DNA, 81 bp, Homo sapiens
aggtcacccagtgagggcaggtcacagacgcccaacagacaggtgagcgcagagaggaagccagtctacagcagaaggaca

SEQ ID NO: 24265 - DNA, 82 bp, Homo sapiens
agggatcatgccaagcccaatctaacatgccatgtctctcctgctatacagggcacaggttccctaagtgagagctccatcc

SEQ ID NO: 24266 - DNA, 80 bp, Homo sapiens
aagcccaatctaacatgccatgtctctcctgctatacagggcacaggttccctaagtgagagctccatcccctctgtctc

SEQ ID NO: 24267 - DNA, 80 bp, Homo sapiens
tctctcctgctatacagggcacaggttccctaagtgagagctccatcccctctgtctctgacaccagcaccccaagaaga

SEQ ID NO: 24268 - DNA, 77 bp, Homo sapiens
tatacagggcacaggttccctaagtgagagctccatcccctctgtctctgacaccagcaccccaagaagaagtcgtc

SEQ ID NO: 24269 - DNA, 76 bp, Homo sapiens
acaggttccctaagtgagagctccatcccctctgtctctgacaccagcaccccaagaagaagtcgtcggcagctcc

SEQ ID NO: 24270 - DNA, 74 bp, Homo sapiens
agctccatcccctctgtctctgacaccagcaccccaagaagaagtcgtcggcagctcccacccgtcccgccaaa

SEQ ID NO: 24271 - DNA, 72 bp, Homo sapiens
tctgtctctgacaccagcaccccaagaagaagtcgtcggcagctcccacccgtcccgccaaagccccggccc

SEQ ID NO: 24272 - DNA, 67 bp, Homo sapiens
caccagcaccccaagaagaagtcgtcggcagctcccacccgtcccgccaaagccccggcccctcctt

SEQ ID NO: 24273 - DNA, 68 bp, Homo sapiens
aagaagtcgtcggcagctcccacccgtcccgccaaagccccggcccctcctttcctacagctccctga

SEQ ID NO: 24274 - DNA, 69 bp, Homo sapiens
agctcccacccgtcccgccaaagccccggcccctcctttcctacagctccctgattcgacacgcgggca

SEQ ID NO: 24275 - DNA, 71 bp, Homo sapiens
acccgtcccgccaaagccccggcccctcctttcctacagctccctgattcgacacgcgggcagcatctctc

SEQ ID NO: 24276 - DNA, 76 bp, Homo sapiens
ccaaagccccggcccctcctttcctacagctccctgattcgacacgcgggcagcatctctccacctgctgatggaa

SEQ ID NO: 24277 - DNA, 78 bp, Homo sapiens
ccctcctttcctacagctccctgattcgacacgcgggcagcatctctccacctgctgatggaagcgaggagggctccc

SEQ ID NO: 24278 - DNA, 80 bp, Homo sapiens
tttcctacagctccctgattcgacacgcgggcagcatctctccacctgctgatggaagcgaggagggctccccgctgacc

SEQ ID NO: 24279 - DNA, 81 bp, Homo sapiens
tccctgattcgacacgcgggcagcatctctccacctgctgatggaagcgaggagggctccccgctgacctcccaagctctg

SEQ ID NO: 24280 - DNA, 81 bp, Homo sapiens
acacgcgggcagcatctctccacctgctgatggaagcgaggagggctccccgctgacctcccaagctctggagagcaacaa

SEQ ID NO: 24281 - DNA, 81 bp, Homo sapiens
atctctccacctgctgatggaagcgaggagggctccccgctgacctcccaagctctggagagcaacaatgcttgcctgacc

SEQ ID NO: 24282 - DNA, 81 bp, Homo sapiens
ctgctgatggaagcgaggagggctccccgctgacctcccaagctctggagagcaacaatgcttgcctgaccgagtcttcca

SEQ ID NO: 24283 - DNA, 77 bp, Homo sapiens
atggaagcgaggagggctccccgctgacctcccaagctctggagagcaacaatgcttgcctgaccgagtcttccaac

SEQ ID NO: 24284 - DNA, 77 bp, Homo sapiens
aggagggctccccgctgacctcccaagctctggagagcaacaatgcttgcctgaccgagtcttccaactctccgcac

SEQ ID NO: 24285 - DNA, 80 bp, Homo sapiens
ctgacctcccaagctctggagagcaacaatgcttgcctgaccgagtcttccaactctccgcacccccagcagagccaaca

SEQ ID NO: 24286 - DNA, 81 bp, Homo sapiens
tcccaagctctggagagcaacaatgcttgcctgaccgagtcttccaactctccgcacccccagcagagccaacatgcctcc

SEQ ID NO: 24287 - DNA, 80 bp, Homo sapiens
aatgcttgcctgaccgagtcttccaactctccgcacccccagcagagccaacatgcctccccacagcgctacatctccga

SEQ ID NO: 24288 - DNA, 77 bp, Homo sapiens
acccccagcagagccaacatgcctccccacagcgctacatctccgagccctacttggccctgcacgaagactcccac

SEQ ID NO: 24289 - DNA, 79 bp, Homo sapiens
agagccaacatgcctccccacagcgctacatctccgagccctacttggccctgcacgaagactcccacgcctcagactg

SEQ ID NO: 24290 - DNA, 79 bp, Homo sapiens
aacatgcctccccacagcgctacatctccgagccctacttggccctgcacgaagactcccacgcctcagactgtggtga

SEQ ID NO: 24291 - DNA, 80 bp, Homo sapiens
acagcgctacatctccgagccctacttggccctgcacgaagactcccacgcctcagactgtggtgaggaggagacgctca

SEQ ID NO: 24292 - DNA, 78 bp, Homo sapiens
tacatctccgagccctacttggccctgcacgaagactcccacgcctcagactgtggtgaggaggagacgctcactttc

SEQ ID NO: 24293 - DNA, 79 bp, Homo sapiens
tacttggccctgcacgaagactcccacgcctcagactgtggtgaggaggagacgctcactttcgaagcagccgtggcta

SEQ ID NO: 24294 - DNA, 79 bp, Homo sapiens
cctgcacgaagactcccacgcctcagactgtggtgaggaggagacgctcactttcgaagcagccgtggctactagcctg

SEQ ID NO: 24295 - DNA, 76 bp, Homo sapiens
aagactcccacgcctcagactgtggtgaggaggagacgctcactttcgaagcagccgtggctactagcctgggccg

SEQ ID NO: 24296 - DNA, 77 bp, Homo sapiens
ctcagactgtggtgaggaggagacgctcactttcgaagcagccgtggctactagcctgggccgttccaacaccatcg

SEQ ID NO: 24297 - DNA, 76 bp, Homo sapiens
ggtgaggaggagacgctcactttcgaagcagccgtggctactagcctgggccgttccaacaccatcggctcagccc

SEQ ID NO: 24298 - DNA, 74 bp, Homo sapiens
aggagacgctcactttcgaagcagccgtggctactagcctgggccgttccaacaccatcggctcagccccaccc

SEQ ID NO: 24299 - DNA, 77 bp, Homo sapiens
tcactttcgaagcagccgtggctactagcctgggccgttccaacaccatcggctcagccccacccctgcggcatagc

SEQ ID NO: 24300 - DNA, 78 bp, Homo sapiens
agccgtggctactagcctgggccgttccaacaccatcggctcagccccacccctgcggcatagctggcagatgcccaa

SEQ ID NO: 24301 - DNA, 78 bp, Homo sapiens
tactagcctgggccgttccaacaccatcggctcagccccacccctgcggcatagctggcagatgcccaacgggcacta

SEQ ID NO: 24302 - DNA, 77 bp, Homo sapiens
ccgttccaacaccatcggctcagccccacccctgcggcatagctggcagatgcccaacgggcactatcggcggcgga

SEQ ID NO: 24303 - DNA, 77 bp, Homo sapiens
aacaccatcggctcagccccacccctgcggcatagctggcagatgcccaacgggcactatcggcggcggaggcgcgg

SEQ ID NO: 24304 - DNA, 74 bp, Homo sapiens
agccccacccctgcggcatagctggcagatgcccaacgggcactatcggcggcggaggcgcggggggcctgggc

SEQ ID NO: 24305 - DNA, 80 bp, Homo sapiens
cctgcggcatagctggcagatgcccaacgggcactatcggcggcggaggcgcggggggcctgggccaggcatgatgtgtg

SEQ ID NO: 24306 - DNA, 76 bp, Homo sapiens
agatgcccaacgggcactatcggcggcggaggcgcggggggcctgggccaggcatgatgtgtggggctgtcaacaa

SEQ ID NO: 24307 - DNA, 77 bp, Homo sapiens
cactatcggcggcggaggcgcggggggcctgggccaggcatgatgtgtggggctgtcaacaacctgctaagtgacac

SEQ ID NO: 24308 - DNA, 76 bp, Homo sapiens
ggcggaggcgcggggggcctgggccaggcatgatgtgtggggctgtcaacaacctgctaagtgacacggaagaaga

SEQ ID NO: 24309 - DNA, 82 bp, Homo sapiens
ggctgtcaacaacctgctaagtgacacggaagaagatgacaaatgctagaggctgctcccccctccgatgcatgctcttctc

SEQ ID NO: 24310 - DNA, 81 bp, Homo sapiens
ctaagtgacacggaagaagatgacaaatgctagaggctgctcccccctccgatgcatgctcttctctcacatggagaaaac

SEQ ID NO: 24311 - DNA, 81 bp, Homo sapiens
aagaagatgacaaatgctagaggctgctcccccctccgatgcatgctcttctctcacatggagaaaaccaagacagaattg

SEQ ID NO: 24312 - DNA, 80 bp, Homo sapiens
tagaggctgctcccccctccgatgcatgctcttctctcacatggagaaaaccaagacagaattgggaagccagtgcggcc

SEQ ID NO: 24313 - DNA, 75 bp, Homo sapiens
ctcccccctccgatgcatgctcttctctcacatggagaaaaccaagacagaattgggaagccagtgcggcccggg

SEQ ID NO: 24314 - DNA, 75 bp, Homo sapiens
atgcatgctcttctctcacatggagaaaaccaagacagaattgggaagccagtgcggcccgggggggaggaagag

SEQ ID NO: 24315 - DNA, 71 bp, Homo sapiens
tcttctctcacatggagaaaaccaagacagaattgggaagccagtgcggcccgggggggaggaagagggaa

SEQ ID NO: 24316 - DNA, 66 bp, Homo sapiens
atggagaaaaccaagacagaattgggaagccagtgcggcccgggggggaggaagagggaaaaggaa

SEQ ID NO: 24317 - DNA, 67 bp, Homo sapiens
accaagacagaattgggaagccagtgcggcccgggggggaggaagagggaaaaggaagatggaagga

SEQ ID NO: 24318 - DNA, 74 bp, Homo sapiens
ggggaggaagagggaaaaggaagatggaaggacaccatgcattatcagagaagaggaagtaaaggacaatcaga

SEQ ID NO: 24319 - DNA, 75 bp, Homo sapiens
agggaaaaggaagatggaaggacaccatgcattatcagagaagaggaagtaaaggacaatcagaacaccagtcaa

SEQ ID NO: 24320 - DNA, 75 bp, Homo sapiens
aagatggaaggacaccatgcattatcagagaagaggaagtaaaggacaatcagaacaccagtcaaacccaccaaa

SEQ ID NO: 24321 - DNA, 75 bp, Homo sapiens
aggacaccatgcattatcagagaagaggaagtaaaggacaatcagaacaccagtcaaacccaccaaattgcttta

SEQ ID NO: 24322 - DNA, 70 bp, Homo sapiens
aagaggaagtaaaggacaatcagaacaccagtcaaacccaccaaattgctttattcccctttgcaagatg

SEQ ID NO: 24323 - DNA, 72 bp, Homo sapiens
aagtaaaggacaatcagaacaccagtcaaacccaccaaattgctttattcccctttgcaagatgggcactgc

SEQ ID NO: 24324 - DNA, 75 bp, Homo sapiens
atcagaacaccagtcaaacccaccaaattgctttattcccctttgcaagatgggcactgccatagttctgcctct

SEQ ID NO: 24325 - DNA, 74 bp, Homo sapiens
accagtcaaacccaccaaattgctttattcccctttgcaagatgggcactgccatagttctgcctctttgctgg

SEQ ID NO: 24326 - DNA, 73 bp, Homo sapiens
accaaattgctttattcccctttgcaagatgggcactgccatagttctgcctctttgctggggaaagaaacca

SEQ ID NO: 24327 - DNA, 73 bp, Homo sapiens
tttattcccctttgcaagatgggcactgccatagttctgcctctttgctggggaaagaaaccaggaacgtgga

SEQ ID NO: 24328 - DNA, 72 bp, Homo sapiens
ggcactgccatagttctgcctctttgctggggaaagaaaccaggaacgtggagggttattactgcgggagaa

SEQ ID NO: 24329 - DNA, 69 bp, Homo sapiens
atagttctgcctctttgctggggaaagaaaccaggaacgtggagggttattactgcgggagaagggaca

SEQ ID NO: 24330 - DNA, 69 bp, Homo sapiens
tctttgctggggaaagaaaccaggaacgtggagggttattactgcgggagaagggacacgaggatggct

SEQ ID NO: 24331 - DNA, 68 bp, Homo sapiens
ggaaagaaaccaggaacgtggagggttattactgcgggagaagggacacgaggatggctttgcttccc

SEQ ID NO: 24332 - DNA, 68 bp, Homo sapiens
aaaccaggaacgtggagggttattactgcgggagaagggacacgaggatggctttgcttccccttgcc

SEQ ID NO: 24333 - DNA, 68 bp, Homo sapiens
tggagggttattactgcgggagaagggacacgaggatggctttgcttccccttgccccttcccacttt

SEQ ID NO: 24334 - DNA, 68 bp, Homo sapiens
ttattactgcgggagaagggacacgaggatggctttgcttccccttgccccttcccacttttctaaaa

SEQ ID NO: 24335 - DNA, 73 bp, Homo sapiens
tttgcttccccttgccccttcccacttttctaaaagctgtggagggatctagctggcctatgtctacactcag

SEQ ID NO: 24336 - DNA, 77 bp, Homo sapiens
cacttttctaaaagctgtggagggatctagctggcctatgtctacactcagtgccctgagaagcctggaagactttc

SEQ ID NO: 24337 - DNA, 79 bp, Homo sapiens
taaaagctgtggagggatctagctggcctatgtctacactcagtgccctgagaagcctggaagactttctggctcttaa

SEQ ID NO: 24338 - DNA, 77 bp, Homo sapiens
agggatctagctggcctatgtctacactcagtgccctgagaagcctggaagactttctggctcttaactggggagta

SEQ ID NO: 24339 - DNA, 79 bp, Homo sapiens
tctagctggcctatgtctacactcagtgccctgagaagcctggaagactttctggctcttaactggggagtagtggaga

SEQ ID NO: 24340 - DNA, 75 bp, Homo sapiens
actcagtgccctgagaagcctggaagactttctggctcttaactggggagtagtggagaccataggagaggactc

SEQ ID NO: 24341 - DNA, 73 bp, Homo sapiens
agaagcctggaagactttctggctcttaactggggagtagtggagaccataggagaggactctcctccctcac

SEQ ID NO: 24342 - DNA, 73 bp, Homo sapiens
aagactttctggctcttaactggggagtagtggagaccataggagaggactctcctccctcaccagctcttac

SEQ ID NO: 24343 - DNA, 78 bp, Homo sapiens
gggagtagtggagaccataggagaggactctcctccctcaccagctcttacgcctcagccagcaccactgccaccagg

SEQ ID NO: 24344 - DNA, 82 bp, Homo sapiens
tagtggagaccataggagaggactctcctccctcaccagctcttacgcctcagccagcaccactgccaccagggcaactgca

SEQ ID NO: 24345 - DNA, 88 bp, Homo sapiens
taggagaggactctcctccctcaccagctcttacgcctcagccagcaccactgccaccagggcaactgcagcagcatctcatgcataa

SEQ ID NO: 24346 - DNA, 87 bp, Homo sapiens
tctcctccctcaccagctcttacgcctcagccagcaccactgccaccagggcaactgcagcagcatctcatgcataaccctgtggct

SEQ ID NO: 24347 - DNA, 87 bp, Homo sapiens
cctcaccagctcttacgcctcagccagcaccactgccaccagggcaactgcagcagcatctcatgcataaccctgtggcttgcttcc

SEQ ID NO: 24348 - DNA, 86 bp, Homo sapiens
tcttacgcctcagccagcaccactgccaccagggcaactgcagcagcatctcatgcataaccctgtggcttgcttcccccagggca

SEQ ID NO: 24349 - DNA, 86 bp, Homo sapiens
agcaccactgccaccagggcaactgcagcagcatctcatgcataaccctgtggcttgcttcccccagggcagcacaggctaagtca

SEQ ID NO: 24350 - DNA, 84 bp, Homo sapiens
aactgcagcagcatctcatgcataaccctgtggcttgcttcccccagggcagcacaggctaagtcaggaacatcggatgccagg

SEQ ID NO: 24351 - DNA, 81 bp, Homo sapiens
agcatctcatgcataaccctgtggcttgcttcccccagggcagcacaggctaagtcaggaacatcggatgccagggaggga

SEQ ID NO: 24352 - DNA, 78 bp, Homo sapiens
atgcataaccctgtggcttgcttcccccagggcagcacaggctaagtcaggaacatcggatgccagggagggaggaga

SEQ ID NO: 24353 - DNA, 76 bp, Homo sapiens
ctgtggcttgcttcccccagggcagcacaggctaagtcaggaacatcggatgccagggagggaggagaaagccgaa

SEQ ID NO: 24354 - DNA, 73 bp, Homo sapiens
ttcccccagggcagcacaggctaagtcaggaacatcggatgccagggagggaggagaaagccgaagcgaaagg

SEQ ID NO: 24355 - DNA, 74 bp, Homo sapiens
ctaagtcaggaacatcggatgccagggagggaggagaaagccgaagcgaaaggggtcagggtgctgaggcaaca

SEQ ID NO: 24356 - DNA, 75 bp, Homo sapiens
aggaacatcggatgccagggagggaggagaaagccgaagcgaaaggggtcagggtgctgaggcaacagcagcaag

SEQ ID NO: 24357 - DNA, 75 bp, Homo sapiens
cagggagggaggagaaagccgaagcgaaaggggtcagggtgctgaggcaacagcagcaagggctggtctggacaa

SEQ ID NO: 24358 - DNA, 76 bp, Homo sapiens
ggagaaagccgaagcgaaaggggtcagggtgctgaggcaacagcagcaagggctggtctggacaagaaaagccata

SEQ ID NO: 24359 - DNA, 78 bp, Homo sapiens
agggtgctgaggcaacagcagcaagggctggtctggacaagaaaagccatagcccggcagcccctaccatgagggaga

SEQ ID NO: 24360 - DNA, 78 bp, Homo sapiens
ggcaacagcagcaagggctggtctggacaagaaaagccatagcccggcagcccctaccatgagggagacagagaaaca

SEQ ID NO: 24361 - DNA, 73 bp, Homo sapiens
aagggctggtctggacaagaaaagccatagcccggcagcccctaccatgagggagacagagaaacagaactgg

SEQ ID NO: 24362 - DNA, 75 bp, Homo sapiens
gtctggacaagaaaagccatagcccggcagcccctaccatgagggagacagagaaacagaactggtggtgctggg

SEQ ID NO: 24363 - DNA, 73 bp, Homo sapiens
aaaagccatagcccggcagcccctaccatgagggagacagagaaacagaactggtggtgctggggggtatagc

SEQ ID NO: 24364 - DNA, 74 bp, Homo sapiens
cctaccatgagggagacagagaaacagaactggtggtgctggggggtatagccccccatccttgaggcctgtca

SEQ ID NO: 24365 - DNA, 73 bp, Homo sapiens
agacagagaaacagaactggtggtgctggggggtatagccccccatccttgaggcctgtcacccacacagtag

SEQ ID NO: 24366 - DNA, 74 bp, Homo sapiens
agaaacagaactggtggtgctggggggtatagccccccatccttgaggcctgtcacccacacagtaggtgctga

SEQ ID NO: 24367 - DNA, 74 bp, Homo sapiens
gggtatagccccccatccttgaggcctgtcacccacacagtaggtgctgagagttaggacaggtcaggaagtcc

SEQ ID NO: 24368 - DNA, 73 bp, Homo sapiens
ccccatccttgaggcctgtcacccacacagtaggtgctgagagttaggacaggtcaggaagtcccccagggtc

SEQ ID NO: 24369 - DNA, 74 bp, Homo sapiens
tccttgaggcctgtcacccacacagtaggtgctgagagttaggacaggtcaggaagtcccccagggtccacaaa

SEQ ID NO: 24370 - DNA, 73 bp, Homo sapiens
acagtaggtgctgagagttaggacaggtcaggaagtcccccagggtccacaaaggtgcctgaggctctggtaa

SEQ ID NO: 24371 - DNA, 71 bp, Homo sapiens
agagttaggacaggtcaggaagtcccccagggtccacaaaggtgcctgaggctctggtaagggtgaagata

SEQ ID NO: 24372 - DNA, 68 bp, Homo sapiens
aggtcaggaagtcccccagggtccacaaaggtgcctgaggctctggtaagggtgaagataaaagtatt

SEQ ID NO: 24373 - DNA, 67 bp, Homo sapiens
aagtcccccagggtccacaaaggtgcctgaggctctggtaagggtgaagataaaagtatttaacaac

SEQ ID NO: 24374 - DNA, 74 bp, Homo sapiens
gtccacaaaggtgcctgaggctctggtaagggtgaagataaaagtatttaacaaccgctatggcatcaatgtaa

SEQ ID NO: 24375 - DNA, 71 bp, Homo sapiens
ctctggtaagggtgaagataaaagtatttaacaaccgctatggcatcaatgtaagtggagtttggtcctag

SEQ ID NO: 24376 - DNA, 72 bp, Homo sapiens
taagggtgaagataaaagtatttaacaaccgctatggcatcaatgtaagtggagtttggtcctagtgccgga

SEQ ID NO: 24377 - DNA, 74 bp, Homo sapiens
aaagtatttaacaaccgctatggcatcaatgtaagtggagtttggtcctagtgccggagcccatgctattccag

SEQ ID NO: 24378 - DNA, 77 bp, Homo sapiens
atttaacaaccgctatggcatcaatgtaagtggagtttggtcctagtgccggagcccatgctattccaggcattggc

SEQ ID NO: 24379 - DNA, 83 bp, Homo sapiens
tatggcatcaatgtaagtggagtttggtcctagtgccggagcccatgctattccaggcattggctctttagatgccagtcatg

SEQ ID NO: 24380 - DNA, 77 bp, Homo sapiens
aatgtaagtggagtttggtcctagtgccggagcccatgctattccaggcattggctctttagatgccagtcatgggg

SEQ ID NO: 24381 - DNA, 78 bp, Homo sapiens
tagtgccggagcccatgctattccaggcattggctctttagatgccagtcatgggggaaccctgagggtgtgggtaga

SEQ ID NO: 24382 - DNA, 73 bp, Homo sapiens
gctctttagatgccagtcatgggggaaccctgagggtgtgggtagagtagcaggggccacctaagagattaaa

SEQ ID NO: 24383 - DNA, 72 bp, Homo sapiens
ttagatgccagtcatgggggaaccctgagggtgtgggtagagtagcaggggccacctaagagattaaaaaca

SEQ ID NO: 24384 - DNA, 67 bp, Homo sapiens
atgggggaaccctgagggtgtgggtagagtagcaggggccacctaagagattaaaaacagtctgttt

SEQ ID NO: 24385 - DNA, 71 bp, Homo sapiens
tgagggtgtgggtagagtagcaggggccacctaagagattaaaaacagtctgttttccaaccagtgtggaa

SEQ ID NO: 24386 - DNA, 72 bp, Homo sapiens
tagcaggggccacctaagagattaaaaacagtctgttttccaaccagtgtggaagcaattaaatatgcgtaa

SEQ ID NO: 24387 - DNA, 71 bp, Homo sapiens
acctaagagattaaaaacagtctgttttccaaccagtgtggaagcaattaaatatgcgtaacagtgctacg

SEQ ID NO: 24388 - DNA, 73 bp, Homo sapiens
agattaaaaacagtctgttttccaaccagtgtggaagcaattaaatatgcgtaacagtgctacggccacacca

SEQ ID NO: 24389 - DNA, 77 bp, Homo sapiens
agtctgttttccaaccagtgtggaagcaattaaatatgcgtaacagtgctacggccacaccagcacctcctggctga

SEQ ID NO: 24390 - DNA, 78 bp, Homo sapiens
aaccagtgtggaagcaattaaatatgcgtaacagtgctacggccacaccagcacctcctggctgaaggtcagcccaca

SEQ ID NO: 24391 - DNA, 80 bp, Homo sapiens
aagcaattaaatatgcgtaacagtgctacggccacaccagcacctcctggctgaaggtcagcccacactctggtccatga

SEQ ID NO: 24392 - DNA, 82 bp, Homo sapiens
ttaaatatgcgtaacagtgctacggccacaccagcacctcctggctgaaggtcagcccacactctggtccatgaggcagcaa

SEQ ID NO: 24393 - DNA, 83 bp, Homo sapiens
gtaacagtgctacggccacaccagcacctcctggctgaaggtcagcccacactctggtccatgaggcagcaaggccagtgctg

SEQ ID NO: 24394 - DNA, 82 bp, Homo sapiens
ccacaccagcacctcctggctgaaggtcagcccacactctggtccatgaggcagcaaggccagtgctgtgccaagcccggta

SEQ ID NO: 24395 - DNA, 79 bp, Homo sapiens
acctcctggctgaaggtcagcccacactctggtccatgaggcagcaaggccagtgctgtgccaagcccggtaaggccaa

SEQ ID NO: 24396 - DNA, 81 bp, Homo sapiens
tggctgaaggtcagcccacactctggtccatgaggcagcaaggccagtgctgtgccaagcccggtaaggccaagtgccgag

SEQ ID NO: 24397 - DNA, 78 bp, Homo sapiens
cccacactctggtccatgaggcagcaaggccagtgctgtgccaagcccggtaaggccaagtgccgaggcccagccttc

SEQ ID NO: 24398 - DNA, 78 bp, Homo sapiens
actctggtccatgaggcagcaaggccagtgctgtgccaagcccggtaaggccaagtgccgaggcccagccttccctgc

SEQ ID NO: 24399 - DNA, 78 bp, Homo sapiens
cagtgctgtgccaagcccggtaaggccaagtgccgaggcccagccttccctgccactcctctgagagggcagaacaca

SEQ ID NO: 24400 - DNA, 77 bp, Homo sapiens
taaggccaagtgccgaggcccagccttccctgccactcctctgagagggcagaacacacatatccaagtaggctacc

SEQ ID NO: 24401 - DNA, 76 bp, Homo sapiens
aagtgccgaggcccagccttccctgccactcctctgagagggcagaacacacatatccaagtaggctacccaccac

SEQ ID NO: 24402 - DNA, 76 bp, Homo sapiens
ctgccactcctctgagagggcagaacacacatatccaagtaggctacccaccactgggtagggatttctgtaaaga

SEQ ID NO: 24403 - DNA, 74 bp, Homo sapiens
tctgagagggcagaacacacatatccaagtaggctacccaccactgggtagggatttctgtaaagatgggaaag

SEQ ID NO: 24404 - DNA, 73 bp, Homo sapiens
agaacacacatatccaagtaggctacccaccactgggtagggatttctgtaaagatgggaaaggctgatagat

SEQ ID NO: 24405 - DNA, 71 bp, Homo sapiens
aagtaggctacccaccactgggtagggatttctgtaaagatgggaaaggctgatagattgaaataagcttc

SEQ ID NO: 24406 - DNA, 74 bp, Homo sapiens
cactgggtagggatttctgtaaagatgggaaaggctgatagattgaaataagcttctgtgaaagtctggattta

SEQ ID NO: 24407 - DNA, 75 bp, Homo sapiens
gtagggatttctgtaaagatgggaaaggctgatagattgaaataagcttctgtgaaagtctggatttactgagga

SEQ ID NO: 24408 - DNA, 75 bp, Homo sapiens
taaagatgggaaaggctgatagattgaaataagcttctgtgaaagtctggatttactgaggacctcccctgagga

SEQ ID NO: 24409 - DNA, 72 bp, Homo sapiens
aaggctgatagattgaaataagcttctgtgaaagtctggatttactgaggacctcccctgaggagggaccgt

SEQ ID NO: 24410 - DNA, 71 bp, Homo sapiens
atagattgaaataagcttctgtgaaagtctggatttactgaggacctcccctgaggagggaccgttgggac

SEQ ID NO: 24411 - DNA, 70 bp, Homo sapiens
aaataagcttctgtgaaagtctggatttactgaggacctcccctgaggagggaccgttgggaccgcagat

SEQ ID NO: 24412 - DNA, 73 bp, Homo sapiens
acctcccctgaggagggaccgttgggaccgcagattctgcagctggtgtggggttcaggtcagtttgtcagga

SEQ ID NO: 24413 - DNA, 73 bp, Homo sapiens
aggagggaccgttgggaccgcagattctgcagctggtgtggggttcaggtcagtttgtcaggatgctttaagg

SEQ ID NO: 24414 - DNA, 76 bp, Homo sapiens
gttgggaccgcagattctgcagctggtgtggggttcaggtcagtttgtcaggatgctttaaggtgattagtaaata

SEQ ID NO: 24415 - DNA, 74 bp, Homo sapiens
agctggtgtggggttcaggtcagtttgtcaggatgctttaaggtgattagtaaatatacctcagcttagacttg

SEQ ID NO: 24416 - DNA, 76 bp, Homo sapiens
ggtcagtttgtcaggatgctttaaggtgattagtaaatatacctcagcttagacttgggctgctccttctagcaaa

SEQ ID NO: 24417 - DNA, 77 bp, Homo sapiens
aggatgctttaaggtgattagtaaatatacctcagcttagacttgggctgctccttctagcaaagcaggctccagtg

SEQ ID NO: 24418 - DNA, 75 bp, Homo sapiens
ctttaaggtgattagtaaatatacctcagcttagacttgggctgctccttctagcaaagcaggctccagtggggc

SEQ ID NO: 24419 - DNA, 81 bp, Homo sapiens
atacctcagcttagacttgggctgctccttctagcaaagcaggctccagtggggcctcatcatacaggatgacaagactgg

SEQ ID NO: 24420 - DNA, 79 bp, Homo sapiens
ttagacttgggctgctccttctagcaaagcaggctccagtggggcctcatcatacaggatgacaagactggggccctgt

SEQ ID NO: 24421 - DNA, 80 bp, Homo sapiens
ctgctccttctagcaaagcaggctccagtggggcctcatcatacaggatgacaagactggggccctgttcaccttgaaca

SEQ ID NO: 24422 - DNA, 79 bp, Homo sapiens
tagcaaagcaggctccagtggggcctcatcatacaggatgacaagactggggccctgttcaccttgaacatgcccctgg

SEQ ID NO: 24423 - DNA, 77 bp, Homo sapiens
tccagtggggcctcatcatacaggatgacaagactggggccctgttcaccttgaacatgcccctgggccaagatggg

SEQ ID NO: 24424 - DNA, 77 bp, Homo sapiens
gggcctcatcatacaggatgacaagactggggccctgttcaccttgaacatgcccctgggccaagatggggcttcac

SEQ ID NO: 24425 - DNA, 73 bp, Homo sapiens
atacaggatgacaagactggggccctgttcaccttgaacatgcccctgggccaagatggggcttcacccctcc

SEQ ID NO: 24426 - DNA, 70 bp, Homo sapiens
aagactggggccctgttcaccttgaacatgcccctgggccaagatggggcttcacccctccccagagtaa

SEQ ID NO: 24427 - DNA, 71 bp, Homo sapiens
gggccctgttcaccttgaacatgcccctgggccaagatggggcttcacccctccccagagtaagagctggg

SEQ ID NO: 24428 - DNA, 73 bp, Homo sapiens
accttgaacatgcccctgggccaagatggggcttcacccctccccagagtaagagctggggctgacagtccca

SEQ ID NO: 24429 - DNA, 73 bp, Homo sapiens
cctgggccaagatggggcttcacccctccccagagtaagagctggggctgacagtcccaccctgtcattccta

SEQ ID NO: 24430 - DNA, 73 bp, Homo sapiens
gatggggcttcacccctccccagagtaagagctggggctgacagtcccaccctgtcattcctaatagcccaaa

SEQ ID NO: 24431 - DNA, 75 bp, Homo sapiens
ttcacccctccccagagtaagagctggggctgacagtcccaccctgtcattcctaatagcccaaacgcagaagca

SEQ ID NO: 24432 - DNA, 79 bp, Homo sapiens
cagagtaagagctggggctgacagtcccaccctgtcattcctaatagcccaaacgcagaagcactgagcaagagagccc

SEQ ID NO: 24433 - DNA, 78 bp, Homo sapiens
taagagctggggctgacagtcccaccctgtcattcctaatagcccaaacgcagaagcactgagcaagagagccctttc

SEQ ID NO: 24434 - DNA, 80 bp, Homo sapiens
ttcctaatagcccaaacgcagaagcactgagcaagagagccctttcttgccaagccagtgctcttttggtatatggcata

SEQ ID NO: 24435 - DNA, 81 bp, Homo sapiens
aagcactgagcaagagagccctttcttgccaagccagtgctcttttggtatatggcatacagctccattggaggggacaca

SEQ ID NO: 24436 - DNA, 79 bp, Homo sapiens
agagagccctttcttgccaagccagtgctcttttggtatatggcatacagctccattggaggggacacatcactggctt

SEQ ID NO: 24437 - DNA, 81 bp, Homo sapiens
ttcttgccaagccagtgctcttttggtatatggcatacagctccattggaggggacacatcactggctttatctggtggaa

SEQ ID NO: 24438 - DNA, 79 bp, Homo sapiens
aagccagtgctcttttggtatatggcatacagctccattggaggggacacatcactggctttatctggtggaaatgtac

SEQ ID NO: 24439 - DNA, 75 bp, Homo sapiens
ttttggtatatggcatacagctccattggaggggacacatcactggctttatctggtggaaatgtacctttccct

SEQ ID NO: 24440 - DNA, 76 bp, Homo sapiens
tatatggcatacagctccattggaggggacacatcactggctttatctggtggaaatgtacctttcccttaagttc

SEQ ID NO: 24441 - DNA, 71 bp, Homo sapiens
agctccattggaggggacacatcactggctttatctggtggaaatgtacctttcccttaagttcctcctta

SEQ ID NO: 24442 - DNA, 74 bp, Homo sapiens
tggaggggacacatcactggctttatctggtggaaatgtacctttcccttaagttcctccttagtgccatcaca

SEQ ID NO: 24443 - DNA, 75 bp, Homo sapiens
acatcactggctttatctggtggaaatgtacctttcccttaagttcctccttagtgccatcacagcaggtgaatg

SEQ ID NO: 24444 - DNA, 73 bp, Homo sapiens
tttatctggtggaaatgtacctttcccttaagttcctccttagtgccatcacagcaggtgaatgggtgcccta

SEQ ID NO: 24445 - DNA, 69 bp, Homo sapiens
aaatgtacctttcccttaagttcctccttagtgccatcacagcaggtgaatgggtgccctacggggccc

SEQ ID NO: 24446 - DNA, 71 bp, Homo sapiens
taagttcctccttagtgccatcacagcaggtgaatgggtgccctacggggccctccttcccccaccaggaa

SEQ ID NO: 24447 - DNA, 72 bp, Homo sapiens
cttagtgccatcacagcaggtgaatgggtgccctacggggccctccttcccccaccaggaacagatggaacc

SEQ ID NO: 24448 - DNA, 70 bp, Homo sapiens
agcaggtgaatgggtgccctacggggccctccttcccccaccaggaacagatggaacctgccacccagga

SEQ ID NO: 24449 - DNA, 72 bp, Homo sapiens
tgaatgggtgccctacggggccctccttcccccaccaggaacagatggaacctgccacccaggatcctgatc

SEQ ID NO: 24450 - DNA, 74 bp, Homo sapiens
cctacggggccctccttcccccaccaggaacagatggaacctgccacccaggatcctgatctgccctgcactga

SEQ ID NO: 24451 - DNA, 80 bp, Homo sapiens
tccttcccccaccaggaacagatggaacctgccacccaggatcctgatctgccctgcactgagcactcagtggataaaca

SEQ ID NO: 24452 - DNA, 83 bp, Homo sapiens
acagatggaacctgccacccaggatcctgatctgccctgcactgagcactcagtggataaacactcctccagcccagacacac

SEQ ID NO: 24453 - DNA, 81 bp, Homo sapiens
ccacccaggatcctgatctgccctgcactgagcactcagtggataaacactcctccagcccagacacactcctcctcttgg

SEQ ID NO: 24454 - DNA, 81 bp, Homo sapiens
cctgcactgagcactcagtggataaacactcctccagcccagacacactcctcctcttgggcaggagcaatccagagttgt

SEQ ID NO: 24455 - DNA, 77 bp, Homo sapiens
agcactcagtggataaacactcctccagcccagacacactcctcctcttgggcaggagcaatccagagttgttattt

SEQ ID NO: 24456 - DNA, 74 bp, Homo sapiens
agtggataaacactcctccagcccagacacactcctcctcttgggcaggagcaatccagagttgttatttttct

SEQ ID NO: 24457 - DNA, 75 bp, Homo sapiens
tcctccagcccagacacactcctcctcttgggcaggagcaatccagagttgttatttttcttagaaggagcctct

SEQ ID NO: 24458 - DNA, 72 bp, Homo sapiens
agacacactcctcctcttgggcaggagcaatccagagttgttatttttcttagaaggagcctcttttccctc

SEQ ID NO: 24459 - DNA, 69 bp, Homo sapiens
ctcctcttgggcaggagcaatccagagttgttatttttcttagaaggagcctcttttccctctattttt

SEQ ID NO: 24460 - DNA, 68 bp, Homo sapiens
ttgggcaggagcaatccagagttgttatttttcttagaaggagcctcttttccctctattttttaaat

SEQ ID NO: 24461 - DNA, 68 bp, Homo sapiens
agcaatccagagttgttatttttcttagaaggagcctcttttccctctattttttaaattgaaatata

SEQ ID NO: 24462 - DNA, 72 bp, Homo sapiens
tttcttagaaggagcctcttttccctctattttttaaattgaaatataatagctgcatcagccctgaaaagc

SEQ ID NO: 24463 - DNA, 72 bp, Homo sapiens
cctcttttccctctattttttaaattgaaatataatagctgcatcagccctgaaaagccaaattcaaccaca

SEQ ID NO: 24464 - DNA, 77 bp, Homo sapiens
tctattttttaaattgaaatataatagctgcatcagccctgaaaagccaaattcaaccacatggctggagaatcatt

SEQ ID NO: 24465 - DNA, 79 bp, Homo sapiens
tttttaaattgaaatataatagctgcatcagccctgaaaagccaaattcaaccacatggctggagaatcatttgtcatg

SEQ ID NO: 24466 - DNA, 79 bp, Homo sapiens
aaatataatagctgcatcagccctgaaaagccaaattcaaccacatggctggagaatcatttgtcatggccccgccttc

SEQ ID NO: 24467 - DNA, 79 bp, Homo sapiens
catcagccctgaaaagccaaattcaaccacatggctggagaatcatttgtcatggccccgccttctcttctgatactaa

SEQ ID NO: 24468 - DNA, 80 bp, Homo sapiens
tgaaaagccaaattcaaccacatggctggagaatcatttgtcatggccccgccttctcttctgatactaatggagcttca

SEQ ID NO: 24469 - DNA, 79 bp, Homo sapiens
aaattcaaccacatggctggagaatcatttgtcatggccccgccttctcttctgatactaatggagcttcatgacccac

SEQ ID NO: 24470 - DNA, 80 bp, Homo sapiens
accacatggctggagaatcatttgtcatggccccgccttctcttctgatactaatggagcttcatgacccacggtcagcc

SEQ ID NO: 24471 - DNA, 75 bp, Homo sapiens
aatcatttgtcatggccccgccttctcttctgatactaatggagcttcatgacccacggtcagcccccaaaccaa

SEQ ID NO: 24472 - DNA, 73 bp, Homo sapiens
tttgtcatggccccgccttctcttctgatactaatggagcttcatgacccacggtcagcccccaaaccaaagt

SEQ ID NO: 24473 - DNA, 73 bp, Homo sapiens
ccttctcttctgatactaatggagcttcatgacccacggtcagcccccaaaccaaagttgtcccaacagagga

SEQ ID NO: 24474 - DNA, 74 bp, Homo sapiens
tcttctgatactaatggagcttcatgacccacggtcagcccccaaaccaaagttgtcccaacagaggaggccag

SEQ ID NO: 24475 - DNA, 76 bp, Homo sapiens
taatggagcttcatgacccacggtcagcccccaaaccaaagttgtcccaacagaggaggccagtgaggcagagaca

SEQ ID NO: 24476 - DNA, 76 bp, Homo sapiens
ttcatgacccacggtcagcccccaaaccaaagttgtcccaacagaggaggccagtgaggcagagacagagctctcc

SEQ ID NO: 24477 - DNA, 76 bp, Homo sapiens
acggtcagcccccaaaccaaagttgtcccaacagaggaggccagtgaggcagagacagagctctcccactctcaga

SEQ ID NO: 24478 - DNA, 75 bp, Homo sapiens
aaaccaaagttgtcccaacagaggaggccagtgaggcagagacagagctctcccactctcagaccctcttttgtc

SEQ ID NO: 24479 - DNA, 77 bp, Homo sapiens
agttgtcccaacagaggaggccagtgaggcagagacagagctctcccactctcagaccctcttttgtcttcattttc

SEQ ID NO: 24480 - DNA, 77 bp, Homo sapiens
agaggaggccagtgaggcagagacagagctctcccactctcagaccctcttttgtcttcattttcctctcccactta

SEQ ID NO: 24481 - DNA, 80 bp, Homo sapiens
agtgaggcagagacagagctctcccactctcagaccctcttttgtcttcattttcctctcccacttagcacatgtgtgct

SEQ ID NO: 24482 - DNA, 79 bp, Homo sapiens
agaccctcttttgtcttcattttcctctcccacttagcacatgtgtgcttgagggtggctgggaatgtgatatacagca

SEQ ID NO: 24483 - DNA, 81 bp, Homo sapiens
ttgtcttcattttcctctcccacttagcacatgtgtgcttgagggtggctgggaatgtgatatacagcaccctgatcctaa

SEQ ID NO: 24484 - DNA, 80 bp, Homo sapiens
acttagcacatgtgtgcttgagggtggctgggaatgtgatatacagcaccctgatcctaacaggtgtgattgttacgtaa

SEQ ID NO: 24485 - DNA, 78 bp, Homo sapiens
cttgagggtggctgggaatgtgatatacagcaccctgatcctaacaggtgtgattgttacgtaagacgctgatactgg

SEQ ID NO: 24486 - DNA, 78 bp, Homo sapiens
gaatgtgatatacagcaccctgatcctaacaggtgtgattgttacgtaagacgctgatactgggccttgtattgcttt

SEQ ID NO: 24487 - DNA, 75 bp, Homo sapiens
atatacagcaccctgatcctaacaggtgtgattgttacgtaagacgctgatactgggccttgtattgcttttaaa

SEQ ID NO: 24488 - DNA, 77 bp, Homo sapiens
taacaggtgtgattgttacgtaagacgctgatactgggccttgtattgcttttaaagtttcctctgctcagcatcat

SEQ ID NO: 24489 - DNA, 77 bp, Homo sapiens
attgttacgtaagacgctgatactgggccttgtattgcttttaaagtttcctctgctcagcatcatttcatgccaaa

SEQ ID NO: 24490 - DNA, 81 bp, Homo sapiens
gtaagacgctgatactgggccttgtattgcttttaaagtttcctctgctcagcatcatttcatgccaaagtgctgctatgg

SEQ ID NO: 24491 - DNA, 81 bp, Homo sapiens
atactgggccttgtattgcttttaaagtttcctctgctcagcatcatttcatgccaaagtgctgctatgggctgctttgtg

SEQ ID NO: 24492 - DNA, 83 bp, Homo sapiens
tattgcttttaaagtttcctctgctcagcatcatttcatgccaaagtgctgctatgggctgctttgtgtgcacaaaattgctt

SEQ ID NO: 24493 - DNA, 81 bp, Homo sapiens
ttttaaagtttcctctgctcagcatcatttcatgccaaagtgctgctatgggctgctttgtgtgcacaaaattgctttttc

SEQ ID NO: 24494 - DNA, 85 bp, Homo sapiens
tgctcagcatcatttcatgccaaagtgctgctatgggctgctttgtgtgcacaaaattgctttttccacctcggaaatgcagctt

SEQ ID NO: 24495 - DNA, 80 bp, Homo sapiens
atcatttcatgccaaagtgctgctatgggctgctttgtgtgcacaaaattgctttttccacctcggaaatgcagctttcc

SEQ ID NO: 24496 - DNA, 77 bp, Homo sapiens
atgccaaagtgctgctatgggctgctttgtgtgcacaaaattgctttttccacctcggaaatgcagctttccctagg

SEQ ID NO: 24497 - DNA, 71 bp, Homo sapiens
ctttgtgtgcacaaaattgctttttccacctcggaaatgcagctttccctagggggaggcctacaacagga

SEQ ID NO: 24498 - DNA, 77 bp, Homo sapiens
aatgcagctttccctagggggaggcctacaacaggacgaccattctgagccagtgagtctattgcatggtgttttga

SEQ ID NO: 24499 - DNA, 74 bp, Homo sapiens
tagggggaggcctacaacaggacgaccattctgagccagtgagtctattgcatggtgttttgagaaagggaatt

SEQ ID NO: 24500 - DNA, 75 bp, Homo sapiens
ctacaacaggacgaccattctgagccagtgagtctattgcatggtgttttgagaaagggaattttagtgacacct

SEQ ID NO: 24501 - DNA, 77 bp, Homo sapiens
attctgagccagtgagtctattgcatggtgttttgagaaagggaattttagtgacaccttatgccatttcaagagga

SEQ ID NO: 24502 - DNA, 76 bp, Homo sapiens
agtgagtctattgcatggtgttttgagaaagggaattttagtgacaccttatgccatttcaagaggagaaatgcag

SEQ ID NO: 24503 - DNA, 76 bp, Homo sapiens
atggtgttttgagaaagggaattttagtgacaccttatgccatttcaagaggagaaatgcaggctggcagagcaat

SEQ ID NO: 24504 - DNA, 76 bp, Homo sapiens
agggaattttagtgacaccttatgccatttcaagaggagaaatgcaggctggcagagcaatttccagaaatggaat

SEQ ID NO: 24505 - DNA, 80 bp, Homo sapiens
acaccttatgccatttcaagaggagaaatgcaggctggcagagcaatttccagaaatggaatttgcctgcaaatagtata

SEQ ID NO: 24506 - DNA, 79 bp, Homo sapiens
catttcaagaggagaaatgcaggctggcagagcaatttccagaaatggaatttgcctgcaaatagtataaacaacacta

SEQ ID NO: 24507 - DNA, 76 bp, Homo sapiens
aggagaaatgcaggctggcagagcaatttccagaaatggaatttgcctgcaaatagtataaacaacactaaattta

SEQ ID NO: 24508 - DNA, 78 bp, Homo sapiens
aatgcaggctggcagagcaatttccagaaatggaatttgcctgcaaatagtataaacaacactaaatttactgtgcca

SEQ ID NO: 24509 - DNA, 74 bp, Homo sapiens
gagcaatttccagaaatggaatttgcctgcaaatagtataaacaacactaaatttactgtgccaggaaatcttc

SEQ ID NO: 24510 - DNA, 74 bp, Homo sapiens
atttgcctgcaaatagtataaacaacactaaatttactgtgccaggaaatcttcctgaactccttgaactcata

SEQ ID NO: 24511 - DNA, 73 bp, Homo sapiens
aatagtataaacaacactaaatttactgtgccaggaaatcttcctgaactccttgaactcatacacacaggta

SEQ ID NO: 24512 - DNA, 74 bp, Homo sapiens
actaaatttactgtgccaggaaatcttcctgaactccttgaactcatacacacaggtatttgagtcctgaataa

SEQ ID NO: 24513 - DNA, 75 bp, Homo sapiens
ctgtgccaggaaatcttcctgaactccttgaactcatacacacaggtatttgagtcctgaataaagtgttggaaa

SEQ ID NO: 24514 - DNA, 76 bp, Homo sapiens
gtatttgagtcctgaataaagtgttggaaagcactgcagatgcggtcacctgactgaccacctgggttttctatta

SEQ ID NO: 24515 - DNA, 76 bp, Homo sapiens
tcctgaataaagtgttggaaagcactgcagatgcggtcacctgactgaccacctgggttttctattaccagtgaat

SEQ ID NO: 24516 - DNA, 74 bp, Homo sapiens
taaagtgttggaaagcactgcagatgcggtcacctgactgaccacctgggttttctattaccagtgaatttctt

SEQ ID NO: 24517 - DNA, 73 bp, Homo sapiens
aaagcactgcagatgcggtcacctgactgaccacctgggttttctattaccagtgaatttcttttattcacct

SEQ ID NO: 24518 - DNA, 71 bp, Homo sapiens
agatgcggtcacctgactgaccacctgggttttctattaccagtgaatttcttttattcaccttcccttga

SEQ ID NO: 24519 - DNA, 69 bp, Homo sapiens
tgactgaccacctgggttttctattaccagtgaatttcttttattcaccttcccttgaccaagaaattg

SEQ ID NO: 24520 - DNA, 64 bp, Homo sapiens
acctgggttttctattaccagtgaatttcttttattcaccttcccttgaccaagaaattgggtt

SEQ ID NO: 24521 - DNA, 67 bp, Homo sapiens
ttctattaccagtgaatttcttttattcaccttcccttgaccaagaaattgggtttcttttccctca

SEQ ID NO: 24522 - DNA, 68 bp, Homo sapiens
agtgaatttcttttattcaccttcccttgaccaagaaattgggtttcttttccctcagcctgcactta

SEQ ID NO: 24523 - DNA, 69 bp, Homo sapiens
tttattcaccttcccttgaccaagaaattgggtttcttttccctcagcctgcacttactcttctattaa

SEQ ID NO: 24524 - DNA, 70 bp, Homo sapiens
tgaccaagaaattgggtttcttttccctcagcctgcacttactcttctattaagaccagaaaataaaata

SEQ ID NO: 24525 - DNA, 73 bp, Homo sapiens
gcctgcacttactcttctattaagaccagaaaataaaataattttccgttgagtcacaaactcatcatcttgt

SEQ ID NO: 24526 - DNA, 74 bp, Homo sapiens
ccagaaaataaaataattttccgttgagtcacaaactcatcatcttgtttggtgttctgctgcctctgaacaaa

SEQ ID NO: 24527 - DNA, 77 bp, Homo sapiens
attttccgttgagtcacaaactcatcatcttgtttggtgttctgctgcctctgaacaaaagtgaatgccagccttcc

SEQ ID NO: 24528 - DNA, 80 bp, Homo sapiens
atcatcttgtttggtgttctgctgcctctgaacaaaagtgaatgccagccttcccttgctgggtgtcagagtctgcctcc

SEQ ID NO: 24529 - DNA, 78 bp, Homo sapiens
tttggtgttctgctgcctctgaacaaaagtgaatgccagccttcccttgctgggtgtcagagtctgcctcccttgaaa

SEQ ID NO: 24530 - DNA, 78 bp, Homo sapiens
tctgctgcctctgaacaaaagtgaatgccagccttcccttgctgggtgtcagagtctgcctcccttgaaaagaggccc

SEQ ID NO: 24531 - DNA, 73 bp, Homo sapiens
aacaaaagtgaatgccagccttcccttgctgggtgtcagagtctgcctcccttgaaaagaggcccctgtagac

SEQ ID NO: 24532 - DNA, 73 bp, Homo sapiens
tgccagccttcccttgctgggtgtcagagtctgcctcccttgaaaagaggcccctgtagaccccaacacctat

SEQ ID NO: 24533 - DNA, 70 bp, Homo sapiens
ttcccttgctgggtgtcagagtctgcctcccttgaaaagaggcccctgtagaccccaacacctattcttt

SEQ ID NO: 24534 - DNA, 70 bp, Homo sapiens
gtgtcagagtctgcctcccttgaaaagaggcccctgtagaccccaacacctattcttttctctggttaat

SEQ ID NO: 24535 - DNA, 69 bp, Homo sapiens
agagtctgcctcccttgaaaagaggcccctgtagaccccaacacctattcttttctctggttaattaca

SEQ ID NO: 24536 - DNA, 73 bp, Homo sapiens
ttgaaaagaggcccctgtagaccccaacacctattcttttctctggttaattacagcagcatctgagaaattc

SEQ ID NO: 24537 - DNA, 74 bp, Homo sapiens
cccctgtagaccccaacacctattcttttctctggttaattacagcagcatctgagaaattccatgcaaaagaa

SEQ ID NO: 24538 - DNA, 76 bp, Homo sapiens
tagaccccaacacctattcttttctctggttaattacagcagcatctgagaaattccatgcaaaagaagactacaa

SEQ ID NO: 24539 - DNA, 79 bp, Homo sapiens
tttctctggttaattacagcagcatctgagaaattccatgcaaaagaagactacaaccagtgtttcagatataccacaa

SEQ ID NO: 24540 - DNA, 79 bp, Homo sapiens
ttaattacagcagcatctgagaaattccatgcaaaagaagactacaaccagtgtttcagatataccacaagatcaaatt

SEQ ID NO: 24541 - DNA, 74 bp, Homo sapiens
aaaagaagactacaaccagtgtttcagatataccacaagatcaaatttgggcactggtggtccacctcagaaga

SEQ ID NO: 24542 - DNA, 77 bp, Homo sapiens
aaccagtgtttcagatataccacaagatcaaatttgggcactggtggtccacctcagaagactcttgagtcatatat

SEQ ID NO: 24543 - DNA, 78 bp, Homo sapiens
gtgtttcagatataccacaagatcaaatttgggcactggtggtccacctcagaagactcttgagtcatatattcagtt

SEQ ID NO: 24544 - DNA, 79 bp, Homo sapiens
atcaaatttgggcactggtggtccacctcagaagactcttgagtcatatattcagtttctcttgctaatatatgactcg

SEQ ID NO: 24545 - DNA, 80 bp, Homo sapiens
actggtggtccacctcagaagactcttgagtcatatattcagtttctcttgctaatatatgactcgtcttcaccatctcc

SEQ ID NO: 24546 - DNA, 80 bp, Homo sapiens
agaagactcttgagtcatatattcagtttctcttgctaatatatgactcgtcttcaccatctcctcaaaacaagagcaaa

SEQ ID NO: 24547 - DNA, 81 bp, Homo sapiens
tcatatattcagtttctcttgctaatatatgactcgtcttcaccatctcctcaaaacaagagcaaagccaagatagaggaa

SEQ ID NO: 24548 - DNA, 76 bp, Homo sapiens
agtttctcttgctaatatatgactcgtcttcaccatctcctcaaaacaagagcaaagccaagatagaggaaggtaa

SEQ ID NO: 24549 - DNA, 76 bp, Homo sapiens
tcttgctaatatatgactcgtcttcaccatctcctcaaaacaagagcaaagccaagatagaggaaggtaaaaggag

SEQ ID NO: 24550 - DNA, 73 bp, Homo sapiens
atatgactcgtcttcaccatctcctcaaaacaagagcaaagccaagatagaggaaggtaaaaggaggaggaaa

SEQ ID NO: 24551 - DNA, 70 bp, Homo sapiens
ttcaccatctcctcaaaacaagagcaaagccaagatagaggaaggtaaaaggaggaggaaaggaaaccaa

SEQ ID NO: 24552 - DNA, 69 bp, Homo sapiens
tcctcaaaacaagagcaaagccaagatagaggaaggtaaaaggaggaggaaaggaaaccaaggcaggga

SEQ ID NO: 24553 - DNA, 69 bp, Homo sapiens
agcaaagccaagatagaggaaggtaaaaggaggaggaaaggaaaccaaggcagggagatgttctaagta

SEQ ID NO: 24554 - DNA, 68 bp, Homo sapiens
ggaggaaaggaaaccaaggcagggagatgttctaagtaggtttgcatttagttacccctcatttcact

SEQ ID NO: 24555 - DNA, 72 bp, Homo sapiens
aaggcagggagatgttctaagtaggtttgcatttagttacccctcatttcacttaaggctccagacagactc

SEQ ID NO: 24556 - DNA, 71 bp, Homo sapiens
atgttctaagtaggtttgcatttagttacccctcatttcacttaaggctccagacagactccaggtaggga

SEQ ID NO: 24557 - DNA, 76 bp, Homo sapiens
taggtttgcatttagttacccctcatttcacttaaggctccagacagactccaggtagggaatgcatgctgtctct

SEQ ID NO: 24558 - DNA, 76 bp, Homo sapiens
atttagttacccctcatttcacttaaggctccagacagactccaggtagggaatgcatgctgtctctttctctgtg

SEQ ID NO: 24559 - DNA, 80 bp, Homo sapiens
atttcacttaaggctccagacagactccaggtagggaatgcatgctgtctctttctctgtgtctgtctccccatctccta

SEQ ID NO: 24560 - DNA, 80 bp, Homo sapiens
acttaaggctccagacagactccaggtagggaatgcatgctgtctctttctctgtgtctgtctccccatctcctagagga

SEQ ID NO: 24561 - DNA, 83 bp, Homo sapiens
agacagactccaggtagggaatgcatgctgtctctttctctgtgtctgtctccccatctcctagaggacagagtgccagcgac

SEQ ID NO: 24562 - DNA, 82 bp, Homo sapiens
aggtagggaatgcatgctgtctctttctctgtgtctgtctccccatctcctagaggacagagtgccagcgacctctggacag

SEQ ID NO: 24563 - DNA, 83 bp, Homo sapiens
aatgcatgctgtctctttctctgtgtctgtctccccatctcctagaggacagagtgccagcgacctctggacaggggcagggc

SEQ ID NO: 24564 - DNA, 80 bp, Homo sapiens
tctgtgtctgtctccccatctcctagaggacagagtgccagcgacctctggacaggggcagggctccagccaaggtgccc

SEQ ID NO: 24565 - DNA, 79 bp, Homo sapiens
ccatctcctagaggacagagtgccagcgacctctggacaggggcagggctccagccaaggtgcccctgagccagggtca

SEQ ID NO: 24566 - DNA, 79 bp, Homo sapiens
tagaggacagagtgccagcgacctctggacaggggcagggctccagccaaggtgcccctgagccagggtcaacatagaa

SEQ ID NO: 24567 - DNA, 74 bp, Homo sapiens
ctctggacaggggcagggctccagccaaggtgcccctgagccagggtcaacatagaatttcctgccccgtgaag

SEQ ID NO: 24568 - DNA, 75 bp, Homo sapiens
gggcagggctccagccaaggtgcccctgagccagggtcaacatagaatttcctgccccgtgaagggctggcacca

SEQ ID NO: 24569 - DNA, 77 bp, Homo sapiens
tccagccaaggtgcccctgagccagggtcaacatagaatttcctgccccgtgaagggctggcaccagctagcatccc

SEQ ID NO: 24570 - DNA, 74 bp, Homo sapiens
aaggtgcccctgagccagggtcaacatagaatttcctgccccgtgaagggctggcaccagctagcatccccttg

SEQ ID NO: 24571 - DNA, 79 bp, Homo sapiens
ccagggtcaacatagaatttcctgccccgtgaagggctggcaccagctagcatccccttggctccacatgagtcatgaa

SEQ ID NO: 24572 - DNA, 79 bp, Homo sapiens
aacatagaatttcctgccccgtgaagggctggcaccagctagcatccccttggctccacatgagtcatgaacacaattg

SEQ ID NO: 24573 - DNA, 83 bp, Homo sapiens
cgtgaagggctggcaccagctagcatccccttggctccacatgagtcatgaacacaattgtcagtgggggtctctgctgctct

SEQ ID NO: 24574 - DNA, 81 bp, Homo sapiens
catccccttggctccacatgagtcatgaacacaattgtcagtgggggtctctgctgctcttctggctgaagaatctgtttt

SEQ ID NO: 24575 - DNA, 80 bp, Homo sapiens
atgagtcatgaacacaattgtcagtgggggtctctgctgctcttctggctgaagaatctgtttttcttctgggcttcact

SEQ ID NO: 24576 - DNA, 76 bp, Homo sapiens
aacacaattgtcagtgggggtctctgctgctcttctggctgaagaatctgtttttcttctgggcttcacttgtagt

SEQ ID NO: 24577 - DNA, 76 bp, Homo sapiens
agtgggggtctctgctgctcttctggctgaagaatctgtttttcttctgggcttcacttgtagttcctattcaatg

SEQ ID NO: 24578 - DNA, 80 bp, Homo sapiens
tctgctgctcttctggctgaagaatctgtttttcttctgggcttcacttgtagttcctattcaatgtctccatagggcac

SEQ ID NO: 24579 - DNA, 76 bp, Homo sapiens
aagaatctgtttttcttctgggcttcacttgtagttcctattcaatgtctccatagggcactgagatcaccaagaa

SEQ ID NO: 24580 - DNA, 76 bp, Homo sapiens
tttttcttctgggcttcacttgtagttcctattcaatgtctccatagggcactgagatcaccaagaacattaccca

SEQ ID NO: 24581 - DNA, 79 bp, Homo sapiens
tgtagttcctattcaatgtctccatagggcactgagatcaccaagaacattacccagaagctgaagtccaaatgttcta

SEQ ID NO: 24582 - DNA, 79 bp, Homo sapiens
ctattcaatgtctccatagggcactgagatcaccaagaacattacccagaagctgaagtccaaatgttctagattttga

SEQ ID NO: 24583 - DNA, 77 bp, Homo sapiens
atagggcactgagatcaccaagaacattacccagaagctgaagtccaaatgttctagattttgacctctcttgactc

SEQ ID NO: 24584 - DNA, 76 bp, Homo sapiens
actgagatcaccaagaacattacccagaagctgaagtccaaatgttctagattttgacctctcttgactctggggc

SEQ ID NO: 24585 - DNA, 74 bp, Homo sapiens
aagaacattacccagaagctgaagtccaaatgttctagattttgacctctcttgactctggggccacaaagaga

SEQ ID NO: 24586 - DNA, 73 bp, Homo sapiens
attacccagaagctgaagtccaaatgttctagattttgacctctcttgactctggggccacaaagagaaggcc

SEQ ID NO: 24587 - DNA, 72 bp, Homo sapiens
aagtccaaatgttctagattttgacctctcttgactctggggccacaaagagaaggccccataatccacctc

SEQ ID NO: 24588 - DNA, 75 bp, Homo sapiens
aatgttctagattttgacctctcttgactctggggccacaaagagaaggccccataatccacctctcagccagta

SEQ ID NO: 24589 - DNA, 74 bp, Homo sapiens
tttgacctctcttgactctggggccacaaagagaaggccccataatccacctctcagccagtatctcccttctt

SEQ ID NO: 24590 - DNA, 78 bp, Homo sapiens
tctcttgactctggggccacaaagagaaggccccataatccacctctcagccagtatctcccttctttgcacagattc

SEQ ID NO: 24591 - DNA, 74 bp, Homo sapiens
ggccacaaagagaaggccccataatccacctctcagccagtatctcccttctttgcacagattcctcccaaccc

SEQ ID NO: 24592 - DNA, 80 bp, Homo sapiens
tctcagccagtatctcccttctttgcacagattcctcccaaccccatagagcctatgtggtgagcatgagggtcgtcttc

SEQ ID NO: 24593 - DNA, 77 bp, Homo sapiens
tatctcccttctttgcacagattcctcccaaccccatagagcctatgtggtgagcatgagggtcgtcttccctctgt

SEQ ID NO: 24594 - DNA, 76 bp, Homo sapiens
cccttctttgcacagattcctcccaaccccatagagcctatgtggtgagcatgagggtcgtcttccctctgttctc

SEQ ID NO: 24595 - DNA, 76 bp, Homo sapiens
acagattcctcccaaccccatagagcctatgtggtgagcatgagggtcgtcttccctctgttctcccatcccagcc

SEQ ID NO: 24596 - DNA, 79 bp, Homo sapiens
aaccccatagagcctatgtggtgagcatgagggtcgtcttccctctgttctcccatcccagcctctgttttgctgcatg

SEQ ID NO: 24597 - DNA, 83 bp, Homo sapiens
atagagcctatgtggtgagcatgagggtcgtcttccctctgttctcccatcccagcctctgttttgctgcatgttagcgctga

SEQ ID NO: 24598 - DNA, 85 bp, Homo sapiens
tgtggtgagcatgagggtcgtcttccctctgttctcccatcccagcctctgttttgctgcatgttagcgctgatccagctcctga

SEQ ID NO: 24599 - DNA, 80 bp, Homo sapiens
ggtcgtcttccctctgttctcccatcccagcctctgttttgctgcatgttagcgctgatccagctcctgagatggttaat

SEQ ID NO: 24600 - DNA, 81 bp, Homo sapiens
cctctgttctcccatcccagcctctgttttgctgcatgttagcgctgatccagctcctgagatggttaattccacccaatc

SEQ ID NO: 24601 - DNA, 80 bp, Homo sapiens
cccatcccagcctctgttttgctgcatgttagcgctgatccagctcctgagatggttaattccacccaatccaagcttat

SEQ ID NO: 24602 - DNA, 82 bp, Homo sapiens
cctctgttttgctgcatgttagcgctgatccagctcctgagatggttaattccacccaatccaagcttatttgcttgcctga

SEQ ID NO: 24603 - DNA, 83 bp, Homo sapiens
ttttgctgcatgttagcgctgatccagctcctgagatggttaattccacccaatccaagcttatttgcttgcctgactgactc

SEQ ID NO: 24604 - DNA, 81 bp, Homo sapiens
atccagctcctgagatggttaattccacccaatccaagcttatttgcttgcctgactgactccaccactctctcagctatg

SEQ ID NO: 24605 - DNA, 77 bp, Homo sapiens
gatggttaattccacccaatccaagcttatttgcttgcctgactgactccaccactctctcagctatgggggaatat

SEQ ID NO: 24606 - DNA, 79 bp, Homo sapiens
aatccaagcttatttgcttgcctgactgactccaccactctctcagctatgggggaatattgcattctaatgaaatagg

SEQ ID NO: 24607 - DNA, 79 bp, Homo sapiens
tgactgactccaccactctctcagctatgggggaatattgcattctaatgaaatagggtttggaactcacctggtgctc

SEQ ID NO: 24608 - DNA, 77 bp, Homo sapiens
accactctctcagctatgggggaatattgcattctaatgaaatagggtttggaactcacctggtgctcctcgcaaga

SEQ ID NO: 24609 - DNA, 79 bp, Homo sapiens
tcagctatgggggaatattgcattctaatgaaatagggtttggaactcacctggtgctcctcgcaagacaactgacaca

SEQ ID NO: 24610 - DNA, 76 bp, Homo sapiens
ggaatattgcattctaatgaaatagggtttggaactcacctggtgctcctcgcaagacaactgacacaaggtgtag

SEQ ID NO: 24611 - DNA, 73 bp, Homo sapiens
attctaatgaaatagggtttggaactcacctggtgctcctcgcaagacaactgacacaaggtgtagggtgtgg

SEQ ID NO: 24612 - DNA, 71 bp, Homo sapiens
aatgaaatagggtttggaactcacctggtgctcctcgcaagacaactgacacaaggtgtagggtgtggggg

SEQ ID NO: 24613 - DNA, 73 bp, Homo sapiens
ggtttggaactcacctggtgctcctcgcaagacaactgacacaaggtgtagggtgtgggggtggacaaaatgc

SEQ ID NO: 24614 - DNA, 74 bp, Homo sapiens
tggtgctcctcgcaagacaactgacacaaggtgtagggtgtgggggtggacaaaatgcccacctactggataaa

SEQ ID NO: 24615 - DNA, 74 bp, Homo sapiens
tcctcgcaagacaactgacacaaggtgtagggtgtgggggtggacaaaatgcccacctactggataaaagctca

SEQ ID NO: 24616 - DNA, 72 bp, Homo sapiens
aactgacacaaggtgtagggtgtgggggtggacaaaatgcccacctactggataaaagctcactgcaggaaa

SEQ ID NO: 24617 - DNA, 71 bp, Homo sapiens
acaaggtgtagggtgtgggggtggacaaaatgcccacctactggataaaagctcactgcaggaaaatgagg

SEQ ID NO: 24618 - DNA, 77 bp, Homo sapiens
tgggggtggacaaaatgcccacctactggataaaagctcactgcaggaaaatgaggtctcctggcataatgcaacaa

SEQ ID NO: 24619 - DNA, 78 bp, Homo sapiens
acaaaatgcccacctactggataaaagctcactgcaggaaaatgaggtctcctggcataatgcaacaaaaatctcata

SEQ ID NO: 24620 - DNA, 77 bp, Homo sapiens
acctactggataaaagctcactgcaggaaaatgaggtctcctggcataatgcaacaaaaatctcatataattttgat

SEQ ID NO: 24621 - DNA, 77 bp, Homo sapiens
ctggataaaagctcactgcaggaaaatgaggtctcctggcataatgcaacaaaaatctcatataattttgattttta

SEQ ID NO: 24622 - DNA, 68 bp, Homo sapiens
atttttaaaaagttgttctcaatttttcattacatcctacttctcagccctctggatgtttcattttt

SEQ ID NO: 24623 - DNA, 70 bp, Homo sapiens
tttttcattacatcctacttctcagccctctggatgtttcatttttttggacaaagtgtttctttagtgg

SEQ ID NO: 24624 - DNA, 71 bp, Homo sapiens
tacatcctacttctcagccctctggatgtttcatttttttggacaaagtgtttctttagtggttggggcca

SEQ ID NO: 24625 - DNA, 68 bp, Homo sapiens
agccctctggatgtttcatttttttggacaaagtgtttctttagtggttggggccagggacaggttga

SEQ ID NO: 24626 - DNA, 66 bp, Homo sapiens
atgtttcatttttttggacaaagtgtttctttagtggttggggccagggacaggttgagggatatt

SEQ ID NO: 24627 - DNA, 68 bp, Homo sapiens
tttttggacaaagtgtttctttagtggttggggccagggacaggttgagggatatttctcggctcatt

SEQ ID NO: 24628 - DNA, 70 bp, Homo sapiens
aaagtgtttctttagtggttggggccagggacaggttgagggatatttctcggctcatttataagatata

SEQ ID NO: 24629 - DNA, 71 bp, Homo sapiens
tttctttagtggttggggccagggacaggttgagggatatttctcggctcatttataagatataaatatta

SEQ ID NO: 24630 - DNA, 74 bp, Homo sapiens
gggccagggacaggttgagggatatttctcggctcatttataagatataaatattatgaggttgtatgtaaaga

SEQ ID NO: 24631 - DNA, 72 bp, Homo sapiens
gggacaggttgagggatatttctcggctcatttataagatataaatattatgaggttgtatgtaaagaaagg

SEQ ID NO: 24632 - DNA, 73 bp, Homo sapiens
ttctcggctcatttataagatataaatattatgaggttgtatgtaaagaaagggcaaacgtacagcagaaggg

SEQ ID NO: 24633 - DNA, 73 bp, Homo sapiens
ataagatataaatattatgaggttgtatgtaaagaaagggcaaacgtacagcagaaggggagcaaatagctac

SEQ ID NO: 24634 - DNA, 72 bp, Homo sapiens
taaatattatgaggttgtatgtaaagaaagggcaaacgtacagcagaaggggagcaaatagctacctttcaa

SEQ ID NO: 24635 - DNA, 70 bp, Homo sapiens
atgaggttgtatgtaaagaaagggcaaacgtacagcagaaggggagcaaatagctacctttcaaggattt

SEQ ID NO: 24636 - DNA, 71 bp, Homo sapiens
atgtaaagaaagggcaaacgtacagcagaaggggagcaaatagctacctttcaaggattttgagatttgaa

SEQ ID NO: 24637 - DNA, 69 bp, Homo sapiens
cagaaggggagcaaatagctacctttcaaggattttgagatttgaaggttaaggaatttttactgctat

SEQ ID NO: 24638 - DNA, 68 bp, Homo sapiens
gggagcaaatagctacctttcaaggattttgagatttgaaggttaaggaatttttactgctatttttg

SEQ ID NO: 24639 - DNA, 70 bp, Homo sapiens
gctacctttcaaggattttgagatttgaaggttaaggaatttttactgctatttttgttcatcagtttca

SEQ ID NO: 24640 - DNA, 72 bp, Homo sapiens
caaggattttgagatttgaaggttaaggaatttttactgctatttttgttcatcagtttcatgtctgttatg

SEQ ID NO: 24641 - DNA, 73 bp, Homo sapiens
gagatttgaaggttaaggaatttttactgctatttttgttcatcagtttcatgtctgttatgttttgagatcc

SEQ ID NO: 24642 - DNA, 74 bp, Homo sapiens
ttaaggaatttttactgctatttttgttcatcagtttcatgtctgttatgttttgagatcctcagaggcctagg

SEQ ID NO: 24643 - DNA, 76 bp, Homo sapiens
ttttactgctatttttgttcatcagtttcatgtctgttatgttttgagatcctcagaggcctagggttagcgtata

SEQ ID NO: 24644 - DNA, 77 bp, Homo sapiens
atcagtttcatgtctgttatgttttgagatcctcagaggcctagggttagcgtataccaagaatcctggtgagaggc

SEQ ID NO: 24645 - DNA, 76 bp, Homo sapiens
ctgttatgttttgagatcctcagaggcctagggttagcgtataccaagaatcctggtgagaggcgttgccatgcct

SEQ ID NO: 24646 - DNA, 75 bp, Homo sapiens
atgttttgagatcctcagaggcctagggttagcgtataccaagaatcctggtgagaggcgttgccatgccttggg

SEQ ID NO: 24647 - DNA, 74 bp, Homo sapiens
atcctcagaggcctagggttagcgtataccaagaatcctggtgagaggcgttgccatgccttggggtgaattct

SEQ ID NO: 24648 - DNA, 72 bp, Homo sapiens
cctagggttagcgtataccaagaatcctggtgagaggcgttgccatgccttggggtgaattcttccccacta

SEQ ID NO: 24649 - DNA, 77 bp, Homo sapiens
agaggcgttgccatgccttggggtgaattcttccccactagctctctcacccagcctacaagtccttctctcataga

SEQ ID NO: 24650 - DNA, 78 bp, Homo sapiens
atgccttggggtgaattcttccccactagctctctcacccagcctacaagtccttctctcatagatcccagagcaatg

SEQ ID NO: 24651 - DNA, 79 bp, Homo sapiens
gtgaattcttccccactagctctctcacccagcctacaagtccttctctcatagatcccagagcaatgggcaccgtcca

SEQ ID NO: 24652 - DNA, 78 bp, Homo sapiens
ttccccactagctctctcacccagcctacaagtccttctctcatagatcccagagcaatgggcaccgtccaggaggta

SEQ ID NO: 24653 - DNA, 78 bp, Homo sapiens
tctctcacccagcctacaagtccttctctcatagatcccagagcaatgggcaccgtccaggaggtacaggagaggact

SEQ ID NO: 24654 - DNA, 78 bp, Homo sapiens
acaagtccttctctcatagatcccagagcaatgggcaccgtccaggaggtacaggagaggactttatgatgcaggaaa

SEQ ID NO: 24655 - DNA, 78 bp, Homo sapiens
ctctcatagatcccagagcaatgggcaccgtccaggaggtacaggagaggactttatgatgcaggaaagaaggaagaa

SEQ ID NO: 24656 - DNA, 73 bp, Homo sapiens
agagcaatgggcaccgtccaggaggtacaggagaggactttatgatgcaggaaagaaggaagaagtgggtccc

SEQ ID NO: 24657 - DNA, 73 bp, Homo sapiens
atgggcaccgtccaggaggtacaggagaggactttatgatgcaggaaagaaggaagaagtgggtcccttgcaa

SEQ ID NO: 24658 - DNA, 74 bp, Homo sapiens
gaggtacaggagaggactttatgatgcaggaaagaaggaagaagtgggtcccttgcaagtggccagacagggaa

SEQ ID NO: 24659 - DNA, 75 bp, Homo sapiens
agaggactttatgatgcaggaaagaaggaagaagtgggtcccttgcaagtggccagacagggaatgatggtttga

SEQ ID NO: 24660 - DNA, 74 bp, Homo sapiens
aaagaaggaagaagtgggtcccttgcaagtggccagacagggaatgatggtttgactccagaaatcaggaatca

SEQ ID NO: 24661 - DNA, 75 bp, Homo sapiens
aggaagaagtgggtcccttgcaagtggccagacagggaatgatggtttgactccagaaatcaggaatcaggttca

SEQ ID NO: 24662 - DNA, 75 bp, Homo sapiens
tcccttgcaagtggccagacagggaatgatggtttgactccagaaatcaggaatcaggttcaggtttggataact

SEQ ID NO: 24663 - DNA, 74 bp, Homo sapiens
tggccagacagggaatgatggtttgactccagaaatcaggaatcaggttcaggtttggataacttctctttaaa

SEQ ID NO: 24664 - DNA, 72 bp, Homo sapiens
acagggaatgatggtttgactccagaaatcaggaatcaggttcaggtttggataacttctctttaaaatatc

SEQ ID NO: 24665 - DNA, 74 bp, Homo sapiens
tttgactccagaaatcaggaatcaggttcaggtttggataacttctctttaaaatatctccacattgagactct

SEQ ID NO: 24666 - DNA, 72 bp, Homo sapiens
ccagaaatcaggaatcaggttcaggtttggataacttctctttaaaatatctccacattgagactcttattt

SEQ ID NO: 24667 - DNA, 70 bp, Homo sapiens
gttcaggtttggataacttctctttaaaatatctccacattgagactcttattttaacaaaatccaaaca

SEQ ID NO: 24668 - DNA, 68 bp, Homo sapiens
acttctctttaaaatatctccacattgagactcttattttaacaaaatccaaacaaaattaactcagg

SEQ ID NO: 24669 - DNA, 70 bp, Homo sapiens
aaaatatctccacattgagactcttattttaacaaaatccaaacaaaattaactcagggcttgtgaccta

SEQ ID NO: 24670 - DNA, 69 bp, Homo sapiens
tctccacattgagactcttattttaacaaaatccaaacaaaattaactcagggcttgtgacctaacctt

SEQ ID NO: 24671 - DNA, 70 bp, Homo sapiens
taacaaaatccaaacaaaattaactcagggcttgtgacctaacctttgtaagaaggtgatcaaagagatc

SEQ ID NO: 24672 - DNA, 71 bp, Homo sapiens
caaacaaaattaactcagggcttgtgacctaacctttgtaagaaggtgatcaaagagatcctacattaata

SEQ ID NO: 24673 - DNA, 73 bp, Homo sapiens
aaattaactcagggcttgtgacctaacctttgtaagaaggtgatcaaagagatcctacattaataagcactgc

SEQ ID NO: 24674 - DNA, 74 bp, Homo sapiens
ctaacctttgtaagaaggtgatcaaagagatcctacattaataagcactgcctgtagcaccagctttgtctttt

SEQ ID NO: 24675 - DNA, 76 bp, Homo sapiens
tgtaagaaggtgatcaaagagatcctacattaataagcactgcctgtagcaccagctttgtctttttgtcttttgt

SEQ ID NO: 24676 - DNA, 74 bp, Homo sapiens
atcaaagagatcctacattaataagcactgcctgtagcaccagctttgtctttttgtcttttgttgtttctttc

SEQ ID NO: 24677 - DNA, 75 bp, Homo sapiens
taagcactgcctgtagcaccagctttgtctttttgtcttttgttgtttctttcctgaaccaccctgtacatcata

SEQ ID NO: 24678 - DNA, 74 bp, Homo sapiens
tgtagcaccagctttgtctttttgtcttttgttgtttctttcctgaaccaccctgtacatcatagccaggtcta

SEQ ID NO: 24679 - DNA, 69 bp, Homo sapiens
ctttgtctttttgtcttttgttgtttctttcctgaaccaccctgtacatcatagccaggtctaccccaa

SEQ ID NO: 24680 - DNA, 76 bp, Homo sapiens
tttgtcttttgttgtttctttcctgaaccaccctgtacatcatagccaggtctaccccaaatagagcagcagctga

SEQ ID NO: 24681 - DNA, 78 bp, Homo sapiens
tttgttgtttctttcctgaaccaccctgtacatcatagccaggtctaccccaaatagagcagcagctgatggcttctc

SEQ ID NO: 24682 - DNA, 82 bp, Homo sapiens
accaccctgtacatcatagccaggtctaccccaaatagagcagcagctgatggcttctctgctgtctgtggagggagggctc

SEQ ID NO: 24683 - DNA, 85 bp, Homo sapiens
atcatagccaggtctaccccaaatagagcagcagctgatggcttctctgctgtctgtggagggagggctcggctgcagacctatg

SEQ ID NO: 24684 - DNA, 84 bp, Homo sapiens
tctaccccaaatagagcagcagctgatggcttctctgctgtctgtggagggagggctcggctgcagacctatggtgttttgtca

SEQ ID NO: 24685 - DNA, 83 bp, Homo sapiens
agctgatggcttctctgctgtctgtggagggagggctcggctgcagacctatggtgttttgtcagctgttaggtgctacagcc

SEQ ID NO: 24686 - DNA, 82 bp, Homo sapiens
tctctgctgtctgtggagggagggctcggctgcagacctatggtgttttgtcagctgttaggtgctacagcccacccagtca

SEQ ID NO: 24687 - DNA, 79 bp, Homo sapiens
ctgtggagggagggctcggctgcagacctatggtgttttgtcagctgttaggtgctacagcccacccagtcagagtaca

SEQ ID NO: 24688 - DNA, 80 bp, Homo sapiens
gggagggctcggctgcagacctatggtgttttgtcagctgttaggtgctacagcccacccagtcagagtacatagacata

SEQ ID NO: 24689 - DNA, 76 bp, Homo sapiens
atggtgttttgtcagctgttaggtgctacagcccacccagtcagagtacatagacatagcgctttaagggacaaag

SEQ ID NO: 24690 - DNA, 76 bp, Homo sapiens
ttttgtcagctgttaggtgctacagcccacccagtcagagtacatagacatagcgctttaagggacaaaggacaaa

SEQ ID NO: 24691 - DNA, 75 bp, Homo sapiens
tacagcccacccagtcagagtacatagacatagcgctttaagggacaaaggacaaacagaactatctttgctttc

SEQ ID NO: 24692 - DNA, 74 bp, Homo sapiens
tcagagtacatagacatagcgctttaagggacaaaggacaaacagaactatctttgctttccggaggccatctt

SEQ ID NO: 24693 - DNA, 70 bp, Homo sapiens
atagacatagcgctttaagggacaaaggacaaacagaactatctttgctttccggaggccatctttttct

SEQ ID NO: 24694 - DNA, 68 bp, Homo sapiens
tagcgctttaagggacaaaggacaaacagaactatctttgctttccggaggccatctttttctttcct

SEQ ID NO: 24695 - DNA, 69 bp, Homo sapiens
caaaggacaaacagaactatctttgctttccggaggccatctttttctttccttgaatcctttctgctt

SEQ ID NO: 24696 - DNA, 67 bp, Homo sapiens
aaacagaactatctttgctttccggaggccatctttttctttccttgaatcctttctgctttaaact

SEQ ID NO: 24697 - DNA, 72 bp, Homo sapiens
ctttttctttccttgaatcctttctgctttaaacttctgaggtttatgcatcccagagaggtcacaccaagc

SEQ ID NO: 24698 - DNA, 74 bp, Homo sapiens
tttccttgaatcctttctgctttaaacttctgaggtttatgcatcccagagaggtcacaccaagccaaagagaa

SEQ ID NO: 24699 - DNA, 71 bp, Homo sapiens
aatcctttctgctttaaacttctgaggtttatgcatcccagagaggtcacaccaagccaaagagaaaaaat

SEQ ID NO: 24700 - DNA, 74 bp, Homo sapiens
tttaaacttctgaggtttatgcatcccagagaggtcacaccaagccaaagagaaaaaattcatagattgtccca

SEQ ID NO: 24701 - DNA, 73 bp, Homo sapiens
aggtttatgcatcccagagaggtcacaccaagccaaagagaaaaaattcatagattgtcccagcctacccaaa

SEQ ID NO: 24702 - DNA, 69 bp, Homo sapiens
gccaaagagaaaaaattcatagattgtcccagcctacccaaagggcctgaaaagcctctctaaacaaaa

SEQ ID NO: 24703 - DNA, 74 bp, Homo sapiens
ttcatagattgtcccagcctacccaaagggcctgaaaagcctctctaaacaaaactcaagatagctgagaagta

SEQ ID NO: 24704 - DNA, 72 bp, Homo sapiens
gtcccagcctacccaaagggcctgaaaagcctctctaaacaaaactcaagatagctgagaagtatgaatggg

SEQ ID NO: 24705 - DNA, 73 bp, Homo sapiens
aaagggcctgaaaagcctctctaaacaaaactcaagatagctgagaagtatgaatggggttcacagcaaagtc

SEQ ID NO: 24706 - DNA, 75 bp, Homo sapiens
aaagcctctctaaacaaaactcaagatagctgagaagtatgaatggggttcacagcaaagtccaattgatggctt

SEQ ID NO: 24707 - DNA, 78 bp, Homo sapiens
tctctaaacaaaactcaagatagctgagaagtatgaatggggttcacagcaaagtccaattgatggcttttgaggctg

SEQ ID NO: 24708 - DNA, 76 bp, Homo sapiens
aaaactcaagatagctgagaagtatgaatggggttcacagcaaagtccaattgatggcttttgaggctgggacacc

SEQ ID NO: 24709 - DNA, 76 bp, Homo sapiens
atagctgagaagtatgaatggggttcacagcaaagtccaattgatggcttttgaggctgggacacccccaaactgc

SEQ ID NO: 24710 - DNA, 73 bp, Homo sapiens
tatgaatggggttcacagcaaagtccaattgatggcttttgaggctgggacacccccaaactgcccttctgtt

SEQ ID NO: 24711 - DNA, 71 bp, Homo sapiens
ttcacagcaaagtccaattgatggcttttgaggctgggacacccccaaactgcccttctgtttttgtagtt

SEQ ID NO: 24712 - DNA, 68 bp, Homo sapiens
aaagtccaattgatggcttttgaggctgggacacccccaaactgcccttctgtttttgtagttttgct

SEQ ID NO: 24713 - DNA, 69 bp, Homo sapiens
ccccaaactgcccttctgtttttgtagttttgctttcttccacccaccctctctccgcatgctgtaagt

SEQ ID NO: 24714 - DNA, 71 bp, Homo sapiens
ttttgctttcttccacccaccctctctccgcatgctgtaagttaggggagttagtatcttgaacttctaaa

SEQ ID NO: 24715 - DNA, 72 bp, Homo sapiens
cacccaccctctctccgcatgctgtaagttaggggagttagtatcttgaacttctaaatgcaaaaggagatt

SEQ ID NO: 24716 - DNA, 73 bp, Homo sapiens
ctctctccgcatgctgtaagttaggggagttagtatcttgaacttctaaatgcaaaaggagattttataataa

SEQ ID NO: 24717 - DNA, 74 bp, Homo sapiens
catgctgtaagttaggggagttagtatcttgaacttctaaatgcaaaaggagattttataataagccatgctac

SEQ ID NO: 24718 - DNA, 74 bp, Homo sapiens
gttagtatcttgaacttctaaatgcaaaaggagattttataataagccatgctacctgtaaatacattattgag

SEQ ID NO: 24719 - DNA, 74 bp, Homo sapiens
ttgaacttctaaatgcaaaaggagattttataataagccatgctacctgtaaatacattattgaggtttgcatt

SEQ ID NO: 24720 - DNA, 71 bp, Homo sapiens
aaatgcaaaaggagattttataataagccatgctacctgtaaatacattattgaggtttgcatttttattt

SEQ ID NO: 24721 - DNA, 73 bp, Homo sapiens
ggagattttataataagccatgctacctgtaaatacattattgaggtttgcatttttatttttggaggtatga

SEQ ID NO: 24722 - DNA, 73 bp, Homo sapiens
agccatgctacctgtaaatacattattgaggtttgcatttttatttttggaggtatgaaagagttgagtagac

SEQ ID NO: 24723 - DNA, 71 bp, Homo sapiens
gctacctgtaaatacattattgaggtttgcatttttatttttggaggtatgaaagagttgagtagaccaag

SEQ ID NO: 24724 - DNA, 71 bp, Homo sapiens
cattattgaggtttgcatttttatttttggaggtatgaaagagttgagtagaccaagtcaaaagaggtgtg

SEQ ID NO: 24725 - DNA, 69 bp, Homo sapiens
gtttgcatttttatttttggaggtatgaaagagttgagtagaccaagtcaaaagaggtgtggggattta

SEQ ID NO: 24726 - DNA, 68 bp, Homo sapiens
tttatttttggaggtatgaaagagttgagtagaccaagtcaaaagaggtgtggggatttatgtttatt

SEQ ID NO: 24727 - DNA, 65 bp, Homo sapiens
gtttatttttatttgtttggggttgtttggttggtggctgggtttcttgtaacagacctattctg

SEQ ID NO: 24728 - DNA, 68 bp, Homo sapiens
tttatttgtttggggttgtttggttggtggctgggtttcttgtaacagacctattctggaatagcaaa

SEQ ID NO: 24729 - DNA, 69 bp, Homo sapiens
ggttgtttggttggtggctgggtttcttgtaacagacctattctggaatagcaaagaaggataccttgg

SEQ ID NO: 24730 - DNA, 77 bp, Homo sapiens
ttgtaacagacctattctggaatagcaaagaaggataccttggtgatctgcaatgtttctgaatctgtttctcttta

SEQ ID NO: 24731 - DNA, 76 bp, Homo sapiens
acctattctggaatagcaaagaaggataccttggtgatctgcaatgtttctgaatctgtttctctttaggaagtga

SEQ ID NO: 24732 - DNA, 78 bp, Homo sapiens
tagcaaagaaggataccttggtgatctgcaatgtttctgaatctgtttctctttaggaagtgattgccatcaaattta

SEQ ID NO: 24733 - DNA, 80 bp, Homo sapiens
gataccttggtgatctgcaatgtttctgaatctgtttctctttaggaagtgattgccatcaaatttagtgatatgatatt

SEQ ID NO: 24734 - DNA, 82 bp, Homo sapiens
ttggtgatctgcaatgtttctgaatctgtttctctttaggaagtgattgccatcaaatttagtgatatgatatttgagtcaa

SEQ ID NO: 24735 - DNA, 77 bp, Homo sapiens
gtttctgaatctgtttctctttaggaagtgattgccatcaaatttagtgatatgatatttgagtcaaaaatctgagg

SEQ ID NO: 24736 - DNA, 76 bp, Homo sapiens
ctgtttctctttaggaagtgattgccatcaaatttagtgatatgatatttgagtcaaaaatctgaggttatagtac

SEQ ID NO: 24737 - DNA, 78 bp, Homo sapiens
aagtgattgccatcaaatttagtgatatgatatttgagtcaaaaatctgaggttatagtaccagctgtcttttctctc

SEQ ID NO: 24738 - DNA, 74 bp, Homo sapiens
tatgatatttgagtcaaaaatctgaggttatagtaccagctgtcttttctctctggtctcctttttgtcgtctt

SEQ ID NO: 24739 - DNA, 73 bp, Homo sapiens
tatttgagtcaaaaatctgaggttatagtaccagctgtcttttctctctggtctcctttttgtcgtctttctc

SEQ ID NO: 24740 - DNA, 73 bp, Homo sapiens
ttatagtaccagctgtcttttctctctggtctcctttttgtcgtctttctctttctgtctaaattggcctctg

SEQ ID NO: 24741 - DNA, 71 bp, Homo sapiens
tgtcttttctctctggtctcctttttgtcgtctttctctttctgtctaaattggcctctgtcttttcctaa

SEQ ID NO: 24742 - DNA, 70 bp, Homo sapiens
tctctggtctcctttttgtcgtctttctctttctgtctaaattggcctctgtcttttcctaaggacttaa

SEQ ID NO: 24743 - DNA, 68 bp, Homo sapiens
gtctcctttttgtcgtctttctctttctgtctaaattggcctctgtcttttcctaaggacttaaaata

SEQ ID NO: 24744 - DNA, 67 bp, Homo sapiens
gtcgtctttctctttctgtctaaattggcctctgtcttttcctaaggacttaaaatataacccaaat

SEQ ID NO: 24745 - DNA, 69 bp, Homo sapiens
tctgtctaaattggcctctgtcttttcctaaggacttaaaatataacccaaattaatgaagaactgccc

SEQ ID NO: 24746 - DNA, 66 bp, Homo sapiens
attggcctctgtcttttcctaaggacttaaaatataacccaaattaatgaagaactgccccaaaac

SEQ ID NO: 24747 - DNA, 68 bp, Homo sapiens
ctctgtcttttcctaaggacttaaaatataacccaaattaatgaagaactgccccaaaacttcagtga

SEQ ID NO: 24748 - DNA, 68 bp, Homo sapiens
tcctaaggacttaaaatataacccaaattaatgaagaactgccccaaaacttcagtgaaagccaagga

SEQ ID NO: 24749 - DNA, 67 bp, Homo sapiens
aatataacccaaattaatgaagaactgccccaaaacttcagtgaaagccaaggaggtacagaatttt

SEQ ID NO: 24750 - DNA, 69 bp, Homo sapiens
aattaatgaagaactgccccaaaacttcagtgaaagccaaggaggtacagaattttttcaggacatctt

SEQ ID NO: 24751 - DNA, 69 bp, Homo sapiens
agaactgccccaaaacttcagtgaaagccaaggaggtacagaattttttcaggacatctttaaccaata

SEQ ID NO: 24752 - DNA, 67 bp, Homo sapiens
cccaaaacttcagtgaaagccaaggaggtacagaattttttcaggacatctttaaccaatacaaaat

SEQ ID NO: 24753 - DNA, 70 bp, Homo sapiens
cagtgaaagccaaggaggtacagaattttttcaggacatctttaaccaatacaaaatttatgtcttaaga

SEQ ID NO: 24754 - DNA, 69 bp, Homo sapiens
gccaaggaggtacagaattttttcaggacatctttaaccaatacaaaatttatgtcttaagaagataat

SEQ ID NO: 24755 - DNA, 68 bp, Homo sapiens
cagaattttttcaggacatctttaaccaatacaaaatttatgtcttaagaagataatttttacaatag

SEQ ID NO: 24756 - DNA, 73 bp, Homo sapiens
tcaggacatctttaaccaatacaaaatttatgtcttaagaagataatttttacaatagtgtagtaatctgata

SEQ ID NO: 24757 - DNA, 71 bp, Homo sapiens
aaatttatgtcttaagaagataatttttacaatagtgtagtaatctgataaatgaaaactattggaagtca

SEQ ID NO: 24758 - DNA, 71 bp, Homo sapiens
tgtcttaagaagataatttttacaatagtgtagtaatctgataaatgaaaactattggaagtcaatagttt

SEQ ID NO: 24759 - DNA, 74 bp, Homo sapiens
caatagtgtagtaatctgataaatgaaaactattggaagtcaatagttttttatattccagctttctgtattca

SEQ ID NO: 24760 - DNA, 73 bp, Homo sapiens
taatctgataaatgaaaactattggaagtcaatagttttttatattccagctttctgtattcaaacttgtgcc

SEQ ID NO: 24761 - DNA, 76 bp, Homo sapiens
aactattggaagtcaatagttttttatattccagctttctgtattcaaacttgtgccttcagcaagcatctcttca

SEQ ID NO: 24762 - DNA, 75 bp, Homo sapiens
agtcaatagttttttatattccagctttctgtattcaaacttgtgccttcagcaagcatctcttcactttctttc

SEQ ID NO: 24763 - DNA, 75 bp, Homo sapiens
tttttatattccagctttctgtattcaaacttgtgccttcagcaagcatctcttcactttctttcccttgtcaat

SEQ ID NO: 24764 - DNA, 79 bp, Homo sapiens
gccttcagcaagcatctcttcactttctttcccttgtcaattgaaacatgaatgtttggctaactcatgatgtaaagtg

SEQ ID NO: 24765 - DNA, 77 bp, Homo sapiens
agcatctcttcactttctttcccttgtcaattgaaacatgaatgtttggctaactcatgatgtaaagtgtctgttaa

SEQ ID NO: 24766 - DNA, 75 bp, Homo sapiens
ctttcccttgtcaattgaaacatgaatgtttggctaactcatgatgtaaagtgtctgttaagttaataatacata

SEQ ID NO: 24767 - DNA, 75 bp, Homo sapiens
caattgaaacatgaatgtttggctaactcatgatgtaaagtgtctgttaagttaataatacataatttaaagcac

SEQ ID NO: 24768 - DNA, 75 bp, Homo sapiens
gaatgtttggctaactcatgatgtaaagtgtctgttaagttaataatacataatttaaagcacttagtctccaca

SEQ ID NO: 24769 - DNA, 75 bp, Homo sapiens
ttggctaactcatgatgtaaagtgtctgttaagttaataatacataatttaaagcacttagtctccacaaagcaa

SEQ ID NO: 24770 - DNA, 73 bp, Homo sapiens
catgatgtaaagtgtctgttaagttaataatacataatttaaagcacttagtctccacaaagcaatttagaaa

SEQ ID NO: 24771 - DNA, 71 bp, Homo sapiens
gtgtctgttaagttaataatacataatttaaagcacttagtctccacaaagcaatttagaaaaatcttcac

SEQ ID NO: 24772 - DNA, 73 bp, Homo sapiens
aataatacataatttaaagcacttagtctccacaaagcaatttagaaaaatcttcacttgttagatcccatga

SEQ ID NO: 24773 - DNA, 72 bp, Homo sapiens
cataatttaaagcacttagtctccacaaagcaatttagaaaaatcttcacttgttagatcccatgaagtacc

SEQ ID NO: 24774 - DNA, 75 bp, Homo sapiens
agcacttagtctccacaaagcaatttagaaaaatcttcacttgttagatcccatgaagtacctatgaaattctca

SEQ ID NO: 24775 - DNA, 78 bp, Homo sapiens
cacaaagcaatttagaaaaatcttcacttgttagatcccatgaagtacctatgaaattctcagcattgctataagcat

SEQ ID NO: 24776 - DNA, 78 bp, Homo sapiens
gcaatttagaaaaatcttcacttgttagatcccatgaagtacctatgaaattctcagcattgctataagcatttgatt

SEQ ID NO: 24777 - DNA, 74 bp, Homo sapiens
aaaaatcttcacttgttagatcccatgaagtacctatgaaattctcagcattgctataagcatttgattttttt

SEQ ID NO: 24778 - DNA, 73 bp, Homo sapiens
gttagatcccatgaagtacctatgaaattctcagcattgctataagcatttgattttttttaaggaaacttcc

SEQ ID NO: 24779 - DNA, 72 bp, Homo sapiens
cccatgaagtacctatgaaattctcagcattgctataagcatttgattttttttaaggaaacttcctgttta

SEQ ID NO: 24780 - DNA, 68 bp, Homo sapiens
gattttttttaaggaaacttcctgtttaatggaatctgaatccaagatttgctttaatttcactctat

SEQ ID NO: 24781 - DNA, 70 bp, Homo sapiens
tttaaggaaacttcctgtttaatggaatctgaatccaagatttgctttaatttcactctattcttcccat

SEQ ID NO: 24782 - DNA, 69 bp, Homo sapiens
aacttcctgtttaatggaatctgaatccaagatttgctttaatttcactctattcttcccattttccct

SEQ ID NO: 24783 - DNA, 72 bp, Homo sapiens
ggaatctgaatccaagatttgctttaatttcactctattcttcccattttcccttattcttcttgttgtctc

SEQ ID NO: 24784 - DNA, 72 bp, Homo sapiens
ctgaatccaagatttgctttaatttcactctattcttcccattttcccttattcttcttgttgtctctctaa

SEQ ID NO: 24785 - DNA, 69 bp, Homo sapiens
gatttgctttaatttcactctattcttcccattttcccttattcttcttgttgtctctctaattaaaaa

SEQ ID NO: 24786 - DNA, 65 bp, Homo sapiens
aaaaaaaacctaggcttttttttttctatccagaaagttgggttttcatgatctgagcttcctta

SEQ ID NO: 24787 - DNA, 68 bp, Homo sapiens
aaacctaggcttttttttttctatccagaaagttgggttttcatgatctgagcttccttatgtctcct

SEQ ID NO: 24788 - DNA, 73 bp, Homo sapiens
tttttctatccagaaagttgggttttcatgatctgagcttccttatgtctccttctctttgtgcaaacttaaa

SEQ ID NO: 24789 - DNA, 76 bp, Homo sapiens
tatccagaaagttgggttttcatgatctgagcttccttatgtctccttctctttgtgcaaacttaaaccagtcata

SEQ ID NO: 24790 - DNA, 76 bp, Homo sapiens
agttgggttttcatgatctgagcttccttatgtctccttctctttgtgcaaacttaaaccagtcatagattgtcac

SEQ ID NO: 24791 - DNA, 78 bp, Homo sapiens
atctgagcttccttatgtctccttctctttgtgcaaacttaaaccagtcatagattgtcacccagacatattctccaa

SEQ ID NO: 24792 - DNA, 78 bp, Homo sapiens
tccttctctttgtgcaaacttaaaccagtcatagattgtcacccagacatattctccaacccagcattggaaatctga

SEQ ID NO: 24793 - DNA, 77 bp, Homo sapiens
tgtgcaaacttaaaccagtcatagattgtcacccagacatattctccaacccagcattggaaatctgaacgaatctt

SEQ ID NO: 24794 - DNA, 75 bp, Homo sapiens
ttaaaccagtcatagattgtcacccagacatattctccaacccagcattggaaatctgaacgaatcttttctctt

SEQ ID NO: 24795 - DNA, 75 bp, Homo sapiens
atagattgtcacccagacatattctccaacccagcattggaaatctgaacgaatcttttctctttttgtcctaca

SEQ ID NO: 24796 - DNA, 75 bp, Homo sapiens
acatattctccaacccagcattggaaatctgaacgaatcttttctctttttgtcctacaagtttgtcagagatga

SEQ ID NO: 24797 - DNA, 75 bp, Homo sapiens
ttctccaacccagcattggaaatctgaacgaatcttttctctttttgtcctacaagtttgtcagagatgagaatg

SEQ ID NO: 24798 - DNA, 79 bp, Homo sapiens
cagcattggaaatctgaacgaatcttttctctttttgtcctacaagtttgtcagagatgagaatggattgctgtctaca

SEQ ID NO: 24799 - DNA, 76 bp, Homo sapiens
attggaaatctgaacgaatcttttctctttttgtcctacaagtttgtcagagatgagaatggattgctgtctacat

SEQ ID NO: 24800 - DNA, 77 bp, Homo sapiens
aaatctgaacgaatcttttctctttttgtcctacaagtttgtcagagatgagaatggattgctgtctacattctaca

SEQ ID NO: 24801 - DNA, 76 bp, Homo sapiens
aacgaatcttttctctttttgtcctacaagtttgtcagagatgagaatggattgctgtctacattctacaaccaga

SEQ ID NO: 24802 - DNA, 76 bp, Homo sapiens
tttctctttttgtcctacaagtttgtcagagatgagaatggattgctgtctacattctacaaccagaccctagact

SEQ ID NO: 24803 - DNA, 77 bp, Homo sapiens
tctttttgtcctacaagtttgtcagagatgagaatggattgctgtctacattctacaaccagaccctagactttata

SEQ ID NO: 24804 - DNA, 76 bp, Homo sapiens
tttttgtcctacaagtttgtcagagatgagaatggattgctgtctacattctacaaccagaccctagactttatac

SEQ ID NO: 24805 - DNA, 78 bp, Homo sapiens
agatgagaatggattgctgtctacattctacaaccagaccctagactttataccaggctgtgccacttcctcttcact

SEQ ID NO: 24806 - DNA, 78 bp, Homo sapiens
tgtctacattctacaaccagaccctagactttataccaggctgtgccacttcctcttcacttcactcagaggatggcc

SEQ ID NO: 24807 - DNA, 75 bp, Homo sapiens
tctacaaccagaccctagactttataccaggctgtgccacttcctcttcacttcactcagaggatggccccaaaa

SEQ ID NO: 24808 - DNA, 74 bp, Homo sapiens
tttataccaggctgtgccacttcctcttcacttcactcagaggatggccccaaaactgaaaaggaaatgaaata

SEQ ID NO: 24809 - DNA, 74 bp, Homo sapiens
tgccacttcctcttcacttcactcagaggatggccccaaaactgaaaaggaaatgaaataatcaaatataccaa

SEQ ID NO: 24810 - DNA, 72 bp, Homo sapiens
tcttcacttcactcagaggatggccccaaaactgaaaaggaaatgaaataatcaaatataccaaatccgaat

SEQ ID NO: 24811 - DNA, 70 bp, Homo sapiens
cactcagaggatggccccaaaactgaaaaggaaatgaaataatcaaatataccaaatccgaatttgactt

SEQ ID NO: 24812 - DNA, 71 bp, Homo sapiens
ctgaaaaggaaatgaaataatcaaatataccaaatccgaatttgactttatttgatgactcaatattttcc

SEQ ID NO: 24813 - DNA, 70 bp, Homo sapiens
tcaaatataccaaatccgaatttgactttatttgatgactcaatattttccttccagtactctaattttt

SEQ ID NO: 24814 - DNA, 67 bp, Homo sapiens
ataccaaatccgaatttgactttatttgatgactcaatattttccttccagtactctaatttttttt

SEQ ID NO: 24815 - DNA, 70 bp, Homo sapiens
ccgaatttgactttatttgatgactcaatattttccttccagtactctaatttttttttatggcaatggc

SEQ ID NO: 24816 - DNA, 71 bp, Homo sapiens
caatattttccttccagtactctaatttttttttatggcaatggcctatatggcacaagaaccaccactta

SEQ ID NO: 24817 - DNA, 72 bp, Homo sapiens
ctctaatttttttttatggcaatggcctatatggcacaagaaccaccacttaaagcaaatctgttgaacatt

SEQ ID NO: 24818 - DNA, 73 bp, Homo sapiens
tttttatggcaatggcctatatggcacaagaaccaccacttaaagcaaatctgttgaacatttttataaggga

SEQ ID NO: 24819 - DNA, 74 bp, Homo sapiens
ctatatggcacaagaaccaccacttaaagcaaatctgttgaacatttttataagggatgagcaagaaaaacaca

SEQ ID NO: 24820 - DNA, 71 bp, Homo sapiens
taaagcaaatctgttgaacatttttataagggatgagcaagaaaaacacactccaaaattttaaagtgcca

SEQ ID NO: 24821 - DNA, 71 bp, Homo sapiens
tctgttgaacatttttataagggatgagcaagaaaaacacactccaaaattttaaagtgccattaatcaat

SEQ ID NO: 24822 - DNA, 67 bp, Homo sapiens
aacatttttataagggatgagcaagaaaaacacactccaaaattttaaagtgccattaatcaatttt

SEQ ID NO: 24823 - DNA, 67 bp, Homo sapiens
agggatgagcaagaaaaacacactccaaaattttaaagtgccattaatcaatttttaagaataaagg

SEQ ID NO: 24824 - DNA, 68 bp, Homo sapiens
gcaagaaaaacacactccaaaattttaaagtgccattaatcaatttttaagaataaaggtaatatgaa

SEQ ID NO: 24825 - DNA, 69 bp, Homo sapiens
cacactccaaaattttaaagtgccattaatcaatttttaagaataaaggtaatatgaaatgagggctaa

SEQ ID NO: 24826 - DNA, 72 bp, Homo sapiens
taaagtgccattaatcaatttttaagaataaaggtaatatgaaatgagggctaaacaatgtaatataactgc

SEQ ID NO: 24827 - DNA, 72 bp, Homo sapiens
gccattaatcaatttttaagaataaaggtaatatgaaatgagggctaaacaatgtaatataactgccagtta

SEQ ID NO: 24828 - DNA, 71 bp, Homo sapiens
tttaagaataaaggtaatatgaaatgagggctaaacaatgtaatataactgccagttaaggtagacagtag

SEQ ID NO: 24829 - DNA, 74 bp, Homo sapiens
tgaaatgagggctaaacaatgtaatataactgccagttaaggtagacagtagttgtggtcttagttacatttga

SEQ ID NO: 24830 - DNA, 74 bp, Homo sapiens
gctaaacaatgtaatataactgccagttaaggtagacagtagttgtggtcttagttacatttgatatggagttg

SEQ ID NO: 24831 - DNA, 75 bp, Homo sapiens
caatgtaatataactgccagttaaggtagacagtagttgtggtcttagttacatttgatatggagttgtgtaata

SEQ ID NO: 24832 - DNA, 76 bp, Homo sapiens
taactgccagttaaggtagacagtagttgtggtcttagttacatttgatatggagttgtgtaatattaagcagatc

SEQ ID NO: 24833 - DNA, 76 bp, Homo sapiens
gtagacagtagttgtggtcttagttacatttgatatggagttgtgtaatattaagcagatcccagtggagttagta

SEQ ID NO: 24834 - DNA, 73 bp, Homo sapiens
ggtcttagttacatttgatatggagttgtgtaatattaagcagatcccagtggagttagtaaaaacataggta

SEQ ID NO: 24835 - DNA, 74 bp, Homo sapiens
ttgatatggagttgtgtaatattaagcagatcccagtggagttagtaaaaacataggtattgagttttaatggc

SEQ ID NO: 24836 - DNA, 72 bp, Homo sapiens
gagttgtgtaatattaagcagatcccagtggagttagtaaaaacataggtattgagttttaatggctaccaa

SEQ ID NO: 24837 - DNA, 72 bp, Homo sapiens
ttaagcagatcccagtggagttagtaaaaacataggtattgagttttaatggctaccaattgggatatatac

SEQ ID NO: 24838 - DNA, 70 bp, Homo sapiens
atcccagtggagttagtaaaaacataggtattgagttttaatggctaccaattgggatatatacttagcc

SEQ ID NO: 24839 - DNA, 73 bp, Homo sapiens
aaaaacataggtattgagttttaatggctaccaattgggatatatacttagcctgcaggctgaactttagtca

SEQ ID NO: 24840 - DNA, 74 bp, Homo sapiens
gtattgagttttaatggctaccaattgggatatatacttagcctgcaggctgaactttagtcagtgtttttcta

SEQ ID NO: 24841 - DNA, 75 bp, Homo sapiens
ttaatggctaccaattgggatatatacttagcctgcaggctgaactttagtcagtgtttttctatcatgttgttt

SEQ ID NO: 24842 - DNA, 76 bp, Homo sapiens
tgggatatatacttagcctgcaggctgaactttagtcagtgtttttctatcatgttgttttgtgaacaagtcaaaa

SEQ ID NO: 24843 - DNA, 75 bp, Homo sapiens
tacttagcctgcaggctgaactttagtcagtgtttttctatcatgttgttttgtgaacaagtcaaaatttataca

SEQ ID NO: 24844 - DNA, 75 bp, Homo sapiens
gcctgcaggctgaactttagtcagtgtttttctatcatgttgttttgtgaacaagtcaaaatttatacaaagcta

SEQ ID NO: 24845 - DNA, 76 bp, Homo sapiens
tgtttttctatcatgttgttttgtgaacaagtcaaaatttatacaaagctaccctaagtgctgcaattgcagagga

SEQ ID NO: 24846 - DNA, 76 bp, Homo sapiens
tcatgttgttttgtgaacaagtcaaaatttatacaaagctaccctaagtgctgcaattgcagaggaacttgcctct

SEQ ID NO: 24847 - DNA, 77 bp, Homo sapiens
ttgtgaacaagtcaaaatttatacaaagctaccctaagtgctgcaattgcagaggaacttgcctcttcgtgatatta

SEQ ID NO: 24848 - DNA, 75 bp, Homo sapiens
acaagtcaaaatttatacaaagctaccctaagtgctgcaattgcagaggaacttgcctcttcgtgatattagagg

SEQ ID NO: 24849 - DNA, 77 bp, Homo sapiens
atttatacaaagctaccctaagtgctgcaattgcagaggaacttgcctcttcgtgatattagagggcagtccaactc

SEQ ID NO: 24850 - DNA, 79 bp, Homo sapiens
taccctaagtgctgcaattgcagaggaacttgcctcttcgtgatattagagggcagtccaactccgctcaaactgagtc

SEQ ID NO: 24851 - DNA, 79 bp, Homo sapiens
tgcaattgcagaggaacttgcctcttcgtgatattagagggcagtccaactccgctcaaactgagtccaagatttgaat

SEQ ID NO: 24852 - DNA, 77 bp, Homo sapiens
agaggaacttgcctcttcgtgatattagagggcagtccaactccgctcaaactgagtccaagatttgaattcatcca

SEQ ID NO: 24853 - DNA, 75 bp, Homo sapiens
atattagagggcagtccaactccgctcaaactgagtccaagatttgaattcatccagaaaaacaaatggaggaga

SEQ ID NO: 24854 - DNA, 73 bp, Homo sapiens
agagggcagtccaactccgctcaaactgagtccaagatttgaattcatccagaaaaacaaatggaggagaaaa

SEQ ID NO: 24855 - DNA, 74 bp, Homo sapiens
aactccgctcaaactgagtccaagatttgaattcatccagaaaaacaaatggaggagaaaagcctaatgcacca

SEQ ID NO: 24856 - DNA, 74 bp, Homo sapiens
aaactgagtccaagatttgaattcatccagaaaaacaaatggaggagaaaagcctaatgcaccacatgtgtttg

SEQ ID NO: 24857 - DNA, 77 bp, Homo sapiens
aagatttgaattcatccagaaaaacaaatggaggagaaaagcctaatgcaccacatgtgtttggcatttcatggctg

SEQ ID NO: 24858 - DNA, 75 bp, Homo sapiens
aaaaacaaatggaggagaaaagcctaatgcaccacatgtgtttggcatttcatggctgggacaatggagtagagg

SEQ ID NO: 24859 - DNA, 78 bp, Homo sapiens
ctaatgcaccacatgtgtttggcatttcatggctgggacaatggagtagagggtaggaagacaagctgtagaacaaaa

SEQ ID NO: 24860 - DNA, 76 bp, Homo sapiens
tttggcatttcatggctgggacaatggagtagagggtaggaagacaagctgtagaacaaaagcaaagtgaggtaga

SEQ ID NO: 24861 - DNA, 74 bp, Homo sapiens
ttcatggctgggacaatggagtagagggtaggaagacaagctgtagaacaaaagcaaagtgaggtagaaagtaa

SEQ ID NO: 24862 - DNA, 71 bp, Homo sapiens
aatggagtagagggtaggaagacaagctgtagaacaaaagcaaagtgaggtagaaagtaacaggtcccaga

SEQ ID NO: 24863 - DNA, 71 bp, Homo sapiens
agggtaggaagacaagctgtagaacaaaagcaaagtgaggtagaaagtaacaggtcccagacgaggacaga

SEQ ID NO: 24864 - DNA, 74 bp, Homo sapiens
acaagctgtagaacaaaagcaaagtgaggtagaaagtaacaggtcccagacgaggacagacttagagatgtgta

SEQ ID NO: 24865 - DNA, 71 bp, Homo sapiens
agaacaaaagcaaagtgaggtagaaagtaacaggtcccagacgaggacagacttagagatgtgtaaccttg

SEQ ID NO: 24866 - DNA, 70 bp, Homo sapiens
aaagtgaggtagaaagtaacaggtcccagacgaggacagacttagagatgtgtaaccttggatcctcttt

SEQ ID NO: 24867 - DNA, 72 bp, Homo sapiens
tagaaagtaacaggtcccagacgaggacagacttagagatgtgtaaccttggatcctctttttcacttagaa

SEQ ID NO: 24868 - DNA, 72 bp, Homo sapiens
cttagagatgtgtaaccttggatcctctttttcacttagaatatgggtaaacttcttagcacaagactggat

SEQ ID NO: 24869 - DNA, 72 bp, Homo sapiens
agatgtgtaaccttggatcctctttttcacttagaatatgggtaaacttcttagcacaagactggattaaga

SEQ ID NO: 24870 - DNA, 70 bp, Homo sapiens
cttggatcctctttttcacttagaatatgggtaaacttcttagcacaagactggattaagagaagttctt

SEQ ID NO: 24871 - DNA, 70 bp, Homo sapiens
ttagaatatgggtaaacttcttagcacaagactggattaagagaagttctttctgttaaactcacctagg

SEQ ID NO: 24872 - DNA, 73 bp, Homo sapiens
ttagcacaagactggattaagagaagttctttctgttaaactcacctagggtagtggctttgaaggcctcaga

SEQ ID NO: 24873 - DNA, 69 bp, Homo sapiens
gttctttctgttaaactcacctagggtagtggctttgaaggcctcagaggattaatagattcccaaaat

SEQ ID NO: 24874 - DNA, 69 bp, Homo sapiens
ttctgttaaactcacctagggtagtggctttgaaggcctcagaggattaatagattcccaaaattttct

SEQ ID NO: 24875 - DNA, 69 bp, Homo sapiens
acctagggtagtggctttgaaggcctcagaggattaatagattcccaaaattttcttccagacctggga

SEQ ID NO: 24876 - DNA, 73 bp, Homo sapiens
tagtggctttgaaggcctcagaggattaatagattcccaaaattttcttccagacctgggagatggagagaaa

SEQ ID NO: 24877 - DNA, 70 bp, Homo sapiens
aaggcctcagaggattaatagattcccaaaattttcttccagacctgggagatggagagaaagaggttct

SEQ ID NO: 24878 - DNA, 69 bp, Homo sapiens
aggattaatagattcccaaaattttcttccagacctgggagatggagagaaagaggttcttgctttaaa

SEQ ID NO: 24879 - DNA, 71 bp, Homo sapiens
tagattcccaaaattttcttccagacctgggagatggagagaaagaggttcttgctttaaagcggctcgaa

SEQ ID NO: 24880 - DNA, 71 bp, Homo sapiens
aattttcttccagacctgggagatggagagaaagaggttcttgctttaaagcggctcgaagacaatcttta

SEQ ID NO: 24881 - DNA, 76 bp, Homo sapiens
cctgggagatggagagaaagaggttcttgctttaaagcggctcgaagacaatctttatgacttcagcaactcttca

SEQ ID NO: 24882 - DNA, 77 bp, Homo sapiens
tttaaagcggctcgaagacaatctttatgacttcagcaactcttcaacatagtagcaccaataaaggagagattatg

SEQ ID NO: 24883 - DNA, 76 bp, Homo sapiens
ctcgaagacaatctttatgacttcagcaactcttcaacatagtagcaccaataaaggagagattatgttaacttcc

SEQ ID NO: 24884 - DNA, 76 bp, Homo sapiens
aatctttatgacttcagcaactcttcaacatagtagcaccaataaaggagagattatgttaacttcctagtggtga

SEQ ID NO: 24885 - DNA, 78 bp, Homo sapiens
tatgacttcagcaactcttcaacatagtagcaccaataaaggagagattatgttaacttcctagtggtgagaatacca

SEQ ID NO: 24886 - DNA, 73 bp, Homo sapiens
aacatagtagcaccaataaaggagagattatgttaacttcctagtggtgagaataccatgggatgggagaagg

SEQ ID NO: 24887 - DNA, 73 bp, Homo sapiens
aataaaggagagattatgttaacttcctagtggtgagaataccatgggatgggagaagggccagtgagtggga

SEQ ID NO: 24888 - DNA, 75 bp, Homo sapiens
agattatgttaacttcctagtggtgagaataccatgggatgggagaagggccagtgagtgggatgggaatgagct

SEQ ID NO: 24889 - DNA, 80 bp, Homo sapiens
ctagtggtgagaataccatgggatgggagaagggccagtgagtgggatgggaatgagcttcatcaggaacagatttcaga

SEQ ID NO: 24890 - DNA, 79 bp, Homo sapiens
aataccatgggatgggagaagggccagtgagtgggatgggaatgagcttcatcaggaacagatttcagactctgcaggg

SEQ ID NO: 24891 - DNA, 80 bp, Homo sapiens
tgggagaagggccagtgagtgggatgggaatgagcttcatcaggaacagatttcagactctgcagggtgcaccggttcta

SEQ ID NO: 24892 - DNA, 81 bp, Homo sapiens
cagtgagtgggatgggaatgagcttcatcaggaacagatttcagactctgcagggtgcaccggttctagcctcaaataaca

SEQ ID NO: 24893 - DNA, 81 bp, Homo sapiens
gatgggaatgagcttcatcaggaacagatttcagactctgcagggtgcaccggttctagcctcaaataacaacattgcaag

SEQ ID NO: 24894 - DNA, 79 bp, Homo sapiens
aatgagcttcatcaggaacagatttcagactctgcagggtgcaccggttctagcctcaaataacaacattgcaaggagg

SEQ ID NO: 24895 - DNA, 76 bp, Homo sapiens
atttcagactctgcagggtgcaccggttctagcctcaaataacaacattgcaaggaggtggactacagggtccaca

SEQ ID NO: 24896 - DNA, 76 bp, Homo sapiens
tctgcagggtgcaccggttctagcctcaaataacaacattgcaaggaggtggactacagggtccacaccctctgtc

SEQ ID NO: 24897 - DNA, 70 bp, Homo sapiens
accggttctagcctcaaataacaacattgcaaggaggtggactacagggtccacaccctctgtccttcgg

SEQ ID NO: 24898 - DNA, 73 bp, Homo sapiens
ataacaacattgcaaggaggtggactacagggtccacaccctctgtccttcggggcccatggtcaggccattc

SEQ ID NO: 24899 - DNA, 71 bp, Homo sapiens
actacagggtccacaccctctgtccttcggggcccatggtcaggccattccctctttgttttgctcctaga

SEQ ID NO: 24900 - DNA, 75 bp, Homo sapiens
acaccctctgtccttcggggcccatggtcaggccattccctctttgttttgctcctagaggatgagcatgtaaga

SEQ ID NO: 24901 - DNA, 80 bp, Homo sapiens
tctgtccttcggggcccatggtcaggccattccctctttgttttgctcctagaggatgagcatgtaagatgagatcagga

SEQ ID NO: 24902 - DNA, 80 bp, Homo sapiens
aggccattccctctttgttttgctcctagaggatgagcatgtaagatgagatcaggagggaaattgggtgctctgcctca

SEQ ID NO: 24903 - DNA, 80 bp, Homo sapiens
tctttgttttgctcctagaggatgagcatgtaagatgagatcaggagggaaattgggtgctctgcctcaggctgttaaaa

SEQ ID NO: 24904 - DNA, 83 bp, Homo sapiens
gttttgctcctagaggatgagcatgtaagatgagatcaggagggaaattgggtgctctgcctcaggctgttaaaatgctgcta

SEQ ID NO: 24905 - DNA, 83 bp, Homo sapiens
aggatgagcatgtaagatgagatcaggagggaaattgggtgctctgcctcaggctgttaaaatgctgctacctgcattctaaa

SEQ ID NO: 24906 - DNA, 81 bp, Homo sapiens
tgtaagatgagatcaggagggaaattgggtgctctgcctcaggctgttaaaatgctgctacctgcattctaaaacgtgcaa

SEQ ID NO: 24907 - DNA, 80 bp, Homo sapiens
agatcaggagggaaattgggtgctctgcctcaggctgttaaaatgctgctacctgcattctaaaacgtgcaagtcatgcc

SEQ ID NO: 24908 - DNA, 79 bp, Homo sapiens
aaattgggtgctctgcctcaggctgttaaaatgctgctacctgcattctaaaacgtgcaagtcatgccccacaagacac

SEQ ID NO: 24909 - DNA, 80 bp, Homo sapiens
tctgcctcaggctgttaaaatgctgctacctgcattctaaaacgtgcaagtcatgccccacaagacacctccttagggca

SEQ ID NO: 24910 - DNA, 79 bp, Homo sapiens
aggctgttaaaatgctgctacctgcattctaaaacgtgcaagtcatgccccacaagacacctccttagggcagcatcca

SEQ ID NO: 24911 - DNA, 80 bp, Homo sapiens
taaaatgctgctacctgcattctaaaacgtgcaagtcatgccccacaagacacctccttagggcagcatccactgtggtg

SEQ ID NO: 24912 - DNA, 82 bp, Homo sapiens
tacctgcattctaaaacgtgcaagtcatgccccacaagacacctccttagggcagcatccactgtggtgtgccagcctgaca

SEQ ID NO: 24913 - DNA, 81 bp, Homo sapiens
tctaaaacgtgcaagtcatgccccacaagacacctccttagggcagcatccactgtggtgtgccagcctgacacccctgca

SEQ ID NO: 24914 - DNA, 81 bp, Homo sapiens
tcatgccccacaagacacctccttagggcagcatccactgtggtgtgccagcctgacacccctgcagtcacggtgtttgaa

SEQ ID NO: 24915 - DNA, 83 bp, Homo sapiens
acctccttagggcagcatccactgtggtgtgccagcctgacacccctgcagtcacggtgtttgaatggcagctgatgctggcc

SEQ ID NO: 24916 - DNA, 84 bp, Homo sapiens
agcatccactgtggtgtgccagcctgacacccctgcagtcacggtgtttgaatggcagctgatgctggcccacccagagtatcg

SEQ ID NO: 24917 - DNA, 82 bp, Homo sapiens
agcctgacacccctgcagtcacggtgtttgaatggcagctgatgctggcccacccagagtatcggtgcatctctcctaaagc

SEQ ID NO: 24918 - DNA, 84 bp, Homo sapiens
ccctgcagtcacggtgtttgaatggcagctgatgctggcccacccagagtatcggtgcatctctcctaaagccacagttcagca

SEQ ID NO: 24919 - DNA, 85 bp, Homo sapiens
acggtgtttgaatggcagctgatgctggcccacccagagtatcggtgcatctctcctaaagccacagttcagcactgcatgttga

SEQ ID NO: 24920 - DNA, 86 bp, Homo sapiens
aatggcagctgatgctggcccacccagagtatcggtgcatctctcctaaagccacagttcagcactgcatgttgaccaggcggata

SEQ ID NO: 24921 - DNA, 83 bp, Homo sapiens
atgctggcccacccagagtatcggtgcatctctcctaaagccacagttcagcactgcatgttgaccaggcggatatcctataa

SEQ ID NO: 24922 - DNA, 83 bp, Homo sapiens
agtatcggtgcatctctcctaaagccacagttcagcactgcatgttgaccaggcggatatcctataatatagatgctcgtttg

SEQ ID NO: 24923 - DNA, 81 bp, Homo sapiens
atctctcctaaagccacagttcagcactgcatgttgaccaggcggatatcctataatatagatgctcgtttggatccaaaa

SEQ ID NO: 24924 - DNA, 79 bp, Homo sapiens
taaagccacagttcagcactgcatgttgaccaggcggatatcctataatatagatgctcgtttggatccaaaaggaaaa

SEQ ID NO: 24925 - DNA, 77 bp, Homo sapiens
ttcagcactgcatgttgaccaggcggatatcctataatatagatgctcgtttggatccaaaaggaaaaccattaaaa

SEQ ID NO: 24926 - DNA, 72 bp, Homo sapiens
catgttgaccaggcggatatcctataatatagatgctcgtttggatccaaaaggaaaaccattaaaaataaa

SEQ ID NO: 24927 - DNA, 70 bp, Homo sapiens
caggcggatatcctataatatagatgctcgtttggatccaaaaggaaaaccattaaaaataaaagaaaga

SEQ ID NO: 24928 - DNA, 61 bp, Homo sapiens
aaataaaagaaagatgaaaaactttaatgttttgggggggataaaagaaaagaataaataa

SEQ ID NO: 24929 - DNA, 63 bp, Homo sapiens
aactttaatgttttgggggggataaaagaaaagaataaataaaaccttgttgtaaagaatgca

SEQ ID NO: 24930 - DNA, 65 bp, Homo sapiens
gttttgggggggataaaagaaaagaataaataaaaccttgttgtaaagaatgcatcggcctgatt

SEQ ID NO: 24931 - DNA, 70 bp, Homo sapiens
gggataaaagaaaagaataaataaaaccttgttgtaaagaatgcatcggcctgatttccctcacttgatg

SEQ ID NO: 24932 - DNA, 71 bp, Homo sapiens
ggcttagaggaccttattatattcacctcttgttaacataaaaattaatgtgctgagtaacatctgttttt

SEQ ID NO: 24933 - DNA, 71 bp, Homo sapiens
accttattatattcacctcttgttaacataaaaattaatgtgctgagtaacatctgttttttattgattta

SEQ ID NO: 24934 - DNA, 74 bp, Homo sapiens
tcacctcttgttaacataaaaattaatgtgctgagtaacatctgttttttattgatttaatcaatacattggga

SEQ ID NO: 24935 - DNA, 74 bp, Homo sapiens
acataaaaattaatgtgctgagtaacatctgttttttattgatttaatcaatacattgggaatttagcagcaag

SEQ ID NO: 24936 - DNA, 78 bp, Homo sapiens
taatgtgctgagtaacatctgttttttattgatttaatcaatacattgggaatttagcagcaagttaatggcaagcag

SEQ ID NO: 24937 - DNA, 73 bp, Homo sapiens
ctgttttttattgatttaatcaatacattgggaatttagcagcaagttaatggcaagcagttacaaaatctcc

SEQ ID NO: 24938 - DNA, 75 bp, Homo sapiens
ttgatttaatcaatacattgggaatttagcagcaagttaatggcaagcagttacaaaatctcctatttttctaca

SEQ ID NO: 24939 - DNA, 73 bp, Homo sapiens
aatcaatacattgggaatttagcagcaagttaatggcaagcagttacaaaatctcctatttttctacatttaa

SEQ ID NO: 24940 - DNA, 73 bp, Homo sapiens
tgggaatttagcagcaagttaatggcaagcagttacaaaatctcctatttttctacatttaaaataagctgtc

SEQ ID NO: 24941 - DNA, 73 bp, Homo sapiens
gcagcaagttaatggcaagcagttacaaaatctcctatttttctacatttaaaataagctgtcttaaacaatc

SEQ ID NO: 24942 - DNA, 72 bp, Homo sapiens
atggcaagcagttacaaaatctcctatttttctacatttaaaataagctgtcttaaacaatctatagcaacc

SEQ ID NO: 24943 - DNA, 70 bp, Homo sapiens
acaaaatctcctatttttctacatttaaaataagctgtcttaaacaatctatagcaacctaaaatctcac

SEQ ID NO: 24944 - DNA, 73 bp, Homo sapiens
cctatttttctacatttaaaataagctgtcttaaacaatctatagcaacctaaaatctcacgaacacatgtga

SEQ ID NO: 24945 - DNA, 76 bp, Homo sapiens
acatttaaaataagctgtcttaaacaatctatagcaacctaaaatctcacgaacacatgtgaatgactgaagcact

SEQ ID NO: 24946 - DNA, 80 bp, Homo sapiens
aataagctgtcttaaacaatctatagcaacctaaaatctcacgaacacatgtgaatgactgaagcacttctgctgtaata

SEQ ID NO: 24947 - DNA, 80 bp, Homo sapiens
taaacaatctatagcaacctaaaatctcacgaacacatgtgaatgactgaagcacttctgctgtaatacgtatggcaagt

SEQ ID NO: 24948 - DNA, 79 bp, Homo sapiens
aatctatagcaacctaaaatctcacgaacacatgtgaatgactgaagcacttctgctgtaatacgtatggcaagtttat

SEQ ID NO: 24949 - DNA, 76 bp, Homo sapiens
aacctaaaatctcacgaacacatgtgaatgactgaagcacttctgctgtaatacgtatggcaagtttattagtaat

SEQ ID NO: 24950 - DNA, 75 bp, Homo sapiens
acgaacacatgtgaatgactgaagcacttctgctgtaatacgtatggcaagtttattagtaattttctaacaaag

SEQ ID NO: 24951 - DNA, 76 bp, Homo sapiens
gaatgactgaagcacttctgctgtaatacgtatggcaagtttattagtaattttctaacaaagtcttctagtgcaa

SEQ ID NO: 24952 - DNA, 76 bp, Homo sapiens
agcacttctgctgtaatacgtatggcaagtttattagtaattttctaacaaagtcttctagtgcaaagtgcacata

SEQ ID NO: 24953 - DNA, 75 bp, Homo sapiens
ttctgctgtaatacgtatggcaagtttattagtaattttctaacaaagtcttctagtgcaaagtgcacataatta

SEQ ID NO: 24954 - DNA, 73 bp, Homo sapiens
cgtatggcaagtttattagtaattttctaacaaagtcttctagtgcaaagtgcacataattatttggcacctc

SEQ ID NO: 24955 - DNA, 72 bp, Homo sapiens
caagtttattagtaattttctaacaaagtcttctagtgcaaagtgcacataattatttggcacctccattac

SEQ ID NO: 24956 - DNA, 74 bp, Homo sapiens
ttttctaacaaagtcttctagtgcaaagtgcacataattatttggcacctccattactatatttggcctcttgt

SEQ ID NO: 24957 - DNA, 74 bp, Homo sapiens
taacaaagtcttctagtgcaaagtgcacataattatttggcacctccattactatatttggcctcttgttttcc

SEQ ID NO: 24958 - DNA, 74 bp, Homo sapiens
ttctagtgcaaagtgcacataattatttggcacctccattactatatttggcctcttgttttcccctataaata

SEQ ID NO: 24959 - DNA, 73 bp, Homo sapiens
cacataattatttggcacctccattactatatttggcctcttgttttcccctataaatagctgtgcctaaaca

SEQ ID NO: 24960 - DNA, 71 bp, Homo sapiens
aattatttggcacctccattactatatttggcctcttgttttcccctataaatagctgtgcctaaacataa

SEQ ID NO: 24961 - DNA, 70 bp, Homo sapiens
atttggcctcttgttttcccctataaatagctgtgcctaaacataagaatttgaagtaaaaatgagcaag

SEQ ID NO: 24962 - DNA, 73 bp, Homo sapiens
ctcttgttttcccctataaatagctgtgcctaaacataagaatttgaagtaaaaatgagcaagtgtgcccaca

SEQ ID NO: 24963 - DNA, 74 bp, Homo sapiens
cctataaatagctgtgcctaaacataagaatttgaagtaaaaatgagcaagtgtgcccacagccttaaattgaa

SEQ ID NO: 24964 - DNA, 74 bp, Homo sapiens
aatagctgtgcctaaacataagaatttgaagtaaaaatgagcaagtgtgcccacagccttaaattgaaggtatc

SEQ ID NO: 24965 - DNA, 71 bp, Homo sapiens
cctaaacataagaatttgaagtaaaaatgagcaagtgtgcccacagccttaaattgaaggtatctgccccc

SEQ ID NO: 24966 - DNA, 72 bp, Homo sapiens
aatgagcaagtgtgcccacagccttaaattgaaggtatctgcccccctaaaaaaccttcgtgtacatcttga

SEQ ID NO: 24967 - DNA, 70 bp, Homo sapiens
aagtgtgcccacagccttaaattgaaggtatctgcccccctaaaaaaccttcgtgtacatcttgagttga

SEQ ID NO: 24968 - DNA, 84 bp, Homo sapiens
atcttgagttgatttccactgcagcccactgccaagcctactggtggctgtcctttaatgccatgtgcagcttatgctgctttg

SEQ ID NO: 24969 - DNA, 84 bp, Homo sapiens
agttgatttccactgcagcccactgccaagcctactggtggctgtcctttaatgccatgtgcagcttatgctgctttggagata

SEQ ID NO: 24970 - DNA, 85 bp, Homo sapiens
tgcagcccactgccaagcctactggtggctgtcctttaatgccatgtgcagcttatgctgctttggagataagcagcttcaattt

SEQ ID NO: 24971 - DNA, 82 bp, Homo sapiens
ccactgccaagcctactggtggctgtcctttaatgccatgtgcagcttatgctgctttggagataagcagcttcaattttaa

SEQ ID NO: 24972 - DNA, 84 bp, Homo sapiens
tactggtggctgtcctttaatgccatgtgcagcttatgctgctttggagataagcagcttcaattttaagctggtgcaaacaca

SEQ ID NO: 24973 - DNA, 82 bp, Homo sapiens
ctgtcctttaatgccatgtgcagcttatgctgctttggagataagcagcttcaattttaagctggtgcaaacacatggcggg

SEQ ID NO: 24974 - DNA, 84 bp, Homo sapiens
ccatgtgcagcttatgctgctttggagataagcagcttcaattttaagctggtgcaaacacatggcggggctctgtggagctaa

SEQ ID NO: 24975 - DNA, 79 bp, Homo sapiens
agcttatgctgctttggagataagcagcttcaattttaagctggtgcaaacacatggcggggctctgtggagctaaaag

SEQ ID NO: 24976 - DNA, 79 bp, Homo sapiens
tttggagataagcagcttcaattttaagctggtgcaaacacatggcggggctctgtggagctaaaaggctacaagctca

SEQ ID NO: 24977 - DNA, 79 bp, Homo sapiens
ataagcagcttcaattttaagctggtgcaaacacatggcggggctctgtggagctaaaaggctacaagctcagcatagg

SEQ ID NO: 24978 - DNA, 74 bp, Homo sapiens
aaacacatggcggggctctgtggagctaaaaggctacaagctcagcatagggctgtcttcttcccctcctaccc

SEQ ID NO: 24979 - DNA, 76 bp, Homo sapiens
ctctgtggagctaaaaggctacaagctcagcatagggctgtcttcttcccctcctaccccctcatcaaagtgctaa

SEQ ID NO: 24980 - DNA, 76 bp, Homo sapiens
tggagctaaaaggctacaagctcagcatagggctgtcttcttcccctcctaccccctcatcaaagtgctaacaaga

SEQ ID NO: 24981 - DNA, 75 bp, Homo sapiens
tacaagctcagcatagggctgtcttcttcccctcctaccccctcatcaaagtgctaacaagagcagctttgtttt

SEQ ID NO: 24982 - DNA, 73 bp, Homo sapiens
agcatagggctgtcttcttcccctcctaccccctcatcaaagtgctaacaagagcagctttgtttttgtactg

SEQ ID NO: 24983 - DNA, 72 bp, Homo sapiens
atagggctgtcttcttcccctcctaccccctcatcaaagtgctaacaagagcagctttgtttttgtactgtc

SEQ ID NO: 24984 - DNA, 73 bp, Homo sapiens
tcttcttcccctcctaccccctcatcaaagtgctaacaagagcagctttgtttttgtactgtccaacactgga

SEQ ID NO: 24985 - DNA, 72 bp, Homo sapiens
ttcttcccctcctaccccctcatcaaagtgctaacaagagcagctttgtttttgtactgtccaacactggag

SEQ ID NO: 24986 - DNA, 71 bp, Homo sapiens
ctcctaccccctcatcaaagtgctaacaagagcagctttgtttttgtactgtccaacactggagggaacct

SEQ ID NO: 24987 - DNA, 72 bp, Homo sapiens
tcctaccccctcatcaaagtgctaacaagagcagctttgtttttgtactgtccaacactggagggaacctta

SEQ ID NO: 24988 - DNA, 70 bp, Homo sapiens
atcaaagtgctaacaagagcagctttgtttttgtactgtccaacactggagggaaccttagagtttcttt

SEQ ID NO: 24989 - DNA, 68 bp, Homo sapiens
aaagtgctaacaagagcagctttgtttttgtactgtccaacactggagggaaccttagagtttctttt

SEQ ID NO: 24990 - DNA, 68 bp, Homo sapiens
ctaacaagagcagctttgtttttgtactgtccaacactggagggaaccttagagtttctttttggttc

SEQ ID NO: 24991 - DNA, 69 bp, Homo sapiens
aagagcagctttgtttttgtactgtccaacactggagggaaccttagagtttctttttggttctggaca

SEQ ID NO: 24992 - DNA, 67 bp, Homo sapiens
agctttgtttttgtactgtccaacactggagggaaccttagagtttctttttggttctggacagggc

SEQ ID NO: 24993 - DNA, 68 bp, Homo sapiens
tttgtactgtccaacactggagggaaccttagagtttctttttggttctggacagggcgccggattta

SEQ ID NO: 24994 - DNA, 66 bp, Homo sapiens
aacactggagggaaccttagagtttctttttggttctggacagggcgccggatttagcagggtact

SEQ ID NO: 24995 - DNA, 68 bp, Homo sapiens
gaaccttagagtttctttttggttctggacagggcgccggatttagcagggtacttggttgctgttcc

SEQ ID NO: 24996 - DNA, 69 bp, Homo sapiens
ttagagtttctttttggttctggacagggcgccggatttagcagggtacttggttgctgttccttggct

SEQ ID NO: 24997 - DNA, 71 bp, Homo sapiens
tttttggttctggacagggcgccggatttagcagggtacttggttgctgttccttggcttggagtcacagg

SEQ ID NO: 24998 - DNA, 69 bp, Homo sapiens
agggcgccggatttagcagggtacttggttgctgttccttggcttggagtcacaggggttttctccatt

SEQ ID NO: 24999 - DNA, 70 bp, Homo sapiens
atttagcagggtacttggttgctgttccttggcttggagtcacaggggttttctccatttctcccttgat

SEQ ID NO: 25000 - DNA, 72 bp, Homo sapiens
ggtacttggttgctgttccttggcttggagtcacaggggttttctccatttctcccttgatttcagctggaa

SEQ ID NO: 25001 - DNA, 74 bp, Homo sapiens
ttgctgttccttggcttggagtcacaggggttttctccatttctcccttgatttcagctggaaggagtttgcta

SEQ ID NO: 25002 - DNA, 74 bp, Homo sapiens
tggcttggagtcacaggggttttctccatttctcccttgatttcagctggaaggagtttgctagatgtgaaact

SEQ ID NO: 25003 - DNA, 77 bp, Homo sapiens
tcacaggggttttctccatttctcccttgatttcagctggaaggagtttgctagatgtgaaacttgaactgcacata

SEQ ID NO: 25004 - DNA, 76 bp, Homo sapiens
atttctcccttgatttcagctggaaggagtttgctagatgtgaaacttgaactgcacatatcaaagttgtccttac

SEQ ID NO: 25005 - DNA, 77 bp, Homo sapiens
tttcagctggaaggagtttgctagatgtgaaacttgaactgcacatatcaaagttgtccttactggttgcaggaaat

SEQ ID NO: 25006 - DNA, 76 bp, Homo sapiens
aaggagtttgctagatgtgaaacttgaactgcacatatcaaagttgtccttactggttgcaggaaattgcttttca

SEQ ID NO: 25007 - DNA, 79 bp, Homo sapiens
tttgctagatgtgaaacttgaactgcacatatcaaagttgtccttactggttgcaggaaattgcttttcataagcagta

SEQ ID NO: 25008 - DNA, 77 bp, Homo sapiens
aaacttgaactgcacatatcaaagttgtccttactggttgcaggaaattgcttttcataagcagtagactgcaaata

SEQ ID NO: 25009 - DNA, 75 bp, Homo sapiens
aactgcacatatcaaagttgtccttactggttgcaggaaattgcttttcataagcagtagactgcaaataaaagg

SEQ ID NO: 25010 - DNA, 75 bp, Homo sapiens
tccttactggttgcaggaaattgcttttcataagcagtagactgcaaataaaaggtcttgattaattttcagaca

SEQ ID NO: 25011 - DNA, 75 bp, Homo sapiens
tggtgagggtattttacacttgggagaaatgcagcaatgattcttcctacctgtttttcctcctcttcatctgaa

SEQ ID NO: 25012 - DNA, 75 bp, Homo sapiens
tattttacacttgggagaaatgcagcaatgattcttcctacctgtttttcctcctcttcatctgaagtgtaattg

SEQ ID NO: 25013 - DNA, 77 bp, Homo sapiens
agaaatgcagcaatgattcttcctacctgtttttcctcctcttcatctgaagtgtaattggcatcagggacatttcc

SEQ ID NO: 25014 - DNA, 74 bp, Homo sapiens
agcaatgattcttcctacctgtttttcctcctcttcatctgaagtgtaattggcatcagggacatttccccagg

SEQ ID NO: 25015 - DNA, 71 bp, Homo sapiens
ttcctacctgtttttcctcctcttcatctgaagtgtaattggcatcagggacatttccccagggttggtaa

SEQ ID NO: 25016 - DNA, 70 bp, Homo sapiens
ttttcctcctcttcatctgaagtgtaattggcatcagggacatttccccagggttggtaacttttcaact

SEQ ID NO: 25017 - DNA, 70 bp, Homo sapiens
ctcctcttcatctgaagtgtaattggcatcagggacatttccccagggttggtaacttttcaacttttct

SEQ ID NO: 25018 - DNA, 70 bp, Homo sapiens
tctgaagtgtaattggcatcagggacatttccccagggttggtaacttttcaacttttcttcagtggacg

SEQ ID NO: 25019 - DNA, 68 bp, Homo sapiens
attggcatcagggacatttccccagggttggtaacttttcaacttttcttcagtggacggcttattct

SEQ ID NO: 25020 - DNA, 67 bp, Homo sapiens
acatttccccagggttggtaacttttcaacttttcttcagtggacggcttattcttctcttctgttg

SEQ ID NO: 25021 - DNA, 68 bp, Homo sapiens
agggttggtaacttttcaacttttcttcagtggacggcttattcttctcttctgttgtgttttcctca

SEQ ID NO: 25022 - DNA, 70 bp, Homo sapiens
taacttttcaacttttcttcagtggacggcttattcttctcttctgttgtgttttcctcaacactttctg

SEQ ID NO: 25023 - DNA, 68 bp, Homo sapiens
aacttttcttcagtggacggcttattcttctcttctgttgtgttttcctcaacactttctgggttatt

SEQ ID NO: 25024 - DNA, 68 bp, Homo sapiens
agtggacggcttattcttctcttctgttgtgttttcctcaacactttctgggttatttttccattcct

SEQ ID NO: 25025 - DNA, 73 bp, Homo sapiens
ttcttctcttctgttgtgttttcctcaacactttctgggttatttttccattccttcatcatctctaatacat

SEQ ID NO: 25026 - DNA, 72 bp, Homo sapiens
ttctgttgtgttttcctcaacactttctgggttatttttccattccttcatcatctctaatacattggttgg

SEQ ID NO: 25027 - DNA, 72 bp, Homo sapiens
ttttcctcaacactttctgggttatttttccattccttcatcatctctaatacattggttggtctcaccgaa

SEQ ID NO: 25028 - DNA, 70 bp, Homo sapiens
ctttctgggttatttttccattccttcatcatctctaatacattggttggtctcaccgaagaaagtttat

SEQ ID NO: 25029 - DNA, 72 bp, Homo sapiens
gttatttttccattccttcatcatctctaatacattggttggtctcaccgaagaaagtttattgccctaata

SEQ ID NO: 25030 - DNA, 74 bp, Homo sapiens
ccattccttcatcatctctaatacattggttggtctcaccgaagaaagtttattgccctaatattaacaatcaa

SEQ ID NO: 25031 - DNA, 72 bp, Homo sapiens
catcatctctaatacattggttggtctcaccgaagaaagtttattgccctaatattaacaatcaatttttgg

SEQ ID NO: 25032 - DNA, 76 bp, Homo sapiens
ctattgctaccaccctatccaagtcactattatctctcaacagtactacttcaacatctatctaattccctatttc

SEQ ID NO: 25033 - DNA, 76 bp, Homo sapiens
taccaccctatccaagtcactattatctctcaacagtactacttcaacatctatctaattccctatttccaagcca

SEQ ID NO: 25034 - DNA, 75 bp, Homo sapiens
tatccaagtcactattatctctcaacagtactacttcaacatctatctaattccctatttccaagccactccccc

SEQ ID NO: 25035 - DNA, 71 bp, Homo sapiens
actattatctctcaacagtactacttcaacatctatctaattccctatttccaagccactcccccccaccc

SEQ ID NO: 25036 - DNA, 70 bp, Homo sapiens
aacagtactacttcaacatctatctaattccctatttccaagccactcccccccaccccaatagtcagag

SEQ ID NO: 25037 - DNA, 72 bp, Homo sapiens
tacttcaacatctatctaattccctatttccaagccactcccccccaccccaatagtcagagtgatctttta

SEQ ID NO: 25038 - DNA, 70 bp, Homo sapiens
atctatctaattccctatttccaagccactcccccccaccccaatagtcagagtgatcttttaagaatat

SEQ ID NO: 25039 - DNA, 69 bp, Homo sapiens
ttccctatttccaagccactcccccccaccccaatagtcagagtgatcttttaagaatattatcggccg

SEQ ID NO: 25040 - DNA, 72 bp, Homo sapiens
aagaaatgagcaatggtagcatgtcagaaagaaaaaagtaatattgtaacttactgttaaccactggttatc

SEQ ID NO: 25041 - DNA, 73 bp, Homo sapiens
tgagcaatggtagcatgtcagaaagaaaaaagtaatattgtaacttactgttaaccactggttatctagtagt

SEQ ID NO: 25042 - DNA, 71 bp, Homo sapiens
gcatgtcagaaagaaaaaagtaatattgtaacttactgttaaccactggttatctagtagttccttagctg

SEQ ID NO: 25043 - DNA, 73 bp, Homo sapiens
gaaaaaagtaatattgtaacttactgttaaccactggttatctagtagttccttagctgtgattctgtgagca

SEQ ID NO: 25044 - DNA, 74 bp, Homo sapiens
aatattgtaacttactgttaaccactggttatctagtagttccttagctgtgattctgtgagcaggatctactt

SEQ ID NO: 25045 - DNA, 75 bp, Homo sapiens
taacttactgttaaccactggttatctagtagttccttagctgtgattctgtgagcaggatctactttcataagt

SEQ ID NO: 25046 - DNA, 75 bp, Homo sapiens
ttaaccactggttatctagtagttccttagctgtgattctgtgagcaggatctactttcataagttgtttcaaaa

SEQ ID NO: 25047 - DNA, 76 bp, Homo sapiens
ttatctagtagttccttagctgtgattctgtgagcaggatctactttcataagttgtttcaaaacacttttagcta

SEQ ID NO: 25048 - DNA, 73 bp, Homo sapiens
agttccttagctgtgattctgtgagcaggatctactttcataagttgtttcaaaacacttttagctaaaaata

SEQ ID NO: 25049 - DNA, 71 bp, Homo sapiens
ctgtgattctgtgagcaggatctactttcataagttgtttcaaaacacttttagctaaaaataagaaaaaa

SEQ ID NO: 25050 - DNA, 76 bp, Homo sapiens
tgttacttatattagctttagtaaataataacgcatctatacttaccacagtcacttatggaattccagactgcat

SEQ ID NO: 25051 - DNA, 76 bp, Homo sapiens
cttatattagctttagtaaataataacgcatctatacttaccacagtcacttatggaattccagactgcattttca

SEQ ID NO: 25052 - DNA, 75 bp, Homo sapiens
gtaaataataacgcatctatacttaccacagtcacttatggaattccagactgcattttcaaaatgtagttctcc

SEQ ID NO: 25053 - DNA, 75 bp, Homo sapiens
taataacgcatctatacttaccacagtcacttatggaattccagactgcattttcaaaatgtagttctccttttc

SEQ ID NO: 25054 - DNA, 73 bp, Homo sapiens
tctatacttaccacagtcacttatggaattccagactgcattttcaaaatgtagttctccttttcttattaac

SEQ ID NO: 25055 - DNA, 72 bp, Homo sapiens
ccacagtcacttatggaattccagactgcattttcaaaatgtagttctccttttcttattaactcaaaaagc

SEQ ID NO: 25056 - DNA, 74 bp, Homo sapiens
gaattccagactgcattttcaaaatgtagttctccttttcttattaactcaaaaagcttctcttctgagcttgc

SEQ ID NO: 25057 - DNA, 73 bp, Homo sapiens
cagactgcattttcaaaatgtagttctccttttcttattaactcaaaaagcttctcttctgagcttgccaaaa

SEQ ID NO: 25058 - DNA, 68 bp, Homo sapiens
caaaatgtagttctccttttcttattaactcaaaaagcttctcttctgagcttgccaaaaagggtggt

SEQ ID NO: 25059 - DNA, 70 bp, Homo sapiens
tctccttttcttattaactcaaaaagcttctcttctgagcttgccaaaaagggtggttctccacgtaatc

SEQ ID NO: 25060 - DNA, 72 bp, Homo sapiens
ttcttattaactcaaaaagcttctcttctgagcttgccaaaaagggtggttctccacgtaatctgcaacaaa

SEQ ID NO: 25061 - DNA, 72 bp, Homo sapiens
aaaaagcttctcttctgagcttgccaaaaagggtggttctccacgtaatctgcaacaaaggcaatcactttg

SEQ ID NO: 25062 - DNA, 71 bp, Homo sapiens
tcttctgagcttgccaaaaagggtggttctccacgtaatctgcaacaaaggcaatcactttgtttaaattt

SEQ ID NO: 25063 - DNA, 77 bp, Homo sapiens
atatcactctactgttagaaactatccactcatcttaaagtgtacatttagcaggctacttacaacatgtacattac

SEQ ID NO: 25064 - DNA, 75 bp, Homo sapiens
actgttagaaactatccactcatcttaaagtgtacatttagcaggctacttacaacatgtacattacgacgccta

SEQ ID NO: 25065 - DNA, 79 bp, Homo sapiens
actatccactcatcttaaagtgtacatttagcaggctacttacaacatgtacattacgacgcctatgctccaaatgtca

SEQ ID NO: 25066 - DNA, 81 bp, Homo sapiens
taaagtgtacatttagcaggctacttacaacatgtacattacgacgcctatgctccaaatgtcacactgctggctatagtc

SEQ ID NO: 25067 - DNA, 83 bp, Homo sapiens
tgtacatttagcaggctacttacaacatgtacattacgacgcctatgctccaaatgtcacactgctggctatagtcgtgggca

SEQ ID NO: 25068 - DNA, 81 bp, Homo sapiens
ctacttacaacatgtacattacgacgcctatgctccaaatgtcacactgctggctatagtcgtgggcactgataacttcag

SEQ ID NO: 25069 - DNA, 83 bp, Homo sapiens
tacaacatgtacattacgacgcctatgctccaaatgtcacactgctggctatagtcgtgggcactgataacttcaggggctgc

SEQ ID NO: 25070 - DNA, 80 bp, Homo sapiens
acattacgacgcctatgctccaaatgtcacactgctggctatagtcgtgggcactgataacttcaggggctgccaaacaa

SEQ ID NO: 25071 - DNA, 82 bp, Homo sapiens
tatgctccaaatgtcacactgctggctatagtcgtgggcactgataacttcaggggctgccaaacaagcagatataaaataa

SEQ ID NO: 25072 - DNA, 79 bp, Homo sapiens
aaatgtcacactgctggctatagtcgtgggcactgataacttcaggggctgccaaacaagcagatataaaataacatta

SEQ ID NO: 25073 - DNA, 77 bp, Homo sapiens
tggctatagtcgtgggcactgataacttcaggggctgccaaacaagcagatataaaataacattaataatacaataa

SEQ ID NO: 25074 - DNA, 75 bp, Homo sapiens
atagtcgtgggcactgataacttcaggggctgccaaacaagcagatataaaataacattaataatacaataaatg

SEQ ID NO: 25075 - DNA, 72 bp, Homo sapiens
aaaacaaaaattaattttaagtctactaacttacccatatagataggagtcccacatgtggcctgcagcatg

SEQ ID NO: 25076 - DNA, 76 bp, Homo sapiens
aattaattttaagtctactaacttacccatatagataggagtcccacatgtggcctgcagcatggcttcactccta

SEQ ID NO: 25077 - DNA, 78 bp, Homo sapiens
tttaagtctactaacttacccatatagataggagtcccacatgtggcctgcagcatggcttcactcctactttgcttc

SEQ ID NO: 25078 - DNA, 79 bp, Homo sapiens
ctaacttacccatatagataggagtcccacatgtggcctgcagcatggcttcactcctactttgcttcttcaccgctaa

SEQ ID NO: 25079 - DNA, 82 bp, Homo sapiens
atatagataggagtcccacatgtggcctgcagcatggcttcactcctactttgcttcttcaccgctaagccaaaatcagtca

SEQ ID NO: 25080 - DNA, 81 bp, Homo sapiens
tcccacatgtggcctgcagcatggcttcactcctactttgcttcttcaccgctaagccaaaatcagtcacctgggagaaga

SEQ ID NO: 25081 - DNA, 78 bp, Homo sapiens
atgtggcctgcagcatggcttcactcctactttgcttcttcaccgctaagccaaaatcagtcacctgggagaagaaat

SEQ ID NO: 25082 - DNA, 77 bp, Homo sapiens
atggcttcactcctactttgcttcttcaccgctaagccaaaatcagtcacctgggagaagaaattcaagcacagtca

SEQ ID NO: 25083 - DNA, 74 bp, Homo sapiens
tcctactttgcttcttcaccgctaagccaaaatcagtcacctgggagaagaaattcaagcacagtcacctgttt

SEQ ID NO: 25084 - DNA, 75 bp, Homo sapiens
tttgcttcttcaccgctaagccaaaatcagtcacctgggagaagaaattcaagcacagtcacctgttttcctgtc

SEQ ID NO: 25085 - DNA, 71 bp, Homo sapiens
gccactttgctatcaaactgtttacaggcaaatatttaccaccattgctaatcttacctttatgtttaagt

SEQ ID NO: 25086 - DNA, 69 bp, Homo sapiens
caaactgtttacaggcaaatatttaccaccattgctaatcttacctttatgtttaagtttatttcattg

SEQ ID NO: 25087 - DNA, 73 bp, Homo sapiens
caggcaaatatttaccaccattgctaatcttacctttatgtttaagtttatttcattgttatcatcaataaga

SEQ ID NO: 25088 - DNA, 72 bp, Homo sapiens
atatttaccaccattgctaatcttacctttatgtttaagtttatttcattgttatcatcaataagactgctt

SEQ ID NO: 25089 - DNA, 71 bp, Homo sapiens
accattgctaatcttacctttatgtttaagtttatttcattgttatcatcaataagactgcttttaaccat

SEQ ID NO: 25090 - DNA, 71 bp, Homo sapiens
tcttacctttatgtttaagtttatttcattgttatcatcaataagactgcttttaaccattatattttcca

SEQ ID NO: 25091 - DNA, 75 bp, Homo sapiens
ttaagtttatttcattgttatcatcaataagactgcttttaaccattatattttccagtttcagatctctatgta

SEQ ID NO: 25092 - DNA, 78 bp, Homo sapiens
ttcattgttatcatcaataagactgcttttaaccattatattttccagtttcagatctctatgtacaatatctaccaa

SEQ ID NO: 25093 - DNA, 76 bp, Homo sapiens
gttatcatcaataagactgcttttaaccattatattttccagtttcagatctctatgtacaatatctaccaagaaa

SEQ ID NO: 25094 - DNA, 73 bp, Homo sapiens
ataagactgcttttaaccattatattttccagtttcagatctctatgtacaatatctaccaagaaaataaaca

SEQ ID NO: 25095 - DNA, 72 bp, Homo sapiens
cttttaaccattatattttccagtttcagatctctatgtacaatatctaccaagaaaataaacaacaaatca

SEQ ID NO: 25096 - DNA, 82 bp, Homo sapiens
aagtgacattagtattcatggggtcaatgagctggataaccctcttcttaccattattgtgaagatatgctatagctgatgc

SEQ ID NO: 25097 - DNA, 84 bp, Homo sapiens
tattcatggggtcaatgagctggataaccctcttcttaccattattgtgaagatatgctatagctgatgcgagactttgaatga

SEQ ID NO: 25098 - DNA, 82 bp, Homo sapiens
aatgagctggataaccctcttcttaccattattgtgaagatatgctatagctgatgcgagactttgaatgatccaccttgtc

SEQ ID NO: 25099 - DNA, 82 bp, Homo sapiens
ctggataaccctcttcttaccattattgtgaagatatgctatagctgatgcgagactttgaatgatccaccttgtctcattc

SEQ ID NO: 25100 - DNA, 84 bp, Homo sapiens
ttcttaccattattgtgaagatatgctatagctgatgcgagactttgaatgatccaccttgtctcattctctgagaaatgccct

SEQ ID NO: 25101 - DNA, 84 bp, Homo sapiens
attattgtgaagatatgctatagctgatgcgagactttgaatgatccaccttgtctcattctctgagaaatgccctttcctatc

SEQ ID NO: 25102 - DNA, 82 bp, Homo sapiens
aagatatgctatagctgatgcgagactttgaatgatccaccttgtctcattctctgagaaatgccctttcctatccagaatt

SEQ ID NO: 25103 - DNA, 81 bp, Homo sapiens
tatagctgatgcgagactttgaatgatccaccttgtctcattctctgagaaatgccctttcctatccagaatttctttgag

SEQ ID NO: 25104 - DNA, 77 bp, Homo sapiens
agactttgaatgatccaccttgtctcattctctgagaaatgccctttcctatccagaatttctttgagttctccatc

SEQ ID NO: 25105 - DNA, 77 bp, Homo sapiens
aatgatccaccttgtctcattctctgagaaatgccctttcctatccagaatttctttgagttctccatcctcacaaa

SEQ ID NO: 25106 - DNA, 79 bp, Homo sapiens
tctcattctctgagaaatgccctttcctatccagaatttctttgagttctccatcctcacaaagctccatcacaaggta

SEQ ID NO: 25107 - DNA, 76 bp, Homo sapiens
tgagaaatgccctttcctatccagaatttctttgagttctccatcctcacaaagctccatcacaaggtacattttc

SEQ ID NO: 25108 - DNA, 76 bp, Homo sapiens
cctttcctatccagaatttctttgagttctccatcctcacaaagctccatcacaaggtacattttctgacattata

SEQ ID NO: 25109 - DNA, 78 bp, Homo sapiens
ctatccagaatttctttgagttctccatcctcacaaagctccatcacaaggtacattttctgacattatatatataaa

SEQ ID NO: 25110 - DNA, 78 bp, Homo sapiens
atttctttgagttctccatcctcacaaagctccatcacaaggtacattttctgacattatatatataaaagagagaga

SEQ ID NO: 25111 - DNA, 70 bp, Homo sapiens
tgtaataataacaactttcaaaatgcagcgcctaatagaggtttacctttggcgtttcaaatacttgttc

SEQ ID NO: 25112 - DNA, 72 bp, Homo sapiens
aacaactttcaaaatgcagcgcctaatagaggtttacctttggcgtttcaaatacttgttccagatgtatga

SEQ ID NO: 25113 - DNA, 76 bp, Homo sapiens
tttcaaaatgcagcgcctaatagaggtttacctttggcgtttcaaatacttgttccagatgtatgatgtgttcatg

SEQ ID NO: 25114 - DNA, 71 bp, Homo sapiens
cctaatagaggtttacctttggcgtttcaaatacttgttccagatgtatgatgtgttcatgttttacactt

SEQ ID NO: 25115 - DNA, 72 bp, Homo sapiens
agaggtttacctttggcgtttcaaatacttgttccagatgtatgatgtgttcatgttttacacttttcagaa

SEQ ID NO: 25116 - DNA, 75 bp, Homo sapiens
tttggcgtttcaaatacttgttccagatgtatgatgtgttcatgttttacacttttcagaatgttcacctctcgt

SEQ ID NO: 25117 - DNA, 76 bp, Homo sapiens
aatacttgttccagatgtatgatgtgttcatgttttacacttttcagaatgttcacctctcgttcaagtaacttca

SEQ ID NO: 25118 - DNA, 80 bp, Homo sapiens
tgttccagatgtatgatgtgttcatgttttacacttttcagaatgttcacctctcgttcaagtaacttcacagcagagct

SEQ ID NO: 25119 - DNA, 76 bp, Homo sapiens
atgtgttcatgttttacacttttcagaatgttcacctctcgttcaagtaacttcacagcagagcttccagccttaa

SEQ ID NO: 25120 - DNA, 76 bp, Homo sapiens
atgttttacacttttcagaatgttcacctctcgttcaagtaacttcacagcagagcttccagccttaatcaatgaa

SEQ ID NO: 25121 - DNA, 77 bp, Homo sapiens
ttttcagaatgttcacctctcgttcaagtaacttcacagcagagcttccagccttaatcaatgaagaaacacagatt

SEQ ID NO: 25122 - DNA, 78 bp, Homo sapiens
aatgttcacctctcgttcaagtaacttcacagcagagcttccagccttaatcaatgaagaaacacagatttcacataa

SEQ ID NO: 25123 - DNA, 73 bp, Homo sapiens
accctgcactaacactgtgccctcagtaggatgctgctaatgagccttaccttttctttgttcacttttttaa

SEQ ID NO: 25124 - DNA, 73 bp, Homo sapiens
taacactgtgccctcagtaggatgctgctaatgagccttaccttttctttgttcacttttttaattgcccact

SEQ ID NO: 25125 - DNA, 69 bp, Homo sapiens
agtaggatgctgctaatgagccttaccttttctttgttcacttttttaattgcccacttcgtttctgtt

SEQ ID NO: 25126 - DNA, 69 bp, Homo sapiens
atgctgctaatgagccttaccttttctttgttcacttttttaattgcccacttcgtttctgtttccttg

SEQ ID NO: 25127 - DNA, 67 bp, Homo sapiens
ccttaccttttctttgttcacttttttaattgcccacttcgtttctgtttccttgtctgtcgcttca

SEQ ID NO: 25128 - DNA, 71 bp, Homo sapiens
tctttgttcacttttttaattgcccacttcgtttctgtttccttgtctgtcgcttcaatgactattccaaa

SEQ ID NO: 25129 - DNA, 69 bp, Homo sapiens
acttttttaattgcccacttcgtttctgtttccttgtctgtcgcttcaatgactattccaaagctccct

SEQ ID NO: 25130 - DNA, 72 bp, Homo sapiens
taattgcccacttcgtttctgtttccttgtctgtcgcttcaatgactattccaaagctcccttttcccaata

SEQ ID NO: 25131 - DNA, 71 bp, Homo sapiens
ttcgtttctgtttccttgtctgtcgcttcaatgactattccaaagctcccttttcccaatattcttccaaa

SEQ ID NO: 25132 - DNA, 71 bp, Homo sapiens
tttccttgtctgtcgcttcaatgactattccaaagctcccttttcccaatattcttccaaaggtatagatt

SEQ ID NO: 25133 - DNA, 71 bp, Homo sapiens
tcgcttcaatgactattccaaagctcccttttcccaatattcttccaaaggtatagatttcctggagaaaa

SEQ ID NO: 25134 - DNA, 68 bp, Homo sapiens
caatgactattccaaagctcccttttcccaatattcttccaaaggtatagatttcctggagaaaaaaa

SEQ ID NO: 25135 - DNA, 78 bp, Homo sapiens
ttagaagaaacctgaaagttcacagtagcttcatttgctttctatatacctcaatagcagctccattctcaatcctta

SEQ ID NO: 25136 - DNA, 78 bp, Homo sapiens
gaaagttcacagtagcttcatttgctttctatatacctcaatagcagctccattctcaatccttatgtgaggaacttt

SEQ ID NO: 25137 - DNA, 78 bp, Homo sapiens
agtagcttcatttgctttctatatacctcaatagcagctccattctcaatccttatgtgaggaacttttccttctgta

SEQ ID NO: 25138 - DNA, 76 bp, Homo sapiens
ttcatttgctttctatatacctcaatagcagctccattctcaatccttatgtgaggaacttttccttctgtaaagt

SEQ ID NO: 25139 - DNA, 75 bp, Homo sapiens
tttctatatacctcaatagcagctccattctcaatccttatgtgaggaacttttccttctgtaaagttgccccga

SEQ ID NO: 25140 - DNA, 73 bp, Homo sapiens
aatagcagctccattctcaatccttatgtgaggaacttttccttctgtaaagttgccccgaccccattgttgc

SEQ ID NO: 25141 - DNA, 73 bp, Homo sapiens
cattctcaatccttatgtgaggaacttttccttctgtaaagttgccccgaccccattgttgctgagatgcttt

SEQ ID NO: 25142 - DNA, 72 bp, Homo sapiens
aatccttatgtgaggaacttttccttctgtaaagttgccccgaccccattgttgctgagatgcttttctctc

SEQ ID NO: 25143 - DNA, 71 bp, Homo sapiens
ggaacttttccttctgtaaagttgccccgaccccattgttgctgagatgcttttctctctacatttgaggt

SEQ ID NO: 25144 - DNA, 73 bp, Homo sapiens
ttttccttctgtaaagttgccccgaccccattgttgctgagatgcttttctctctacatttgaggttcttgag

SEQ ID NO: 25145 - DNA, 74 bp, Homo sapiens
taaagttgccccgaccccattgttgctgagatgcttttctctctacatttgaggttcttgagggctgggaccaa

SEQ ID NO: 25146 - DNA, 71 bp, Homo sapiens
cccgaccccattgttgctgagatgcttttctctctacatttgaggttcttgagggctgggaccaaaaaaaa

SEQ ID NO: 25147 - DNA, 74 bp, Homo sapiens
aacgggatgtcaacttgtgcttagatgtggaatctttgatatttaccaaatctttcctggaggttatatctctg

SEQ ID NO: 25148 - DNA, 77 bp, Homo sapiens
gatgtcaacttgtgcttagatgtggaatctttgatatttaccaaatctttcctggaggttatatctctgttgatatt

SEQ ID NO: 25149 - DNA, 73 bp, Homo sapiens
gtgcttagatgtggaatctttgatatttaccaaatctttcctggaggttatatctctgttgatatttttttct

SEQ ID NO: 25150 - DNA, 76 bp, Homo sapiens
ttctttttttctctccagtgaaattaaagattctgcactaccaatgcttgatgtctgtgacatttccaccaccaaa

SEQ ID NO: 25151 - DNA, 77 bp, Homo sapiens
tttttctctccagtgaaattaaagattctgcactaccaatgcttgatgtctgtgacatttccaccaccaaaactgga

SEQ ID NO: 25152 - DNA, 73 bp, Homo sapiens
aaattaaagattctgcactaccaatgcttgatgtctgtgacatttccaccaccaaaactggaggaacccttgt

SEQ ID NO: 25153 - DNA, 75 bp, Homo sapiens
aaagattctgcactaccaatgcttgatgtctgtgacatttccaccaccaaaactggaggaacccttgttttgctg

SEQ ID NO: 25154 - DNA, 75 bp, Homo sapiens
taccaatgcttgatgtctgtgacatttccaccaccaaaactggaggaacccttgttttgctggaacatacacaaa

SEQ ID NO: 25155 - DNA, 72 bp, Homo sapiens
atgtctgtgacatttccaccaccaaaactggaggaacccttgttttgctggaacatacacaaagtacatctt

SEQ ID NO: 25156 - DNA, 71 bp, Homo sapiens
acatttccaccaccaaaactggaggaacccttgttttgctggaacatacacaaagtacatctttctgagaa

SEQ ID NO: 25157 - DNA, 74 bp, Homo sapiens
accaccaaaactggaggaacccttgttttgctggaacatacacaaagtacatctttctgagaagcagatgaaca

SEQ ID NO: 25158 - DNA, 75 bp, Homo sapiens
gaggaacccttgttttgctggaacatacacaaagtacatctttctgagaagcagatgaacagtcggggcattttg

SEQ ID NO: 25159 - DNA, 75 bp, Homo sapiens
ttgttttgctggaacatacacaaagtacatctttctgagaagcagatgaacagtcggggcattttgtggattttt

SEQ ID NO: 25160 - DNA, 77 bp, Homo sapiens
tggaacatacacaaagtacatctttctgagaagcagatgaacagtcggggcattttgtggattttttatctaagcca

SEQ ID NO: 25161 - DNA, 76 bp, Homo sapiens
aaagtacatctttctgagaagcagatgaacagtcggggcattttgtggattttttatctaagccactatcagccat

SEQ ID NO: 25162 - DNA, 77 bp, Homo sapiens
tacatctttctgagaagcagatgaacagtcggggcattttgtggattttttatctaagccactatcagccatttgtt

SEQ ID NO: 25163 - DNA, 76 bp, Homo sapiens
tctttctgagaagcagatgaacagtcggggcattttgtggattttttatctaagccactatcagccatttgtttaa

SEQ ID NO: 25164 - DNA, 75 bp, Homo sapiens
tttctgagaagcagatgaacagtcggggcattttgtggattttttatctaagccactatcagccatttgtttaac

SEQ ID NO: 25165 - DNA, 76 bp, Homo sapiens
agcagatgaacagtcggggcattttgtggattttttatctaagccactatcagccatttgtttaactctgcaacaa

SEQ ID NO: 25166 - DNA, 73 bp, Homo sapiens
atgaacagtcggggcattttgtggattttttatctaagccactatcagccatttgtttaactctgcaacaaaa

SEQ ID NO: 25167 - DNA, 73 bp, Homo sapiens
aacagtcggggcattttgtggattttttatctaagccactatcagccatttgtttaactctgcaacaaaagca

SEQ ID NO: 25168 - DNA, 72 bp, Homo sapiens
gggcattttgtggattttttatctaagccactatcagccatttgtttaactctgcaacaaaagcaactttaa

SEQ ID NO: 25169 - DNA, 71 bp, Homo sapiens
tggattttttatctaagccactatcagccatttgtttaactctgcaacaaaagcaactttaaaaatgtttc

SEQ ID NO: 25170 - DNA, 72 bp, Homo sapiens
atctaagccactatcagccatttgtttaactctgcaacaaaagcaactttaaaaatgtttccactgtttgag

SEQ ID NO: 25171 - DNA, 71 bp, Homo sapiens
ccactatcagccatttgtttaactctgcaacaaaagcaactttaaaaatgtttccactgtttgaggaagaa

SEQ ID NO: 25172 - DNA, 68 bp, Homo sapiens
gccatttgtttaactctgcaacaaaagcaactttaaaaatgtttccactgtttgaggaagaaaaccag

SEQ ID NO: 25173 - DNA, 68 bp, Homo sapiens
ctctgcaacaaaagcaactttaaaaatgtttccactgtttgaggaagaaaaccaggccaaaaaggata

SEQ ID NO: 25174 - DNA, 64 bp, Homo sapiens
aagcaactttaaaaatgtttccactgtttgaggaagaaaaccaggccaaaaaggataaggtagt

SEQ ID NO: 25175 - DNA, 66 bp, Homo sapiens
aaaaatgtttccactgtttgaggaagaaaaccaggccaaaaaggataaggtagttgatggtgaaaa

SEQ ID NO: 25176 - DNA, 67 bp, Homo sapiens
aggaagaaaaccaggccaaaaaggataaggtagttgatggtgaaaactgtaatttcgaactggtgaa

SEQ ID NO: 25177 - DNA, 68 bp, Homo sapiens
aaaaccaggccaaaaaggataaggtagttgatggtgaaaactgtaatttcgaactggtgaagtcctca

SEQ ID NO: 25178 - DNA, 70 bp, Homo sapiens
aaaaaggataaggtagttgatggtgaaaactgtaatttcgaactggtgaagtcctcaggttaaggatgca

SEQ ID NO: 25179 - DNA, 74 bp, Homo sapiens
taaggtagttgatggtgaaaactgtaatttcgaactggtgaagtcctcaggttaaggatgcactagacacatat

SEQ ID NO: 25180 - DNA, 80 bp, Homo sapiens
tgaaaactgtaatttcgaactggtgaagtcctcaggttaaggatgcactagacacatattcacacgtgagagctgcagaa

SEQ ID NO: 25181 - DNA, 79 bp, Homo sapiens
actgtaatttcgaactggtgaagtcctcaggttaaggatgcactagacacatattcacacgtgagagctgcagaaagaa

SEQ ID NO: 25182 - DNA, 70 bp, Homo sapiens
agaaaagaaataaccatttagagaaattcttaacctattaccatcctggaaatcagagaaaagctagcaa

SEQ ID NO: 25183 - DNA, 73 bp, Homo sapiens
ataaccatttagagaaattcttaacctattaccatcctggaaatcagagaaaagctagcaactagcactagaa

SEQ ID NO: 25184 - DNA, 77 bp, Homo sapiens
ttagagaaattcttaacctattaccatcctggaaatcagagaaaagctagcaactagcactagaagcatcctgtata

SEQ ID NO: 25185 - DNA, 78 bp, Homo sapiens
attcttaacctattaccatcctggaaatcagagaaaagctagcaactagcactagaagcatcctgtatagacatgaaa

SEQ ID NO: 25186 - DNA, 79 bp, Homo sapiens
tattaccatcctggaaatcagagaaaagctagcaactagcactagaagcatcctgtatagacatgaaaaggacaaaata

SEQ ID NO: 25187 - DNA, 76 bp, Homo sapiens
aaatcagagaaaagctagcaactagcactagaagcatcctgtatagacatgaaaaggacaaaataggaccacaaaa

SEQ ID NO: 25188 - DNA, 75 bp, Homo sapiens
aaaagctagcaactagcactagaagcatcctgtatagacatgaaaaggacaaaataggaccacaaaactggtgaa

SEQ ID NO: 25189 - DNA, 76 bp, Homo sapiens
actagcactagaagcatcctgtatagacatgaaaaggacaaaataggaccacaaaactggtgaaaagcatggtcta

SEQ ID NO: 25190 - DNA, 73 bp, Homo sapiens
actagaagcatcctgtatagacatgaaaaggacaaaataggaccacaaaactggtgaaaagcatggtctaaaa

SEQ ID NO: 25191 - DNA, 75 bp, Homo sapiens
tgtatagacatgaaaaggacaaaataggaccacaaaactggtgaaaagcatggtctaaaacagcatcttatcaaa

SEQ ID NO: 25192 - DNA, 71 bp, Homo sapiens
aaaaggacaaaataggaccacaaaactggtgaaaagcatggtctaaaacagcatcttatcaaactgcgtag

SEQ ID NO: 25193 - DNA, 73 bp, Homo sapiens
aataggaccacaaaactggtgaaaagcatggtctaaaacagcatcttatcaaactgcgtagtgggttatgaaa

SEQ ID NO: 25194 - DNA, 73 bp, Homo sapiens
acaaaactggtgaaaagcatggtctaaaacagcatcttatcaaactgcgtagtgggttatgaaatccattttg

SEQ ID NO: 25195 - DNA, 76 bp, Homo sapiens
tgaaaagcatggtctaaaacagcatcttatcaaactgcgtagtgggttatgaaatccattttgtgggttgatacca

SEQ ID NO: 25196 - DNA, 72 bp, Homo sapiens
gtctaaaacagcatcttatcaaactgcgtagtgggttatgaaatccattttgtgggttgataccacttttta

SEQ ID NO: 25197 - DNA, 70 bp, Homo sapiens
aaacagcatcttatcaaactgcgtagtgggttatgaaatccattttgtgggttgataccactttttaaaa

SEQ ID NO: 25198 - DNA, 69 bp, Homo sapiens
cactttttaaaaataaagtagaatcaaagagataatatttagcatacctccttggaaatttctgtgaaa

SEQ ID NO: 25199 - DNA, 68 bp, Homo sapiens
ctttttaaaaataaagtagaatcaaagagataatatttagcatacctccttggaaatttctgtgaaac

SEQ ID NO: 25200 - DNA, 71 bp, Homo sapiens
ataaagtagaatcaaagagataatatttagcatacctccttggaaatttctgtgaaacttttaattggaca

SEQ ID NO: 25201 - DNA, 74 bp, Homo sapiens
agaatcaaagagataatatttagcatacctccttggaaatttctgtgaaacttttaattggacagacatatatg

SEQ ID NO: 25202 - DNA, 76 bp, Homo sapiens
taatatttagcatacctccttggaaatttctgtgaaacttttaattggacagacatatatgtatagagtgtgtgtg

SEQ ID NO: 25203 - DNA, 72 bp, Homo sapiens
gtgtgcgtgtgtacttgatcacagtatgaaatgtatttcttaatgtgggttgtggtttttaaaaaggcttaa

SEQ ID NO: 25204 - DNA, 69 bp, Homo sapiens
gtgtacttgatcacagtatgaaatgtatttcttaatgtgggttgtggtttttaaaaaggcttaaaatat

SEQ ID NO: 25205 - DNA, 67 bp, Homo sapiens
cacagtatgaaatgtatttcttaatgtgggttgtggtttttaaaaaggcttaaaatattggtgttaa

SEQ ID NO: 25206 - DNA, 65 bp, Homo sapiens
gtatttcttaatgtgggttgtggtttttaaaaaggcttaaaatattggtgttaaacatacattac

SEQ ID NO: 25207 - DNA, 65 bp, Homo sapiens
cttaatgtgggttgtggtttttaaaaaggcttaaaatattggtgttaaacatacattactatggt

SEQ ID NO: 25208 - DNA, 64 bp, Homo sapiens
ggttgtggtttttaaaaaggcttaaaatattggtgttaaacatacattactatggtttcaaatt

SEQ ID NO: 25209 - DNA, 65 bp, Homo sapiens
aaaggcttaaaatattggtgttaaacatacattactatggtttcaaattttaaaccttaatctat

SEQ ID NO: 25210 - DNA, 70 bp, Homo sapiens
aatattggtgttaaacatacattactatggtttcaaattttaaaccttaatctattgattattagagcaa

SEQ ID NO: 25211 - DNA, 70 bp, Homo sapiens
tggtgttaaacatacattactatggtttcaaattttaaaccttaatctattgattattagagcaaattcc

SEQ ID NO: 25212 - DNA, 71 bp, Homo sapiens
catacattactatggtttcaaattttaaaccttaatctattgattattagagcaaattcctattacatact

SEQ ID NO: 25213 - DNA, 70 bp, Homo sapiens
tttcaaattttaaaccttaatctattgattattagagcaaattcctattacatactttacaaaggagtga

SEQ ID NO: 25214 - DNA, 71 bp, Homo sapiens
taaaccttaatctattgattattagagcaaattcctattacatactttacaaaggagtgaataattcgatt

SEQ ID NO: 25215 - DNA, 71 bp, Homo sapiens
tctattgattattagagcaaattcctattacatactttacaaaggagtgaataattcgatttttagaaaac

SEQ ID NO: 25216 - DNA, 70 bp, Homo sapiens
attagagcaaattcctattacatactttacaaaggagtgaataattcgatttttagaaaactagctaatc

SEQ ID NO: 25217 - DNA, 69 bp, Homo sapiens
gcaaattcctattacatactttacaaaggagtgaataattcgatttttagaaaactagctaatcctaaa

SEQ ID NO: 25218 - DNA, 67 bp, Homo sapiens
catactttacaaaggagtgaataattcgatttttagaaaactagctaatcctaaaagtttaagtatc

SEQ ID NO: 25219 - DNA, 68 bp, Homo sapiens
caaaggagtgaataattcgatttttagaaaactagctaatcctaaaagtttaagtatcctcataagta

SEQ ID NO: 25220 - DNA, 69 bp, Homo sapiens
agtgaataattcgatttttagaaaactagctaatcctaaaagtttaagtatcctcataagtatcctcat

SEQ ID NO: 25221 - DNA, 70 bp, Homo sapiens
gaaaactagctaatcctaaaagtttaagtatcctcataagtatcctcatttttatattgagcaaaaataa

SEQ ID NO: 25222 - DNA, 71 bp, Homo sapiens
tcctaaaagtttaagtatcctcataagtatcctcatttttatattgagcaaaaataaaaatgagtgggtgc

SEQ ID NO: 25223 - DNA, 72 bp, Homo sapiens
aagtatcctcataagtatcctcatttttatattgagcaaaaataaaaatgagtgggtgctatttttccctga

SEQ ID NO: 25224 - DNA, 72 bp, Homo sapiens
cctcataagtatcctcatttttatattgagcaaaaataaaaatgagtgggtgctatttttccctgagtctaa

SEQ ID NO: 25225 - DNA, 74 bp, Homo sapiens
tcatttttatattgagcaaaaataaaaatgagtgggtgctatttttccctgagtctaaaataggtatggcagca

SEQ ID NO: 25226 - DNA, 70 bp, Homo sapiens
aataaaaatgagtgggtgctatttttccctgagtctaaaataggtatggcagcattttacttaactagga

SEQ ID NO: 25227 - DNA, 71 bp, Homo sapiens
aaatgagtgggtgctatttttccctgagtctaaaataggtatggcagcattttacttaactaggaccattg

SEQ ID NO: 25228 - DNA, 76 bp, Homo sapiens
tatttttccctgagtctaaaataggtatggcagcattttacttaactaggaccattggcagctgcatggtggcaag

SEQ ID NO: 25229 - DNA, 76 bp, Homo sapiens
tttacttaactaggaccattggcagctgcatggtggcaagttggaaagatctcagttgaggaggaagaaaaataca

SEQ ID NO: 25230 - DNA, 80 bp, Homo sapiens
accattggcagctgcatggtggcaagttggaaagatctcagttgaggaggaagaaaaatacactctgcagtacatataaa

SEQ ID NO: 25231 - DNA, 75 bp, Homo sapiens
gcaagttggaaagatctcagttgaggaggaagaaaaatacactctgcagtacatataaaggagtactttgagaaa

SEQ ID NO: 25232 - DNA, 74 bp, Homo sapiens
ttggaaagatctcagttgaggaggaagaaaaatacactctgcagtacatataaaggagtactttgagaaacttc

SEQ ID NO: 25233 - DNA, 71 bp, Homo sapiens
agttgaggaggaagaaaaatacactctgcagtacatataaaggagtactttgagaaacttccagaagtaat

SEQ ID NO: 25234 - DNA, 72 bp, Homo sapiens
gaagaaaaatacactctgcagtacatataaaggagtactttgagaaacttccagaagtaattgggagtacat

SEQ ID NO: 25235 - DNA, 73 bp, Homo sapiens
atacactctgcagtacatataaaggagtactttgagaaacttccagaagtaattgggagtacattattatggt

SEQ ID NO: 25236 - DNA, 73 bp, Homo sapiens
ggagtactttgagaaacttccagaagtaattgggagtacattattatggttttatgctataccatttcagaca

SEQ ID NO: 25237 - DNA, 73 bp, Homo sapiens
ttctaggcaaaagaaaaatggcacaagaaaatatgtgtacatgtttgttaccttaggcagaagaaaaactgca

SEQ ID NO: 25238 - DNA, 72 bp, Homo sapiens
aaatggcacaagaaaatatgtgtacatgtttgttaccttaggcagaagaaaaactgcaggtgaaaatttcca

SEQ ID NO: 25239 - DNA, 72 bp, Homo sapiens
agaaaatatgtgtacatgtttgttaccttaggcagaagaaaaactgcaggtgaaaatttccagtgtgcgtaa

SEQ ID NO: 25240 - DNA, 73 bp, Homo sapiens
tgtacatgtttgttaccttaggcagaagaaaaactgcaggtgaaaatttccagtgtgcgtaagcaacagttaa

SEQ ID NO: 25241 - DNA, 71 bp, Homo sapiens
atgtttgttaccttaggcagaagaaaaactgcaggtgaaaatttccagtgtgcgtaagcaacagttaaata

SEQ ID NO: 25242 - DNA, 70 bp, Homo sapiens
ggcagaagaaaaactgcaggtgaaaatttccagtgtgcgtaagcaacagttaaataccaaaacccagtaa

SEQ ID NO: 25243 - DNA, 69 bp, Homo sapiens
aaaactgcaggtgaaaatttccagtgtgcgtaagcaacagttaaataccaaaacccagtaaagccagaa

SEQ ID NO: 25244 - DNA, 73 bp, Homo sapiens
aggtgaaaatttccagtgtgcgtaagcaacagttaaataccaaaacccagtaaagccagaagtgagcagcaga

SEQ ID NO: 25245 - DNA, 78 bp, Homo sapiens
atttccagtgtgcgtaagcaacagttaaataccaaaacccagtaaagccagaagtgagcagcagagctgccacacaga

SEQ ID NO: 25246 - DNA, 78 bp, Homo sapiens
cgtaagcaacagttaaataccaaaacccagtaaagccagaagtgagcagcagagctgccacacagatcactgaaggtg

SEQ ID NO: 25247 - DNA, 80 bp, Homo sapiens
taaataccaaaacccagtaaagccagaagtgagcagcagagctgccacacagatcactgaaggtggcaccagagaactaa

SEQ ID NO: 25248 - DNA, 78 bp, Homo sapiens
accaaaacccagtaaagccagaagtgagcagcagagctgccacacagatcactgaaggtggcaccagagaactaaccc

SEQ ID NO: 25249 - DNA, 81 bp, Homo sapiens
taaagccagaagtgagcagcagagctgccacacagatcactgaaggtggcaccagagaactaaccccagaggaaggtccta

SEQ ID NO: 25250 - DNA, 79 bp, Homo sapiens
aagtgagcagcagagctgccacacagatcactgaaggtggcaccagagaactaaccccagaggaaggtcctagaagaaa

SEQ ID NO: 25251 - DNA, 76 bp, Homo sapiens
agagctgccacacagatcactgaaggtggcaccagagaactaaccccagaggaaggtcctagaagaaagaggtgaa

SEQ ID NO: 25252 - DNA, 76 bp, Homo sapiens
acacagatcactgaaggtggcaccagagaactaaccccagaggaaggtcctagaagaaagaggtgaagatcagcca

SEQ ID NO: 25253 - DNA, 74 bp, Homo sapiens
actgaaggtggcaccagagaactaaccccagaggaaggtcctagaagaaagaggtgaagatcagccaggcgtgc

SEQ ID NO: 25254 - DNA, 63 bp, Homo sapiens
aaaatttgtaaagttaaggagggtaacttataaaagtacaacttcccagtttatatgaaaatg

SEQ ID NO: 25255 - DNA, 64 bp, Homo sapiens
ttgtaaagttaaggagggtaacttataaaagtacaacttcccagtttatatgaaaatggtttaa

SEQ ID NO: 25256 - DNA, 65 bp, Homo sapiens
aggagggtaacttataaaagtacaacttcccagtttatatgaaaatggtttaataatactgaaac

SEQ ID NO: 25257 - DNA, 68 bp, Homo sapiens
cttataaaagtacaacttcccagtttatatgaaaatggtttaataatactgaaacttaaaagctgata

SEQ ID NO: 25258 - DNA, 70 bp, Homo sapiens
cagtttatatgaaaatggtttaataatactgaaacttaaaagctgataaaatttattggctacgactaca

SEQ ID NO: 25259 - DNA, 68 bp, Homo sapiens
atggtttaataatactgaaacttaaaagctgataaaatttattggctacgactacattttttctccaa

SEQ ID NO: 25260 - DNA, 74 bp, Homo sapiens
cttaaaagctgataaaatttattggctacgactacattttttctccaatcacagcaaatattatgagacactta

SEQ ID NO: 25261 - DNA, 79 bp, Homo sapiens
gctgataaaatttattggctacgactacattttttctccaatcacagcaaatattatgagacacttatcaatgcaaagc

SEQ ID NO: 25262 - DNA, 78 bp, Homo sapiens
tttattggctacgactacattttttctccaatcacagcaaatattatgagacacttatcaatgcaaagcttttgatcc

SEQ ID NO: 25263 - DNA, 79 bp, Homo sapiens
ctacgactacattttttctccaatcacagcaaatattatgagacacttatcaatgcaaagcttttgatcctttatcatg

SEQ ID NO: 25264 - DNA, 80 bp, Homo sapiens
ttttctccaatcacagcaaatattatgagacacttatcaatgcaaagcttttgatcctttatcatgtactctgaacccta

SEQ ID NO: 25265 - DNA, 80 bp, Homo sapiens
acagcaaatattatgagacacttatcaatgcaaagcttttgatcctttatcatgtactctgaaccctatgcactactaaa

SEQ ID NO: 25266 - DNA, 80 bp, Homo sapiens
attatgagacacttatcaatgcaaagcttttgatcctttatcatgtactctgaaccctatgcactactaaataggcaata

SEQ ID NO: 25267 - DNA, 80 bp, Homo sapiens
acacttatcaatgcaaagcttttgatcctttatcatgtactctgaaccctatgcactactaaataggcaatatgatacaa

SEQ ID NO: 25268 - DNA, 76 bp, Homo sapiens
caaagcttttgatcctttatcatgtactctgaaccctatgcactactaaataggcaatatgatacaatcaaaggtt

SEQ ID NO: 25269 - DNA, 75 bp, Homo sapiens
cttttgatcctttatcatgtactctgaaccctatgcactactaaataggcaatatgatacaatcaaaggtttctt

SEQ ID NO: 25270 - DNA, 78 bp, Homo sapiens
tttatcatgtactctgaaccctatgcactactaaataggcaatatgatacaatcaaaggtttctttggcagacataat

SEQ ID NO: 25271 - DNA, 77 bp, Homo sapiens
actctgaaccctatgcactactaaataggcaatatgatacaatcaaaggtttctttggcagacataattatatgtac

SEQ ID NO: 25272 - DNA, 77 bp, Homo sapiens
ctatgcactactaaataggcaatatgatacaatcaaaggtttctttggcagacataattatatgtaccaaaacatta

SEQ ID NO: 25273 - DNA, 74 bp, Homo sapiens
ctaaataggcaatatgatacaatcaaaggtttctttggcagacataattatatgtaccaaaacattaaactgcg

SEQ ID NO: 25274 - DNA, 71 bp, Homo sapiens
gatacaatcaaaggtttctttggcagacataattatatgtaccaaaacattaaactgcgtattttccctta

SEQ ID NO: 25275 - DNA, 67 bp, Homo sapiens
caaaggtttctttggcagacataattatatgtaccaaaacattaaactgcgtattttcccttaaact

SEQ ID NO: 25276 - DNA, 71 bp, Homo sapiens
tggcagacataattatatgtaccaaaacattaaactgcgtattttcccttaaacttacctgactaaaggca

SEQ ID NO: 25277 - DNA, 72 bp, Homo sapiens
cataattatatgtaccaaaacattaaactgcgtattttcccttaaacttacctgactaaaggcatctgatca

SEQ ID NO: 25278 - DNA, 69 bp, Homo sapiens
gtaccaaaacattaaactgcgtattttcccttaaacttacctgactaaaggcatctgatcaaaagacaa

SEQ ID NO: 25279 - DNA, 70 bp, Homo sapiens
cattaaactgcgtattttcccttaaacttacctgactaaaggcatctgatcaaaagacaaaaagtgaaca

SEQ ID NO: 25280 - DNA, 69 bp, Homo sapiens
tgcgtattttcccttaaacttacctgactaaaggcatctgatcaaaagacaaaaagtgaacaattttaa

SEQ ID NO: 25281 - DNA, 70 bp, Homo sapiens
ccttaaacttacctgactaaaggcatctgatcaaaagacaaaaagtgaacaattttaataagtagttgca

SEQ ID NO: 25282 - DNA, 74 bp, Homo sapiens
ctgactaaaggcatctgatcaaaagacaaaaagtgaacaattttaataagtagttgcatttatcaataagagtc

SEQ ID NO: 25283 - DNA, 74 bp, Homo sapiens
ggcatctgatcaaaagacaaaaagtgaacaattttaataagtagttgcatttatcaataagagtctacaaggta

SEQ ID NO: 25284 - DNA, 71 bp, Homo sapiens
gtgaacaattttaataagtagttgcatttatcaataagagtctacaaggtaacaaaaagtgtaaagagaca

SEQ ID NO: 25285 - DNA, 71 bp, Homo sapiens
agtagttgcatttatcaataagagtctacaaggtaacaaaaagtgtaaagagacatctttttgaaaattca

SEQ ID NO: 25286 - DNA, 68 bp, Homo sapiens
gagtctacaaggtaacaaaaagtgtaaagagacatctttttgaaaattcatataaaacaaaccttcca

SEQ ID NO: 25287 - DNA, 70 bp, Homo sapiens
gtaacaaaaagtgtaaagagacatctttttgaaaattcatataaaacaaaccttccatgttattagatca

SEQ ID NO: 25288 - DNA, 72 bp, Homo sapiens
gagacatctttttgaaaattcatataaaacaaaccttccatgttattagatcaacaaatataatcacctggg

SEQ ID NO: 25289 - DNA, 70 bp, Homo sapiens
aaattcatataaaacaaaccttccatgttattagatcaacaaatataatcacctgggtatattttattag

SEQ ID NO: 25290 - DNA, 70 bp, Homo sapiens
catataaaacaaaccttccatgttattagatcaacaaatataatcacctgggtatattttattagggaaa

SEQ ID NO: 25291 - DNA, 72 bp, Homo sapiens
accttccatgttattagatcaacaaatataatcacctgggtatattttattagggaaaaatgacaatattga

SEQ ID NO: 25292 - DNA, 72 bp, Homo sapiens
ttagatcaacaaatataatcacctgggtatattttattagggaaaaatgacaatattgataataaaaagaga

SEQ ID NO: 25293 - DNA, 70 bp, Homo sapiens
tcaacaaatataatcacctgggtatattttattagggaaaaatgacaatattgataataaaaagagaaag

SEQ ID NO: 25294 - DNA, 69 bp, Homo sapiens
taatcacctgggtatattttattagggaaaaatgacaatattgataataaaaagagaaaggaaaaatga

SEQ ID NO: 25295 - DNA, 73 bp, Homo sapiens
aggaaaaatgaaaatgcatctcagaccagaataccataacaaaacttttgtggaagctgcattttatttgaaa

SEQ ID NO: 25296 - DNA, 75 bp, Homo sapiens
tgaaaatgcatctcagaccagaataccataacaaaacttttgtggaagctgcattttatttgaaaatccacccat

SEQ ID NO: 25297 - DNA, 72 bp, Homo sapiens
ctcagaccagaataccataacaaaacttttgtggaagctgcattttatttgaaaatccacccattttgctaa

SEQ ID NO: 25298 - DNA, 70 bp, Homo sapiens
acaaaacttttgtggaagctgcattttatttgaaaatccacccattttgctaacatacattttaatattg

SEQ ID NO: 25299 - DNA, 71 bp, Homo sapiens
ttgtggaagctgcattttatttgaaaatccacccattttgctaacatacattttaatattgtaaacaaaaa

SEQ ID NO: 25300 - DNA, 73 bp, Homo sapiens
tttatttgaaaatccacccattttgctaacatacattttaatattgtaaacaaaaatagaatctgcagagaca

SEQ ID NO: 25301 - DNA, 76 bp, Homo sapiens
tgaaaatccacccattttgctaacatacattttaatattgtaaacaaaaatagaatctgcagagacaatgcaacaa

SEQ ID NO: 25302 - DNA, 76 bp, Homo sapiens
acccattttgctaacatacattttaatattgtaaacaaaaatagaatctgcagagacaatgcaacaagaatgctta

SEQ ID NO: 25303 - DNA, 80 bp, Homo sapiens
tgctaacatacattttaatattgtaaacaaaaatagaatctgcagagacaatgcaacaagaatgcttaaactcatgtaca

SEQ ID NO: 25304 - DNA, 78 bp, Homo sapiens
catacattttaatattgtaaacaaaaatagaatctgcagagacaatgcaacaagaatgcttaaactcatgtacagaat

SEQ ID NO: 25305 - DNA, 79 bp, Homo sapiens
gtaaacaaaaatagaatctgcagagacaatgcaacaagaatgcttaaactcatgtacagaattgctttcctacaatgaa

SEQ ID NO: 25306 - DNA, 79 bp, Homo sapiens
aacaaaaatagaatctgcagagacaatgcaacaagaatgcttaaactcatgtacagaattgctttcctacaatgaactg

SEQ ID NO: 25307 - DNA, 77 bp, Homo sapiens
cagagacaatgcaacaagaatgcttaaactcatgtacagaattgctttcctacaatgaactgtccttcttaaggccc

SEQ ID NO: 25308 - DNA, 76 bp, Homo sapiens
agagacaatgcaacaagaatgcttaaactcatgtacagaattgctttcctacaatgaactgtccttcttaaggccc

SEQ ID NO: 25309 - DNA, 75 bp, Homo sapiens
aatgcaacaagaatgcttaaactcatgtacagaattgctttcctacaatgaactgtccttcttaaggcccctctc

SEQ ID NO: 25310 - DNA, 72 bp, Homo sapiens
aatgcttaaactcatgtacagaattgctttcctacaatgaactgtccttcttaaggcccctctccacccaaa

SEQ ID NO: 25311 - DNA, 70 bp, Homo sapiens
agaattgctttcctacaatgaactgtccttcttaaggcccctctccacccaaatgttaaagatgtattta

SEQ ID NO: 25312 - DNA, 71 bp, Homo sapiens
tttcctacaatgaactgtccttcttaaggcccctctccacccaaatgttaaagatgtatttacacaaagca

SEQ ID NO: 25313 - DNA, 70 bp, Homo sapiens
aactgtccttcttaaggcccctctccacccaaatgttaaagatgtatttacacaaagcaccgatcaacag

SEQ ID NO: 25314 - DNA, 72 bp, Homo sapiens
ttcttaaggcccctctccacccaaatgttaaagatgtatttacacaaagcaccgatcaacagtgcagtttaa

SEQ ID NO: 25315 - DNA, 72 bp, Homo sapiens
tccacccaaatgttaaagatgtatttacacaaagcaccgatcaacagtgcagtttaattcttcgtttactaa

SEQ ID NO: 25316 - DNA, 73 bp, Homo sapiens
tgttaaagatgtatttacacaaagcaccgatcaacagtgcagtttaattcttcgtttactaaactcttggcta

SEQ ID NO: 25317 - DNA, 70 bp, Homo sapiens
accgatcaacagtgcagtttaattcttcgtttactaaactcttggctagacattaactttaaagatacta

SEQ ID NO: 25318 - DNA, 67 bp, Homo sapiens
gtgcagtttaattcttcgtttactaaactcttggctagacattaactttaaagatactatttcccct

SEQ ID NO: 25319 - DNA, 73 bp, Homo sapiens
ggctagacattaactttaaagatactatttccccttatttaaaaggtatatgatcataacatggcacgagcca

SEQ ID NO: 25320 - DNA, 70 bp, Homo sapiens
actttaaagatactatttccccttatttaaaaggtatatgatcataacatggcacgagccaaagaaaatg

SEQ ID NO: 25321 - DNA, 72 bp, Homo sapiens
agatactatttccccttatttaaaaggtatatgatcataacatggcacgagccaaagaaaatgttcaaggac

SEQ ID NO: 25322 - DNA, 71 bp, Homo sapiens
tttccccttatttaaaaggtatatgatcataacatggcacgagccaaagaaaatgttcaaggactttgccc

SEQ ID NO: 25323 - DNA, 71 bp, Homo sapiens
tttaaaaggtatatgatcataacatggcacgagccaaagaaaatgttcaaggactttgccccccttccctc

SEQ ID NO: 25324 - DNA, 71 bp, Homo sapiens
atatgatcataacatggcacgagccaaagaaaatgttcaaggactttgccccccttccctcccccttgtaa

SEQ ID NO: 25325 - DNA, 63 bp, Homo sapiens
aaagaaaatgttcaaggactttgccccccttccctcccccttgtaacaccttctagagtttta

SEQ ID NO: 25326 - DNA, 64 bp, Homo sapiens
aatgttcaaggactttgccccccttccctcccccttgtaacaccttctagagttttagtgaaaa

SEQ ID NO: 25327 - DNA, 62 bp, Homo sapiens
actttgccccccttccctcccccttgtaacaccttctagagttttagtgaaaagaaggaaag

SEQ ID NO: 25328 - DNA, 67 bp, Homo sapiens
ttccctcccccttgtaacaccttctagagttttagtgaaaagaaggaaagtcttgaagtgaaagcaa

SEQ ID NO: 25329 - DNA, 71 bp, Homo sapiens
cttgtaacaccttctagagttttagtgaaaagaaggaaagtcttgaagtgaaagcaattcctcacattcat

SEQ ID NO: 25330 - DNA, 70 bp, Homo sapiens
ttttagtgaaaagaaggaaagtcttgaagtgaaagcaattcctcacattcattttggaaaggccctaatg

SEQ ID NO: 25331 - DNA, 71 bp, Homo sapiens
aagaaggaaagtcttgaagtgaaagcaattcctcacattcattttggaaaggccctaatgtcaaatggaaa

SEQ ID NO: 25332 - DNA, 76 bp, Homo sapiens
agtgaaagcaattcctcacattcattttggaaaggccctaatgtcaaatggaaaataatgacatgccaagcacaaa

SEQ ID NO: 25333 - DNA, 76 bp, Homo sapiens
attcctcacattcattttggaaaggccctaatgtcaaatggaaaataatgacatgccaagcacaaagcagtaaaga

SEQ ID NO: 25334 - DNA, 73 bp, Homo sapiens
attttggaaaggccctaatgtcaaatggaaaataatgacatgccaagcacaaagcagtaaagatccttcccaa

SEQ ID NO: 25335 - DNA, 78 bp, Homo sapiens
ccctaatgtcaaatggaaaataatgacatgccaagcacaaagcagtaaagatccttcccaatgcactaatgctgaatt

SEQ ID NO: 25336 - DNA, 77 bp, Homo sapiens
aaatggaaaataatgacatgccaagcacaaagcagtaaagatccttcccaatgcactaatgctgaatttaaaatgta

SEQ ID NO: 25337 - DNA, 77 bp, Homo sapiens
aaaataatgacatgccaagcacaaagcagtaaagatccttcccaatgcactaatgctgaatttaaaatgtagtgctt

SEQ ID NO: 25338 - DNA, 78 bp, Homo sapiens
acatgccaagcacaaagcagtaaagatccttcccaatgcactaatgctgaatttaaaatgtagtgcttttcctagtca

SEQ ID NO: 25339 - DNA, 74 bp, Homo sapiens
aaagcagtaaagatccttcccaatgcactaatgctgaatttaaaatgtagtgcttttcctagtcagtgaactgt

SEQ ID NO: 25340 - DNA, 76 bp, Homo sapiens
aatgcactaatgctgaatttaaaatgtagtgcttttcctagtcagtgaactgttccctggcaaaatcctaggcaca

SEQ ID NO: 25341 - DNA, 73 bp, Homo sapiens
atttaaaatgtagtgcttttcctagtcagtgaactgttccctggcaaaatcctaggcacagaattgactataa

SEQ ID NO: 25342 - DNA, 75 bp, Homo sapiens
cttttcctagtcagtgaactgttccctggcaaaatcctaggcacagaattgactataaggattaatgcatttata

SEQ ID NO: 25343 - DNA, 77 bp, Homo sapiens
tcagtgaactgttccctggcaaaatcctaggcacagaattgactataaggattaatgcatttataatgcttccctaa

SEQ ID NO: 25344 - DNA, 74 bp, Homo sapiens
aactgttccctggcaaaatcctaggcacagaattgactataaggattaatgcatttataatgcttccctaaatc

SEQ ID NO: 25345 - DNA, 75 bp, Homo sapiens
aaaatcctaggcacagaattgactataaggattaatgcatttataatgcttccctaaatcccacagaggccgaga

SEQ ID NO: 25346 - DNA, 76 bp, Homo sapiens
taggcacagaattgactataaggattaatgcatttataatgcttccctaaatcccacagaggccgagaattcttaa

SEQ ID NO: 25347 - DNA, 75 bp, Homo sapiens
aattgactataaggattaatgcatttataatgcttccctaaatcccacagaggccgagaattcttaagagattca

SEQ ID NO: 25348 - DNA, 76 bp, Homo sapiens
taaggattaatgcatttataatgcttccctaaatcccacagaggccgagaattcttaagagattcagacctatgga

SEQ ID NO: 25349 - DNA, 73 bp, Homo sapiens
ttataatgcttccctaaatcccacagaggccgagaattcttaagagattcagacctatggacttgccttaaaa

SEQ ID NO: 25350 - DNA, 72 bp, Homo sapiens
atgcttccctaaatcccacagaggccgagaattcttaagagattcagacctatggacttgccttaaaatatt

SEQ ID NO: 25351 - DNA, 74 bp, Homo sapiens
aaatcccacagaggccgagaattcttaagagattcagacctatggacttgccttaaaatatttagtgctctgta

SEQ ID NO: 25352 - DNA, 78 bp, Homo sapiens
cgagaattcttaagagattcagacctatggacttgccttaaaatatttagtgctctgtatgtcagctgagaaaagcat

SEQ ID NO: 25353 - DNA, 79 bp, Homo sapiens
attcttaagagattcagacctatggacttgccttaaaatatttagtgctctgtatgtcagctgagaaaagcattctgaa

SEQ ID NO: 25354 - DNA, 81 bp, Homo sapiens
attcagacctatggacttgccttaaaatatttagtgctctgtatgtcagctgagaaaagcattctgaatcagattcattct

SEQ ID NO: 25355 - DNA, 81 bp, Homo sapiens
aaatatttagtgctctgtatgtcagctgagaaaagcattctgaatcagattcattcttgtggataaaaatcaaacatactg

SEQ ID NO: 25356 - DNA, 87 bp, Homo sapiens
ttagtgctctgtatgtcagctgagaaaagcattctgaatcagattcattcttgtggataaaaatcaaacatactgtgcacatccata

SEQ ID NO: 25357 - DNA, 86 bp, Homo sapiens
tatgtcagctgagaaaagcattctgaatcagattcattcttgtggataaaaatcaaacatactgtgcacatccatactcattttca

SEQ ID NO: 25358 - DNA, 83 bp, Homo sapiens
tgagaaaagcattctgaatcagattcattcttgtggataaaaatcaaacatactgtgcacatccatactcattttcataagga

SEQ ID NO: 25359 - DNA, 83 bp, Homo sapiens
tgaatcagattcattcttgtggataaaaatcaaacatactgtgcacatccatactcattttcataaggaggtctgatacaata

SEQ ID NO: 25360 - DNA, 81 bp, Homo sapiens
cagattcattcttgtggataaaaatcaaacatactgtgcacatccatactcattttcataaggaggtctgatacaatatta

SEQ ID NO: 25361 - DNA, 79 bp, Homo sapiens
cttgtggataaaaatcaaacatactgtgcacatccatactcattttcataaggaggtctgatacaatattaatgttatg

SEQ ID NO: 25362 - DNA, 81 bp, Homo sapiens
atcaaacatactgtgcacatccatactcattttcataaggaggtctgatacaatattaatgttatgtaaaattgataatca

SEQ ID NO: 25363 - DNA, 80 bp, Homo sapiens
atactgtgcacatccatactcattttcataaggaggtctgatacaatattaatgttatgtaaaattgataatcataaata

SEQ ID NO: 25364 - DNA, 77 bp, Homo sapiens
catccatactcattttcataaggaggtctgatacaatattaatgttatgtaaaattgataatcataaataaatacaa

SEQ ID NO: 25365 - DNA, 74 bp, Homo sapiens
ttcataaggaggtctgatacaatattaatgttatgtaaaattgataatcataaataaatacaaatacttaagga

SEQ ID NO: 25366 - DNA, 76 bp, Homo sapiens
ggtctgatacaatattaatgttatgtaaaattgataatcataaataaatacaaatacttaaggaatgtctactgca

SEQ ID NO: 25367 - DNA, 74 bp, Homo sapiens
caatattaatgttatgtaaaattgataatcataaataaatacaaatacttaaggaatgtctactgcaaactgaa

SEQ ID NO: 25368 - DNA, 73 bp, Homo sapiens
atgttatgtaaaattgataatcataaataaatacaaatacttaaggaatgtctactgcaaactgaatataatt

SEQ ID NO: 25369 - DNA, 69 bp, Homo sapiens
aaaattgataatcataaataaatacaaatacttaaggaatgtctactgcaaactgaatataattttttt

SEQ ID NO: 25370 - DNA, 66 bp, Homo sapiens
aaaaaaagaaaagttaatttcagttattgtttctgtatttgtgaggactggagaaaagaaagataa

SEQ ID NO: 25371 - DNA, 72 bp, Homo sapiens
gaaaagttaatttcagttattgtttctgtatttgtgaggactggagaaaagaaagataatgcataattagga

SEQ ID NO: 25372 - DNA, 73 bp, Homo sapiens
tcagttattgtttctgtatttgtgaggactggagaaaagaaagataatgcataattaggaattttaattttga

SEQ ID NO: 25373 - DNA, 72 bp, Homo sapiens
cagttattgtttctgtatttgtgaggactggagaaaagaaagataatgcataattaggaattttaattttga

SEQ ID NO: 25374 - DNA, 71 bp, Homo sapiens
attgtttctgtatttgtgaggactggagaaaagaaagataatgcataattaggaattttaattttgatccc

SEQ ID NO: 25375 - DNA, 70 bp, Homo sapiens
gactggagaaaagaaagataatgcataattaggaattttaattttgatcccccaaaagagtcctgttgaa

SEQ ID NO: 25376 - DNA, 70 bp, Homo sapiens
agataatgcataattaggaattttaattttgatcccccaaaagagtcctgttgaaatacagtaaaggaca

SEQ ID NO: 25377 - DNA, 69 bp, Homo sapiens
gcataattaggaattttaattttgatcccccaaaagagtcctgttgaaatacagtaaaggacacagttc

SEQ ID NO: 25378 - DNA, 68 bp, Homo sapiens
aattttaattttgatcccccaaaagagtcctgttgaaatacagtaaaggacacagttcttctctccag

SEQ ID NO: 25379 - DNA, 70 bp, Homo sapiens
aaaagagtcctgttgaaatacagtaaaggacacagttcttctctccaggcagcttttccaaatacaaatt

SEQ ID NO: 25380 - DNA, 72 bp, Homo sapiens
ttgaaatacagtaaaggacacagttcttctctccaggcagcttttccaaatacaaatttcacactttccaaa

SEQ ID NO: 25381 - DNA, 71 bp, Homo sapiens
atacagtaaaggacacagttcttctctccaggcagcttttccaaatacaaatttcacactttccaaataag

SEQ ID NO: 25382 - DNA, 71 bp, Homo sapiens
acagttcttctctccaggcagcttttccaaatacaaatttcacactttccaaataagggcttttcttgata

SEQ ID NO: 25383 - DNA, 71 bp, Homo sapiens
tctccaggcagcttttccaaatacaaatttcacactttccaaataagggcttttcttgataggttactgat

SEQ ID NO: 25384 - DNA, 70 bp, Homo sapiens
gcagcttttccaaatacaaatttcacactttccaaataagggcttttcttgataggttactgattatggg

SEQ ID NO: 25385 - DNA, 69 bp, Homo sapiens
tacaaatttcacactttccaaataagggcttttcttgataggttactgattatgggtattaacaggagt

SEQ ID NO: 25386 - DNA, 69 bp, Homo sapiens
ttccaaataagggcttttcttgataggttactgattatgggtattaacaggagttgaaagaattgaagg

SEQ ID NO: 25387 - DNA, 69 bp, Homo sapiens
tccaaataagggcttttcttgataggttactgattatgggtattaacaggagttgaaagaattgaaggg

SEQ ID NO: 25388 - DNA, 70 bp, Homo sapiens
taagggcttttcttgataggttactgattatgggtattaacaggagttgaaagaattgaagggttagtca

SEQ ID NO: 25389 - DNA, 70 bp, Homo sapiens
cttgataggttactgattatgggtattaacaggagttgaaagaattgaagggttagtcaccaaaaagaca

SEQ ID NO: 25390 - DNA, 70 bp, Homo sapiens
ataggttactgattatgggtattaacaggagttgaaagaattgaagggttagtcaccaaaaagacagatc

SEQ ID NO: 25391 - DNA, 71 bp, Homo sapiens
ctgattatgggtattaacaggagttgaaagaattgaagggttagtcaccaaaaagacagatcttagtctta

SEQ ID NO: 25392 - DNA, 72 bp, Homo sapiens
ggtattaacaggagttgaaagaattgaagggttagtcaccaaaaagacagatcttagtcttaaatcatagca

SEQ ID NO: 25393 - DNA, 72 bp, Homo sapiens
gtattaacaggagttgaaagaattgaagggttagtcaccaaaaagacagatcttagtcttaaatcatagcaa

SEQ ID NO: 25394 - DNA, 72 bp, Homo sapiens
gaattgaagggttagtcaccaaaaagacagatcttagtcttaaatcatagcaattcttggctttataaactg

SEQ ID NO: 25395 - DNA, 73 bp, Homo sapiens
ggttagtcaccaaaaagacagatcttagtcttaaatcatagcaattcttggctttataaactgtattgatacg

SEQ ID NO: 25396 - DNA, 74 bp, Homo sapiens
caccaaaaagacagatcttagtcttaaatcatagcaattcttggctttataaactgtattgatacgttctccta

SEQ ID NO: 25397 - DNA, 74 bp, Homo sapiens
gatcttagtcttaaatcatagcaattcttggctttataaactgtattgatacgttctcctataaactagtccca

SEQ ID NO: 25398 - DNA, 72 bp, Homo sapiens
tcttaaatcatagcaattcttggctttataaactgtattgatacgttctcctataaactagtcccaatttcc

SEQ ID NO: 25399 - DNA, 69 bp, Homo sapiens
aattcttggctttataaactgtattgatacgttctcctataaactagtcccaatttccttcatgggcct

SEQ ID NO: 25400 - DNA, 71 bp, Homo sapiens
tttataaactgtattgatacgttctcctataaactagtcccaatttccttcatgggccttcactgagttac

SEQ ID NO: 25401 - DNA, 71 bp, Homo sapiens
aaactgtattgatacgttctcctataaactagtcccaatttccttcatgggccttcactgagttacttgta

SEQ ID NO: 25402 - DNA, 73 bp, Homo sapiens
ccaatttccttcatgggccttcactgagttacttgtagcattctaatggaagaagagagtttaagagatttaa

SEQ ID NO: 25403 - DNA, 76 bp, Homo sapiens
ttcatgggccttcactgagttacttgtagcattctaatggaagaagagagtttaagagatttaagagacagcagtt

SEQ ID NO: 25404 - DNA, 74 bp, Homo sapiens
cttcactgagttacttgtagcattctaatggaagaagagagtttaagagatttaagagacagcagtttggattt

SEQ ID NO: 25405 - DNA, 75 bp, Homo sapiens
ttacttgtagcattctaatggaagaagagagtttaagagatttaagagacagcagtttggattttgctggaagta

SEQ ID NO: 25406 - DNA, 73 bp, Homo sapiens
ttctaatggaagaagagagtttaagagatttaagagacagcagtttggattttgctggaagtaaggattttgc

SEQ ID NO: 25407 - DNA, 75 bp, Homo sapiens
agaagagagtttaagagatttaagagacagcagtttggattttgctggaagtaaggattttgctgcttgagcact

SEQ ID NO: 25408 - DNA, 74 bp, Homo sapiens
tttaagagatttaagagacagcagtttggattttgctggaagtaaggattttgctgcttgagcacttgtctttt

SEQ ID NO: 25409 - DNA, 74 bp, Homo sapiens
atttaagagacagcagtttggattttgctggaagtaaggattttgctgcttgagcacttgtctttttggagtaa

SEQ ID NO: 25410 - DNA, 71 bp, Homo sapiens
agtttggattttgctggaagtaaggattttgctgcttgagcacttgtctttttggagtaattccattttct

SEQ ID NO: 25411 - DNA, 74 bp, Homo sapiens
tttgctggaagtaaggattttgctgcttgagcacttgtctttttggagtaattccattttcttccatcaagtta

SEQ ID NO: 25412 - DNA, 72 bp, Homo sapiens
agtaaggattttgctgcttgagcacttgtctttttggagtaattccattttcttccatcaagttacataaac

SEQ ID NO: 25413 - DNA, 75 bp, Homo sapiens
attttgctgcttgagcacttgtctttttggagtaattccattttcttccatcaagttacataaactgtatctgga

SEQ ID NO: 25414 - DNA, 71 bp, Homo sapiens
ttgagcacttgtctttttggagtaattccattttcttccatcaagttacataaactgtatctggaaaaaaa

SEQ ID NO: 25415 - DNA, 67 bp, Homo sapiens
gtctttttggagtaattccattttcttccatcaagttacataaactgtatctggaaaaaaaaagtgg

SEQ ID NO: 25416 - DNA, 70 bp, Homo sapiens
ttccattttcttccatcaagttacataaactgtatctggaaaaaaaaagtgggtatgttaattcattgta

SEQ ID NO: 25417 - DNA, 71 bp, Homo sapiens
cttccatcaagttacataaactgtatctggaaaaaaaaagtgggtatgttaattcattgtattgtaggatg

SEQ ID NO: 25418 - DNA, 72 bp, Homo sapiens
caagttacataaactgtatctggaaaaaaaaagtgggtatgttaattcattgtattgtaggatgtcttctca

SEQ ID NO: 25419 - DNA, 70 bp, Homo sapiens
aaaaaaaagtgggtatgttaattcattgtattgtaggatgtcttctcataaataaaaatgctttgtggtc

SEQ ID NO: 25420 - DNA, 72 bp, Homo sapiens
aaagtgggtatgttaattcattgtattgtaggatgtcttctcataaataaaaatgctttgtggtctttacca

SEQ ID NO: 25421 - DNA, 73 bp, Homo sapiens
attcattgtattgtaggatgtcttctcataaataaaaatgctttgtggtctttaccatttaactggcccagaa

SEQ ID NO: 25422 - DNA, 74 bp, Homo sapiens
tattgtaggatgtcttctcataaataaaaatgctttgtggtctttaccatttaactggcccagaagtgttcaca

SEQ ID NO: 25423 - DNA, 74 bp, Homo sapiens
atgtcttctcataaataaaaatgctttgtggtctttaccatttaactggcccagaagtgttcacaacatgctta

SEQ ID NO: 25424 - DNA, 71 bp, Homo sapiens
aataaaaatgctttgtggtctttaccatttaactggcccagaagtgttcacaacatgcttatcacaaaccc

SEQ ID NO: 25425 - DNA, 71 bp, Homo sapiens
ctttgtggtctttaccatttaactggcccagaagtgttcacaacatgcttatcacaaaccctgtttataaa

SEQ ID NO: 25426 - DNA, 70 bp, Homo sapiens
ggtctttaccatttaactggcccagaagtgttcacaacatgcttatcacaaaccctgtttataaaacaaa

SEQ ID NO: 25427 - DNA, 74 bp, Homo sapiens
catttaactggcccagaagtgttcacaacatgcttatcacaaaccctgtttataaaacaaagtcagtattatca

SEQ ID NO: 25428 - DNA, 76 bp, Homo sapiens
cagaagtgttcacaacatgcttatcacaaaccctgtttataaaacaaagtcagtattatcaacttatgtgccagaa

SEQ ID NO: 25429 - DNA, 76 bp, Homo sapiens
gttcacaacatgcttatcacaaaccctgtttataaaacaaagtcagtattatcaacttatgtgccagaaagctcaa

SEQ ID NO: 25430 - DNA, 76 bp, Homo sapiens
gcttatcacaaaccctgtttataaaacaaagtcagtattatcaacttatgtgccagaaagctcaatatttgacaca

SEQ ID NO: 25431 - DNA, 76 bp, Homo sapiens
ctgtttataaaacaaagtcagtattatcaacttatgtgccagaaagctcaatatttgacacatatagggacttcca

SEQ ID NO: 25432 - DNA, 75 bp, Homo sapiens
aaacaaagtcagtattatcaacttatgtgccagaaagctcaatatttgacacatatagggacttccaaataatgt

SEQ ID NO: 25433 - DNA, 75 bp, Homo sapiens
agtcagtattatcaacttatgtgccagaaagctcaatatttgacacatatagggacttccaaataatgttttttg

SEQ ID NO: 25434 - DNA, 75 bp, Homo sapiens
aggcataagcaaccacatccaggccaaatacttaactgctaaaaatagaggaatagcatgtggaggaggaaaaga

SEQ ID NO: 25435 - DNA, 74 bp, Homo sapiens
taagcaaccacatccaggccaaatacttaactgctaaaaatagaggaatagcatgtggaggaggaaaagaaaga

SEQ ID NO: 25436 - DNA, 73 bp, Homo sapiens
aggccaaatacttaactgctaaaaatagaggaatagcatgtggaggaggaaaagaaagaagatcaatgaccta

SEQ ID NO: 25437 - DNA, 71 bp, Homo sapiens
aaatacttaactgctaaaaatagaggaatagcatgtggaggaggaaaagaaagaagatcaatgacctattt

SEQ ID NO: 25438 - DNA, 76 bp, Homo sapiens
tgctaaaaatagaggaatagcatgtggaggaggaaaagaaagaagatcaatgacctattttttcatgacaagttca

SEQ ID NO: 25439 - DNA, 75 bp, Homo sapiens
tagaggaatagcatgtggaggaggaaaagaaagaagatcaatgacctattttttcatgacaagttcagaaaaatc

SEQ ID NO: 25440 - DNA, 75 bp, Homo sapiens
tggaggaggaaaagaaagaagatcaatgacctattttttcatgacaagttcagaaaaatctctccataagcacaa

SEQ ID NO: 25441 - DNA, 74 bp, Homo sapiens
aaagaaagaagatcaatgacctattttttcatgacaagttcagaaaaatctctccataagcacaaataccacaa

SEQ ID NO: 25442 - DNA, 78 bp, Homo sapiens
gaagatcaatgacctattttttcatgacaagttcagaaaaatctctccataagcacaaataccacaagcaaaatctca

SEQ ID NO: 25443 - DNA, 76 bp, Homo sapiens
ctattttttcatgacaagttcagaaaaatctctccataagcacaaataccacaagcaaaatctcatttgggaagca

SEQ ID NO: 25444 - DNA, 77 bp, Homo sapiens
ttcatgacaagttcagaaaaatctctccataagcacaaataccacaagcaaaatctcatttgggaagcaaaatttga

SEQ ID NO: 25445 - DNA, 75 bp, Homo sapiens
atctctccataagcacaaataccacaagcaaaatctcatttgggaagcaaaatttgaaatattatttccaaatga

SEQ ID NO: 25446 - DNA, 75 bp, Homo sapiens
gcacaaataccacaagcaaaatctcatttgggaagcaaaatttgaaatattatttccaaatgatatacaattaga

SEQ ID NO: 25447 - DNA, 74 bp, Homo sapiens
ataccacaagcaaaatctcatttgggaagcaaaatttgaaatattatttccaaatgatatacaattagagacaa

SEQ ID NO: 25448 - DNA, 72 bp, Homo sapiens
atctcatttgggaagcaaaatttgaaatattatttccaaatgatatacaattagagacaataaagggaacag

SEQ ID NO: 25449 - DNA, 72 bp, Homo sapiens
tgggaagcaaaatttgaaatattatttccaaatgatatacaattagagacaataaagggaacagtaatatta

SEQ ID NO: 25450 - DNA, 71 bp, Homo sapiens
ttgaaatattatttccaaatgatatacaattagagacaataaagggaacagtaatattatactaagtcttt

SEQ ID NO: 25451 - DNA, 71 bp, Homo sapiens
caaatgatatacaattagagacaataaagggaacagtaatattatactaagtctttttattaacataaata

SEQ ID NO: 25452 - DNA, 69 bp, Homo sapiens
tagagacaataaagggaacagtaatattatactaagtctttttattaacataaataagaacctgaaaga

SEQ ID NO: 25453 - DNA, 69 bp, Homo sapiens
caataaagggaacagtaatattatactaagtctttttattaacataaataagaacctgaaagagccata

SEQ ID NO: 25454 - DNA, 68 bp, Homo sapiens
gaacagtaatattatactaagtctttttattaacataaataagaacctgaaagagccataaaaatatt

SEQ ID NO: 25455 - DNA, 67 bp, Homo sapiens
tactaagtctttttattaacataaataagaacctgaaagagccataaaaatatttttcaatagggta

SEQ ID NO: 25456 - DNA, 70 bp, Homo sapiens
tttattaacataaataagaacctgaaagagccataaaaatatttttcaatagggtactactgttcattca

SEQ ID NO: 25457 - DNA, 70 bp, Homo sapiens
aacataaataagaacctgaaagagccataaaaatatttttcaatagggtactactgttcattcaaagata

SEQ ID NO: 25458 - DNA, 72 bp, Homo sapiens
cctgaaagagccataaaaatatttttcaatagggtactactgttcattcaaagatatttcactcacaatttc

SEQ ID NO: 25459 - DNA, 71 bp, Homo sapiens
gagccataaaaatatttttcaatagggtactactgttcattcaaagatatttcactcacaatttcccttaa

SEQ ID NO: 25460 - DNA, 71 bp, Homo sapiens
atttttcaatagggtactactgttcattcaaagatatttcactcacaatttcccttaaactgcccatccaa

SEQ ID NO: 25461 - DNA, 71 bp, Homo sapiens
aatagggtactactgttcattcaaagatatttcactcacaatttcccttaaactgcccatccaaagattac

SEQ ID NO: 25462 - DNA, 77 bp, Homo sapiens
tgttcattcaaagatatttcactcacaatttcccttaaactgcccatccaaagattactgaagtagatgtgctaata

SEQ ID NO: 25463 - DNA, 74 bp, Homo sapiens
aagatatttcactcacaatttcccttaaactgcccatccaaagattactgaagtagatgtgctaataaacttgc

SEQ ID NO: 25464 - DNA, 73 bp, Homo sapiens
atttcactcacaatttcccttaaactgcccatccaaagattactgaagtagatgtgctaataaacttgccaaa

SEQ ID NO: 25465 - DNA, 74 bp, Homo sapiens
tttcccttaaactgcccatccaaagattactgaagtagatgtgctaataaacttgccaaatcagaagactataa

SEQ ID NO: 25466 - DNA, 75 bp, Homo sapiens
taaactgcccatccaaagattactgaagtagatgtgctaataaacttgccaaatcagaagactataaactcccaa

SEQ ID NO: 25467 - DNA, 75 bp, Homo sapiens
tccaaagattactgaagtagatgtgctaataaacttgccaaatcagaagactataaactcccaaagatctagaag

SEQ ID NO: 25468 - DNA, 75 bp, Homo sapiens
actgaagtagatgtgctaataaacttgccaaatcagaagactataaactcccaaagatctagaaggtatatctaa

SEQ ID NO: 25469 - DNA, 72 bp, Homo sapiens
atgtgctaataaacttgccaaatcagaagactataaactcccaaagatctagaaggtatatctaaactgggg

SEQ ID NO: 25470 - DNA, 72 bp, Homo sapiens
agaagactataaactcccaaagatctagaaggtatatctaaactgggggctagagcatcaagaagaacaaat

SEQ ID NO: 25471 - DNA, 72 bp, Homo sapiens
actataaactcccaaagatctagaaggtatatctaaactgggggctagagcatcaagaagaacaaattacac

SEQ ID NO: 25472 - DNA, 75 bp, Homo sapiens
aaagatctagaaggtatatctaaactgggggctagagcatcaagaagaacaaattacactgtcttccagcaaaca

SEQ ID NO: 25473 - DNA, 82 bp, Homo sapiens
atctaaactgggggctagagcatcaagaagaacaaattacactgtcttccagcaaacagaggcagtgtggatcatatgcaga

SEQ ID NO: 25474 - DNA, 83 bp, Homo sapiens
tagagcatcaagaagaacaaattacactgtcttccagcaaacagaggcagtgtggatcatatgcagaatccttctaatcgaaa

SEQ ID NO: 25475 - DNA, 78 bp, Homo sapiens
agaagaacaaattacactgtcttccagcaaacagaggcagtgtggatcatatgcagaatccttctaatcgaaagggct

SEQ ID NO: 25476 - DNA, 77 bp, Homo sapiens
aaattacactgtcttccagcaaacagaggcagtgtggatcatatgcagaatccttctaatcgaaagggcttaagtat

SEQ ID NO: 25477 - DNA, 79 bp, Homo sapiens
tcttccagcaaacagaggcagtgtggatcatatgcagaatccttctaatcgaaagggcttaagtattcacttgccctta

SEQ ID NO: 25478 - DNA, 73 bp, Homo sapiens
agtgtggatcatatgcagaatccttctaatcgaaagggcttaagtattcacttgcccttaattaaaaagcaaa

SEQ ID NO: 25479 - DNA, 69 bp, Homo sapiens
atgcagaatccttctaatcgaaagggcttaagtattcacttgcccttaattaaaaagcaaactttatcc

SEQ ID NO: 25480 - DNA, 70 bp, Homo sapiens
tccttctaatcgaaagggcttaagtattcacttgcccttaattaaaaagcaaactttatccgatctcatc

SEQ ID NO: 25481 - DNA, 74 bp, Homo sapiens
acttgcccttaattaaaaagcaaactttatccgatctcatccatttactgtgagcagtggatgagattacttta

SEQ ID NO: 25482 - DNA, 76 bp, Homo sapiens
taaaaagcaaactttatccgatctcatccatttactgtgagcagtggatgagattactttaaataattatgttaca

SEQ ID NO: 25483 - DNA, 77 bp, Homo sapiens
agcaaactttatccgatctcatccatttactgtgagcagtggatgagattactttaaataattatgttacagatatt

SEQ ID NO: 25484 - DNA, 76 bp, Homo sapiens
atccgatctcatccatttactgtgagcagtggatgagattactttaaataattatgttacagatattttccaaaag

SEQ ID NO: 25485 - DNA, 72 bp, Homo sapiens
atccatttactgtgagcagtggatgagattactttaaataattatgttacagatattttccaaaagttgttt

SEQ ID NO: 25486 - DNA, 69 bp, Homo sapiens
ggatgagattactttaaataattatgttacagatattttccaaaagttgtttttccttatgtcctatct

SEQ ID NO: 25487 - DNA, 70 bp, Homo sapiens
aaataattatgttacagatattttccaaaagttgtttttccttatgtcctatcttttcattctgcaccta

SEQ ID NO: 25488 - DNA, 70 bp, Homo sapiens
gttacagatattttccaaaagttgtttttccttatgtcctatcttttcattctgcacctaaagaatagag

SEQ ID NO: 25489 - DNA, 69 bp, Homo sapiens
ttttccaaaagttgtttttccttatgtcctatcttttcattctgcacctaaagaatagaggaagaggag

SEQ ID NO: 25490 - DNA, 70 bp, Homo sapiens
ggaggaggaggagagggagcctagagtcctttaaagaaatgaaagagaagcgtgaattgtgtttaatgtt

SEQ ID NO: 25491 - DNA, 70 bp, Homo sapiens
gagagggagcctagagtcctttaaagaaatgaaagagaagcgtgaattgtgtttaatgtttggtaattgt

SEQ ID NO: 25492 - DNA, 68 bp, Homo sapiens
ggagcctagagtcctttaaagaaatgaaagagaagcgtgaattgtgtttaatgtttggtaattgtttt

SEQ ID NO: 25493 - DNA, 66 bp, Homo sapiens
gtcctttaaagaaatgaaagagaagcgtgaattgtgtttaatgtttggtaattgtttttaagtatt

SEQ ID NO: 25494 - DNA, 69 bp, Homo sapiens
tgaaagagaagcgtgaattgtgtttaatgtttggtaattgtttttaagtatttaagtccccatctccca

SEQ ID NO: 25495 - DNA, 67 bp, Homo sapiens
gaagcgtgaattgtgtttaatgtttggtaattgtttttaagtatttaagtccccatctcccaaaaca

SEQ ID NO: 25496 - DNA, 66 bp, Homo sapiens
tgtttaatgtttggtaattgtttttaagtatttaagtccccatctcccaaaacaagtagcaatacc

SEQ ID NO: 25497 - DNA, 66 bp, Homo sapiens
gtttggtaattgtttttaagtatttaagtccccatctcccaaaacaagtagcaatacctaaagtga

SEQ ID NO: 25498 - DNA, 67 bp, Homo sapiens
ttttaagtatttaagtccccatctcccaaaacaagtagcaatacctaaagtgatttataagaaatcc

SEQ ID NO: 25499 - DNA, 69 bp, Homo sapiens
gtatttaagtccccatctcccaaaacaagtagcaatacctaaagtgatttataagaaatcctccaaaga

SEQ ID NO: 25500 - DNA, 72 bp, Homo sapiens
cccatctcccaaaacaagtagcaatacctaaagtgatttataagaaatcctccaaagagagctctgcaaagg

SEQ ID NO: 25501 - DNA, 69 bp, Homo sapiens
aaaacaagtagcaatacctaaagtgatttataagaaatcctccaaagagagctctgcaaaggggtcctt

SEQ ID NO: 25502 - DNA, 73 bp, Homo sapiens
aatacctaaagtgatttataagaaatcctccaaagagagctctgcaaaggggtcctttcctgaagctctgtga

SEQ ID NO: 25503 - DNA, 76 bp, Homo sapiens
taaagtgatttataagaaatcctccaaagagagctctgcaaaggggtcctttcctgaagctctgtgaggactgtga

SEQ ID NO: 25504 - DNA, 76 bp, Homo sapiens
tataagaaatcctccaaagagagctctgcaaaggggtcctttcctgaagctctgtgaggactgtgactggaggggc

SEQ ID NO: 25505 - DNA, 80 bp, Homo sapiens
aaagagagctctgcaaaggggtcctttcctgaagctctgtgaggactgtgactggaggggctggatgctgccgacagctg

SEQ ID NO: 25506 - DNA, 78 bp, Homo sapiens
tctgcaaaggggtcctttcctgaagctctgtgaggactgtgactggaggggctggatgctgccgacagctgggggaaa

SEQ ID NO: 25507 - DNA, 77 bp, Homo sapiens
gggtcctttcctgaagctctgtgaggactgtgactggaggggctggatgctgccgacagctgggggaaaagaagaca

SEQ ID NO: 25508 - DNA, 79 bp, Homo sapiens
gtcctttcctgaagctctgtgaggactgtgactggaggggctggatgctgccgacagctgggggaaaagaagacagaga

SEQ ID NO: 25509 - DNA, 80 bp, Homo sapiens
ttcctgaagctctgtgaggactgtgactggaggggctggatgctgccgacagctgggggaaaagaagacagagagaggga

SEQ ID NO: 25510 - DNA, 78 bp, Homo sapiens
aagctctgtgaggactgtgactggaggggctggatgctgccgacagctgggggaaaagaagacagagagagggaaaga

SEQ ID NO: 25511 - DNA, 76 bp, Homo sapiens
tgtgaggactgtgactggaggggctggatgctgccgacagctgggggaaaagaagacagagagagggaaagaaaaa

SEQ ID NO: 25512 - DNA, 73 bp, Homo sapiens
aggactgtgactggaggggctggatgctgccgacagctgggggaaaagaagacagagagagggaaagaaaaaa

SEQ ID NO: 25513 - DNA, 74 bp, Homo sapiens
ctgtgactggaggggctggatgctgccgacagctgggggaaaagaagacagagagagggaaagaaaaaaagatc

SEQ ID NO: 25514 - DNA, 79 bp, Homo sapiens
gctggatgctgccgacagctgggggaaaagaagacagagagagggaaagaaaaaaagatctcagaatgacagaacatga

SEQ ID NO: 25515 - DNA, 74 bp, Homo sapiens
gagagagggaaagaaaaaaagatctcagaatgacagaacatgaaagcagaaaatgtatgaaagaagaagtggtt

SEQ ID NO: 25516 - DNA, 72 bp, Homo sapiens
gggaaagaaaaaaagatctcagaatgacagaacatgaaagcagaaaatgtatgaaagaagaagtggttttgg

SEQ ID NO: 25517 - DNA, 74 bp, Homo sapiens
cagaatgacagaacatgaaagcagaaaatgtatgaaagaagaagtggttttggttttgtcatctttaataaata

SEQ ID NO: 25518 - DNA, 71 bp, Homo sapiens
gcagaaaatgtatgaaagaagaagtggttttggttttgtcatctttaataaatataagggcagtctttgta

SEQ ID NO: 25519 - DNA, 69 bp, Homo sapiens
atgaaagaagaagtggttttggttttgtcatctttaataaatataagggcagtctttgtagaaaatgga

SEQ ID NO: 25520 - DNA, 68 bp, Homo sapiens
ggttttggttttgtcatctttaataaatataagggcagtctttgtagaaaatggattgttaagacaaa

SEQ ID NO: 25521 - DNA, 73 bp, Homo sapiens
ttgtcatctttaataaatataagggcagtctttgtagaaaatggattgttaagacaaaagtttcagtcatatg

SEQ ID NO: 25522 - DNA, 71 bp, Homo sapiens
ctttaataaatataagggcagtctttgtagaaaatggattgttaagacaaaagtttcagtcatatgtcaag

SEQ ID NO: 25523 - DNA, 73 bp, Homo sapiens
taagggcagtctttgtagaaaatggattgttaagacaaaagtttcagtcatatgtcaagttaaaaggtatgca

SEQ ID NO: 25524 - DNA, 75 bp, Homo sapiens
gtctttgtagaaaatggattgttaagacaaaagtttcagtcatatgtcaagttaaaaggtatgcaatggcatgtg

SEQ ID NO: 25525 - DNA, 75 bp, Homo sapiens
gaaaatggattgttaagacaaaagtttcagtcatatgtcaagttaaaaggtatgcaatggcatgtgtttttcaga

SEQ ID NO: 25526 - DNA, 73 bp, Homo sapiens
taagacaaaagtttcagtcatatgtcaagttaaaaggtatgcaatggcatgtgtttttcagaaaacaaactcg

SEQ ID NO: 25527 - DNA, 75 bp, Homo sapiens
tttcagtcatatgtcaagttaaaaggtatgcaatggcatgtgtttttcagaaaacaaactcgtgcttctgaagtt

SEQ ID NO: 25528 - DNA, 75 bp, Homo sapiens
gtcatatgtcaagttaaaaggtatgcaatggcatgtgtttttcagaaaacaaactcgtgcttctgaagtttcaaa

SEQ ID NO: 25529 - DNA, 74 bp, Homo sapiens
tatgcaatggcatgtgtttttcagaaaacaaactcgtgcttctgaagtttcaaaggaataatgtcttttaccca

SEQ ID NO: 25530 - DNA, 71 bp, Homo sapiens
tcgtgcttctgaagtttcaaaggaataatgtcttttacccaaaaggtcgatataagctgacccatggttaa

SEQ ID NO: 25531 - DNA, 68 bp, Homo sapiens
ctgaagtttcaaaggaataatgtcttttacccaaaaggtcgatataagctgacccatggttaagaatt

SEQ ID NO: 25532 - DNA, 68 bp, Homo sapiens
aatgtcttttacccaaaaggtcgatataagctgacccatggttaagaattttaatgtgtgtatggggg

SEQ ID NO: 25533 - DNA, 67 bp, Homo sapiens
acccaaaaggtcgatataagctgacccatggttaagaattttaatgtgtgtatggggggtggtgggg

SEQ ID NO: 25534 - DNA, 69 bp, Homo sapiens
tcgatataagctgacccatggttaagaattttaatgtgtgtatggggggtggtggggggataggggagg

SEQ ID NO: 25535 - DNA, 69 bp, Homo sapiens
ccatggttaagaattttaatgtgtgtatggggggtggtggggggataggggagggaatacataattgca

SEQ ID NO: 25536 - DNA, 67 bp, Homo sapiens
ttaagaattttaatgtgtgtatggggggtggtggggggataggggagggaatacataattgcatttt

SEQ ID NO: 25537 - DNA, 70 bp, Homo sapiens
ggggataggggagggaatacataattgcatttttgtttaaaattgagagaacatggtttcctgtgtccag

SEQ ID NO: 25538 - DNA, 74 bp, Homo sapiens
gagggaatacataattgcatttttgtttaaaattgagagaacatggtttcctgtgtccaggctatctgtccaaa

SEQ ID NO: 25539 - DNA, 77 bp, Homo sapiens
atacataattgcatttttgtttaaaattgagagaacatggtttcctgtgtccaggctatctgtccaaagctgtgcaa

SEQ ID NO: 25540 - DNA, 77 bp, Homo sapiens
ttttgtttaaaattgagagaacatggtttcctgtgtccaggctatctgtccaaagctgtgcaactctgacctcagtc

SEQ ID NO: 25541 - DNA, 77 bp, Homo sapiens
tttaaaattgagagaacatggtttcctgtgtccaggctatctgtccaaagctgtgcaactctgacctcagtccggac

SEQ ID NO: 25542 - DNA, 79 bp, Homo sapiens
agagaacatggtttcctgtgtccaggctatctgtccaaagctgtgcaactctgacctcagtccggacccaacacatcta

SEQ ID NO: 25543 - DNA, 81 bp, Homo sapiens
ttcctgtgtccaggctatctgtccaaagctgtgcaactctgacctcagtccggacccaacacatctagctgcaatattctt

SEQ ID NO: 25544 - DNA, 78 bp, Homo sapiens
aggctatctgtccaaagctgtgcaactctgacctcagtccggacccaacacatctagctgcaatattctttcctttct

SEQ ID NO: 25545 - DNA, 68 bp, Homo sapiens
ctttctttcttcataagggtcgaaaagtcctgtcctaggttcacacactttttacacgaagttgtctc

SEQ ID NO: 25546 - DNA, 72 bp, Homo sapiens
ggtcgaaaagtcctgtcctaggttcacacactttttacacgaagttgtctcctgctcatttatcttgacgaa

SEQ ID NO: 25547 - DNA, 78 bp, Homo sapiens
tgtcctaggttcacacactttttacacgaagttgtctcctgctcatttatcttgacgaactgcagctgacacacgtac

SEQ ID NO: 25548 - DNA, 78 bp, Homo sapiens
taggttcacacactttttacacgaagttgtctcctgctcatttatcttgacgaactgcagctgacacacgtactgtgg

SEQ ID NO: 25549 - DNA, 76 bp, Homo sapiens
actttttacacgaagttgtctcctgctcatttatcttgacgaactgcagctgacacacgtactgtgggaggtgaaa

SEQ ID NO: 25550 - DNA, 76 bp, Homo sapiens
acgaagttgtctcctgctcatttatcttgacgaactgcagctgacacacgtactgtgggaggtgaaagggacctta

SEQ ID NO: 25551 - DNA, 78 bp, Homo sapiens
tgctcatttatcttgacgaactgcagctgacacacgtactgtgggaggtgaaagggaccttagaggtcacctactgta

SEQ ID NO: 25552 - DNA, 74 bp, Homo sapiens
tttatcttgacgaactgcagctgacacacgtactgtgggaggtgaaagggaccttagaggtcacctactgtaac

SEQ ID NO: 25553 - DNA, 76 bp, Homo sapiens
aactgcagctgacacacgtactgtgggaggtgaaagggaccttagaggtcacctactgtaactgtccacatactgc

SEQ ID NO: 25554 - DNA, 73 bp, Homo sapiens
acacacgtactgtgggaggtgaaagggaccttagaggtcacctactgtaactgtccacatactgccctgaata

SEQ ID NO: 25555 - DNA, 72 bp, Homo sapiens
tgggaggtgaaagggaccttagaggtcacctactgtaactgtccacatactgccctgaatatggggaatact

SEQ ID NO: 25556 - DNA, 71 bp, Homo sapiens
aagggaccttagaggtcacctactgtaactgtccacatactgccctgaatatggggaatacttaagatctt

SEQ ID NO: 25557 - DNA, 76 bp, Homo sapiens
ttagaggtcacctactgtaactgtccacatactgccctgaatatggggaatacttaagatctttgattctgcttcc

SEQ ID NO: 25558 - DNA, 75 bp, Homo sapiens
taactgtccacatactgccctgaatatggggaatacttaagatctttgattctgcttcctgtttggacaaattta

SEQ ID NO: 25559 - DNA, 73 bp, Homo sapiens
atactgccctgaatatggggaatacttaagatctttgattctgcttcctgtttggacaaatttacttgattct

SEQ ID NO: 25560 - DNA, 73 bp, Homo sapiens
atatggggaatacttaagatctttgattctgcttcctgtttggacaaatttacttgattcttagaatctgtcc

SEQ ID NO: 25561 - DNA, 73 bp, Homo sapiens
gaatacttaagatctttgattctgcttcctgtttggacaaatttacttgattcttagaatctgtcctattgtt

SEQ ID NO: 25562 - DNA, 74 bp, Homo sapiens
ttgattctgcttcctgtttggacaaatttacttgattcttagaatctgtcctattgtttaattcgaatatactg

SEQ ID NO: 25563 - DNA, 73 bp, Homo sapiens
gcttcctgtttggacaaatttacttgattcttagaatctgtcctattgtttaattcgaatatactgtaaggca

SEQ ID NO: 25564 - DNA, 74 bp, Homo sapiens
cttgattcttagaatctgtcctattgtttaattcgaatatactgtaaggcaagtaaacaactgaattcagtatg

SEQ ID NO: 25565 - DNA, 74 bp, Homo sapiens
attcgaatatactgtaaggcaagtaaacaactgaattcagtatgtatctttattctcccaaacacagactattc

SEQ ID NO: 25566 - DNA, 74 bp, Homo sapiens
tactgtaaggcaagtaaacaactgaattcagtatgtatctttattctcccaaacacagactattcctgaagaac

SEQ ID NO: 25567 - DNA, 76 bp, Homo sapiens
ctgaattcagtatgtatctttattctcccaaacacagactattcctgaagaaccaagatattaattttcatacatg

SEQ ID NO: 25568 - DNA, 76 bp, Homo sapiens
gtatgtatctttattctcccaaacacagactattcctgaagaaccaagatattaattttcatacatgtatccttca

SEQ ID NO: 25569 - DNA, 79 bp, Homo sapiens
tattctcccaaacacagactattcctgaagaaccaagatattaattttcatacatgtatccttcattaagctgacatga

SEQ ID NO: 25570 - DNA, 78 bp, Homo sapiens
aacacagactattcctgaagaaccaagatattaattttcatacatgtatccttcattaagctgacatgagcgtttcaa

SEQ ID NO: 25571 - DNA, 76 bp, Homo sapiens
agactattcctgaagaaccaagatattaattttcatacatgtatccttcattaagctgacatgagcgtttcaaacc

SEQ ID NO: 25572 - DNA, 74 bp, Homo sapiens
aaccaagatattaattttcatacatgtatccttcattaagctgacatgagcgtttcaaacccgacatgaacctt

SEQ ID NO: 25573 - DNA, 73 bp, Homo sapiens
ttaattttcatacatgtatccttcattaagctgacatgagcgtttcaaacccgacatgaacctttttactttg

SEQ ID NO: 25574 - DNA, 74 bp, Homo sapiens
tttcatacatgtatccttcattaagctgacatgagcgtttcaaacccgacatgaacctttttactttggaacaa

SEQ ID NO: 25575 - DNA, 71 bp, Homo sapiens
tatccttcattaagctgacatgagcgtttcaaacccgacatgaacctttttactttggaacaagcttttaa

SEQ ID NO: 25576 - DNA, 68 bp, Homo sapiens
acccgacatgaacctttttactttggaacaagcttttaattctttttctccctctgtataagattgca

SEQ ID NO: 25577 - DNA, 71 bp, Homo sapiens
cctttttactttggaacaagcttttaattctttttctccctctgtataagattgcaaagcatataagcaca

SEQ ID NO: 25578 - DNA, 74 bp, Homo sapiens
ctttggaacaagcttttaattctttttctccctctgtataagattgcaaagcatataagcacaggactattaca

SEQ ID NO: 25579 - DNA, 75 bp, Homo sapiens
acaagcttttaattctttttctccctctgtataagattgcaaagcatataagcacaggactattacaaaatgagc

SEQ ID NO: 25580 - DNA, 74 bp, Homo sapiens
tttttctccctctgtataagattgcaaagcatataagcacaggactattacaaaatgagcttttcttttaggga

SEQ ID NO: 25581 - DNA, 78 bp, Homo sapiens
tctgtataagattgcaaagcatataagcacaggactattacaaaatgagcttttcttttagggatgtcctagtgagta

SEQ ID NO: 25582 - DNA, 75 bp, Homo sapiens
agattgcaaagcatataagcacaggactattacaaaatgagcttttcttttagggatgtcctagtgagtaataaa

SEQ ID NO: 25583 - DNA, 73 bp, Homo sapiens
agcatataagcacaggactattacaaaatgagcttttcttttagggatgtcctagtgagtaataaaagttgac

SEQ ID NO: 25584 - DNA, 71 bp, Homo sapiens
cacaggactattacaaaatgagcttttcttttagggatgtcctagtgagtaataaaagttgactaactgga

SEQ ID NO: 25585 - DNA, 69 bp, Homo sapiens
caaaatgagcttttcttttagggatgtcctagtgagtaataaaagttgactaactggaaatagtttcaa

SEQ ID NO: 25586 - DNA, 70 bp, Homo sapiens
gagcttttcttttagggatgtcctagtgagtaataaaagttgactaactggaaatagtttcaattcatac

SEQ ID NO: 25587 - DNA, 72 bp, Homo sapiens
gggatgtcctagtgagtaataaaagttgactaactggaaatagtttcaattcatacttcaacattcaaatcc

SEQ ID NO: 25588 - DNA, 72 bp, Homo sapiens
cctagtgagtaataaaagttgactaactggaaatagtttcaattcatacttcaacattcaaatcctatagag

SEQ ID NO: 25589 - DNA, 72 bp, Homo sapiens
aaaagttgactaactggaaatagtttcaattcatacttcaacattcaaatcctatagaggatttctttgctg

SEQ ID NO: 25590 - DNA, 75 bp, Homo sapiens
actaactggaaatagtttcaattcatacttcaacattcaaatcctatagaggatttctttgctggtgccaagtga

SEQ ID NO: 25591 - DNA, 76 bp, Homo sapiens
caattcatacttcaacattcaaatcctatagaggatttctttgctggtgccaagtgatttcatttctttctaccta

SEQ ID NO: 25592 - DNA, 77 bp, Homo sapiens
tatttatttattttcggaaaagcactacagagaatgaacagccaatgagcttcggcaaatattacatcactagtata

SEQ ID NO: 25593 - DNA, 78 bp, Homo sapiens
tttattttcggaaaagcactacagagaatgaacagccaatgagcttcggcaaatattacatcactagtatatgcaact

SEQ ID NO: 25594 - DNA, 82 bp, Homo sapiens
aaaagcactacagagaatgaacagccaatgagcttcggcaaatattacatcactagtatatgcaacttgttctggatgccaa

SEQ ID NO: 25595 - DNA, 83 bp, Homo sapiens
agagaatgaacagccaatgagcttcggcaaatattacatcactagtatatgcaacttgttctggatgccaagatcaatttata

SEQ ID NO: 25596 - DNA, 84 bp, Homo sapiens
gccaatgagcttcggcaaatattacatcactagtatatgcaacttgttctggatgccaagatcaatttataggcatcagttata

SEQ ID NO: 25597 - DNA, 82 bp, Homo sapiens
ttcggcaaatattacatcactagtatatgcaacttgttctggatgccaagatcaatttataggcatcagttatactcatggt

SEQ ID NO: 25598 - DNA, 82 bp, Homo sapiens
atattacatcactagtatatgcaacttgttctggatgccaagatcaatttataggcatcagttatactcatggttgagtaat

SEQ ID NO: 25599 - DNA, 79 bp, Homo sapiens
aacttgttctggatgccaagatcaatttataggcatcagttatactcatggttgagtaatttcctaatgcatatcttgt

SEQ ID NO: 25600 - DNA, 79 bp, Homo sapiens
tggatgccaagatcaatttataggcatcagttatactcatggttgagtaatttcctaatgcatatcttgttcccaaaaa

SEQ ID NO: 25601 - DNA, 75 bp, Homo sapiens
aggcatcagttatactcatggttgagtaatttcctaatgcatatcttgttcccaaaaacaaatgttcaaagacaa

SEQ ID NO: 25602 - DNA, 73 bp, Homo sapiens
catggttgagtaatttcctaatgcatatcttgttcccaaaaacaaatgttcaaagacaatgggaagagacaaa

SEQ ID NO: 25603 - DNA, 77 bp, Homo sapiens
aatgcatatcttgttcccaaaaacaaatgttcaaagacaatgggaagagacaaatggaacaatgatggaatcacgca

SEQ ID NO: 25604 - DNA, 77 bp, Homo sapiens
ttgttcccaaaaacaaatgttcaaagacaatgggaagagacaaatggaacaatgatggaatcacgcaggcagctaca

SEQ ID NO: 25605 - DNA, 79 bp, Homo sapiens
aaacaaatgttcaaagacaatgggaagagacaaatggaacaatgatggaatcacgcaggcagctacagatgggaggaca

SEQ ID NO: 25606 - DNA, 84 bp, Homo sapiens
aagacaatgggaagagacaaatggaacaatgatggaatcacgcaggcagctacagatgggaggacagagcagcatgcctgggct

SEQ ID NO: 25607 - DNA, 85 bp, Homo sapiens
aaatggaacaatgatggaatcacgcaggcagctacagatgggaggacagagcagcatgcctgggcttgaggtttcaaatatcatc

SEQ ID NO: 25608 - DNA, 88 bp, Homo sapiens
tggaatcacgcaggcagctacagatgggaggacagagcagcatgcctgggcttgaggtttcaaatatcatccatgcagagacaaatta

SEQ ID NO: 25609 - DNA, 81 bp, Homo sapiens
gacagagcagcatgcctgggcttgaggtttcaaatatcatccatgcagagacaaattaaggtataactactggaaagactc

SEQ ID NO: 25610 - DNA, 78 bp, Homo sapiens
agcagcatgcctgggcttgaggtttcaaatatcatccatgcagagacaaattaaggtataactactggaaagactccc

SEQ ID NO: 25611 - DNA, 74 bp, Homo sapiens
tgggcttgaggtttcaaatatcatccatgcagagacaaattaaggtataactactggaaagactccccctcctc

SEQ ID NO: 25612 - DNA, 73 bp, Homo sapiens
ggtttcaaatatcatccatgcagagacaaattaaggtataactactggaaagactccccctcctccctcttca

SEQ ID NO: 25613 - DNA, 74 bp, Homo sapiens
atcatccatgcagagacaaattaaggtataactactggaaagactccccctcctccctcttcagcgcaaccacg

SEQ ID NO: 25614 - DNA, 68 bp, Homo sapiens
acaaattaaggtataactactggaaagactccccctcctccctcttcagcgcaaccacggacggccaa

SEQ ID NO: 25615 - DNA, 72 bp, Homo sapiens
tggaaagactccccctcctccctcttcagcgcaaccacggacggccaatcaaaagcacaacgatttcaagta

SEQ ID NO: 25616 - DNA, 71 bp, Homo sapiens
ccccctcctccctcttcagcgcaaccacggacggccaatcaaaagcacaacgatttcaagtaaagtgatcc

SEQ ID NO: 25617 - DNA, 75 bp, Homo sapiens
ctccctcttcagcgcaaccacggacggccaatcaaaagcacaacgatttcaagtaaagtgatcctcagttactga

SEQ ID NO: 25618 - DNA, 76 bp, Homo sapiens
acggccaatcaaaagcacaacgatttcaagtaaagtgatcctcagttactgagctggagggagtccaacatccaca

SEQ ID NO: 25619 - DNA, 76 bp, Homo sapiens
aatcaaaagcacaacgatttcaagtaaagtgatcctcagttactgagctggagggagtccaacatccacacttatc

SEQ ID NO: 25620 - DNA, 77 bp, Homo sapiens
acaacgatttcaagtaaagtgatcctcagttactgagctggagggagtccaacatccacacttatctccaagatgaa

SEQ ID NO: 25621 - DNA, 75 bp, Homo sapiens
aagtaaagtgatcctcagttactgagctggagggagtccaacatccacacttatctccaagatgaacttggtttc

SEQ ID NO: 25622 - DNA, 78 bp, Homo sapiens
ctcagttactgagctggagggagtccaacatccacacttatctccaagatgaacttggtttctctctgaagcagattt

SEQ ID NO: 25623 - DNA, 77 bp, Homo sapiens
ttactgagctggagggagtccaacatccacacttatctccaagatgaacttggtttctctctgaagcagattttctt

SEQ ID NO: 25624 - DNA, 75 bp, Homo sapiens
gagtccaacatccacacttatctccaagatgaacttggtttctctctgaagcagattttctttttcacctacagt

SEQ ID NO: 25625 - DNA, 73 bp, Homo sapiens
aacatccacacttatctccaagatgaacttggtttctctctgaagcagattttctttttcacctacagttaaa

SEQ ID NO: 25626 - DNA, 73 bp, Homo sapiens
acttatctccaagatgaacttggtttctctctgaagcagattttctttttcacctacagttaaaacaacagca

SEQ ID NO: 25627 - DNA, 76 bp, Homo sapiens
aacaacaaatcctacttattgcagatagactgcatctaaaatcagaagtttcctatgatagccccacaccgaaata

SEQ ID NO: 25628 - DNA, 77 bp, Homo sapiens
tacttattgcagatagactgcatctaaaatcagaagtttcctatgatagccccacaccgaaataccttcttaaatca

SEQ ID NO: 25629 - DNA, 72 bp, Homo sapiens
agatagactgcatctaaaatcagaagtttcctatgatagccccacaccgaaataccttcttaaatcacgttt

SEQ ID NO: 25630 - DNA, 69 bp, Homo sapiens
atctaaaatcagaagtttcctatgatagccccacaccgaaataccttcttaaatcacgttttcaccagg

SEQ ID NO: 25631 - DNA, 70 bp, Homo sapiens
aaatcagaagtttcctatgatagccccacaccgaaataccttcttaaatcacgttttcaccagggtagca

SEQ ID NO: 25632 - DNA, 71 bp, Homo sapiens
tttcctatgatagccccacaccgaaataccttcttaaatcacgttttcaccagggtagcagtctgaagacc

SEQ ID NO: 25633 - DNA, 72 bp, Homo sapiens
ccacaccgaaataccttcttaaatcacgttttcaccagggtagcagtctgaagacctgacagacccacagta

SEQ ID NO: 25634 - DNA, 71 bp, Homo sapiens
aaataccttcttaaatcacgttttcaccagggtagcagtctgaagacctgacagacccacagtaaaatgcc

SEQ ID NO: 25635 - DNA, 74 bp, Homo sapiens
tcttaaatcacgttttcaccagggtagcagtctgaagacctgacagacccacagtaaaatgcccctgaagaata

SEQ ID NO: 25636 - DNA, 74 bp, Homo sapiens
ttttcaccagggtagcagtctgaagacctgacagacccacagtaaaatgcccctgaagaatacggaagagacaa

SEQ ID NO: 25637 - DNA, 76 bp, Homo sapiens
tagcagtctgaagacctgacagacccacagtaaaatgcccctgaagaatacggaagagacaaatctattttcaata

SEQ ID NO: 25638 - DNA, 76 bp, Homo sapiens
aagacctgacagacccacagtaaaatgcccctgaagaatacggaagagacaaatctattttcaatatgtgagcata

SEQ ID NO: 25639 - DNA, 77 bp, Homo sapiens
agacccacagtaaaatgcccctgaagaatacggaagagacaaatctattttcaatatgtgagcatactgctagacaa

SEQ ID NO: 25640 - DNA, 77 bp, Homo sapiens
acagtaaaatgcccctgaagaatacggaagagacaaatctattttcaatatgtgagcatactgctagacaagtccta

SEQ ID NO: 25641 - DNA, 78 bp, Homo sapiens
ctgaagaatacggaagagacaaatctattttcaatatgtgagcatactgctagacaagtcctagaggcttataaacaa

SEQ ID NO: 25642 - DNA, 78 bp, Homo sapiens
aatacggaagagacaaatctattttcaatatgtgagcatactgctagacaagtcctagaggcttataaacaatgttga

SEQ ID NO: 25643 - DNA, 77 bp, Homo sapiens
gacaaatctattttcaatatgtgagcatactgctagacaagtcctagaggcttataaacaatgttgaaaaggattac

SEQ ID NO: 25644 - DNA, 76 bp, Homo sapiens
tttcaatatgtgagcatactgctagacaagtcctagaggcttataaacaatgttgaaaaggattacttttccttga

SEQ ID NO: 25645 - DNA, 74 bp, Homo sapiens
atgtgagcatactgctagacaagtcctagaggcttataaacaatgttgaaaaggattacttttccttgagaaaa

SEQ ID NO: 25646 - DNA, 69 bp, Homo sapiens
ctagacaagtcctagaggcttataaacaatgttgaaaaggattacttttccttgagaaaaagagctggt

SEQ ID NO: 25647 - DNA, 66 bp, Homo sapiens
aagtcctagaggcttataaacaatgttgaaaaggattacttttccttgagaaaaagagctggtttt

SEQ ID NO: 25648 - DNA, 72 bp, Homo sapiens
gagctggttttttattagaactcctagtagtctcttaaattggtaaaacacatacacgtctcatatctataa

SEQ ID NO: 25649 - DNA, 73 bp, Homo sapiens
tttattagaactcctagtagtctcttaaattggtaaaacacatacacgtctcatatctataaaaatgtagcca

SEQ ID NO: 25650 - DNA, 72 bp, Homo sapiens
agaactcctagtagtctcttaaattggtaaaacacatacacgtctcatatctataaaaatgtagccaaacta

SEQ ID NO: 25651 - DNA, 74 bp, Homo sapiens
gtctcttaaattggtaaaacacatacacgtctcatatctataaaaatgtagccaaactaaaacatgacagagac

SEQ ID NO: 25652 - DNA, 75 bp, Homo sapiens
tggtaaaacacatacacgtctcatatctataaaaatgtagccaaactaaaacatgacagagaccaccaataagaa

SEQ ID NO: 25653 - DNA, 76 bp, Homo sapiens
cacatacacgtctcatatctataaaaatgtagccaaactaaaacatgacagagaccaccaataagaaaacaagaca

SEQ ID NO: 25654 - DNA, 75 bp, Homo sapiens
tcatatctataaaaatgtagccaaactaaaacatgacagagaccaccaataagaaaacaagacaacatccctgga

SEQ ID NO: 25655 - DNA, 70 bp, Homo sapiens
aaaaatgtagccaaactaaaacatgacagagaccaccaataagaaaacaagacaacatccctggaataag

SEQ ID NO: 25656 - DNA, 73 bp, Homo sapiens
ccaaactaaaacatgacagagaccaccaataagaaaacaagacaacatccctggaataagtttcttatcatca

SEQ ID NO: 25657 - DNA, 77 bp, Homo sapiens
aaacatgacagagaccaccaataagaaaacaagacaacatccctggaataagtttcttatcatcaatatctgtatca

SEQ ID NO: 25658 - DNA, 76 bp, Homo sapiens
gaccaccaataagaaaacaagacaacatccctggaataagtttcttatcatcaatatctgtatcaagcggatgaaa

SEQ ID NO: 25659 - DNA, 76 bp, Homo sapiens
aataagaaaacaagacaacatccctggaataagtttcttatcatcaatatctgtatcaagcggatgaaaccatagc

SEQ ID NO: 25660 - DNA, 79 bp, Homo sapiens
acaagacaacatccctggaataagtttcttatcatcaatatctgtatcaagcggatgaaaccatagccagggctagcta

SEQ ID NO: 25661 - DNA, 82 bp, Homo sapiens
atccctggaataagtttcttatcatcaatatctgtatcaagcggatgaaaccatagccagggctagctaggctgactgcaca

SEQ ID NO: 25662 - DNA, 83 bp, Homo sapiens
ataagtttcttatcatcaatatctgtatcaagcggatgaaaccatagccagggctagctaggctgactgcacagctccaagga

SEQ ID NO: 25663 - DNA, 81 bp, Homo sapiens
atgaaaccatagccagggctagctaggctgactgcacagctccaaggagtgggacatacagcagcccctgaccatcctacc

SEQ ID NO: 25664 - DNA, 82 bp, Homo sapiens
tagctaggctgactgcacagctccaaggagtgggacatacagcagcccctgaccatcctaccccttcctggcatctattcca

SEQ ID NO: 25665 - DNA, 80 bp, Homo sapiens
actgcacagctccaaggagtgggacatacagcagcccctgaccatcctaccccttcctggcatctattccaaagcacaga

SEQ ID NO: 25666 - DNA, 79 bp, Homo sapiens
acagctccaaggagtgggacatacagcagcccctgaccatcctaccccttcctggcatctattccaaagcacagacaca

SEQ ID NO: 25667 - DNA, 82 bp, Homo sapiens
tgggacatacagcagcccctgaccatcctaccccttcctggcatctattccaaagcacagacacaccatgcactggtgagaa

SEQ ID NO: 25668 - DNA, 80 bp, Homo sapiens
atacagcagcccctgaccatcctaccccttcctggcatctattccaaagcacagacacaccatgcactggtgagaaagta

SEQ ID NO: 25669 - DNA, 78 bp, Homo sapiens
cccttcctggcatctattccaaagcacagacacaccatgcactggtgagaaagtagtcaccccagagagtaaataaga

SEQ ID NO: 25670 - DNA, 77 bp, Homo sapiens
catctattccaaagcacagacacaccatgcactggtgagaaagtagtcaccccagagagtaaataagagaaggaaag

SEQ ID NO: 25671 - DNA, 75 bp, Homo sapiens
attccaaagcacagacacaccatgcactggtgagaaagtagtcaccccagagagtaaataagagaaggaaaggaa

SEQ ID NO: 25672 - DNA, 76 bp, Homo sapiens
agacacaccatgcactggtgagaaagtagtcaccccagagagtaaataagagaaggaaaggaaatgtgcttcagta

SEQ ID NO: 25673 - DNA, 72 bp, Homo sapiens
actggtgagaaagtagtcaccccagagagtaaataagagaaggaaaggaaatgtgcttcagtagcccaatta

SEQ ID NO: 25674 - DNA, 73 bp, Homo sapiens
agaaagtagtcaccccagagagtaaataagagaaggaaaggaaatgtgcttcagtagcccaattactgctcag

SEQ ID NO: 25675 - DNA, 74 bp, Homo sapiens
cccagagagtaaataagagaaggaaaggaaatgtgcttcagtagcccaattactgctcaggaaaatcaagaaca

SEQ ID NO: 25676 - DNA, 72 bp, Homo sapiens
agtaaataagagaaggaaaggaaatgtgcttcagtagcccaattactgctcaggaaaatcaagaacaaaata

SEQ ID NO: 25677 - DNA, 76 bp, Homo sapiens
aaggaaaggaaatgtgcttcagtagcccaattactgctcaggaaaatcaagaacaaaatagcatgaagaggcaatg

SEQ ID NO: 25678 - DNA, 77 bp, Homo sapiens
aatgtgcttcagtagcccaattactgctcaggaaaatcaagaacaaaatagcatgaagaggcaatgggttcttggta

SEQ ID NO: 25679 - DNA, 75 bp, Homo sapiens
agtagcccaattactgctcaggaaaatcaagaacaaaatagcatgaagaggcaatgggttcttggtaggtgagaa

SEQ ID NO: 25680 - DNA, 75 bp, Homo sapiens
aattactgctcaggaaaatcaagaacaaaatagcatgaagaggcaatgggttcttggtaggtgagaagtaggaga

SEQ ID NO: 25681 - DNA, 71 bp, Homo sapiens
gaaaatcaagaacaaaatagcatgaagaggcaatgggttcttggtaggtgagaagtaggagaattttaaaa

SEQ ID NO: 25682 - DNA, 71 bp, Homo sapiens
caagaacaaaatagcatgaagaggcaatgggttcttggtaggtgagaagtaggagaattttaaaactataa

SEQ ID NO: 25683 - DNA, 70 bp, Homo sapiens
caatgggttcttggtaggtgagaagtaggagaattttaaaactataagagctgacttgactctacttatt

SEQ ID NO: 25684 - DNA, 73 bp, Homo sapiens
ttcttggtaggtgagaagtaggagaattttaaaactataagagctgacttgactctacttatttctgtgagta

SEQ ID NO: 25685 - DNA, 71 bp, Homo sapiens
aggtgagaagtaggagaattttaaaactataagagctgacttgactctacttatttctgtgagtaaattaa

SEQ ID NO: 25686 - DNA, 72 bp, Homo sapiens
gaattttaaaactataagagctgacttgactctacttatttctgtgagtaaattaaagaacatgatgtaggg

SEQ ID NO: 25687 - DNA, 75 bp, Homo sapiens
actataagagctgacttgactctacttatttctgtgagtaaattaaagaacatgatgtagggttgctaaagaaca

SEQ ID NO: 25688 - DNA, 71 bp, Homo sapiens
gactctacttatttctgtgagtaaattaaagaacatgatgtagggttgctaaagaacataaaaaggcaagg

SEQ ID NO: 25689 - DNA, 71 bp, Homo sapiens
tctgtgagtaaattaaagaacatgatgtagggttgctaaagaacataaaaaggcaaggttaaagtactaga

SEQ ID NO: 25690 - DNA, 69 bp, Homo sapiens
gagtaaattaaagaacatgatgtagggttgctaaagaacataaaaaggcaaggttaaagtactagagga

SEQ ID NO: 25691 - DNA, 67 bp, Homo sapiens
aagaacatgatgtagggttgctaaagaacataaaaaggcaaggttaaagtactagaggataaaaaat

SEQ ID NO: 25692 - DNA, 65 bp, Homo sapiens
tgtagggttgctaaagaacataaaaaggcaaggttaaagtactagaggataaaaaattaaaaaca

SEQ ID NO: 25693 - DNA, 72 bp, Homo sapiens
taaaaaattaaaaacacaaaccagcaaccaaaagctgttgctttcacataaagctattcacataaagcacaa

SEQ ID NO: 25694 - DNA, 71 bp, Homo sapiens
aaaaaattaaaaacacaaaccagcaaccaaaagctgttgctttcacataaagctattcacataaagcacaa

SEQ ID NO: 25695 - DNA, 74 bp, Homo sapiens
aaaacacaaaccagcaaccaaaagctgttgctttcacataaagctattcacataaagcacaaaatcatcaaatt

SEQ ID NO: 25696 - DNA, 80 bp, Homo sapiens
cagcaaccaaaagctgttgctttcacataaagctattcacataaagcacaaaatcatcaaattttacaagagagcatatg

SEQ ID NO: 25697 - DNA, 78 bp, Homo sapiens
accaaaagctgttgctttcacataaagctattcacataaagcacaaaatcatcaaattttacaagagagcatatgtaa

SEQ ID NO: 25698 - DNA, 79 bp, Homo sapiens
gctttcacataaagctattcacataaagcacaaaatcatcaaattttacaagagagcatatgtaatttgttgttctgga

SEQ ID NO: 25699 - DNA, 78 bp, Homo sapiens
agctattcacataaagcacaaaatcatcaaattttacaagagagcatatgtaatttgttgttctggacaccaagacaa

SEQ ID NO: 25700 - DNA, 79 bp, Homo sapiens
tcacataaagcacaaaatcatcaaattttacaagagagcatatgtaatttgttgttctggacaccaagacaaatcataa

SEQ ID NO: 25701 - DNA, 78 bp, Homo sapiens
gcacaaaatcatcaaattttacaagagagcatatgtaatttgttgttctggacaccaagacaaatcataattgatctt

SEQ ID NO: 25702 - DNA, 77 bp, Homo sapiens
aagagagcatatgtaatttgttgttctggacaccaagacaaatcataattgatctttccagtcaagccctactatta

SEQ ID NO: 25703 - DNA, 76 bp, Homo sapiens
acaccaagacaaatcataattgatctttccagtcaagccctactattacatcaccaggtatctatcacaaataaaa

SEQ ID NO: 25704 - DNA, 75 bp, Homo sapiens
caaatcataattgatctttccagtcaagccctactattacatcaccaggtatctatcacaaataaaattaaaaca

SEQ ID NO: 25705 - DNA, 68 bp, Homo sapiens
aaaacaaaaagagcctttacctatttacttcaaataacattctctatcccaaaattcccacagagcca

SEQ ID NO: 25706 - DNA, 67 bp, Homo sapiens
aaaaagagcctttacctatttacttcaaataacattctctatcccaaaattcccacagagccaaaaa

SEQ ID NO: 25707 - DNA, 71 bp, Homo sapiens
ctatttacttcaaataacattctctatcccaaaattcccacagagccaaaaaaaattggtatagctatcag

SEQ ID NO: 25708 - DNA, 72 bp, Homo sapiens
cttcaaataacattctctatcccaaaattcccacagagccaaaaaaaattggtatagctatcagttcgttca

SEQ ID NO: 25709 - DNA, 73 bp, Homo sapiens
caaaattcccacagagccaaaaaaaattggtatagctatcagttcgttcaaatcaaaatgacctatgtcacaa

SEQ ID NO: 25710 - DNA, 75 bp, Homo sapiens
acagagccaaaaaaaattggtatagctatcagttcgttcaaatcaaaatgacctatgtcacaactgaagatgtct

SEQ ID NO: 25711 - DNA, 75 bp, Homo sapiens
aaaaattggtatagctatcagttcgttcaaatcaaaatgacctatgtcacaactgaagatgtcttcaacaaagtg

SEQ ID NO: 25712 - DNA, 79 bp, Homo sapiens
tatagctatcagttcgttcaaatcaaaatgacctatgtcacaactgaagatgtcttcaacaaagtggtcaattgtaatg

SEQ ID NO: 25713 - DNA, 76 bp, Homo sapiens
gttcgttcaaatcaaaatgacctatgtcacaactgaagatgtcttcaacaaagtggtcaattgtaatggtccaata

SEQ ID NO: 25714 - DNA, 77 bp, Homo sapiens
aatgacctatgtcacaactgaagatgtcttcaacaaagtggtcaattgtaatggtccaatacagacatagtcttttc

SEQ ID NO: 25715 - DNA, 77 bp, Homo sapiens
acaactgaagatgtcttcaacaaagtggtcaattgtaatggtccaatacagacatagtcttttctcatgtatagaaa

SEQ ID NO: 25716 - DNA, 78 bp, Homo sapiens
caaagtggtcaattgtaatggtccaatacagacatagtcttttctcatgtatagaaaaatgaaatactgagaagagca

SEQ ID NO: 25717 - DNA, 79 bp, Homo sapiens
gtcaattgtaatggtccaatacagacatagtcttttctcatgtatagaaaaatgaaatactgagaagagcagcgtataa

SEQ ID NO: 25718 - DNA, 78 bp, Homo sapiens
atggtccaatacagacatagtcttttctcatgtatagaaaaatgaaatactgagaagagcagcgtataaatatactaa

SEQ ID NO: 25719 - DNA, 79 bp, Homo sapiens
cagacatagtcttttctcatgtatagaaaaatgaaatactgagaagagcagcgtataaatatactaaaatctgcaagtg

SEQ ID NO: 25720 - DNA, 82 bp, Homo sapiens
tctcatgtatagaaaaatgaaatactgagaagagcagcgtataaatatactaaaatctgcaagtggttgatgatagtatctc

SEQ ID NO: 25721 - DNA, 77 bp, Homo sapiens
agaaaaatgaaatactgagaagagcagcgtataaatatactaaaatctgcaagtggttgatgatagtatctcttaaa

SEQ ID NO: 25722 - DNA, 77 bp, Homo sapiens
aatactgagaagagcagcgtataaatatactaaaatctgcaagtggttgatgatagtatctcttaaattccttctcc

SEQ ID NO: 25723 - DNA, 74 bp, Homo sapiens
ataaatatactaaaatctgcaagtggttgatgatagtatctcttaaattccttctcccctcctccactactcta

SEQ ID NO: 25724 - DNA, 76 bp, Homo sapiens
tctgcaagtggttgatgatagtatctcttaaattccttctcccctcctccactactctaatcaatcaataagaaaa

SEQ ID NO: 25725 - DNA, 72 bp, Homo sapiens
gttgatgatagtatctcttaaattccttctcccctcctccactactctaatcaatcaataagaaaaaatacg

SEQ ID NO: 25726 - DNA, 67 bp, Homo sapiens
ctcttaaattccttctcccctcctccactactctaatcaatcaataagaaaaaatacggtaaaatgt

SEQ ID NO: 25727 - DNA, 70 bp, Homo sapiens
caatcaataagaaaaaatacggtaaaatgttaccaaaatctttgcattatatccagagcaatgatttttt

SEQ ID NO: 25728 - DNA, 71 bp, Homo sapiens
aaatacggtaaaatgttaccaaaatctttgcattatatccagagcaatgatttttttggttatagagcgtg

SEQ ID NO: 25729 - DNA, 73 bp, Homo sapiens
cggtaaaatgttaccaaaatctttgcattatatccagagcaatgatttttttggttatagagcgtgtttcata

SEQ ID NO: 25730 - DNA, 79 bp, Homo sapiens
caaaatctttgcattatatccagagcaatgatttttttggttatagagcgtgtttcatatagtctatctatcaacagtg

SEQ ID NO: 25731 - DNA, 79 bp, Homo sapiens
ctttgcattatatccagagcaatgatttttttggttatagagcgtgtttcatatagtctatctatcaacagtgtcttgt

SEQ ID NO: 25732 - DNA, 67 bp, Homo sapiens
ttttttttattaaagttaaggtcttgcaatgttgtacaggctgggtcaaactgactttaataaagga

SEQ ID NO: 25733 - DNA, 70 bp, Homo sapiens
ttattaaagttaaggtcttgcaatgttgtacaggctgggtcaaactgactttaataaaggacaaacacac

SEQ ID NO: 25734 - DNA, 71 bp, Homo sapiens
ttaaggtcttgcaatgttgtacaggctgggtcaaactgactttaataaaggacaaacacacctagcttaaa

SEQ ID NO: 25735 - DNA, 67 bp, Homo sapiens
gttgtacaggctgggtcaaactgactttaataaaggacaaacacacctagcttaaagaaggttaaaa

SEQ ID NO: 25736 - DNA, 69 bp, Homo sapiens
ctgactttaataaaggacaaacacacctagcttaaagaaggttaaaaaaagtctattgatagactatca

SEQ ID NO: 25737 - DNA, 69 bp, Homo sapiens
taataaaggacaaacacacctagcttaaagaaggttaaaaaaagtctattgatagactatcataaaata

SEQ ID NO: 25738 - DNA, 68 bp, Homo sapiens
gacaaacacacctagcttaaagaaggttaaaaaaagtctattgatagactatcataaaataaaaatgg

SEQ ID NO: 25739 - DNA, 68 bp, Homo sapiens
ctagcttaaagaaggttaaaaaaagtctattgatagactatcataaaataaaaatggttactccttca

SEQ ID NO: 25740 - DNA, 69 bp, Homo sapiens
gaaggttaaaaaaagtctattgatagactatcataaaataaaaatggttactccttcattatactcctg

SEQ ID NO: 25741 - DNA, 71 bp, Homo sapiens
ttgatagactatcataaaataaaaatggttactccttcattatactcctgttaacatcaaacaaagaaaat

SEQ ID NO: 25742 - DNA, 67 bp, Homo sapiens
aaaataaaaatggttactccttcattatactcctgttaacatcaaacaaagaaaatttcaggttaga

SEQ ID NO: 25743 - DNA, 71 bp, Homo sapiens
tggttactccttcattatactcctgttaacatcaaacaaagaaaatttcaggttagaacaagaaaacatca

SEQ ID NO: 25744 - DNA, 71 bp, Homo sapiens
ctccttcattatactcctgttaacatcaaacaaagaaaatttcaggttagaacaagaaaacatcaacaatc

SEQ ID NO: 25745 - DNA, 73 bp, Homo sapiens
catcaaacaaagaaaatttcaggttagaacaagaaaacatcaacaatctcagaaagtgaggctagtggaatta

SEQ ID NO: 25746 - DNA, 73 bp, Homo sapiens
tttcaggttagaacaagaaaacatcaacaatctcagaaagtgaggctagtggaattaaaagcttatgaaagac

SEQ ID NO: 25747 - DNA, 74 bp, Homo sapiens
caagaaaacatcaacaatctcagaaagtgaggctagtggaattaaaagcttatgaaagactaaatggttggata

SEQ ID NO: 25748 - DNA, 74 bp, Homo sapiens
acatcaacaatctcagaaagtgaggctagtggaattaaaagcttatgaaagactaaatggttggatatttagga

SEQ ID NO: 25749 - DNA, 69 bp, Homo sapiens
ctcagaaagtgaggctagtggaattaaaagcttatgaaagactaaatggttggatatttaggaaaaaac

SEQ ID NO: 25750 - DNA, 72 bp, Homo sapiens
gaggctagtggaattaaaagcttatgaaagactaaatggttggatatttaggaaaaaacttgtgacatatca

SEQ ID NO: 25751 - DNA, 71 bp, Homo sapiens
ggaattaaaagcttatgaaagactaaatggttggatatttaggaaaaaacttgtgacatatcatttggctg

SEQ ID NO: 25752 - DNA, 71 bp, Homo sapiens
gactaaatggttggatatttaggaaaaaacttgtgacatatcatttggctgtacttaaaatccttagagaa

SEQ ID NO: 25753 - DNA, 73 bp, Homo sapiens
aaaacttgtgacatatcatttggctgtacttaaaatccttagagaaccaattttgccacatctttacatttga

SEQ ID NO: 25754 - DNA, 75 bp, Homo sapiens
tgtgacatatcatttggctgtacttaaaatccttagagaaccaattttgccacatctttacatttgaatttttca

SEQ ID NO: 25755 - DNA, 71 bp, Homo sapiens
catttggctgtacttaaaatccttagagaaccaattttgccacatctttacatttgaatttttcagtcacc

SEQ ID NO: 25756 - DNA, 70 bp, Homo sapiens
ccaattttgccacatctttacatttgaatttttcagtcacccaaaagactgggtagaaacttaacaatgc

SEQ ID NO: 25757 - DNA, 74 bp, Homo sapiens
atttgaatttttcagtcacccaaaagactgggtagaaacttaacaatgctgtagagattcattctgtctcattg

SEQ ID NO: 25758 - DNA, 76 bp, Homo sapiens
ttttcagtcacccaaaagactgggtagaaacttaacaatgctgtagagattcattctgtctcattggcaaaatcaa

SEQ ID NO: 25759 - DNA, 75 bp, Homo sapiens
aagactgggtagaaacttaacaatgctgtagagattcattctgtctcattggcaaaatcaacctcttaagagaaa

SEQ ID NO: 25760 - DNA, 75 bp, Homo sapiens
ggtagaaacttaacaatgctgtagagattcattctgtctcattggcaaaatcaacctcttaagagaaaaatggat

SEQ ID NO: 25761 - DNA, 76 bp, Homo sapiens
taacaatgctgtagagattcattctgtctcattggcaaaatcaacctcttaagagaaaaatggattgtactccctt

SEQ ID NO: 25762 - DNA, 76 bp, Homo sapiens
tgtagagattcattctgtctcattggcaaaatcaacctcttaagagaaaaatggattgtactccctttgcctggaa

SEQ ID NO: 25763 - DNA, 76 bp, Homo sapiens
attctgtctcattggcaaaatcaacctcttaagagaaaaatggattgtactccctttgcctggaatgacagtgcca

SEQ ID NO: 25764 - DNA, 71 bp, Homo sapiens
aatcaacctcttaagagaaaaatggattgtactccctttgcctggaatgacagtgccaggttttgtagaaa

SEQ ID NO: 25765 - DNA, 73 bp, Homo sapiens
agaaaaatggattgtactccctttgcctggaatgacagtgccaggttttgtagaaagatggaactgaatctaa

SEQ ID NO: 25766 - DNA, 74 bp, Homo sapiens
aatggattgtactccctttgcctggaatgacagtgccaggttttgtagaaagatggaactgaatctaatcctaa

SEQ ID NO: 25767 - DNA, 74 bp, Homo sapiens
ctttgcctggaatgacagtgccaggttttgtagaaagatggaactgaatctaatcctaactctcttataaaatg

SEQ ID NO: 25768 - DNA, 74 bp, Homo sapiens
tggaatgacagtgccaggttttgtagaaagatggaactgaatctaatcctaactctcttataaaatgggattta

SEQ ID NO: 25769 - DNA, 72 bp, Homo sapiens
cagtgccaggttttgtagaaagatggaactgaatctaatcctaactctcttataaaatgggatttagaataa

SEQ ID NO: 25770 - DNA, 71 bp, Homo sapiens
gtagaaagatggaactgaatctaatcctaactctcttataaaatgggatttagaataataggcccaatacc

SEQ ID NO: 25771 - DNA, 72 bp, Homo sapiens
aatctaatcctaactctcttataaaatgggatttagaataataggcccaatacctgtactgccgcttatggc

SEQ ID NO: 25772 - DNA, 74 bp, Homo sapiens
tctcttataaaatgggatttagaataataggcccaatacctgtactgccgcttatggctgtcttgagaattaaa

SEQ ID NO: 25773 - DNA, 74 bp, Homo sapiens
ataaaatgggatttagaataataggcccaatacctgtactgccgcttatggctgtcttgagaattaaatgaaca

SEQ ID NO: 25774 - DNA, 84 bp, Homo sapiens
aataggcccaatacctgtactgccgcttatggctgtcttgagaattaaatgaacacaagcactcagcatgctgcctggcatata

SEQ ID NO: 25775 - DNA, 86 bp, Homo sapiens
tgtactgccgcttatggctgtcttgagaattaaatgaacacaagcactcagcatgctgcctggcatatattaagtagctcaaatat

SEQ ID NO: 25776 - DNA, 84 bp, Homo sapiens
tgtcttgagaattaaatgaacacaagcactcagcatgctgcctggcatatattaagtagctcaaatattcttagttccatcttc

SEQ ID NO: 25777 - DNA, 81 bp, Homo sapiens
attaaatgaacacaagcactcagcatgctgcctggcatatattaagtagctcaaatattcttagttccatcttccctacta

SEQ ID NO: 25778 - DNA, 81 bp, Homo sapiens
caagcactcagcatgctgcctggcatatattaagtagctcaaatattcttagttccatcttccctactacctaccatcaaa

SEQ ID NO: 25779 - DNA, 81 bp, Homo sapiens
gcatgctgcctggcatatattaagtagctcaaatattcttagttccatcttccctactacctaccatcaaatgttcatcta

SEQ ID NO: 25780 - DNA, 79 bp, Homo sapiens
tggcatatattaagtagctcaaatattcttagttccatcttccctactacctaccatcaaatgttcatctacagatata

SEQ ID NO: 25781 - DNA, 75 bp, Homo sapiens
attaagtagctcaaatattcttagttccatcttccctactacctaccatcaaatgttcatctacagatataagag

SEQ ID NO: 25782 - DNA, 75 bp, Homo sapiens
aaatattcttagttccatcttccctactacctaccatcaaatgttcatctacagatataagaggcctagctcaaa

SEQ ID NO: 25783 - DNA, 79 bp, Homo sapiens
atcttccctactacctaccatcaaatgttcatctacagatataagaggcctagctcaaatgtcattgcctctgtgttgt

SEQ ID NO: 25784 - DNA, 81 bp, Homo sapiens
actacctaccatcaaatgttcatctacagatataagaggcctagctcaaatgtcattgcctctgtgttgttcttgctcctc

SEQ ID NO: 25785 - DNA, 83 bp, Homo sapiens
aaatgttcatctacagatataagaggcctagctcaaatgtcattgcctctgtgttgttcttgctcctctgccgtgctctgtta

SEQ ID NO: 25786 - DNA, 83 bp, Homo sapiens
tacagatataagaggcctagctcaaatgtcattgcctctgtgttgttcttgctcctctgccgtgctctgttatgtctttctta

SEQ ID NO: 25787 - DNA, 81 bp, Homo sapiens
tataagaggcctagctcaaatgtcattgcctctgtgttgttcttgctcctctgccgtgctctgttatgtctttcttataag

SEQ ID NO: 25788 - DNA, 80 bp, Homo sapiens
tcaaatgtcattgcctctgtgttgttcttgctcctctgccgtgctctgttatgtctttcttataaggggtctcattccat

SEQ ID NO: 25789 - DNA, 78 bp, Homo sapiens
attgcctctgtgttgttcttgctcctctgccgtgctctgttatgtctttcttataaggggtctcattccattatcaac

SEQ ID NO: 25790 - DNA, 80 bp, Homo sapiens
ctcctctgccgtgctctgttatgtctttcttataaggggtctcattccattatcaaccagtcacttgtgcatctgtatta

SEQ ID NO: 25791 - DNA, 79 bp, Homo sapiens
gtgctctgttatgtctttcttataaggggtctcattccattatcaaccagtcacttgtgcatctgtattacactcacct

SEQ ID NO: 25792 - DNA, 78 bp, Homo sapiens
tttcttataaggggtctcattccattatcaaccagtcacttgtgcatctgtattacactcacctttaggctgctcagg

SEQ ID NO: 25793 - DNA, 82 bp, Homo sapiens
tctcattccattatcaaccagtcacttgtgcatctgtattacactcacctttaggctgctcaggtgcaggaaacactttatc

SEQ ID NO: 25794 - DNA, 79 bp, Homo sapiens
attatcaaccagtcacttgtgcatctgtattacactcacctttaggctgctcaggtgcaggaaacactttatctgtcct

SEQ ID NO: 25795 - DNA, 81 bp, Homo sapiens
tcacttgtgcatctgtattacactcacctttaggctgctcaggtgcaggaaacactttatctgtcctttgttcagcaacta

SEQ ID NO: 25796 - DNA, 79 bp, Homo sapiens
atctgtattacactcacctttaggctgctcaggtgcaggaaacactttatctgtcctttgttcagcaactagcagtcaa

SEQ ID NO: 25797 - DNA, 79 bp, Homo sapiens
tattacactcacctttaggctgctcaggtgcaggaaacactttatctgtcctttgttcagcaactagcagtcaattaca

SEQ ID NO: 25798 - DNA, 78 bp, Homo sapiens
tttaggctgctcaggtgcaggaaacactttatctgtcctttgttcagcaactagcagtcaattacacattgtaagaat

SEQ ID NO: 25799 - DNA, 75 bp, Homo sapiens
aggtgcaggaaacactttatctgtcctttgttcagcaactagcagtcaattacacattgtaagaattctaaagtg

SEQ ID NO: 25800 - DNA, 76 bp, Homo sapiens
ttatctgtcctttgttcagcaactagcagtcaattacacattgtaagaattctaaagtgtgcaaaattaaaatgcc

SEQ ID NO: 25801 - DNA, 73 bp, Homo sapiens
ctagcagtcaattacacattgtaagaattctaaagtgtgcaaaattaaaatgccttttggtgataaaacaagc

SEQ ID NO: 25802 - DNA, 70 bp, Homo sapiens
gtaagaattctaaagtgtgcaaaattaaaatgccttttggtgataaaacaagctccatataaaaacagtc

SEQ ID NO: 25803 - DNA, 70 bp, Homo sapiens
aagtgtgcaaaattaaaatgccttttggtgataaaacaagctccatataaaaacagtctccaaagtggaa

SEQ ID NO: 25804 - DNA, 70 bp, Homo sapiens
aattaaaatgccttttggtgataaaacaagctccatataaaaacagtctccaaagtggaatgtacaaaga

SEQ ID NO: 25805 - DNA, 70 bp, Homo sapiens
aatgccttttggtgataaaacaagctccatataaaaacagtctccaaagtggaatgtacaaagaaattat

SEQ ID NO: 25806 - DNA, 71 bp, Homo sapiens
ggtgataaaacaagctccatataaaaacagtctccaaagtggaatgtacaaagaaattattacaactgtcc

SEQ ID NO: 25807 - DNA, 70 bp, Homo sapiens
acaagctccatataaaaacagtctccaaagtggaatgtacaaagaaattattacaactgtcctattttta

SEQ ID NO: 25808 - DNA, 66 bp, Homo sapiens
taaaaacagtctccaaagtggaatgtacaaagaaattattacaactgtcctatttttaaaaattcc

SEQ ID NO: 25809 - DNA, 67 bp, Homo sapiens
ccaaagtggaatgtacaaagaaattattacaactgtcctatttttaaaaattcctatttttacatgc

SEQ ID NO: 25810 - DNA, 67 bp, Homo sapiens
tgtacaaagaaattattacaactgtcctatttttaaaaattcctatttttacatgcttaaatgtacc

SEQ ID NO: 25811 - DNA, 70 bp, Homo sapiens
aattattacaactgtcctatttttaaaaattcctatttttacatgcttaaatgtacctcatatatattgc

SEQ ID NO: 25812 - DNA, 72 bp, Homo sapiens
ttacaactgtcctatttttaaaaattcctatttttacatgcttaaatgtacctcatatatattgctgtagaa

SEQ ID NO: 25813 - DNA, 73 bp, Homo sapiens
ttttaaaaattcctatttttacatgcttaaatgtacctcatatatattgctgtagaaatatatgaatgtattt

SEQ ID NO: 25814 - DNA, 79 bp, Homo sapiens
tcctatttttacatgcttaaatgtacctcatatatattgctgtagaaatatatgaatgtattttataaatacacataca

SEQ ID NO: 25815 - DNA, 82 bp, Homo sapiens
acatgcttaaatgtacctcatatatattgctgtagaaatatatgaatgtattttataaatacacatacagtcatggtacata

SEQ ID NO: 25816 - DNA, 82 bp, Homo sapiens
atgtacctcatatatattgctgtagaaatatatgaatgtattttataaatacacatacagtcatggtacatacttgctatgg

SEQ ID NO: 25817 - DNA, 80 bp, Homo sapiens
cctcatatatattgctgtagaaatatatgaatgtattttataaatacacatacagtcatggtacatacttgctatggttt

SEQ ID NO: 25818 - DNA, 80 bp, Homo sapiens
tgctgtagaaatatatgaatgtattttataaatacacatacagtcatggtacatacttgctatggttttgattgagtgtt

SEQ ID NO: 25819 - DNA, 78 bp, Homo sapiens
tatgaatgtattttataaatacacatacagtcatggtacatacttgctatggttttgattgagtgtttgttccctaca

SEQ ID NO: 25820 - DNA, 74 bp, Homo sapiens
ttttataaatacacatacagtcatggtacatacttgctatggttttgattgagtgtttgttccctacaaaactc

SEQ ID NO: 25821 - DNA, 73 bp, Homo sapiens
acacatacagtcatggtacatacttgctatggttttgattgagtgtttgttccctacaaaactcttgtttaaa

SEQ ID NO: 25822 - DNA, 71 bp, Homo sapiens
cagtcatggtacatacttgctatggttttgattgagtgtttgttccctacaaaactcttgtttaaatttgg

SEQ ID NO: 25823 - DNA, 70 bp, Homo sapiens
gtacatacttgctatggttttgattgagtgtttgttccctacaaaactcttgtttaaatttggttgccat

SEQ ID NO: 25824 - DNA, 71 bp, Homo sapiens
gctatggttttgattgagtgtttgttccctacaaaactcttgtttaaatttggttgccattgtaaacagca

SEQ ID NO: 25825 - DNA, 71 bp, Homo sapiens
gattgagtgtttgttccctacaaaactcttgtttaaatttggttgccattgtaaacagcattgagagttag

SEQ ID NO: 25826 - DNA, 68 bp, Homo sapiens
actcttgtttaaatttggttgccattgtaaacagcattgagagttaggacttttaagaggtatttagg

SEQ ID NO: 25827 - DNA, 72 bp, Homo sapiens
ttgccattgtaaacagcattgagagttaggacttttaagaggtatttaggttctcatcaagggagtgggttc

SEQ ID NO: 25828 - DNA, 70 bp, Homo sapiens
tgtaaacagcattgagagttaggacttttaagaggtatttaggttctcatcaagggagtgggttcgcccc

SEQ ID NO: 25829 - DNA, 65 bp, Homo sapiens
agagttaggacttttaagaggtatttaggttctcatcaagggagtgggttcgcccccttttgttc

SEQ ID NO: 25830 - DNA, 67 bp, Homo sapiens
acttttaagaggtatttaggttctcatcaagggagtgggttcgcccccttttgttctctctctgcct

SEQ ID NO: 25831 - DNA, 72 bp, Homo sapiens
aggttctcatcaagggagtgggttcgcccccttttgttctctctctgcctttctgcctgccgtgtgatacct

SEQ ID NO: 25832 - DNA, 77 bp, Homo sapiens
gagtgggttcgcccccttttgttctctctctgcctttctgcctgccgtgtgataccttccaccatactatcatgcac

SEQ ID NO: 25833 - DNA, 77 bp, Homo sapiens
gttcgcccccttttgttctctctctgcctttctgcctgccgtgtgataccttccaccatactatcatgcaccaagaa

SEQ ID NO: 25834 - DNA, 80 bp, Homo sapiens
tgcctttctgcctgccgtgtgataccttccaccatactatcatgcaccaagaaggcccttgccaaatcccagtacgctga

SEQ ID NO: 25835 - DNA, 78 bp, Homo sapiens
gtgtgataccttccaccatactatcatgcaccaagaaggcccttgccaaatcccagtacgctgatactagactttcca

SEQ ID NO: 25836 - DNA, 78 bp, Homo sapiens
ttccaccatactatcatgcaccaagaaggcccttgccaaatcccagtacgctgatactagactttccagcctccacaa

SEQ ID NO: 25837 - DNA, 78 bp, Homo sapiens
tatcatgcaccaagaaggcccttgccaaatcccagtacgctgatactagactttccagcctccacaactgtaagccaa

SEQ ID NO: 25838 - DNA, 72 bp, Homo sapiens
aagaaggcccttgccaaatcccagtacgctgatactagactttccagcctccacaactgtaagccaataatt

SEQ ID NO: 25839 - DNA, 75 bp, Homo sapiens
ttgccaaatcccagtacgctgatactagactttccagcctccacaactgtaagccaataatttctctctttataa

SEQ ID NO: 25840 - DNA, 79 bp, Homo sapiens
agtctatggtattctgttacatcagcacaaacagacttagacaatgcttcaaacatgttttcctaatactgatgtgtaa

SEQ ID NO: 25841 - DNA, 78 bp, Homo sapiens
ggtattctgttacatcagcacaaacagacttagacaatgcttcaaacatgttttcctaatactgatgtgtaatcaaaa

SEQ ID NO: 25842 - DNA, 78 bp, Homo sapiens
acatcagcacaaacagacttagacaatgcttcaaacatgttttcctaatactgatgtgtaatcaaaacatttagagac

SEQ ID NO: 25843 - DNA, 77 bp, Homo sapiens
aacagacttagacaatgcttcaaacatgttttcctaatactgatgtgtaatcaaaacatttagagaccatggtgcta

SEQ ID NO: 25844 - DNA, 77 bp, Homo sapiens
gacaatgcttcaaacatgttttcctaatactgatgtgtaatcaaaacatttagagaccatggtgctactaaatagga

SEQ ID NO: 25845 - DNA, 76 bp, Homo sapiens
caaacatgttttcctaatactgatgtgtaatcaaaacatttagagaccatggtgctactaaataggattccacaga

SEQ ID NO: 25846 - DNA, 77 bp, Homo sapiens
tcaaaacatttagagaccatggtgctactaaataggattccacagagacactgagtcacagaacagttaggctgttt

SEQ ID NO: 25847 - DNA, 73 bp, Homo sapiens
gtgctactaaataggattccacagagacactgagtcacagaacagttaggctgttttggggtaatgtttaaaa

SEQ ID NO: 25848 - DNA, 73 bp, Homo sapiens
actaaataggattccacagagacactgagtcacagaacagttaggctgttttggggtaatgtttaaaacatga

SEQ ID NO: 25849 - DNA, 74 bp, Homo sapiens
attccacagagacactgagtcacagaacagttaggctgttttggggtaatgtttaaaacatgaccaggccatta

SEQ ID NO: 25850 - DNA, 72 bp, Homo sapiens
tgagtcacagaacagttaggctgttttggggtaatgtttaaaacatgaccaggccattagtggtacgttgaa

SEQ ID NO: 25851 - DNA, 68 bp, Homo sapiens
aacagttaggctgttttggggtaatgtttaaaacatgaccaggccattagtggtacgttgaatccagt

SEQ ID NO: 25852 - DNA, 70 bp, Homo sapiens
ttaggctgttttggggtaatgtttaaaacatgaccaggccattagtggtacgttgaatccagttgcttaa

SEQ ID NO: 25853 - DNA, 71 bp, Homo sapiens
gggtaatgtttaaaacatgaccaggccattagtggtacgttgaatccagttgcttaaggatataaattata

SEQ ID NO: 25854 - DNA, 75 bp, Homo sapiens
tttaaaacatgaccaggccattagtggtacgttgaatccagttgcttaaggatataaattatacagtgctgcatt

SEQ ID NO: 25855 - DNA, 75 bp, Homo sapiens
accaggccattagtggtacgttgaatccagttgcttaaggatataaattatacagtgctgcatttcatttattta

SEQ ID NO: 25856 - DNA, 75 bp, Homo sapiens
ttagtggtacgttgaatccagttgcttaaggatataaattatacagtgctgcatttcatttatttatattaaaga

SEQ ID NO: 25857 - DNA, 80 bp, Homo sapiens
tgaatccagttgcttaaggatataaattatacagtgctgcatttcatttatttatattaaagataatgtgattcctcagc

SEQ ID NO: 25858 - DNA, 77 bp, Homo sapiens
gttgcttaaggatataaattatacagtgctgcatttcatttatttatattaaagataatgtgattcctcagcttccc

SEQ ID NO: 25859 - DNA, 81 bp, Homo sapiens
gatataaattatacagtgctgcatttcatttatttatattaaagataatgtgattcctcagcttcccctgtgagatagtgc

SEQ ID NO: 25860 - DNA, 81 bp, Homo sapiens
tatacagtgctgcatttcatttatttatattaaagataatgtgattcctcagcttcccctgtgagatagtgctaaaagaca

SEQ ID NO: 25861 - DNA, 77 bp, Homo sapiens
ttcatttatttatattaaagataatgtgattcctcagcttcccctgtgagatagtgctaaaagacaggatttctcta

SEQ ID NO: 25862 - DNA, 78 bp, Homo sapiens
taaagataatgtgattcctcagcttcccctgtgagatagtgctaaaagacaggatttctctactatatacatgtaggg

SEQ ID NO: 25863 - DNA, 75 bp, Homo sapiens
attcctcagcttcccctgtgagatagtgctaaaagacaggatttctctactatatacatgtaggggtctgtcctt

SEQ ID NO: 25864 - DNA, 73 bp, Homo sapiens
ttcccctgtgagatagtgctaaaagacaggatttctctactatatacatgtaggggtctgtcctttgggttaa

SEQ ID NO: 25865 - DNA, 74 bp, Homo sapiens
atagtgctaaaagacaggatttctctactatatacatgtaggggtctgtcctttgggttaagtctagtgccaca

SEQ ID NO: 25866 - DNA, 71 bp, Homo sapiens
aaagacaggatttctctactatatacatgtaggggtctgtcctttgggttaagtctagtgccacaaataat

SEQ ID NO: 25867 - DNA, 72 bp, Homo sapiens
aggatttctctactatatacatgtaggggtctgtcctttgggttaagtctagtgccacaaataattgcttct

SEQ ID NO: 25868 - DNA, 76 bp, Homo sapiens
tatatacatgtaggggtctgtcctttgggttaagtctagtgccacaaataattgcttcttgtgtttatgctcaaca

SEQ ID NO: 25869 - DNA, 71 bp, Homo sapiens
tgtcctttgggttaagtctagtgccacaaataattgcttcttgtgtttatgctcaacaaaaccccaccttg

SEQ ID NO: 25870 - DNA, 72 bp, Homo sapiens
ttaagtctagtgccacaaataattgcttcttgtgtttatgctcaacaaaaccccaccttgggtttctgccca

SEQ ID NO: 25871 - DNA, 73 bp, Homo sapiens
cacaaataattgcttcttgtgtttatgctcaacaaaaccccaccttgggtttctgcccatcaacaacataaca

SEQ ID NO: 25872 - DNA, 72 bp, Homo sapiens
taattgcttcttgtgtttatgctcaacaaaaccccaccttgggtttctgcccatcaacaacataacaaagta

SEQ ID NO: 25873 - DNA, 72 bp, Homo sapiens
tgtttatgctcaacaaaaccccaccttgggtttctgcccatcaacaacataacaaagtaatgccaacattaa

SEQ ID NO: 25874 - DNA, 69 bp, Homo sapiens
aacaaaaccccaccttgggtttctgcccatcaacaacataacaaagtaatgccaacattaaccctgtca

SEQ ID NO: 25875 - DNA, 74 bp, Homo sapiens
caccttgggtttctgcccatcaacaacataacaaagtaatgccaacattaaccctgtcaccttgaatgcattac

SEQ ID NO: 25876 - DNA, 74 bp, Homo sapiens
tttctgcccatcaacaacataacaaagtaatgccaacattaaccctgtcaccttgaatgcattacccattttgt

SEQ ID NO: 25877 - DNA, 71 bp, Homo sapiens
ccatcaacaacataacaaagtaatgccaacattaaccctgtcaccttgaatgcattacccattttgttttt

SEQ ID NO: 25878 - DNA, 73 bp, Homo sapiens
accgcacccggcccgcattacgcattttgttttaggggatgccacacagtgacctgggagcattccactttga

SEQ ID NO: 25879 - DNA, 77 bp, Homo sapiens
gcccgcattacgcattttgttttaggggatgccacacagtgacctgggagcattccactttgaatgtatgttgtatc

SEQ ID NO: 25880 - DNA, 76 bp, Homo sapiens
attacgcattttgttttaggggatgccacacagtgacctgggagcattccactttgaatgtatgttgtatctgaac

SEQ ID NO: 25881 - DNA, 76 bp, Homo sapiens
ttgttttaggggatgccacacagtgacctgggagcattccactttgaatgtatgttgtatctgaacctctctaaaa

SEQ ID NO: 25882 - DNA, 75 bp, Homo sapiens
atgccacacagtgacctgggagcattccactttgaatgtatgttgtatctgaacctctctaaaactgtttttccc

SEQ ID NO: 25883 - DNA, 71 bp, Homo sapiens
acagtgacctgggagcattccactttgaatgtatgttgtatctgaacctctctaaaactgtttttcccccc

SEQ ID NO: 25884 - DNA, 69 bp, Homo sapiens
agcattccactttgaatgtatgttgtatctgaacctctctaaaactgtttttccccccccaaagacagg

SEQ ID NO: 25885 - DNA, 68 bp, Homo sapiens
actttgaatgtatgttgtatctgaacctctctaaaactgtttttccccccccaaagacagggtctagc

SEQ ID NO: 25886 - DNA, 72 bp, Homo sapiens
gccactgtgcccaattctcctcttagaattagagaataaggacaattcagggaataggaacaatttccaaaa

SEQ ID NO: 25887 - DNA, 68 bp, Homo sapiens
cccaattctcctcttagaattagagaataaggacaattcagggaataggaacaatttccaaaaacagg

SEQ ID NO: 25888 - DNA, 68 bp, Homo sapiens
tcctcttagaattagagaataaggacaattcagggaataggaacaatttccaaaaacagggcaacctt

SEQ ID NO: 25889 - DNA, 67 bp, Homo sapiens
gaattagagaataaggacaattcagggaataggaacaatttccaaaaacagggcaacctttaaatat

SEQ ID NO: 25890 - DNA, 66 bp, Homo sapiens
aggacaattcagggaataggaacaatttccaaaaacagggcaacctttaaatattttcttagtcag

SEQ ID NO: 25891 - DNA, 66 bp, Homo sapiens
cagggaataggaacaatttccaaaaacagggcaacctttaaatattttcttagtcagtttcaaata

SEQ ID NO: 25892 - DNA, 65 bp, Homo sapiens
aggaacaatttccaaaaacagggcaacctttaaatattttcttagtcagtttcaaatattttcat

SEQ ID NO: 25893 - DNA, 69 bp, Homo sapiens
ccaaaaacagggcaacctttaaatattttcttagtcagtttcaaatattttcatttgatccttacagca

SEQ ID NO: 25894 - DNA, 70 bp, Homo sapiens
gggcaacctttaaatattttcttagtcagtttcaaatattttcatttgatccttacagcaaaatgataaa

SEQ ID NO: 25895 - DNA, 72 bp, Homo sapiens
tattttcttagtcagtttcaaatattttcatttgatccttacagcaaaatgataaagtacacaaagtaatac

SEQ ID NO: 25896 - DNA, 70 bp, Homo sapiens
aatattttcatttgatccttacagcaaaatgataaagtacacaaagtaataccacaattttacaggtaag

SEQ ID NO: 25897 - DNA, 70 bp, Homo sapiens
ttgatccttacagcaaaatgataaagtacacaaagtaataccacaattttacaggtaaggaaactaaggc

SEQ ID NO: 25898 - DNA, 69 bp, Homo sapiens
ccttacagcaaaatgataaagtacacaaagtaataccacaattttacaggtaaggaaactaaggctcaa

SEQ ID NO: 25899 - DNA, 69 bp, Homo sapiens
gataaagtacacaaagtaataccacaattttacaggtaaggaaactaaggctcaaagttacatagagaa

SEQ ID NO: 25900 - DNA, 70 bp, Homo sapiens
gtacacaaagtaataccacaattttacaggtaaggaaactaaggctcaaagttacatagagaatttgctc

SEQ ID NO: 25901 - DNA, 71 bp, Homo sapiens
aataccacaattttacaggtaaggaaactaaggctcaaagttacatagagaatttgctctcaacacatggt

SEQ ID NO: 25902 - DNA, 76 bp, Homo sapiens
acaggtaaggaaactaaggctcaaagttacatagagaatttgctctcaacacatggttagctgaggagtcaagtca

SEQ ID NO: 25903 - DNA, 78 bp, Homo sapiens
aaactaaggctcaaagttacatagagaatttgctctcaacacatggttagctgaggagtcaagtcaagactgctgaat

SEQ ID NO: 25904 - DNA, 80 bp, Homo sapiens
aaggctcaaagttacatagagaatttgctctcaacacatggttagctgaggagtcaagtcaagactgctgaattgtgacc

SEQ ID NO: 25905 - DNA, 79 bp, Homo sapiens
ttacatagagaatttgctctcaacacatggttagctgaggagtcaagtcaagactgctgaattgtgaccccccaaaaga

SEQ ID NO: 25906 - DNA, 78 bp, Homo sapiens
aatttgctctcaacacatggttagctgaggagtcaagtcaagactgctgaattgtgaccccccaaaagatgtgttgaa

SEQ ID NO: 25907 - DNA, 75 bp, Homo sapiens
aacacatggttagctgaggagtcaagtcaagactgctgaattgtgaccccccaaaagatgtgttgaagtcctaac

SEQ ID NO: 25908 - DNA, 75 bp, Homo sapiens
ttagctgaggagtcaagtcaagactgctgaattgtgaccccccaaaagatgtgttgaagtcctaacccctggtgc

SEQ ID NO: 25909 - DNA, 70 bp, Homo sapiens
tgaagtcctaacccctggtgcccataaatttgaccctacttggaaacagggtctttgtagatgtaatcaa

SEQ ID NO: 25910 - DNA, 69 bp, Homo sapiens
tcctaacccctggtgcccataaatttgaccctacttggaaacagggtctttgtagatgtaatcaagtta

SEQ ID NO: 25911 - DNA, 74 bp, Homo sapiens
atgtaatcaagttaagatgaggtctttggagtgaccctaatttgatgaccagtgtccttataaggagaggcacg

SEQ ID NO: 25912 - DNA, 74 bp, Homo sapiens
gttaagatgaggtctttggagtgaccctaatttgatgaccagtgtccttataaggagaggcacgtggaggtaga

SEQ ID NO: 25913 - DNA, 73 bp, Homo sapiens
aggtctttggagtgaccctaatttgatgaccagtgtccttataaggagaggcacgtggaggtagagacccata

SEQ ID NO: 25914 - DNA, 77 bp, Homo sapiens
ttggagtgaccctaatttgatgaccagtgtccttataaggagaggcacgtggaggtagagacccatagagagaatgc

SEQ ID NO: 25915 - DNA, 79 bp, Homo sapiens
taatttgatgaccagtgtccttataaggagaggcacgtggaggtagagacccatagagagaatgccatgttgacaggta

SEQ ID NO: 25916 - DNA, 77 bp, Homo sapiens
agtgtccttataaggagaggcacgtggaggtagagacccatagagagaatgccatgttgacaggtagagactaaatg

SEQ ID NO: 25917 - DNA, 79 bp, Homo sapiens
cttataaggagaggcacgtggaggtagagacccatagagagaatgccatgttgacaggtagagactaaatggctacaga

SEQ ID NO: 25918 - DNA, 80 bp, Homo sapiens
cacgtggaggtagagacccatagagagaatgccatgttgacaggtagagactaaatggctacagatgcaaactatggaac

SEQ ID NO: 25919 - DNA, 79 bp, Homo sapiens
aggtagagacccatagagagaatgccatgttgacaggtagagactaaatggctacagatgcaaactatggaacgaatgg

SEQ ID NO: 25920 - DNA, 78 bp, Homo sapiens
atagagagaatgccatgttgacaggtagagactaaatggctacagatgcaaactatggaacgaatggggctaccaaaa

SEQ ID NO: 25921 - DNA, 77 bp, Homo sapiens
aatgccatgttgacaggtagagactaaatggctacagatgcaaactatggaacgaatggggctaccaaaagctggaa

SEQ ID NO: 25922 - DNA, 75 bp, Homo sapiens
ttgacaggtagagactaaatggctacagatgcaaactatggaacgaatggggctaccaaaagctggaaaagccaa

SEQ ID NO: 25923 - DNA, 72 bp, Homo sapiens
tacagatgcaaactatggaacgaatggggctaccaaaagctggaaaagccaaggaaggaccctcctctagaa

SEQ ID NO: 25924 - DNA, 66 bp, Homo sapiens
aaactatggaacgaatggggctaccaaaagctggaaaagccaaggaaggaccctcctctagaaaat

SEQ ID NO: 25925 - DNA, 69 bp, Homo sapiens
aacgaatggggctaccaaaagctggaaaagccaaggaaggaccctcctctagaaaattcagagggagca

SEQ ID NO: 25926 - DNA, 73 bp, Homo sapiens
taccaaaagctggaaaagccaaggaaggaccctcctctagaaaattcagagggagcatggctctgccgatacc

SEQ ID NO: 25927 - DNA, 75 bp, Homo sapiens
tggaaaagccaaggaaggaccctcctctagaaaattcagagggagcatggctctgccgataccctgatttctcca

SEQ ID NO: 25928 - DNA, 76 bp, Homo sapiens
aggaaggaccctcctctagaaaattcagagggagcatggctctgccgataccctgatttctccagaagtgatagaa

SEQ ID NO: 25929 - DNA, 76 bp, Homo sapiens
ctcctctagaaaattcagagggagcatggctctgccgataccctgatttctccagaagtgatagaaaacaaatttc

SEQ ID NO: 25930 - DNA, 74 bp, Homo sapiens
aaaattcagagggagcatggctctgccgataccctgatttctccagaagtgatagaaaacaaatttctgtttta

SEQ ID NO: 25931 - DNA, 73 bp, Homo sapiens
ggagcatggctctgccgataccctgatttctccagaagtgatagaaaacaaatttctgttttaatttctgttt

SEQ ID NO: 25932 - DNA, 64 bp, Homo sapiens
aaacaaatttctgttttaatttctgtttttaagagcttaaaaacttttaacatgcttaatcaag

SEQ ID NO: 25933 - DNA, 66 bp, Homo sapiens
ctgttttaatttctgtttttaagagcttaaaaacttttaacatgcttaatcaagtttgtggtacac

SEQ ID NO: 25934 - DNA, 69 bp, Homo sapiens
tttctgtttttaagagcttaaaaacttttaacatgcttaatcaagtttgtggtacactttgttacagca

SEQ ID NO: 25935 - DNA, 70 bp, Homo sapiens
tttaagagcttaaaaacttttaacatgcttaatcaagtttgtggtacactttgttacagcagtcctagga

SEQ ID NO: 25936 - DNA, 75 bp, Homo sapiens
gtttgtggtacactttgttacagcagtcctaggaaactataatataaactctaatgcagatctgctggttccaag

SEQ ID NO: 25937 - DNA, 74 bp, Homo sapiens
ctttgttacagcagtcctaggaaactataatataaactctaatgcagatctgctggttccaaggctggtgtttt

SEQ ID NO: 25938 - DNA, 72 bp, Homo sapiens
cctaggaaactataatataaactctaatgcagatctgctggttccaaggctggtgtttttttcctcttcaaa

SEQ ID NO: 25939 - DNA, 76 bp, Homo sapiens
tataatataaactctaatgcagatctgctggttccaaggctggtgtttttttcctcttcaaactctgctatcccaa

SEQ ID NO: 25940 - DNA, 76 bp, Homo sapiens
taatgcagatctgctggttccaaggctggtgtttttttcctcttcaaactctgctatcccaattaatttcaattca

SEQ ID NO: 25941 - DNA, 73 bp, Homo sapiens
tgctggttccaaggctggtgtttttttcctcttcaaactctgctatcccaattaatttcaattcagctagaat

SEQ ID NO: 25942 - DNA, 71 bp, Homo sapiens
ttccaaggctggtgtttttttcctcttcaaactctgctatcccaattaatttcaattcagctagaatttac

SEQ ID NO: 25943 - DNA, 72 bp, Homo sapiens
ggtgtttttttcctcttcaaactctgctatcccaattaatttcaattcagctagaatttacggctatattga

SEQ ID NO: 25944 - DNA, 74 bp, Homo sapiens
ttcctcttcaaactctgctatcccaattaatttcaattcagctagaatttacggctatattgaatttacaagaa

SEQ ID NO: 25945 - DNA, 69 bp, Homo sapiens
aaataattttttaaaggaacttttctagtaaatgtgagacaatacattcccattctttctgtatacaca

SEQ ID NO: 25946 - DNA, 75 bp, Homo sapiens
ttaaaggaacttttctagtaaatgtgagacaatacattcccattctttctgtatacacagtattatacatggtca

SEQ ID NO: 25947 - DNA, 81 bp, Homo sapiens
ttttctagtaaatgtgagacaatacattcccattctttctgtatacacagtattatacatggtcactgatgttcgtcatga

SEQ ID NO: 25948 - DNA, 82 bp, Homo sapiens
tagtaaatgtgagacaatacattcccattctttctgtatacacagtattatacatggtcactgatgttcgtcatgaagattc

SEQ ID NO: 25949 - DNA, 83 bp, Homo sapiens
agacaatacattcccattctttctgtatacacagtattatacatggtcactgatgttcgtcatgaagattctgcagaacttca

SEQ ID NO: 25950 - DNA, 82 bp, Homo sapiens
attcccattctttctgtatacacagtattatacatggtcactgatgttcgtcatgaagattctgcagaacttcacaggcacc

SEQ ID NO: 25951 - DNA, 81 bp, Homo sapiens
tgtatacacagtattatacatggtcactgatgttcgtcatgaagattctgcagaacttcacaggcaccccggactttaaga

SEQ ID NO: 25952 - DNA, 77 bp, Homo sapiens
agtattatacatggtcactgatgttcgtcatgaagattctgcagaacttcacaggcaccccggactttaagaatact

SEQ ID NO: 25953 - DNA, 75 bp, Homo sapiens
atggtcactgatgttcgtcatgaagattctgcagaacttcacaggcaccccggactttaagaatactttctggtt

SEQ ID NO: 25954 - DNA, 73 bp, Homo sapiens
ctgatgttcgtcatgaagattctgcagaacttcacaggcaccccggactttaagaatactttctggttttatt

SEQ ID NO: 25955 - DNA, 69 bp, Homo sapiens
aagattctgcagaacttcacaggcaccccggactttaagaatactttctggttttatttattaagacaa

SEQ ID NO: 25956 - DNA, 69 bp, Homo sapiens
tctgcagaacttcacaggcaccccggactttaagaatactttctggttttatttattaagacaagaaat

SEQ ID NO: 25957 - DNA, 66 bp, Homo sapiens
ggactttaagaatactttctggttttatttattaagacaagaaattagatttctaccttttcgaga

SEQ ID NO: 25958 - DNA, 70 bp, Homo sapiens
agaatactttctggttttatttattaagacaagaaattagatttctaccttttcgagaatgtcctcagca

SEQ ID NO: 25959 - DNA, 67 bp, Homo sapiens
ggttttatttattaagacaagaaattagatttctaccttttcgagaatgtcctcagcaaaaacctag

SEQ ID NO: 25960 - DNA, 70 bp, Homo sapiens
ttaagacaagaaattagatttctaccttttcgagaatgtcctcagcaaaaacctagtaataagcaaggtc

SEQ ID NO: 25961 - DNA, 70 bp, Homo sapiens
caagaaattagatttctaccttttcgagaatgtcctcagcaaaaacctagtaataagcaaggtcttattc

SEQ ID NO: 25962 - DNA, 78 bp, Homo sapiens
ctcagcaaaaacctagtaataagcaaggtcttattctataagttgtcttgttagcaatagtgatcagcagatgagact

SEQ ID NO: 25963 - DNA, 77 bp, Homo sapiens
aaacctagtaataagcaaggtcttattctataagttgtcttgttagcaatagtgatcagcagatgagacttctaaca

SEQ ID NO: 25964 - DNA, 78 bp, Homo sapiens
aagcaaggtcttattctataagttgtcttgttagcaatagtgatcagcagatgagacttctaacatttctatttcgaa

SEQ ID NO: 25965 - DNA, 81 bp, Homo sapiens
ttattctataagttgtcttgttagcaatagtgatcagcagatgagacttctaacatttctatttcgaatgattcaggtgtg

SEQ ID NO: 25966 - DNA, 82 bp, Homo sapiens
ttagcaatagtgatcagcagatgagacttctaacatttctatttcgaatgattcaggtgtgtgtactaggagctagttttca

SEQ ID NO: 25967 - DNA, 80 bp, Homo sapiens
atagtgatcagcagatgagacttctaacatttctatttcgaatgattcaggtgtgtgtactaggagctagttttcaccta

SEQ ID NO: 25968 - DNA, 76 bp, Homo sapiens
atgagacttctaacatttctatttcgaatgattcaggtgtgtgtactaggagctagttttcacctatggtactaca

SEQ ID NO: 25969 - DNA, 75 bp, Homo sapiens
taacatttctatttcgaatgattcaggtgtgtgtactaggagctagttttcacctatggtactacatcccaatcc

SEQ ID NO: 25970 - DNA, 72 bp, Homo sapiens
aatgattcaggtgtgtgtactaggagctagttttcacctatggtactacatcccaatccccaaggaaacgtc

SEQ ID NO: 25971 - DNA, 72 bp, Homo sapiens
tgtgtgtactaggagctagttttcacctatggtactacatcccaatccccaaggaaacgtccctcatggtat

SEQ ID NO: 25972 - DNA, 73 bp, Homo sapiens
agctagttttcacctatggtactacatcccaatccccaaggaaacgtccctcatggtattctgcagtaggcaa

SEQ ID NO: 25973 - DNA, 74 bp, Homo sapiens
ttttcacctatggtactacatcccaatccccaaggaaacgtccctcatggtattctgcagtaggcaaggatgaa

SEQ ID NO: 25974 - DNA, 79 bp, Homo sapiens
tactacatcccaatccccaaggaaacgtccctcatggtattctgcagtaggcaaggatgaatgagcacaacacattgct

SEQ ID NO: 25975 - DNA, 78 bp, Homo sapiens
aatccccaaggaaacgtccctcatggtattctgcagtaggcaaggatgaatgagcacaacacattgcttacaaggcaa

SEQ ID NO: 25976 - DNA, 77 bp, Homo sapiens
aaggaaacgtccctcatggtattctgcagtaggcaaggatgaatgagcacaacacattgcttacaaggcaaaaagcc

SEQ ID NO: 25977 - DNA, 81 bp, Homo sapiens
tccctcatggtattctgcagtaggcaaggatgaatgagcacaacacattgcttacaaggcaaaaagccttcttcacagaaa

SEQ ID NO: 25978 - DNA, 83 bp, Homo sapiens
tattctgcagtaggcaaggatgaatgagcacaacacattgcttacaaggcaaaaagccttcttcacagaaatccagctggaga

SEQ ID NO: 25979 - DNA, 83 bp, Homo sapiens
caaggatgaatgagcacaacacattgcttacaaggcaaaaagccttcttcacagaaatccagctggagagatcggctgacaga

SEQ ID NO: 25980 - DNA, 82 bp, Homo sapiens
atgaatgagcacaacacattgcttacaaggcaaaaagccttcttcacagaaatccagctggagagatcggctgacagaggag

SEQ ID NO: 25981 - DNA, 79 bp, Homo sapiens
acattgcttacaaggcaaaaagccttcttcacagaaatccagctggagagatcggctgacagaggaggtactgccaata

SEQ ID NO: 25982 - DNA, 79 bp, Homo sapiens
caaggcaaaaagccttcttcacagaaatccagctggagagatcggctgacagaggaggtactgccaatactcacaatta

SEQ ID NO: 25983 - DNA, 78 bp, Homo sapiens
aaaaagccttcttcacagaaatccagctggagagatcggctgacagaggaggtactgccaatactcacaattaacaca

SEQ ID NO: 25984 - DNA, 78 bp, Homo sapiens
aatccagctggagagatcggctgacagaggaggtactgccaatactcacaattaacacaccaagagaataaaacaaca

SEQ ID NO: 25985 - DNA, 63 bp, Homo sapiens
caaaaccaaaacgaaacctaaaagcagccactagttcttaaatacaagaaagtactttaaaag

SEQ ID NO: 25986 - DNA, 63 bp, Homo sapiens
ccaaaacgaaacctaaaagcagccactagttcttaaatacaagaaagtactttaaaaggcttt

SEQ ID NO: 25987 - DNA, 65 bp, Homo sapiens
acctaaaagcagccactagttcttaaatacaagaaagtactttaaaaggctttttctaagactta

SEQ ID NO: 25988 - DNA, 65 bp, Homo sapiens
agccactagttcttaaatacaagaaagtactttaaaaggctttttctaagacttaaattattcga

SEQ ID NO: 25989 - DNA, 66 bp, Homo sapiens
aatacaagaaagtactttaaaaggctttttctaagacttaaattattcgaatatctaaaggcaaca

SEQ ID NO: 25990 - DNA, 66 bp, Homo sapiens
agtactttaaaaggctttttctaagacttaaattattcgaatatctaaaggcaacagtgttcccat

SEQ ID NO: 25991 - DNA, 68 bp, Homo sapiens
aaggctttttctaagacttaaattattcgaatatctaaaggcaacagtgttcccatttagaaggataa

SEQ ID NO: 25992 - DNA, 71 bp, Homo sapiens
ctaagacttaaattattcgaatatctaaaggcaacagtgttcccatttagaaggataaaaagcactcacaa

SEQ ID NO: 25993 - DNA, 77 bp, Homo sapiens
tcccatttagaaggataaaaagcactcacaacaagccatcatttcctttcagacacttaactgatgtcagactgatt

SEQ ID NO: 25994 - DNA, 78 bp, Homo sapiens
aaaagcactcacaacaagccatcatttcctttcagacacttaactgatgtcagactgatttaaaattagccactgcaa

SEQ ID NO: 25995 - DNA, 75 bp, Homo sapiens
aacaagccatcatttcctttcagacacttaactgatgtcagactgatttaaaattagccactgcaaacaacaaaa

SEQ ID NO: 25996 - DNA, 76 bp, Homo sapiens
ccatcatttcctttcagacacttaactgatgtcagactgatttaaaattagccactgcaaacaacaaaaaacagca

SEQ ID NO: 25997 - DNA, 76 bp, Homo sapiens
agacacttaactgatgtcagactgatttaaaattagccactgcaaacaacaaaaaacagcagccattttgcatctt

SEQ ID NO: 25998 - DNA, 76 bp, Homo sapiens
ttaactgatgtcagactgatttaaaattagccactgcaaacaacaaaaaacagcagccattttgcatctttaacca

SEQ ID NO: 25999 - DNA, 75 bp, Homo sapiens
gactgatttaaaattagccactgcaaacaacaaaaaacagcagccattttgcatctttaaccatatcctccataa

SEQ ID NO: 26000 - DNA, 72 bp, Homo sapiens
aaattagccactgcaaacaacaaaaaacagcagccattttgcatctttaaccatatcctccataaacaaaac

SEQ ID NO: 26001 - DNA, 74 bp, Homo sapiens
tgcaaacaacaaaaaacagcagccattttgcatctttaaccatatcctccataaacaaaactggcagtcctcct

SEQ ID NO: 26002 - DNA, 70 bp, Homo sapiens
aaaaaacagcagccattttgcatctttaaccatatcctccataaacaaaactggcagtcctcctttaaaa

SEQ ID NO: 26003 - DNA, 69 bp, Homo sapiens
agccattttgcatctttaaccatatcctccataaacaaaactggcagtcctcctttaaaaaaaggccta

SEQ ID NO: 26004 - DNA, 69 bp, Homo sapiens
tttgcatctttaaccatatcctccataaacaaaactggcagtcctcctttaaaaaaaggcctaatacca

SEQ ID NO: 26005 - DNA, 68 bp, Homo sapiens
ttaaccatatcctccataaacaaaactggcagtcctcctttaaaaaaaggcctaataccagtcaagaa

SEQ ID NO: 26006 - DNA, 66 bp, Homo sapiens
ctccataaacaaaactggcagtcctcctttaaaaaaaggcctaataccagtcaagaaaccaacaaa

SEQ ID NO: 26007 - DNA, 65 bp, Homo sapiens
aaaactggcagtcctcctttaaaaaaaggcctaataccagtcaagaaaccaacaaaacttggcca

SEQ ID NO: 26008 - DNA, 67 bp, Homo sapiens
agtcctcctttaaaaaaaggcctaataccagtcaagaaaccaacaaaacttggccaggagcagtggc

SEQ ID NO: 26009 - DNA, 64 bp, Homo sapiens
caaaaaagaaaccaacagttaattttaaaattaaatgcccaaaggtaatactctgtatttttca

SEQ ID NO: 26010 - DNA, 67 bp, Homo sapiens
agaaaccaacagttaattttaaaattaaatgcccaaaggtaatactctgtatttttcatattgcttc

SEQ ID NO: 26011 - DNA, 68 bp, Homo sapiens
accaacagttaattttaaaattaaatgcccaaaggtaatactctgtatttttcatattgcttctggga

SEQ ID NO: 26012 - DNA, 68 bp, Homo sapiens
ccaacagttaattttaaaattaaatgcccaaaggtaatactctgtatttttcatattgcttctgggaa

SEQ ID NO: 26013 - DNA, 69 bp, Homo sapiens
attttaaaattaaatgcccaaaggtaatactctgtatttttcatattgcttctgggaaaataggcagat

SEQ ID NO: 26014 - DNA, 75 bp, Homo sapiens
taaaattaaatgcccaaaggtaatactctgtatttttcatattgcttctgggaaaataggcagattgatatgtga

SEQ ID NO: 26015 - DNA, 77 bp, Homo sapiens
attaaatgcccaaaggtaatactctgtatttttcatattgcttctgggaaaataggcagattgatatgtgatcagtg

SEQ ID NO: 26016 - DNA, 78 bp, Homo sapiens
taaatgcccaaaggtaatactctgtatttttcatattgcttctgggaaaataggcagattgatatgtgatcagtggga

SEQ ID NO: 26017 - DNA, 75 bp, Homo sapiens
ccaaaggtaatactctgtatttttcatattgcttctgggaaaataggcagattgatatgtgatcagtgggaattt

SEQ ID NO: 26018 - DNA, 76 bp, Homo sapiens
aaggtaatactctgtatttttcatattgcttctgggaaaataggcagattgatatgtgatcagtgggaatttttca

SEQ ID NO: 26019 - DNA, 77 bp, Homo sapiens
ctctgtatttttcatattgcttctgggaaaataggcagattgatatgtgatcagtgggaatttttcatataaggaaa

SEQ ID NO: 26020 - DNA, 77 bp, Homo sapiens
ctgtatttttcatattgcttctgggaaaataggcagattgatatgtgatcagtgggaatttttcatataaggaaata

SEQ ID NO: 26021 - DNA, 79 bp, Homo sapiens
catattgcttctgggaaaataggcagattgatatgtgatcagtgggaatttttcatataaggaaataagatgacaacaa

SEQ ID NO: 26022 - DNA, 77 bp, Homo sapiens
gaaaataggcagattgatatgtgatcagtgggaatttttcatataaggaaataagatgacaacaacaacccttgtca

SEQ ID NO: 26023 - DNA, 76 bp, Homo sapiens
taggcagattgatatgtgatcagtgggaatttttcatataaggaaataagatgacaacaacaacccttgtcacccc

SEQ ID NO: 26024 - DNA, 73 bp, Homo sapiens
atatgtgatcagtgggaatttttcatataaggaaataagatgacaacaacaacccttgtcacccccaaagagc

SEQ ID NO: 26025 - DNA, 68 bp, Homo sapiens
gggaatttttcatataaggaaataagatgacaacaacaacccttgtcacccccaaagagcttcaaaaa

SEQ ID NO: 26026 - DNA, 69 bp, Homo sapiens
aaataagatgacaacaacaacccttgtcacccccaaagagcttcaaaaatacctaaactgccatataaa

SEQ ID NO: 26027 - DNA, 70 bp, Homo sapiens
atgacaacaacaacccttgtcacccccaaagagcttcaaaaatacctaaactgccatataaacattcatt

SEQ ID NO: 26028 - DNA, 71 bp, Homo sapiens
cccaaagagcttcaaaaatacctaaactgccatataaacattcatttaaaaagtgttatttcatatcacaa

SEQ ID NO: 26029 - DNA, 74 bp, Homo sapiens
gcttcaaaaatacctaaactgccatataaacattcatttaaaaagtgttatttcatatcacaatgactttcaga

SEQ ID NO: 26030 - DNA, 74 bp, Homo sapiens
tacctaaactgccatataaacattcatttaaaaagtgttatttcatatcacaatgactttcagaagaaaattga

SEQ ID NO: 26031 - DNA, 74 bp, Homo sapiens
tgccatataaacattcatttaaaaagtgttatttcatatcacaatgactttcagaagaaaattgaaactataac

SEQ ID NO: 26032 - DNA, 77 bp, Homo sapiens
agtgttatttcatatcacaatgactttcagaagaaaattgaaactataactgtcttcatgcttaataacataatagc

SEQ ID NO: 26033 - DNA, 80 bp, Homo sapiens
catatcacaatgactttcagaagaaaattgaaactataactgtcttcatgcttaataacataatagctgtatattgcaac

SEQ ID NO: 26034 - DNA, 78 bp, Homo sapiens
cacaatgactttcagaagaaaattgaaactataactgtcttcatgcttaataacataatagctgtatattgcaactaa

SEQ ID NO: 26035 - DNA, 74 bp, Homo sapiens
gaagaaaattgaaactataactgtcttcatgcttaataacataatagctgtatattgcaactaaagaattagtt

SEQ ID NO: 26036 - DNA, 77 bp, Homo sapiens
tgaaactataactgtcttcatgcttaataacataatagctgtatattgcaactaaagaattagtttatgaactactg

SEQ ID NO: 26037 - DNA, 79 bp, Homo sapiens
ctgtcttcatgcttaataacataatagctgtatattgcaactaaagaattagtttatgaactactggcttagcaatgga

SEQ ID NO: 26038 - DNA, 79 bp, Homo sapiens
catgcttaataacataatagctgtatattgcaactaaagaattagtttatgaactactggcttagcaatggacatttca

SEQ ID NO: 26039 - DNA, 76 bp, Homo sapiens
aacataatagctgtatattgcaactaaagaattagtttatgaactactggcttagcaatggacatttcaatttatg

SEQ ID NO: 26040 - DNA, 77 bp, Homo sapiens
gctgtatattgcaactaaagaattagtttatgaactactggcttagcaatggacatttcaatttatgtaaagcacca

SEQ ID NO: 26041 - DNA, 75 bp, Homo sapiens
gcaactaaagaattagtttatgaactactggcttagcaatggacatttcaatttatgtaaagcaccagtaagaga

SEQ ID NO: 26042 - DNA, 74 bp, Homo sapiens
aattagtttatgaactactggcttagcaatggacatttcaatttatgtaaagcaccagtaagagaaagcaggag

SEQ ID NO: 26043 - DNA, 73 bp, Homo sapiens
aactactggcttagcaatggacatttcaatttatgtaaagcaccagtaagagaaagcaggagtcccctttcca

SEQ ID NO: 26044 - DNA, 76 bp, Homo sapiens
ttagcaatggacatttcaatttatgtaaagcaccagtaagagaaagcaggagtcccctttccagacacactagcaa

SEQ ID NO: 26045 - DNA, 74 bp, Homo sapiens
atttcaatttatgtaaagcaccagtaagagaaagcaggagtcccctttccagacacactagcaatctgtaccaa

SEQ ID NO: 26046 - DNA, 73 bp, Homo sapiens
atttatgtaaagcaccagtaagagaaagcaggagtcccctttccagacacactagcaatctgtaccaagtaac

SEQ ID NO: 26047 - DNA, 72 bp, Homo sapiens
accagtaagagaaagcaggagtcccctttccagacacactagcaatctgtaccaagtaaccaaatagtaaga

SEQ ID NO: 26048 - DNA, 73 bp, Homo sapiens
agaaagcaggagtcccctttccagacacactagcaatctgtaccaagtaaccaaatagtaagactgtgaggaa

SEQ ID NO: 26049 - DNA, 71 bp, Homo sapiens
actagcaatctgtaccaagtaaccaaatagtaagactgtgaggaagcacagaagagaaacaaaaggaaaac

SEQ ID NO: 26050 - DNA, 70 bp, Homo sapiens
caagtaaccaaatagtaagactgtgaggaagcacagaagagaaacaaaaggaaaaccacaaggacctaga

SEQ ID NO: 26051 - DNA, 72 bp, Homo sapiens
aaatagtaagactgtgaggaagcacagaagagaaacaaaaggaaaaccacaaggacctagaatttatcatga

SEQ ID NO: 26052 - DNA, 72 bp, Homo sapiens
taagactgtgaggaagcacagaagagaaacaaaaggaaaaccacaaggacctagaatttatcatgaagttaa

SEQ ID NO: 26053 - DNA, 71 bp, Homo sapiens
agcacagaagagaaacaaaaggaaaaccacaaggacctagaatttatcatgaagttaaacatctaggaaga

SEQ ID NO: 26054 - DNA, 72 bp, Homo sapiens
gaaacaaaaggaaaaccacaaggacctagaatttatcatgaagttaaacatctaggaagatgcactaatgta

SEQ ID NO: 26055 - DNA, 73 bp, Homo sapiens
aaggaaaaccacaaggacctagaatttatcatgaagttaaacatctaggaagatgcactaatgtagaacaaca

SEQ ID NO: 26056 - DNA, 77 bp, Homo sapiens
cacaaggacctagaatttatcatgaagttaaacatctaggaagatgcactaatgtagaacaacataataaagacagc

SEQ ID NO: 26057 - DNA, 80 bp, Homo sapiens
atttatcatgaagttaaacatctaggaagatgcactaatgtagaacaacataataaagacagctacaatgttaggcatga

SEQ ID NO: 26058 - DNA, 78 bp, Homo sapiens
gaagttaaacatctaggaagatgcactaatgtagaacaacataataaagacagctacaatgttaggcatgaaacagaa

SEQ ID NO: 26059 - DNA, 77 bp, Homo sapiens
aaacatctaggaagatgcactaatgtagaacaacataataaagacagctacaatgttaggcatgaaacagaaaaaca

SEQ ID NO: 26060 - DNA, 78 bp, Homo sapiens
gaagatgcactaatgtagaacaacataataaagacagctacaatgttaggcatgaaacagaaaaacaatagtatctgt

SEQ ID NO: 26061 - DNA, 74 bp, Homo sapiens
gtagaacaacataataaagacagctacaatgttaggcatgaaacagaaaaacaatagtatctgttgttaaacaa

SEQ ID NO: 26062 - DNA, 76 bp, Homo sapiens
caacataataaagacagctacaatgttaggcatgaaacagaaaaacaatagtatctgttgttaaacaattccatga

SEQ ID NO: 26063 - DNA, 75 bp, Homo sapiens
aagacagctacaatgttaggcatgaaacagaaaaacaatagtatctgttgttaaacaattccatgaaaatatcta

SEQ ID NO: 26064 - DNA, 74 bp, Homo sapiens
acggagaaaagggtatgtgtataggaattcataagttcaaagctacagcgcagtctactgaattaaagccataa

SEQ ID NO: 26065 - DNA, 75 bp, Homo sapiens
aaagggtatgtgtataggaattcataagttcaaagctacagcgcagtctactgaattaaagccataatgacaatt

SEQ ID NO: 26066 - DNA, 78 bp, Homo sapiens
tataggaattcataagttcaaagctacagcgcagtctactgaattaaagccataatgacaatttcctgaagaattgaa

SEQ ID NO: 26067 - DNA, 77 bp, Homo sapiens
aattcataagttcaaagctacagcgcagtctactgaattaaagccataatgacaatttcctgaagaattgaatcaag

SEQ ID NO: 26068 - DNA, 81 bp, Homo sapiens
ttcaaagctacagcgcagtctactgaattaaagccataatgacaatttcctgaagaattgaatcaagtctgagctaacagc

SEQ ID NO: 26069 - DNA, 79 bp, Homo sapiens
cagtctactgaattaaagccataatgacaatttcctgaagaattgaatcaagtctgagctaacagccatctggaaggtg

SEQ ID NO: 26070 - DNA, 78 bp, Homo sapiens
aattaaagccataatgacaatttcctgaagaattgaatcaagtctgagctaacagccatctggaaggtgttagctgct

SEQ ID NO: 26071 - DNA, 80 bp, Homo sapiens
ataatgacaatttcctgaagaattgaatcaagtctgagctaacagccatctggaaggtgttagctgcttcctcataaaca

SEQ ID NO: 26072 - DNA, 79 bp, Homo sapiens
atttcctgaagaattgaatcaagtctgagctaacagccatctggaaggtgttagctgcttcctcataaacaagcactaa

SEQ ID NO: 26073 - DNA, 82 bp, Homo sapiens
aagaattgaatcaagtctgagctaacagccatctggaaggtgttagctgcttcctcataaacaagcactaatgcagtgctta

SEQ ID NO: 26074 - DNA, 81 bp, Homo sapiens
aatcaagtctgagctaacagccatctggaaggtgttagctgcttcctcataaacaagcactaatgcagtgcttagagtaac

SEQ ID NO: 26075 - DNA, 78 bp, Homo sapiens
ctaacagccatctggaaggtgttagctgcttcctcataaacaagcactaatgcagtgcttagagtaacctagataaaa

SEQ ID NO: 26076 - DNA, 78 bp, Homo sapiens
atctggaaggtgttagctgcttcctcataaacaagcactaatgcagtgcttagagtaacctagataaaatgtaagaca

SEQ ID NO: 26077 - DNA, 79 bp, Homo sapiens
ggtgttagctgcttcctcataaacaagcactaatgcagtgcttagagtaacctagataaaatgtaagacacacaacaca

SEQ ID NO: 26078 - DNA, 80 bp, Homo sapiens
ctcataaacaagcactaatgcagtgcttagagtaacctagataaaatgtaagacacacaacacactggaatgtctcacta

SEQ ID NO: 26079 - DNA, 77 bp, Homo sapiens
aaacaagcactaatgcagtgcttagagtaacctagataaaatgtaagacacacaacacactggaatgtctcactaaa

SEQ ID NO: 26080 - DNA, 77 bp, Homo sapiens
cagtgcttagagtaacctagataaaatgtaagacacacaacacactggaatgtctcactaaatggcaacaagataaa

SEQ ID NO: 26081 - DNA, 75 bp, Homo sapiens
ttagagtaacctagataaaatgtaagacacacaacacactggaatgtctcactaaatggcaacaagataaaggta

SEQ ID NO: 26082 - DNA, 80 bp, Homo sapiens
taagacacacaacacactggaatgtctcactaaatggcaacaagataaaggtatctgagagggctagagctctctcaaaa

SEQ ID NO: 26083 - DNA, 77 bp, Homo sapiens
aacacactggaatgtctcactaaatggcaacaagataaaggtatctgagagggctagagctctctcaaaaatgttaa

SEQ ID NO: 26084 - DNA, 77 bp, Homo sapiens
aatgtctcactaaatggcaacaagataaaggtatctgagagggctagagctctctcaaaaatgttaacttgatataa

SEQ ID NO: 26085 - DNA, 77 bp, Homo sapiens
aacaagataaaggtatctgagagggctagagctctctcaaaaatgttaacttgatataatagtaatcaggcaagaga

SEQ ID NO: 26086 - DNA, 79 bp, Homo sapiens
tatctgagagggctagagctctctcaaaaatgttaacttgatataatagtaatcaggcaagagaccaagagctacaagt

SEQ ID NO: 26087 - DNA, 78 bp, Homo sapiens
gctagagctctctcaaaaatgttaacttgatataatagtaatcaggcaagagaccaagagctacaagttatgccttag

SEQ ID NO: 26088 - DNA, 75 bp, Homo sapiens
tctctcaaaaatgttaacttgatataatagtaatcaggcaagagaccaagagctacaagttatgccttaggtaag

SEQ ID NO: 26089 - DNA, 76 bp, Homo sapiens
ttgatataatagtaatcaggcaagagaccaagagctacaagttatgccttaggtaagtaacagctctcaaaacaaa

SEQ ID NO: 26090 - DNA, 74 bp, Homo sapiens
aatcaggcaagagaccaagagctacaagttatgccttaggtaagtaacagctctcaaaacaaacacttcaaaga

SEQ ID NO: 26091 - DNA, 71 bp, Homo sapiens
aagagctacaagttatgccttaggtaagtaacagctctcaaaacaaacacttcaaagagcaaggaagaatt

SEQ ID NO: 26092 - DNA, 70 bp, Homo sapiens
agttatgccttaggtaagtaacagctctcaaaacaaacacttcaaagagcaaggaagaattttgggaaca

SEQ ID NO: 26093 - DNA, 71 bp, Homo sapiens
aagtaacagctctcaaaacaaacacttcaaagagcaaggaagaattttgggaacagctgtagaaattagat

SEQ ID NO: 26094 - DNA, 71 bp, Homo sapiens
caaacacttcaaagagcaaggaagaattttgggaacagctgtagaaattagatttgattaaaagattccat

SEQ ID NO: 26095 - DNA, 72 bp, Homo sapiens
caaagagcaaggaagaattttgggaacagctgtagaaattagatttgattaaaagattccattttgatggaa

SEQ ID NO: 26096 - DNA, 70 bp, Homo sapiens
aggaagaattttgggaacagctgtagaaattagatttgattaaaagattccattttgatggaatttcatt

SEQ ID NO: 26097 - DNA, 70 bp, Homo sapiens
gggaacagctgtagaaattagatttgattaaaagattccattttgatggaatttcatttttcatttaaac

SEQ ID NO: 26098 - DNA, 70 bp, Homo sapiens
gctgtagaaattagatttgattaaaagattccattttgatggaatttcatttttcatttaaactaccatt

SEQ ID NO: 26099 - DNA, 67 bp, Homo sapiens
gatttgattaaaagattccattttgatggaatttcatttttcatttaaactaccatttactttaccc

SEQ ID NO: 26100 - DNA, 73 bp, Homo sapiens
ttgatggaatttcatttttcatttaaactaccatttactttaccccatacaaagagatggatgatctctgccc

SEQ ID NO: 26101 - DNA, 71 bp, Homo sapiens
ttcatttttcatttaaactaccatttactttaccccatacaaagagatggatgatctctgcccttaataat

SEQ ID NO: 26102 - DNA, 69 bp, Homo sapiens
ttttcatttaaactaccatttactttaccccatacaaagagatggatgatctctgcccttaataatttt

SEQ ID NO: 26103 - DNA, 70 bp, Homo sapiens
taccccatacaaagagatggatgatctctgcccttaataattttttaatccaattgaaaaaaagggaaca

SEQ ID NO: 26104 - DNA, 70 bp, Homo sapiens
catacaaagagatggatgatctctgcccttaataattttttaatccaattgaaaaaaagggaacaaaaca

SEQ ID NO: 26105 - DNA, 69 bp, Homo sapiens
gatggatgatctctgcccttaataattttttaatccaattgaaaaaaagggaacaaaacaatgaaagaa

SEQ ID NO: 26106 - DNA, 65 bp, Homo sapiens
ctctgcccttaataattttttaatccaattgaaaaaaagggaacaaaacaatgaaagaacaatta

SEQ ID NO: 26107 - DNA, 63 bp, Homo sapiens
ttttttaatccaattgaaaaaaagggaacaaaacaatgaaagaacaattaaaaggtaattcat

SEQ ID NO: 26108 - DNA, 65 bp, Homo sapiens
taatccaattgaaaaaaagggaacaaaacaatgaaagaacaattaaaaggtaattcattaagaaa

SEQ ID NO: 26109 - DNA, 62 bp, Homo sapiens
aaaagggaacaaaacaatgaaagaacaattaaaaggtaattcattaagaaaaatcttttggt

SEQ ID NO: 26110 - DNA, 67 bp, Homo sapiens
caaaacaatgaaagaacaattaaaaggtaattcattaagaaaaatcttttggtttcggctagcattc

SEQ ID NO: 26111 - DNA, 67 bp, Homo sapiens
gaaagaacaattaaaaggtaattcattaagaaaaatcttttggtttcggctagcattctacggacaa

SEQ ID NO: 26112 - DNA, 67 bp, Homo sapiens
aaaggtaattcattaagaaaaatcttttggtttcggctagcattctacggacaaaattaatccaaga

SEQ ID NO: 26113 - DNA, 72 bp, Homo sapiens
ttcattaagaaaaatcttttggtttcggctagcattctacggacaaaattaatccaagagactggctgagaa

SEQ ID NO: 26114 - DNA, 71 bp, Homo sapiens
aaaaatcttttggtttcggctagcattctacggacaaaattaatccaagagactggctgagaatcattaaa

SEQ ID NO: 26115 - DNA, 74 bp, Homo sapiens
tttggtttcggctagcattctacggacaaaattaatccaagagactggctgagaatcattaaacatgctttaaa

SEQ ID NO: 26116 - DNA, 76 bp, Homo sapiens
ctagcattctacggacaaaattaatccaagagactggctgagaatcattaaacatgctttaaagcatgagaaaaac

SEQ ID NO: 26117 - DNA, 74 bp, Homo sapiens
cggacaaaattaatccaagagactggctgagaatcattaaacatgctttaaagcatgagaaaaaccttatctag

SEQ ID NO: 26118 - DNA, 76 bp, Homo sapiens
tccaagagactggctgagaatcattaaacatgctttaaagcatgagaaaaaccttatctagttcaaagataaacag

SEQ ID NO: 26119 - DNA, 74 bp, Homo sapiens
gactggctgagaatcattaaacatgctttaaagcatgagaaaaaccttatctagttcaaagataaacagtttac

SEQ ID NO: 26120 - DNA, 70 bp, Homo sapiens
gagaatcattaaacatgctttaaagcatgagaaaaaccttatctagttcaaagataaacagtttactttt

SEQ ID NO: 26121 - DNA, 66 bp, Homo sapiens
aaacatgctttaaagcatgagaaaaaccttatctagttcaaagataaacagtttacttttttcttt

SEQ ID NO: 26122 - DNA, 70 bp, Homo sapiens
atgagccactgtgttcggccaacagtttaatttttaattattaaaaatgttcaatcataaacataaaata

SEQ ID NO: 26123 - DNA, 71 bp, Homo sapiens
taatttttaattattaaaaatgttcaatcataaacataaaataaagctgtcttcattcctcaggtgagccg

SEQ ID NO: 26124 - DNA, 73 bp, Homo sapiens
ttattaaaaatgttcaatcataaacataaaataaagctgtcttcattcctcaggtgagccgtctaatgtttta

SEQ ID NO: 26125 - DNA, 76 bp, Homo sapiens
aatgttcaatcataaacataaaataaagctgtcttcattcctcaggtgagccgtctaatgttttagctcaccataa

SEQ ID NO: 26126 - DNA, 75 bp, Homo sapiens
taaacataaaataaagctgtcttcattcctcaggtgagccgtctaatgttttagctcaccataactattagccaa

SEQ ID NO: 26127 - DNA, 75 bp, Homo sapiens
aataaagctgtcttcattcctcaggtgagccgtctaatgttttagctcaccataactattagccaacaaatcaaa

SEQ ID NO: 26128 - DNA, 75 bp, Homo sapiens
tcttcattcctcaggtgagccgtctaatgttttagctcaccataactattagccaacaaatcaaaccaattttga

SEQ ID NO: 26129 - DNA, 73 bp, Homo sapiens
ttcctcaggtgagccgtctaatgttttagctcaccataactattagccaacaaatcaaaccaattttgaacac

SEQ ID NO: 26130 - DNA, 72 bp, Homo sapiens
cgtctaatgttttagctcaccataactattagccaacaaatcaaaccaattttgaacaccactgcaagttat

SEQ ID NO: 26131 - DNA, 73 bp, Homo sapiens
tgttttagctcaccataactattagccaacaaatcaaaccaattttgaacaccactgcaagttattataatgg

SEQ ID NO: 26132 - DNA, 72 bp, Homo sapiens
caccataactattagccaacaaatcaaaccaattttgaacaccactgcaagttattataatggttacaagta

SEQ ID NO: 26133 - DNA, 73 bp, Homo sapiens
agccaacaaatcaaaccaattttgaacaccactgcaagttattataatggttacaagtaagtgaaatgagaga

SEQ ID NO: 26134 - DNA, 71 bp, Homo sapiens
caaaccaattttgaacaccactgcaagttattataatggttacaagtaagtgaaatgagagattaaggagg

SEQ ID NO: 26135 - DNA, 73 bp, Homo sapiens
ttttgaacaccactgcaagttattataatggttacaagtaagtgaaatgagagattaaggaggggcagagtaa

SEQ ID NO: 26136 - DNA, 76 bp, Homo sapiens
cactgcaagttattataatggttacaagtaagtgaaatgagagattaaggaggggcagagtaagttatatgatgaa

SEQ ID NO: 26137 - DNA, 72 bp, Homo sapiens
gttattataatggttacaagtaagtgaaatgagagattaaggaggggcagagtaagttatatgatgaaaaag

SEQ ID NO: 26138 - DNA, 71 bp, Homo sapiens
gagagattaaggaggggcagagtaagttatatgatgaaaaaggtaagtttacaaggtgattcatttactta

SEQ ID NO: 26139 - DNA, 71 bp, Homo sapiens
gggcagagtaagttatatgatgaaaaaggtaagtttacaaggtgattcatttacttaacaaataatgtcca

SEQ ID NO: 26140 - DNA, 69 bp, Homo sapiens
gagtaagttatatgatgaaaaaggtaagtttacaaggtgattcatttacttaacaaataatgtccaaaa

SEQ ID NO: 26141 - DNA, 70 bp, Homo sapiens
gatgaaaaaggtaagtttacaaggtgattcatttacttaacaaataatgtccaaaaactattacatgtca

SEQ ID NO: 26142 - DNA, 70 bp, Homo sapiens
aaggtaagtttacaaggtgattcatttacttaacaaataatgtccaaaaactattacatgtcaggcactg

SEQ ID NO: 26143 - DNA, 72 bp, Homo sapiens
ttacttaacaaataatgtccaaaaactattacatgtcaggcactgttctaggaactagggacagagaagtaa

SEQ ID NO: 26144 - DNA, 76 bp, Homo sapiens
aaaaactattacatgtcaggcactgttctaggaactagggacagagaagtaaacatgccagagaagcttgccttca

SEQ ID NO: 26145 - DNA, 81 bp, Homo sapiens
tattacatgtcaggcactgttctaggaactagggacagagaagtaaacatgccagagaagcttgccttcatgaagcttata

SEQ ID NO: 26146 - DNA, 77 bp, Homo sapiens
cactgttctaggaactagggacagagaagtaaacatgccagagaagcttgccttcatgaagcttataatctagtaaa

SEQ ID NO: 26147 - DNA, 76 bp, Homo sapiens
ttctaggaactagggacagagaagtaaacatgccagagaagcttgccttcatgaagcttataatctagtaaagaaa

SEQ ID NO: 26148 - DNA, 78 bp, Homo sapiens
acagagaagtaaacatgccagagaagcttgccttcatgaagcttataatctagtaaagaaagcccttgctagactgga

SEQ ID NO: 26149 - DNA, 79 bp, Homo sapiens
aagtaaacatgccagagaagcttgccttcatgaagcttataatctagtaaagaaagcccttgctagactggatggatgc

SEQ ID NO: 26150 - DNA, 79 bp, Homo sapiens
agagaagcttgccttcatgaagcttataatctagtaaagaaagcccttgctagactggatggatgccaggtagtcacaa

SEQ ID NO: 26151 - DNA, 77 bp, Homo sapiens
ccttcatgaagcttataatctagtaaagaaagcccttgctagactggatggatgccaggtagtcacaaggtctgtaa

SEQ ID NO: 26152 - DNA, 74 bp, Homo sapiens
agcttataatctagtaaagaaagcccttgctagactggatggatgccaggtagtcacaaggtctgtaagaaaaa

SEQ ID NO: 26153 - DNA, 76 bp, Homo sapiens
taatctagtaaagaaagcccttgctagactggatggatgccaggtagtcacaaggtctgtaagaaaaaataatgca

SEQ ID NO: 26154 - DNA, 74 bp, Homo sapiens
aaagcccttgctagactggatggatgccaggtagtcacaaggtctgtaagaaaaaataatgcagaataaggaaa

SEQ ID NO: 26155 - DNA, 76 bp, Homo sapiens
ttgctagactggatggatgccaggtagtcacaaggtctgtaagaaaaaataatgcagaataaggaaaagaattcca

SEQ ID NO: 26156 - DNA, 75 bp, Homo sapiens
caggtagtcacaaggtctgtaagaaaaaataatgcagaataaggaaaagaattccagatctcataaggatgtgaa

SEQ ID NO: 26157 - DNA, 72 bp, Homo sapiens
aaggtctgtaagaaaaaataatgcagaataaggaaaagaattccagatctcataaggatgtgaaagggacac

SEQ ID NO: 26158 - DNA, 76 bp, Homo sapiens
aaaaataatgcagaataaggaaaagaattccagatctcataaggatgtgaaagggacaccagatgactgaagactg

SEQ ID NO: 26159 - DNA, 76 bp, Homo sapiens
agaataaggaaaagaattccagatctcataaggatgtgaaagggacaccagatgactgaagactggacaaagaata

SEQ ID NO: 26160 - DNA, 74 bp, Homo sapiens
aaggaaaagaattccagatctcataaggatgtgaaagggacaccagatgactgaagactggacaaagaataaac

SEQ ID NO: 26161 - DNA, 77 bp, Homo sapiens
attccagatctcataaggatgtgaaagggacaccagatgactgaagactggacaaagaataaacccactttatggca

SEQ ID NO: 26162 - DNA, 74 bp, Homo sapiens
ataaggatgtgaaagggacaccagatgactgaagactggacaaagaataaacccactttatggcaggtgaagga

SEQ ID NO: 26163 - DNA, 72 bp, Homo sapiens
agatgactgaagactggacaaagaataaacccactttatggcaggtgaaggacttatggaaaagacaaataa

SEQ ID NO: 26164 - DNA, 71 bp, Homo sapiens
aagactggacaaagaataaacccactttatggcaggtgaaggacttatggaaaagacaaataacagcagaa

SEQ ID NO: 26165 - DNA, 72 bp, Homo sapiens
agaataaacccactttatggcaggtgaaggacttatggaaaagacaaataacagcagaacactggatactta

SEQ ID NO: 26166 - DNA, 75 bp, Homo sapiens
cactttatggcaggtgaaggacttatggaaaagacaaataacagcagaacactggatacttattgagaattgtaa

SEQ ID NO: 26167 - DNA, 75 bp, Homo sapiens
caggtgaaggacttatggaaaagacaaataacagcagaacactggatacttattgagaattgtaaaagcatggaa

SEQ ID NO: 26168 - DNA, 75 bp, Homo sapiens
gacttatggaaaagacaaataacagcagaacactggatacttattgagaattgtaaaagcatggaatcgaagaac

SEQ ID NO: 26169 - DNA, 75 bp, Homo sapiens
aagacaaataacagcagaacactggatacttattgagaattgtaaaagcatggaatcgaagaacttgaatattcc

SEQ ID NO: 26170 - DNA, 76 bp, Homo sapiens
taacagcagaacactggatacttattgagaattgtaaaagcatggaatcgaagaacttgaatattccgttaactca

SEQ ID NO: 26171 - DNA, 74 bp, Homo sapiens
cactggatacttattgagaattgtaaaagcatggaatcgaagaacttgaatattccgttaactcattattactc

SEQ ID NO: 26172 - DNA, 72 bp, Homo sapiens
acttattgagaattgtaaaagcatggaatcgaagaacttgaatattccgttaactcattattactcttataa

SEQ ID NO: 26173 - DNA, 73 bp, Homo sapiens
tgtaaaagcatggaatcgaagaacttgaatattccgttaactcattattactcttataaatagggaggcttca

SEQ ID NO: 26174 - DNA, 73 bp, Homo sapiens
aagcatggaatcgaagaacttgaatattccgttaactcattattactcttataaatagggaggcttcatgagg

SEQ ID NO: 26175 - DNA, 70 bp, Homo sapiens
cgaagaacttgaatattccgttaactcattattactcttataaatagggaggcttcatgaggttgtttta

SEQ ID NO: 26176 - DNA, 71 bp, Homo sapiens
gaatattccgttaactcattattactcttataaatagggaggcttcatgaggttgttttaagatggaagga

SEQ ID NO: 26177 - DNA, 72 bp, Homo sapiens
gttaactcattattactcttataaatagggaggcttcatgaggttgttttaagatggaaggaaagctgagaa

SEQ ID NO: 26178 - DNA, 70 bp, Homo sapiens
attactcttataaatagggaggcttcatgaggttgttttaagatggaaggaaagctgagaaaaggcttta

SEQ ID NO: 26179 - DNA, 70 bp, Homo sapiens
ataaatagggaggcttcatgaggttgttttaagatggaaggaaagctgagaaaaggctttaaatgttcag

SEQ ID NO: 26180 - DNA, 71 bp, Homo sapiens
ggcttcatgaggttgttttaagatggaaggaaagctgagaaaaggctttaaatgttcagttatatttagat

SEQ ID NO: 26181 - DNA, 69 bp, Homo sapiens
ggttgttttaagatggaaggaaagctgagaaaaggctttaaatgttcagttatatttagattcacctcc

SEQ ID NO: 26182 - DNA, 72 bp, Homo sapiens
aagatggaaggaaagctgagaaaaggctttaaatgttcagttatatttagattcacctccttaggctggaca

SEQ ID NO: 26183 - DNA, 74 bp, Homo sapiens
gagtgagactccattacccacacacaaaaaagattcacctccctaaatgtttgagtatggagatgggtattaca

SEQ ID NO: 26184 - DNA, 71 bp, Homo sapiens
actccattacccacacacaaaaaagattcacctccctaaatgtttgagtatggagatgggtattacaaata

SEQ ID NO: 26185 - DNA, 72 bp, Homo sapiens
cacacaaaaaagattcacctccctaaatgtttgagtatggagatgggtattacaaatactgcctacaaaaga

SEQ ID NO: 26186 - DNA, 71 bp, Homo sapiens
aaaagattcacctccctaaatgtttgagtatggagatgggtattacaaatactgcctacaaaagattgttc

SEQ ID NO: 26187 - DNA, 72 bp, Homo sapiens
cacctccctaaatgtttgagtatggagatgggtattacaaatactgcctacaaaagattgttccaatattta

SEQ ID NO: 26188 - DNA, 72 bp, Homo sapiens
tgtttgagtatggagatgggtattacaaatactgcctacaaaagattgttccaatatttacaaaacggatta

SEQ ID NO: 26189 - DNA, 69 bp, Homo sapiens
tggagatgggtattacaaatactgcctacaaaagattgttccaatatttacaaaacggattaaatcggg

SEQ ID NO: 26190 - DNA, 69 bp, Homo sapiens
ggtattacaaatactgcctacaaaagattgttccaatatttacaaaacggattaaatcggggaggcaga

SEQ ID NO: 26191 - DNA, 73 bp, Homo sapiens
tactgcctacaaaagattgttccaatatttacaaaacggattaaatcggggaggcagagaacatgagtgacta

SEQ ID NO: 26192 - DNA, 71 bp, Homo sapiens
aaaagattgttccaatatttacaaaacggattaaatcggggaggcagagaacatgagtgactattgcaaaa

SEQ ID NO: 26193 - DNA, 72 bp, Homo sapiens
aatatttacaaaacggattaaatcggggaggcagagaacatgagtgactattgcaaaacaagtgtgaataaa

SEQ ID NO: 26194 - DNA, 73 bp, Homo sapiens
tacaaaacggattaaatcggggaggcagagaacatgagtgactattgcaaaacaagtgtgaataaagaggttc

SEQ ID NO: 26195 - DNA, 73 bp, Homo sapiens
attaaatcggggaggcagagaacatgagtgactattgcaaaacaagtgtgaataaagaggttccaagactggg

SEQ ID NO: 26196 - DNA, 78 bp, Homo sapiens
cagagaacatgagtgactattgcaaaacaagtgtgaataaagaggttccaagactgggtgaaagctgtagaatgcaag

SEQ ID NO: 26197 - DNA, 77 bp, Homo sapiens
aacatgagtgactattgcaaaacaagtgtgaataaagaggttccaagactgggtgaaagctgtagaatgcaaggaga

SEQ ID NO: 26198 - DNA, 73 bp, Homo sapiens
actattgcaaaacaagtgtgaataaagaggttccaagactgggtgaaagctgtagaatgcaaggagaagggtg

SEQ ID NO: 26199 - DNA, 72 bp, Homo sapiens
aagtgtgaataaagaggttccaagactgggtgaaagctgtagaatgcaaggagaagggtgggtctaattata

SEQ ID NO: 26200 - DNA, 74 bp, Homo sapiens
taaagaggttccaagactgggtgaaagctgtagaatgcaaggagaagggtgggtctaattatagcagaggaata

SEQ ID NO: 26201 - DNA, 74 bp, Homo sapiens
agactgggtgaaagctgtagaatgcaaggagaagggtgggtctaattatagcagaggaataattagtgagactt

SEQ ID NO: 26202 - DNA, 76 bp, Homo sapiens
aaagctgtagaatgcaaggagaagggtgggtctaattatagcagaggaataattagtgagactttgtgattagata

SEQ ID NO: 26203 - DNA, 75 bp, Homo sapiens
agaagggtgggtctaattatagcagaggaataattagtgagactttgtgattagatacatgcagaacaaaggaat

SEQ ID NO: 26204 - DNA, 76 bp, Homo sapiens
gtgggtctaattatagcagaggaataattagtgagactttgtgattagatacatgcagaacaaaggaattacaaaa

SEQ ID NO: 26205 - DNA, 75 bp, Homo sapiens
tatagcagaggaataattagtgagactttgtgattagatacatgcagaacaaaggaattacaaaataattaaaag

SEQ ID NO: 26206 - DNA, 71 bp, Homo sapiens
gtgagactttgtgattagatacatgcagaacaaaggaattacaaaataattaaaagtaacattaacaaatt

SEQ ID NO: 26207 - DNA, 71 bp, Homo sapiens
gattagatacatgcagaacaaaggaattacaaaataattaaaagtaacattaacaaatttaagattctgac

SEQ ID NO: 26208 - DNA, 69 bp, Homo sapiens
acatgcagaacaaaggaattacaaaataattaaaagtaacattaacaaatttaagattctgactttcaa

SEQ ID NO: 26209 - DNA, 73 bp, Homo sapiens
ataattaaaagtaacattaacaaatttaagattctgactttcaaatgattcaaatgactatgtagagagacca

SEQ ID NO: 26210 - DNA, 75 bp, Homo sapiens
gtaacattaacaaatttaagattctgactttcaaatgattcaaatgactatgtagagagaccaaagcttcttcaa

SEQ ID NO: 26211 - DNA, 78 bp, Homo sapiens
caaatttaagattctgactttcaaatgattcaaatgactatgtagagagaccaaagcttcttcaagccatttcattgc

SEQ ID NO: 26212 - DNA, 80 bp, Homo sapiens
attctgactttcaaatgattcaaatgactatgtagagagaccaaagcttcttcaagccatttcattgctgcctgatttta

SEQ ID NO: 26213 - DNA, 77 bp, Homo sapiens
actttcaaatgattcaaatgactatgtagagagaccaaagcttcttcaagccatttcattgctgcctgattttattt

SEQ ID NO: 26214 - DNA, 78 bp, Homo sapiens
tcaaatgactatgtagagagaccaaagcttcttcaagccatttcattgctgcctgattttattttcctagttatcaat

SEQ ID NO: 26215 - DNA, 76 bp, Homo sapiens
actatgtagagagaccaaagcttcttcaagccatttcattgctgcctgattttattttcctagttatcaatttgct

SEQ ID NO: 26216 - DNA, 76 bp, Homo sapiens
gcttcttcaagccatttcattgctgcctgattttattttcctagttatcaatttgcttccttcatttgctttttca

SEQ ID NO: 26217 - DNA, 74 bp, Homo sapiens
gccatttcattgctgcctgattttattttcctagttatcaatttgcttccttcatttgctttttcagtaatact

SEQ ID NO: 26218 - DNA, 73 bp, Homo sapiens
gctgcctgattttattttcctagttatcaatttgcttccttcatttgctttttcagtaatacttaagtactca

SEQ ID NO: 26219 - DNA, 70 bp, Homo sapiens
ctagttatcaatttgcttccttcatttgctttttcagtaatacttaagtactcatttcaaattttatctt

SEQ ID NO: 26220 - DNA, 68 bp, Homo sapiens
ttgctttttcagtaatacttaagtactcatttcaaattttatctttcaactagaaacttattacccta

SEQ ID NO: 26221 - DNA, 70 bp, Homo sapiens
tcagtaatacttaagtactcatttcaaattttatctttcaactagaaacttattaccctaatgttctcat

SEQ ID NO: 26222 - DNA, 72 bp, Homo sapiens
tttatctttcaactagaaacttattaccctaatgttctcattcacttctcttctgatataaagtaattaaga

SEQ ID NO: 26223 - DNA, 71 bp, Homo sapiens
tcaactagaaacttattaccctaatgttctcattcacttctcttctgatataaagtaattaagaaaaggta

SEQ ID NO: 26224 - DNA, 71 bp, Homo sapiens
ttattaccctaatgttctcattcacttctcttctgatataaagtaattaagaaaaggtatttctgtccctg

SEQ ID NO: 26225 - DNA, 70 bp, Homo sapiens
cacttctcttctgatataaagtaattaagaaaaggtatttctgtccctgttttttttcatgcacaaggaa

SEQ ID NO: 26226 - DNA, 70 bp, Homo sapiens
ctgatataaagtaattaagaaaaggtatttctgtccctgttttttttcatgcacaaggaaattctggcac

SEQ ID NO: 26227 - DNA, 69 bp, Homo sapiens
taattaagaaaaggtatttctgtccctgttttttttcatgcacaaggaaattctggcacttttctggtg

SEQ ID NO: 26228 - DNA, 68 bp, Homo sapiens
aagaaaaggtatttctgtccctgttttttttcatgcacaaggaaattctggcacttttctggtgtttc

SEQ ID NO: 26229 - DNA, 70 bp, Homo sapiens
tttctgtccctgttttttttcatgcacaaggaaattctggcacttttctggtgtttctgtgaaacggtta

SEQ ID NO: 26230 - DNA, 70 bp, Homo sapiens
ttttttcatgcacaaggaaattctggcacttttctggtgtttctgtgaaacggttatgtgggttttagaa

SEQ ID NO: 26231 - DNA, 71 bp, Homo sapiens
atgcacaaggaaattctggcacttttctggtgtttctgtgaaacggttatgtgggttttagaaggcaacag

SEQ ID NO: 26232 - DNA, 68 bp, Homo sapiens
attctggcacttttctggtgtttctgtgaaacggttatgtgggttttagaaggcaacaggacgtaaaa

SEQ ID NO: 26233 - DNA, 66 bp, Homo sapiens
tttctggtgtttctgtgaaacggttatgtgggttttagaaggcaacaggacgtaaaacctgggtta

SEQ ID NO: 26234 - DNA, 68 bp, Homo sapiens
gtgtttctgtgaaacggttatgtgggttttagaaggcaacaggacgtaaaacctgggttaagagcaga

SEQ ID NO: 26235 - DNA, 67 bp, Homo sapiens
aaacggttatgtgggttttagaaggcaacaggacgtaaaacctgggttaagagcagatgctgggtgg

SEQ ID NO: 26236 - DNA, 69 bp, Homo sapiens
atgtgggttttagaaggcaacaggacgtaaaacctgggttaagagcagatgctgggtgggtacggtggc

SEQ ID NO: 26237 - DNA, 64 bp, Homo sapiens
aaaatgtttaggtttttaaaaagcaaaactcatacacaatgtttcaaggttgaaggttattacc

SEQ ID NO: 26238 - DNA, 66 bp, Homo sapiens
ggtttttaaaaagcaaaactcatacacaatgtttcaaggttgaaggttattacccaaaactgtaga

SEQ ID NO: 26239 - DNA, 70 bp, Homo sapiens
aagcaaaactcatacacaatgtttcaaggttgaaggttattacccaaaactgtagagaatattctttaca

SEQ ID NO: 26240 - DNA, 70 bp, Homo sapiens
catacacaatgtttcaaggttgaaggttattacccaaaactgtagagaatattctttacaactatagtag

SEQ ID NO: 26241 - DNA, 68 bp, Homo sapiens
gtttcaaggttgaaggttattacccaaaactgtagagaatattctttacaactatagtagttacatcc

SEQ ID NO: 26242 - DNA, 70 bp, Homo sapiens
aggttgaaggttattacccaaaactgtagagaatattctttacaactatagtagttacatcctgaatgtg

SEQ ID NO: 26243 - DNA, 71 bp, Homo sapiens
gttattacccaaaactgtagagaatattctttacaactatagtagttacatcctgaatgtgtaaatgtggt

SEQ ID NO: 26244 - DNA, 71 bp, Homo sapiens
gaatattctttacaactatagtagttacatcctgaatgtgtaaatgtggtttacaatttagcagaaaaacc

SEQ ID NO: 26245 - DNA, 74 bp, Homo sapiens
caactatagtagttacatcctgaatgtgtaaatgtggtttacaatttagcagaaaaacctaaggagtgtgcaga

SEQ ID NO: 26246 - DNA, 74 bp, Homo sapiens
agtagttacatcctgaatgtgtaaatgtggtttacaatttagcagaaaaacctaaggagtgtgcagactgttca

SEQ ID NO: 26247 - DNA, 74 bp, Homo sapiens
aatgtgtaaatgtggtttacaatttagcagaaaaacctaaggagtgtgcagactgttcactgctgacgaaagaa

SEQ ID NO: 26248 - DNA, 74 bp, Homo sapiens
gtaaatgtggtttacaatttagcagaaaaacctaaggagtgtgcagactgttcactgctgacgaaagaagatgg

SEQ ID NO: 26249 - DNA, 75 bp, Homo sapiens
tttacaatttagcagaaaaacctaaggagtgtgcagactgttcactgctgacgaaagaagatggtgctaccgtat

SEQ ID NO: 26250 - DNA, 74 bp, Homo sapiens
aaaaacctaaggagtgtgcagactgttcactgctgacgaaagaagatggtgctaccgtattggccagtaagggc

SEQ ID NO: 26251 - DNA, 79 bp, Homo sapiens
agactgttcactgctgacgaaagaagatggtgctaccgtattggccagtaagggctcagtaccactagcagagagactg

SEQ ID NO: 26252 - DNA, 78 bp, Homo sapiens
actgctgacgaaagaagatggtgctaccgtattggccagtaagggctcagtaccactagcagagagactgtggtataa

SEQ ID NO: 26253 - DNA, 78 bp, Homo sapiens
acgaaagaagatggtgctaccgtattggccagtaagggctcagtaccactagcagagagactgtggtataaatgagca

SEQ ID NO: 26254 - DNA, 79 bp, Homo sapiens
atggtgctaccgtattggccagtaagggctcagtaccactagcagagagactgtggtataaatgagcactggactagga

SEQ ID NO: 26255 - DNA, 80 bp, Homo sapiens
cgtattggccagtaagggctcagtaccactagcagagagactgtggtataaatgagcactggactaggaatcagacacac

SEQ ID NO: 26256 - DNA, 79 bp, Homo sapiens
taagggctcagtaccactagcagagagactgtggtataaatgagcactggactaggaatcagacacacctggggataag

SEQ ID NO: 26257 - DNA, 79 bp, Homo sapiens
agtaccactagcagagagactgtggtataaatgagcactggactaggaatcagacacacctggggataagttgatttca

SEQ ID NO: 26258 - DNA, 76 bp, Homo sapiens
agagactgtggtataaatgagcactggactaggaatcagacacacctggggataagttgatttcaccatttaatta

SEQ ID NO: 26259 - DNA, 75 bp, Homo sapiens
gtataaatgagcactggactaggaatcagacacacctggggataagttgatttcaccatttaattagttgaagaa

SEQ ID NO: 26260 - DNA, 70 bp, Homo sapiens
actaggaatcagacacacctggggataagttgatttcaccatttaattagttgaagaacccttccaagtc

SEQ ID NO: 26261 - DNA, 69 bp, Homo sapiens
acacacctggggataagttgatttcaccatttaattagttgaagaacccttccaagtctgtcttcttta

SEQ ID NO: 26262 - DNA, 69 bp, Homo sapiens
gggataagttgatttcaccatttaattagttgaagaacccttccaagtctgtcttctttacctatgaaa

SEQ ID NO: 26263 - DNA, 71 bp, Homo sapiens
atttcaccatttaattagttgaagaacccttccaagtctgtcttctttacctatgaaatgtgacggtgaga

SEQ ID NO: 26264 - DNA, 72 bp, Homo sapiens
atttaattagttgaagaacccttccaagtctgtcttctttacctatgaaatgtgacggtgagagcagaccca

SEQ ID NO: 26265 - DNA, 73 bp, Homo sapiens
ttgaagaacccttccaagtctgtcttctttacctatgaaatgtgacggtgagagcagacccatctaccttaaa

SEQ ID NO: 26266 - DNA, 77 bp, Homo sapiens
tcttctttacctatgaaatgtgacggtgagagcagacccatctaccttaaagaatcggctaacacaatgtatgtgaa

SEQ ID NO: 26267 - DNA, 74 bp, Homo sapiens
agcagacccatctaccttaaagaatcggctaacacaatgtatgtgaaagtaattggaaattgtctggtagtatc

SEQ ID NO: 26268 - DNA, 75 bp, Homo sapiens
agaatcggctaacacaatgtatgtgaaagtaattggaaattgtctggtagtatccaagcttaaggtagcaatata

SEQ ID NO: 26269 - DNA, 77 bp, Homo sapiens
gctaacacaatgtatgtgaaagtaattggaaattgtctggtagtatccaagcttaaggtagcaatatattctgacaa

SEQ ID NO: 26270 - DNA, 78 bp, Homo sapiens
tgtgaaagtaattggaaattgtctggtagtatccaagcttaaggtagcaatatattctgacaacagcctgcaaatcaa

SEQ ID NO: 26271 - DNA, 79 bp, Homo sapiens
aagtaattggaaattgtctggtagtatccaagcttaaggtagcaatatattctgacaacagcctgcaaatcaagatgca

SEQ ID NO: 26272 - DNA, 80 bp, Homo sapiens
aaattgtctggtagtatccaagcttaaggtagcaatatattctgacaacagcctgcaaatcaagatgcagagtgggtgaa

SEQ ID NO: 26273 - DNA, 79 bp, Homo sapiens
tatccaagcttaaggtagcaatatattctgacaacagcctgcaaatcaagatgcagagtgggtgaagggtttaactaca

SEQ ID NO: 26274 - DNA, 79 bp, Homo sapiens
ttaaggtagcaatatattctgacaacagcctgcaaatcaagatgcagagtgggtgaagggtttaactacatatcaggaa

SEQ ID NO: 26275 - DNA, 71 bp, Homo sapiens
agatgcagagtgggtgaagggtttaactacatatcaggaaaaacacttctgtagtcgaaggtccctaataa

SEQ ID NO: 26276 - DNA, 71 bp, Homo sapiens
taactacatatcaggaaaaacacttctgtagtcgaaggtccctaataagtttttagcatggactatagctt

SEQ ID NO: 26277 - DNA, 70 bp, Homo sapiens
acatatcaggaaaaacacttctgtagtcgaaggtccctaataagtttttagcatggactatagctttaaa

SEQ ID NO: 26278 - DNA, 65 bp, Homo sapiens
aaaaacacttctgtagtcgaaggtccctaataagtttttagcatggactatagctttaaaaaaaa

SEQ ID NO: 26279 - DNA, 67 bp, Homo sapiens
tgtagtcgaaggtccctaataagtttttagcatggactatagctttaaaaaaaattacttaaataca

SEQ ID NO: 26280 - DNA, 68 bp, Homo sapiens
ttttagcatggactatagctttaaaaaaaattacttaaatacatttaggtttctatcacttagtctct

SEQ ID NO: 26281 - DNA, 70 bp, Homo sapiens
gcatggactatagctttaaaaaaaattacttaaatacatttaggtttctatcacttagtctcttgtacca

SEQ ID NO: 26282 - DNA, 66 bp, Homo sapiens
gctttaaaaaaaattacttaaatacatttaggtttctatcacttagtctcttgtaccaaaataata

SEQ ID NO: 26283 - DNA, 72 bp, Homo sapiens
taaaaaacaaaaggacatgaaaaagacattaactgtgtatcaagaaaacatctacaacagatagggaaatca

SEQ ID NO: 26284 - DNA, 75 bp, Homo sapiens
aaggacatgaaaaagacattaactgtgtatcaagaaaacatctacaacagatagggaaatcatccatatacttct

SEQ ID NO: 26285 - DNA, 74 bp, Homo sapiens
gaaaaagacattaactgtgtatcaagaaaacatctacaacagatagggaaatcatccatatacttcttaaaaga

SEQ ID NO: 26286 - DNA, 75 bp, Homo sapiens
acattaactgtgtatcaagaaaacatctacaacagatagggaaatcatccatatacttcttaaaagattatcaag

SEQ ID NO: 26287 - DNA, 73 bp, Homo sapiens
gtatcaagaaaacatctacaacagatagggaaatcatccatatacttcttaaaagattatcaagttaaaccag

SEQ ID NO: 26288 - DNA, 76 bp, Homo sapiens
catctacaacagatagggaaatcatccatatacttcttaaaagattatcaagttaaaccagtaatgagattactgc

SEQ ID NO: 26289 - DNA, 74 bp, Homo sapiens
acagatagggaaatcatccatatacttcttaaaagattatcaagttaaaccagtaatgagattactgctggtaa

SEQ ID NO: 26290 - DNA, 73 bp, Homo sapiens
gaaatcatccatatacttcttaaaagattatcaagttaaaccagtaatgagattactgctggtaaaagttcaa

SEQ ID NO: 26291 - DNA, 70 bp, Homo sapiens
cttcttaaaagattatcaagttaaaccagtaatgagattactgctggtaaaagttcaataacaattacta

SEQ ID NO: 26292 - DNA, 71 bp, Homo sapiens
tcaagttaaaccagtaatgagattactgctggtaaaagttcaataacaattactataaatactgtaaacac

SEQ ID NO: 26293 - DNA, 73 bp, Homo sapiens
ccagtaatgagattactgctggtaaaagttcaataacaattactataaatactgtaaacactcatagtctatt

SEQ ID NO: 26294 - DNA, 71 bp, Homo sapiens
gattactgctggtaaaagttcaataacaattactataaatactgtaaacactcatagtctattttataaaa

SEQ ID NO: 26295 - DNA, 70 bp, Homo sapiens
ggtaaaagttcaataacaattactataaatactgtaaacactcatagtctattttataaaaacaaatgca

SEQ ID NO: 26296 - DNA, 71 bp, Homo sapiens
acaattactataaatactgtaaacactcatagtctattttataaaaacaaatgcacaaaaagtgactgact

SEQ ID NO: 26297 - DNA, 71 bp, Homo sapiens
taaatactgtaaacactcatagtctattttataaaaacaaatgcacaaaaagtgactgacttataaaagta

SEQ ID NO: 26298 - DNA, 72 bp, Homo sapiens
ctgtaaacactcatagtctattttataaaaacaaatgcacaaaaagtgactgacttataaaagtaatgactg

SEQ ID NO: 26299 - DNA, 72 bp, Homo sapiens
catagtctattttataaaaacaaatgcacaaaaagtgactgacttataaaagtaatgactgtgtcaattacc

SEQ ID NO: 26300 - DNA, 73 bp, Homo sapiens
caaatgcacaaaaagtgactgacttataaaagtaatgactgtgtcaattaccctcactccaagttattttcaa

SEQ ID NO: 26301 - DNA, 71 bp, Homo sapiens
ctgacttataaaagtaatgactgtgtcaattaccctcactccaagttattttcaattttcactgtaaatac

SEQ ID NO: 26302 - DNA, 71 bp, Homo sapiens
agtaatgactgtgtcaattaccctcactccaagttattttcaattttcactgtaaatacttaactgattaa

SEQ ID NO: 26303 - DNA, 69 bp, Homo sapiens
gtgtcaattaccctcactccaagttattttcaattttcactgtaaatacttaactgattaaagaacaag

SEQ ID NO: 26304 - DNA, 69 bp, Homo sapiens
ccctcactccaagttattttcaattttcactgtaaatacttaactgattaaagaacaaggaggaagtca

SEQ ID NO: 26305 - DNA, 70 bp, Homo sapiens
ttattttcaattttcactgtaaatacttaactgattaaagaacaaggaggaagtcattttaacatggaca

SEQ ID NO: 26306 - DNA, 68 bp, Homo sapiens
ttttcactgtaaatacttaactgattaaagaacaaggaggaagtcattttaacatggacaaagggtgg

SEQ ID NO: 26307 - DNA, 67 bp, Homo sapiens
ctgtaaatacttaactgattaaagaacaaggaggaagtcattttaacatggacaaagggtggggtaa

SEQ ID NO: 26308 - DNA, 67 bp, Homo sapiens
taactgattaaagaacaaggaggaagtcattttaacatggacaaagggtggggtaaaaaaagaggca

SEQ ID NO: 26309 - DNA, 67 bp, Homo sapiens
ggaggaagtcattttaacatggacaaagggtggggtaaaaaaagaggcatgttggtaaatgtattaa

SEQ ID NO: 26310 - DNA, 70 bp, Homo sapiens
taacatggacaaagggtggggtaaaaaaagaggcatgttggtaaatgtattaattgcaaccaacatgaat

SEQ ID NO: 26311 - DNA, 66 bp, Homo sapiens
aagggtggggtaaaaaaagaggcatgttggtaaatgtattaattgcaaccaacatgaattttaccc

SEQ ID NO: 26312 - DNA, 69 bp, Homo sapiens
gggtaaaaaaagaggcatgttggtaaatgtattaattgcaaccaacatgaattttaccccttaatcaga

SEQ ID NO: 26313 - DNA, 71 bp, Homo sapiens
ggcatgttggtaaatgtattaattgcaaccaacatgaattttaccccttaatcagaactaaattcactacc

SEQ ID NO: 26314 - DNA, 73 bp, Homo sapiens
taaatgtattaattgcaaccaacatgaattttaccccttaatcagaactaaattcactacccactctcagcca

SEQ ID NO: 26315 - DNA, 73 bp, Homo sapiens
tattaattgcaaccaacatgaattttaccccttaatcagaactaaattcactacccactctcagccaaacaga

SEQ ID NO: 26316 - DNA, 73 bp, Homo sapiens
caacatgaattttaccccttaatcagaactaaattcactacccactctcagccaaacagagatatcaatttat

SEQ ID NO: 26317 - DNA, 76 bp, Homo sapiens
taaattcactacccactctcagccaaacagagatatcaatttattaagagacgcattattcaaaacggctgagaaa

SEQ ID NO: 26318 - DNA, 76 bp, Homo sapiens
ccaaacagagatatcaatttattaagagacgcattattcaaaacggctgagaaatgaaaggattgcctaggcttca

SEQ ID NO: 26319 - DNA, 77 bp, Homo sapiens
atatcaatttattaagagacgcattattcaaaacggctgagaaatgaaaggattgcctaggcttcactagtctatga

SEQ ID NO: 26320 - DNA, 75 bp, Homo sapiens
atttattaagagacgcattattcaaaacggctgagaaatgaaaggattgcctaggcttcactagtctatgaaata

SEQ ID NO: 26321 - DNA, 75 bp, Homo sapiens
acgcattattcaaaacggctgagaaatgaaaggattgcctaggcttcactagtctatgaaatacagtccactatt

SEQ ID NO: 26322 - DNA, 74 bp, Homo sapiens
attcaaaacggctgagaaatgaaaggattgcctaggcttcactagtctatgaaatacagtccactatttcactt

SEQ ID NO: 26323 - DNA, 74 bp, Homo sapiens
agaaatgaaaggattgcctaggcttcactagtctatgaaatacagtccactatttcactttctgtggtttcagt

SEQ ID NO: 26324 - DNA, 73 bp, Homo sapiens
aaaggattgcctaggcttcactagtctatgaaatacagtccactatttcactttctgtggtttcagttaccca

SEQ ID NO: 26325 - DNA, 72 bp, Homo sapiens
cctaggcttcactagtctatgaaatacagtccactatttcactttctgtggtttcagttacccaaagtgaac

SEQ ID NO: 26326 - DNA, 72 bp, Homo sapiens
tctatgaaatacagtccactatttcactttctgtggtttcagttacccaaagtgaaccgtggtctgaaaata

SEQ ID NO: 26327 - DNA, 69 bp, Homo sapiens
aatacagtccactatttcactttctgtggtttcagttacccaaagtgaaccgtggtctgaaaataggta

SEQ ID NO: 26328 - DNA, 69 bp, Homo sapiens
tatttcactttctgtggtttcagttacccaaagtgaaccgtggtctgaaaataggtaagtagaggatat

SEQ ID NO: 26329 - DNA, 70 bp, Homo sapiens
ctgtggtttcagttacccaaagtgaaccgtggtctgaaaataggtaagtagaggatattaagatagttca

SEQ ID NO: 26330 - DNA, 70 bp, Homo sapiens
tttcagttacccaaagtgaaccgtggtctgaaaataggtaagtagaggatattaagatagttcaagagaa

SEQ ID NO: 26331 - DNA, 71 bp, Homo sapiens
aaagtgaaccgtggtctgaaaataggtaagtagaggatattaagatagttcaagagaaagacagagaggga

SEQ ID NO: 26332 - DNA, 75 bp, Homo sapiens
accgtggtctgaaaataggtaagtagaggatattaagatagttcaagagaaagacagagagggagagagcaagca

SEQ ID NO: 26333 - DNA, 77 bp, Homo sapiens
aaaataggtaagtagaggatattaagatagttcaagagaaagacagagagggagagagcaagcatgtccgtgagcaa

SEQ ID NO: 26334 - DNA, 82 bp, Homo sapiens
tagaggatattaagatagttcaagagaaagacagagagggagagagcaagcatgtccgtgagcaagagcacacattaacaaa

SEQ ID NO: 26335 - DNA, 79 bp, Homo sapiens
ttcaagagaaagacagagagggagagagcaagcatgtccgtgagcaagagcacacattaacaaaacttttattacagta

SEQ ID NO: 26336 - DNA, 76 bp, Homo sapiens
aagcatgtccgtgagcaagagcacacattaacaaaacttttattacagtacactgttactgttctattattcatta

SEQ ID NO: 26337 - DNA, 75 bp, Homo sapiens
gtgagcaagagcacacattaacaaaacttttattacagtacactgttactgttctattattcattattattaatc

SEQ ID NO: 26338 - DNA, 73 bp, Homo sapiens
gcacacattaacaaaacttttattacagtacactgttactgttctattattcattattattaatctcttactg

SEQ ID NO: 26339 - DNA, 70 bp, Homo sapiens
caaaacttttattacagtacactgttactgttctattattcattattattaatctcttactgtacttaat

SEQ ID NO: 26340 - DNA, 76 bp, Homo sapiens
tttataaattaacctttatcagaggtatgtatgtatagcatatatatggttcagtactaccccattttcaggcatc

SEQ ID NO: 26341 - DNA, 76 bp, Homo sapiens
aaattaacctttatcagaggtatgtatgtatagcatatatatggttcagtactaccccattttcaggcatccactg

SEQ ID NO: 26342 - DNA, 80 bp, Homo sapiens
ttatcagaggtatgtatgtatagcatatatatggttcagtactaccccattttcaggcatccactgtgggtcttggaaca

SEQ ID NO: 26343 - DNA, 72 bp, Homo sapiens
tcagtactaccccattttcaggcatccactgtgggtcttggaacatatcccccaaagagaagaggggactac

SEQ ID NO: 26344 - DNA, 74 bp, Homo sapiens
cccattttcaggcatccactgtgggtcttggaacatatcccccaaagagaagaggggactaccgtgcacagaga

SEQ ID NO: 26345 - DNA, 75 bp, Homo sapiens
ggcatccactgtgggtcttggaacatatcccccaaagagaagaggggactaccgtgcacagagactagattcaaa

SEQ ID NO: 26346 - DNA, 75 bp, Homo sapiens
tgtgggtcttggaacatatcccccaaagagaagaggggactaccgtgcacagagactagattcaaattggatcaa

SEQ ID NO: 26347 - DNA, 74 bp, Homo sapiens
cccaaagagaagaggggactaccgtgcacagagactagattcaaattggatcaaataaactaatattggcaatg

SEQ ID NO: 26348 - DNA, 75 bp, Homo sapiens
aagaggggactaccgtgcacagagactagattcaaattggatcaaataaactaatattggcaatgtaagactata

SEQ ID NO: 26349 - DNA, 78 bp, Homo sapiens
actaccgtgcacagagactagattcaaattggatcaaataaactaatattggcaatgtaagactatatgctttggcaa

SEQ ID NO: 26350 - DNA, 80 bp, Homo sapiens
gcacagagactagattcaaattggatcaaataaactaatattggcaatgtaagactatatgctttggcaaatgtaatata

SEQ ID NO: 26351 - DNA, 80 bp, Homo sapiens
gattcaaattggatcaaataaactaatattggcaatgtaagactatatgctttggcaaatgtaatatatatgcattcaag

SEQ ID NO: 26352 - DNA, 79 bp, Homo sapiens
tggatcaaataaactaatattggcaatgtaagactatatgctttggcaaatgtaatatatatgcattcaagtgaaaggg

SEQ ID NO: 26353 - DNA, 79 bp, Homo sapiens
taatattggcaatgtaagactatatgctttggcaaatgtaatatatatgcattcaagtgaaaggggaataacaagtcca

SEQ ID NO: 26354 - DNA, 78 bp, Homo sapiens
caatgtaagactatatgctttggcaaatgtaatatatatgcattcaagtgaaaggggaataacaagtccactaagcaa

SEQ ID NO: 26355 - DNA, 80 bp, Homo sapiens
actatatgctttggcaaatgtaatatatatgcattcaagtgaaaggggaataacaagtccactaagcaaatgctcattca

SEQ ID NO: 26356 - DNA, 80 bp, Homo sapiens
tatgctttggcaaatgtaatatatatgcattcaagtgaaaggggaataacaagtccactaagcaaatgctcattcaaatg

SEQ ID NO: 26357 - DNA, 78 bp, Homo sapiens
ggcaaatgtaatatatatgcattcaagtgaaaggggaataacaagtccactaagcaaatgctcattcaaatgttttca

SEQ ID NO: 26358 - DNA, 78 bp, Homo sapiens
gtaatatatatgcattcaagtgaaaggggaataacaagtccactaagcaaatgctcattcaaatgttttcaagcatta

SEQ ID NO: 26359 - DNA, 78 bp, Homo sapiens
tatatgcattcaagtgaaaggggaataacaagtccactaagcaaatgctcattcaaatgttttcaagcattaaacaca

SEQ ID NO: 26360 - DNA, 76 bp, Homo sapiens
gcattcaagtgaaaggggaataacaagtccactaagcaaatgctcattcaaatgttttcaagcattaaacacataa

SEQ ID NO: 26361 - DNA, 73 bp, Homo sapiens
aagtgaaaggggaataacaagtccactaagcaaatgctcattcaaatgttttcaagcattaaacacataacca

SEQ ID NO: 26362 - DNA, 75 bp, Homo sapiens
tgaaaggggaataacaagtccactaagcaaatgctcattcaaatgttttcaagcattaaacacataaccaatcag

SEQ ID NO: 26363 - DNA, 78 bp, Homo sapiens
taacaagtccactaagcaaatgctcattcaaatgttttcaagcattaaacacataaccaatcagttagcattagcaac

SEQ ID NO: 26364 - DNA, 76 bp, Homo sapiens
gcaaatgctcattcaaatgttttcaagcattaaacacataaccaatcagttagcattagcaaccatttaagaaaag

SEQ ID NO: 26365 - DNA, 72 bp, Homo sapiens
cattcaaatgttttcaagcattaaacacataaccaatcagttagcattagcaaccatttaagaaaaggaggg

SEQ ID NO: 26366 - DNA, 72 bp, Homo sapiens
tcaagcattaaacacataaccaatcagttagcattagcaaccatttaagaaaaggaggggtgttctaacaat

SEQ ID NO: 26367 - DNA, 73 bp, Homo sapiens
cattaaacacataaccaatcagttagcattagcaaccatttaagaaaaggaggggtgttctaacaattgcata

SEQ ID NO: 26368 - DNA, 71 bp, Homo sapiens
accaatcagttagcattagcaaccatttaagaaaaggaggggtgttctaacaattgcatataattaactac

SEQ ID NO: 26369 - DNA, 72 bp, Homo sapiens
gttagcattagcaaccatttaagaaaaggaggggtgttctaacaattgcatataattaactacttctagatg

SEQ ID NO: 26370 - DNA, 71 bp, Homo sapiens
gcaaccatttaagaaaaggaggggtgttctaacaattgcatataattaactacttctagatgtcaaaacag

SEQ ID NO: 26371 - DNA, 79 bp, Homo sapiens
tgttctaacaattgcatataattaactacttctagatgtcaaaacagtacgagcagagccacagacacagaaggataaa

SEQ ID NO: 26372 - DNA, 82 bp, Homo sapiens
tacttctagatgtcaaaacagtacgagcagagccacagacacagaaggataaaccatcctatcacttcacaagagcctcatc

SEQ ID NO: 26373 - DNA, 81 bp, Homo sapiens
atgtcaaaacagtacgagcagagccacagacacagaaggataaaccatcctatcacttcacaagagcctcatcccagagta

SEQ ID NO: 26374 - DNA, 80 bp, Homo sapiens
acagacacagaaggataaaccatcctatcacttcacaagagcctcatcccagagtatgccaccagagaagtgaataacaa

SEQ ID NO: 26375 - DNA, 76 bp, Homo sapiens
aaggataaaccatcctatcacttcacaagagcctcatcccagagtatgccaccagagaagtgaataacaaaggaat

SEQ ID NO: 26376 - DNA, 77 bp, Homo sapiens
taaaccatcctatcacttcacaagagcctcatcccagagtatgccaccagagaagtgaataacaaaggaatttccta

SEQ ID NO: 26377 - DNA, 78 bp, Homo sapiens
tatcacttcacaagagcctcatcccagagtatgccaccagagaagtgaataacaaaggaatttcctatatcttctaac

SEQ ID NO: 26378 - DNA, 73 bp, Homo sapiens
aagagcctcatcccagagtatgccaccagagaagtgaataacaaaggaatttcctatatcttctaaccgtaac

SEQ ID NO: 26379 - DNA, 69 bp, Homo sapiens
agagtatgccaccagagaagtgaataacaaaggaatttcctatatcttctaaccgtaacgggtaaaaca

SEQ ID NO: 26380 - DNA, 63 bp, Homo sapiens
agaagtgaataacaaaggaatttcctatatcttctaaccgtaacgggtaaaacattaaaaaaa

SEQ ID NO: 26381 - DNA, 69 bp, Homo sapiens
aaaaaaaattcttctaatgcaacaataatgggacaaaaaacaatgtatatttatggtgtattttcagga

SEQ ID NO: 26382 - DNA, 72 bp, Homo sapiens
cttctaatgcaacaataatgggacaaaaaacaatgtatatttatggtgtattttcaggaactaggagagaaa

SEQ ID NO: 26383 - DNA, 71 bp, Homo sapiens
aatgcaacaataatgggacaaaaaacaatgtatatttatggtgtattttcaggaactaggagagaaaagcc

SEQ ID NO: 26384 - DNA, 70 bp, Homo sapiens
ggacaaaaaacaatgtatatttatggtgtattttcaggaactaggagagaaaagccttagaaacacgtca

SEQ ID NO: 26385 - DNA, 70 bp, Homo sapiens
acaatgtatatttatggtgtattttcaggaactaggagagaaaagccttagaaacacgtcaagaggaaag

SEQ ID NO: 26386 - DNA, 71 bp, Homo sapiens
ttatggtgtattttcaggaactaggagagaaaagccttagaaacacgtcaagaggaaagtctctggattaa

SEQ ID NO: 26387 - DNA, 71 bp, Homo sapiens
tattttcaggaactaggagagaaaagccttagaaacacgtcaagaggaaagtctctggattaaaccatcta

SEQ ID NO: 26388 - DNA, 70 bp, Homo sapiens
aactaggagagaaaagccttagaaacacgtcaagaggaaagtctctggattaaaccatctaagtttagca

SEQ ID NO: 26389 - DNA, 73 bp, Homo sapiens
agagaaaagccttagaaacacgtcaagaggaaagtctctggattaaaccatctaagtttagcatgacatttca

SEQ ID NO: 26390 - DNA, 72 bp, Homo sapiens
agaaaagccttagaaacacgtcaagaggaaagtctctggattaaaccatctaagtttagcatgacatttcaa

SEQ ID NO: 26391 - DNA, 71 bp, Homo sapiens
ccttagaaacacgtcaagaggaaagtctctggattaaaccatctaagtttagcatgacatttcaagctttt

SEQ ID NO: 26392 - DNA, 73 bp, Homo sapiens
cttagaaacacgtcaagaggaaagtctctggattaaaccatctaagtttagcatgacatttcaagctttttga

SEQ ID NO: 26393 - DNA, 72 bp, Homo sapiens
aaacacgtcaagaggaaagtctctggattaaaccatctaagtttagcatgacatttcaagctttttgactcc

SEQ ID NO: 26394 - DNA, 68 bp, Homo sapiens
aaagtctctggattaaaccatctaagtttagcatgacatttcaagctttttgactcctttttttggtt

SEQ ID NO: 26395 - DNA, 69 bp, Homo sapiens
ctctggattaaaccatctaagtttagcatgacatttcaagctttttgactcctttttttggtttttgaa

SEQ ID NO: 26396 - DNA, 68 bp, Homo sapiens
gattaaaccatctaagtttagcatgacatttcaagctttttgactcctttttttggtttttgaaaaca

SEQ ID NO: 26397 - DNA, 71 bp, Homo sapiens
tctaagtttagcatgacatttcaagctttttgactcctttttttggtttttgaaaacaatcctcagtggca

SEQ ID NO: 26398 - DNA, 71 bp, Homo sapiens
gcatgacatttcaagctttttgactcctttttttggtttttgaaaacaatcctcagtggcagaaagttatc

SEQ ID NO: 26399 - DNA, 68 bp, Homo sapiens
tcaagctttttgactcctttttttggtttttgaaaacaatcctcagtggcagaaagttatctaacgaa

SEQ ID NO: 26400 - DNA, 70 bp, Homo sapiens
tgaaaacaatcctcagtggcagaaagttatctaacgaaaaaataacattcaaaactttttggagagttgc

SEQ ID NO: 26401 - DNA, 70 bp, Homo sapiens
caatcctcagtggcagaaagttatctaacgaaaaaataacattcaaaactttttggagagttgccaagag

SEQ ID NO: 26402 - DNA, 70 bp, Homo sapiens
ggcagaaagttatctaacgaaaaaataacattcaaaactttttggagagttgccaagagtttcacaagca

SEQ ID NO: 26403 - DNA, 74 bp, Homo sapiens
aaataacattcaaaactttttggagagttgccaagagtttcacaagcatctcaaggccaacacgccctgctgta

SEQ ID NO: 26404 - DNA, 81 bp, Homo sapiens
tttttggagagttgccaagagtttcacaagcatctcaaggccaacacgccctgctgtagcatcattctagccattagccaa

SEQ ID NO: 26405 - DNA, 80 bp, Homo sapiens
gttgccaagagtttcacaagcatctcaaggccaacacgccctgctgtagcatcattctagccattagccaaggaactaaa

SEQ ID NO: 26406 - DNA, 81 bp, Homo sapiens
tttcacaagcatctcaaggccaacacgccctgctgtagcatcattctagccattagccaaggaactaaagctctgagttaa

SEQ ID NO: 26407 - DNA, 76 bp, Homo sapiens
acgccctgctgtagcatcattctagccattagccaaggaactaaagctctgagttaatggttttgaggttcacaaa

SEQ ID NO: 26408 - DNA, 77 bp, Homo sapiens
tgtagcatcattctagccattagccaaggaactaaagctctgagttaatggttttgaggttcacaaaggatactaca

SEQ ID NO: 26409 - DNA, 74 bp, Homo sapiens
atcattctagccattagccaaggaactaaagctctgagttaatggttttgaggttcacaaaggatactacacca

SEQ ID NO: 26410 - DNA, 72 bp, Homo sapiens
attagccaaggaactaaagctctgagttaatggttttgaggttcacaaaggatactacaccagaatcacgaa

SEQ ID NO: 26411 - DNA, 73 bp, Homo sapiens
aggaactaaagctctgagttaatggttttgaggttcacaaaggatactacaccagaatcacgaagagcaagta

SEQ ID NO: 26412 - DNA, 76 bp, Homo sapiens
tgagttaatggttttgaggttcacaaaggatactacaccagaatcacgaagagcaagtaggctccttaatctcaga

SEQ ID NO: 26413 - DNA, 73 bp, Homo sapiens
aatggttttgaggttcacaaaggatactacaccagaatcacgaagagcaagtaggctccttaatctcagaaaa

SEQ ID NO: 26414 - DNA, 77 bp, Homo sapiens
ttcacaaaggatactacaccagaatcacgaagagcaagtaggctccttaatctcagaaaaatcatcctttggatcta

SEQ ID NO: 26415 - DNA, 73 bp, Homo sapiens
aatcacgaagagcaagtaggctccttaatctcagaaaaatcatcctttggatctaccaactataagttaccaa

SEQ ID NO: 26416 - DNA, 71 bp, Homo sapiens
aagagcaagtaggctccttaatctcagaaaaatcatcctttggatctaccaactataagttaccaagaatt

SEQ ID NO: 26417 - DNA, 71 bp, Homo sapiens
gtaggctccttaatctcagaaaaatcatcctttggatctaccaactataagttaccaagaattttctgtct

SEQ ID NO: 26418 - DNA, 72 bp, Homo sapiens
ctcagaaaaatcatcctttggatctaccaactataagttaccaagaattttctgtctttagtatttgctatc

SEQ ID NO: 26419 - DNA, 70 bp, Homo sapiens
ggatctaccaactataagttaccaagaattttctgtctttagtatttgctatctacttatcctttccctc

SEQ ID NO: 26420 - DNA, 69 bp, Homo sapiens
ccaactataagttaccaagaattttctgtctttagtatttgctatctacttatcctttccctccaaata

SEQ ID NO: 26421 - DNA, 70 bp, Homo sapiens
gttaccaagaattttctgtctttagtatttgctatctacttatcctttccctccaaataatcaatattcc

SEQ ID NO: 26422 - DNA, 73 bp, Homo sapiens
ctgtctttagtatttgctatctacttatcctttccctccaaataatcaatattcctaaagctcttatataaga

SEQ ID NO: 26423 - DNA, 76 bp, Homo sapiens
tatttgctatctacttatcctttccctccaaataatcaatattcctaaagctcttatataagaaagatatgaagca

SEQ ID NO: 26424 - DNA, 76 bp, Homo sapiens
gctatctacttatcctttccctccaaataatcaatattcctaaagctcttatataagaaagatatgaagcaagcaa

SEQ ID NO: 26425 - DNA, 76 bp, Homo sapiens
tttccctccaaataatcaatattcctaaagctcttatataagaaagatatgaagcaagcaatatccataatgaagg

SEQ ID NO: 26426 - DNA, 78 bp, Homo sapiens
caaataatcaatattcctaaagctcttatataagaaagatatgaagcaagcaatatccataatgaaggtagaaagtgc

SEQ ID NO: 26427 - DNA, 77 bp, Homo sapiens
tattcctaaagctcttatataagaaagatatgaagcaagcaatatccataatgaaggtagaaagtgctagtaacttg

SEQ ID NO: 26428 - DNA, 77 bp, Homo sapiens
agctcttatataagaaagatatgaagcaagcaatatccataatgaaggtagaaagtgctagtaacttgtttctcaag

SEQ ID NO: 26429 - DNA, 75 bp, Homo sapiens
agaaagatatgaagcaagcaatatccataatgaaggtagaaagtgctagtaacttgtttctcaagttgtacaaaa

SEQ ID NO: 26430 - DNA, 71 bp, Homo sapiens
gaagcaagcaatatccataatgaaggtagaaagtgctagtaacttgtttctcaagttgtacaaaagggttt

SEQ ID NO: 26431 - DNA, 70 bp, Homo sapiens
agcaatatccataatgaaggtagaaagtgctagtaacttgtttctcaagttgtacaaaagggttttatag

SEQ ID NO: 26432 - DNA, 69 bp, Homo sapiens
gtagaaagtgctagtaacttgtttctcaagttgtacaaaagggttttatagtatcatattccttccaaa

SEQ ID NO: 26433 - DNA, 69 bp, Homo sapiens
ctagtaacttgtttctcaagttgtacaaaagggttttatagtatcatattccttccaaatcaaacacat

SEQ ID NO: 26434 - DNA, 72 bp, Homo sapiens
tcaagttgtacaaaagggttttatagtatcatattccttccaaatcaaacacattaccacagttacatgtag

SEQ ID NO: 26435 - DNA, 72 bp, Homo sapiens
caaaagggttttatagtatcatattccttccaaatcaaacacattaccacagttacatgtagtgtgtaatac

SEQ ID NO: 26436 - DNA, 78 bp, Homo sapiens
ttttatagtatcatattccttccaaatcaaacacattaccacagttacatgtagtgtgtaatacctgtgctcctgata

SEQ ID NO: 26437 - DNA, 74 bp, Homo sapiens
ccttccaaatcaaacacattaccacagttacatgtagtgtgtaatacctgtgctcctgatacagggccaaaggg

SEQ ID NO: 26438 - DNA, 78 bp, Homo sapiens
atgtagtgtgtaatacctgtgctcctgatacagggccaaaggggtttggaggtctcatgacaggctggctgtatatta

SEQ ID NO: 26439 - DNA, 75 bp, Homo sapiens
gtaatacctgtgctcctgatacagggccaaaggggtttggaggtctcatgacaggctggctgtatattaaggttg

SEQ ID NO: 26440 - DNA, 76 bp, Homo sapiens
tcctgatacagggccaaaggggtttggaggtctcatgacaggctggctgtatattaaggttggttgcgtcattaca

SEQ ID NO: 26441 - DNA, 74 bp, Homo sapiens
gccaaaggggtttggaggtctcatgacaggctggctgtatattaaggttggttgcgtcattacaggaacacttc

SEQ ID NO: 26442 - DNA, 76 bp, Homo sapiens
gtttggaggtctcatgacaggctggctgtatattaaggttggttgcgtcattacaggaacacttcccatttgtgga

SEQ ID NO: 26443 - DNA, 76 bp, Homo sapiens
tctcatgacaggctggctgtatattaaggttggttgcgtcattacaggaacacttcccatttgtggaggctaaaaa

SEQ ID NO: 26444 - DNA, 70 bp, Homo sapiens
tgtatattaaggttggttgcgtcattacaggaacacttcccatttgtggaggctaaaaaagagaaaaata

SEQ ID NO: 26445 - DNA, 72 bp, Homo sapiens
ttggttgcgtcattacaggaacacttcccatttgtggaggctaaaaaagagaaaaatatcaaaagatactga

SEQ ID NO: 26446 - DNA, 71 bp, Homo sapiens
cattacaggaacacttcccatttgtggaggctaaaaaagagaaaaatatcaaaagatactgactcctatct

SEQ ID NO: 26447 - DNA, 72 bp, Homo sapiens
catttgtggaggctaaaaaagagaaaaatatcaaaagatactgactcctatcttccttattgtgactaagta

SEQ ID NO: 26448 - DNA, 74 bp, Homo sapiens
aaatatcaaaagatactgactcctatcttccttattgtgactaagtaaataacaatgacaacagggatgacagg

SEQ ID NO: 26449 - DNA, 72 bp, Homo sapiens
actcctatcttccttattgtgactaagtaaataacaatgacaacagggatgacaggtcctagtacctttgct

SEQ ID NO: 26450 - DNA, 74 bp, Homo sapiens
tcttccttattgtgactaagtaaataacaatgacaacagggatgacaggtcctagtacctttgcttgactcaaa

SEQ ID NO: 26451 - DNA, 70 bp, Homo sapiens
actaagtaaataacaatgacaacagggatgacaggtcctagtacctttgcttgactcaaagggtaacttc

SEQ ID NO: 26452 - DNA, 71 bp, Homo sapiens
aacagggatgacaggtcctagtacctttgcttgactcaaagggtaacttcctctgaatataagtaagacta

SEQ ID NO: 26453 - DNA, 71 bp, Homo sapiens
acaggtcctagtacctttgcttgactcaaagggtaacttcctctgaatataagtaagactaacagctacaa

SEQ ID NO: 26454 - DNA, 70 bp, Homo sapiens
gcttgactcaaagggtaacttcctctgaatataagtaagactaacagctacaaactttcgagagtatttt

SEQ ID NO: 26455 - DNA, 66 bp, Homo sapiens
caaagggtaacttcctctgaatataagtaagactaacagctacaaactttcgagagtatttttttt

SEQ ID NO: 26456 - DNA, 65 bp, Homo sapiens
tttttttcttttggtaagtaaagtctttaacatgctcatttttaaaatgtagtaacaaagcctaa

SEQ ID NO: 26457 - DNA, 66 bp, Homo sapiens
tcttttggtaagtaaagtctttaacatgctcatttttaaaatgtagtaacaaagcctaactttttc

SEQ ID NO: 26458 - DNA, 71 bp, Homo sapiens
gtaaagtctttaacatgctcatttttaaaatgtagtaacaaagcctaactttttctattcaatgagttgca

SEQ ID NO: 26459 - DNA, 68 bp, Homo sapiens
tttaaaatgtagtaacaaagcctaactttttctattcaatgagttgcaaaatgtaaactttattgtat

SEQ ID NO: 26460 - DNA, 71 bp, Homo sapiens
atgtagtaacaaagcctaactttttctattcaatgagttgcaaaatgtaaactttattgtattacaacaga

SEQ ID NO: 26461 - DNA, 71 bp, Homo sapiens
caaagcctaactttttctattcaatgagttgcaaaatgtaaactttattgtattacaacagataaaatgat

SEQ ID NO: 26462 - DNA, 74 bp, Homo sapiens
tctattcaatgagttgcaaaatgtaaactttattgtattacaacagataaaatgattaagactaagagtttcca

SEQ ID NO: 26463 - DNA, 70 bp, Homo sapiens
gcaaaatgtaaactttattgtattacaacagataaaatgattaagactaagagtttccaaatttatcagg

SEQ ID NO: 26464 - DNA, 72 bp, Homo sapiens
ctttattgtattacaacagataaaatgattaagactaagagtttccaaatttatcaggtttagacatcaaga

SEQ ID NO: 26465 - DNA, 70 bp, Homo sapiens
caacagataaaatgattaagactaagagtttccaaatttatcaggtttagacatcaagaaaacttaagac

SEQ ID NO: 26466 - DNA, 71 bp, Homo sapiens
aatgattaagactaagagtttccaaatttatcaggtttagacatcaagaaaacttaagactctgtcttcgc

SEQ ID NO: 26467 - DNA, 72 bp, Homo sapiens
gactaagagtttccaaatttatcaggtttagacatcaagaaaacttaagactctgtcttcgctgctaagaaa

SEQ ID NO: 26468 - DNA, 72 bp, Homo sapiens
gagtttccaaatttatcaggtttagacatcaagaaaacttaagactctgtcttcgctgctaagaaatttcaa

SEQ ID NO: 26469 - DNA, 72 bp, Homo sapiens
tccaaatttatcaggtttagacatcaagaaaacttaagactctgtcttcgctgctaagaaatttcaaagtaa

SEQ ID NO: 26470 - DNA, 71 bp, Homo sapiens
tttatcaggtttagacatcaagaaaacttaagactctgtcttcgctgctaagaaatttcaaagtaaatttg

SEQ ID NO: 26471 - DNA, 71 bp, Homo sapiens
caggtttagacatcaagaaaacttaagactctgtcttcgctgctaagaaatttcaaagtaaatttgtataa

SEQ ID NO: 26472 - DNA, 72 bp, Homo sapiens
gacatcaagaaaacttaagactctgtcttcgctgctaagaaatttcaaagtaaatttgtataacaaatcaag

SEQ ID NO: 26473 - DNA, 75 bp, Homo sapiens
taagactctgtcttcgctgctaagaaatttcaaagtaaatttgtataacaaatcaagtacttttgccattatgca

SEQ ID NO: 26474 - DNA, 74 bp, Homo sapiens
gactctgtcttcgctgctaagaaatttcaaagtaaatttgtataacaaatcaagtacttttgccattatgcaag

SEQ ID NO: 26475 - DNA, 76 bp, Homo sapiens
tgctaagaaatttcaaagtaaatttgtataacaaatcaagtacttttgccattatgcaagtgatcacaagtgaaga

SEQ ID NO: 26476 - DNA, 78 bp, Homo sapiens
caaagtaaatttgtataacaaatcaagtacttttgccattatgcaagtgatcacaagtgaagacagttgattctctga

SEQ ID NO: 26477 - DNA, 78 bp, Homo sapiens
aatttgtataacaaatcaagtacttttgccattatgcaagtgatcacaagtgaagacagttgattctctgaataagcc

SEQ ID NO: 26478 - DNA, 80 bp, Homo sapiens
acaaatcaagtacttttgccattatgcaagtgatcacaagtgaagacagttgattctctgaataagcctgctctagttct

SEQ ID NO: 26479 - DNA, 80 bp, Homo sapiens
tacttttgccattatgcaagtgatcacaagtgaagacagttgattctctgaataagcctgctctagttcttccattttat

SEQ ID NO: 26480 - DNA, 81 bp, Homo sapiens
attatgcaagtgatcacaagtgaagacagttgattctctgaataagcctgctctagttcttccattttatttcatataaga

SEQ ID NO: 26481 - DNA, 80 bp, Homo sapiens
gtgatcacaagtgaagacagttgattctctgaataagcctgctctagttcttccattttatttcatataagaatcaagaa

SEQ ID NO: 26482 - DNA, 78 bp, Homo sapiens
gtgaagacagttgattctctgaataagcctgctctagttcttccattttatttcatataagaatcaagaaagagctta

SEQ ID NO: 26483 - DNA, 73 bp, Homo sapiens
gaataagcctgctctagttcttccattttatttcatataagaatcaagaaagagcttaaactacaaaccagag

SEQ ID NO: 26484 - DNA, 69 bp, Homo sapiens
ttttatttcatataagaatcaagaaagagcttaaactacaaaccagaggttaactctttcttgagtaac

SEQ ID NO: 26485 - DNA, 71 bp, Homo sapiens
catataagaatcaagaaagagcttaaactacaaaccagaggttaactctttcttgagtaactgaaaataca

SEQ ID NO: 26486 - DNA, 70 bp, Homo sapiens
caagaaagagcttaaactacaaaccagaggttaactctttcttgagtaactgaaaatacaatctcaacca

SEQ ID NO: 26487 - DNA, 70 bp, Homo sapiens
agagcttaaactacaaaccagaggttaactctttcttgagtaactgaaaatacaatctcaaccaaatatg

SEQ ID NO: 26488 - DNA, 69 bp, Homo sapiens
ctacaaaccagaggttaactctttcttgagtaactgaaaatacaatctcaaccaaatatgtttctttaa

SEQ ID NO: 26489 - DNA, 68 bp, Homo sapiens
gaggttaactctttcttgagtaactgaaaatacaatctcaaccaaatatgtttctttaaaaattacca

SEQ ID NO: 26490 - DNA, 68 bp, Homo sapiens
ctttcttgagtaactgaaaatacaatctcaaccaaatatgtttctttaaaaattaccactacagggta

SEQ ID NO: 26491 - DNA, 66 bp, Homo sapiens
ctgaaaatacaatctcaaccaaatatgtttctttaaaaattaccactacagggtataaaattaacc

SEQ ID NO: 26492 - DNA, 67 bp, Homo sapiens
caatctcaaccaaatatgtttctttaaaaattaccactacagggtataaaattaacctagtaagtga

SEQ ID NO: 26493 - DNA, 66 bp, Homo sapiens
atatgtttctttaaaaattaccactacagggtataaaattaacctagtaagtgacaatacctagtg

SEQ ID NO: 26494 - DNA, 64 bp, Homo sapiens
ctttaaaaattaccactacagggtataaaattaacctagtaagtgacaatacctagtgtaaaaa

SEQ ID NO: 26495 - DNA, 70 bp, Homo sapiens
ttaccactacagggtataaaattaacctagtaagtgacaatacctagtgtaaaaataatgcacaaacaga

SEQ ID NO: 26496 - DNA, 69 bp, Homo sapiens
acagggtataaaattaacctagtaagtgacaatacctagtgtaaaaataatgcacaaacagaatactgt

SEQ ID NO: 26497 - DNA, 71 bp, Homo sapiens
ttaacctagtaagtgacaatacctagtgtaaaaataatgcacaaacagaatactgttttggttaaaatgca

SEQ ID NO: 26498 - DNA, 71 bp, Homo sapiens
atacctagtgtaaaaataatgcacaaacagaatactgttttggttaaaatgcaatgctctaaaatctttcc

SEQ ID NO: 26499 - DNA, 71 bp, Homo sapiens
ctgttttggttaaaatgcaatgctctaaaatctttcctttcaagaagttctatttattgtttcaagcagac

SEQ ID NO: 26500 - DNA, 75 bp, Homo sapiens
gcaatgctctaaaatctttcctttcaagaagttctatttattgtttcaagcagactactatttgcatttagagct

SEQ ID NO: 26501 - DNA, 72 bp, Homo sapiens
atctttcctttcaagaagttctatttattgtttcaagcagactactatttgcatttagagcttcattttaag

SEQ ID NO: 26502 - DNA, 74 bp, Homo sapiens
caagaagttctatttattgtttcaagcagactactatttgcatttagagcttcattttaagtttatggcctgag

SEQ ID NO: 26503 - DNA, 77 bp, Homo sapiens
tatttattgtttcaagcagactactatttgcatttagagcttcattttaagtttatggcctgagtttctcagcagac

SEQ ID NO: 26504 - DNA, 75 bp, Homo sapiens
attgtttcaagcagactactatttgcatttagagcttcattttaagtttatggcctgagtttctcagcagacttt

SEQ ID NO: 26505 - DNA, 72 bp, Homo sapiens
gcagactactatttgcatttagagcttcattttaagtttatggcctgagtttctcagcagactttttttttt

SEQ ID NO: 26506 - DNA, 78 bp, Homo sapiens
cacacccagcctcagcagacattttaatgcaatgactatgaaaaaaagctgtgaaacttctccacatgtataaaagga

SEQ ID NO: 26507 - DNA, 76 bp, Homo sapiens
ctcagcagacattttaatgcaatgactatgaaaaaaagctgtgaaacttctccacatgtataaaaggagttacttc

SEQ ID NO: 26508 - DNA, 76 bp, Homo sapiens
gacattttaatgcaatgactatgaaaaaaagctgtgaaacttctccacatgtataaaaggagttacttccatatca

SEQ ID NO: 26509 - DNA, 77 bp, Homo sapiens
gcaatgactatgaaaaaaagctgtgaaacttctccacatgtataaaaggagttacttccatatcatatacataaaga

SEQ ID NO: 26510 - DNA, 73 bp, Homo sapiens
gaaaaaaagctgtgaaacttctccacatgtataaaaggagttacttccatatcatatacataaagaagtaaca

SEQ ID NO: 26511 - DNA, 78 bp, Homo sapiens
ctgtgaaacttctccacatgtataaaaggagttacttccatatcatatacataaagaagtaacatagcaggcacagta

SEQ ID NO: 26512 - DNA, 79 bp, Homo sapiens
ttctccacatgtataaaaggagttacttccatatcatatacataaagaagtaacatagcaggcacagtagcaataccaa

SEQ ID NO: 26513 - DNA, 77 bp, Homo sapiens
atgtataaaaggagttacttccatatcatatacataaagaagtaacatagcaggcacagtagcaataccaagggaca

SEQ ID NO: 26514 - DNA, 78 bp, Homo sapiens
ttacttccatatcatatacataaagaagtaacatagcaggcacagtagcaataccaagggacacggtactgccttcta

SEQ ID NO: 26515 - DNA, 77 bp, Homo sapiens
atatcatatacataaagaagtaacatagcaggcacagtagcaataccaagggacacggtactgccttctaccaggaa

SEQ ID NO: 26516 - DNA, 74 bp, Homo sapiens
acataaagaagtaacatagcaggcacagtagcaataccaagggacacggtactgccttctaccaggaacagttc

SEQ ID NO: 26517 - DNA, 75 bp, Homo sapiens
agtaacatagcaggcacagtagcaataccaagggacacggtactgccttctaccaggaacagttcctcaaataca

SEQ ID NO: 26518 - DNA, 71 bp, Homo sapiens
acagtagcaataccaagggacacggtactgccttctaccaggaacagttcctcaaatacataccagtgggt

SEQ ID NO: 26519 - DNA, 73 bp, Homo sapiens
acacggtactgccttctaccaggaacagttcctcaaatacataccagtgggttgaagctactagcaccatttc

SEQ ID NO: 26520 - DNA, 74 bp, Homo sapiens
tactgccttctaccaggaacagttcctcaaatacataccagtgggttgaagctactagcaccatttcttttcta

SEQ ID NO: 26521 - DNA, 75 bp, Homo sapiens
ggaacagttcctcaaatacataccagtgggttgaagctactagcaccatttcttttctaattgagtctctatata

SEQ ID NO: 26522 - DNA, 76 bp, Homo sapiens
ttcctcaaatacataccagtgggttgaagctactagcaccatttcttttctaattgagtctctatatactgagagt

SEQ ID NO: 26523 - DNA, 75 bp, Homo sapiens
atacataccagtgggttgaagctactagcaccatttcttttctaattgagtctctatatactgagagttgggaaa

SEQ ID NO: 26524 - DNA, 76 bp, Homo sapiens
tactagcaccatttcttttctaattgagtctctatatactgagagttgggaaactaagggcaatctaaaatgcaca

SEQ ID NO: 26525 - DNA, 75 bp, Homo sapiens
ttcttttctaattgagtctctatatactgagagttgggaaactaagggcaatctaaaatgcacattgtggcattt

SEQ ID NO: 26526 - DNA, 75 bp, Homo sapiens
taattgagtctctatatactgagagttgggaaactaagggcaatctaaaatgcacattgtggcattttgaaaggt

SEQ ID NO: 26527 - DNA, 74 bp, Homo sapiens
tctctatatactgagagttgggaaactaagggcaatctaaaatgcacattgtggcattttgaaaggttaaaaga

SEQ ID NO: 26528 - DNA, 70 bp, Homo sapiens
tgagagttgggaaactaagggcaatctaaaatgcacattgtggcattttgaaaggttaaaagactgtttt

SEQ ID NO: 26529 - DNA, 70 bp, Homo sapiens
ggaaactaagggcaatctaaaatgcacattgtggcattttgaaaggttaaaagactgtttttgtactgta

SEQ ID NO: 26530 - DNA, 75 bp, Homo sapiens
ggcaatctaaaatgcacattgtggcattttgaaaggttaaaagactgtttttgtactgtaataatcattgtcaca

SEQ ID NO: 26531 - DNA, 72 bp, Homo sapiens
gcacattgtggcattttgaaaggttaaaagactgtttttgtactgtaataatcattgtcacaggaaaatttc

SEQ ID NO: 26532 - DNA, 70 bp, Homo sapiens
ggcattttgaaaggttaaaagactgtttttgtactgtaataatcattgtcacaggaaaatttctctagcc

SEQ ID NO: 26533 - DNA, 71 bp, Homo sapiens
ggttaaaagactgtttttgtactgtaataatcattgtcacaggaaaatttctctagcctttatcagactaa

SEQ ID NO: 26534 - DNA, 73 bp, Homo sapiens
agactgtttttgtactgtaataatcattgtcacaggaaaatttctctagcctttatcagactaaatttatctc

SEQ ID NO: 26535 - DNA, 76 bp, Homo sapiens
tttctctagcctttatcagactaaatttatctctatacaattcaagtgttaatccctcccatgccctacaatatca

SEQ ID NO: 26536 - DNA, 74 bp, Homo sapiens
atttatctctatacaattcaagtgttaatccctcccatgccctacaatatcaggttataagacctcactggtat

SEQ ID NO: 26537 - DNA, 75 bp, Homo sapiens
attcaagtgttaatccctcccatgccctacaatatcaggttataagacctcactggtatttaatatatggtcaca

SEQ ID NO: 26538 - DNA, 76 bp, Homo sapiens
cctcccatgccctacaatatcaggttataagacctcactggtatttaatatatggtcacagcaacaaaggcttaga

SEQ ID NO: 26539 - DNA, 75 bp, Homo sapiens
atgccctacaatatcaggttataagacctcactggtatttaatatatggtcacagcaacaaaggcttagaattaa

SEQ ID NO: 26540 - DNA, 74 bp, Homo sapiens
caggttataagacctcactggtatttaatatatggtcacagcaacaaaggcttagaattaacattaatgtttga

SEQ ID NO: 26541 - DNA, 73 bp, Homo sapiens
ggtatttaatatatggtcacagcaacaaaggcttagaattaacattaatgtttgaaatataaaaggcccagca

SEQ ID NO: 26542 - DNA, 72 bp, Homo sapiens
tatggtcacagcaacaaaggcttagaattaacattaatgtttgaaatataaaaggcccagcaaagttacgag

SEQ ID NO: 26543 - DNA, 71 bp, Homo sapiens
cacagcaacaaaggcttagaattaacattaatgtttgaaatataaaaggcccagcaaagttacgaggagaa

SEQ ID NO: 26544 - DNA, 67 bp, Homo sapiens
aaggcttagaattaacattaatgtttgaaatataaaaggcccagcaaagttacgaggagaaaaataa

SEQ ID NO: 26545 - DNA, 67 bp, Homo sapiens
acattaatgtttgaaatataaaaggcccagcaaagttacgaggagaaaaataaaccaagtaatacta

SEQ ID NO: 26546 - DNA, 71 bp, Homo sapiens
ttgaaatataaaaggcccagcaaagttacgaggagaaaaataaaccaagtaatactatgaacattaatgca

SEQ ID NO: 26547 - DNA, 71 bp, Homo sapiens
aaaggcccagcaaagttacgaggagaaaaataaaccaagtaatactatgaacattaatgcataagatctct

SEQ ID NO: 26548 - DNA, 73 bp, Homo sapiens
cccagcaaagttacgaggagaaaaataaaccaagtaatactatgaacattaatgcataagatctcttgtataa

SEQ ID NO: 26549 - DNA, 77 bp, Homo sapiens
tacgaggagaaaaataaaccaagtaatactatgaacattaatgcataagatctcttgtataatgattattctagaca

SEQ ID NO: 26550 - DNA, 78 bp, Homo sapiens
taaaccaagtaatactatgaacattaatgcataagatctcttgtataatgattattctagacatacttatgaaaccaa

SEQ ID NO: 26551 - DNA, 81 bp, Homo sapiens
gtaatactatgaacattaatgcataagatctcttgtataatgattattctagacatacttatgaaaccaatgctatggttc

SEQ ID NO: 26552 - DNA, 83 bp, Homo sapiens
acattaatgcataagatctcttgtataatgattattctagacatacttatgaaaccaatgctatggttctactgcattaggca

SEQ ID NO: 26553 - DNA, 81 bp, Homo sapiens
ttgtataatgattattctagacatacttatgaaaccaatgctatggttctactgcattaggcactagggctaggagtatga

SEQ ID NO: 26554 - DNA, 80 bp, Homo sapiens
attattctagacatacttatgaaaccaatgctatggttctactgcattaggcactagggctaggagtatgaggagcacta

SEQ ID NO: 26555 - DNA, 77 bp, Homo sapiens
acatacttatgaaaccaatgctatggttctactgcattaggcactagggctaggagtatgaggagcactaaattctt

SEQ ID NO: 26556 - DNA, 73 bp, Homo sapiens
aatgctatggttctactgcattaggcactagggctaggagtatgaggagcactaaattcttttttaggttaaa

SEQ ID NO: 26557 - DNA, 72 bp, Homo sapiens
ttctactgcattaggcactagggctaggagtatgaggagcactaaattcttttttaggttaaattgtaataa

SEQ ID NO: 26558 - DNA, 69 bp, Homo sapiens
ttaggcactagggctaggagtatgaggagcactaaattcttttttaggttaaattgtaataaaaacatg

SEQ ID NO: 26559 - DNA, 70 bp, Homo sapiens
gtatgaggagcactaaattcttttttaggttaaattgtaataaaaacatgttatatatgaatcaatattt

SEQ ID NO: 26560 - DNA, 67 bp, Homo sapiens
cactaaattcttttttaggttaaattgtaataaaaacatgttatatatgaatcaatattttttccaa

SEQ ID NO: 26561 - DNA, 69 bp, Homo sapiens
taggttaaattgtaataaaaacatgttatatatgaatcaatattttttccaaaagctgtacctaggaaa

SEQ ID NO: 26562 - DNA, 70 bp, Homo sapiens
tgtaataaaaacatgttatatatgaatcaatattttttccaaaagctgtacctaggaaaatacttacaat

SEQ ID NO: 26563 - DNA, 74 bp, Homo sapiens
acatgttatatatgaatcaatattttttccaaaagctgtacctaggaaaatacttacaattccatatcctatca

SEQ ID NO: 26564 - DNA, 75 bp, Homo sapiens
tttccaaaagctgtacctaggaaaatacttacaattccatatcctatcatgcctgttggtgtagtagcaggatag

SEQ ID NO: 26565 - DNA, 76 bp, Homo sapiens
tgtacctaggaaaatacttacaattccatatcctatcatgcctgttggtgtagtagcaggataggccattacaggg

SEQ ID NO: 26566 - DNA, 77 bp, Homo sapiens
aatacttacaattccatatcctatcatgcctgttggtgtagtagcaggataggccattacagggggtgcctaacata

SEQ ID NO: 26567 - DNA, 76 bp, Homo sapiens
atcctatcatgcctgttggtgtagtagcaggataggccattacagggggtgcctaacatagtgaaaggaaaaatga

SEQ ID NO: 26568 - DNA, 73 bp, Homo sapiens
tagtagcaggataggccattacagggggtgcctaacatagtgaaaggaaaaatgaacaagaaagtataactca

SEQ ID NO: 26569 - DNA, 73 bp, Homo sapiens
ggggtgcctaacatagtgaaaggaaaaatgaacaagaaagtataactcatgtgtgtcaactgagttcaaggaa

SEQ ID NO: 26570 - DNA, 75 bp, Homo sapiens
acatagtgaaaggaaaaatgaacaagaaagtataactcatgtgtgtcaactgagttcaaggaattagtagctgta

SEQ ID NO: 26571 - DNA, 74 bp, Homo sapiens
aggaaaaatgaacaagaaagtataactcatgtgtgtcaactgagttcaaggaattagtagctgtagttccacta

SEQ ID NO: 26572 - DNA, 73 bp, Homo sapiens
gaacaagaaagtataactcatgtgtgtcaactgagttcaaggaattagtagctgtagttccactaaaaagaat

SEQ ID NO: 26573 - DNA, 75 bp, Homo sapiens
gaaagtataactcatgtgtgtcaactgagttcaaggaattagtagctgtagttccactaaaaagaattgctaaga

SEQ ID NO: 26574 - DNA, 76 bp, Homo sapiens
atgtgtgtcaactgagttcaaggaattagtagctgtagttccactaaaaagaattgctaagacagctgtgagtaag

SEQ ID NO: 26575 - DNA, 74 bp, Homo sapiens
aactgagttcaaggaattagtagctgtagttccactaaaaagaattgctaagacagctgtgagtaagtgacact

SEQ ID NO: 26576 - DNA, 76 bp, Homo sapiens
aaggaattagtagctgtagttccactaaaaagaattgctaagacagctgtgagtaagtgacacttgtgatcattaa

SEQ ID NO: 26577 - DNA, 77 bp, Homo sapiens
ctgtagttccactaaaaagaattgctaagacagctgtgagtaagtgacacttgtgatcattaagaactgtcgattaa

SEQ ID NO: 26578 - DNA, 78 bp, Homo sapiens
actaaaaagaattgctaagacagctgtgagtaagtgacacttgtgatcattaagaactgtcgattaatggtcagtgaa

SEQ ID NO: 26579 - DNA, 77 bp, Homo sapiens
taagacagctgtgagtaagtgacacttgtgatcattaagaactgtcgattaatggtcagtgaaaaaaagtgttttga

SEQ ID NO: 26580 - DNA, 75 bp, Homo sapiens
gtgagtaagtgacacttgtgatcattaagaactgtcgattaatggtcagtgaaaaaaagtgttttgaaattagca

SEQ ID NO: 26581 - DNA, 71 bp, Homo sapiens
taagaactgtcgattaatggtcagtgaaaaaaagtgttttgaaattagcagaaaagcagacttattagaag

SEQ ID NO: 26582 - DNA, 71 bp, Homo sapiens
tggtcagtgaaaaaaagtgttttgaaattagcagaaaagcagacttattagaaggataactataccactta

SEQ ID NO: 26583 - DNA, 70 bp, Homo sapiens
aaagtgttttgaaattagcagaaaagcagacttattagaaggataactataccacttaaacttagataca

SEQ ID NO: 26584 - DNA, 80 bp, Homo sapiens
tagcagaaaagcagacttattagaaggataactataccacttaaacttagatacagcagtgatctaagatttcatcatgc

SEQ ID NO: 26585 - DNA, 75 bp, Homo sapiens
ctataccacttaaacttagatacagcagtgatctaagatttcatcatgctttttacagctttaaaaatctttaga

SEQ ID NO: 26586 - DNA, 73 bp, Homo sapiens
ttaaacttagatacagcagtgatctaagatttcatcatgctttttacagctttaaaaatctttagatttaaaa

SEQ ID NO: 26587 - DNA, 73 bp, Homo sapiens
atacagcagtgatctaagatttcatcatgctttttacagctttaaaaatctttagatttaaaaaagtatctta

SEQ ID NO: 26588 - DNA, 69 bp, Homo sapiens
gatctaagatttcatcatgctttttacagctttaaaaatctttagatttaaaaaagtatcttaaatagt

SEQ ID NO: 26589 - DNA, 68 bp, Homo sapiens
tcatcatgctttttacagctttaaaaatctttagatttaaaaaagtatcttaaatagttctaaatagt

SEQ ID NO: 26590 - DNA, 64 bp, Homo sapiens
tacagctttaaaaatctttagatttaaaaaagtatcttaaatagttctaaatagttctaaaatt

SEQ ID NO: 26591 - DNA, 67 bp, Homo sapiens
gatttaaaaaagtatcttaaatagttctaaatagttctaaaatttaaagcctatcactatcattaaa

SEQ ID NO: 26592 - DNA, 69 bp, Homo sapiens
gtatcttaaatagttctaaatagttctaaaatttaaagcctatcactatcattaaaaaatgtctaccca

SEQ ID NO: 26593 - DNA, 67 bp, Homo sapiens
atagttctaaatagttctaaaatttaaagcctatcactatcattaaaaaatgtctacccagaaaaag

SEQ ID NO: 26594 - DNA, 69 bp, Homo sapiens
gcctatcactatcattaaaaaatgtctacccagaaaaagtattattgaatgttttcttacttaggtacc

SEQ ID NO: 26595 - DNA, 68 bp, Homo sapiens
cccagaaaaagtattattgaatgttttcttacttaggtacctgattgctttagcattcaaagaaaaaa

SEQ ID NO: 26596 - DNA, 72 bp, Homo sapiens
gtattattgaatgttttcttacttaggtacctgattgctttagcattcaaagaaaaaaatgtaaagatctca

SEQ ID NO: 26597 - DNA, 72 bp, Homo sapiens
ttcttacttaggtacctgattgctttagcattcaaagaaaaaaatgtaaagatctcaaatcaatcaataacc

SEQ ID NO: 26598 - DNA, 73 bp, Homo sapiens
ctgattgctttagcattcaaagaaaaaaatgtaaagatctcaaatcaatcaataacctgatcttccaaaaagt

SEQ ID NO: 26599 - DNA, 72 bp, Homo sapiens
tagcattcaaagaaaaaaatgtaaagatctcaaatcaatcaataacctgatcttccaaaaagttagtttcta

SEQ ID NO: 26600 - DNA, 71 bp, Homo sapiens
aaaatgtaaagatctcaaatcaatcaataacctgatcttccaaaaagttagtttctaaggatcttactcac

SEQ ID NO: 26601 - DNA, 72 bp, Homo sapiens
gatctcaaatcaatcaataacctgatcttccaaaaagttagtttctaaggatcttactcactcttttcaaaa

SEQ ID NO: 26602 - DNA, 69 bp, Homo sapiens
caatcaataacctgatcttccaaaaagttagtttctaaggatcttactcactcttttcaaaaaactcca

SEQ ID NO: 26603 - DNA, 66 bp, Homo sapiens
taacctgatcttccaaaaagttagtttctaaggatcttactcactcttttcaaaaaactccaaagg

SEQ ID NO: 26604 - DNA, 64 bp, Homo sapiens
caaaaagttagtttctaaggatcttactcactcttttcaaaaaactccaaaggtttcaaactac

SEQ ID NO: 26605 - DNA, 69 bp, Homo sapiens
gtttctaaggatcttactcactcttttcaaaaaactccaaaggtttcaaactactattgagtatgacta

SEQ ID NO: 26606 - DNA, 73 bp, Homo sapiens
gatcttactcactcttttcaaaaaactccaaaggtttcaaactactattgagtatgactatttctatgagcca

SEQ ID NO: 26607 - DNA, 72 bp, Homo sapiens
ctcactcttttcaaaaaactccaaaggtttcaaactactattgagtatgactatttctatgagccatagttc

SEQ ID NO: 26608 - DNA, 73 bp, Homo sapiens
aaaaactccaaaggtttcaaactactattgagtatgactatttctatgagccatagttcttatatagagtatg

SEQ ID NO: 26609 - DNA, 76 bp, Homo sapiens
caaactactattgagtatgactatttctatgagccatagttcttatatagagtatgtacgttagctttctaattta

SEQ ID NO: 26610 - DNA, 75 bp, Homo sapiens
attgagtatgactatttctatgagccatagttcttatatagagtatgtacgttagctttctaatttattccaaaa

SEQ ID NO: 26611 - DNA, 71 bp, Homo sapiens
actatttctatgagccatagttcttatatagagtatgtacgttagctttctaatttattccaaaaattatt

SEQ ID NO: 26612 - DNA, 72 bp, Homo sapiens
tgagccatagttcttatatagagtatgtacgttagctttctaatttattccaaaaattatttaagaggaaca

SEQ ID NO: 26613 - DNA, 70 bp, Homo sapiens
atatagagtatgtacgttagctttctaatttattccaaaaattatttaagaggaacaatcaattaggtca

SEQ ID NO: 26614 - DNA, 70 bp, Homo sapiens
tatgtacgttagctttctaatttattccaaaaattatttaagaggaacaatcaattaggtcagtttatgc

SEQ ID NO: 26615 - DNA, 70 bp, Homo sapiens
gttagctttctaatttattccaaaaattatttaagaggaacaatcaattaggtcagtttatgctttcatg

SEQ ID NO: 26616 - DNA, 70 bp, Homo sapiens
tattccaaaaattatttaagaggaacaatcaattaggtcagtttatgctttcatgtttaaaagaaccatc

SEQ ID NO: 26617 - DNA, 74 bp, Homo sapiens
gaggaacaatcaattaggtcagtttatgctttcatgtttaaaagaaccatctatcactatgatgtttaagttcc

SEQ ID NO: 26618 - DNA, 72 bp, Homo sapiens
caattaggtcagtttatgctttcatgtttaaaagaaccatctatcactatgatgtttaagttcccctcttcc

SEQ ID NO: 26619 - DNA, 72 bp, Homo sapiens
gtcagtttatgctttcatgtttaaaagaaccatctatcactatgatgtttaagttcccctcttcctactact

SEQ ID NO: 26620 - DNA, 73 bp, Homo sapiens
gctttcatgtttaaaagaaccatctatcactatgatgtttaagttcccctcttcctactactttgattatctg

SEQ ID NO: 26621 - DNA, 72 bp, Homo sapiens
aaagaaccatctatcactatgatgtttaagttcccctcttcctactactttgattatctgtaaacatacaat

SEQ ID NO: 26622 - DNA, 75 bp, Homo sapiens
ccatctatcactatgatgtttaagttcccctcttcctactactttgattatctgtaaacatacaatttgagaaca

SEQ ID NO: 26623 - DNA, 73 bp, Homo sapiens
ctatgatgtttaagttcccctcttcctactactttgattatctgtaaacatacaatttgagaacagaatcatt

SEQ ID NO: 26624 - DNA, 76 bp, Homo sapiens
tcccctcttcctactactttgattatctgtaaacatacaatttgagaacagaatcattttagatatagttgctgtc

SEQ ID NO: 26625 - DNA, 76 bp, Homo sapiens
cttcctactactttgattatctgtaaacatacaatttgagaacagaatcattttagatatagttgctgtcttaaca

SEQ ID NO: 26626 - DNA, 79 bp, Homo sapiens
tgattatctgtaaacatacaatttgagaacagaatcattttagatatagttgctgtcttaacaacatttcctgtgtgtg

SEQ ID NO: 26627 - DNA, 76 bp, Homo sapiens
ctgtaaacatacaatttgagaacagaatcattttagatatagttgctgtcttaacaacatttcctgtgtgtgtttc

SEQ ID NO: 26628 - DNA, 76 bp, Homo sapiens
gaacagaatcattttagatatagttgctgtcttaacaacatttcctgtgtgtgtttctcataatgaaaactgaaat

SEQ ID NO: 26629 - DNA, 75 bp, Homo sapiens
agatatagttgctgtcttaacaacatttcctgtgtgtgtttctcataatgaaaactgaaattgaataaaggtgaa

SEQ ID NO: 26630 - DNA, 73 bp, Homo sapiens
aacaacatttcctgtgtgtgtttctcataatgaaaactgaaattgaataaaggtgaaagaccaataacactgc

SEQ ID NO: 26631 - DNA, 71 bp, Homo sapiens
gtgtttctcataatgaaaactgaaattgaataaaggtgaaagaccaataacactgctaaaacataaaataa

SEQ ID NO: 26632 - DNA, 70 bp, Homo sapiens
gaaaactgaaattgaataaaggtgaaagaccaataacactgctaaaacataaaataactgaaattatatg

SEQ ID NO: 26633 - DNA, 72 bp, Homo sapiens
attgaataaaggtgaaagaccaataacactgctaaaacataaaataactgaaattatatggcaatttgaaca

SEQ ID NO: 26634 - DNA, 76 bp, Homo sapiens
aggtgaaagaccaataacactgctaaaacataaaataactgaaattatatggcaatttgaacatatgcatggagaa

SEQ ID NO: 26635 - DNA, 77 bp, Homo sapiens
gaccaataacactgctaaaacataaaataactgaaattatatggcaatttgaacatatgcatggagaaattaaatga

SEQ ID NO: 26636 - DNA, 73 bp, Homo sapiens
acataaaataactgaaattatatggcaatttgaacatatgcatggagaaattaaatgaaatataactttaaaa

SEQ ID NO: 26637 - DNA, 72 bp, Homo sapiens
actgaaattatatggcaatttgaacatatgcatggagaaattaaatgaaatataactttaaaaaaataacac

SEQ ID NO: 26638 - DNA, 71 bp, Homo sapiens
ggcaatttgaacatatgcatggagaaattaaatgaaatataactttaaaaaaataacactaaagtgaatag

SEQ ID NO: 26639 - DNA, 71 bp, Homo sapiens
tgaacatatgcatggagaaattaaatgaaatataactttaaaaaaataacactaaagtgaatagttataag

SEQ ID NO: 26640 - DNA, 66 bp, Homo sapiens
catggagaaattaaatgaaatataactttaaaaaaataacactaaagtgaatagttataagtttag

SEQ ID NO: 26641 - DNA, 67 bp, Homo sapiens
tgaaatataactttaaaaaaataacactaaagtgaatagttataagtttagtattcgggtgagcgtg

SEQ ID NO: 26642 - DNA, 66 bp, Homo sapiens
ctttaaaaaaataacactaaagtgaatagttataagtttagtattcgggtgagcgtgtaggactta

SEQ ID NO: 26643 - DNA, 69 bp, Homo sapiens
aaataacactaaagtgaatagttataagtttagtattcgggtgagcgtgtaggacttattggtctctcc

SEQ ID NO: 26644 - DNA, 68 bp, Homo sapiens
aaagtgaatagttataagtttagtattcgggtgagcgtgtaggacttattggtctctccctacttaaa

SEQ ID NO: 26645 - DNA, 68 bp, Homo sapiens
atagttataagtttagtattcgggtgagcgtgtaggacttattggtctctccctacttaaaaccaaga

SEQ ID NO: 26646 - DNA, 77 bp, Homo sapiens
tgtaggacttattggtctctccctacttaaaaccaagatctgcaagagcagtagacaaactgccaagaagagcagaa

SEQ ID NO: 26647 - DNA, 80 bp, Homo sapiens
tacttaaaaccaagatctgcaagagcagtagacaaactgccaagaagagcagaagcctgtaagatttcatgcagttgtta

SEQ ID NO: 26648 - DNA, 79 bp, Homo sapiens
aaccaagatctgcaagagcagtagacaaactgccaagaagagcagaagcctgtaagatttcatgcagttgttattttaa

SEQ ID NO: 26649 - DNA, 77 bp, Homo sapiens
aagagcagtagacaaactgccaagaagagcagaagcctgtaagatttcatgcagttgttattttaaacattaccaca

SEQ ID NO: 26650 - DNA, 75 bp, Homo sapiens
acaaactgccaagaagagcagaagcctgtaagatttcatgcagttgttattttaaacattaccacaatcaacatt

SEQ ID NO: 26651 - DNA, 76 bp, Homo sapiens
agaagagcagaagcctgtaagatttcatgcagttgttattttaaacattaccacaatcaacatttcccttcattca

SEQ ID NO: 26652 - DNA, 76 bp, Homo sapiens
cagaagcctgtaagatttcatgcagttgttattttaaacattaccacaatcaacatttcccttcattcagaagtca

SEQ ID NO: 26653 - DNA, 78 bp, Homo sapiens
agatttcatgcagttgttattttaaacattaccacaatcaacatttcccttcattcagaagtcatcaagtgcatagtg

SEQ ID NO: 26654 - DNA, 79 bp, Homo sapiens
agttgttattttaaacattaccacaatcaacatttcccttcattcagaagtcatcaagtgcatagtggcagcacagata

SEQ ID NO: 26655 - DNA, 85 bp, Homo sapiens
attaccacaatcaacatttcccttcattcagaagtcatcaagtgcatagtggcagcacagatacacacacagacacccagccatc

SEQ ID NO: 26656 - DNA, 88 bp, Homo sapiens
atcaacatttcccttcattcagaagtcatcaagtgcatagtggcagcacagatacacacacagacacccagccatctggcagcaaatg

SEQ ID NO: 26657 - DNA, 88 bp, Homo sapiens
cttcattcagaagtcatcaagtgcatagtggcagcacagatacacacacagacacccagccatctggcagcaaatggcggaatattaa

SEQ ID NO: 26658 - DNA, 77 bp, Homo sapiens
agcacagatacacacacagacacccagccatctggcagcaaatggcggaatattaagcaagaaaaaaaatcggtatt

SEQ ID NO: 26659 - DNA, 76 bp, Homo sapiens
acacacagacacccagccatctggcagcaaatggcggaatattaagcaagaaaaaaaatcggtatttcccatgcca

SEQ ID NO: 26660 - DNA, 75 bp, Homo sapiens
acccagccatctggcagcaaatggcggaatattaagcaagaaaaaaaatcggtatttcccatgccaccatcagaa

SEQ ID NO: 26661 - DNA, 78 bp, Homo sapiens
atctggcagcaaatggcggaatattaagcaagaaaaaaaatcggtatttcccatgccaccatcagaatcaattctgca

SEQ ID NO: 26662 - DNA, 74 bp, Homo sapiens
aaatggcggaatattaagcaagaaaaaaaatcggtatttcccatgccaccatcagaatcaattctgcaacacac

SEQ ID NO: 26663 - DNA, 76 bp, Homo sapiens
aatattaagcaagaaaaaaaatcggtatttcccatgccaccatcagaatcaattctgcaacacacccatgaaatca

SEQ ID NO: 26664 - DNA, 77 bp, Homo sapiens
aaaaaaaatcggtatttcccatgccaccatcagaatcaattctgcaacacacccatgaaatcagtagatgctaggaa

SEQ ID NO: 26665 - DNA, 84 bp, Homo sapiens
atgccaccatcagaatcaattctgcaacacacccatgaaatcagtagatgctaggaagaatttctggcacattgaaaatctgaa

SEQ ID NO: 26666 - DNA, 80 bp, Homo sapiens
attctgcaacacacccatgaaatcagtagatgctaggaagaatttctggcacattgaaaatctgaatgtgaaaacaagta

SEQ ID NO: 26667 - DNA, 79 bp, Homo sapiens
atgctaggaagaatttctggcacattgaaaatctgaatgtgaaaacaagtaatagctgaaaggttatgagattctgcta

SEQ ID NO: 26668 - DNA, 79 bp, Homo sapiens
tttctggcacattgaaaatctgaatgtgaaaacaagtaatagctgaaaggttatgagattctgctacagcagtggttaa

SEQ ID NO: 26669 - DNA, 80 bp, Homo sapiens
attgaaaatctgaatgtgaaaacaagtaatagctgaaaggttatgagattctgctacagcagtggttaatagcatgccaa

SEQ ID NO: 26670 - DNA, 79 bp, Homo sapiens
aatctgaatgtgaaaacaagtaatagctgaaaggttatgagattctgctacagcagtggttaatagcatgccaatttat

SEQ ID NO: 26671 - DNA, 76 bp, Homo sapiens
aaaacaagtaatagctgaaaggttatgagattctgctacagcagtggttaatagcatgccaatttattgcaaaaag

SEQ ID NO: 26672 - DNA, 77 bp, Homo sapiens
ttatgagattctgctacagcagtggttaatagcatgccaatttattgcaaaaaggctcgtttttggtcacttacgta

SEQ ID NO: 26673 - DNA, 75 bp, Homo sapiens
attctgctacagcagtggttaatagcatgccaatttattgcaaaaaggctcgtttttggtcacttacgtattgtg

SEQ ID NO: 26674 - DNA, 72 bp, Homo sapiens
acagcagtggttaatagcatgccaatttattgcaaaaaggctcgtttttggtcacttacgtattgtggaaaa

SEQ ID NO: 26675 - DNA, 76 bp, Homo sapiens
ttaatagcatgccaatttattgcaaaaaggctcgtttttggtcacttacgtattgtggaaaatgcatgccattctg

SEQ ID NO: 26676 - DNA, 70 bp, Homo sapiens
aatttattgcaaaaaggctcgtttttggtcacttacgtattgtggaaaatgcatgccattctgtttttcc

SEQ ID NO: 26677 - DNA, 69 bp, Homo sapiens
aaaaaggctcgtttttggtcacttacgtattgtggaaaatgcatgccattctgtttttcccagggagaa

SEQ ID NO: 26678 - DNA, 76 bp, Homo sapiens
ttacgtattgtggaaaatgcatgccattctgtttttcccagggagaacaattacataatgcaataacactggatta

SEQ ID NO: 26679 - DNA, 77 bp, Homo sapiens
tattgtggaaaatgcatgccattctgtttttcccagggagaacaattacataatgcaataacactggattagaacaa

SEQ ID NO: 26680 - DNA, 74 bp, Homo sapiens
atgccattctgtttttcccagggagaacaattacataatgcaataacactggattagaacaagtacttacacaa

SEQ ID NO: 26681 - DNA, 76 bp, Homo sapiens
agggagaacaattacataatgcaataacactggattagaacaagtacttacacaacagaaaatacacagagagcat

SEQ ID NO: 26682 - DNA, 78 bp, Homo sapiens
ttacataatgcaataacactggattagaacaagtacttacacaacagaaaatacacagagagcattttagttcacatg

SEQ ID NO: 26683 - DNA, 79 bp, Homo sapiens
atgcaataacactggattagaacaagtacttacacaacagaaaatacacagagagcattttagttcacatgtacattca

SEQ ID NO: 26684 - DNA, 76 bp, Homo sapiens
tggattagaacaagtacttacacaacagaaaatacacagagagcattttagttcacatgtacattcactaactacc

SEQ ID NO: 26685 - DNA, 74 bp, Homo sapiens
caagtacttacacaacagaaaatacacagagagcattttagttcacatgtacattcactaactacctaaaatcc

SEQ ID NO: 26686 - DNA, 74 bp, Homo sapiens
cacaacagaaaatacacagagagcattttagttcacatgtacattcactaactacctaaaatcccttgtatttc

SEQ ID NO: 26687 - DNA, 76 bp, Homo sapiens
atacacagagagcattttagttcacatgtacattcactaactacctaaaatcccttgtatttccagtatctaatga

SEQ ID NO: 26688 - DNA, 71 bp, Homo sapiens
gtacattcactaactacctaaaatcccttgtatttccagtatctaatgaaagaacatctatactaaaacac

SEQ ID NO: 26689 - DNA, 73 bp, Homo sapiens
tcccttgtatttccagtatctaatgaaagaacatctatactaaaacactatcaaggttgacaagggaattgta

SEQ ID NO: 26690 - DNA, 75 bp, Homo sapiens
tatctaatgaaagaacatctatactaaaacactatcaaggttgacaagggaattgtagtctttggcctcatctct

SEQ ID NO: 26691 - DNA, 73 bp, Homo sapiens
aaagaacatctatactaaaacactatcaaggttgacaagggaattgtagtctttggcctcatctctttatata

SEQ ID NO: 26692 - DNA, 71 bp, Homo sapiens
tatactaaaacactatcaaggttgacaagggaattgtagtctttggcctcatctctttatataaaaaatag

SEQ ID NO: 26693 - DNA, 71 bp, Homo sapiens
tcaaggttgacaagggaattgtagtctttggcctcatctctttatataaaaaatagtttattgattacaag

SEQ ID NO: 26694 - DNA, 71 bp, Homo sapiens
gttgacaagggaattgtagtctttggcctcatctctttatataaaaaatagtttattgattacaagtacca

SEQ ID NO: 26695 - DNA, 72 bp, Homo sapiens
gaattgtagtctttggcctcatctctttatataaaaaatagtttattgattacaagtaccattaaaacatca

SEQ ID NO: 26696 - DNA, 74 bp, Homo sapiens
tggcctcatctctttatataaaaaatagtttattgattacaagtaccattaaaacatcaattctatcaacagtg

SEQ ID NO: 26697 - DNA, 74 bp, Homo sapiens
ctttatataaaaaatagtttattgattacaagtaccattaaaacatcaattctatcaacagtgtcaacagtgca

SEQ ID NO: 26698 - DNA, 72 bp, Homo sapiens
aaatagtttattgattacaagtaccattaaaacatcaattctatcaacagtgtcaacagtgcaaaattttgg

SEQ ID NO: 26699 - DNA, 77 bp, Homo sapiens
ttgattacaagtaccattaaaacatcaattctatcaacagtgtcaacagtgcaaaattttgggcattgcataaacag

SEQ ID NO: 26700 - DNA, 75 bp, Homo sapiens
tacaagtaccattaaaacatcaattctatcaacagtgtcaacagtgcaaaattttgggcattgcataaacagggt

SEQ ID NO: 26701 - DNA, 80 bp, Homo sapiens
attaaaacatcaattctatcaacagtgtcaacagtgcaaaattttgggcattgcataaacagggttgcatcagatgtcta

SEQ ID NO: 26702 - DNA, 79 bp, Homo sapiens
aattctatcaacagtgtcaacagtgcaaaattttgggcattgcataaacagggttgcatcagatgtctaccacagaaaa

SEQ ID NO: 26703 - DNA, 77 bp, Homo sapiens
aacagtgtcaacagtgcaaaattttgggcattgcataaacagggttgcatcagatgtctaccacagaaaaaaagcaa

SEQ ID NO: 26704 - DNA, 76 bp, Homo sapiens
tgcaaaattttgggcattgcataaacagggttgcatcagatgtctaccacagaaaaaaagcaagcactaattaaaa

SEQ ID NO: 26705 - DNA, 74 bp, Homo sapiens
attttgggcattgcataaacagggttgcatcagatgtctaccacagaaaaaaagcaagcactaattaaaagaat

SEQ ID NO: 26706 - DNA, 75 bp, Homo sapiens
ttgcataaacagggttgcatcagatgtctaccacagaaaaaaagcaagcactaattaaaagaatttgtagtataa

SEQ ID NO: 26707 - DNA, 73 bp, Homo sapiens
agggttgcatcagatgtctaccacagaaaaaaagcaagcactaattaaaagaatttgtagtataatatatatt

SEQ ID NO: 26708 - DNA, 64 bp, Homo sapiens
attttaataaaattccaatgaatttgtgttaaatttaaaaaacactgaaaaaccttgacagtgt

SEQ ID NO: 26709 - DNA, 65 bp, Homo sapiens
aattccaatgaatttgtgttaaatttaaaaaacactgaaaaaccttgacagtgtttaaggattaa

SEQ ID NO: 26710 - DNA, 65 bp, Homo sapiens
caatgaatttgtgttaaatttaaaaaacactgaaaaaccttgacagtgtttaaggattaataaaa

SEQ ID NO: 26711 - DNA, 62 bp, Homo sapiens
aaatttaaaaaacactgaaaaaccttgacagtgtttaaggattaataaaaaggttagaaatg

SEQ ID NO: 26712 - DNA, 66 bp, Homo sapiens
aacactgaaaaaccttgacagtgtttaaggattaataaaaaggttagaaatgtaaagaaatgtcaa

SEQ ID NO: 26713 - DNA, 67 bp, Homo sapiens
aaaccttgacagtgtttaaggattaataaaaaggttagaaatgtaaagaaatgtcaaaagcagcagt

SEQ ID NO: 26714 - DNA, 70 bp, Homo sapiens
tgacagtgtttaaggattaataaaaaggttagaaatgtaaagaaatgtcaaaagcagcagtttatcttaa

SEQ ID NO: 26715 - DNA, 71 bp, Homo sapiens
ggattaataaaaaggttagaaatgtaaagaaatgtcaaaagcagcagtttatcttaagtagtgaatcacat

SEQ ID NO: 26716 - DNA, 73 bp, Homo sapiens
taaaaaggttagaaatgtaaagaaatgtcaaaagcagcagtttatcttaagtagtgaatcacattatcagccc

SEQ ID NO: 26717 - DNA, 72 bp, Homo sapiens
aaaaaggttagaaatgtaaagaaatgtcaaaagcagcagtttatcttaagtagtgaatcacattatcagccc

SEQ ID NO: 26718 - DNA, 76 bp, Homo sapiens
agaaatgtaaagaaatgtcaaaagcagcagtttatcttaagtagtgaatcacattatcagccccaaacattagcca

SEQ ID NO: 26719 - DNA, 76 bp, Homo sapiens
tgtaaagaaatgtcaaaagcagcagtttatcttaagtagtgaatcacattatcagccccaaacattagccattaaa

SEQ ID NO: 26720 - DNA, 75 bp, Homo sapiens
agaaatgtcaaaagcagcagtttatcttaagtagtgaatcacattatcagccccaaacattagccattaaaaaga

SEQ ID NO: 26721 - DNA, 73 bp, Homo sapiens
gtcaaaagcagcagtttatcttaagtagtgaatcacattatcagccccaaacattagccattaaaaagaaaac

SEQ ID NO: 26722 - DNA, 72 bp, Homo sapiens
agcagtttatcttaagtagtgaatcacattatcagccccaaacattagccattaaaaagaaaactccataaa

SEQ ID NO: 26723 - DNA, 72 bp, Homo sapiens
cttaagtagtgaatcacattatcagccccaaacattagccattaaaaagaaaactccataaaatacatataa

SEQ ID NO: 26724 - DNA, 73 bp, Homo sapiens
gaatcacattatcagccccaaacattagccattaaaaagaaaactccataaaatacatataaatatttaagca

SEQ ID NO: 26725 - DNA, 69 bp, Homo sapiens
atcagccccaaacattagccattaaaaagaaaactccataaaatacatataaatatttaagcaaaatcc

SEQ ID NO: 26726 - DNA, 72 bp, Homo sapiens
tagccattaaaaagaaaactccataaaatacatataaatatttaagcaaaatccttaggagatgatacacat

SEQ ID NO: 26727 - DNA, 77 bp, Homo sapiens
actccataaaatacatataaatatttaagcaaaatccttaggagatgatacacattaccatatataacacagcaaga

SEQ ID NO: 26728 - DNA, 77 bp, Homo sapiens
catataaatatttaagcaaaatccttaggagatgatacacattaccatatataacacagcaagataaagactgttac

SEQ ID NO: 26729 - DNA, 76 bp, Homo sapiens
gcaaaatccttaggagatgatacacattaccatatataacacagcaagataaagactgttaccttatcaacttaaa

SEQ ID NO: 26730 - DNA, 77 bp, Homo sapiens
ggagatgatacacattaccatatataacacagcaagataaagactgttaccttatcaacttaaatacaaattctaca

SEQ ID NO: 26731 - DNA, 75 bp, Homo sapiens
acacattaccatatataacacagcaagataaagactgttaccttatcaacttaaatacaaattctacatgactaa

SEQ ID NO: 26732 - DNA, 73 bp, Homo sapiens
ataacacagcaagataaagactgttaccttatcaacttaaatacaaattctacatgactaaatacctactaca

SEQ ID NO: 26733 - DNA, 71 bp, Homo sapiens
agactgttaccttatcaacttaaatacaaattctacatgactaaatacctactacattttagtagtcagtc

SEQ ID NO: 26734 - DNA, 71 bp, Homo sapiens
accttatcaacttaaatacaaattctacatgactaaatacctactacattttagtagtcagtcttaagtgc

SEQ ID NO: 26735 - DNA, 75 bp, Homo sapiens
atacaaattctacatgactaaatacctactacattttagtagtcagtcttaagtgctatctatgaactcctaata

SEQ ID NO: 26736 - DNA, 77 bp, Homo sapiens
ctacatgactaaatacctactacattttagtagtcagtcttaagtgctatctatgaactcctaatacttcatataga

SEQ ID NO: 26737 - DNA, 75 bp, Homo sapiens
gactaaatacctactacattttagtagtcagtcttaagtgctatctatgaactcctaatacttcatatagattaa

SEQ ID NO: 26738 - DNA, 75 bp, Homo sapiens
ttagtagtcagtcttaagtgctatctatgaactcctaatacttcatatagattaatactaacttaatataagaaa

SEQ ID NO: 26739 - DNA, 75 bp, Homo sapiens
gtcttaagtgctatctatgaactcctaatacttcatatagattaatactaacttaatataagaaaatattcatta

SEQ ID NO: 26740 - DNA, 76 bp, Homo sapiens
tatgaactcctaatacttcatatagattaatactaacttaatataagaaaatattcattatattttaatagcagca

SEQ ID NO: 26741 - DNA, 74 bp, Homo sapiens
ctcctaatacttcatatagattaatactaacttaatataagaaaatattcattatattttaatagcagcactgg

SEQ ID NO: 26742 - DNA, 77 bp, Homo sapiens
tcatatagattaatactaacttaatataagaaaatattcattatattttaatagcagcactggtatttatatcattc

SEQ ID NO: 26743 - DNA, 79 bp, Homo sapiens
tactaacttaatataagaaaatattcattatattttaatagcagcactggtatttatatcattcctcatacatcatcaa

SEQ ID NO: 26744 - DNA, 83 bp, Homo sapiens
atataagaaaatattcattatattttaatagcagcactggtatttatatcattcctcatacatcatcaatgtcataattcaca

SEQ ID NO: 26745 - DNA, 84 bp, Homo sapiens
taatagcagcactggtatttatatcattcctcatacatcatcaatgtcataattcacacgagtccataaaatccactactctaa

SEQ ID NO: 26746 - DNA, 80 bp, Homo sapiens
gtatttatatcattcctcatacatcatcaatgtcataattcacacgagtccataaaatccactactctaaactcctacca

SEQ ID NO: 26747 - DNA, 80 bp, Homo sapiens
tatcattcctcatacatcatcaatgtcataattcacacgagtccataaaatccactactctaaactcctaccatacccta

SEQ ID NO: 26748 - DNA, 78 bp, Homo sapiens
atacatcatcaatgtcataattcacacgagtccataaaatccactactctaaactcctaccataccctagtcagtgag

SEQ ID NO: 26749 - DNA, 76 bp, Homo sapiens
tgtcataattcacacgagtccataaaatccactactctaaactcctaccataccctagtcagtgaggtgtgttata

SEQ ID NO: 26750 - DNA, 73 bp, Homo sapiens
aattcacacgagtccataaaatccactactctaaactcctaccataccctagtcagtgaggtgtgttatagtg

SEQ ID NO: 26751 - DNA, 72 bp, Homo sapiens
agtccataaaatccactactctaaactcctaccataccctagtcagtgaggtgtgttatagtgggaagaaga

SEQ ID NO: 26752 - DNA, 74 bp, Homo sapiens
actactctaaactcctaccataccctagtcagtgaggtgtgttatagtgggaagaagactggattcagagtcaa

SEQ ID NO: 26753 - DNA, 75 bp, Homo sapiens
ctaaactcctaccataccctagtcagtgaggtgtgttatagtgggaagaagactggattcagagtcaaagagatg

SEQ ID NO: 26754 - DNA, 75 bp, Homo sapiens
ataccctagtcagtgaggtgtgttatagtgggaagaagactggattcagagtcaaagagatggatttcaacttaa

SEQ ID NO: 26755 - DNA, 76 bp, Homo sapiens
tgtgttatagtgggaagaagactggattcagagtcaaagagatggatttcaacttaaatctgcttttcaactgctt

SEQ ID NO: 26756 - DNA, 73 bp, Homo sapiens
actggattcagagtcaaagagatggatttcaacttaaatctgcttttcaactgctttgcacttagggaaaaaa

SEQ ID NO: 26757 - DNA, 70 bp, Homo sapiens
agagtcaaagagatggatttcaacttaaatctgcttttcaactgctttgcacttagggaaaaaaaaaatc

SEQ ID NO: 26758 - DNA, 75 bp, Homo sapiens
aaatctttagaagtggggtgatacatgctccaattccctcaagacagcaacatttacatgtttaagattgtgtat

SEQ ID NO: 26759 - DNA, 77 bp, Homo sapiens
gggtgatacatgctccaattccctcaagacagcaacatttacatgtttaagattgtgtatttgtgtgtataaaaatc

SEQ ID NO: 26760 - DNA, 75 bp, Homo sapiens
acatgctccaattccctcaagacagcaacatttacatgtttaagattgtgtatttgtgtgtataaaaatctaaac

SEQ ID NO: 26761 - DNA, 74 bp, Homo sapiens
ccctcaagacagcaacatttacatgtttaagattgtgtatttgtgtgtataaaaatctaaactacttaaatgca

SEQ ID NO: 26762 - DNA, 72 bp, Homo sapiens
gacagcaacatttacatgtttaagattgtgtatttgtgtgtataaaaatctaaactacttaaatgcaaagtt

SEQ ID NO: 26763 - DNA, 70 bp, Homo sapiens
agcaacatttacatgtttaagattgtgtatttgtgtgtataaaaatctaaactacttaaatgcaaagttt

SEQ ID NO: 26764 - DNA, 70 bp, Homo sapiens
tacatgtttaagattgtgtatttgtgtgtataaaaatctaaactacttaaatgcaaagttttaaaatcag

SEQ ID NO: 26765 - DNA, 71 bp, Homo sapiens
catgtttaagattgtgtatttgtgtgtataaaaatctaaactacttaaatgcaaagttttaaaatcagtga

SEQ ID NO: 26766 - DNA, 73 bp, Homo sapiens
gattgtgtatttgtgtgtataaaaatctaaactacttaaatgcaaagttttaaaatcagtgatgataggctgg

SEQ ID NO: 26767 - DNA, 73 bp, Homo sapiens
tgtatttgtgtgtataaaaatctaaactacttaaatgcaaagttttaaaatcagtgatgataggctgggcgtg

SEQ ID NO: 26768 - DNA, 72 bp, Homo sapiens
gtatttgtgtgtataaaaatctaaactacttaaatgcaaagttttaaaatcagtgatgataggctgggcgtg

SEQ ID NO: 26769 - DNA, 68 bp, Homo sapiens
acaacaaaaaaacactgccttaaaaaggtagctaaatctcaatattactttccatttatgaagtctta

SEQ ID NO: 26770 - DNA, 71 bp, Homo sapiens
aaacactgccttaaaaaggtagctaaatctcaatattactttccatttatgaagtcttaagctatataata

SEQ ID NO: 26771 - DNA, 71 bp, Homo sapiens
aacactgccttaaaaaggtagctaaatctcaatattactttccatttatgaagtcttaagctatataataa

SEQ ID NO: 26772 - DNA, 74 bp, Homo sapiens
tgccttaaaaaggtagctaaatctcaatattactttccatttatgaagtcttaagctatataataaaatgcaca

SEQ ID NO: 26773 - DNA, 73 bp, Homo sapiens
ggtagctaaatctcaatattactttccatttatgaagtcttaagctatataataaaatgcacaaattttaaca

SEQ ID NO: 26774 - DNA, 73 bp, Homo sapiens
atctcaatattactttccatttatgaagtcttaagctatataataaaatgcacaaattttaacaaacatacta

SEQ ID NO: 26775 - DNA, 73 bp, Homo sapiens
tccatttatgaagtcttaagctatataataaaatgcacaaattttaacaaacatactatttttagctcagtcc

SEQ ID NO: 26776 - DNA, 73 bp, Homo sapiens
tatgaagtcttaagctatataataaaatgcacaaattttaacaaacatactatttttagctcagtcctactaa

SEQ ID NO: 26777 - DNA, 73 bp, Homo sapiens
gctatataataaaatgcacaaattttaacaaacatactatttttagctcagtcctactaattttaacatatca

SEQ ID NO: 26778 - DNA, 70 bp, Homo sapiens
aaatgcacaaattttaacaaacatactatttttagctcagtcctactaattttaacatatcattaaccca

SEQ ID NO: 26779 - DNA, 69 bp, Homo sapiens
cacaaattttaacaaacatactatttttagctcagtcctactaattttaacatatcattaacccacgga

SEQ ID NO: 26780 - DNA, 70 bp, Homo sapiens
aaacatactatttttagctcagtcctactaattttaacatatcattaacccacggaaaacagggcagtgc

SEQ ID NO: 26781 - DNA, 71 bp, Homo sapiens
atttttagctcagtcctactaattttaacatatcattaacccacggaaaacagggcagtgctctggaagtg

SEQ ID NO: 26782 - DNA, 72 bp, Homo sapiens
tcctactaattttaacatatcattaacccacggaaaacagggcagtgctctggaagtggctataaggacaac

SEQ ID NO: 26783 - DNA, 74 bp, Homo sapiens
tttaacatatcattaacccacggaaaacagggcagtgctctggaagtggctataaggacaaccgcagcctctaa

SEQ ID NO: 26784 - DNA, 74 bp, Homo sapiens
atatcattaacccacggaaaacagggcagtgctctggaagtggctataaggacaaccgcagcctctaacagtaa

SEQ ID NO: 26785 - DNA, 77 bp, Homo sapiens
cggaaaacagggcagtgctctggaagtggctataaggacaaccgcagcctctaacagtaacaggacagctgtcagta

SEQ ID NO: 26786 - DNA, 78 bp, Homo sapiens
acagggcagtgctctggaagtggctataaggacaaccgcagcctctaacagtaacaggacagctgtcagtaacgtgta

SEQ ID NO: 26787 - DNA, 78 bp, Homo sapiens
tgctctggaagtggctataaggacaaccgcagcctctaacagtaacaggacagctgtcagtaacgtgtagcccgtgta

SEQ ID NO: 26788 - DNA, 77 bp, Homo sapiens
tggaagtggctataaggacaaccgcagcctctaacagtaacaggacagctgtcagtaacgtgtagcccgtgtaatca

SEQ ID NO: 26789 - DNA, 76 bp, Homo sapiens
tataaggacaaccgcagcctctaacagtaacaggacagctgtcagtaacgtgtagcccgtgtaatcaaaacacagc

SEQ ID NO: 26790 - DNA, 76 bp, Homo sapiens
accgcagcctctaacagtaacaggacagctgtcagtaacgtgtagcccgtgtaatcaaaacacagctactagccta

SEQ ID NO: 26791 - DNA, 78 bp, Homo sapiens
tctaacagtaacaggacagctgtcagtaacgtgtagcccgtgtaatcaaaacacagctactagcctactgtctggaga

SEQ ID NO: 26792 - DNA, 77 bp, Homo sapiens
taacagtaacaggacagctgtcagtaacgtgtagcccgtgtaatcaaaacacagctactagcctactgtctggagaa

SEQ ID NO: 26793 - DNA, 76 bp, Homo sapiens
agtaacaggacagctgtcagtaacgtgtagcccgtgtaatcaaaacacagctactagcctactgtctggagaaaga

SEQ ID NO: 26794 - DNA, 77 bp, Homo sapiens
acagctgtcagtaacgtgtagcccgtgtaatcaaaacacagctactagcctactgtctggagaaagaatgcttcaaa

SEQ ID NO: 26795 - DNA, 72 bp, Homo sapiens
agtaacgtgtagcccgtgtaatcaaaacacagctactagcctactgtctggagaaagaatgcttcaaacttt

SEQ ID NO: 26796 - DNA, 71 bp, Homo sapiens
aatcaaaacacagctactagcctactgtctggagaaagaatgcttcaaacttttccacaaggagttttctt

SEQ ID NO: 26797 - DNA, 71 bp, Homo sapiens
ctactagcctactgtctggagaaagaatgcttcaaacttttccacaaggagttttctttgactgacgaaaa

SEQ ID NO: 26798 - DNA, 70 bp, Homo sapiens
tactgtctggagaaagaatgcttcaaacttttccacaaggagttttctttgactgacgaaaatttgttgg

SEQ ID NO: 26799 - DNA, 67 bp, Homo sapiens
gcttcaaacttttccacaaggagttttctttgactgacgaaaatttgttggttggtaagatagaaac

SEQ ID NO: 26800 - DNA, 67 bp, Homo sapiens
acttttccacaaggagttttctttgactgacgaaaatttgttggttggtaagatagaaactggccaa

SEQ ID NO: 26801 - DNA, 69 bp, Homo sapiens
aggagttttctttgactgacgaaaatttgttggttggtaagatagaaactggccaaggacaggagaata

SEQ ID NO: 26802 - DNA, 72 bp, Homo sapiens
aaaatttgttggttggtaagatagaaactggccaaggacaggagaatagccacagagctattctgggtctac

SEQ ID NO: 26803 - DNA, 75 bp, Homo sapiens
tggtaagatagaaactggccaaggacaggagaatagccacagagctattctgggtctaccataccttacagtaat

SEQ ID NO: 26804 - DNA, 71 bp, Homo sapiens
aaggacaggagaatagccacagagctattctgggtctaccataccttacagtaattaaaacatactaaaac

SEQ ID NO: 26805 - DNA, 72 bp, Homo sapiens
agaatagccacagagctattctgggtctaccataccttacagtaattaaaacatactaaaacctcttcatta

SEQ ID NO: 26806 - DNA, 74 bp, Homo sapiens
cacagagctattctgggtctaccataccttacagtaattaaaacatactaaaacctcttcattactagatgcta

SEQ ID NO: 26807 - DNA, 71 bp, Homo sapiens
tattctgggtctaccataccttacagtaattaaaacatactaaaacctcttcattactagatgctaattat

SEQ ID NO: 26808 - DNA, 70 bp, Homo sapiens
ctaccataccttacagtaattaaaacatactaaaacctcttcattactagatgctaattatttaattaga

SEQ ID NO: 26809 - DNA, 69 bp, Homo sapiens
gtaattaaaacatactaaaacctcttcattactagatgctaattatttaattagaaaatacagttaatc

SEQ ID NO: 26810 - DNA, 74 bp, Homo sapiens
catactaaaacctcttcattactagatgctaattatttaattagaaaatacagttaatcctcattattcatgga

SEQ ID NO: 26811 - DNA, 78 bp, Homo sapiens
tcattactagatgctaattatttaattagaaaatacagttaatcctcattattcatggattccatatttgcaaattca

SEQ ID NO: 26812 - DNA, 77 bp, Homo sapiens
gctaattatttaattagaaaatacagttaatcctcattattcatggattccatatttgcaaattcacctacatgata

SEQ ID NO: 26813 - DNA, 77 bp, Homo sapiens
ttagaaaatacagttaatcctcattattcatggattccatatttgcaaattcacctacatgataaactttgtgacac

SEQ ID NO: 26814 - DNA, 77 bp, Homo sapiens
cagttaatcctcattattcatggattccatatttgcaaattcacctacatgataaactttgtgacaccaaaaatcaa

SEQ ID NO: 26815 - DNA, 77 bp, Homo sapiens
ctcattattcatggattccatatttgcaaattcacctacatgataaactttgtgacaccaaaaatcaacactcctgg

SEQ ID NO: 26816 - DNA, 76 bp, Homo sapiens
atggattccatatttgcaaattcacctacatgataaactttgtgacaccaaaaatcaacactcctggtgctttcaa

SEQ ID NO: 26817 - DNA, 76 bp, Homo sapiens
atatttgcaaattcacctacatgataaactttgtgacaccaaaaatcaacactcctggtgctttcaaggccattca

SEQ ID NO: 26818 - DNA, 76 bp, Homo sapiens
aaattcacctacatgataaactttgtgacaccaaaaatcaacactcctggtgctttcaaggccattcatgctcatt

SEQ ID NO: 26819 - DNA, 75 bp, Homo sapiens
actttgtgacaccaaaaatcaacactcctggtgctttcaaggccattcatgctcatttgcagaggggcaaaaatt

SEQ ID NO: 26820 - DNA, 78 bp, Homo sapiens
aaaaatcaacactcctggtgctttcaaggccattcatgctcatttgcagaggggcaaaaatttgactcatccaataca

SEQ ID NO: 26821 - DNA, 82 bp, Homo sapiens
ttcaaggccattcatgctcatttgcagaggggcaaaaatttgactcatccaatacagttcacctccagctgagatggaacaa

SEQ ID NO: 26822 - DNA, 80 bp, Homo sapiens
attcatgctcatttgcagaggggcaaaaatttgactcatccaatacagttcacctccagctgagatggaacaaaggacac

SEQ ID NO: 26823 - DNA, 77 bp, Homo sapiens
atttgcagaggggcaaaaatttgactcatccaatacagttcacctccagctgagatggaacaaaggacactctgcct

SEQ ID NO: 26824 - DNA, 80 bp, Homo sapiens
ggcaaaaatttgactcatccaatacagttcacctccagctgagatggaacaaaggacactctgccttggttcagctctca

SEQ ID NO: 26825 - DNA, 80 bp, Homo sapiens
aaatttgactcatccaatacagttcacctccagctgagatggaacaaaggacactctgccttggttcagctctcatacca

SEQ ID NO: 26826 - DNA, 81 bp, Homo sapiens
atccaatacagttcacctccagctgagatggaacaaaggacactctgccttggttcagctctcataccagaccagaggata

SEQ ID NO: 26827 - DNA, 80 bp, Homo sapiens
agttcacctccagctgagatggaacaaaggacactctgccttggttcagctctcataccagaccagaggatagagaagga

SEQ ID NO: 26828 - DNA, 80 bp, Homo sapiens
tgagatggaacaaaggacactctgccttggttcagctctcataccagaccagaggatagagaaggaggatggggagtcca

SEQ ID NO: 26829 - DNA, 78 bp, Homo sapiens
aacaaaggacactctgccttggttcagctctcataccagaccagaggatagagaaggaggatggggagtccatcatac

SEQ ID NO: 26830 - DNA, 80 bp, Homo sapiens
actctgccttggttcagctctcataccagaccagaggatagagaaggaggatggggagtccatcatactgcaagaaactc

SEQ ID NO: 26831 - DNA, 81 bp, Homo sapiens
ttggttcagctctcataccagaccagaggatagagaaggaggatggggagtccatcatactgcaagaaactctgactctgg

SEQ ID NO: 26832 - DNA, 78 bp, Homo sapiens
gaggatagagaaggaggatggggagtccatcatactgcaagaaactctgactctggggccagctggacagggctaaaa

SEQ ID NO: 26833 - DNA, 75 bp, Homo sapiens
aaggaggatggggagtccatcatactgcaagaaactctgactctggggccagctggacagggctaaaattccaac

SEQ ID NO: 26834 - DNA, 77 bp, Homo sapiens
gggagtccatcatactgcaagaaactctgactctggggccagctggacagggctaaaattccaactctggcaccagt

SEQ ID NO: 26835 - DNA, 79 bp, Homo sapiens
atcatactgcaagaaactctgactctggggccagctggacagggctaaaattccaactctggcaccagttagtgcgaca

SEQ ID NO: 26836 - DNA, 75 bp, Homo sapiens
actctggggccagctggacagggctaaaattccaactctggcaccagttagtgcgacagccttaagcaagtcact

SEQ ID NO: 26837 - DNA, 76 bp, Homo sapiens
agctggacagggctaaaattccaactctggcaccagttagtgcgacagccttaagcaagtcacttaacacttctga

SEQ ID NO: 26838 - DNA, 73 bp, Homo sapiens
ggctaaaattccaactctggcaccagttagtgcgacagccttaagcaagtcacttaacacttctgaactttat

SEQ ID NO: 26839 - DNA, 72 bp, Homo sapiens
caccagttagtgcgacagccttaagcaagtcacttaacacttctgaactttatttcctctttcataaaataa

SEQ ID NO: 26840 - DNA, 72 bp, Homo sapiens
gttagtgcgacagccttaagcaagtcacttaacacttctgaactttatttcctctttcataaaataaataga

SEQ ID NO: 26841 - DNA, 72 bp, Homo sapiens
cagccttaagcaagtcacttaacacttctgaactttatttcctctttcataaaataaatagaatatactaga

SEQ ID NO: 26842 - DNA, 70 bp, Homo sapiens
gtcacttaacacttctgaactttatttcctctttcataaaataaatagaatatactagaatgaggttttc

SEQ ID NO: 26843 - DNA, 69 bp, Homo sapiens
cacttctgaactttatttcctctttcataaaataaatagaatatactagaatgaggttttctaaaagga

SEQ ID NO: 26844 - DNA, 72 bp, Homo sapiens
tatttcctctttcataaaataaatagaatatactagaatgaggttttctaaaaggaccgtctatgtgacata

SEQ ID NO: 26845 - DNA, 75 bp, Homo sapiens
atatacatatatgcatatatttcccccagcaagggttcagtgttcactaattcagtgtttggggtgacttaagta

SEQ ID NO: 26846 - DNA, 72 bp, Homo sapiens
atatgcatatatttcccccagcaagggttcagtgttcactaattcagtgtttggggtgacttaagtacttaa

SEQ ID NO: 26847 - DNA, 72 bp, Homo sapiens
aagggttcagtgttcactaattcagtgtttggggtgacttaagtacttaactgccacaaataatgagtatca

SEQ ID NO: 26848 - DNA, 73 bp, Homo sapiens
tgttcactaattcagtgtttggggtgacttaagtacttaactgccacaaataatgagtatcaactgtgtaagt

SEQ ID NO: 26849 - DNA, 74 bp, Homo sapiens
aattcagtgtttggggtgacttaagtacttaactgccacaaataatgagtatcaactgtgtaagttatatgaca

SEQ ID NO: 26850 - DNA, 77 bp, Homo sapiens
gggtgacttaagtacttaactgccacaaataatgagtatcaactgtgtaagttatatgacatatatataattgccaa

SEQ ID NO: 26851 - DNA, 80 bp, Homo sapiens
taagtacttaactgccacaaataatgagtatcaactgtgtaagttatatgacatatatataattgccaaacacattgtca

SEQ ID NO: 26852 - DNA, 82 bp, Homo sapiens
ttaactgccacaaataatgagtatcaactgtgtaagttatatgacatatatataattgccaaacacattgtcatatatataa

SEQ ID NO: 26853 - DNA, 77 bp, Homo sapiens
atgacatatatataattgccaaacacattgtcatatatataaattatatgacaaaaccgaagcaagtatagtttctt

SEQ ID NO: 26854 - DNA, 76 bp, Homo sapiens
tatatataattgccaaacacattgtcatatatataaattatatgacaaaaccgaagcaagtatagtttctttacca

SEQ ID NO: 26855 - DNA, 74 bp, Homo sapiens
gccaaacacattgtcatatatataaattatatgacaaaaccgaagcaagtatagtttctttaccaataatgaaa

SEQ ID NO: 26856 - DNA, 70 bp, Homo sapiens
atatgacaaaaccgaagcaagtatagtttctttaccaataatgaaatcacaagattttgtattttagaaa

SEQ ID NO: 26857 - DNA, 73 bp, Homo sapiens
aaatttgaggtcagtaatatagagtagtgattaaggacatatgttctatagttaggctgcctaggttataaaa

SEQ ID NO: 26858 - DNA, 74 bp, Homo sapiens
gaggtcagtaatatagagtagtgattaaggacatatgttctatagttaggctgcctaggttataaaaattcaac

SEQ ID NO: 26859 - DNA, 75 bp, Homo sapiens
agagtagtgattaaggacatatgttctatagttaggctgcctaggttataaaaattcaactcatcatttaagatc

SEQ ID NO: 26860 - DNA, 75 bp, Homo sapiens
ttaaggacatatgttctatagttaggctgcctaggttataaaaattcaactcatcatttaagatctctgtaatcc

SEQ ID NO: 26861 - DNA, 78 bp, Homo sapiens
acatatgttctatagttaggctgcctaggttataaaaattcaactcatcatttaagatctctgtaatcctgagcacat

SEQ ID NO: 26862 - DNA, 78 bp, Homo sapiens
ctatagttaggctgcctaggttataaaaattcaactcatcatttaagatctctgtaatcctgagcacattgcttaata

SEQ ID NO: 26863 - DNA, 78 bp, Homo sapiens
cctaggttataaaaattcaactcatcatttaagatctctgtaatcctgagcacattgcttaataactctgagcctcca

SEQ ID NO: 26864 - DNA, 80 bp, Homo sapiens
ttataaaaattcaactcatcatttaagatctctgtaatcctgagcacattgcttaataactctgagcctccacttcctca

SEQ ID NO: 26865 - DNA, 71 bp, Homo sapiens
taataatagtgactaacacattaataggaggattataaaaaataaaacattattatttactggaatatgtc

SEQ ID NO: 26866 - DNA, 72 bp, Homo sapiens
agtgactaacacattaataggaggattataaaaaataaaacattattatttactggaatatgtctggcacaa

SEQ ID NO: 26867 - DNA, 68 bp, Homo sapiens
taaaaaataaaacattattatttactggaatatgtctggcacaaagtaacccttaaatacttgttagc

SEQ ID NO: 26868 - DNA, 70 bp, Homo sapiens
aacattattatttactggaatatgtctggcacaaagtaacccttaaatacttgttagccactaaaatgta

SEQ ID NO: 26869 - DNA, 70 bp, Homo sapiens
atttactggaatatgtctggcacaaagtaacccttaaatacttgttagccactaaaatgtatctggtaaa

SEQ ID NO: 26870 - DNA, 72 bp, Homo sapiens
atatgtctggcacaaagtaacccttaaatacttgttagccactaaaatgtatctggtaaatataggcaacca

SEQ ID NO: 26871 - DNA, 69 bp, Homo sapiens
cacaaagtaacccttaaatacttgttagccactaaaatgtatctggtaaatataggcaaccagcttcct

SEQ ID NO: 26872 - DNA, 69 bp, Homo sapiens
aagtaacccttaaatacttgttagccactaaaatgtatctggtaaatataggcaaccagcttcctttga

SEQ ID NO: 26873 - DNA, 69 bp, Homo sapiens
gtaacccttaaatacttgttagccactaaaatgtatctggtaaatataggcaaccagcttcctttgaaa

SEQ ID NO: 26874 - DNA, 70 bp, Homo sapiens
ccttaaatacttgttagccactaaaatgtatctggtaaatataggcaaccagcttcctttgaaagaaata

SEQ ID NO: 26875 - DNA, 71 bp, Homo sapiens
atacttgttagccactaaaatgtatctggtaaatataggcaaccagcttcctttgaaagaaatacaattac

SEQ ID NO: 26876 - DNA, 72 bp, Homo sapiens
tagccactaaaatgtatctggtaaatataggcaaccagcttcctttgaaagaaatacaattacttatacttc

SEQ ID NO: 26877 - DNA, 71 bp, Homo sapiens
atctggtaaatataggcaaccagcttcctttgaaagaaatacaattacttatacttctaaactcagtaaca

SEQ ID NO: 26878 - DNA, 71 bp, Homo sapiens
tctggtaaatataggcaaccagcttcctttgaaagaaatacaattacttatacttctaaactcagtaacaa

SEQ ID NO: 26879 - DNA, 70 bp, Homo sapiens
aatataggcaaccagcttcctttgaaagaaatacaattacttatacttctaaactcagtaacaatccttc

SEQ ID NO: 26880 - DNA, 69 bp, Homo sapiens
aggcaaccagcttcctttgaaagaaatacaattacttatacttctaaactcagtaacaatccttctatt

SEQ ID NO: 26881 - DNA, 72 bp, Homo sapiens
gcttcctttgaaagaaatacaattacttatacttctaaactcagtaacaatccttctatttatgtctatcac

SEQ ID NO: 26882 - DNA, 70 bp, Homo sapiens
agaaatacaattacttatacttctaaactcagtaacaatccttctatttatgtctatcactttaaaaaca

SEQ ID NO: 26883 - DNA, 71 bp, Homo sapiens
acttctaaactcagtaacaatccttctatttatgtctatcactttaaaaacattttcatgttacatattta

SEQ ID NO: 26884 - DNA, 71 bp, Homo sapiens
ctcagtaacaatccttctatttatgtctatcactttaaaaacattttcatgttacatatttaactaaatta

SEQ ID NO: 26885 - DNA, 72 bp, Homo sapiens
tctatttatgtctatcactttaaaaacattttcatgttacatatttaactaaattattcaactgttagtcta

SEQ ID NO: 26886 - DNA, 72 bp, Homo sapiens
gtctatcactttaaaaacattttcatgttacatatttaactaaattattcaactgttagtctatcaggagct

SEQ ID NO: 26887 - DNA, 72 bp, Homo sapiens
taaaaacattttcatgttacatatttaactaaattattcaactgttagtctatcaggagctttttcaactca

SEQ ID NO: 26888 - DNA, 77 bp, Homo sapiens
ttcatgttacatatttaactaaattattcaactgttagtctatcaggagctttttcaactcaccattgttgcagcat

SEQ ID NO: 26889 - DNA, 75 bp, Homo sapiens
atatttaactaaattattcaactgttagtctatcaggagctttttcaactcaccattgttgcagcattccaagcg

SEQ ID NO: 26890 - DNA, 74 bp, Homo sapiens
aactaaattattcaactgttagtctatcaggagctttttcaactcaccattgttgcagcattccaagcggttgt

SEQ ID NO: 26891 - DNA, 76 bp, Homo sapiens
attcaactgttagtctatcaggagctttttcaactcaccattgttgcagcattccaagcggttgttggtgcaacct

SEQ ID NO: 26892 - DNA, 77 bp, Homo sapiens
tatcaggagctttttcaactcaccattgttgcagcattccaagcggttgttggtgcaacctttggttgccagttaga

SEQ ID NO: 26893 - DNA, 73 bp, Homo sapiens
aactcaccattgttgcagcattccaagcggttgttggtgcaacctttggttgccagttagatcccccagttaa

SEQ ID NO: 26894 - DNA, 71 bp, Homo sapiens
ttgttgcagcattccaagcggttgttggtgcaacctttggttgccagttagatcccccagttaacttcttt

SEQ ID NO: 26895 - DNA, 68 bp, Homo sapiens
attccaagcggttgttggtgcaacctttggttgccagttagatcccccagttaacttcttttcacctg

SEQ ID NO: 26896 - DNA, 69 bp, Homo sapiens
ttggtgcaacctttggttgccagttagatcccccagttaacttcttttcacctggttgactccaattta

SEQ ID NO: 26897 - DNA, 69 bp, Homo sapiens
tttggttgccagttagatcccccagttaacttcttttcacctggttgactccaatttacatcactttaa

SEQ ID NO: 26898 - DNA, 69 bp, Homo sapiens
ttgccagttagatcccccagttaacttcttttcacctggttgactccaatttacatcactttaaataaa

SEQ ID NO: 26899 - DNA, 69 bp, Homo sapiens
cccagttaacttcttttcacctggttgactccaatttacatcactttaaataaacataagtgagaatat

SEQ ID NO: 26900 - DNA, 71 bp, Homo sapiens
acttcttttcacctggttgactccaatttacatcactttaaataaacataagtgagaatattaaatgtctc

SEQ ID NO: 26901 - DNA, 72 bp, Homo sapiens
cacctggttgactccaatttacatcactttaaataaacataagtgagaatattaaatgtctctaattataaa

SEQ ID NO: 26902 - DNA, 71 bp, Homo sapiens
tgactccaatttacatcactttaaataaacataagtgagaatattaaatgtctctaattataaagtttcct

SEQ ID NO: 26903 - DNA, 72 bp, Homo sapiens
catcactttaaataaacataagtgagaatattaaatgtctctaattataaagtttccttagctatatactta

SEQ ID NO: 26904 - DNA, 74 bp, Homo sapiens
taaacataagtgagaatattaaatgtctctaattataaagtttccttagctatatacttatatagaacagagta

SEQ ID NO: 26905 - DNA, 75 bp, Homo sapiens
gtgagaatattaaatgtctctaattataaagtttccttagctatatacttatatagaacagagtaagatagagac

SEQ ID NO: 26906 - DNA, 75 bp, Homo sapiens
taaatgtctctaattataaagtttccttagctatatacttatatagaacagagtaagatagagacttgaggctgg

SEQ ID NO: 26907 - DNA, 75 bp, Homo sapiens
tctctaattataaagtttccttagctatatacttatatagaacagagtaagatagagacttgaggctgggcgtgg

SEQ ID NO: 26908 - DNA, 74 bp, Homo sapiens
aaaaaaagatgcagacttgatatctctacacatatttttgagaggaaagccaaatcaaccctccaaataacaca

SEQ ID NO: 26909 - DNA, 77 bp, Homo sapiens
aagatgcagacttgatatctctacacatatttttgagaggaaagccaaatcaaccctccaaataacacatggagaaa

SEQ ID NO: 26910 - DNA, 74 bp, Homo sapiens
cttgatatctctacacatatttttgagaggaaagccaaatcaaccctccaaataacacatggagaaaacactaa

SEQ ID NO: 26911 - DNA, 70 bp, Homo sapiens
acatatttttgagaggaaagccaaatcaaccctccaaataacacatggagaaaacactaaataacacacg

SEQ ID NO: 26912 - DNA, 70 bp, Homo sapiens
tttgagaggaaagccaaatcaaccctccaaataacacatggagaaaacactaaataacacacggagaaaa

SEQ ID NO: 26913 - DNA, 70 bp, Homo sapiens
aaagccaaatcaaccctccaaataacacatggagaaaacactaaataacacacggagaaaacaatgtgta

SEQ ID NO: 26914 - DNA, 71 bp, Homo sapiens
ccctccaaataacacatggagaaaacactaaataacacacggagaaaacaatgtgtatattaaacactcac

SEQ ID NO: 26915 - DNA, 72 bp, Homo sapiens
cacatggagaaaacactaaataacacacggagaaaacaatgtgtatattaaacactcacttcttagtggttc

SEQ ID NO: 26916 - DNA, 70 bp, Homo sapiens
ggagaaaacactaaataacacacggagaaaacaatgtgtatattaaacactcacttcttagtggttccat

SEQ ID NO: 26917 - DNA, 73 bp, Homo sapiens
taaataacacacggagaaaacaatgtgtatattaaacactcacttcttagtggttccatttccgatgccaaga

SEQ ID NO: 26918 - DNA, 73 bp, Homo sapiens
agaaaacaatgtgtatattaaacactcacttcttagtggttccatttccgatgccaagatctaggaaaggaga

SEQ ID NO: 26919 - DNA, 72 bp, Homo sapiens
acaatgtgtatattaaacactcacttcttagtggttccatttccgatgccaagatctaggaaaggagaaaaa

SEQ ID NO: 26920 - DNA, 69 bp, Homo sapiens
tattaaacactcacttcttagtggttccatttccgatgccaagatctaggaaaggagaaaaacaaaaaa

SEQ ID NO: 26921 - DNA, 70 bp, Homo sapiens
tcttagtggttccatttccgatgccaagatctaggaaaggagaaaaacaaaaaagcattttataacacga

SEQ ID NO: 26922 - DNA, 71 bp, Homo sapiens
tccatttccgatgccaagatctaggaaaggagaaaaacaaaaaagcattttataacacgagacgcagttta

SEQ ID NO: 26923 - DNA, 69 bp, Homo sapiens
ccgatgccaagatctaggaaaggagaaaaacaaaaaagcattttataacacgagacgcagtttaataaa

SEQ ID NO: 26924 - DNA, 67 bp, Homo sapiens
aagatctaggaaaggagaaaaacaaaaaagcattttataacacgagacgcagtttaataaaacaaca

SEQ ID NO: 26925 - DNA, 67 bp, Homo sapiens
ggagaaaaacaaaaaagcattttataacacgagacgcagtttaataaaacaacataaaagaagatta

SEQ ID NO: 26926 - DNA, 68 bp, Homo sapiens
aaaagcattttataacacgagacgcagtttaataaaacaacataaaagaagattaacgtatccaaaga

SEQ ID NO: 26927 - DNA, 70 bp, Homo sapiens
tataacacgagacgcagtttaataaaacaacataaaagaagattaacgtatccaaagactacttactgcc

SEQ ID NO: 26928 - DNA, 70 bp, Homo sapiens
cacgagacgcagtttaataaaacaacataaaagaagattaacgtatccaaagactacttactgcccacaa

SEQ ID NO: 26929 - DNA, 68 bp, Homo sapiens
aataaaacaacataaaagaagattaacgtatccaaagactacttactgcccacaaggttggctaaaga

SEQ ID NO: 26930 - DNA, 71 bp, Homo sapiens
acaacataaaagaagattaacgtatccaaagactacttactgcccacaaggttggctaaagatgaatccaa

SEQ ID NO: 26931 - DNA, 74 bp, Homo sapiens
aagattaacgtatccaaagactacttactgcccacaaggttggctaaagatgaatccaagtcatcagatactaa

SEQ ID NO: 26932 - DNA, 75 bp, Homo sapiens
acgtatccaaagactacttactgcccacaaggttggctaaagatgaatccaagtcatcagatactaacttgctag

SEQ ID NO: 26933 - DNA, 74 bp, Homo sapiens
actacttactgcccacaaggttggctaaagatgaatccaagtcatcagatactaacttgctaggtgggagtttg

SEQ ID NO: 26934 - DNA, 74 bp, Homo sapiens
cacaaggttggctaaagatgaatccaagtcatcagatactaacttgctaggtgggagtttggcaacaggaaggt

SEQ ID NO: 26935 - DNA, 75 bp, Homo sapiens
ttggctaaagatgaatccaagtcatcagatactaacttgctaggtgggagtttggcaacaggaaggttctggttc

SEQ ID NO: 26936 - DNA, 77 bp, Homo sapiens
agatgaatccaagtcatcagatactaacttgctaggtgggagtttggcaacaggaaggttctggttctgagaggcca

SEQ ID NO: 26937 - DNA, 74 bp, Homo sapiens
atcagatactaacttgctaggtgggagtttggcaacaggaaggttctggttctgagaggccactgttggtttga

SEQ ID NO: 26938 - DNA, 72 bp, Homo sapiens
atactaacttgctaggtgggagtttggcaacaggaaggttctggttctgagaggccactgttggtttgagaa

SEQ ID NO: 26939 - DNA, 74 bp, Homo sapiens
gtgggagtttggcaacaggaaggttctggttctgagaggccactgttggtttgagaagtccacctagttcatca

SEQ ID NO: 26940 - DNA, 74 bp, Homo sapiens
ttggcaacaggaaggttctggttctgagaggccactgttggtttgagaagtccacctagttcatcaaagcctta

SEQ ID NO: 26941 - DNA, 71 bp, Homo sapiens
aggttctggttctgagaggccactgttggtttgagaagtccacctagttcatcaaagccttaaagttacaa

SEQ ID NO: 26942 - DNA, 73 bp, Homo sapiens
tctgagaggccactgttggtttgagaagtccacctagttcatcaaagccttaaagttacaaacagacgaaata

SEQ ID NO: 26943 - DNA, 70 bp, Homo sapiens
cactgttggtttgagaagtccacctagttcatcaaagccttaaagttacaaacagacgaaatagaatttg

SEQ ID NO: 26944 - DNA, 64 bp, Homo sapiens
tttttaataaaattttttttccttacccccagaatctacaataacatttgtagatttatttcca

SEQ ID NO: 26945 - DNA, 67 bp, Homo sapiens
aattttttttccttacccccagaatctacaataacatttgtagatttatttccaaacacagattcaa

SEQ ID NO: 26946 - DNA, 70 bp, Homo sapiens
ccttacccccagaatctacaataacatttgtagatttatttccaaacacagattcaaagtcaacattaag

SEQ ID NO: 26947 - DNA, 73 bp, Homo sapiens
agaatctacaataacatttgtagatttatttccaaacacagattcaaagtcaacattaaggccagctgaaggg

SEQ ID NO: 26948 - DNA, 75 bp, Homo sapiens
tacaataacatttgtagatttatttccaaacacagattcaaagtcaacattaaggccagctgaagggtgtggctg

SEQ ID NO: 26949 - DNA, 76 bp, Homo sapiens
atttgtagatttatttccaaacacagattcaaagtcaacattaaggccagctgaagggtgtggctgtgcaactgga

SEQ ID NO: 26950 - DNA, 77 bp, Homo sapiens
ttatttccaaacacagattcaaagtcaacattaaggccagctgaagggtgtggctgtgcaactggagaaggagtgaa

SEQ ID NO: 26951 - DNA, 78 bp, Homo sapiens
acacagattcaaagtcaacattaaggccagctgaagggtgtggctgtgcaactggagaaggagtgaatcctgagtaaa

SEQ ID NO: 26952 - DNA, 74 bp, Homo sapiens
aaagtcaacattaaggccagctgaagggtgtggctgtgcaactggagaaggagtgaatcctgagtaaaccaaaa

SEQ ID NO: 26953 - DNA, 73 bp, Homo sapiens
ttaaggccagctgaagggtgtggctgtgcaactggagaaggagtgaatcctgagtaaaccaaaatggaaaaaa

SEQ ID NO: 26954 - DNA, 68 bp, Homo sapiens
ggcagtataaacattgattggaaaaaaaggttaaatggtactttaccaacaaacatttcatgagtagg

SEQ ID NO: 26955 - DNA, 68 bp, Homo sapiens
acattgattggaaaaaaaggttaaatggtactttaccaacaaacatttcatgagtaggtgtcctagta

SEQ ID NO: 26956 - DNA, 67 bp, Homo sapiens
gattggaaaaaaaggttaaatggtactttaccaacaaacatttcatgagtaggtgtcctagtagtaa

SEQ ID NO: 26957 - DNA, 71 bp, Homo sapiens
aggttaaatggtactttaccaacaaacatttcatgagtaggtgtcctagtagtaaaagtagatacatctga

SEQ ID NO: 26958 - DNA, 72 bp, Homo sapiens
ggtactttaccaacaaacatttcatgagtaggtgtcctagtagtaaaagtagatacatctgaagaaatggaa

SEQ ID NO: 26959 - DNA, 74 bp, Homo sapiens
aacaaacatttcatgagtaggtgtcctagtagtaaaagtagatacatctgaagaaatggaaaggtgaacatcac

SEQ ID NO: 26960 - DNA, 72 bp, Homo sapiens
atgagtaggtgtcctagtagtaaaagtagatacatctgaagaaatggaaaggtgaacatcaccactactttt

SEQ ID NO: 26961 - DNA, 73 bp, Homo sapiens
tgtcctagtagtaaaagtagatacatctgaagaaatggaaaggtgaacatcaccactactttttgtgaggaaa

SEQ ID NO: 26962 - DNA, 71 bp, Homo sapiens
aaaagtagatacatctgaagaaatggaaaggtgaacatcaccactactttttgtgaggaaaggatttaagc

SEQ ID NO: 26963 - DNA, 74 bp, Homo sapiens
tagatacatctgaagaaatggaaaggtgaacatcaccactactttttgtgaggaaaggatttaagcttggaatg

SEQ ID NO: 26964 - DNA, 74 bp, Homo sapiens
aagaaatggaaaggtgaacatcaccactactttttgtgaggaaaggatttaagcttggaatggcatcatcaaca

SEQ ID NO: 26965 - DNA, 77 bp, Homo sapiens
aaaggtgaacatcaccactactttttgtgaggaaaggatttaagcttggaatggcatcatcaacagcatctacagta

SEQ ID NO: 26966 - DNA, 79 bp, Homo sapiens
atcaccactactttttgtgaggaaaggatttaagcttggaatggcatcatcaacagcatctacagtagcagagaaagga

SEQ ID NO: 26967 - DNA, 82 bp, Homo sapiens
ttttgtgaggaaaggatttaagcttggaatggcatcatcaacagcatctacagtagcagagaaaggatctgtgcagtccaaa

SEQ ID NO: 26968 - DNA, 84 bp, Homo sapiens
aaaggatttaagcttggaatggcatcatcaacagcatctacagtagcagagaaaggatctgtgcagtccaaatgtattatagca

SEQ ID NO: 26969 - DNA, 86 bp, Homo sapiens
ttaagcttggaatggcatcatcaacagcatctacagtagcagagaaaggatctgtgcagtccaaatgtattatagcaaaatgaaga

SEQ ID NO: 26970 - DNA, 82 bp, Homo sapiens
aggagagatgcatgtaacatctaaaatagaattcatcaatgcttacctccccatgtacttgctacctgagaagcagttgaca

SEQ ID NO: 26971 - DNA, 81 bp, Homo sapiens
catgtaacatctaaaatagaattcatcaatgcttacctccccatgtacttgctacctgagaagcagttgacataggatgta

SEQ ID NO: 26972 - DNA, 80 bp, Homo sapiens
aacatctaaaatagaattcatcaatgcttacctccccatgtacttgctacctgagaagcagttgacataggatgtacaga

SEQ ID NO: 26973 - DNA, 80 bp, Homo sapiens
atagaattcatcaatgcttacctccccatgtacttgctacctgagaagcagttgacataggatgtacagatgggtgaaaa

SEQ ID NO: 26974 - DNA, 81 bp, Homo sapiens
aatgcttacctccccatgtacttgctacctgagaagcagttgacataggatgtacagatgggtgaaaagttggctgctgca

SEQ ID NO: 26975 - DNA, 85 bp, Homo sapiens
ccatgtacttgctacctgagaagcagttgacataggatgtacagatgggtgaaaagttggctgctgcaaatcaagcagatcattg

SEQ ID NO: 26976 - DNA, 85 bp, Homo sapiens
ttgctacctgagaagcagttgacataggatgtacagatgggtgaaaagttggctgctgcaaatcaagcagatcattgggcagctt

SEQ ID NO: 26977 - DNA, 86 bp, Homo sapiens
aagcagttgacataggatgtacagatgggtgaaaagttggctgctgcaaatcaagcagatcattgggcagctttgatgtgctagaa

SEQ ID NO: 26978 - DNA, 84 bp, Homo sapiens
acataggatgtacagatgggtgaaaagttggctgctgcaaatcaagcagatcattgggcagctttgatgtgctagaaagatatt

SEQ ID NO: 26979 - DNA, 83 bp, Homo sapiens
atgtacagatgggtgaaaagttggctgctgcaaatcaagcagatcattgggcagctttgatgtgctagaaagatattttggaa

SEQ ID NO: 26980 - DNA, 80 bp, Homo sapiens
tgaaaagttggctgctgcaaatcaagcagatcattgggcagctttgatgtgctagaaagatattttggaaacgtgtttta

SEQ ID NO: 26981 - DNA, 79 bp, Homo sapiens
ctgctgcaaatcaagcagatcattgggcagctttgatgtgctagaaagatattttggaaacgtgttttatttaccagaa

SEQ ID NO: 26982 - DNA, 67 bp, Homo sapiens
gaagtctttgaacctacatattcaaaggtaaccttaacttctactcctacctgttagaagaactagg

SEQ ID NO: 26983 - DNA, 65 bp, Homo sapiens
acctacatattcaaaggtaaccttaacttctactcctacctgttagaagaactaggggtagaaaa

SEQ ID NO: 26984 - DNA, 67 bp, Homo sapiens
attcaaaggtaaccttaacttctactcctacctgttagaagaactaggggtagaaaatatgtcaatg

SEQ ID NO: 26985 - DNA, 72 bp, Homo sapiens
accttaacttctactcctacctgttagaagaactaggggtagaaaatatgtcaatggctggtgcagtcatta

SEQ ID NO: 26986 - DNA, 77 bp, Homo sapiens
tctactcctacctgttagaagaactaggggtagaaaatatgtcaatggctggtgcagtcattatccctcctgctgag

SEQ ID NO: 26987 - DNA, 79 bp, Homo sapiens
tgttagaagaactaggggtagaaaatatgtcaatggctggtgcagtcattatccctcctgctgaggtggatacaggaga

SEQ ID NO: 26988 - DNA, 81 bp, Homo sapiens
taggggtagaaaatatgtcaatggctggtgcagtcattatccctcctgctgaggtggatacaggagaggctgcagttgtta

SEQ ID NO: 26989 - DNA, 80 bp, Homo sapiens
aaaatatgtcaatggctggtgcagtcattatccctcctgctgaggtggatacaggagaggctgcagttgttaaagaggta

SEQ ID NO: 26990 - DNA, 79 bp, Homo sapiens
aatggctggtgcagtcattatccctcctgctgaggtggatacaggagaggctgcagttgttaaagaggtatgaggtttc

SEQ ID NO: 26991 - DNA, 76 bp, Homo sapiens
agtcattatccctcctgctgaggtggatacaggagaggctgcagttgttaaagaggtatgaggtttctttgcaagt

SEQ ID NO: 26992 - DNA, 75 bp, Homo sapiens
ttatccctcctgctgaggtggatacaggagaggctgcagttgttaaagaggtatgaggtttctttgcaagttctt

SEQ ID NO: 26993 - DNA, 73 bp, Homo sapiens
aggtggatacaggagaggctgcagttgttaaagaggtatgaggtttctttgcaagttcttttaggcgctgttc

SEQ ID NO: 26994 - DNA, 72 bp, Homo sapiens
aggagaggctgcagttgttaaagaggtatgaggtttctttgcaagttcttttaggcgctgttcctgttaaga

SEQ ID NO: 26995 - DNA, 70 bp, Homo sapiens
tgcagttgttaaagaggtatgaggtttctttgcaagttcttttaggcgctgttcctgttaagaaagggaa

SEQ ID NO: 26996 - DNA, 69 bp, Homo sapiens
taaagaggtatgaggtttctttgcaagttcttttaggcgctgttcctgttaagaaagggaactaccata

SEQ ID NO: 26997 - DNA, 69 bp, Homo sapiens
atgaggtttctttgcaagttcttttaggcgctgttcctgttaagaaagggaactaccataaggattcca

SEQ ID NO: 26998 - DNA, 70 bp, Homo sapiens
atgaacacctgtactcatttttcgaaataaggagaatgcacaaacttacctttaaagctttcaaacgtgc

SEQ ID NO: 26999 - DNA, 70 bp, Homo sapiens
tgtactcatttttcgaaataaggagaatgcacaaacttacctttaaagctttcaaacgtgcctgttcttc

SEQ ID NO: 27000 - DNA, 70 bp, Homo sapiens
ttttcgaaataaggagaatgcacaaacttacctttaaagctttcaaacgtgcctgttcttcctctaatgc

SEQ ID NO: 27001 - DNA, 72 bp, Homo sapiens
aaggagaatgcacaaacttacctttaaagctttcaaacgtgcctgttcttcctctaatgctgcctgcttttc

SEQ ID NO: 27002 - DNA, 70 bp, Homo sapiens
acaaacttacctttaaagctttcaaacgtgcctgttcttcctctaatgctgcctgcttttccctttcatc

SEQ ID NO: 27003 - DNA, 75 bp, Homo sapiens
ttaaagctttcaaacgtgcctgttcttcctctaatgctgcctgcttttccctttcatccactttggtcagagata

SEQ ID NO: 27004 - DNA, 77 bp, Homo sapiens
tttcaaacgtgcctgttcttcctctaatgctgcctgcttttccctttcatccactttggtcagagatagaccagtgc

SEQ ID NO: 27005 - DNA, 79 bp, Homo sapiens
tgttcttcctctaatgctgcctgcttttccctttcatccactttggtcagagatagaccagtgcttgccagggaagaca

SEQ ID NO: 27006 - DNA, 80 bp, Homo sapiens
taatgctgcctgcttttccctttcatccactttggtcagagatagaccagtgcttgccagggaagacactgcattggaaa

SEQ ID NO: 27007 - DNA, 76 bp, Homo sapiens
gcttttccctttcatccactttggtcagagatagaccagtgcttgccagggaagacactgcattggaaagtgtagt

SEQ ID NO: 27008 - DNA, 79 bp, Homo sapiens
ttcatccactttggtcagagatagaccagtgcttgccagggaagacactgcattggaaagtgtagttgccctaggataa

SEQ ID NO: 27009 - DNA, 77 bp, Homo sapiens
actttggtcagagatagaccagtgcttgccagggaagacactgcattggaaagtgtagttgccctaggataattgaa

SEQ ID NO: 27010 - DNA, 78 bp, Homo sapiens
agagatagaccagtgcttgccagggaagacactgcattggaaagtgtagttgccctaggataattgaacagagataat

SEQ ID NO: 27011 - DNA, 75 bp, Homo sapiens
agtgcttgccagggaagacactgcattggaaagtgtagttgccctaggataattgaacagagataatttggcttt

SEQ ID NO: 27012 - DNA, 80 bp, Homo sapiens
ttcatctactgcctcagaaaaatcactctggctttttggcctacaaagaatgatatacctgcttgcagctgtagaatctt

SEQ ID NO: 27013 - DNA, 75 bp, Homo sapiens
agaaaaatcactctggctttttggcctacaaagaatgatatacctgcttgcagctgtagaatctttgattttctt

SEQ ID NO: 27014 - DNA, 75 bp, Homo sapiens
actctggctttttggcctacaaagaatgatatacctgcttgcagctgtagaatctttgattttctttccttccaa

SEQ ID NO: 27015 - DNA, 75 bp, Homo sapiens
ttttggcctacaaagaatgatatacctgcttgcagctgtagaatctttgattttctttccttccaaggaagctaa

SEQ ID NO: 27016 - DNA, 76 bp, Homo sapiens
tacaaagaatgatatacctgcttgcagctgtagaatctttgattttctttccttccaaggaagctaaatgttgttc

SEQ ID NO: 27017 - DNA, 76 bp, Homo sapiens
atatacctgcttgcagctgtagaatctttgattttctttccttccaaggaagctaaatgttgttccaaagcatcaa

SEQ ID NO: 27018 - DNA, 77 bp, Homo sapiens
ttgcagctgtagaatctttgattttctttccttccaaggaagctaaatgttgttccaaagcatcaagaagactgcta

SEQ ID NO: 27019 - DNA, 72 bp, Homo sapiens
gtagaatctttgattttctttccttccaaggaagctaaatgttgttccaaagcatcaagaagactgctaggg

SEQ ID NO: 27020 - DNA, 74 bp, Homo sapiens
ttctttccttccaaggaagctaaatgttgttccaaagcatcaagaagactgctaggggcctgcaattgtacaaa

SEQ ID NO: 27021 - DNA, 75 bp, Homo sapiens
ttccaaggaagctaaatgttgttccaaagcatcaagaagactgctaggggcctgcaattgtacaaatattaagaa

SEQ ID NO: 27022 - DNA, 76 bp, Homo sapiens
ctaaatgttgttccaaagcatcaagaagactgctaggggcctgcaattgtacaaatattaagaatttcatgataat

SEQ ID NO: 27023 - DNA, 77 bp, Homo sapiens
ttgttccaaagcatcaagaagactgctaggggcctgcaattgtacaaatattaagaatttcatgataattaggccac

SEQ ID NO: 27024 - DNA, 74 bp, Homo sapiens
ggctatatgttacttatcttaatactcttcacaacttgtacacaacagatagtggattggtattttaacaataa

SEQ ID NO: 27025 - DNA, 71 bp, Homo sapiens
cttatcttaatactcttcacaacttgtacacaacagatagtggattggtattttaacaataaacttacctg

SEQ ID NO: 27026 - DNA, 71 bp, Homo sapiens
actcttcacaacttgtacacaacagatagtggattggtattttaacaataaacttacctgtgaaaggtctg

SEQ ID NO: 27027 - DNA, 71 bp, Homo sapiens
acttgtacacaacagatagtggattggtattttaacaataaacttacctgtgaaaggtctggtatatcacc

SEQ ID NO: 27028 - DNA, 72 bp, Homo sapiens
acaacagatagtggattggtattttaacaataaacttacctgtgaaaggtctggtatatcacctctgtcaat

SEQ ID NO: 27029 - DNA, 70 bp, Homo sapiens
agtggattggtattttaacaataaacttacctgtgaaaggtctggtatatcacctctgtcaattccaact

SEQ ID NO: 27030 - DNA, 73 bp, Homo sapiens
ttaacaataaacttacctgtgaaaggtctggtatatcacctctgtcaattccaacttgctgtaagaaaagcat

SEQ ID NO: 27031 - DNA, 73 bp, Homo sapiens
ataaacttacctgtgaaaggtctggtatatcacctctgtcaattccaacttgctgtaagaaaagcattgtatt

SEQ ID NO: 27032 - DNA, 75 bp, Homo sapiens
ctgtgaaaggtctggtatatcacctctgtcaattccaacttgctgtaagaaaagcattgtatttaataaattata

SEQ ID NO: 27033 - DNA, 74 bp, Homo sapiens
tctggtatatcacctctgtcaattccaacttgctgtaagaaaagcattgtatttaataaattataataaaaata

SEQ ID NO: 27034 - DNA, 70 bp, Homo sapiens
acttacagacaaaaaggcaagttaggagacagtcacttaaagacagtttacctctgcaactttgaggaac

SEQ ID NO: 27035 - DNA, 71 bp, Homo sapiens
aaaaaggcaagttaggagacagtcacttaaagacagtttacctctgcaactttgaggaactctgagattct

SEQ ID NO: 27036 - DNA, 75 bp, Homo sapiens
ttaggagacagtcacttaaagacagtttacctctgcaactttgaggaactctgagattcttgtcatcctagttag

SEQ ID NO: 27037 - DNA, 73 bp, Homo sapiens
cttaaagacagtttacctctgcaactttgaggaactctgagattcttgtcatcctagttaggaacttcttata

SEQ ID NO: 27038 - DNA, 76 bp, Homo sapiens
acagtttacctctgcaactttgaggaactctgagattcttgtcatcctagttaggaacttcttatagatgtcaaga

SEQ ID NO: 27039 - DNA, 78 bp, Homo sapiens
tctgcaactttgaggaactctgagattcttgtcatcctagttaggaacttcttatagatgtcaagaccttctttgcat

SEQ ID NO: 27040 - DNA, 74 bp, Homo sapiens
aggaactctgagattcttgtcatcctagttaggaacttcttatagatgtcaagaccttctttgcattggttctt

SEQ ID NO: 27041 - DNA, 76 bp, Homo sapiens
gagattcttgtcatcctagttaggaacttcttatagatgtcaagaccttctttgcattggttctttttcatatcaa

SEQ ID NO: 27042 - DNA, 74 bp, Homo sapiens
ttgtcatcctagttaggaacttcttatagatgtcaagaccttctttgcattggttctttttcatatcaaaatat

SEQ ID NO: 27043 - DNA, 73 bp, Homo sapiens
gttaggaacttcttatagatgtcaagaccttctttgcattggttctttttcatatcaaaatatttttctgaca

SEQ ID NO: 27044 - DNA, 73 bp, Homo sapiens
ttcttatagatgtcaagaccttctttgcattggttctttttcatatcaaaatatttttctgacaaaataaatg

SEQ ID NO: 27045 - DNA, 70 bp, Homo sapiens
tgtcaagaccttctttgcattggttctttttcatatcaaaatatttttctgacaaaataaatgtaaaaat

SEQ ID NO: 27046 - DNA, 75 bp, Homo sapiens
tccatatgacacaagataagaaatgttattaggctacagcagtatttacccaacaaattaataattccttcattg

SEQ ID NO: 27047 - DNA, 76 bp, Homo sapiens
cacaagataagaaatgttattaggctacagcagtatttacccaacaaattaataattccttcattgtatgctgcaa

SEQ ID NO: 27048 - DNA, 77 bp, Homo sapiens
atgttattaggctacagcagtatttacccaacaaattaataattccttcattgtatgctgcaaacagtctaatggca

SEQ ID NO: 27049 - DNA, 78 bp, Homo sapiens
ttaggctacagcagtatttacccaacaaattaataattccttcattgtatgctgcaaacagtctaatggcatctttga

SEQ ID NO: 27050 - DNA, 78 bp, Homo sapiens
gtatttacccaacaaattaataattccttcattgtatgctgcaaacagtctaatggcatctttgaacaggagcatgaa

SEQ ID NO: 27051 - DNA, 81 bp, Homo sapiens
acaaattaataattccttcattgtatgctgcaaacagtctaatggcatctttgaacaggagcatgaaggcagcatttatta

SEQ ID NO: 27052 - DNA, 80 bp, Homo sapiens
ataattccttcattgtatgctgcaaacagtctaatggcatctttgaacaggagcatgaaggcagcatttattaccccatt

SEQ ID NO: 27053 - DNA, 80 bp, Homo sapiens
attgtatgctgcaaacagtctaatggcatctttgaacaggagcatgaaggcagcatttattaccccatttgtaagttcat

SEQ ID NO: 27054 - DNA, 77 bp, Homo sapiens
aaacagtctaatggcatctttgaacaggagcatgaaggcagcatttattaccccatttgtaagttcattgctattaa

SEQ ID NO: 27055 - DNA, 76 bp, Homo sapiens
atggcatctttgaacaggagcatgaaggcagcatttattaccccatttgtaagttcattgctattaacctagggaa

SEQ ID NO: 27056 - DNA, 72 bp, Homo sapiens
tttgaacaggagcatgaaggcagcatttattaccccatttgtaagttcattgctattaacctagggaaaaat

SEQ ID NO: 27057 - DNA, 71 bp, Homo sapiens
aggagcatgaaggcagcatttattaccccatttgtaagttcattgctattaacctagggaaaaattggaaa

SEQ ID NO: 27058 - DNA, 67 bp, Homo sapiens
aggcagcatttattaccccatttgtaagttcattgctattaacctagggaaaaattggaaaataaaa

SEQ ID NO: 27059 - DNA, 72 bp, Homo sapiens
tataatgacctaattttttaaaatcttaaattacaaaagcataactcacattaaaatcaagaagtgcatcca

SEQ ID NO: 27060 - DNA, 74 bp, Homo sapiens
taattttttaaaatcttaaattacaaaagcataactcacattaaaatcaagaagtgcatccatctgattctgaa

SEQ ID NO: 27061 - DNA, 76 bp, Homo sapiens
aaatcttaaattacaaaagcataactcacattaaaatcaagaagtgcatccatctgattctgaataattggtacag

SEQ ID NO: 27062 - DNA, 76 bp, Homo sapiens
ttacaaaagcataactcacattaaaatcaagaagtgcatccatctgattctgaataattggtacagtttttaggag

SEQ ID NO: 27063 - DNA, 76 bp, Homo sapiens
gcataactcacattaaaatcaagaagtgcatccatctgattctgaataattggtacagtttttaggagtttttctg

SEQ ID NO: 27064 - DNA, 75 bp, Homo sapiens
cacattaaaatcaagaagtgcatccatctgattctgaataattggtacagtttttaggagtttttctgtgttcat

SEQ ID NO: 27065 - DNA, 76 bp, Homo sapiens
caagaagtgcatccatctgattctgaataattggtacagtttttaggagtttttctgtgttcattgttctcataac

SEQ ID NO: 27066 - DNA, 76 bp, Homo sapiens
atccatctgattctgaataattggtacagtttttaggagtttttctgtgttcattgttctcataactccatcagcc

SEQ ID NO: 27067 - DNA, 75 bp, Homo sapiens
tctgaataattggtacagtttttaggagtttttctgtgttcattgttctcataactccatcagccctgttatgaa

SEQ ID NO: 27068 - DNA, 71 bp, Homo sapiens
aattggtacagtttttaggagtttttctgtgttcattgttctcataactccatcagccctgttatgaaaaa

SEQ ID NO: 27069 - DNA, 71 bp, Homo sapiens
gtttttaggagtttttctgtgttcattgttctcataactccatcagccctgttatgaaaaaaccagagaaa

SEQ ID NO: 27070 - DNA, 70 bp, Homo sapiens
ttttaaaaattcaaatcaattagatgtcaaaaaaagcttaactcaccctctcttcacttttgtgaaatca

SEQ ID NO: 27071 - DNA, 75 bp, Homo sapiens
tcaaatcaattagatgtcaaaaaaagcttaactcaccctctcttcacttttgtgaaatcaaatgcaacttgtctg

SEQ ID NO: 27072 - DNA, 74 bp, Homo sapiens
ttagatgtcaaaaaaagcttaactcaccctctcttcacttttgtgaaatcaaatgcaacttgtctgtatgaaac

SEQ ID NO: 27073 - DNA, 74 bp, Homo sapiens
aaaaagcttaactcaccctctcttcacttttgtgaaatcaaatgcaacttgtctgtatgaaactgctttctcat

SEQ ID NO: 27074 - DNA, 76 bp, Homo sapiens
gcttaactcaccctctcttcacttttgtgaaatcaaatgcaacttgtctgtatgaaactgctttctcatttaaata

SEQ ID NO: 27075 - DNA, 76 bp, Homo sapiens
ctcttcacttttgtgaaatcaaatgcaacttgtctgtatgaaactgctttctcatttaaatatctactataccgcc

SEQ ID NO: 27076 - DNA, 78 bp, Homo sapiens
tgtgaaatcaaatgcaacttgtctgtatgaaactgctttctcatttaaatatctactataccgcctaataaatgtaga

SEQ ID NO: 27077 - DNA, 79 bp, Homo sapiens
aatgcaacttgtctgtatgaaactgctttctcatttaaatatctactataccgcctaataaatgtagacatgtcatatc

SEQ ID NO: 27078 - DNA, 77 bp, Homo sapiens
aacttgtctgtatgaaactgctttctcatttaaatatctactataccgcctaataaatgtagacatgtcatatcctg

SEQ ID NO: 27079 - DNA, 74 bp, Homo sapiens
gaaactgctttctcatttaaatatctactataccgcctaataaatgtagacatgtcatatcctgtaaaaaaaca

SEQ ID NO: 27080 - DNA, 71 bp, Homo sapiens
ctttctcatttaaatatctactataccgcctaataaatgtagacatgtcatatcctgtaaaaaaacaaaaa

SEQ ID NO: 27081 - DNA, 75 bp, Homo sapiens
ctggagtaatcatcatgtgggtgtcattcttttgattttctataatgtaaaagttatctttaccttgcaatccac

SEQ ID NO: 27082 - DNA, 74 bp, Homo sapiens
catcatgtgggtgtcattcttttgattttctataatgtaaaagttatctttaccttgcaatccacttttatcca

SEQ ID NO: 27083 - DNA, 69 bp, Homo sapiens
cattcttttgattttctataatgtaaaagttatctttaccttgcaatccacttttatccaaaaaattgc

SEQ ID NO: 27084 - DNA, 68 bp, Homo sapiens
gattttctataatgtaaaagttatctttaccttgcaatccacttttatccaaaaaattgcttaagtta

SEQ ID NO: 27085 - DNA, 66 bp, Homo sapiens
tgtaaaagttatctttaccttgcaatccacttttatccaaaaaattgcttaagttaaacaacgtgt

SEQ ID NO: 27086 - DNA, 69 bp, Homo sapiens
tatctttaccttgcaatccacttttatccaaaaaattgcttaagttaaacaacgtgtttcttgaagcca

SEQ ID NO: 27087 - DNA, 69 bp, Homo sapiens
ccttgcaatccacttttatccaaaaaattgcttaagttaaacaacgtgtttcttgaagccaaatactga

SEQ ID NO: 27088 - DNA, 67 bp, Homo sapiens
ttttatccaaaaaattgcttaagttaaacaacgtgtttcttgaagccaaatactgaataaaacgctg

SEQ ID NO: 27089 - DNA, 66 bp, Homo sapiens
ccaaaaaattgcttaagttaaacaacgtgtttcttgaagccaaatactgaataaaacgctggaaaa

SEQ ID NO: 27090 - DNA, 65 bp, Homo sapiens
gcttaagttaaacaacgtgtttcttgaagccaaatactgaataaaacgctggaaaaaaaaaatta

SEQ ID NO: 27091 - DNA, 78 bp, Homo sapiens
acaataagtcaacacatcagtatacttgttcaataaaaattctgcttacctcatttccatacaccatcaaatgatgag

SEQ ID NO: 27092 - DNA, 81 bp, Homo sapiens
tcaacacatcagtatacttgttcaataaaaattctgcttacctcatttccatacaccatcaaatgatgagttgtaatgaga

SEQ ID NO: 27093 - DNA, 77 bp, Homo sapiens
acttgttcaataaaaattctgcttacctcatttccatacaccatcaaatgatgagttgtaatgagagatttgaagac

SEQ ID NO: 27094 - DNA, 76 bp, Homo sapiens
aataaaaattctgcttacctcatttccatacaccatcaaatgatgagttgtaatgagagatttgaagaccaccacc

SEQ ID NO: 27095 - DNA, 78 bp, Homo sapiens
tgcttacctcatttccatacaccatcaaatgatgagttgtaatgagagatttgaagaccaccacccaactactattag

SEQ ID NO: 27096 - DNA, 75 bp, Homo sapiens
tttccatacaccatcaaatgatgagttgtaatgagagatttgaagaccaccacccaactactattagtagttctt

SEQ ID NO: 27097 - DNA, 76 bp, Homo sapiens
tacaccatcaaatgatgagttgtaatgagagatttgaagaccaccacccaactactattagtagttctttcaaata

SEQ ID NO: 27098 - DNA, 73 bp, Homo sapiens
aatgatgagttgtaatgagagatttgaagaccaccacccaactactattagtagttctttcaaataaactgtc

SEQ ID NO: 27099 - DNA, 73 bp, Homo sapiens
ttgtaatgagagatttgaagaccaccacccaactactattagtagttctttcaaataaactgtctgccaactg

SEQ ID NO: 27100 - DNA, 72 bp, Homo sapiens
atttgaagaccaccacccaactactattagtagttctttcaaataaactgtctgccaactgtgggatgttca

SEQ ID NO: 27101 - DNA, 74 bp, Homo sapiens
accacccaactactattagtagttctttcaaataaactgtctgccaactgtgggatgttcacattcatctcatt

SEQ ID NO: 27102 - DNA, 79 bp, Homo sapiens
tactattagtagttctttcaaataaactgtctgccaactgtgggatgttcacattcatctcatttgtgcactgaattaa

SEQ ID NO: 27103 - DNA, 80 bp, Homo sapiens
ttctttcaaataaactgtctgccaactgtgggatgttcacattcatctcatttgtgcactgaattaagtctgcaataaaa

SEQ ID NO: 27104 - DNA, 77 bp, Homo sapiens
aaataaactgtctgccaactgtgggatgttcacattcatctcatttgtgcactgaattaagtctgcaataaaaaatt

SEQ ID NO: 27105 - DNA, 78 bp, Homo sapiens
gtctgccaactgtgggatgttcacattcatctcatttgtgcactgaattaagtctgcaataaaaaatttttaaatgat

SEQ ID NO: 27106 - DNA, 69 bp, Homo sapiens
cgggtcgcgcgggcgccggggagcgggggccgcggtcggcttcactcacagtccaggtgctttttcttg

SEQ ID NO: 27107 - DNA, 72 bp, Homo sapiens
agcgggggccgcggtcggcttcactcacagtccaggtgctttttcttgggccccatgatctcgtgggtcgtg

SEQ ID NO: 27108 - DNA, 76 bp, Homo sapiens
ggtcggcttcactcacagtccaggtgctttttcttgggccccatgatctcgtgggtcgtggccttgcatactgtct

SEQ ID NO: 27109 - DNA, 77 bp, Homo sapiens
ttcactcacagtccaggtgctttttcttgggccccatgatctcgtgggtcgtggccttgcatactgtcttggatacg

SEQ ID NO: 27110 - DNA, 77 bp, Homo sapiens
caggtgctttttcttgggccccatgatctcgtgggtcgtggccttgcatactgtcttggatacggcagagccggtga

SEQ ID NO: 27111 - DNA, 78 bp, Homo sapiens
tttttcttgggccccatgatctcgtgggtcgtggccttgcatactgtcttggatacggcagagccggtgacactgtgc

SEQ ID NO: 27112 - DNA, 82 bp, Homo sapiens
cccatgatctcgtgggtcgtggccttgcatactgtcttggatacggcagagccggtgacactgtgctgggcggcagtgattc

SEQ ID NO: 27113 - DNA, 80 bp, Homo sapiens
atctcgtgggtcgtggccttgcatactgtcttggatacggcagagccggtgacactgtgctgggcggcagtgattcggtc

SEQ ID NO: 27114 - DNA, 82 bp, Homo sapiens
tcgtggccttgcatactgtcttggatacggcagagccggtgacactgtgctgggcggcagtgattcggtccgtcaggctctg

SEQ ID NO: 27115 - DNA, 80 bp, Homo sapiens
atactgtcttggatacggcagagccggtgacactgtgctgggcggcagtgattcggtccgtcaggctctggccggacatc

SEQ ID NO: 27116 - DNA, 83 bp, Homo sapiens
ttggatacggcagagccggtgacactgtgctgggcggcagtgattcggtccgtcaggctctggccggacatctctgcagctcc

SEQ ID NO: 27117 - DNA, 81 bp, Homo sapiens
agagccggtgacactgtgctgggcggcagtgattcggtccgtcaggctctggccggacatctctgcagctcctccaccacc

SEQ ID NO: 27118 - DNA, 80 bp, Homo sapiens
actgtgctgggcggcagtgattcggtccgtcaggctctggccggacatctctgcagctcctccaccaccccacccgctca

SEQ ID NO: 27119 - DNA, 80 bp, Homo sapiens
tgggcggcagtgattcggtccgtcaggctctggccggacatctctgcagctcctccaccaccccacccgctcagcagccg

SEQ ID NO: 27120 - DNA, 78 bp, Homo sapiens
tgattcggtccgtcaggctctggccggacatctctgcagctcctccaccaccccacccgctcagcagccggcggggac

SEQ ID NO: 27121 - DNA, 76 bp, Homo sapiens
cgtcaggctctggccggacatctctgcagctcctccaccaccccacccgctcagcagccggcggggactgggaccc

SEQ ID NO: 27122 - DNA, 74 bp, Homo sapiens
ggacatctctgcagctcctccaccaccccacccgctcagcagccggcggggactgggacccccaagagccggag

SEQ ID NO: 27123 - DNA, 73 bp, Homo sapiens
tctctgcagctcctccaccaccccacccgctcagcagccggcggggactgggacccccaagagccggagggtc

SEQ ID NO: 27124 - DNA, 66 bp, Homo sapiens
ccaccaccccacccgctcagcagccggcggggactgggacccccaagagccggagggtccccaccc

SEQ ID NO: 27125 - DNA, 65 bp, Homo sapiens
cccacccgctcagcagccggcggggactgggacccccaagagccggagggtccccaccccccacc

SEQ ID NO: 27126 - DNA, 66 bp, Homo sapiens
tcagcagccggcggggactgggacccccaagagccggagggtccccaccccccaccgcacccccta

SEQ ID NO: 27127 - DNA, 61 bp, Homo sapiens
gggactgggacccccaagagccggagggtccccaccccccaccgcaccccctacccccacc

SEQ ID NO: 27128 - DNA, 61 bp, Homo sapiens
ccccaagagccggagggtccccaccccccaccgcaccccctacccccaccggctccttccc

SEQ ID NO: 27129 - DNA, 62 bp, Homo sapiens
agccggagggtccccaccccccaccgcaccccctacccccaccggctccttccccgcctgcc

SEQ ID NO: 27130 - DNA, 63 bp, Homo sapiens
caccccccaccgcaccccctacccccaccggctccttccccgcctgccggcctggggcgcggt

SEQ ID NO: 27131 - DNA, 63 bp, Homo sapiens
cccaccgcaccccctacccccaccggctccttccccgcctgccggcctggggcgcggttcggg

SEQ ID NO: 27132 - DNA, 69 bp, Homo sapiens
tacccccaccggctccttccccgcctgccggcctggggcgcggttcggggccgcgcgctgccaccagtc

SEQ ID NO: 27133 - DNA, 71 bp, Homo sapiens
accggctccttccccgcctgccggcctggggcgcggttcggggccgcgcgctgccaccagtccagagagaa

SEQ ID NO: 27134 - DNA, 73 bp, Homo sapiens
cgcctgccggcctggggcgcggttcggggccgcgcgctgccaccagtccagagagaaccggctcgtgtcaccc

SEQ ID NO: 27135 - DNA, 74 bp, Homo sapiens
ggttcggggccgcgcgctgccaccagtccagagagaaccggctcgtgtcacccgcggagtcggacaagatgtcg

SEQ ID NO: 27136 - DNA, 75 bp, Homo sapiens
ccgcgcgctgccaccagtccagagagaaccggctcgtgtcacccgcggagtcggacaagatgtcgggcactccct

SEQ ID NO: 27137 - DNA, 73 bp, Homo sapiens
agagagaaccggctcgtgtcacccgcggagtcggacaagatgtcgggcactcccttgcccccgcctcagttca

SEQ ID NO: 27138 - DNA, 72 bp, Homo sapiens
aaccggctcgtgtcacccgcggagtcggacaagatgtcgggcactcccttgcccccgcctcagttcagccca

SEQ ID NO: 27139 - DNA, 71 bp, Homo sapiens
tgtcacccgcggagtcggacaagatgtcgggcactcccttgcccccgcctcagttcagcccaccccttccc

SEQ ID NO: 27140 - DNA, 71 bp, Homo sapiens
agtcggacaagatgtcgggcactcccttgcccccgcctcagttcagcccaccccttcccgggtcagctgga

SEQ ID NO: 27141 - DNA, 71 bp, Homo sapiens
aagatgtcgggcactcccttgcccccgcctcagttcagcccaccccttcccgggtcagctggagccgggca

SEQ ID NO: 27142 - DNA, 69 bp, Homo sapiens
tcccttgcccccgcctcagttcagcccaccccttcccgggtcagctggagccgggcagggtaagaggaa

SEQ ID NO: 27143 - DNA, 74 bp, Homo sapiens
cgcctcagttcagcccaccccttcccgggtcagctggagccgggcagggtaagaggaacaggcagctgcaggaa

SEQ ID NO: 27144 - DNA, 72 bp, Homo sapiens
agttcagcccaccccttcccgggtcagctggagccgggcagggtaagaggaacaggcagctgcaggaaaatg

SEQ ID NO: 27145 - DNA, 75 bp, Homo sapiens
cttcccgggtcagctggagccgggcagggtaagaggaacaggcagctgcaggaaaatggcggcgccaggctcctc

SEQ ID NO: 27146 - DNA, 78 bp, Homo sapiens
tcagctggagccgggcagggtaagaggaacaggcagctgcaggaaaatggcggcgccaggctcctcctcggagctttc

SEQ ID NO: 27147 - DNA, 73 bp, Homo sapiens
agccgggcagggtaagaggaacaggcagctgcaggaaaatggcggcgccaggctcctcctcggagctttccgg

SEQ ID NO: 27148 - DNA, 67 bp, Homo sapiens
aggcctctctctaccatggaactattgaagctctccttatttacttaccccagaaaggttttttccc

SEQ ID NO: 27149 - DNA, 65 bp, Homo sapiens
tctctaccatggaactattgaagctctccttatttacttaccccagaaaggttttttcccccctt

SEQ ID NO: 27150 - DNA, 63 bp, Homo sapiens
aactattgaagctctccttatttacttaccccagaaaggttttttcccccctttccttgagag

SEQ ID NO: 27151 - DNA, 65 bp, Homo sapiens
tctccttatttacttaccccagaaaggttttttcccccctttccttgagaggcttggaaatgtca

SEQ ID NO: 27152 - DNA, 64 bp, Homo sapiens
tatttacttaccccagaaaggttttttcccccctttccttgagaggcttggaaatgtcacctgg

SEQ ID NO: 27153 - DNA, 65 bp, Homo sapiens
agaaaggttttttcccccctttccttgagaggcttggaaatgtcacctggttttgtttatctcta

SEQ ID NO: 27154 - DNA, 66 bp, Homo sapiens
tttttcccccctttccttgagaggcttggaaatgtcacctggttttgtttatctctactccgaaaa

SEQ ID NO: 27155 - DNA, 67 bp, Homo sapiens
cctttccttgagaggcttggaaatgtcacctggttttgtttatctctactccgaaaacccgacacgt

SEQ ID NO: 27156 - DNA, 70 bp, Homo sapiens
gcttggaaatgtcacctggttttgtttatctctactccgaaaacccgacacgttgctgccattctaaatt

SEQ ID NO: 27157 - DNA, 70 bp, Homo sapiens
aaatgtcacctggttttgtttatctctactccgaaaacccgacacgttgctgccattctaaatttagata

SEQ ID NO: 27158 - DNA, 71 bp, Homo sapiens
tttgtttatctctactccgaaaacccgacacgttgctgccattctaaatttagatactagctggccggtat

SEQ ID NO: 27159 - DNA, 75 bp, Homo sapiens
tatctctactccgaaaacccgacacgttgctgccattctaaatttagatactagctggccggtattcattctcta

SEQ ID NO: 27160 - DNA, 73 bp, Homo sapiens
aaacccgacacgttgctgccattctaaatttagatactagctggccggtattcattctctagggtgtggaata

SEQ ID NO: 27161 - DNA, 74 bp, Homo sapiens
acgttgctgccattctaaatttagatactagctggccggtattcattctctagggtgtggaataggacaggaaa

SEQ ID NO: 27162 - DNA, 75 bp, Homo sapiens
attctaaatttagatactagctggccggtattcattctctagggtgtggaataggacaggaaacacatagcttca

SEQ ID NO: 27163 - DNA, 75 bp, Homo sapiens
aaatttagatactagctggccggtattcattctctagggtgtggaataggacaggaaacacatagcttcactgga

SEQ ID NO: 27164 - DNA, 74 bp, Homo sapiens
actagctggccggtattcattctctagggtgtggaataggacaggaaacacatagcttcactggaatttgaaaa

SEQ ID NO: 27165 - DNA, 73 bp, Homo sapiens
tattcattctctagggtgtggaataggacaggaaacacatagcttcactggaatttgaaaagggaagtagtag

SEQ ID NO: 27166 - DNA, 72 bp, Homo sapiens
actaataaaatttacttcttaagtcaattcaagcatagactagggttaacagtagagactctggttcagagc

SEQ ID NO: 27167 - DNA, 73 bp, Homo sapiens
aaaatttacttcttaagtcaattcaagcatagactagggttaacagtagagactctggttcagagctcacctc

SEQ ID NO: 27168 - DNA, 77 bp, Homo sapiens
ttaagtcaattcaagcatagactagggttaacagtagagactctggttcagagctcacctctgccactttctagtta

SEQ ID NO: 27169 - DNA, 75 bp, Homo sapiens
agcatagactagggttaacagtagagactctggttcagagctcacctctgccactttctagttatgtaacgttta

SEQ ID NO: 27170 - DNA, 74 bp, Homo sapiens
agactagggttaacagtagagactctggttcagagctcacctctgccactttctagttatgtaacgtttatctg

SEQ ID NO: 27171 - DNA, 78 bp, Homo sapiens
taacagtagagactctggttcagagctcacctctgccactttctagttatgtaacgtttatctggctccccatctgta

SEQ ID NO: 27172 - DNA, 75 bp, Homo sapiens
actctggttcagagctcacctctgccactttctagttatgtaacgtttatctggctccccatctgtaaaatgaaa

SEQ ID NO: 27173 - DNA, 72 bp, Homo sapiens
tatcttcccccgtttcctgggacattggtggtgtagcccattccacagactttcgctccctagcagcgggtc

SEQ ID NO: 27174 - DNA, 74 bp, Homo sapiens
tttcctgggacattggtggtgtagcccattccacagactttcgctccctagcagcgggtcggagatcgaaggaa

SEQ ID NO: 27175 - DNA, 72 bp, Homo sapiens
attggtggtgtagcccattccacagactttcgctccctagcagcgggtcggagatcgaaggaacgggccaat

SEQ ID NO: 27176 - DNA, 75 bp, Homo sapiens
tgtagcccattccacagactttcgctccctagcagcgggtcggagatcgaaggaacgggccaattgcggctgaaa

SEQ ID NO: 27177 - DNA, 72 bp, Homo sapiens
ttccacagactttcgctccctagcagcgggtcggagatcgaaggaacgggccaattgcggctgaaacgtctt

SEQ ID NO: 27178 - DNA, 71 bp, Homo sapiens
ctttcgctccctagcagcgggtcggagatcgaaggaacgggccaattgcggctgaaacgtctttggaagga

SEQ ID NO: 27179 - DNA, 69 bp, Homo sapiens
ctagcagcgggtcggagatcgaaggaacgggccaattgcggctgaaacgtctttggaaggaggaagggg

SEQ ID NO: 27180 - DNA, 71 bp, Homo sapiens
tcggagatcgaaggaacgggccaattgcggctgaaacgtctttggaaggaggaagggggtgagggagcatc

SEQ ID NO: 27181 - DNA, 67 bp, Homo sapiens
aacgggccaattgcggctgaaacgtctttggaaggaggaagggggtgagggagcatccctttgagtt

SEQ ID NO: 27182 - DNA, 69 bp, Homo sapiens
aattgcggctgaaacgtctttggaaggaggaagggggtgagggagcatccctttgagtttcgcctcttc

SEQ ID NO: 27183 - DNA, 67 bp, Homo sapiens
aaacgtctttggaaggaggaagggggtgagggagcatccctttgagtttcgcctcttctcgaggcgg

SEQ ID NO: 27184 - DNA, 69 bp, Homo sapiens
tttggaaggaggaagggggtgagggagcatccctttgagtttcgcctcttctcgaggcggtggtgggaa

SEQ ID NO: 27185 - DNA, 70 bp, Homo sapiens
gggggtgagggagcatccctttgagtttcgcctcttctcgaggcggtggtgggaagggagacatacttaa

SEQ ID NO: 27186 - DNA, 73 bp, Homo sapiens
gagcatccctttgagtttcgcctcttctcgaggcggtggtgggaagggagacatacttaatactgccctctta

SEQ ID NO: 27187 - DNA, 71 bp, Homo sapiens
ctttgagtttcgcctcttctcgaggcggtggtgggaagggagacatacttaatactgccctcttaatccaa

SEQ ID NO: 27188 - DNA, 70 bp, Homo sapiens
cctcttctcgaggcggtggtgggaagggagacatacttaatactgccctcttaatccaacggaccttaca

SEQ ID NO: 27189 - DNA, 70 bp, Homo sapiens
aggcggtggtgggaagggagacatacttaatactgccctcttaatccaacggaccttacatcgtgtagac

SEQ ID NO: 27190 - DNA, 70 bp, Homo sapiens
gggaagggagacatacttaatactgccctcttaatccaacggaccttacatcgtgtagactgccgggagg

SEQ ID NO: 27191 - DNA, 70 bp, Homo sapiens
acatacttaatactgccctcttaatccaacggaccttacatcgtgtagactgccgggagggcggcgggaa

SEQ ID NO: 27192 - DNA, 68 bp, Homo sapiens
cttaatactgccctcttaatccaacggaccttacatcgtgtagactgccgggagggcggcgggaaaag

SEQ ID NO: 27193 - DNA, 67 bp, Homo sapiens
ttaatccaacggaccttacatcgtgtagactgccgggagggcggcgggaaaagggcaagacgggagt

SEQ ID NO: 27194 - DNA, 66 bp, Homo sapiens
ccaacggaccttacatcgtgtagactgccgggagggcggcgggaaaagggcaagacgggagttggg

SEQ ID NO: 27195 - DNA, 67 bp, Homo sapiens
ttacatcgtgtagactgccgggagggcggcgggaaaagggcaagacgggagttggggaagggaagga

SEQ ID NO: 27196 - DNA, 67 bp, Homo sapiens
tagactgccgggagggcggcgggaaaagggcaagacgggagttggggaagggaaggagccaggaagc

SEQ ID NO: 27197 - DNA, 65 bp, Homo sapiens
agggcggcgggaaaagggcaagacgggagttggggaagggaaggagccaggaagccgcgcgggag

SEQ ID NO: 27198 - DNA, 68 bp, Homo sapiens
gggaaaagggcaagacgggagttggggaagggaaggagccaggaagccgcgcgggagggcgcgcgcgc

SEQ ID NO: 27199 - DNA, 68 bp, Homo sapiens
acgggagttggggaagggaaggagccaggaagccgcgcgggagggcgcgcgcgcgcgcccctttttca

SEQ ID NO: 27200 - DNA, 71 bp, Homo sapiens
gggaagggaaggagccaggaagccgcgcgggagggcgcgcgcgcgcgcccctttttcagcagtgtggcggg

SEQ ID NO: 27201 - DNA, 74 bp, Homo sapiens
aaggagccaggaagccgcgcgggagggcgcgcgcgcgcgcccctttttcagcagtgtggcggggtcgcacgcac

SEQ ID NO: 27202 - DNA, 73 bp, Homo sapiens
aagccgcgcgggagggcgcgcgcgcgcgcccctttttcagcagtgtggcggggtcgcacgcacgcccgcctcg

SEQ ID NO: 27203 - DNA, 75 bp, Homo sapiens
agggcgcgcgcgcgcgcccctttttcagcagtgtggcggggtcgcacgcacgcccgcctcggcggctgggcgcga

SEQ ID NO: 27204 - DNA, 75 bp, Homo sapiens
cgcgcgcccctttttcagcagtgtggcggggtcgcacgcacgcccgcctcggcggctgggcgcgatttgcgacag

SEQ ID NO: 27205 - DNA, 73 bp, Homo sapiens
ccctttttcagcagtgtggcggggtcgcacgcacgcccgcctcggcggctgggcgcgatttgcgacagtgggg

SEQ ID NO: 27206 - DNA, 73 bp, Homo sapiens
agcagtgtggcggggtcgcacgcacgcccgcctcggcggctgggcgcgatttgcgacagtggggggggcggtg

SEQ ID NO: 27207 - DNA, 72 bp, Homo sapiens
gggtcgcacgcacgcccgcctcggcggctgggcgcgatttgcgacagtggggggggcggtggaggtggcggc

SEQ ID NO: 27208 - DNA, 72 bp, Homo sapiens
acgcacgcccgcctcggcggctgggcgcgatttgcgacagtggggggggcggtggaggtggcggcggcagcg

SEQ ID NO: 27209 - DNA, 73 bp, Homo sapiens
ctgggcgcgatttgcgacagtggggggggcggtggaggtggcggcggcagcggcaactttgcggcaagctcgg

SEQ ID NO: 27210 - DNA, 73 bp, Homo sapiens
gacagtggggggggcggtggaggtggcggcggcagcggcaactttgcggcaagctcgggccgggcttgcttga

SEQ ID NO: 27211 - DNA, 73 bp, Homo sapiens
ggggcggtggaggtggcggcggcagcggcaactttgcggcaagctcgggccgggcttgcttgacggcggtgtg

SEQ ID NO: 27212 - DNA, 73 bp, Homo sapiens
aggtggcggcggcagcggcaactttgcggcaagctcgggccgggcttgcttgacggcggtgtggcggaggccc

SEQ ID NO: 27213 - DNA, 72 bp, Homo sapiens
cggcggcagcggcaactttgcggcaagctcgggccgggcttgcttgacggcggtgtggcggaggccccgccc

SEQ ID NO: 27214 - DNA, 69 bp, Homo sapiens
aagctcgggccgggcttgcttgacggcggtgtggcggaggccccgccccaggcggcaggaacctggagg

SEQ ID NO: 27215 - DNA, 69 bp, Homo sapiens
ccgggcttgcttgacggcggtgtggcggaggccccgccccaggcggcaggaacctggagggaggcggag

SEQ ID NO: 27216 - DNA, 72 bp, Homo sapiens
ttgcttgacggcggtgtggcggaggccccgccccaggcggcaggaacctggagggaggcggaggaatatgtc

SEQ ID NO: 27217 - DNA, 71 bp, Homo sapiens
aggccccgccccaggcggcaggaacctggagggaggcggaggaatatgtccgagagggaagtgtcgactgc

SEQ ID NO: 27218 - DNA, 72 bp, Homo sapiens
aggcggcaggaacctggagggaggcggaggaatatgtccgagagggaagtgtcgactgcgccggcgggaaca

SEQ ID NO: 27219 - DNA, 75 bp, Homo sapiens
agggaggcggaggaatatgtccgagagggaagtgtcgactgcgccggcgggaacagacatgcctgcggccaagaa

SEQ ID NO: 27220 - DNA, 80 bp, Homo sapiens
aggaatatgtccgagagggaagtgtcgactgcgccggcgggaacagacatgcctgcggccaagaagcagaagctgagcag

SEQ ID NO: 27221 - DNA, 82 bp, Homo sapiens
agagggaagtgtcgactgcgccggcgggaacagacatgcctgcggccaagaagcagaagctgagcagtgacgagaacagcaa

SEQ ID NO: 27222 - DNA, 83 bp, Homo sapiens
aagtgtcgactgcgccggcgggaacagacatgcctgcggccaagaagcagaagctgagcagtgacgagaacagcaatccagac

SEQ ID NO: 27223 - DNA, 85 bp, Homo sapiens
cctgcggccaagaagcagaagctgagcagtgacgagaacagcaatccagacctctctggagacgagaatgtaagtgcagcttctg

SEQ ID NO: 27224 - DNA, 86 bp, Homo sapiens
tgagcagtgacgagaacagcaatccagacctctctggagacgagaatgtaagtgcagcttctggcagttacgagactgcggagtga

SEQ ID NO: 27225 - DNA, 76 bp, Homo sapiens
taaaaacagtattgctgtttcatgtaatttttcctcatttactgcttacaggatgacgctgtcagtatagaaagtg

SEQ ID NO: 27226 - DNA, 76 bp, Homo sapiens
tgtttcatgtaatttttcctcatttactgcttacaggatgacgctgtcagtatagaaagtggtacaaacactgaac

SEQ ID NO: 27227 - DNA, 75 bp, Homo sapiens
aatttttcctcatttactgcttacaggatgacgctgtcagtatagaaagtggtacaaacactgaacgccctgata

SEQ ID NO: 27228 - DNA, 78 bp, Homo sapiens
tcatttactgcttacaggatgacgctgtcagtatagaaagtggtacaaacactgaacgccctgatacacctacaaaca

SEQ ID NO: 27229 - DNA, 75 bp, Homo sapiens
cttacaggatgacgctgtcagtatagaaagtggtacaaacactgaacgccctgatacacctacaaacacgccaaa

SEQ ID NO: 27230 - DNA, 75 bp, Homo sapiens
acgctgtcagtatagaaagtggtacaaacactgaacgccctgatacacctacaaacacgccaaatgcacctggaa

SEQ ID NO: 27231 - DNA, 72 bp, Homo sapiens
agtatagaaagtggtacaaacactgaacgccctgatacacctacaaacacgccaaatgcacctggaaggaaa

SEQ ID NO: 27232 - DNA, 70 bp, Homo sapiens
aaagtggtacaaacactgaacgccctgatacacctacaaacacgccaaatgcacctggaaggaaaagttg

SEQ ID NO: 27233 - DNA, 68 bp, Homo sapiens
aaacactgaacgccctgatacacctacaaacacgccaaatgcacctggaaggaaaagttggggaaagg

SEQ ID NO: 27234 - DNA, 69 bp, Homo sapiens
tgatacacctacaaacacgccaaatgcacctggaaggaaaagttggggaaagggaaaatggaagtcaaa

SEQ ID NO: 27235 - DNA, 69 bp, Homo sapiens
tacaaacacgccaaatgcacctggaaggaaaagttggggaaagggaaaatggaagtcaaagaaatgcaa

SEQ ID NO: 27236 - DNA, 69 bp, Homo sapiens
caaatgcacctggaaggaaaagttggggaaagggaaaatggaagtcaaagaaatgcaaatattctttca

SEQ ID NO: 27237 - DNA, 67 bp, Homo sapiens
cacctggaaggaaaagttggggaaagggaaaatggaagtcaaagaaatgcaaatattctttcaaatg

SEQ ID NO: 27238 - DNA, 69 bp, Homo sapiens
agttggggaaagggaaaatggaagtcaaagaaatgcaaatattctttcaaatgtgtaaatagtctcaag

SEQ ID NO: 27239 - DNA, 73 bp, Homo sapiens
gggaaagggaaaatggaagtcaaagaaatgcaaatattctttcaaatgtgtaaatagtctcaaggtatgtgca

SEQ ID NO: 27240 - DNA, 72 bp, Homo sapiens
ggaagtcaaagaaatgcaaatattctttcaaatgtgtaaatagtctcaaggtatgtgcaaaaaaagatcctt

SEQ ID NO: 27241 - DNA, 76 bp, Homo sapiens
gaaatgcaaatattctttcaaatgtgtaaatagtctcaaggtatgtgcaaaaaaagatcctttgggctgaatgcta

SEQ ID NO: 27242 - DNA, 72 bp, Homo sapiens
ctggtttgtaagatacattaatcttttcttatttcatgattattttataggaagatcataaccaaccattgt

SEQ ID NO: 27243 - DNA, 73 bp, Homo sapiens
agatacattaatcttttcttatttcatgattattttataggaagatcataaccaaccattgtttggagttcag

SEQ ID NO: 27244 - DNA, 71 bp, Homo sapiens
atcttttcttatttcatgattattttataggaagatcataaccaaccattgtttggagttcagtttaactg

SEQ ID NO: 27245 - DNA, 73 bp, Homo sapiens
atttcatgattattttataggaagatcataaccaaccattgtttggagttcagtttaactggcacagtaaaga

SEQ ID NO: 27246 - DNA, 73 bp, Homo sapiens
tattttataggaagatcataaccaaccattgtttggagttcagtttaactggcacagtaaagaaggagatcca

SEQ ID NO: 27247 - DNA, 74 bp, Homo sapiens
tataggaagatcataaccaaccattgtttggagttcagtttaactggcacagtaaagaaggagatccattagtg

SEQ ID NO: 27248 - DNA, 73 bp, Homo sapiens
taaccaaccattgtttggagttcagtttaactggcacagtaaagaaggagatccattagtgtttgcaactgta

SEQ ID NO: 27249 - DNA, 74 bp, Homo sapiens
attgtttggagttcagtttaactggcacagtaaagaaggagatccattagtgtttgcaactgtaggaagcaaca

SEQ ID NO: 27250 - DNA, 76 bp, Homo sapiens
ttcagtttaactggcacagtaaagaaggagatccattagtgtttgcaactgtaggaagcaacagagtgagtgttaa

SEQ ID NO: 27251 - DNA, 75 bp, Homo sapiens
tggcacagtaaagaaggagatccattagtgtttgcaactgtaggaagcaacagagtgagtgttaaggggtctatt

SEQ ID NO: 27252 - DNA, 73 bp, Homo sapiens
taaagaaggagatccattagtgtttgcaactgtaggaagcaacagagtgagtgttaaggggtctatttagtat

SEQ ID NO: 27253 - DNA, 73 bp, Homo sapiens
atccattagtgtttgcaactgtaggaagcaacagagtgagtgttaaggggtctatttagtatttggcttgatt

SEQ ID NO: 27254 - DNA, 69 bp, Homo sapiens
aagttggagagagtatgttttctatacttgagatgaaatttactgtatttttattttcattaggttacc

SEQ ID NO: 27255 - DNA, 72 bp, Homo sapiens
ggagagagtatgttttctatacttgagatgaaatttactgtatttttattttcattaggttaccttgtatga

SEQ ID NO: 27256 - DNA, 75 bp, Homo sapiens
tctatacttgagatgaaatttactgtatttttattttcattaggttaccttgtatgaatgtcattcacaaggaga

SEQ ID NO: 27257 - DNA, 72 bp, Homo sapiens
gagatgaaatttactgtatttttattttcattaggttaccttgtatgaatgtcattcacaaggagaaatccg

SEQ ID NO: 27258 - DNA, 72 bp, Homo sapiens
tttactgtatttttattttcattaggttaccttgtatgaatgtcattcacaaggagaaatccggttgttgca

SEQ ID NO: 27259 - DNA, 73 bp, Homo sapiens
tttattttcattaggttaccttgtatgaatgtcattcacaaggagaaatccggttgttgcaatcttacgtgga

SEQ ID NO: 27260 - DNA, 79 bp, Homo sapiens
ttcattaggttaccttgtatgaatgtcattcacaaggagaaatccggttgttgcaatcttacgtggatgctgatgtatc

SEQ ID NO: 27261 - DNA, 77 bp, Homo sapiens
ttgtatgaatgtcattcacaaggagaaatccggttgttgcaatcttacgtggatgctgatgtatcctttcctgggtt

SEQ ID NO: 27262 - DNA, 74 bp, Homo sapiens
aatgtcattcacaaggagaaatccggttgttgcaatcttacgtggatgctgatgtatcctttcctgggttttta

SEQ ID NO: 27263 - DNA, 71 bp, Homo sapiens
acaaggagaaatccggttgttgcaatcttacgtggatgctgatgtatcctttcctgggtttttaatatctt

SEQ ID NO: 27264 - DNA, 71 bp, Homo sapiens
aatccggttgttgcaatcttacgtggatgctgatgtatcctttcctgggtttttaatatctttagtcaaag

SEQ ID NO: 27265 - DNA, 71 bp, Homo sapiens
ttgcaatcttacgtggatgctgatgtatcctttcctgggtttttaatatctttagtcaaaggaatttattt

SEQ ID NO: 27266 - DNA, 67 bp, Homo sapiens
gtttctttttcaaaaacattatgtttcttaactgtggaatttcttaggctgatgaaaacttttacac

SEQ ID NO: 27267 - DNA, 72 bp, Homo sapiens
caaaaacattatgtttcttaactgtggaatttcttaggctgatgaaaacttttacacttgtgcatggaccta

SEQ ID NO: 27268 - DNA, 76 bp, Homo sapiens
ttatgtttcttaactgtggaatttcttaggctgatgaaaacttttacacttgtgcatggacctatgatagcaatac

SEQ ID NO: 27269 - DNA, 78 bp, Homo sapiens
ttaactgtggaatttcttaggctgatgaaaacttttacacttgtgcatggacctatgatagcaatacgagccatcctc

SEQ ID NO: 27270 - DNA, 81 bp, Homo sapiens
aatttcttaggctgatgaaaacttttacacttgtgcatggacctatgatagcaatacgagccatcctctgctggctgtagc

SEQ ID NO: 27271 - DNA, 84 bp, Homo sapiens
atgaaaacttttacacttgtgcatggacctatgatagcaatacgagccatcctctgctggctgtagctggatctagaggcataa

SEQ ID NO: 27272 - DNA, 85 bp, Homo sapiens
ttttacacttgtgcatggacctatgatagcaatacgagccatcctctgctggctgtagctggatctagaggcataattaggataa

SEQ ID NO: 27273 - DNA, 86 bp, Homo sapiens
tgcatggacctatgatagcaatacgagccatcctctgctggctgtagctggatctagaggcataattaggataataaatcctataa

SEQ ID NO: 27274 - DNA, 82 bp, Homo sapiens
acctatgatagcaatacgagccatcctctgctggctgtagctggatctagaggcataattaggataataaatcctataacaa

SEQ ID NO: 27275 - DNA, 82 bp, Homo sapiens
aatacgagccatcctctgctggctgtagctggatctagaggcataattaggataataaatcctataacaatgcagtgtataa

SEQ ID NO: 27276 - DNA, 78 bp, Homo sapiens
cctctgctggctgtagctggatctagaggcataattaggataataaatcctataacaatgcagtgtataaaggtgggt

SEQ ID NO: 27277 - DNA, 75 bp, Homo sapiens
ctgtagctggatctagaggcataattaggataataaatcctataacaatgcagtgtataaaggtgggtttttctg

SEQ ID NO: 27278 - DNA, 74 bp, Homo sapiens
gctggatctagaggcataattaggataataaatcctataacaatgcagtgtataaaggtgggtttttctggtta

SEQ ID NO: 27279 - DNA, 71 bp, Homo sapiens
gaggcataattaggataataaatcctataacaatgcagtgtataaaggtgggtttttctggttaaattgta

SEQ ID NO: 27280 - DNA, 69 bp, Homo sapiens
aaaaaatttactgattttgagataggaaacttgaaatgttttaaatttattgtagcactatgttggcca

SEQ ID NO: 27281 - DNA, 77 bp, Homo sapiens
ctgattttgagataggaaacttgaaatgttttaaatttattgtagcactatgttggccatggaaatgctatcaatga

SEQ ID NO: 27282 - DNA, 77 bp, Homo sapiens
gagataggaaacttgaaatgttttaaatttattgtagcactatgttggccatggaaatgctatcaatgagctgaaat

SEQ ID NO: 27283 - DNA, 80 bp, Homo sapiens
ttgaaatgttttaaatttattgtagcactatgttggccatggaaatgctatcaatgagctgaaattccatccaagagatc

SEQ ID NO: 27284 - DNA, 79 bp, Homo sapiens
atgttttaaatttattgtagcactatgttggccatggaaatgctatcaatgagctgaaattccatccaagagatccaaa

SEQ ID NO: 27285 - DNA, 84 bp, Homo sapiens
tattgtagcactatgttggccatggaaatgctatcaatgagctgaaattccatccaagagatccaaatcttctcctgtcagtaa

SEQ ID NO: 27286 - DNA, 80 bp, Homo sapiens
tatgttggccatggaaatgctatcaatgagctgaaattccatccaagagatccaaatcttctcctgtcagtaagtaaagg

SEQ ID NO: 27287 - DNA, 78 bp, Homo sapiens
atggaaatgctatcaatgagctgaaattccatccaagagatccaaatcttctcctgtcagtaagtaaaggtaagtgaa

SEQ ID NO: 27288 - DNA, 77 bp, Homo sapiens
tatcaatgagctgaaattccatccaagagatccaaatcttctcctgtcagtaagtaaaggtaagtgaagcaaatgtt

SEQ ID NO: 27289 - DNA, 75 bp, Homo sapiens
agctgaaattccatccaagagatccaaatcttctcctgtcagtaagtaaaggtaagtgaagcaaatgtttcttga

SEQ ID NO: 27290 - DNA, 75 bp, Homo sapiens
atccaagagatccaaatcttctcctgtcagtaagtaaaggtaagtgaagcaaatgtttcttgagtctgtgcaatt

SEQ ID NO: 27291 - DNA, 77 bp, Homo sapiens
tttttgtatgtttatactagatcatgctttacgattatggaatatccagacggacactctggtggcaatatttggag

SEQ ID NO: 27292 - DNA, 79 bp, Homo sapiens
tatgtttatactagatcatgctttacgattatggaatatccagacggacactctggtggcaatatttggaggcgtagaa

SEQ ID NO: 27293 - DNA, 79 bp, Homo sapiens
actagatcatgctttacgattatggaatatccagacggacactctggtggcaatatttggaggcgtagaagggcacaga

SEQ ID NO: 27294 - DNA, 77 bp, Homo sapiens
tttacgattatggaatatccagacggacactctggtggcaatatttggaggcgtagaagggcacagagatgaagttc

SEQ ID NO: 27295 - DNA, 80 bp, Homo sapiens
tatggaatatccagacggacactctggtggcaatatttggaggcgtagaagggcacagagatgaagttctaagtgctgta

SEQ ID NO: 27296 - DNA, 75 bp, Homo sapiens
acggacactctggtggcaatatttggaggcgtagaagggcacagagatgaagttctaagtgctgtaagttggaaa

SEQ ID NO: 27297 - DNA, 76 bp, Homo sapiens
actctggtggcaatatttggaggcgtagaagggcacagagatgaagttctaagtgctgtaagttggaaactgcagg

SEQ ID NO: 27298 - DNA, 75 bp, Homo sapiens
aatatttggaggcgtagaagggcacagagatgaagttctaagtgctgtaagttggaaactgcagggcaatgactt

SEQ ID NO: 27299 - DNA, 76 bp, Homo sapiens
cgtagaagggcacagagatgaagttctaagtgctgtaagttggaaactgcagggcaatgactttcaggtttacata

SEQ ID NO: 27300 - DNA, 70 bp, Homo sapiens
ataatttggagctgtaatttatataaaactttttggttttgcatacaggattatgatcttttgggtgaaa

SEQ ID NO: 27301 - DNA, 69 bp, Homo sapiens
ggagctgtaatttatataaaactttttggttttgcatacaggattatgatcttttgggtgaaaaaataa

SEQ ID NO: 27302 - DNA, 70 bp, Homo sapiens
ataaaactttttggttttgcatacaggattatgatcttttgggtgaaaaaataatgtcctgtggtatgga

SEQ ID NO: 27303 - DNA, 74 bp, Homo sapiens
ttggttttgcatacaggattatgatcttttgggtgaaaaaataatgtcctgtggtatggatcattctcttaaac

SEQ ID NO: 27304 - DNA, 75 bp, Homo sapiens
ttgcatacaggattatgatcttttgggtgaaaaaataatgtcctgtggtatggatcattctcttaaactttggag

SEQ ID NO: 27305 - DNA, 73 bp, Homo sapiens
ggattatgatcttttgggtgaaaaaataatgtcctgtggtatggatcattctcttaaactttggaggatcaat

SEQ ID NO: 27306 - DNA, 76 bp, Homo sapiens
ttgggtgaaaaaataatgtcctgtggtatggatcattctcttaaactttggaggatcaattcaaagagaatgatga

SEQ ID NO: 27307 - DNA, 78 bp, Homo sapiens
aataatgtcctgtggtatggatcattctcttaaactttggaggatcaattcaaagagaatgatgaatgcaattaagga

SEQ ID NO: 27308 - DNA, 80 bp, Homo sapiens
tcctgtggtatggatcattctcttaaactttggaggatcaattcaaagagaatgatgaatgcaattaaggaatcttatga

SEQ ID NO: 27309 - DNA, 79 bp, Homo sapiens
ggatcattctcttaaactttggaggatcaattcaaagagaatgatgaatgcaattaaggaatcttatgattataatcca

SEQ ID NO: 27310 - DNA, 76 bp, Homo sapiens
ctcttaaactttggaggatcaattcaaagagaatgatgaatgcaattaaggaatcttatgattataatccaaataa

SEQ ID NO: 27311 - DNA, 76 bp, Homo sapiens
ttggaggatcaattcaaagagaatgatgaatgcaattaaggaatcttatgattataatccaaataaaactaacagg

SEQ ID NO: 27312 - DNA, 74 bp, Homo sapiens
caaagagaatgatgaatgcaattaaggaatcttatgattataatccaaataaaactaacaggtaacagttgtgg

SEQ ID NO: 27313 - DNA, 75 bp, Homo sapiens
gaatgatgaatgcaattaaggaatcttatgattataatccaaataaaactaacaggtaacagttgtggtatttga

SEQ ID NO: 27314 - DNA, 70 bp, Homo sapiens
gcaattaaggaatcttatgattataatccaaataaaactaacaggtaacagttgtggtatttgaaacaat

SEQ ID NO: 27315 - DNA, 66 bp, Homo sapiens
attttttcttttaactttttacatttccattcttccttcaggccatttatttctcagaaaatccat

SEQ ID NO: 27316 - DNA, 68 bp, Homo sapiens
cttttaactttttacatttccattcttccttcaggccatttatttctcagaaaatccattttcctgat

SEQ ID NO: 27317 - DNA, 73 bp, Homo sapiens
acatttccattcttccttcaggccatttatttctcagaaaatccattttcctgatttttctaccagagacata

SEQ ID NO: 27318 - DNA, 74 bp, Homo sapiens
cattcttccttcaggccatttatttctcagaaaatccattttcctgatttttctaccagagacatacataggaa

SEQ ID NO: 27319 - DNA, 75 bp, Homo sapiens
cttcaggccatttatttctcagaaaatccattttcctgatttttctaccagagacatacataggaattatgttga

SEQ ID NO: 27320 - DNA, 76 bp, Homo sapiens
atttctcagaaaatccattttcctgatttttctaccagagacatacataggaattatgttgattgtgtgcgatggt

SEQ ID NO: 27321 - DNA, 78 bp, Homo sapiens
atccattttcctgatttttctaccagagacatacataggaattatgttgattgtgtgcgatggttaggcgatttgata

SEQ ID NO: 27322 - DNA, 78 bp, Homo sapiens
tcctgatttttctaccagagacatacataggaattatgttgattgtgtgcgatggttaggcgatttgatactttctaa

SEQ ID NO: 27323 - DNA, 77 bp, Homo sapiens
ttttctaccagagacatacataggaattatgttgattgtgtgcgatggttaggcgatttgatactttctaaggtatg

SEQ ID NO: 27324 - DNA, 76 bp, Homo sapiens
atacataggaattatgttgattgtgtgcgatggttaggcgatttgatactttctaaggtatggtaactgcagttaa

SEQ ID NO: 27325 - DNA, 75 bp, Homo sapiens
aattatgttgattgtgtgcgatggttaggcgatttgatactttctaaggtatggtaactgcagttaagctgtact

SEQ ID NO: 27326 - DNA, 77 bp, Homo sapiens
ttgattgtgtgcgatggttaggcgatttgatactttctaaggtatggtaactgcagttaagctgtacttccatcgtg

SEQ ID NO: 27327 - DNA, 76 bp, Homo sapiens
attcagttcctcattaacatttctttttctcatttctctctctgttttagtcttgtgaaaatgccattgtgtgctg

SEQ ID NO: 27328 - DNA, 75 bp, Homo sapiens
ttaacatttctttttctcatttctctctctgttttagtcttgtgaaaatgccattgtgtgctggaaacctggcaa

SEQ ID NO: 27329 - DNA, 80 bp, Homo sapiens
ttttctcatttctctctctgttttagtcttgtgaaaatgccattgtgtgctggaaacctggcaagatggaagatgatata

SEQ ID NO: 27330 - DNA, 80 bp, Homo sapiens
tctctctctgttttagtcttgtgaaaatgccattgtgtgctggaaacctggcaagatggaagatgatatagataaaatta

SEQ ID NO: 27331 - DNA, 77 bp, Homo sapiens
ctctgttttagtcttgtgaaaatgccattgtgtgctggaaacctggcaagatggaagatgatatagataaaattaaa

SEQ ID NO: 27332 - DNA, 78 bp, Homo sapiens
ttgtgaaaatgccattgtgtgctggaaacctggcaagatggaagatgatatagataaaattaaacccagtgaatctaa

SEQ ID NO: 27333 - DNA, 78 bp, Homo sapiens
cattgtgtgctggaaacctggcaagatggaagatgatatagataaaattaaacccagtgaatctaatgtgactattct

SEQ ID NO: 27334 - DNA, 76 bp, Homo sapiens
tggaaacctggcaagatggaagatgatatagataaaattaaacccagtgaatctaatgtgactattcttgggcgat

SEQ ID NO: 27335 - DNA, 78 bp, Homo sapiens
ctggcaagatggaagatgatatagataaaattaaacccagtgaatctaatgtgactattcttgggcgatttgattaca

SEQ ID NO: 27336 - DNA, 78 bp, Homo sapiens
agatgatatagataaaattaaacccagtgaatctaatgtgactattcttgggcgatttgattacagccagtgtgacat

SEQ ID NO: 27337 - DNA, 75 bp, Homo sapiens
agataaaattaaacccagtgaatctaatgtgactattcttgggcgatttgattacagccagtgtgacatttggta

SEQ ID NO: 27338 - DNA, 76 bp, Homo sapiens
attaaacccagtgaatctaatgtgactattcttgggcgatttgattacagccagtgtgacatttggtacatgaggt

SEQ ID NO: 27339 - DNA, 77 bp, Homo sapiens
aatctaatgtgactattcttgggcgatttgattacagccagtgtgacatttggtacatgaggttttctatggatttc

SEQ ID NO: 27340 - DNA, 75 bp, Homo sapiens
actattcttgggcgatttgattacagccagtgtgacatttggtacatgaggttttctatggatttctggcaaaag

SEQ ID NO: 27341 - DNA, 77 bp, Homo sapiens
tcttgggcgatttgattacagccagtgtgacatttggtacatgaggttttctatggatttctggcaaaaggtatcaa

SEQ ID NO: 27342 - DNA, 75 bp, Homo sapiens
tttgattacagccagtgtgacatttggtacatgaggttttctatggatttctggcaaaaggtatcaacatacttt

SEQ ID NO: 27343 - DNA, 74 bp, Homo sapiens
ccagtgtgacatttggtacatgaggttttctatggatttctggcaaaaggtatcaacatacttttacattttga

SEQ ID NO: 27344 - DNA, 74 bp, Homo sapiens
tttggtacatgaggttttctatggatttctggcaaaaggtatcaacatacttttacattttgaaatgatctgac

SEQ ID NO: 27345 - DNA, 73 bp, Homo sapiens
ggttttctatggatttctggcaaaaggtatcaacatacttttacattttgaaatgatctgacttatgaaagac

SEQ ID NO: 27346 - DNA, 75 bp, Homo sapiens
ctatggatttctggcaaaaggtatcaacatacttttacattttgaaatgatctgacttatgaaagaccattgtaa

SEQ ID NO: 27347 - DNA, 74 bp, Homo sapiens
ctggcaaaaggtatcaacatacttttacattttgaaatgatctgacttatgaaagaccattgtaattctagctt

SEQ ID NO: 27348 - DNA, 75 bp, Homo sapiens
gtatcaacatacttttacattttgaaatgatctgacttatgaaagaccattgtaattctagctttttctgttgtg

SEQ ID NO: 27349 - DNA, 75 bp, Homo sapiens
tacattttgaaatgatctgacttatgaaagaccattgtaattctagctttttctgttgtgtccatgttctttttc

SEQ ID NO: 27350 - DNA, 71 bp, Homo sapiens
gaaagaccattgtaattctagctttttctgttgtgtccatgttctttttcctttacaaatctaccctgatg

SEQ ID NO: 27351 - DNA, 72 bp, Homo sapiens
tgtaattctagctttttctgttgtgtccatgttctttttcctttacaaatctaccctgatgttttgtattga

SEQ ID NO: 27352 - DNA, 70 bp, Homo sapiens
ttctgttgtgtccatgttctttttcctttacaaatctaccctgatgttttgtattgattactttgccctt

SEQ ID NO: 27353 - DNA, 72 bp, Homo sapiens
ctttttcctttacaaatctaccctgatgttttgtattgattactttgccctttgatgtcattcatcaaatac

SEQ ID NO: 27354 - DNA, 73 bp, Homo sapiens
ctttacaaatctaccctgatgttttgtattgattactttgccctttgatgtcattcatcaaatactttggtgt

SEQ ID NO: 27355 - DNA, 75 bp, Homo sapiens
ctaccctgatgttttgtattgattactttgccctttgatgtcattcatcaaatactttggtgttattcattctac

SEQ ID NO: 27356 - DNA, 80 bp, Homo sapiens
gtattgattactttgccctttgatgtcattcatcaaatactttggtgttattcattctacttttgtggctctgcatatga

SEQ ID NO: 27357 - DNA, 81 bp, Homo sapiens
attactttgccctttgatgtcattcatcaaatactttggtgttattcattctacttttgtggctctgcatatgatctgcag

SEQ ID NO: 27358 - DNA, 83 bp, Homo sapiens
tgatgtcattcatcaaatactttggtgttattcattctacttttgtggctctgcatatgatctgcagtgcttactttaaatta

SEQ ID NO: 27359 - DNA, 78 bp, Homo sapiens
catcaaatactttggtgttattcattctacttttgtggctctgcatatgatctgcagtgcttactttaaattaagttg

SEQ ID NO: 27360 - DNA, 78 bp, Homo sapiens
tactttggtgttattcattctacttttgtggctctgcatatgatctgcagtgcttactttaaattaagttggcagtta

SEQ ID NO: 27361 - DNA, 80 bp, Homo sapiens
tgttattcattctacttttgtggctctgcatatgatctgcagtgcttactttaaattaagttggcagttaggtatcaatg

SEQ ID NO: 27362 - DNA, 78 bp, Homo sapiens
tacttttgtggctctgcatatgatctgcagtgcttactttaaattaagttggcagttaggtatcaatggtggaaatta

SEQ ID NO: 27363 - DNA, 77 bp, Homo sapiens
tctgcatatgatctgcagtgcttactttaaattaagttggcagttaggtatcaatggtggaaattaggtgtttatgt

SEQ ID NO: 27364 - DNA, 75 bp, Homo sapiens
tatgatctgcagtgcttactttaaattaagttggcagttaggtatcaatggtggaaattaggtgtttatgttcca

SEQ ID NO: 27365 - DNA, 71 bp, Homo sapiens
gtgcttactttaaattaagttggcagttaggtatcaatggtggaaattaggtgtttatgttccataacata

SEQ ID NO: 27366 - DNA, 73 bp, Homo sapiens
attaagttggcagttaggtatcaatggtggaaattaggtgtttatgttccataacataaacattatcataaca

SEQ ID NO: 27367 - DNA, 75 bp, Homo sapiens
tggcagttaggtatcaatggtggaaattaggtgtttatgttccataacataaacattatcataacattactaaga

SEQ ID NO: 27368 - DNA, 73 bp, Homo sapiens
ggtatcaatggtggaaattaggtgtttatgttccataacataaacattatcataacattactaagacttaatg

SEQ ID NO: 27369 - DNA, 71 bp, Homo sapiens
gtggaaattaggtgtttatgttccataacataaacattatcataacattactaagacttaatgttttagta

SEQ ID NO: 27370 - DNA, 74 bp, Homo sapiens
ttatgttccataacataaacattatcataacattactaagacttaatgttttagtaattagattgtcagtctac

SEQ ID NO: 27371 - DNA, 74 bp, Homo sapiens
ccataacataaacattatcataacattactaagacttaatgttttagtaattagattgtcagtctacctatgta

SEQ ID NO: 27372 - DNA, 72 bp, Homo sapiens
acattatcataacattactaagacttaatgttttagtaattagattgtcagtctacctatgtaactgtttcc

SEQ ID NO: 27373 - DNA, 72 bp, Homo sapiens
cataacattactaagacttaatgttttagtaattagattgtcagtctacctatgtaactgtttcctagagaa

SEQ ID NO: 27374 - DNA, 71 bp, Homo sapiens
ctaagacttaatgttttagtaattagattgtcagtctacctatgtaactgtttcctagagaaaaatcagga

SEQ ID NO: 27375 - DNA, 73 bp, Homo sapiens
gattgtcagtctacctatgtaactgtttcctagagaaaaatcaggatagaagacagataaaatactagttacc

SEQ ID NO: 27376 - DNA, 72 bp, Homo sapiens
tcagtctacctatgtaactgtttcctagagaaaaatcaggatagaagacagataaaatactagttacctaaa

SEQ ID NO: 27377 - DNA, 69 bp, Homo sapiens
tatgtaactgtttcctagagaaaaatcaggatagaagacagataaaatactagttacctaaaaatttaa

SEQ ID NO: 27378 - DNA, 73 bp, Homo sapiens
gatgtttttaaaaatatgtttatacagatgcttgcattgggcaatcaagttggcaaactttatgtttgggatt

SEQ ID NO: 27379 - DNA, 75 bp, Homo sapiens
aaatatgtttatacagatgcttgcattgggcaatcaagttggcaaactttatgtttgggatttagaagtagaaga

SEQ ID NO: 27380 - DNA, 77 bp, Homo sapiens
ttatacagatgcttgcattgggcaatcaagttggcaaactttatgtttgggatttagaagtagaagatcctcataaa

SEQ ID NO: 27381 - DNA, 74 bp, Homo sapiens
ttgcattgggcaatcaagttggcaaactttatgtttgggatttagaagtagaagatcctcataaagccaagtaa

SEQ ID NO: 27382 - DNA, 71 bp, Homo sapiens
ggcaatcaagttggcaaactttatgtttgggatttagaagtagaagatcctcataaagccaagtaagtatt

SEQ ID NO: 27383 - DNA, 69 bp, Homo sapiens
agttggcaaactttatgtttgggatttagaagtagaagatcctcataaagccaagtaagtatttagaaa

SEQ ID NO: 27384 - DNA, 70 bp, Homo sapiens
actttatgtttgggatttagaagtagaagatcctcataaagccaagtaagtatttagaaatttctgttca

SEQ ID NO: 27385 - DNA, 70 bp, Homo sapiens
gggatttagaagtagaagatcctcataaagccaagtaagtatttagaaatttctgttcaaaatttcaggc

SEQ ID NO: 27386 - DNA, 70 bp, Homo sapiens
agaagatcctcataaagccaagtaagtatttagaaatttctgttcaaaatttcaggctttttctccacac

SEQ ID NO: 27387 - DNA, 71 bp, Homo sapiens
cctcataaagccaagtaagtatttagaaatttctgttcaaaatttcaggctttttctccacacttgtatgc

SEQ ID NO: 27388 - DNA, 73 bp, Homo sapiens
gccaagtaagtatttagaaatttctgttcaaaatttcaggctttttctccacacttgtatgccaatgtagaga

SEQ ID NO: 27389 - DNA, 77 bp, Homo sapiens
tagaaatttctgttcaaaatttcaggctttttctccacacttgtatgccaatgtagagaagatcatttatatttgca

SEQ ID NO: 27390 - DNA, 79 bp, Homo sapiens
tgttcaaaatttcaggctttttctccacacttgtatgccaatgtagagaagatcatttatatttgcagtgccatcctta

SEQ ID NO: 27391 - DNA, 78 bp, Homo sapiens
ttcaggctttttctccacacttgtatgccaatgtagagaagatcatttatatttgcagtgccatccttaagtcatttt

SEQ ID NO: 27392 - DNA, 77 bp, Homo sapiens
ctttttctccacacttgtatgccaatgtagagaagatcatttatatttgcagtgccatccttaagtcatttttaaca

SEQ ID NO: 27393 - DNA, 78 bp, Homo sapiens
tgtatgccaatgtagagaagatcatttatatttgcagtgccatccttaagtcatttttaacatttactgttttcagag

SEQ ID NO: 27394 - DNA, 76 bp, Homo sapiens
gccaatgtagagaagatcatttatatttgcagtgccatccttaagtcatttttaacatttactgttttcagagtta

SEQ ID NO: 27395 - DNA, 72 bp, Homo sapiens
gatcatttatatttgcagtgccatccttaagtcatttttaacatttactgttttcagagttaaagttattct

SEQ ID NO: 27396 - DNA, 69 bp, Homo sapiens
ttatatttgcagtgccatccttaagtcatttttaacatttactgttttcagagttaaagttattctttt

SEQ ID NO: 27397 - DNA, 67 bp, Homo sapiens
agtgccatccttaagtcatttttaacatttactgttttcagagttaaagttattcttttttattcca

SEQ ID NO: 27398 - DNA, 64 bp, Homo sapiens
gtcatttttaacatttactgttttcagagttaaagttattcttttttattccaataatttttgt

SEQ ID NO: 27399 - DNA, 64 bp, Homo sapiens
tttcagagttaaagttattcttttttattccaataatttttgtttttcctaagtaccttggtga

SEQ ID NO: 27400 - DNA, 64 bp, Homo sapiens
gttaaagttattcttttttattccaataatttttgtttttcctaagtaccttggtgacaagtca

SEQ ID NO: 27401 - DNA, 64 bp, Homo sapiens
tcttttttattccaataatttttgtttttcctaagtaccttggtgacaagtcatttcttgtttt

SEQ ID NO: 27402 - DNA, 67 bp, Homo sapiens
tccaataatttttgtttttcctaagtaccttggtgacaagtcatttcttgtttttatacaaattatg

SEQ ID NO: 27403 - DNA, 70 bp, Homo sapiens
tgtttttcctaagtaccttggtgacaagtcatttcttgtttttatacaaattatgtagtgcttgttgaac

SEQ ID NO: 27404 - DNA, 71 bp, Homo sapiens
ccttggtgacaagtcatttcttgtttttatacaaattatgtagtgcttgttgaacttaaaatatatctaaa

SEQ ID NO: 27405 - DNA, 69 bp, Homo sapiens
aagtcatttcttgtttttatacaaattatgtagtgcttgttgaacttaaaatatatctaaattttataa

SEQ ID NO: 27406 - DNA, 73 bp, Homo sapiens
gtgcttgttgaacttaaaatatatctaaattttataaaatttgagactgagctcttagtgaagtatattctgg

SEQ ID NO: 27407 - DNA, 71 bp, Homo sapiens
cttaaaatatatctaaattttataaaatttgagactgagctcttagtgaagtatattctggttttaagtgc

SEQ ID NO: 27408 - DNA, 72 bp, Homo sapiens
tctaaattttataaaatttgagactgagctcttagtgaagtatattctggttttaagtgcttttcgtatgac

SEQ ID NO: 27409 - DNA, 76 bp, Homo sapiens
tataaaatttgagactgagctcttagtgaagtatattctggttttaagtgcttttcgtatgacttggaacatctgc

SEQ ID NO: 27410 - DNA, 75 bp, Homo sapiens
agactgagctcttagtgaagtatattctggttttaagtgcttttcgtatgacttggaacatctgcttattttcta

SEQ ID NO: 27411 - DNA, 74 bp, Homo sapiens
tcttagtgaagtatattctggttttaagtgcttttcgtatgacttggaacatctgcttattttctaatccgctg

SEQ ID NO: 27412 - DNA, 71 bp, Homo sapiens
tatattctggttttaagtgcttttcgtatgacttggaacatctgcttattttctaatccgctgttttaggg

SEQ ID NO: 27413 - DNA, 73 bp, Homo sapiens
ttttaagtgcttttcgtatgacttggaacatctgcttattttctaatccgctgttttagggtagacactgaca

SEQ ID NO: 27414 - DNA, 73 bp, Homo sapiens
ttttcgtatgacttggaacatctgcttattttctaatccgctgttttagggtagacactgacaacgttatgtg

SEQ ID NO: 27415 - DNA, 72 bp, Homo sapiens
acttggaacatctgcttattttctaatccgctgttttagggtagacactgacaacgttatgtgtggtcttta

SEQ ID NO: 27416 - DNA, 71 bp, Homo sapiens
atctgcttattttctaatccgctgttttagggtagacactgacaacgttatgtgtggtctttaacctgttg

SEQ ID NO: 27417 - DNA, 71 bp, Homo sapiens
tattttctaatccgctgttttagggtagacactgacaacgttatgtgtggtctttaacctgttgtcatgtt

SEQ ID NO: 27418 - DNA, 69 bp, Homo sapiens
atccgctgttttagggtagacactgacaacgttatgtgtggtctttaacctgttgtcatgttttttccc

SEQ ID NO: 27419 - DNA, 72 bp, Homo sapiens
ttagggtagacactgacaacgttatgtgtggtctttaacctgttgtcatgttttttccctagatgtacaaca

SEQ ID NO: 27420 - DNA, 74 bp, Homo sapiens
acaacgttatgtgtggtctttaacctgttgtcatgttttttccctagatgtacaacactgactcatcataaatg

SEQ ID NO: 27421 - DNA, 79 bp, Homo sapiens
tatgtgtggtctttaacctgttgtcatgttttttccctagatgtacaacactgactcatcataaatgtggtgctgctat

SEQ ID NO: 27422 - DNA, 78 bp, Homo sapiens
tctttaacctgttgtcatgttttttccctagatgtacaacactgactcatcataaatgtggtgctgctattcgacaaa

SEQ ID NO: 27423 - DNA, 79 bp, Homo sapiens
tttttccctagatgtacaacactgactcatcataaatgtggtgctgctattcgacaaaccagttttagcagggatagca

SEQ ID NO: 27424 - DNA, 84 bp, Homo sapiens
actgactcatcataaatgtggtgctgctattcgacaaaccagttttagcagggatagcagcattcttatagctgtttgtgatga

SEQ ID NO: 27425 - DNA, 82 bp, Homo sapiens
ataaatgtggtgctgctattcgacaaaccagttttagcagggatagcagcattcttatagctgtttgtgatgatgccagtat

SEQ ID NO: 27426 - DNA, 83 bp, Homo sapiens
tgctattcgacaaaccagttttagcagggatagcagcattcttatagctgtttgtgatgatgccagtatttggcgctgggatc

SEQ ID NO: 27427 - DNA, 81 bp, Homo sapiens
ttagcagggatagcagcattcttatagctgtttgtgatgatgccagtatttggcgctgggatcgacttcgataaaatactt

SEQ ID NO: 27428 - DNA, 80 bp, Homo sapiens
atagcagcattcttatagctgtttgtgatgatgccagtatttggcgctgggatcgacttcgataaaatacttttgcctaa

SEQ ID NO: 27429 - DNA, 77 bp, Homo sapiens
tcttatagctgtttgtgatgatgccagtatttggcgctgggatcgacttcgataaaatacttttgcctaatcaaaat

SEQ ID NO: 27430 - DNA, 76 bp, Homo sapiens
tttgtgatgatgccagtatttggcgctgggatcgacttcgataaaatacttttgcctaatcaaaattagagtgtgt

SEQ ID NO: 27431 - DNA, 74 bp, Homo sapiens
atgatgccagtatttggcgctgggatcgacttcgataaaatacttttgcctaatcaaaattagagtgtgtttgt

SEQ ID NO: 27432 - DNA, 74 bp, Homo sapiens
tatttggcgctgggatcgacttcgataaaatacttttgcctaatcaaaattagagtgtgtttgttgtctgtgta

SEQ ID NO: 27433 - DNA, 72 bp, Homo sapiens
ctgggatcgacttcgataaaatacttttgcctaatcaaaattagagtgtgtttgttgtctgtgtaaaataga

SEQ ID NO: 27434 - DNA, 74 bp, Homo sapiens
tttgcctaatcaaaattagagtgtgtttgttgtctgtgtaaaatagaattaatgtatcttgctagtaagggcac

SEQ ID NO: 27435 - DNA, 75 bp, Homo sapiens
tcaaaattagagtgtgtttgttgtctgtgtaaaatagaattaatgtatcttgctagtaagggcacgtagagcatt

SEQ ID NO: 27436 - DNA, 75 bp, Homo sapiens
ttagagtgtgtttgttgtctgtgtaaaatagaattaatgtatcttgctagtaagggcacgtagagcatttagagt

SEQ ID NO: 27437 - DNA, 77 bp, Homo sapiens
ttgttgtctgtgtaaaatagaattaatgtatcttgctagtaagggcacgtagagcatttagagttgtctttcagcat

SEQ ID NO: 27438 - DNA, 81 bp, Homo sapiens
aaatagaattaatgtatcttgctagtaagggcacgtagagcatttagagttgtctttcagcattcaatcaggctgagctga

SEQ ID NO: 27439 - DNA, 81 bp, Homo sapiens
aattaatgtatcttgctagtaagggcacgtagagcatttagagttgtctttcagcattcaatcaggctgagctgaatgtag

SEQ ID NO: 27440 - DNA, 83 bp, Homo sapiens
atcttgctagtaagggcacgtagagcatttagagttgtctttcagcattcaatcaggctgagctgaatgtagtgatgtttaca

SEQ ID NO: 27441 - DNA, 82 bp, Homo sapiens
taagggcacgtagagcatttagagttgtctttcagcattcaatcaggctgagctgaatgtagtgatgtttacattgtttaca

SEQ ID NO: 27442 - DNA, 82 bp, Homo sapiens
tagagcatttagagttgtctttcagcattcaatcaggctgagctgaatgtagtgatgtttacattgtttacattctttgtac

SEQ ID NO: 27443 - DNA, 80 bp, Homo sapiens
agagttgtctttcagcattcaatcaggctgagctgaatgtagtgatgtttacattgtttacattctttgtactgtcttcc

SEQ ID NO: 27444 - DNA, 84 bp, Homo sapiens
ttcagcattcaatcaggctgagctgaatgtagtgatgtttacattgtttacattctttgtactgtcttcctgctcagactctac

SEQ ID NO: 27445 - DNA, 80 bp, Homo sapiens
ggctgagctgaatgtagtgatgtttacattgtttacattctttgtactgtcttcctgctcagactctactgcttttaata

SEQ ID NO: 27446 - DNA, 77 bp, Homo sapiens
agctgaatgtagtgatgtttacattgtttacattctttgtactgtcttcctgctcagactctactgcttttaataaa

SEQ ID NO: 27447 - DNA, 73 bp, Homo sapiens
tgatgtttacattgtttacattctttgtactgtcttcctgctcagactctactgcttttaataaaaatttatt

SEQ ID NO: 27448 - DNA, 70 bp, Homo sapiens
ctgtcttcctgctcagactctactgcttttaataaaaatttatttttgtaaagctgtgtgtttagttact

SEQ ID NO: 27449 - DNA, 71 bp, Homo sapiens
tgctcagactctactgcttttaataaaaatttatttttgtaaagctgtgtgtttagttactttcattgtgg

SEQ ID NO: 27450 - DNA, 67 bp, Homo sapiens
ctactgcttttaataaaaatttatttttgtaaagctgtgtgtttagttactttcattgtggtgaaaa

SEQ ID NO: 27451 - DNA, 69 bp, Homo sapiens
agaaacacaacttcagaacttctaaggatgtttcccacacacttaccccacagtaagttcgcttctaaa

SEQ ID NO: 27452 - DNA, 68 bp, Homo sapiens
aacttcagaacttctaaggatgtttcccacacacttaccccacagtaagttcgcttctaaactttcaa

SEQ ID NO: 27453 - DNA, 65 bp, Homo sapiens
aacttctaaggatgtttcccacacacttaccccacagtaagttcgcttctaaactttcaaaaagt

SEQ ID NO: 27454 - DNA, 66 bp, Homo sapiens
atgtttcccacacacttaccccacagtaagttcgcttctaaactttcaaaaagtttcacgtcccaa

SEQ ID NO: 27455 - DNA, 66 bp, Homo sapiens
acacttaccccacagtaagttcgcttctaaactttcaaaaagtttcacgtcccaagatggggtgaa

SEQ ID NO: 27456 - DNA, 67 bp, Homo sapiens
acagtaagttcgcttctaaactttcaaaaagtttcacgtcccaagatggggtgaaggtgagacggtg

SEQ ID NO: 27457 - DNA, 69 bp, Homo sapiens
agttcgcttctaaactttcaaaaagtttcacgtcccaagatggggtgaaggtgagacggtggagatgaa

SEQ ID NO: 27458 - DNA, 71 bp, Homo sapiens
tttcaaaaagtttcacgtcccaagatggggtgaaggtgagacggtggagatgaaccggggcagacagagac

SEQ ID NO: 27459 - DNA, 70 bp, Homo sapiens
aaaagtttcacgtcccaagatggggtgaaggtgagacggtggagatgaaccggggcagacagagaccacc

SEQ ID NO: 27460 - DNA, 70 bp, Homo sapiens
caagatggggtgaaggtgagacggtggagatgaaccggggcagacagagaccaccccaaataccggaccc

SEQ ID NO: 27461 - DNA, 67 bp, Homo sapiens
gggtgaaggtgagacggtggagatgaaccggggcagacagagaccaccccaaataccggacccgggg

SEQ ID NO: 27462 - DNA, 67 bp, Homo sapiens
gtgagacggtggagatgaaccggggcagacagagaccaccccaaataccggacccgggggaaatggg

SEQ ID NO: 27463 - DNA, 64 bp, Homo sapiens
agatgaaccggggcagacagagaccaccccaaataccggacccgggggaaatggggtaccaacg

SEQ ID NO: 27464 - DNA, 65 bp, Homo sapiens
cagacagagaccaccccaaataccggacccgggggaaatggggtaccaacggctgggccccagga

SEQ ID NO: 27465 - DNA, 64 bp, Homo sapiens
agagaccaccccaaataccggacccgggggaaatggggtaccaacggctgggccccaggagaca

SEQ ID NO: 27466 - DNA, 63 bp, Homo sapiens
ccaaataccggacccgggggaaatggggtaccaacggctgggccccaggagacactcggaggg

SEQ ID NO: 27467 - DNA, 64 bp, Homo sapiens
acccgggggaaatggggtaccaacggctgggccccaggagacactcggaggggtccgcgggctc

SEQ ID NO: 27468 - DNA, 66 bp, Homo sapiens
gggtaccaacggctgggccccaggagacactcggaggggtccgcgggctcggcccggtccctccgc

SEQ ID NO: 27469 - DNA, 66 bp, Homo sapiens
ccaacggctgggccccaggagacactcggaggggtccgcgggctcggcccggtccctccgctgggg

SEQ ID NO: 27470 - DNA, 65 bp, Homo sapiens
cccaggagacactcggaggggtccgcgggctcggcccggtccctccgctggggggttaccagccg

SEQ ID NO: 27471 - DNA, 68 bp, Homo sapiens
tcggaggggtccgcgggctcggcccggtccctccgctggggggttaccagccggccggcagcgagata

SEQ ID NO: 27472 - DNA, 68 bp, Homo sapiens
gggtccgcgggctcggcccggtccctccgctggggggttaccagccggccggcagcgagatacccaga

SEQ ID NO: 27473 - DNA, 66 bp, Homo sapiens
ggcccggtccctccgctggggggttaccagccggccggcagcgagatacccagaggcccgtttttc

SEQ ID NO: 27474 - DNA, 72 bp, Homo sapiens
ccatcccgcgggcccgccctgagccagtgactccagggaccactcaccgcggccggcggactggcgggtctc

SEQ ID NO: 27475 - DNA, 76 bp, Homo sapiens
gcccgccctgagccagtgactccagggaccactcaccgcggccggcggactggcgggtctccgacaggtgcgcaca

SEQ ID NO: 27476 - DNA, 78 bp, Homo sapiens
tgagccagtgactccagggaccactcaccgcggccggcggactggcgggtctccgacaggtgcgcacactcggcgcag

SEQ ID NO: 27477 - DNA, 78 bp, Homo sapiens
ctccagggaccactcaccgcggccggcggactggcgggtctccgacaggtgcgcacactcggcgcaggctgtcgctga

SEQ ID NO: 27478 - DNA, 76 bp, Homo sapiens
actcaccgcggccggcggactggcgggtctccgacaggtgcgcacactcggcgcaggctgtcgctgagcccggaat

SEQ ID NO: 27479 - DNA, 78 bp, Homo sapiens
gccggcggactggcgggtctccgacaggtgcgcacactcggcgcaggctgtcgctgagcccggaattctgcaccggga

SEQ ID NO: 27480 - DNA, 76 bp, Homo sapiens
tggcgggtctccgacaggtgcgcacactcggcgcaggctgtcgctgagcccggaattctgcaccgggagaaacttt

SEQ ID NO: 27481 - DNA, 77 bp, Homo sapiens
ggtctccgacaggtgcgcacactcggcgcaggctgtcgctgagcccggaattctgcaccgggagaaacttttcagcc

SEQ ID NO: 27482 - DNA, 78 bp, Homo sapiens
aggtgcgcacactcggcgcaggctgtcgctgagcccggaattctgcaccgggagaaacttttcagcccgcagagcaac

SEQ ID NO: 27483 - DNA, 77 bp, Homo sapiens
actcggcgcaggctgtcgctgagcccggaattctgcaccgggagaaacttttcagcccgcagagcaaccgcagggca

SEQ ID NO: 27484 - DNA, 74 bp, Homo sapiens
ctgtcgctgagcccggaattctgcaccgggagaaacttttcagcccgcagagcaaccgcagggcagtggacggg

SEQ ID NO: 27485 - DNA, 71 bp, Homo sapiens
agcccggaattctgcaccgggagaaacttttcagcccgcagagcaaccgcagggcagtggacgggggccgc

SEQ ID NO: 27486 - DNA, 73 bp, Homo sapiens
ttctgcaccgggagaaacttttcagcccgcagagcaaccgcagggcagtggacgggggccgcgcgaggacaaa

SEQ ID NO: 27487 - DNA, 71 bp, Homo sapiens
aaacttttcagcccgcagagcaaccgcagggcagtggacgggggccgcgcgaggacaaacagcggcggcgg

SEQ ID NO: 27488 - DNA, 75 bp, Homo sapiens
ttcagcccgcagagcaaccgcagggcagtggacgggggccgcgcgaggacaaacagcggcggcgggtgcaaagcc

SEQ ID NO: 27489 - DNA, 72 bp, Homo sapiens
agagcaaccgcagggcagtggacgggggccgcgcgaggacaaacagcggcggcgggtgcaaagccccttctc

SEQ ID NO: 27490 - DNA, 70 bp, Homo sapiens
agggcagtggacgggggccgcgcgaggacaaacagcggcggcgggtgcaaagccccttctccaagccgcg

SEQ ID NO: 27491 - DNA, 71 bp, Homo sapiens
caaaatagaactcatttcatggaaaaaaggaatcccacagcatttctttttaataactgttcagctacaaa

SEQ ID NO: 27492 - DNA, 70 bp, Homo sapiens
ttcatggaaaaaaggaatcccacagcatttctttttaataactgttcagctacaaaattttattggtatc

SEQ ID NO: 27493 - DNA, 68 bp, Homo sapiens
aaaggaatcccacagcatttctttttaataactgttcagctacaaaattttattggtatctttttatg

SEQ ID NO: 27494 - DNA, 70 bp, Homo sapiens
cacagcatttctttttaataactgttcagctacaaaattttattggtatctttttatgttccctctagag

SEQ ID NO: 27495 - DNA, 71 bp, Homo sapiens
ctttttaataactgttcagctacaaaattttattggtatctttttatgttccctctagaggatgtaatgca

SEQ ID NO: 27496 - DNA, 75 bp, Homo sapiens
actgttcagctacaaaattttattggtatctttttatgttccctctagaggatgtaatgcacaaaagcattgcca

SEQ ID NO: 27497 - DNA, 74 bp, Homo sapiens
tacaaaattttattggtatctttttatgttccctctagaggatgtaatgcacaaaagcattgccacggaacata

SEQ ID NO: 27498 - DNA, 75 bp, Homo sapiens
ttattggtatctttttatgttccctctagaggatgtaatgcacaaaagcattgccacggaacatataaaattaca

SEQ ID NO: 27499 - DNA, 75 bp, Homo sapiens
gtatctttttatgttccctctagaggatgtaatgcacaaaagcattgccacggaacatataaaattacaaatgaa

SEQ ID NO: 27500 - DNA, 75 bp, Homo sapiens
atgttccctctagaggatgtaatgcacaaaagcattgccacggaacatataaaattacaaatgaaatttattgta

SEQ ID NO: 27501 - DNA, 73 bp, Homo sapiens
agaggatgtaatgcacaaaagcattgccacggaacatataaaattacaaatgaaatttattgtaaaaagtaga

SEQ ID NO: 27502 - DNA, 73 bp, Homo sapiens
gcacaaaagcattgccacggaacatataaaattacaaatgaaatttattgtaaaaagtagaatgtcttctaga

SEQ ID NO: 27503 - DNA, 74 bp, Homo sapiens
gcattgccacggaacatataaaattacaaatgaaatttattgtaaaaagtagaatgtcttctagactggtgtca

SEQ ID NO: 27504 - DNA, 70 bp, Homo sapiens
cggaacatataaaattacaaatgaaatttattgtaaaaagtagaatgtcttctagactggtgtcagtatt

SEQ ID NO: 27505 - DNA, 74 bp, Homo sapiens
tacaaatgaaatttattgtaaaaagtagaatgtcttctagactggtgtcagtatttatgtcattcataaaccaa

SEQ ID NO: 27506 - DNA, 74 bp, Homo sapiens
atttattgtaaaaagtagaatgtcttctagactggtgtcagtatttatgtcattcataaaccaaaactgctgta

SEQ ID NO: 27507 - DNA, 76 bp, Homo sapiens
aaaaagtagaatgtcttctagactggtgtcagtatttatgtcattcataaaccaaaactgctgtataatatattca

SEQ ID NO: 27508 - DNA, 82 bp, Homo sapiens
tgtcttctagactggtgtcagtatttatgtcattcataaaccaaaactgctgtataatatattcattgtcagcaagttcatg

SEQ ID NO: 27509 - DNA, 83 bp, Homo sapiens
tctagactggtgtcagtatttatgtcattcataaaccaaaactgctgtataatatattcattgtcagcaagttcatgtgtgta

SEQ ID NO: 27510 - DNA, 82 bp, Homo sapiens
cagtatttatgtcattcataaaccaaaactgctgtataatatattcattgtcagcaagttcatgtgtgtaaattgccatcca

SEQ ID NO: 27511 - DNA, 81 bp, Homo sapiens
cattcataaaccaaaactgctgtataatatattcattgtcagcaagttcatgtgtgtaaattgccatccaatgttattgac

SEQ ID NO: 27512 - DNA, 83 bp, Homo sapiens
ccaaaactgctgtataatatattcattgtcagcaagttcatgtgtgtaaattgccatccaatgttattgactgatataagaca

SEQ ID NO: 27513 - DNA, 86 bp, Homo sapiens
ctgctgtataatatattcattgtcagcaagttcatgtgtgtaaattgccatccaatgttattgactgatataagacagatattgaa

SEQ ID NO: 27514 - DNA, 83 bp, Homo sapiens
aatatattcattgtcagcaagttcatgtgtgtaaattgccatccaatgttattgactgatataagacagatattgaaaagaca

SEQ ID NO: 27515 - DNA, 80 bp, Homo sapiens
ttgtcagcaagttcatgtgtgtaaattgccatccaatgttattgactgatataagacagatattgaaaagacaatttaaa

SEQ ID NO: 27516 - DNA, 74 bp, Homo sapiens
gtaaattgccatccaatgttattgactgatataagacagatattgaaaagacaatttaaatttactcttccaaa

SEQ ID NO: 27517 - DNA, 73 bp, Homo sapiens
gactgatataagacagatattgaaaagacaatttaaatttactcttccaaacataaactgttccacaaaagca

SEQ ID NO: 27518 - DNA, 67 bp, Homo sapiens
ttaaatttactcttccaaacataaactgttccacaaaagcactgtaaaaactccttcaagattttgg

SEQ ID NO: 27519 - DNA, 69 bp, Homo sapiens
ttactcttccaaacataaactgttccacaaaagcactgtaaaaactccttcaagattttgggttgtgct

SEQ ID NO: 27520 - DNA, 70 bp, Homo sapiens
aacataaactgttccacaaaagcactgtaaaaactccttcaagattttgggttgtgcttgacatttatgg

SEQ ID NO: 27521 - DNA, 70 bp, Homo sapiens
cactgtaaaaactccttcaagattttgggttgtgcttgacatttatggttaactacataatttggtcgtg

SEQ ID NO: 27522 - DNA, 73 bp, Homo sapiens
actccttcaagattttgggttgtgcttgacatttatggttaactacataatttggtcgtgtcataatccattg

SEQ ID NO: 27523 - DNA, 74 bp, Homo sapiens
aagattttgggttgtgcttgacatttatggttaactacataatttggtcgtgtcataatccattgtgtttggca

SEQ ID NO: 27524 - DNA, 79 bp, Homo sapiens
ttaactacataatttggtcgtgtcataatccattgtgtttggcaatttggcattaaacgcctgcagagcagattggatc

SEQ ID NO: 27525 - DNA, 79 bp, Homo sapiens
ataatttggtcgtgtcataatccattgtgtttggcaatttggcattaaacgcctgcagagcagattggatcctcaccac

SEQ ID NO: 27526 - DNA, 82 bp, Homo sapiens
tcataatccattgtgtttggcaatttggcattaaacgcctgcagagcagattggatcctcaccacctcactagtagacagct

SEQ ID NO: 27527 - DNA, 81 bp, Homo sapiens
attgtgtttggcaatttggcattaaacgcctgcagagcagattggatcctcaccacctcactagtagacagcttgagtcta

SEQ ID NO: 27528 - DNA, 83 bp, Homo sapiens
aatttggcattaaacgcctgcagagcagattggatcctcaccacctcactagtagacagcttgagtctatgacgaagcaagca

SEQ ID NO: 27529 - DNA, 82 bp, Homo sapiens
attaaacgcctgcagagcagattggatcctcaccacctcactagtagacagcttgagtctatgacgaagcaagcaagagaaa

SEQ ID NO: 27530 - DNA, 83 bp, Homo sapiens
cagagcagattggatcctcaccacctcactagtagacagcttgagtctatgacgaagcaagcaagagaaaagatctagacgac

SEQ ID NO: 27531 - DNA, 82 bp, Homo sapiens
agattggatcctcaccacctcactagtagacagcttgagtctatgacgaagcaagcaagagaaaagatctagacgacgctga

SEQ ID NO: 27532 - DNA, 78 bp, Homo sapiens
accacctcactagtagacagcttgagtctatgacgaagcaagcaagagaaaagatctagacgacgctgaccaggtggg

SEQ ID NO: 27533 - DNA, 78 bp, Homo sapiens
tagtagacagcttgagtctatgacgaagcaagcaagagaaaagatctagacgacgctgaccaggtggggagagtttat

SEQ ID NO: 27534 - DNA, 77 bp, Homo sapiens
tatgacgaagcaagcaagagaaaagatctagacgacgctgaccaggtggggagagtttatttacacggtctctgatc

SEQ ID NO: 27535 - DNA, 74 bp, Homo sapiens
agcaagagaaaagatctagacgacgctgaccaggtggggagagtttatttacacggtctctgatctctagtagt

SEQ ID NO: 27536 - DNA, 73 bp, Homo sapiens
aaaagatctagacgacgctgaccaggtggggagagtttatttacacggtctctgatctctagtagttgcaaaa

SEQ ID NO: 27537 - DNA, 76 bp, Homo sapiens
tagacgacgctgaccaggtggggagagtttatttacacggtctctgatctctagtagttgcaaaagtgctgaatcc

SEQ ID NO: 27538 - DNA, 73 bp, Homo sapiens
accaggtggggagagtttatttacacggtctctgatctctagtagttgcaaaagtgctgaatcctgggatccc

SEQ ID NO: 27539 - DNA, 75 bp, Homo sapiens
ggagagtttatttacacggtctctgatctctagtagttgcaaaagtgctgaatcctgggatccctgagtataggg

SEQ ID NO: 27540 - DNA, 76 bp, Homo sapiens
atttacacggtctctgatctctagtagttgcaaaagtgctgaatcctgggatccctgagtataggggtagtccagc

SEQ ID NO: 27541 - DNA, 80 bp, Homo sapiens
tctctgatctctagtagttgcaaaagtgctgaatcctgggatccctgagtataggggtagtccagctgcaaaatcaggtc

SEQ ID NO: 27542 - DNA, 74 bp, Homo sapiens
aaaagtgctgaatcctgggatccctgagtataggggtagtccagctgcaaaatcaggtcccgaattgcttcagg

SEQ ID NO: 27543 - DNA, 75 bp, Homo sapiens
aatcctgggatccctgagtataggggtagtccagctgcaaaatcaggtcccgaattgcttcagggtcaaagtgca

SEQ ID NO: 27544 - DNA, 78 bp, Homo sapiens
tgagtataggggtagtccagctgcaaaatcaggtcccgaattgcttcagggtcaaagtgcatgctgtagccaaacact

SEQ ID NO: 27545 - DNA, 78 bp, Homo sapiens
ggtagtccagctgcaaaatcaggtcccgaattgcttcagggtcaaagtgcatgctgtagccaaacacttgaatgttat

SEQ ID NO: 27546 - DNA, 79 bp, Homo sapiens
tccagctgcaaaatcaggtcccgaattgcttcagggtcaaagtgcatgctgtagccaaacacttgaatgttattgattt

SEQ ID NO: 27547 - DNA, 78 bp, Homo sapiens
aaatcaggtcccgaattgcttcagggtcaaagtgcatgctgtagccaaacacttgaatgttattgattttcatatagc

SEQ ID NO: 27548 - DNA, 76 bp, Homo sapiens
gtcaaagtgcatgctgtagccaaacacttgaatgttattgattttcatatagcccaggttccgggaagggtcaata

SEQ ID NO: 27549 - DNA, 73 bp, Homo sapiens
atgctgtagccaaacacttgaatgttattgattttcatatagcccaggttccgggaagggtcaataaactcca

SEQ ID NO: 27550 - DNA, 71 bp, Homo sapiens
caaacacttgaatgttattgattttcatatagcccaggttccgggaagggtcaataaactccagaggttca

SEQ ID NO: 27551 - DNA, 71 bp, Homo sapiens
ttgaatgttattgattttcatatagcccaggttccgggaagggtcaataaactccagaggttcatagtaaa

SEQ ID NO: 27552 - DNA, 72 bp, Homo sapiens
attttcatatagcccaggttccgggaagggtcaataaactccagaggttcatagtaaatgctctcattacca

SEQ ID NO: 27553 - DNA, 80 bp, Homo sapiens
ttcatagtaaatgctctcattaccattgggaccattggacttgatgcgacttctcaggtagatgtgtactgtctcaaaaa

SEQ ID NO: 27554 - DNA, 78 bp, Homo sapiens
aaatgctctcattaccattgggaccattggacttgatgcgacttctcaggtagatgtgtactgtctcaaaaaatgtct

SEQ ID NO: 27555 - DNA, 76 bp, Homo sapiens
attaccattgggaccattggacttgatgcgacttctcaggtagatgtgtactgtctcaaaaaatgtcttccatttg

SEQ ID NO: 27556 - DNA, 75 bp, Homo sapiens
attggacttgatgcgacttctcaggtagatgtgtactgtctcaaaaaatgtcttccatttgttccccagagttaa

SEQ ID NO: 27557 - DNA, 75 bp, Homo sapiens
atgcgacttctcaggtagatgtgtactgtctcaaaaaatgtcttccatttgttccccagagttaatgtccagtta

SEQ ID NO: 27558 - DNA, 73 bp, Homo sapiens
acttctcaggtagatgtgtactgtctcaaaaaatgtcttccatttgttccccagagttaatgtccagttataa

SEQ ID NO: 27559 - DNA, 73 bp, Homo sapiens
atgtgtactgtctcaaaaaatgtcttccatttgttccccagagttaatgtccagttataacactgcaggggta

SEQ ID NO: 27560 - DNA, 70 bp, Homo sapiens
tcaaaaaatgtcttccatttgttccccagagttaatgtccagttataacactgcaggggtaggtccaact

SEQ ID NO: 27561 - DNA, 70 bp, Homo sapiens
aaatgtcttccatttgttccccagagttaatgtccagttataacactgcaggggtaggtccaacttagtc

SEQ ID NO: 27562 - DNA, 70 bp, Homo sapiens
atttgttccccagagttaatgtccagttataacactgcaggggtaggtccaacttagtccgctcccagtc

SEQ ID NO: 27563 - DNA, 70 bp, Homo sapiens
agttaatgtccagttataacactgcaggggtaggtccaacttagtccgctcccagtctggaaagctgttt

SEQ ID NO: 27564 - DNA, 75 bp, Homo sapiens
gggtaggtccaacttagtccgctcccagtctggaaagctgttttcattcacaggcataaaccagctctcagagtg

SEQ ID NO: 27565 - DNA, 77 bp, Homo sapiens
aacttagtccgctcccagtctggaaagctgttttcattcacaggcataaaccagctctcagagtggctgcctccgaa

SEQ ID NO: 27566 - DNA, 79 bp, Homo sapiens
ccagtctggaaagctgttttcattcacaggcataaaccagctctcagagtggctgcctccgaagggattgacataaaca

SEQ ID NO: 27567 - DNA, 77 bp, Homo sapiens
cataaaccagctctcagagtggctgcctccgaagggattgacataaacagccaacactggctccaaggtgctgtttt

SEQ ID NO: 27568 - DNA, 76 bp, Homo sapiens
tggctgcctccgaagggattgacataaacagccaacactggctccaaggtgctgtttttagttaagcaaatctgta

SEQ ID NO: 27569 - DNA, 72 bp, Homo sapiens
cctccgaagggattgacataaacagccaacactggctccaaggtgctgtttttagttaagcaaatctgtaaa

SEQ ID NO: 27570 - DNA, 73 bp, Homo sapiens
attgacataaacagccaacactggctccaaggtgctgtttttagttaagcaaatctgtaaagagagacccaaa

SEQ ID NO: 27571 - DNA, 74 bp, Homo sapiens
aacagccaacactggctccaaggtgctgtttttagttaagcaaatctgtaaagagagacccaaaatcatatgga

SEQ ID NO: 27572 - DNA, 73 bp, Homo sapiens
ctccaaggtgctgtttttagttaagcaaatctgtaaagagagacccaaaatcatatggaccagacttgacttg

SEQ ID NO: 27573 - DNA, 73 bp, Homo sapiens
ctgtttttagttaagcaaatctgtaaagagagacccaaaatcatatggaccagacttgacttgtacttattgc

SEQ ID NO: 27574 - DNA, 75 bp, Homo sapiens
tttagttaagcaaatctgtaaagagagacccaaaatcatatggaccagacttgacttgtacttattgctcttcaa

SEQ ID NO: 27575 - DNA, 77 bp, Homo sapiens
aaatctgtaaagagagacccaaaatcatatggaccagacttgacttgtacttattgctcttcaaggtgaggagcatc

SEQ ID NO: 27576 - DNA, 77 bp, Homo sapiens
aagagagacccaaaatcatatggaccagacttgacttgtacttattgctcttcaaggtgaggagcatccgcttacgc

SEQ ID NO: 27577 - DNA, 76 bp, Homo sapiens
accagacttgacttgtacttattgctcttcaaggtgaggagcatccgcttacgccaggagggatcaaaccagctat

SEQ ID NO: 27578 - DNA, 80 bp, Homo sapiens
cttgtacttattgctcttcaaggtgaggagcatccgcttacgccaggagggatcaaaccagctattgaggcgcatgtcat

SEQ ID NO: 27579 - DNA, 83 bp, Homo sapiens
ttattgctcttcaaggtgaggagcatccgcttacgccaggagggatcaaaccagctattgaggcgcatgtcattgctgataaa

SEQ ID NO: 27580 - DNA, 83 bp, Homo sapiens
ttcaaggtgaggagcatccgcttacgccaggagggatcaaaccagctattgaggcgcatgtcattgctgataaaaatggcatg

SEQ ID NO: 27581 - DNA, 80 bp, Homo sapiens
atccgcttacgccaggagggatcaaaccagctattgaggcgcatgtcattgctgataaaaatggcatggacttctattcg

SEQ ID NO: 27582 - DNA, 81 bp, Homo sapiens
cttacgccaggagggatcaaaccagctattgaggcgcatgtcattgctgataaaaatggcatggacttctattcgtctgtc

SEQ ID NO: 27583 - DNA, 84 bp, Homo sapiens
accagctattgaggcgcatgtcattgctgataaaaatggcatggacttctattcgtctgtccgttttctgcagcagatatttca

SEQ ID NO: 27584 - DNA, 83 bp, Homo sapiens
tgctgataaaaatggcatggacttctattcgtctgtccgttttctgcagcagatatttcatctcgagatcttgcaggtcagtt

SEQ ID NO: 27585 - DNA, 80 bp, Homo sapiens
aaaaatggcatggacttctattcgtctgtccgttttctgcagcagatatttcatctcgagatcttgcaggtcagtttcaa

SEQ ID NO: 27586 - DNA, 81 bp, Homo sapiens
atggacttctattcgtctgtccgttttctgcagcagatatttcatctcgagatcttgcaggtcagtttcaaagccaatata

SEQ ID NO: 27587 - DNA, 81 bp, Homo sapiens
attcgtctgtccgttttctgcagcagatatttcatctcgagatcttgcaggtcagtttcaaagccaatatagtgatcggtg

SEQ ID NO: 27588 - DNA, 83 bp, Homo sapiens
ttttctgcagcagatatttcatctcgagatcttgcaggtcagtttcaaagccaatatagtgatcggtggactcggcgacttca

SEQ ID NO: 27589 - DNA, 82 bp, Homo sapiens
agatatttcatctcgagatcttgcaggtcagtttcaaagccaatatagtgatcggtggactcggcgacttcaggcttgcaga

SEQ ID NO: 27590 - DNA, 81 bp, Homo sapiens
ttcatctcgagatcttgcaggtcagtttcaaagccaatatagtgatcggtggactcggcgacttcaggcttgcagagcccc

SEQ ID NO: 27591 - DNA, 83 bp, Homo sapiens
tcttgcaggtcagtttcaaagccaatatagtgatcggtggactcggcgacttcaggcttgcagagcccctggctgagcatgta

SEQ ID NO: 27592 - DNA, 82 bp, Homo sapiens
tttcaaagccaatatagtgatcggtggactcggcgacttcaggcttgcagagcccctggctgagcatgtagccggtgttgca

SEQ ID NO: 27593 - DNA, 82 bp, Homo sapiens
aagccaatatagtgatcggtggactcggcgacttcaggcttgcagagcccctggctgagcatgtagccggtgttgcaggtgc

SEQ ID NO: 27594 - DNA, 81 bp, Homo sapiens
agtgatcggtggactcggcgacttcaggcttgcagagcccctggctgagcatgtagccggtgttgcaggtgccgcagcggg

SEQ ID NO: 27595 - DNA, 85 bp, Homo sapiens
acttcaggcttgcagagcccctggctgagcatgtagccggtgttgcaggtgccgcagcgggtgcggttgtctggtgcgcatgtca

SEQ ID NO: 27596 - DNA, 85 bp, Homo sapiens
agagcccctggctgagcatgtagccggtgttgcaggtgccgcagcgggtgcggttgtctggtgcgcatgtcaggcaggcagaggc

SEQ ID NO: 27597 - DNA, 88 bp, Homo sapiens
tgagcatgtagccggtgttgcaggtgccgcagcgggtgcggttgtctggtgcgcatgtcaggcaggcagaggcgtctcccactgtgca

SEQ ID NO: 27598 - DNA, 84 bp, Homo sapiens
atgtagccggtgttgcaggtgccgcagcgggtgcggttgtctggtgcgcatgtcaggcaggcagaggcgtctcccactgtgcag

SEQ ID NO: 27599 - DNA, 85 bp, Homo sapiens
tgttgcaggtgccgcagcgggtgcggttgtctggtgcgcatgtcaggcaggcagaggcgtctcccactgtgcagggcaggaacgc

SEQ ID NO: 27600 - DNA, 82 bp, Homo sapiens
agcgggtgcggttgtctggtgcgcatgtcaggcaggcagaggcgtctcccactgtgcagggcaggaacgcggtgcagaccac

SEQ ID NO: 27601 - DNA, 83 bp, Homo sapiens
ggttgtctggtgcgcatgtcaggcaggcagaggcgtctcccactgtgcagggcaggaacgcggtgcagaccacctggtcattc

SEQ ID NO: 27602 - DNA, 83 bp, Homo sapiens
tggtgcgcatgtcaggcaggcagaggcgtctcccactgtgcagggcaggaacgcggtgcagaccacctggtcattcggacacg

SEQ ID NO: 27603 - DNA, 81 bp, Homo sapiens
aggcaggcagaggcgtctcccactgtgcagggcaggaacgcggtgcagaccacctggtcattcggacacgtgcacgagtgc

SEQ ID NO: 27604 - DNA, 81 bp, Homo sapiens
ggcgtctcccactgtgcagggcaggaacgcggtgcagaccacctggtcattcggacacgtgcacgagtgcgtctcttctga

SEQ ID NO: 27605 - DNA, 78 bp, Homo sapiens
agggcaggaacgcggtgcagaccacctggtcattcggacacgtgcacgagtgcgtctcttctgaaaagctgcctagga

SEQ ID NO: 27606 - DNA, 81 bp, Homo sapiens
ggtgcagaccacctggtcattcggacacgtgcacgagtgcgtctcttctgaaaagctgcctaggaggccgttctcattgca

SEQ ID NO: 27607 - DNA, 79 bp, Homo sapiens
agaccacctggtcattcggacacgtgcacgagtgcgtctcttctgaaaagctgcctaggaggccgttctcattgcagta

SEQ ID NO: 27608 - DNA, 80 bp, Homo sapiens
acgtgcacgagtgcgtctcttctgaaaagctgcctaggaggccgttctcattgcagtagagaaaagactggatgcgagta

SEQ ID NO: 27609 - DNA, 77 bp, Homo sapiens
gtctcttctgaaaagctgcctaggaggccgttctcattgcagtagagaaaagactggatgcgagtaagccagtaggt

SEQ ID NO: 27610 - DNA, 75 bp, Homo sapiens
aaaagctgcctaggaggccgttctcattgcagtagagaaaagactggatgcgagtaagccagtaggttgaggttc

SEQ ID NO: 27611 - DNA, 76 bp, Homo sapiens
ttctcattgcagtagagaaaagactggatgcgagtaagccagtaggttgaggttctagaaatacaaaacagaacga

SEQ ID NO: 27612 - DNA, 73 bp, Homo sapiens
agtagagaaaagactggatgcgagtaagccagtaggttgaggttctagaaatacaaaacagaacgaatctaca

SEQ ID NO: 27613 - DNA, 72 bp, Homo sapiens
aaaagactggatgcgagtaagccagtaggttgaggttctagaaatacaaaacagaacgaatctacataaata

SEQ ID NO: 27614 - DNA, 72 bp, Homo sapiens
actttttcggcaataaacttaattgcttacattaccacaaatgtcttacctttgtcttggcaggctgatgag

SEQ ID NO: 27615 - DNA, 71 bp, Homo sapiens
aataaacttaattgcttacattaccacaaatgtcttacctttgtcttggcaggctgatgaggggttgttta

SEQ ID NO: 27616 - DNA, 74 bp, Homo sapiens
ttaattgcttacattaccacaaatgtcttacctttgtcttggcaggctgatgaggggttgtttatgacacctct

SEQ ID NO: 27617 - DNA, 74 bp, Homo sapiens
ttaccacaaatgtcttacctttgtcttggcaggctgatgaggggttgtttatgacacctcttgctaaggctaaa

SEQ ID NO: 27618 - DNA, 72 bp, Homo sapiens
aaatgtcttacctttgtcttggcaggctgatgaggggttgtttatgacacctcttgctaaggctaaaaagct

SEQ ID NO: 27619 - DNA, 73 bp, Homo sapiens
ctttgtcttggcaggctgatgaggggttgtttatgacacctcttgctaaggctaaaaagcttgtgtacaattt

SEQ ID NO: 27620 - DNA, 73 bp, Homo sapiens
aggctgatgaggggttgtttatgacacctcttgctaaggctaaaaagcttgtgtacaattttctgcgccttta

SEQ ID NO: 27621 - DNA, 69 bp, Homo sapiens
ggttgtttatgacacctcttgctaaggctaaaaagcttgtgtacaattttctgcgcctttaggaaaagt

SEQ ID NO: 27622 - DNA, 71 bp, Homo sapiens
tttatgacacctcttgctaaggctaaaaagcttgtgtacaattttctgcgcctttaggaaaagttgtttca

SEQ ID NO: 27623 - DNA, 72 bp, Homo sapiens
ttgctaaggctaaaaagcttgtgtacaattttctgcgcctttaggaaaagttgtttcatgctgttctccagt

SEQ ID NO: 27624 - DNA, 72 bp, Homo sapiens
taaaaagcttgtgtacaattttctgcgcctttaggaaaagttgtttcatgctgttctccagttgttcataac

SEQ ID NO: 27625 - DNA, 73 bp, Homo sapiens
tgtacaattttctgcgcctttaggaaaagttgtttcatgctgttctccagttgttcataacggcgctgaaaat

SEQ ID NO: 27626 - DNA, 72 bp, Homo sapiens
attttctgcgcctttaggaaaagttgtttcatgctgttctccagttgttcataacggcgctgaaaattagaa

SEQ ID NO: 27627 - DNA, 74 bp, Homo sapiens
ttaggaaaagttgtttcatgctgttctccagttgttcataacggcgctgaaaattagaatccattgtccacaaa

SEQ ID NO: 27628 - DNA, 78 bp, Homo sapiens
agttgtttcatgctgttctccagttgttcataacggcgctgaaaattagaatccattgtccacaaatgcattatagta

SEQ ID NO: 27629 - DNA, 79 bp, Homo sapiens
tgttctccagttgttcataacggcgctgaaaattagaatccattgtccacaaatgcattatagtagatgtgttgaggaa

SEQ ID NO: 27630 - DNA, 76 bp, Homo sapiens
agttgttcataacggcgctgaaaattagaatccattgtccacaaatgcattatagtagatgtgttgaggaaataat

SEQ ID NO: 27631 - DNA, 77 bp, Homo sapiens
ataacggcgctgaaaattagaatccattgtccacaaatgcattatagtagatgtgttgaggaaataattcataggta

SEQ ID NO: 27632 - DNA, 77 bp, Homo sapiens
gaaaattagaatccattgtccacaaatgcattatagtagatgtgttgaggaaataattcataggtagccttttcata

SEQ ID NO: 27633 - DNA, 77 bp, Homo sapiens
atccattgtccacaaatgcattatagtagatgtgttgaggaaataattcataggtagccttttcataaataacttga

SEQ ID NO: 27634 - DNA, 78 bp, Homo sapiens
ccacaaatgcattatagtagatgtgttgaggaaataattcataggtagccttttcataaataacttgaattcatctga

SEQ ID NO: 27635 - DNA, 75 bp, Homo sapiens
atagtagatgtgttgaggaaataattcataggtagccttttcataaataacttgaattcatctgaaaaatgtcaa

SEQ ID NO: 27636 - DNA, 74 bp, Homo sapiens
atgtgttgaggaaataattcataggtagccttttcataaataacttgaattcatctgaaaaatgtcaaaattca

SEQ ID NO: 27637 - DNA, 72 bp, Homo sapiens
gaaataattcataggtagccttttcataaataacttgaattcatctgaaaaatgtcaaaattcaacacttta

SEQ ID NO: 27638 - DNA, 70 bp, Homo sapiens
attttttgtcaatatttaaaagtgttatattaaaatacatgtcttacctgattcctcaaagtcactgttg

SEQ ID NO: 27639 - DNA, 71 bp, Homo sapiens
atatttaaaagtgttatattaaaatacatgtcttacctgattcctcaaagtcactgttgtaagctttccag

SEQ ID NO: 27640 - DNA, 71 bp, Homo sapiens
aagtgttatattaaaatacatgtcttacctgattcctcaaagtcactgttgtaagctttccaggtttcagt

SEQ ID NO: 27641 - DNA, 73 bp, Homo sapiens
taaaatacatgtcttacctgattcctcaaagtcactgttgtaagctttccaggtttcagttattcgaagaaga

SEQ ID NO: 27642 - DNA, 73 bp, Homo sapiens
acatgtcttacctgattcctcaaagtcactgttgtaagctttccaggtttcagttattcgaagaagattctct

SEQ ID NO: 27643 - DNA, 74 bp, Homo sapiens
attcctcaaagtcactgttgtaagctttccaggtttcagttattcgaagaagattctcttccatggcttgaatg

SEQ ID NO: 27644 - DNA, 75 bp, Homo sapiens
aaagtcactgttgtaagctttccaggtttcagttattcgaagaagattctcttccatggcttgaatgtccatgga

SEQ ID NO: 27645 - DNA, 77 bp, Homo sapiens
taagctttccaggtttcagttattcgaagaagattctcttccatggcttgaatgtccatggaggggcagttgcattc

SEQ ID NO: 27646 - DNA, 75 bp, Homo sapiens
aggtttcagttattcgaagaagattctcttccatggcttgaatgtccatggaggggcagttgcattctggaaatt

SEQ ID NO: 27647 - DNA, 76 bp, Homo sapiens
agttattcgaagaagattctcttccatggcttgaatgtccatggaggggcagttgcattctggaaatttgggacca

SEQ ID NO: 27648 - DNA, 78 bp, Homo sapiens
aagaagattctcttccatggcttgaatgtccatggaggggcagttgcattctggaaatttgggaccacagtgacacca

SEQ ID NO: 27649 - DNA, 80 bp, Homo sapiens
tcttccatggcttgaatgtccatggaggggcagttgcattctggaaatttgggaccacagtgacaccagcagtcattttc

SEQ ID NO: 27650 - DNA, 78 bp, Homo sapiens
aatgtccatggaggggcagttgcattctggaaatttgggaccacagtgacaccagcagtcattttccttgcagataaa

SEQ ID NO: 27651 - DNA, 77 bp, Homo sapiens
atggaggggcagttgcattctggaaatttgggaccacagtgacaccagcagtcattttccttgcagataaactctcc

SEQ ID NO: 27652 - DNA, 79 bp, Homo sapiens
gttgcattctggaaatttgggaccacagtgacaccagcagtcattttccttgcagataaactctccctctgaattgcaa

SEQ ID NO: 27653 - DNA, 80 bp, Homo sapiens
aatttgggaccacagtgacaccagcagtcattttccttgcagataaactctccctctgaattgcaagcaatgtagctcaa

SEQ ID NO: 27654 - DNA, 84 bp, Homo sapiens
cacagtgacaccagcagtcattttccttgcagataaactctccctctgaattgcaagcaatgtagctcaaagctgcttgtacaa

SEQ ID NO: 27655 - DNA, 80 bp, Homo sapiens
acaccagcagtcattttccttgcagataaactctccctctgaattgcaagcaatgtagctcaaagctgcttgtacaaaac

SEQ ID NO: 27656 - DNA, 78 bp, Homo sapiens
agataaactctccctctgaattgcaagcaatgtagctcaaagctgcttgtacaaaacgttcctgaagatagtctggga

SEQ ID NO: 27657 - DNA, 79 bp, Homo sapiens
tccctctgaattgcaagcaatgtagctcaaagctgcttgtacaaaacgttcctgaagatagtctgggagaagtacttga

SEQ ID NO: 27658 - DNA, 76 bp, Homo sapiens
attgcaagcaatgtagctcaaagctgcttgtacaaaacgttcctgaagatagtctgggagaagtacttgaagccct

SEQ ID NO: 27659 - DNA, 74 bp, Homo sapiens
aatgtagctcaaagctgcttgtacaaaacgttcctgaagatagtctgggagaagtacttgaagcccttgaagaa

SEQ ID NO: 27660 - DNA, 71 bp, Homo sapiens
aaagctgcttgtacaaaacgttcctgaagatagtctgggagaagtacttgaagcccttgaagaacaaacaa

SEQ ID NO: 27661 - DNA, 69 bp, Homo sapiens
cttgtacaaaacgttcctgaagatagtctgggagaagtacttgaagcccttgaagaacaaacaaagaaa

SEQ ID NO: 27662 - DNA, 68 bp, Homo sapiens
acgttcctgaagatagtctgggagaagtacttgaagcccttgaagaacaaacaaagaaattaacaaat

SEQ ID NO: 27663 - DNA, 76 bp, Homo sapiens
attgctattcaggcttgtagagaattaatgaaattttaccaacataccttgcaactgaatcttattctcaggactc

SEQ ID NO: 27664 - DNA, 75 bp, Homo sapiens
attcaggcttgtagagaattaatgaaattttaccaacataccttgcaactgaatcttattctcaggactctgaac

SEQ ID NO: 27665 - DNA, 75 bp, Homo sapiens
agaattaatgaaattttaccaacataccttgcaactgaatcttattctcaggactctgaaccagaacagaactga

SEQ ID NO: 27666 - DNA, 77 bp, Homo sapiens
atgaaattttaccaacataccttgcaactgaatcttattctcaggactctgaaccagaacagaactgacagaatcta

SEQ ID NO: 27667 - DNA, 78 bp, Homo sapiens
aacataccttgcaactgaatcttattctcaggactctgaaccagaacagaactgacagaatctaggttgtcatagtta

SEQ ID NO: 27668 - DNA, 82 bp, Homo sapiens
ttgcaactgaatcttattctcaggactctgaaccagaacagaactgacagaatctaggttgtcatagttactgcagccaaga

SEQ ID NO: 27669 - DNA, 79 bp, Homo sapiens
aatcttattctcaggactctgaaccagaacagaactgacagaatctaggttgtcatagttactgcagccaagaggacca

SEQ ID NO: 27670 - DNA, 76 bp, Homo sapiens
aggactctgaaccagaacagaactgacagaatctaggttgtcatagttactgcagccaagaggaccagtccgtgtt

SEQ ID NO: 27671 - DNA, 75 bp, Homo sapiens
aaccagaacagaactgacagaatctaggttgtcatagttactgcagccaagaggaccagtccgtgtttctgttac

SEQ ID NO: 27672 - DNA, 75 bp, Homo sapiens
actgacagaatctaggttgtcatagttactgcagccaagaggaccagtccgtgtttctgttacctggcaaacaaa

SEQ ID NO: 27673 - DNA, 74 bp, Homo sapiens
aatctaggttgtcatagttactgcagccaagaggaccagtccgtgtttctgttacctggcaaacaaaacatcaa

SEQ ID NO: 27674 - DNA, 73 bp, Homo sapiens
atagttactgcagccaagaggaccagtccgtgtttctgttacctggcaaacaaaacatcaactttattatcta

SEQ ID NO: 27675 - DNA, 73 bp, Homo sapiens
gaaacaaacaatggaaggtgataattttagcgtaaactcattcttacctttatggcagtggatgcaatttgaa

SEQ ID NO: 27676 - DNA, 75 bp, Homo sapiens
aacaatggaaggtgataattttagcgtaaactcattcttacctttatggcagtggatgcaatttgaatgtggtga

SEQ ID NO: 27677 - DNA, 73 bp, Homo sapiens
ataattttagcgtaaactcattcttacctttatggcagtggatgcaatttgaatgtggtgaagtctccgaagg

SEQ ID NO: 27678 - DNA, 76 bp, Homo sapiens
ttagcgtaaactcattcttacctttatggcagtggatgcaatttgaatgtggtgaagtctccgaagggtgctgtcc

SEQ ID NO: 27679 - DNA, 77 bp, Homo sapiens
attcttacctttatggcagtggatgcaatttgaatgtggtgaagtctccgaagggtgctgtccctgtcaatgaaata

SEQ ID NO: 27680 - DNA, 79 bp, Homo sapiens
tttatggcagtggatgcaatttgaatgtggtgaagtctccgaagggtgctgtccctgtcaatgaaataagaagcggcta

SEQ ID NO: 27681 - DNA, 80 bp, Homo sapiens
agtggatgcaatttgaatgtggtgaagtctccgaagggtgctgtccctgtcaatgaaataagaagcggctagctgatgta

SEQ ID NO: 27682 - DNA, 79 bp, Homo sapiens
atttgaatgtggtgaagtctccgaagggtgctgtccctgtcaatgaaataagaagcggctagctgatgtagcgtctcca

SEQ ID NO: 27683 - DNA, 78 bp, Homo sapiens
aagtctccgaagggtgctgtccctgtcaatgaaataagaagcggctagctgatgtagcgtctccagagtgaccgaaga

SEQ ID NO: 27684 - DNA, 79 bp, Homo sapiens
aagggtgctgtccctgtcaatgaaataagaagcggctagctgatgtagcgtctccagagtgaccgaagagctattggtg

SEQ ID NO: 27685 - DNA, 80 bp, Homo sapiens
tccctgtcaatgaaataagaagcggctagctgatgtagcgtctccagagtgaccgaagagctattggtggtggaatcact

SEQ ID NO: 27686 - DNA, 79 bp, Homo sapiens
aatgaaataagaagcggctagctgatgtagcgtctccagagtgaccgaagagctattggtggtggaatcacttccttca

SEQ ID NO: 27687 - DNA, 81 bp, Homo sapiens
aagcggctagctgatgtagcgtctccagagtgaccgaagagctattggtggtggaatcacttccttcagctcgtttgctca

SEQ ID NO: 27688 - DNA, 77 bp, Homo sapiens
atgtagcgtctccagagtgaccgaagagctattggtggtggaatcacttccttcagctcgtttgctcaacttccgct

SEQ ID NO: 27689 - DNA, 77 bp, Homo sapiens
tccagagtgaccgaagagctattggtggtggaatcacttccttcagctcgtttgctcaacttccgcttgtccacaaa

SEQ ID NO: 27690 - DNA, 74 bp, Homo sapiens
agtgaccgaagagctattggtggtggaatcacttccttcagctcgtttgctcaacttccgcttgtccacaaaaa

SEQ ID NO: 27691 - DNA, 76 bp, Homo sapiens
tattggtggtggaatcacttccttcagctcgtttgctcaacttccgcttgtccacaaaaattgtgagtgactcctc

SEQ ID NO: 27692 - DNA, 78 bp, Homo sapiens
gaatcacttccttcagctcgtttgctcaacttccgcttgtccacaaaaattgtgagtgactcctctcctgcattaata

SEQ ID NO: 27693 - DNA, 76 bp, Homo sapiens
ttccttcagctcgtttgctcaacttccgcttgtccacaaaaattgtgagtgactcctctcctgcattaataatatt

SEQ ID NO: 27694 - DNA, 76 bp, Homo sapiens
tttgctcaacttccgcttgtccacaaaaattgtgagtgactcctctcctgcattaataatatttcaaattattcaa

SEQ ID NO: 27695 - DNA, 74 bp, Homo sapiens
cttccgcttgtccacaaaaattgtgagtgactcctctcctgcattaataatatttcaaattattcaattttcca

SEQ ID NO: 27696 - DNA, 78 bp, Homo sapiens
ttttaggcacaagcacacacaggcacaaataggttcaaagagccgtacctcccagagtagcagatagcaagaaatgtg

SEQ ID NO: 27697 - DNA, 77 bp, Homo sapiens
aagcacacacaggcacaaataggttcaaagagccgtacctcccagagtagcagatagcaagaaatgtgtcccatatt

SEQ ID NO: 27698 - DNA, 71 bp, Homo sapiens
atatttcttgataaggttttctgtgatttgctgaagggtaggtcgacgtcccaaaagtcttatgttgcgga

SEQ ID NO: 27699 - DNA, 72 bp, Homo sapiens
ttgataaggttttctgtgatttgctgaagggtaggtcgacgtcccaaaagtcttatgttgcggaagaattca

SEQ ID NO: 27700 - DNA, 72 bp, Homo sapiens
ttttctgtgatttgctgaagggtaggtcgacgtcccaaaagtcttatgttgcggaagaattcaggggcaaga

SEQ ID NO: 27701 - DNA, 72 bp, Homo sapiens
atttgctgaagggtaggtcgacgtcccaaaagtcttatgttgcggaagaattcaggggcaagaggcagagga

SEQ ID NO: 27702 - DNA, 72 bp, Homo sapiens
taggtcgacgtcccaaaagtcttatgttgcggaagaattcaggggcaagaggcagaggagagccaaggaaat

SEQ ID NO: 27703 - DNA, 71 bp, Homo sapiens
acgtcccaaaagtcttatgttgcggaagaattcaggggcaagaggcagaggagagccaaggaaatttcttc

SEQ ID NO: 27704 - DNA, 75 bp, Homo sapiens
ttatgttgcggaagaattcaggggcaagaggcagaggagagccaaggaaatttcttctctcaactgcaaggttat

SEQ ID NO: 27705 - DNA, 72 bp, Homo sapiens
aagaattcaggggcaagaggcagaggagagccaaggaaatttcttctctcaactgcaaggttatttactttc

SEQ ID NO: 27706 - DNA, 73 bp, Homo sapiens
gggcaagaggcagaggagagccaaggaaatttcttctctcaactgcaaggttatttactttccagcggccaaa

SEQ ID NO: 27707 - DNA, 72 bp, Homo sapiens
cagaggagagccaaggaaatttcttctctcaactgcaaggttatttactttccagcggccaaactccctgaa

SEQ ID NO: 27708 - DNA, 69 bp, Homo sapiens
ccaaggaaatttcttctctcaactgcaaggttatttactttccagcggccaaactccctgaaaagcaaa

SEQ ID NO: 27709 - DNA, 68 bp, Homo sapiens
aaatttcttctctcaactgcaaggttatttactttccagcggccaaactccctgaaaagcaaatttat

SEQ ID NO: 27710 - DNA, 70 bp, Homo sapiens
ctctcaactgcaaggttatttactttccagcggccaaactccctgaaaagcaaatttatttttattcata

SEQ ID NO: 27711 - DNA, 76 bp, Homo sapiens
aaccttcaaggatgatatttctgtaattgctttccctttgcttcatacctgtatatcttgtatcttgtgctaaatc

SEQ ID NO: 27712 - DNA, 76 bp, Homo sapiens
aaggatgatatttctgtaattgctttccctttgcttcatacctgtatatcttgtatcttgtgctaaatccctgccg

SEQ ID NO: 27713 - DNA, 77 bp, Homo sapiens
tgtaattgctttccctttgcttcatacctgtatatcttgtatcttgtgctaaatccctgccggcttctgtccacaaa

SEQ ID NO: 27714 - DNA, 77 bp, Homo sapiens
ttccctttgcttcatacctgtatatcttgtatcttgtgctaaatccctgccggcttctgtccacaaaatctgtgtat

SEQ ID NO: 27715 - DNA, 81 bp, Homo sapiens
ttcatacctgtatatcttgtatcttgtgctaaatccctgccggcttctgtccacaaaatctgtgtattcctgtgagcgatg

SEQ ID NO: 27716 - DNA, 78 bp, Homo sapiens
atatcttgtatcttgtgctaaatccctgccggcttctgtccacaaaatctgtgtattcctgtgagcgatggaagggtc

SEQ ID NO: 27717 - DNA, 78 bp, Homo sapiens
tatcttgtgctaaatccctgccggcttctgtccacaaaatctgtgtattcctgtgagcgatggaagggtcccttatca

SEQ ID NO: 27718 - DNA, 76 bp, Homo sapiens
ctaaatccctgccggcttctgtccacaaaatctgtgtattcctgtgagcgatggaagggtcccttatcagagagga

SEQ ID NO: 27719 - DNA, 76 bp, Homo sapiens
ccggcttctgtccacaaaatctgtgtattcctgtgagcgatggaagggtcccttatcagagaggagccagtcgaag

SEQ ID NO: 27720 - DNA, 77 bp, Homo sapiens
tgtccacaaaatctgtgtattcctgtgagcgatggaagggtcccttatcagagaggagccagtcgaaggggcttgtg

SEQ ID NO: 27721 - DNA, 80 bp, Homo sapiens
tgtgtattcctgtgagcgatggaagggtcccttatcagagaggagccagtcgaaggggcttgtggcatgctgatccgaaa

SEQ ID NO: 27722 - DNA, 82 bp, Homo sapiens
tcctgtgagcgatggaagggtcccttatcagagaggagccagtcgaaggggcttgtggcatgctgatccgaaacagcagcaa

SEQ ID NO: 27723 - DNA, 77 bp, Homo sapiens
gaagggtcccttatcagagaggagccagtcgaaggggcttgtggcatgctgatccgaaacagcagcaaccgctaaaa

SEQ ID NO: 27724 - DNA, 81 bp, Homo sapiens
ttatcagagaggagccagtcgaaggggcttgtggcatgctgatccgaaacagcagcaaccgctaaaacccagcaatgaaga

SEQ ID NO: 27725 - DNA, 80 bp, Homo sapiens
agagaggagccagtcgaaggggcttgtggcatgctgatccgaaacagcagcaaccgctaaaacccagcaatgaagactca

SEQ ID NO: 27726 - DNA, 80 bp, Homo sapiens
agtcgaaggggcttgtggcatgctgatccgaaacagcagcaaccgctaaaacccagcaatgaagactcagtgctatccac

SEQ ID NO: 27727 - DNA, 86 bp, Homo sapiens
ttgtggcatgctgatccgaaacagcagcaaccgctaaaacccagcaatgaagactcagtgctatccactcccatagagccatcaga

SEQ ID NO: 27728 - DNA, 84 bp, Homo sapiens
atgctgatccgaaacagcagcaaccgctaaaacccagcaatgaagactcagtgctatccactcccatagagccatcagagagaa

SEQ ID NO: 27729 - DNA, 83 bp, Homo sapiens
aaacagcagcaaccgctaaaacccagcaatgaagactcagtgctatccactcccatagagccatcagagagaacaattcagca

SEQ ID NO: 27730 - DNA, 83 bp, Homo sapiens
aaccgctaaaacccagcaatgaagactcagtgctatccactcccatagagccatcagagagaacaattcagcaccagctctgc

SEQ ID NO: 27731 - DNA, 90 bp, Homo sapiens
agcaatgaagactcagtgctatccactcccatagagccatcagagagaacaattcagcaccagctctgcttcgccatatcatgcttccac

SEQ ID NO: 27732 - DNA, 87 bp, Homo sapiens
aagactcagtgctatccactcccatagagccatcagagagaacaattcagcaccagctctgcttcgccatatcatgcttccactggg

SEQ ID NO: 27733 - DNA, 87 bp, Homo sapiens
atagagccatcagagagaacaattcagcaccagctctgcttcgccatatcatgcttccactggggatttagagccttcattctctca

SEQ ID NO: 27734 - DNA, 85 bp, Homo sapiens
atcagagagaacaattcagcaccagctctgcttcgccatatcatgcttccactggggatttagagccttcattctctcagctttc

SEQ ID NO: 27735 - DNA, 82 bp, Homo sapiens
aacaattcagcaccagctctgcttcgccatatcatgcttccactggggatttagagccttcattctctcagctttccctcaa

SEQ ID NO: 27736 - DNA, 81 bp, Homo sapiens
cagctctgcttcgccatatcatgcttccactggggatttagagccttcattctctcagctttccctcaacacctagacaaa

SEQ ID NO: 27737 - DNA, 79 bp, Homo sapiens
ttcgccatatcatgcttccactggggatttagagccttcattctctcagctttccctcaacacctagacaaaatacaca

SEQ ID NO: 27738 - DNA, 76 bp, Homo sapiens
atgcttccactggggatttagagccttcattctctcagctttccctcaacacctagacaaaatacacaggcaatta

SEQ ID NO: 27739 - DNA, 73 bp, Homo sapiens
actggggatttagagccttcattctctcagctttccctcaacacctagacaaaatacacaggcaattagttaa

SEQ ID NO: 27740 - DNA, 75 bp, Homo sapiens
gttcttggcagcgggagcccctcagatgtaaatttccctttcacacgcttgagcttcaggtataatacagcaaaa

SEQ ID NO: 27741 - DNA, 74 bp, Homo sapiens
gagcccctcagatgtaaatttccctttcacacgcttgagcttcaggtataatacagcaaaacgcacttacctaa

SEQ ID NO: 27742 - DNA, 73 bp, Homo sapiens
agatgtaaatttccctttcacacgcttgagcttcaggtataatacagcaaaacgcacttacctaaatactgac

SEQ ID NO: 27743 - DNA, 75 bp, Homo sapiens
tccctttcacacgcttgagcttcaggtataatacagcaaaacgcacttacctaaatactgactgtctgttcctta

SEQ ID NO: 27744 - DNA, 77 bp, Homo sapiens
ttcacacgcttgagcttcaggtataatacagcaaaacgcacttacctaaatactgactgtctgttccttactggatc

SEQ ID NO: 27745 - DNA, 76 bp, Homo sapiens
ttcaggtataatacagcaaaacgcacttacctaaatactgactgtctgttccttactggatctgactgtactgaaa

SEQ ID NO: 27746 - DNA, 73 bp, Homo sapiens
ataatacagcaaaacgcacttacctaaatactgactgtctgttccttactggatctgactgtactgaaagttt

SEQ ID NO: 27747 - DNA, 69 bp, Homo sapiens
caaaacgcacttacctaaatactgactgtctgttccttactggatctgactgtactgaaagtttttttt

SEQ ID NO: 27748 - DNA, 71 bp, Homo sapiens
aatagcaatagttaagtttctagtaacagataaagagaataacttaccagaggaaatttcaggaagcaaga

SEQ ID NO: 27749 - DNA, 72 bp, Homo sapiens
gttaagtttctagtaacagataaagagaataacttaccagaggaaatttcaggaagcaagaagactgtgaga

SEQ ID NO: 27750 - DNA, 73 bp, Homo sapiens
ctagtaacagataaagagaataacttaccagaggaaatttcaggaagcaagaagactgtgagaaaaatacatc

SEQ ID NO: 27751 - DNA, 72 bp, Homo sapiens
aaagagaataacttaccagaggaaatttcaggaagcaagaagactgtgagaaaaatacatccaggattcaaa

SEQ ID NO: 27752 - DNA, 75 bp, Homo sapiens
taacttaccagaggaaatttcaggaagcaagaagactgtgagaaaaatacatccaggattcaaatagatattcca

SEQ ID NO: 27753 - DNA, 76 bp, Homo sapiens
aggaaatttcaggaagcaagaagactgtgagaaaaatacatccaggattcaaatagatattccatgatcttccaaa

SEQ ID NO: 27754 - DNA, 76 bp, Homo sapiens
aggaagcaagaagactgtgagaaaaatacatccaggattcaaatagatattccatgatcttccaaatcaaggtaaa

SEQ ID NO: 27755 - DNA, 77 bp, Homo sapiens
caagaagactgtgagaaaaatacatccaggattcaaatagatattccatgatcttccaaatcaaggtaaagtagtga

SEQ ID NO: 27756 - DNA, 76 bp, Homo sapiens
aaaaatacatccaggattcaaatagatattccatgatcttccaaatcaaggtaaagtagtgagctgcagggtagta

SEQ ID NO: 27757 - DNA, 76 bp, Homo sapiens
tccaggattcaaatagatattccatgatcttccaaatcaaggtaaagtagtgagctgcagggtagtaggactttaa

SEQ ID NO: 27758 - DNA, 74 bp, Homo sapiens
attcaaatagatattccatgatcttccaaatcaaggtaaagtagtgagctgcagggtagtaggactttaaaata

SEQ ID NO: 27759 - DNA, 75 bp, Homo sapiens
atattccatgatcttccaaatcaaggtaaagtagtgagctgcagggtagtaggactttaaaataatcagcagttc

SEQ ID NO: 27760 - DNA, 75 bp, Homo sapiens
tccaaatcaaggtaaagtagtgagctgcagggtagtaggactttaaaataatcagcagttcctggtggcatgtaa

SEQ ID NO: 27761 - DNA, 73 bp, Homo sapiens
gtaaagtagtgagctgcagggtagtaggactttaaaataatcagcagttcctggtggcatgtaaccaagtaaa

SEQ ID NO: 27762 - DNA, 73 bp, Homo sapiens
tgagctgcagggtagtaggactttaaaataatcagcagttcctggtggcatgtaaccaagtaaaaaccagtta

SEQ ID NO: 27763 - DNA, 69 bp, Homo sapiens
agggtagtaggactttaaaataatcagcagttcctggtggcatgtaaccaagtaaaaaccagttacaca

SEQ ID NO: 27764 - DNA, 71 bp, Homo sapiens
actttaaaataatcagcagttcctggtggcatgtaaccaagtaaaaaccagttacacagagagccacgaac

SEQ ID NO: 27765 - DNA, 71 bp, Homo sapiens
aataatcagcagttcctggtggcatgtaaccaagtaaaaaccagttacacagagagccacgaacccccaag

SEQ ID NO: 27766 - DNA, 69 bp, Homo sapiens
agttcctggtggcatgtaaccaagtaaaaaccagttacacagagagccacgaacccccaaggcaagaaa

SEQ ID NO: 27767 - DNA, 70 bp, Homo sapiens
atgtaaccaagtaaaaaccagttacacagagagccacgaacccccaaggcaagaaagcagaatgtgaaaa

SEQ ID NO: 27768 - DNA, 75 bp, Homo sapiens
aggcggtcgcggctccccctggcggcggatgtgcctcgctggaggggcgcagtcaggcgttctccgcgggcagcc

SEQ ID NO: 27769 - DNA, 74 bp, Homo sapiens
cggctccccctggcggcggatgtgcctcgctggaggggcgcagtcaggcgttctccgcgggcagccggcggcgg

SEQ ID NO: 27770 - DNA, 75 bp, Homo sapiens
cggcggatgtgcctcgctggaggggcgcagtcaggcgttctccgcgggcagccggcggcggggccttgccttaca

SEQ ID NO: 27771 - DNA, 75 bp, Homo sapiens
tgtgcctcgctggaggggcgcagtcaggcgttctccgcgggcagccggcggcggggccttgccttacagcgcggg

SEQ ID NO: 27772 - DNA, 72 bp, Homo sapiens
gggcgcagtcaggcgttctccgcgggcagccggcggcggggccttgccttacagcgcggggtcctcggcggc

SEQ ID NO: 27773 - DNA, 70 bp, Homo sapiens
agtcaggcgttctccgcgggcagccggcggcggggccttgccttacagcgcggggtcctcggcggcctgg

SEQ ID NO: 27774 - DNA, 72 bp, Homo sapiens
ttctccgcgggcagccggcggcggggccttgccttacagcgcggggtcctcggcggcctgggtggctactgc

SEQ ID NO: 27775 - DNA, 73 bp, Homo sapiens
cggcggcggggccttgccttacagcgcggggtcctcggcggcctgggtggctactgcccctgctgctgtcgta

SEQ ID NO: 27776 - DNA, 74 bp, Homo sapiens
ggccttgccttacagcgcggggtcctcggcggcctgggtggctactgcccctgctgctgtcgtaggcgaggacg

SEQ ID NO: 27777 - DNA, 74 bp, Homo sapiens
ccttacagcgcggggtcctcggcggcctgggtggctactgcccctgctgctgtcgtaggcgaggacggctgtta

SEQ ID NO: 27778 - DNA, 79 bp, Homo sapiens
gtcctcggcggcctgggtggctactgcccctgctgctgtcgtaggcgaggacggctgttagtgctgctgctgttggttc

SEQ ID NO: 27779 - DNA, 79 bp, Homo sapiens
cggcctgggtggctactgcccctgctgctgtcgtaggcgaggacggctgttagtgctgctgctgttggttcgtcgcggc

SEQ ID NO: 27780 - DNA, 79 bp, Homo sapiens
ctactgcccctgctgctgtcgtaggcgaggacggctgttagtgctgctgctgttggttcgtcgcggcggcgaaggagga

SEQ ID NO: 27781 - DNA, 78 bp, Homo sapiens
ccctgctgctgtcgtaggcgaggacggctgttagtgctgctgctgttggttcgtcgcggcggcgaaggaggaggagga

SEQ ID NO: 27782 - DNA, 73 bp, Homo sapiens
aggaggaggaagagggcgaggcgacaagagaagaaggaggcaggcgcggcggcagcggcggcgccccgagccg

SEQ ID NO: 27783 - DNA, 73 bp, Homo sapiens
aggaagagggcgaggcgacaagagaagaaggaggcaggcgcggcggcagcggcggcgccccgagccggcggag

SEQ ID NO: 27784 - DNA, 72 bp, Homo sapiens
cgaggcgacaagagaagaaggaggcaggcgcggcggcagcggcggcgccccgagccggcggaggcgaggggg

SEQ ID NO: 27785 - DNA, 71 bp, Homo sapiens
agagaagaaggaggcaggcgcggcggcagcggcggcgccccgagccggcggaggcgaggggggggaagatg

SEQ ID NO: 27786 - DNA, 72 bp, Homo sapiens
caggcgcggcggcagcggcggcgccccgagccggcggaggcgaggggggggaagatggcggacgtgcttagc

SEQ ID NO: 27787 - DNA, 73 bp, Homo sapiens
ggcagcggcggcgccccgagccggcggaggcgaggggggggaagatggcggacgtgcttagcgtcctgcgaca

SEQ ID NO: 27788 - DNA, 73 bp, Homo sapiens
gcgccccgagccggcggaggcgaggggggggaagatggcggacgtgcttagcgtcctgcgacagtacaacatc

SEQ ID NO: 27789 - DNA, 73 bp, Homo sapiens
agccggcggaggcgaggggggggaagatggcggacgtgcttagcgtcctgcgacagtacaacatccagaagaa

SEQ ID NO: 27790 - DNA, 74 bp, Homo sapiens
aggcgaggggggggaagatggcggacgtgcttagcgtcctgcgacagtacaacatccagaagaaggagattgtg

SEQ ID NO: 27791 - DNA, 77 bp, Homo sapiens
cggacgtgcttagcgtcctgcgacagtacaacatccagaagaaggagattgtggtgaagggagacgaagtgatcttc

SEQ ID NO: 27792 - DNA, 75 bp, Homo sapiens
ttagcgtcctgcgacagtacaacatccagaagaaggagattgtggtgaagggagacgaagtgatcttcggggagt

SEQ ID NO: 27793 - DNA, 74 bp, Homo sapiens
atccagaagaaggagattgtggtgaagggagacgaagtgatcttcggggagttctcctggcccaagaatgtgaa

SEQ ID NO: 27794 - DNA, 73 bp, Homo sapiens
aggagattgtggtgaagggagacgaagtgatcttcggggagttctcctggcccaagaatgtgaagaccaacta

SEQ ID NO: 27795 - DNA, 73 bp, Homo sapiens
tggtgaagggagacgaagtgatcttcggggagttctcctggcccaagaatgtgaagaccaactatgttgtttg

SEQ ID NO: 27796 - DNA, 69 bp, Homo sapiens
agtgatcttcggggagttctcctggcccaagaatgtgaagaccaactatgttgtttgggggtaagtccg

SEQ ID NO: 27797 - DNA, 71 bp, Homo sapiens
cctggcccaagaatgtgaagaccaactatgttgtttgggggtaagtccggcatggctgtggcccaggggtg

SEQ ID NO: 27798 - DNA, 69 bp, Homo sapiens
tgaattagaattgtcagtaaaaaaaatcttgccttaattatttcaggactggaaaggaaggccaaccca

SEQ ID NO: 27799 - DNA, 68 bp, Homo sapiens
aattgtcagtaaaaaaaatcttgccttaattatttcaggactggaaaggaaggccaacccagagagta

SEQ ID NO: 27800 - DNA, 69 bp, Homo sapiens
aaaaaatcttgccttaattatttcaggactggaaaggaaggccaacccagagagtactacacattggat

SEQ ID NO: 27801 - DNA, 71 bp, Homo sapiens
tgccttaattatttcaggactggaaaggaaggccaacccagagagtactacacattggattccattttatt

SEQ ID NO: 27802 - DNA, 70 bp, Homo sapiens
aattatttcaggactggaaaggaaggccaacccagagagtactacacattggattccattttatttctac

SEQ ID NO: 27803 - DNA, 71 bp, Homo sapiens
actggaaaggaaggccaacccagagagtactacacattggattccattttatttctacttaataacgtgca

SEQ ID NO: 27804 - DNA, 72 bp, Homo sapiens
aaggccaacccagagagtactacacattggattccattttatttctacttaataacgtgcacctttctcatc

SEQ ID NO: 27805 - DNA, 73 bp, Homo sapiens
agagtactacacattggattccattttatttctacttaataacgtgcacctttctcatcctgtttatgtccga

SEQ ID NO: 27806 - DNA, 74 bp, Homo sapiens
actacacattggattccattttatttctacttaataacgtgcacctttctcatcctgtttatgtccgacgtgca

SEQ ID NO: 27807 - DNA, 73 bp, Homo sapiens
ccattttatttctacttaataacgtgcacctttctcatcctgtttatgtccgacgtgcagctgtaagtagaat

SEQ ID NO: 27808 - DNA, 74 bp, Homo sapiens
atttctacttaataacgtgcacctttctcatcctgtttatgtccgacgtgcagctgtaagtagaattcatttta

SEQ ID NO: 27809 - DNA, 76 bp, Homo sapiens
ttaataacgtgcacctttctcatcctgtttatgtccgacgtgcagctgtaagtagaattcattttacttatctatc

SEQ ID NO: 27810 - DNA, 72 bp, Homo sapiens
tatttattaagttgtgtatcattgttattcatttcatatctcatttaaaattttggttttagactgaaaata

SEQ ID NO: 27811 - DNA, 72 bp, Homo sapiens
agttgtgtatcattgttattcatttcatatctcatttaaaattttggttttagactgaaaatattcctgtgg

SEQ ID NO: 27812 - DNA, 70 bp, Homo sapiens
ttgttattcatttcatatctcatttaaaattttggttttagactgaaaatattcctgtggttagaagacc

SEQ ID NO: 27813 - DNA, 71 bp, Homo sapiens
catttcatatctcatttaaaattttggttttagactgaaaatattcctgtggttagaagacctgatcgaaa

SEQ ID NO: 27814 - DNA, 69 bp, Homo sapiens
ctcatttaaaattttggttttagactgaaaatattcctgtggttagaagacctgatcgaaaagatctac

SEQ ID NO: 27815 - DNA, 73 bp, Homo sapiens
tttggttttagactgaaaatattcctgtggttagaagacctgatcgaaaagatctacttggatatctcaatgg

SEQ ID NO: 27816 - DNA, 75 bp, Homo sapiens
ttttagactgaaaatattcctgtggttagaagacctgatcgaaaagatctacttggatatctcaatggtgaagcg

SEQ ID NO: 27817 - DNA, 76 bp, Homo sapiens
tattcctgtggttagaagacctgatcgaaaagatctacttggatatctcaatggtgaagcgtgtgagtacttttta

SEQ ID NO: 27818 - DNA, 75 bp, Homo sapiens
tgtggttagaagacctgatcgaaaagatctacttggatatctcaatggtgaagcgtgtgagtactttttaaattg

SEQ ID NO: 27819 - DNA, 74 bp, Homo sapiens
tgatcgaaaagatctacttggatatctcaatggtgaagcgtgtgagtactttttaaattgttcccagtcttaaa

SEQ ID NO: 27820 - DNA, 72 bp, Homo sapiens
aaaagatctacttggatatctcaatggtgaagcgtgtgagtactttttaaattgttcccagtcttaaacaga

SEQ ID NO: 27821 - DNA, 72 bp, Homo sapiens
ttggatatctcaatggtgaagcgtgtgagtactttttaaattgttcccagtcttaaacagacattgtttctt

SEQ ID NO: 27822 - DNA, 77 bp, Homo sapiens
cttgtaataatatccaatatatatgttgaaatagtaatccttacgtgaatctttttatgtcttcagcaacatcggca

SEQ ID NO: 27823 - DNA, 79 bp, Homo sapiens
tatccaatatatatgttgaaatagtaatccttacgtgaatctttttatgtcttcagcaacatcggcaagtatagacaga

SEQ ID NO: 27824 - DNA, 78 bp, Homo sapiens
atatatgttgaaatagtaatccttacgtgaatctttttatgtcttcagcaacatcggcaagtatagacagaagcgctc

SEQ ID NO: 27825 - DNA, 76 bp, Homo sapiens
tagtaatccttacgtgaatctttttatgtcttcagcaacatcggcaagtatagacagaagcgctcccttagaaata

SEQ ID NO: 27826 - DNA, 75 bp, Homo sapiens
atccttacgtgaatctttttatgtcttcagcaacatcggcaagtatagacagaagcgctcccttagaaataggtc

SEQ ID NO: 27827 - DNA, 78 bp, Homo sapiens
tttttatgtcttcagcaacatcggcaagtatagacagaagcgctcccttagaaataggtcttcagcgatctactcaag

SEQ ID NO: 27828 - DNA, 79 bp, Homo sapiens
ttcagcaacatcggcaagtatagacagaagcgctcccttagaaataggtcttcagcgatctactcaaggtatgtcttgt

SEQ ID NO: 27829 - DNA, 79 bp, Homo sapiens
aacatcggcaagtatagacagaagcgctcccttagaaataggtcttcagcgatctactcaaggtatgtcttgttgcata

SEQ ID NO: 27830 - DNA, 77 bp, Homo sapiens
aagtatagacagaagcgctcccttagaaataggtcttcagcgatctactcaaggtatgtcttgttgcatatttatat

SEQ ID NO: 27831 - DNA, 77 bp, Homo sapiens
agaagcgctcccttagaaataggtcttcagcgatctactcaaggtatgtcttgttgcatatttatattgaactttca

SEQ ID NO: 27832 - DNA, 78 bp, Homo sapiens
tagaaataggtcttcagcgatctactcaaggtatgtcttgttgcatatttatattgaactttcagaagcccattccaa

SEQ ID NO: 27833 - DNA, 77 bp, Homo sapiens
ttcagcgatctactcaaggtatgtcttgttgcatatttatattgaactttcagaagcccattccaaaactacacatt

SEQ ID NO: 27834 - DNA, 75 bp, Homo sapiens
cgatctactcaaggtatgtcttgttgcatatttatattgaactttcagaagcccattccaaaactacacatttat

SEQ ID NO: 27835 - DNA, 73 bp, Homo sapiens
aggtatgtcttgttgcatatttatattgaactttcagaagcccattccaaaactacacatttatttacttctc

SEQ ID NO: 27836 - DNA, 71 bp, Homo sapiens
ttgttgcatatttatattgaactttcagaagcccattccaaaactacacatttatttacttctctttcttt

SEQ ID NO: 27837 - DNA, 72 bp, Homo sapiens
tgttgcatatttatattgaactttcagaagcccattccaaaactacacatttatttacttctctttctttta

SEQ ID NO: 27838 - DNA, 70 bp, Homo sapiens
ttatattgaactttcagaagcccattccaaaactacacatttatttacttctctttcttttatagtcaaa

SEQ ID NO: 27839 - DNA, 70 bp, Homo sapiens
ttgaactttcagaagcccattccaaaactacacatttatttacttctctttcttttatagtcaaacgagc

SEQ ID NO: 27840 - DNA, 74 bp, Homo sapiens
ttcagaagcccattccaaaactacacatttatttacttctctttcttttatagtcaaacgagctgcagatgaag

SEQ ID NO: 27841 - DNA, 75 bp, Homo sapiens
tccaaaactacacatttatttacttctctttcttttatagtcaaacgagctgcagatgaagttttagcagaagca

SEQ ID NO: 27842 - DNA, 74 bp, Homo sapiens
cacatttatttacttctctttcttttatagtcaaacgagctgcagatgaagttttagcagaagcaaagaaacca

SEQ ID NO: 27843 - DNA, 74 bp, Homo sapiens
tttacttctctttcttttatagtcaaacgagctgcagatgaagttttagcagaagcaaagaaaccacgaattga

SEQ ID NO: 27844 - DNA, 73 bp, Homo sapiens
ttcttttatagtcaaacgagctgcagatgaagttttagcagaagcaaagaaaccacgaattgaggtaaagaaa

SEQ ID NO: 27845 - DNA, 74 bp, Homo sapiens
tatagtcaaacgagctgcagatgaagttttagcagaagcaaagaaaccacgaattgaggtaaagaaactgtatt

SEQ ID NO: 27846 - DNA, 72 bp, Homo sapiens
gagctgcagatgaagttttagcagaagcaaagaaaccacgaattgaggtaaagaaactgtattttaaacaat

SEQ ID NO: 27847 - DNA, 67 bp, Homo sapiens
atgaagttttagcagaagcaaagaaaccacgaattgaggtaaagaaactgtattttaaacaatttta

SEQ ID NO: 27848 - DNA, 67 bp, Homo sapiens
agcagaagcaaagaaaccacgaattgaggtaaagaaactgtattttaaacaattttatttatattgt

SEQ ID NO: 27849 - DNA, 66 bp, Homo sapiens
accacgaattgaggtaaagaaactgtattttaaacaattttatttatattgttattgaaattggga

SEQ ID NO: 27850 - DNA, 71 bp, Homo sapiens
tcctaaaagttcaataaaaattttaaatgcattaaccagtggttatttccaggatgaagagtgtgtgcgcc

SEQ ID NO: 27851 - DNA, 75 bp, Homo sapiens
tcaataaaaattttaaatgcattaaccagtggttatttccaggatgaagagtgtgtgcgccttgataaagagaga

SEQ ID NO: 27852 - DNA, 73 bp, Homo sapiens
aaaaattttaaatgcattaaccagtggttatttccaggatgaagagtgtgtgcgccttgataaagagagattg

SEQ ID NO: 27853 - DNA, 77 bp, Homo sapiens
aatgcattaaccagtggttatttccaggatgaagagtgtgtgcgccttgataaagagagattggctgcccgtttgga

SEQ ID NO: 27854 - DNA, 76 bp, Homo sapiens
tggttatttccaggatgaagagtgtgtgcgccttgataaagagagattggctgcccgtttggagggtcacaaagaa

SEQ ID NO: 27855 - DNA, 76 bp, Homo sapiens
aggatgaagagtgtgtgcgccttgataaagagagattggctgcccgtttggagggtcacaaagaagggattgtaca

SEQ ID NO: 27856 - DNA, 76 bp, Homo sapiens
aagagtgtgtgcgccttgataaagagagattggctgcccgtttggagggtcacaaagaagggattgtacagactga

SEQ ID NO: 27857 - DNA, 74 bp, Homo sapiens
cttgataaagagagattggctgcccgtttggagggtcacaaagaagggattgtacagactgaacagattaggta

SEQ ID NO: 27858 - DNA, 72 bp, Homo sapiens
aagagagattggctgcccgtttggagggtcacaaagaagggattgtacagactgaacagattaggtaagaat

SEQ ID NO: 27859 - DNA, 70 bp, Homo sapiens
ttggctgcccgtttggagggtcacaaagaagggattgtacagactgaacagattaggtaagaattctttt

SEQ ID NO: 27860 - DNA, 69 bp, Homo sapiens
gtttggagggtcacaaagaagggattgtacagactgaacagattaggtaagaattctttttaagtagaa

SEQ ID NO: 27861 - DNA, 69 bp, Homo sapiens
tcacaaagaagggattgtacagactgaacagattaggtaagaattctttttaagtagaaagtaggtagt

SEQ ID NO: 27862 - DNA, 71 bp, Homo sapiens
aaatttaaaaaagaaattgcttttaggtctttgtctgaagctatgtcagtggaaaaaattgctgcaatcaa

SEQ ID NO: 27863 - DNA, 74 bp, Homo sapiens
aagaaattgcttttaggtctttgtctgaagctatgtcagtggaaaaaattgctgcaatcaaagccaaaattatg

SEQ ID NO: 27864 - DNA, 74 bp, Homo sapiens
cttttaggtctttgtctgaagctatgtcagtggaaaaaattgctgcaatcaaagccaaaattatggctaagaaa

SEQ ID NO: 27865 - DNA, 78 bp, Homo sapiens
tttgtctgaagctatgtcagtggaaaaaattgctgcaatcaaagccaaaattatggctaagaaaagatctactatcaa

SEQ ID NO: 27866 - DNA, 79 bp, Homo sapiens
agctatgtcagtggaaaaaattgctgcaatcaaagccaaaattatggctaagaaaagatctactatcaagactgatcta

SEQ ID NO: 27867 - DNA, 81 bp, Homo sapiens
gtggaaaaaattgctgcaatcaaagccaaaattatggctaagaaaagatctactatcaagactgatctagatgatgacata

SEQ ID NO: 27868 - DNA, 82 bp, Homo sapiens
ttgctgcaatcaaagccaaaattatggctaagaaaagatctactatcaagactgatctagatgatgacataactgcccttaa

SEQ ID NO: 27869 - DNA, 77 bp, Homo sapiens
aaagccaaaattatggctaagaaaagatctactatcaagactgatctagatgatgacataactgcccttaaacagag

SEQ ID NO: 27870 - DNA, 76 bp, Homo sapiens
aaaattatggctaagaaaagatctactatcaagactgatctagatgatgacataactgcccttaaacagaggagtt

SEQ ID NO: 27871 - DNA, 80 bp, Homo sapiens
ctaagaaaagatctactatcaagactgatctagatgatgacataactgcccttaaacagaggagttttgtggatgctgag

SEQ ID NO: 27872 - DNA, 82 bp, Homo sapiens
atctactatcaagactgatctagatgatgacataactgcccttaaacagaggagttttgtggatgctgaggtagatgtgacc

SEQ ID NO: 27873 - DNA, 80 bp, Homo sapiens
aagactgatctagatgatgacataactgcccttaaacagaggagttttgtggatgctgaggtagatgtgacccgagatat

SEQ ID NO: 27874 - DNA, 84 bp, Homo sapiens
tagatgatgacataactgcccttaaacagaggagttttgtggatgctgaggtagatgtgacccgagatattgtcagcagagaga

SEQ ID NO: 27875 - DNA, 80 bp, Homo sapiens
ataactgcccttaaacagaggagttttgtggatgctgaggtagatgtgacccgagatattgtcagcagagagagagtatg

SEQ ID NO: 27876 - DNA, 81 bp, Homo sapiens
ttaaacagaggagttttgtggatgctgaggtagatgtgacccgagatattgtcagcagagagagagtatggaggacacgaa

SEQ ID NO: 27877 - DNA, 82 bp, Homo sapiens
tttgtggatgctgaggtagatgtgacccgagatattgtcagcagagagagagtatggaggacacgaacaactatcttacaaa

SEQ ID NO: 27878 - DNA, 81 bp, Homo sapiens
ctgaggtagatgtgacccgagatattgtcagcagagagagagtatggaggacacgaacaactatcttacaaagcacaggaa

SEQ ID NO: 27879 - DNA, 78 bp, Homo sapiens
atgtgacccgagatattgtcagcagagagagagtatggaggacacgaacaactatcttacaaagcacaggaaaggtaa

SEQ ID NO: 27880 - DNA, 76 bp, Homo sapiens
agatattgtcagcagagagagagtatggaggacacgaacaactatcttacaaagcacaggaaaggtaattaaaata

SEQ ID NO: 27881 - DNA, 72 bp, Homo sapiens
agcagagagagagtatggaggacacgaacaactatcttacaaagcacaggaaaggtaattaaaatattttac

SEQ ID NO: 27882 - DNA, 73 bp, Homo sapiens
gagagagtatggaggacacgaacaactatcttacaaagcacaggaaaggtaattaaaatattttactcattca

SEQ ID NO: 27883 - DNA, 72 bp, Homo sapiens
ggaggacacgaacaactatcttacaaagcacaggaaaggtaattaaaatattttactcattcattggagtga

SEQ ID NO: 27884 - DNA, 67 bp, Homo sapiens
ttactattgtatatttaaagtgggcttaattaaaatccatttatattttagaatttttccaagaaca

SEQ ID NO: 27885 - DNA, 68 bp, Homo sapiens
taaagtgggcttaattaaaatccatttatattttagaatttttccaagaacatttttgcaattcttca

SEQ ID NO: 27886 - DNA, 70 bp, Homo sapiens
tgggcttaattaaaatccatttatattttagaatttttccaagaacatttttgcaattcttcaatctgta

SEQ ID NO: 27887 - DNA, 71 bp, Homo sapiens
tccatttatattttagaatttttccaagaacatttttgcaattcttcaatctgtaaaagccagagaagaag

SEQ ID NO: 27888 - DNA, 71 bp, Homo sapiens
attttagaatttttccaagaacatttttgcaattcttcaatctgtaaaagccagagaagaagggcgtgcac

SEQ ID NO: 27889 - DNA, 73 bp, Homo sapiens
aatttttccaagaacatttttgcaattcttcaatctgtaaaagccagagaagaagggcgtgcacctgaacagc

SEQ ID NO: 27890 - DNA, 74 bp, Homo sapiens
aacatttttgcaattcttcaatctgtaaaagccagagaagaagggcgtgcacctgaacagcgacctgccccaaa

SEQ ID NO: 27891 - DNA, 78 bp, Homo sapiens
attcttcaatctgtaaaagccagagaagaagggcgtgcacctgaacagcgacctgccccaaatgcagcacctgtggta

SEQ ID NO: 27892 - DNA, 78 bp, Homo sapiens
aatctgtaaaagccagagaagaagggcgtgcacctgaacagcgacctgccccaaatgcagcacctgtggtaagaatgc

SEQ ID NO: 27893 - DNA, 78 bp, Homo sapiens
aaagccagagaagaagggcgtgcacctgaacagcgacctgccccaaatgcagcacctgtggtaagaatgctttactgc

SEQ ID NO: 27894 - DNA, 77 bp, Homo sapiens
aagaagggcgtgcacctgaacagcgacctgccccaaatgcagcacctgtggtaagaatgctttactgctttacagta

SEQ ID NO: 27895 - DNA, 69 bp, Homo sapiens
gcacattaaataagtgacatttaaaaatattaacaagtaactcataattaatttttttacaggatccca

SEQ ID NO: 27896 - DNA, 69 bp, Homo sapiens
gtgacatttaaaaatattaacaagtaactcataattaatttttttacaggatcccactttgcgcaccaa

SEQ ID NO: 27897 - DNA, 70 bp, Homo sapiens
aatattaacaagtaactcataattaatttttttacaggatcccactttgcgcaccaaacagcctatccca

SEQ ID NO: 27898 - DNA, 72 bp, Homo sapiens
aagtaactcataattaatttttttacaggatcccactttgcgcaccaaacagcctatcccagctgcctataa

SEQ ID NO: 27899 - DNA, 74 bp, Homo sapiens
aattaatttttttacaggatcccactttgcgcaccaaacagcctatcccagctgcctataacagatacgatcag

SEQ ID NO: 27900 - DNA, 77 bp, Homo sapiens
tttttacaggatcccactttgcgcaccaaacagcctatcccagctgcctataacagatacgatcaggaaagattcaa

SEQ ID NO: 27901 - DNA, 76 bp, Homo sapiens
aggatcccactttgcgcaccaaacagcctatcccagctgcctataacagatacgatcaggaaagattcaaaggaaa

SEQ ID NO: 27902 - DNA, 76 bp, Homo sapiens
tttgcgcaccaaacagcctatcccagctgcctataacagatacgatcaggaaagattcaaaggaaaagaaggcaag

SEQ ID NO: 27903 - DNA, 74 bp, Homo sapiens
aaacagcctatcccagctgcctataacagatacgatcaggaaagattcaaaggaaaagaaggcaagttgcttaa

SEQ ID NO: 27904 - DNA, 73 bp, Homo sapiens
agctgcctataacagatacgatcaggaaagattcaaaggaaaagaaggcaagttgcttaattcttatcttccc

SEQ ID NO: 27905 - DNA, 70 bp, Homo sapiens
ataacagatacgatcaggaaagattcaaaggaaaagaaggcaagttgcttaattcttatcttccccttag

SEQ ID NO: 27906 - DNA, 69 bp, Homo sapiens
atcaggaaagattcaaaggaaaagaaggcaagttgcttaattcttatcttccccttagtgtggttgtgt

SEQ ID NO: 27907 - DNA, 71 bp, Homo sapiens
ttgttataggtcataagatacatgatctataaaatcttaacaataagcctcttttttttcgtagaaacgga

SEQ ID NO: 27908 - DNA, 71 bp, Homo sapiens
ggtcataagatacatgatctataaaatcttaacaataagcctcttttttttcgtagaaacggaaggcttca

SEQ ID NO: 27909 - DNA, 69 bp, Homo sapiens
catgatctataaaatcttaacaataagcctcttttttttcgtagaaacggaaggcttcaaaattgacac

SEQ ID NO: 27910 - DNA, 66 bp, Homo sapiens
aaaatcttaacaataagcctcttttttttcgtagaaacggaaggcttcaaaattgacactatggga

SEQ ID NO: 27911 - DNA, 66 bp, Homo sapiens
cttaacaataagcctcttttttttcgtagaaacggaaggcttcaaaattgacactatgggaaccta

SEQ ID NO: 27912 - DNA, 70 bp, Homo sapiens
tcttttttttcgtagaaacggaaggcttcaaaattgacactatgggaacctaccatggtatgacactgaa

SEQ ID NO: 27913 - DNA, 72 bp, Homo sapiens
ttttcgtagaaacggaaggcttcaaaattgacactatgggaacctaccatggtatgacactgaaatctgtaa

SEQ ID NO: 27914 - DNA, 70 bp, Homo sapiens
aaggcttcaaaattgacactatgggaacctaccatggtatgacactgaaatctgtaacggtaagttaatt

SEQ ID NO: 27915 - DNA, 73 bp, Homo sapiens
ttcaaaattgacactatgggaacctaccatggtatgacactgaaatctgtaacggtaagttaatttggctgta

SEQ ID NO: 27916 - DNA, 72 bp, Homo sapiens
tatgggaacctaccatggtatgacactgaaatctgtaacggtaagttaatttggctgtagatgttcttttgt

SEQ ID NO: 27917 - DNA, 71 bp, Homo sapiens
aacctaccatggtatgacactgaaatctgtaacggtaagttaatttggctgtagatgttcttttgttccag

SEQ ID NO: 27918 - DNA, 73 bp, Homo sapiens
tgacactgaaatctgtaacggtaagttaatttggctgtagatgttcttttgttccagggattttatgtgagta

SEQ ID NO: 27919 - DNA, 69 bp, Homo sapiens
ctttggaataattaaagtgtttattatgtaaagaaactttgatcttatatatcaattcttattctttta

SEQ ID NO: 27920 - DNA, 72 bp, Homo sapiens
agtgtttattatgtaaagaaactttgatcttatatatcaattcttattcttttaaaggagggtgcatctgcc

SEQ ID NO: 27921 - DNA, 73 bp, Homo sapiens
atgtaaagaaactttgatcttatatatcaattcttattcttttaaaggagggtgcatctgcccggaagactca

SEQ ID NO: 27922 - DNA, 73 bp, Homo sapiens
aagaaactttgatcttatatatcaattcttattcttttaaaggagggtgcatctgcccggaagactcagactc

SEQ ID NO: 27923 - DNA, 78 bp, Homo sapiens
tcttatatatcaattcttattcttttaaaggagggtgcatctgcccggaagactcagactcctgcagcccagccagta

SEQ ID NO: 27924 - DNA, 76 bp, Homo sapiens
atcaattcttattcttttaaaggagggtgcatctgcccggaagactcagactcctgcagcccagccagtaccaaga

SEQ ID NO: 27925 - DNA, 76 bp, Homo sapiens
tttaaaggagggtgcatctgcccggaagactcagactcctgcagcccagccagtaccaagaccaggtagaaatata

SEQ ID NO: 27926 - DNA, 77 bp, Homo sapiens
ggtgcatctgcccggaagactcagactcctgcagcccagccagtaccaagaccaggtagaaatatagaactttgctt

SEQ ID NO: 27927 - DNA, 74 bp, Homo sapiens
atctgcccggaagactcagactcctgcagcccagccagtaccaagaccaggtagaaatatagaactttgctttt

SEQ ID NO: 27928 - DNA, 72 bp, Homo sapiens
aagactcagactcctgcagcccagccagtaccaagaccaggtagaaatatagaactttgctttttgttttct

SEQ ID NO: 27929 - DNA, 72 bp, Homo sapiens
tgcagcccagccagtaccaagaccaggtagaaatatagaactttgctttttgttttctttcaaaagatcgta

SEQ ID NO: 27930 - DNA, 70 bp, Homo sapiens
ccagtaccaagaccaggtagaaatatagaactttgctttttgttttctttcaaaagatcgtaacagtgca

SEQ ID NO: 27931 - DNA, 67 bp, Homo sapiens
aaaatatcccttatttgtaagtttgaaaataagaatatggtttttatgacacagagttgtgattttt

SEQ ID NO: 27932 - DNA, 66 bp, Homo sapiens
ccttatttgtaagtttgaaaataagaatatggtttttatgacacagagttgtgattttttttcttt

SEQ ID NO: 27933 - DNA, 72 bp, Homo sapiens
tttttttctttttcacagtttctcaagcaagacctcccccaaatcagaagaaaggtgaggttgtgcatatga

SEQ ID NO: 27934 - DNA, 72 bp, Homo sapiens
ttttcacagtttctcaagcaagacctcccccaaatcagaagaaaggtgaggttgtgcatatgattttaaact

SEQ ID NO: 27935 - DNA, 70 bp, Homo sapiens
agtttctcaagcaagacctcccccaaatcagaagaaaggtgaggttgtgcatatgattttaaacttaact

SEQ ID NO: 27936 - DNA, 68 bp, Homo sapiens
gcaagacctcccccaaatcagaagaaaggtgaggttgtgcatatgattttaaacttaactttaaaaag

SEQ ID NO: 27937 - DNA, 70 bp, Homo sapiens
cccaaatcagaagaaaggtgaggttgtgcatatgattttaaacttaactttaaaaagtaaatgattgcaa

SEQ ID NO: 27938 - DNA, 70 bp, Homo sapiens
gaaaggtgaggttgtgcatatgattttaaacttaactttaaaaagtaaatgattgcaaaaccaggcctga

SEQ ID NO: 27939 - DNA, 69 bp, Homo sapiens
gtaagtataatttctaataatatattttctacctgtaaattttgtctttataggatctcgaacacccat

SEQ ID NO: 27940 - DNA, 74 bp, Homo sapiens
ttctaataatatattttctacctgtaaattttgtctttataggatctcgaacacccattatcataattcctgca

SEQ ID NO: 27941 - DNA, 74 bp, Homo sapiens
tatattttctacctgtaaattttgtctttataggatctcgaacacccattatcataattcctgcagctaccacc

SEQ ID NO: 27942 - DNA, 74 bp, Homo sapiens
tacctgtaaattttgtctttataggatctcgaacacccattatcataattcctgcagctaccacctctttaata

SEQ ID NO: 27943 - DNA, 75 bp, Homo sapiens
ttttgtctttataggatctcgaacacccattatcataattcctgcagctaccacctctttaataaccatgcttaa

SEQ ID NO: 27944 - DNA, 77 bp, Homo sapiens
tttataggatctcgaacacccattatcataattcctgcagctaccacctctttaataaccatgcttaatgcaaaaga

SEQ ID NO: 27945 - DNA, 75 bp, Homo sapiens
aacacccattatcataattcctgcagctaccacctctttaataaccatgcttaatgcaaaagaccttctacagga

SEQ ID NO: 27946 - DNA, 76 bp, Homo sapiens
tatcataattcctgcagctaccacctctttaataaccatgcttaatgcaaaagaccttctacaggacctgaagtaa

SEQ ID NO: 27947 - DNA, 73 bp, Homo sapiens
tgcagctaccacctctttaataaccatgcttaatgcaaaagaccttctacaggacctgaagtaagtaatttat

SEQ ID NO: 27948 - DNA, 70 bp, Homo sapiens
ctaccacctctttaataaccatgcttaatgcaaaagaccttctacaggacctgaagtaagtaatttatta

SEQ ID NO: 27949 - DNA, 71 bp, Homo sapiens
taaccatgcttaatgcaaaagaccttctacaggacctgaagtaagtaatttattaaactatcctgtacgta

SEQ ID NO: 27950 - DNA, 72 bp, Homo sapiens
taatgcaaaagaccttctacaggacctgaagtaagtaatttattaaactatcctgtacgtaggatattgaga

SEQ ID NO: 27951 - DNA, 76 bp, Homo sapiens
tttcatcacgtggaatacattgactttttctcatctctgttttttcaaagatttgtcccatcagatgaaaagaaga

SEQ ID NO: 27952 - DNA, 73 bp, Homo sapiens
gtggaatacattgactttttctcatctctgttttttcaaagatttgtcccatcagatgaaaagaagaaacaag

SEQ ID NO: 27953 - DNA, 72 bp, Homo sapiens
ctttttctcatctctgttttttcaaagatttgtcccatcagatgaaaagaagaaacaaggttgtcaacgaga

SEQ ID NO: 27954 - DNA, 73 bp, Homo sapiens
ctcatctctgttttttcaaagatttgtcccatcagatgaaaagaagaaacaaggttgtcaacgagaaaatgaa

SEQ ID NO: 27955 - DNA, 73 bp, Homo sapiens
tcaaagatttgtcccatcagatgaaaagaagaaacaaggttgtcaacgagaaaatgaaactctaatacaaaga

SEQ ID NO: 27956 - DNA, 72 bp, Homo sapiens
gatttgtcccatcagatgaaaagaagaaacaaggttgtcaacgagaaaatgaaactctaatacaaagaagaa

SEQ ID NO: 27957 - DNA, 73 bp, Homo sapiens
cagatgaaaagaagaaacaaggttgtcaacgagaaaatgaaactctaatacaaagaagaaaagaccagatgca

SEQ ID NO: 27958 - DNA, 70 bp, Homo sapiens
aagaagaaacaaggttgtcaacgagaaaatgaaactctaatacaaagaagaaaagaccagatgcaaccag

SEQ ID NO: 27959 - DNA, 74 bp, Homo sapiens
ttgtcaacgagaaaatgaaactctaatacaaagaagaaaagaccagatgcaaccagggggcactgcaattagtg

SEQ ID NO: 27960 - DNA, 72 bp, Homo sapiens
aaaatgaaactctaatacaaagaagaaaagaccagatgcaaccagggggcactgcaattagtgttacagtac

SEQ ID NO: 27961 - DNA, 72 bp, Homo sapiens
aaactctaatacaaagaagaaaagaccagatgcaaccagggggcactgcaattagtgttacagtaccttata

SEQ ID NO: 27962 - DNA, 73 bp, Homo sapiens
aaagaagaaaagaccagatgcaaccagggggcactgcaattagtgttacagtaccttatagagtagtagacca

SEQ ID NO: 27963 - DNA, 73 bp, Homo sapiens
aagaccagatgcaaccagggggcactgcaattagtgttacagtaccttatagagtagtagaccagccccttaa

SEQ ID NO: 27964 - DNA, 73 bp, Homo sapiens
atgcaaccagggggcactgcaattagtgttacagtaccttatagagtagtagaccagccccttaaacttatgc

SEQ ID NO: 27965 - DNA, 72 bp, Homo sapiens
actgcaattagtgttacagtaccttatagagtagtagaccagccccttaaacttatgcctcaagactggtaa

SEQ ID NO: 27966 - DNA, 71 bp, Homo sapiens
aattagtgttacagtaccttatagagtagtagaccagccccttaaacttatgcctcaagactggtaagata

SEQ ID NO: 27967 - DNA, 74 bp, Homo sapiens
agtaccttatagagtagtagaccagccccttaaacttatgcctcaagactggtaagatagtctctatatatata

SEQ ID NO: 27968 - DNA, 76 bp, Homo sapiens
atagagtagtagaccagccccttaaacttatgcctcaagactggtaagatagtctctatatatatatcttttcaca

SEQ ID NO: 27969 - DNA, 66 bp, Homo sapiens
aataatctccgtctgtcccctacctccccccacccacttttctacttgtagggaccgcgttgtagc

SEQ ID NO: 27970 - DNA, 67 bp, Homo sapiens
tctgtcccctacctccccccacccacttttctacttgtagggaccgcgttgtagccgtttttgtgca

SEQ ID NO: 27971 - DNA, 70 bp, Homo sapiens
tccccccacccacttttctacttgtagggaccgcgttgtagccgtttttgtgcagggtcctgcatggcag

SEQ ID NO: 27972 - DNA, 70 bp, Homo sapiens
acttttctacttgtagggaccgcgttgtagccgtttttgtgcagggtcctgcatggcagttcaaaggttg

SEQ ID NO: 27973 - DNA, 73 bp, Homo sapiens
tacttgtagggaccgcgttgtagccgtttttgtgcagggtcctgcatggcagttcaaaggttggccatggctt

SEQ ID NO: 27974 - DNA, 77 bp, Homo sapiens
accgcgttgtagccgtttttgtgcagggtcctgcatggcagttcaaaggttggccatggcttttgcctgatggatca

SEQ ID NO: 27975 - DNA, 78 bp, Homo sapiens
ccgtttttgtgcagggtcctgcatggcagttcaaaggttggccatggcttttgcctgatggatcaccagttgatatat

SEQ ID NO: 27976 - DNA, 81 bp, Homo sapiens
tttgtgcagggtcctgcatggcagttcaaaggttggccatggcttttgcctgatggatcaccagttgatatatttgctaaa

SEQ ID NO: 27977 - DNA, 80 bp, Homo sapiens
tgcatggcagttcaaaggttggccatggcttttgcctgatggatcaccagttgatatatttgctaaaagtaagattctct

SEQ ID NO: 27978 - DNA, 76 bp, Homo sapiens
ttcaaaggttggccatggcttttgcctgatggatcaccagttgatatatttgctaaaagtaagattctctttgtat

SEQ ID NO: 27979 - DNA, 78 bp, Homo sapiens
ttggccatggcttttgcctgatggatcaccagttgatatatttgctaaaagtaagattctctttgtatttactgtatc

SEQ ID NO: 27980 - DNA, 78 bp, Homo sapiens
gcttttgcctgatggatcaccagttgatatatttgctaaaagtaagattctctttgtatttactgtatccagtataga

SEQ ID NO: 27981 - DNA, 74 bp, Homo sapiens
ttttattttgagtaaaaatgataacttctctccaccctctctatagttaaagccttccatctgaagtatgatga

SEQ ID NO: 27982 - DNA, 74 bp, Homo sapiens
ttttgagtaaaaatgataacttctctccaccctctctatagttaaagccttccatctgaagtatgatgaagttc

SEQ ID NO: 27983 - DNA, 75 bp, Homo sapiens
ataacttctctccaccctctctatagttaaagccttccatctgaagtatgatgaagttcgtctggatccaaatgt

SEQ ID NO: 27984 - DNA, 77 bp, Homo sapiens
ttctctccaccctctctatagttaaagccttccatctgaagtatgatgaagttcgtctggatccaaatgttcagaaa

SEQ ID NO: 27985 - DNA, 78 bp, Homo sapiens
tctatagttaaagccttccatctgaagtatgatgaagttcgtctggatccaaatgttcagaaatgggatgtaacagta

SEQ ID NO: 27986 - DNA, 77 bp, Homo sapiens
ttaaagccttccatctgaagtatgatgaagttcgtctggatccaaatgttcagaaatgggatgtaacagtattagaa

SEQ ID NO: 27987 - DNA, 80 bp, Homo sapiens
atctgaagtatgatgaagttcgtctggatccaaatgttcagaaatgggatgtaacagtattagaactcagctatcacaaa

SEQ ID NO: 27988 - DNA, 78 bp, Homo sapiens
gttcgtctggatccaaatgttcagaaatgggatgtaacagtattagaactcagctatcacaaacgtcatttggataga

SEQ ID NO: 27989 - DNA, 76 bp, Homo sapiens
aaatgttcagaaatgggatgtaacagtattagaactcagctatcacaaacgtcatttggatagaccagtgttctta

SEQ ID NO: 27990 - DNA, 72 bp, Homo sapiens
aaatgggatgtaacagtattagaactcagctatcacaaacgtcatttggatagaccagtgttcttacggttt

SEQ ID NO: 27991 - DNA, 72 bp, Homo sapiens
taacagtattagaactcagctatcacaaacgtcatttggatagaccagtgttcttacggttttgggaaacat

SEQ ID NO: 27992 - DNA, 73 bp, Homo sapiens
tattagaactcagctatcacaaacgtcatttggatagaccagtgttcttacggttttgggaaacattggacag

SEQ ID NO: 27993 - DNA, 70 bp, Homo sapiens
tatcacaaacgtcatttggatagaccagtgttcttacggttttgggaaacattggacaggtaattccgat

SEQ ID NO: 27994 - DNA, 69 bp, Homo sapiens
gtcatttggatagaccagtgttcttacggttttgggaaacattggacaggtaattccgattctaaaata

SEQ ID NO: 27995 - DNA, 70 bp, Homo sapiens
atagaccagtgttcttacggttttgggaaacattggacaggtaattccgattctaaaatatgcttgtgtg

SEQ ID NO: 27996 - DNA, 71 bp, Homo sapiens
ctaaaattcctatagtcattataacctaccataatatttttttcaggtacatggtaaagcataaatcgcac

SEQ ID NO: 27997 - DNA, 75 bp, Homo sapiens
cctatagtcattataacctaccataatatttttttcaggtacatggtaaagcataaatcgcacttgagattctga

SEQ ID NO: 27998 - DNA, 73 bp, Homo sapiens
ataacctaccataatatttttttcaggtacatggtaaagcataaatcgcacttgagattctgaattatttggc

SEQ ID NO: 27999 - DNA, 75 bp, Homo sapiens
cataatatttttttcaggtacatggtaaagcataaatcgcacttgagattctgaattatttggctcctccatttc

SEQ ID NO: 28000 - DNA, 76 bp, Homo sapiens
tttttcaggtacatggtaaagcataaatcgcacttgagattctgaattatttggctcctccatttctggaaattga

SEQ ID NO: 28001 - DNA, 77 bp, Homo sapiens
atggtaaagcataaatcgcacttgagattctgaattatttggctcctccatttctggaaattgagactcaagcttta

SEQ ID NO: 28002 - DNA, 78 bp, Homo sapiens
ataaatcgcacttgagattctgaattatttggctcctccatttctggaaattgagactcaagctttatgaatttatca

SEQ ID NO: 28003 - DNA, 74 bp, Homo sapiens
gattctgaattatttggctcctccatttctggaaattgagactcaagctttatgaatttatcaagaacttaaaa

SEQ ID NO: 28004 - DNA, 75 bp, Homo sapiens
tggctcctccatttctggaaattgagactcaagctttatgaatttatcaagaacttaaaaatgaagaaggtcaca

SEQ ID NO: 28005 - DNA, 75 bp, Homo sapiens
ccatttctggaaattgagactcaagctttatgaatttatcaagaacttaaaaatgaagaaggtcacagattgatc

SEQ ID NO: 28006 - DNA, 74 bp, Homo sapiens
ttgagactcaagctttatgaatttatcaagaacttaaaaatgaagaaggtcacagattgatcttttataagacc

SEQ ID NO: 28007 - DNA, 72 bp, Homo sapiens
actcaagctttatgaatttatcaagaacttaaaaatgaagaaggtcacagattgatcttttataagacctta

SEQ ID NO: 28008 - DNA, 74 bp, Homo sapiens
gaatttatcaagaacttaaaaatgaagaaggtcacagattgatcttttataagaccttatttgatgctttgtgc

SEQ ID NO: 28009 - DNA, 76 bp, Homo sapiens
gaacttaaaaatgaagaaggtcacagattgatcttttataagaccttatttgatgctttgtgcttcaaggagatga

SEQ ID NO: 28010 - DNA, 76 bp, Homo sapiens
aaaaatgaagaaggtcacagattgatcttttataagaccttatttgatgctttgtgcttcaaggagatgatacctg

SEQ ID NO: 28011 - DNA, 81 bp, Homo sapiens
tcacagattgatcttttataagaccttatttgatgctttgtgcttcaaggagatgatacctgtcatccatataagcaaact

SEQ ID NO: 28012 - DNA, 77 bp, Homo sapiens
gatcttttataagaccttatttgatgctttgtgcttcaaggagatgatacctgtcatccatataagcaaactttttg

SEQ ID NO: 28013 - DNA, 78 bp, Homo sapiens
tataagaccttatttgatgctttgtgcttcaaggagatgatacctgtcatccatataagcaaactttttggcttacaa

SEQ ID NO: 28014 - DNA, 75 bp, Homo sapiens
atttgatgctttgtgcttcaaggagatgatacctgtcatccatataagcaaactttttggcttacaactattttt

SEQ ID NO: 28015 - DNA, 73 bp, Homo sapiens
tttgtgcttcaaggagatgatacctgtcatccatataagcaaactttttggcttacaactatttttttaatat

SEQ ID NO: 28016 - DNA, 72 bp, Homo sapiens
ggagatgatacctgtcatccatataagcaaactttttggcttacaactatttttttaatattagccttctag

SEQ ID NO: 28017 - DNA, 71 bp, Homo sapiens
cctgtcatccatataagcaaactttttggcttacaactatttttttaatattagccttctagtctgtaatg

SEQ ID NO: 28018 - DNA, 69 bp, Homo sapiens
catataagcaaactttttggcttacaactatttttttaatattagccttctagtctgtaatggaaattg

SEQ ID NO: 28019 - DNA, 70 bp, Homo sapiens
tttaatattagccttctagtctgtaatggaaattgtatattttgatagaagttttttctccattggttaa

SEQ ID NO: 28020 - DNA, 71 bp, Homo sapiens
gccttctagtctgtaatggaaattgtatattttgatagaagttttttctccattggttaaattagcattac

SEQ ID NO: 28021 - DNA, 70 bp, Homo sapiens
ctagtctgtaatggaaattgtatattttgatagaagttttttctccattggttaaattagcattacttaa

SEQ ID NO: 28022 - DNA, 67 bp, Homo sapiens
atggaaattgtatattttgatagaagttttttctccattggttaaattagcattacttaaaatttgt

SEQ ID NO: 28023 - DNA, 65 bp, Homo sapiens
gttttttctccattggttaaattagcattacttaaaatttgtttctttagaaaataaatgcaggt

SEQ ID NO: 28024 - DNA, 69 bp, Homo sapiens
tctccattggttaaattagcattacttaaaatttgtttctttagaaaataaatgcaggttataaatgtg

SEQ ID NO: 28025 - DNA, 70 bp, Homo sapiens
aattagcattacttaaaatttgtttctttagaaaataaatgcaggttataaatgtgtgtatatttagaga

SEQ ID NO: 28026 - DNA, 70 bp, Homo sapiens
cttaaaatttgtttctttagaaaataaatgcaggttataaatgtgtgtatatttagagattataaggctc

SEQ ID NO: 28027 - DNA, 77 bp, Homo sapiens
gtttctttagaaaataaatgcaggttataaatgtgtgtatatttagagattataaggctctctgagccatcttctga

SEQ ID NO: 28028 - DNA, 79 bp, Homo sapiens
gaaaataaatgcaggttataaatgtgtgtatatttagagattataaggctctctgagccatcttctgatttttcattgc

SEQ ID NO: 28029 - DNA, 81 bp, Homo sapiens
atgcaggttataaatgtgtgtatatttagagattataaggctctctgagccatcttctgatttttcattgctctataattc

SEQ ID NO: 28030 - DNA, 79 bp, Homo sapiens
atgtgtgtatatttagagattataaggctctctgagccatcttctgatttttcattgctctataattctttttactgaa

SEQ ID NO: 28031 - DNA, 76 bp, Homo sapiens
atatttagagattataaggctctctgagccatcttctgatttttcattgctctataattctttttactgaaaatac

SEQ ID NO: 28032 - DNA, 79 bp, Homo sapiens
gagattataaggctctctgagccatcttctgatttttcattgctctataattctttttactgaaaatactatgttatga

SEQ ID NO: 28033 - DNA, 78 bp, Homo sapiens
ggctctctgagccatcttctgatttttcattgctctataattctttttactgaaaatactatgttatgaatggtatta

SEQ ID NO: 28034 - DNA, 73 bp, Homo sapiens
gccatcttctgatttttcattgctctataattctttttactgaaaatactatgttatgaatggtattaaattt

SEQ ID NO: 28035 - DNA, 74 bp, Homo sapiens
ttcattgctctataattctttttactgaaaatactatgttatgaatggtattaaattttagtctctggaacatc

SEQ ID NO: 28036 - DNA, 70 bp, Homo sapiens
tttactgaaaatactatgttatgaatggtattaaattttagtctctggaacatccaaaaccaagcaaagg

SEQ ID NO: 28037 - DNA, 72 bp, Homo sapiens
gaaaatactatgttatgaatggtattaaattttagtctctggaacatccaaaaccaagcaaagggatgtgac

SEQ ID NO: 28038 - DNA, 78 bp, Homo sapiens
aacatccaaaaccaagcaaagggatgtgactattttgaatgaatcagaatgtcaacttgtatgtacactatatctaca

SEQ ID NO: 28039 - DNA, 77 bp, Homo sapiens
aaagggatgtgactattttgaatgaatcagaatgtcaacttgtatgtacactatatctacacttactcattatttaa

SEQ ID NO: 28040 - DNA, 76 bp, Homo sapiens
gactattttgaatgaatcagaatgtcaacttgtatgtacactatatctacacttactcattatttaaaaagaataa

SEQ ID NO: 28041 - DNA, 76 bp, Homo sapiens
gaatcagaatgtcaacttgtatgtacactatatctacacttactcattatttaaaaagaataatgaaaaatctaga

SEQ ID NO: 28042 - DNA, 74 bp, Homo sapiens
gtcaacttgtatgtacactatatctacacttactcattatttaaaaagaataatgaaaaatctagatcaattct

SEQ ID NO: 28043 - DNA, 75 bp, Homo sapiens
tctacacttactcattatttaaaaagaataatgaaaaatctagatcaattcttcaatttgattgaactgttcagc

SEQ ID NO: 28044 - DNA, 73 bp, Homo sapiens
ctcattatttaaaaagaataatgaaaaatctagatcaattcttcaatttgattgaactgttcagccttttcaa

SEQ ID NO: 28045 - DNA, 71 bp, Homo sapiens
aaaaagaataatgaaaaatctagatcaattcttcaatttgattgaactgttcagccttttcaagatttctt

SEQ ID NO: 28046 - DNA, 74 bp, Homo sapiens
gaataatgaaaaatctagatcaattcttcaatttgattgaactgttcagccttttcaagatttctttatttaca

SEQ ID NO: 28047 - DNA, 74 bp, Homo sapiens
aaatctagatcaattcttcaatttgattgaactgttcagccttttcaagatttctttatttacaaatgattaca

SEQ ID NO: 28048 - DNA, 73 bp, Homo sapiens
caattcttcaatttgattgaactgttcagccttttcaagatttctttatttacaaatgattacatttaaatga

SEQ ID NO: 28049 - DNA, 74 bp, Homo sapiens
ttgattgaactgttcagccttttcaagatttctttatttacaaatgattacatttaaatgaatgtacattcttc

SEQ ID NO: 28050 - DNA, 74 bp, Homo sapiens
actgttcagccttttcaagatttctttatttacaaatgattacatttaaatgaatgtacattcttctcactgac

SEQ ID NO: 28051 - DNA, 75 bp, Homo sapiens
ttcaagatttctttatttacaaatgattacatttaaatgaatgtacattcttctcactgactttggtgattttga

SEQ ID NO: 28052 - DNA, 75 bp, Homo sapiens
ttatttacaaatgattacatttaaatgaatgtacattcttctcactgactttggtgattttgaaacctagaatga

SEQ ID NO: 28053 - DNA, 77 bp, Homo sapiens
ttaaatgaatgtacattcttctcactgactttggtgattttgaaacctagaatgatgtgtttctatctgtaatatct

SEQ ID NO: 28054 - DNA, 76 bp, Homo sapiens
atgtacattcttctcactgactttggtgattttgaaacctagaatgatgtgtttctatctgtaatatctttccatt

SEQ ID NO: 28055 - DNA, 73 bp, Homo sapiens
gactttggtgattttgaaacctagaatgatgtgtttctatctgtaatatctttccatttgaaaaaaatctcaa

SEQ ID NO: 28056 - DNA, 71 bp, Homo sapiens
gtttctatctgtaatatctttccatttgaaaaaaatctcaaaacacagattaaaaccacaataggctgtag

SEQ ID NO: 28057 - DNA, 70 bp, Homo sapiens
tctgtaatatctttccatttgaaaaaaatctcaaaacacagattaaaaccacaataggctgtagtatttt

SEQ ID NO: 28058 - DNA, 68 bp, Homo sapiens
catttgaaaaaaatctcaaaacacagattaaaaccacaataggctgtagtattttttattttgggagc

SEQ ID NO: 28059 - DNA, 70 bp, Homo sapiens
tcaaaacacagattaaaaccacaataggctgtagtattttttattttgggagccagagtatgatttgggg

SEQ ID NO: 28060 - DNA, 71 bp, Homo sapiens
aaaaccacaataggctgtagtattttttattttgggagccagagtatgatttgggggaagaatatgtatca

SEQ ID NO: 28061 - DNA, 72 bp, Homo sapiens
acaataggctgtagtattttttattttgggagccagagtatgatttgggggaagaatatgtatcagccctat

SEQ ID NO: 28062 - DNA, 72 bp, Homo sapiens
attttttattttgggagccagagtatgatttgggggaagaatatgtatcagccctattgcagtataacttta

SEQ ID NO: 28063 - DNA, 73 bp, Homo sapiens
ttttgggagccagagtatgatttgggggaagaatatgtatcagccctattgcagtataactttaagctccttt

SEQ ID NO: 28064 - DNA, 73 bp, Homo sapiens
agagtatgatttgggggaagaatatgtatcagccctattgcagtataactttaagctccttttctctttagtc

SEQ ID NO: 28065 - DNA, 70 bp, Homo sapiens
tttgggggaagaatatgtatcagccctattgcagtataactttaagctccttttctctttagtccacttt

SEQ ID NO: 28066 - DNA, 69 bp, Homo sapiens
tgcagtataactttaagctccttttctctttagtccacttttgattgtaatttttatggtataggattt

SEQ ID NO: 28067 - DNA, 68 bp, Homo sapiens
ctttaagctccttttctctttagtccacttttgattgtaatttttatggtataggattttgaatcttc

SEQ ID NO: 28068 - DNA, 71 bp, Homo sapiens
ttctctttagtccacttttgattgtaatttttatggtataggattttgaatcttctattttaggcttgtca

SEQ ID NO: 28069 - DNA, 73 bp, Homo sapiens
tttatggtataggattttgaatcttctattttaggcttgtcagtcttggagttcttatcttccattatcccta

SEQ ID NO: 28070 - DNA, 72 bp, Homo sapiens
gtataggattttgaatcttctattttaggcttgtcagtcttggagttcttatcttccattatccctaaatat

SEQ ID NO: 28071 - DNA, 73 bp, Homo sapiens
tattttaggcttgtcagtcttggagttcttatcttccattatccctaaatattgataaactcccaggcaccaa

SEQ ID NO: 28072 - DNA, 70 bp, Homo sapiens
ggagttcttatcttccattatccctaaatattgataaactcccaggcaccaaagaaaacatttgcttaat

SEQ ID NO: 28073 - DNA, 71 bp, Homo sapiens
cttccattatccctaaatattgataaactcccaggcaccaaagaaaacatttgcttaattgtctgaaaaga

SEQ ID NO: 28074 - DNA, 70 bp, Homo sapiens
ccctaaatattgataaactcccaggcaccaaagaaaacatttgcttaattgtctgaaaagaaacaagaga

SEQ ID NO: 28075 - DNA, 70 bp, Homo sapiens
tgataaactcccaggcaccaaagaaaacatttgcttaattgtctgaaaagaaacaagagaaaaacactgg

SEQ ID NO: 28076 - DNA, 67 bp, Homo sapiens
cccaggcaccaaagaaaacatttgcttaattgtctgaaaagaaacaagagaaaaacactggtatttt

SEQ ID NO: 28077 - DNA, 71 bp, Homo sapiens
gaaaacatttgcttaattgtctgaaaagaaacaagagaaaaacactggtatttttatgtctgtattcaata

SEQ ID NO: 28078 - DNA, 72 bp, Homo sapiens
ttgcttaattgtctgaaaagaaacaagagaaaaacactggtatttttatgtctgtattcaatatggtataaa

SEQ ID NO: 28079 - DNA, 71 bp, Homo sapiens
ttgtctgaaaagaaacaagagaaaaacactggtatttttatgtctgtattcaatatggtataaaatataaa

SEQ ID NO: 28080 - DNA, 69 bp, Homo sapiens
gaaacaagagaaaaacactggtatttttatgtctgtattcaatatggtataaaatataaaaactatatt

SEQ ID NO: 28081 - DNA, 69 bp, Homo sapiens
acactggtatttttatgtctgtattcaatatggtataaaatataaaaactatattttaacttagtgaaa

SEQ ID NO: 28082 - DNA, 68 bp, Homo sapiens
ggtatttttatgtctgtattcaatatggtataaaatataaaaactatattttaacttagtgaaatatt

SEQ ID NO: 28083 - DNA, 70 bp, Homo sapiens
tgtctgtattcaatatggtataaaatataaaaactatattttaacttagtgaaatattttactatttctc

SEQ ID NO: 28084 - DNA, 68 bp, Homo sapiens
tggtataaaatataaaaactatattttaacttagtgaaatattttactatttctctacttcagacaaa

SEQ ID NO: 28085 - DNA, 71 bp, Homo sapiens
tataaaaactatattttaacttagtgaaatattttactatttctctacttcagacaaaatgttgcatccaa

SEQ ID NO: 28086 - DNA, 75 bp, Homo sapiens
cttagtgaaatattttactatttctctacttcagacaaaatgttgcatccaaggtacatcaagtgaccatttgcc

SEQ ID NO: 28087 - DNA, 75 bp, Homo sapiens
attttactatttctctacttcagacaaaatgttgcatccaaggtacatcaagtgaccatttgccttgaaccttga

SEQ ID NO: 28088 - DNA, 63 bp, Homo sapiens
tttttttccttaaaggcaactaggaagctttactttcctaaagtgtttttgccattggaattt

SEQ ID NO: 28089 - DNA, 70 bp, Homo sapiens
ttaaaggcaactaggaagctttactttcctaaagtgtttttgccattggaatttttgctgatcacagtct

SEQ ID NO: 28090 - DNA, 72 bp, Homo sapiens
caactaggaagctttactttcctaaagtgtttttgccattggaatttttgctgatcacagtcttatgtcatt

SEQ ID NO: 28091 - DNA, 72 bp, Homo sapiens
gctttactttcctaaagtgtttttgccattggaatttttgctgatcacagtcttatgtcatttttttctctg

SEQ ID NO: 28092 - DNA, 73 bp, Homo sapiens
aagtgtttttgccattggaatttttgctgatcacagtcttatgtcatttttttctctgtttttattcccagca

SEQ ID NO: 28093 - DNA, 74 bp, Homo sapiens
gccattggaatttttgctgatcacagtcttatgtcatttttttctctgtttttattcccagcaattttctccta

SEQ ID NO: 28094 - DNA, 71 bp, Homo sapiens
ggaatttttgctgatcacagtcttatgtcatttttttctctgtttttattcccagcaattttctcctaggt

SEQ ID NO: 28095 - DNA, 72 bp, Homo sapiens
gctgatcacagtcttatgtcatttttttctctgtttttattcccagcaattttctcctaggttaacatattt

SEQ ID NO: 28096 - DNA, 67 bp, Homo sapiens
atgtcatttttttctctgtttttattcccagcaattttctcctaggttaacatatttttggtgaacg

SEQ ID NO: 28097 - DNA, 66 bp, Homo sapiens
tttctctgtttttattcccagcaattttctcctaggttaacatatttttggtgaacgtttaggcct

SEQ ID NO: 28098 - DNA, 70 bp, Homo sapiens
cagcaattttctcctaggttaacatatttttggtgaacgtttaggcctttcataggtattaagctgacat

SEQ ID NO: 28099 - DNA, 70 bp, Homo sapiens
cctaggttaacatatttttggtgaacgtttaggcctttcataggtattaagctgacattatctagcttct

SEQ ID NO: 28100 - DNA, 72 bp, Homo sapiens
gttaacatatttttggtgaacgtttaggcctttcataggtattaagctgacattatctagcttcttaatgaa

SEQ ID NO: 28101 - DNA, 75 bp, Homo sapiens
tggtgaacgtttaggcctttcataggtattaagctgacattatctagcttcttaatgaaatttaacactgtcaca

SEQ ID NO: 28102 - DNA, 72 bp, Homo sapiens
cgtttaggcctttcataggtattaagctgacattatctagcttcttaatgaaatttaacactgtcacaaaaa

SEQ ID NO: 28103 - DNA, 75 bp, Homo sapiens
tttcataggtattaagctgacattatctagcttcttaatgaaatttaacactgtcacaaaaatgagaagttatta

SEQ ID NO: 28104 - DNA, 72 bp, Homo sapiens
attaagctgacattatctagcttcttaatgaaatttaacactgtcacaaaaatgagaagttattatttttta

SEQ ID NO: 28105 - DNA, 74 bp, Homo sapiens
tctagcttcttaatgaaatttaacactgtcacaaaaatgagaagttattattttttaagtgatcacatagttca

SEQ ID NO: 28106 - DNA, 73 bp, Homo sapiens
taatgaaatttaacactgtcacaaaaatgagaagttattattttttaagtgatcacatagttcataccactag

SEQ ID NO: 28107 - DNA, 73 bp, Homo sapiens
ttaacactgtcacaaaaatgagaagttattattttttaagtgatcacatagttcataccactagtaactagaa

SEQ ID NO: 28108 - DNA, 73 bp, Homo sapiens
ctgtcacaaaaatgagaagttattattttttaagtgatcacatagttcataccactagtaactagaaaagata

SEQ ID NO: 28109 - DNA, 78 bp, Homo sapiens
gtgatcacatagttcataccactagtaactagaaaagatatttattcacatgatatttacaaggctcttcagaaggga

SEQ ID NO: 28110 - DNA, 77 bp, Homo sapiens
ttcataccactagtaactagaaaagatatttattcacatgatatttacaaggctcttcagaagggaacagtcagcat

SEQ ID NO: 28111 - DNA, 74 bp, Homo sapiens
accactagtaactagaaaagatatttattcacatgatatttacaaggctcttcagaagggaacagtcagcattt

SEQ ID NO: 28112 - DNA, 75 bp, Homo sapiens
ctagaaaagatatttattcacatgatatttacaaggctcttcagaagggaacagtcagcattttaaattactaga

SEQ ID NO: 28113 - DNA, 75 bp, Homo sapiens
tttattcacatgatatttacaaggctcttcagaagggaacagtcagcattttaaattactagattttagcatact

SEQ ID NO: 28114 - DNA, 73 bp, Homo sapiens
tgatatttacaaggctcttcagaagggaacagtcagcattttaaattactagattttagcatacttaacaagg

SEQ ID NO: 28115 - DNA, 72 bp, Homo sapiens
aggctcttcagaagggaacagtcagcattttaaattactagattttagcatacttaacaaggtttgaacaga

SEQ ID NO: 28116 - DNA, 70 bp, Homo sapiens
gaagggaacagtcagcattttaaattactagattttagcatacttaacaaggtttgaacagattctaccc

SEQ ID NO: 28117 - DNA, 66 bp, Homo sapiens
tttaaattactagattttagcatacttaacaaggtttgaacagattctacccctattttcctccct

SEQ ID NO: 28118 - DNA, 64 bp, Homo sapiens
acttaacaaggtttgaacagattctacccctattttcctccctttttagcgtcttctttcctta

SEQ ID NO: 28119 - DNA, 65 bp, Homo sapiens
acaaggtttgaacagattctacccctattttcctccctttttagcgtcttctttccttaaagata

SEQ ID NO: 28120 - DNA, 65 bp, Homo sapiens
cagattctacccctattttcctccctttttagcgtcttctttccttaaagataaaagaaaactca

SEQ ID NO: 28121 - DNA, 62 bp, Homo sapiens
ccctattttcctccctttttagcgtcttctttccttaaagataaaagaaaactcaaatttgt

SEQ ID NO: 28122 - DNA, 64 bp, Homo sapiens
cctccctttttagcgtcttctttccttaaagataaaagaaaactcaaatttgtttacattaggc

SEQ ID NO: 28123 - DNA, 69 bp, Homo sapiens
ttagcgtcttctttccttaaagataaaagaaaactcaaatttgtttacattaggctttcttagcatata

SEQ ID NO: 28124 - DNA, 69 bp, Homo sapiens
ttccttaaagataaaagaaaactcaaatttgtttacattaggctttcttagcatataaatatatttcca

SEQ ID NO: 28125 - DNA, 68 bp, Homo sapiens
aaagaaaactcaaatttgtttacattaggctttcttagcatataaatatatttccaaaataaattaca

SEQ ID NO: 28126 - DNA, 71 bp, Homo sapiens
tcaaatttgtttacattaggctttcttagcatataaatatatttccaaaataaattacatgttgtgtaaac

SEQ ID NO: 28127 - DNA, 75 bp, Homo sapiens
ttacattaggctttcttagcatataaatatatttccaaaataaattacatgttgtgtaaactttctccatgatga

SEQ ID NO: 28128 - DNA, 74 bp, Homo sapiens
tataaatatatttccaaaataaattacatgttgtgtaaactttctccatgatgaaatagtcaaggaccagaatc

SEQ ID NO: 28129 - DNA, 73 bp, Homo sapiens
tttccaaaataaattacatgttgtgtaaactttctccatgatgaaatagtcaaggaccagaatctgtaatatt

SEQ ID NO: 28130 - DNA, 76 bp, Homo sapiens
ctttctccatgatgaaatagtcaaggaccagaatctgtaatatttttatgtaagattacttgtcaagactactaca

SEQ ID NO: 28131 - DNA, 74 bp, Homo sapiens
gtcaaggaccagaatctgtaatatttttatgtaagattacttgtcaagactactacaagtcagtatgaactacc

SEQ ID NO: 28132 - DNA, 73 bp, Homo sapiens
accagaatctgtaatatttttatgtaagattacttgtcaagactactacaagtcagtatgaactaccttccca

SEQ ID NO: 28133 - DNA, 70 bp, Homo sapiens
atttttatgtaagattacttgtcaagactactacaagtcagtatgaactaccttcccataaagatttttg

SEQ ID NO: 28134 - DNA, 71 bp, Homo sapiens
atgtaagattacttgtcaagactactacaagtcagtatgaactaccttcccataaagatttttggtatttg

SEQ ID NO: 28135 - DNA, 69 bp, Homo sapiens
acttgtcaagactactacaagtcagtatgaactaccttcccataaagatttttggtatttgtacttatt

SEQ ID NO: 28136 - DNA, 69 bp, Homo sapiens
gactactacaagtcagtatgaactaccttcccataaagatttttggtatttgtacttatttatgaactt

SEQ ID NO: 28137 - DNA, 71 bp, Homo sapiens
gtcagtatgaactaccttcccataaagatttttggtatttgtacttatttatgaactttacttgagacaga

SEQ ID NO: 28138 - DNA, 69 bp, Homo sapiens
ctaccttcccataaagatttttggtatttgtacttatttatgaactttacttgagacagaatatggtta

SEQ ID NO: 28139 - DNA, 69 bp, Homo sapiens
cataaagatttttggtatttgtacttatttatgaactttacttgagacagaatatggttaaaattagga

SEQ ID NO: 28140 - DNA, 70 bp, Homo sapiens
ggtatttgtacttatttatgaactttacttgagacagaatatggttaaaattaggaacatctactttgaa

SEQ ID NO: 28141 - DNA, 70 bp, Homo sapiens
atgaactttacttgagacagaatatggttaaaattaggaacatctactttgaatgaggtttatttttcta

SEQ ID NO: 28142 - DNA, 71 bp, Homo sapiens
tgagacagaatatggttaaaattaggaacatctactttgaatgaggtttatttttctattttgaatttgcc

SEQ ID NO: 28143 - DNA, 69 bp, Homo sapiens
gaatatggttaaaattaggaacatctactttgaatgaggtttatttttctattttgaatttgccttatg

SEQ ID NO: 28144 - DNA, 72 bp, Homo sapiens
taggaacatctactttgaatgaggtttatttttctattttgaatttgccttatgtatattcaaaggcttatg

SEQ ID NO: 28145 - DNA, 70 bp, Homo sapiens
ctactttgaatgaggtttatttttctattttgaatttgccttatgtatattcaaaggcttatggaaatac

SEQ ID NO: 28146 - DNA, 70 bp, Homo sapiens
tgaggtttatttttctattttgaatttgccttatgtatattcaaaggcttatggaaatactgtaaaggaa

SEQ ID NO: 28147 - DNA, 71 bp, Homo sapiens
tgaatttgccttatgtatattcaaaggcttatggaaatactgtaaaggaacattaggaaaaggacaaatag

SEQ ID NO: 28148 - DNA, 72 bp, Homo sapiens
tatgtatattcaaaggcttatggaaatactgtaaaggaacattaggaaaaggacaaataggctataaccatc

SEQ ID NO: 28149 - DNA, 70 bp, Homo sapiens
caaaggcttatggaaatactgtaaaggaacattaggaaaaggacaaataggctataaccatctatcttaa

SEQ ID NO: 28150 - DNA, 70 bp, Homo sapiens
tggaaatactgtaaaggaacattaggaaaaggacaaataggctataaccatctatcttaaaatcagaccc

SEQ ID NO: 28151 - DNA, 71 bp, Homo sapiens
gaacattaggaaaaggacaaataggctataaccatctatcttaaaatcagacccttagtataagcacctct

SEQ ID NO: 28152 - DNA, 69 bp, Homo sapiens
gaaaaggacaaataggctataaccatctatcttaaaatcagacccttagtataagcacctctttttctt

SEQ ID NO: 28153 - DNA, 70 bp, Homo sapiens
aggctataaccatctatcttaaaatcagacccttagtataagcacctctttttcttttcctctttgacaa

SEQ ID NO: 28154 - DNA, 70 bp, Homo sapiens
ccatctatcttaaaatcagacccttagtataagcacctctttttcttttcctctttgacaatttagtctc

SEQ ID NO: 28155 - DNA, 68 bp, Homo sapiens
aatcagacccttagtataagcacctctttttcttttcctctttgacaatttagtctcttatttaggtc

SEQ ID NO: 28156 - DNA, 69 bp, Homo sapiens
gacccttagtataagcacctctttttcttttcctctttgacaatttagtctcttatttaggtccatgta

SEQ ID NO: 28157 - DNA, 70 bp, Homo sapiens
gcacctctttttcttttcctctttgacaatttagtctcttatttaggtccatgtaattaatttcattcca

SEQ ID NO: 28158 - DNA, 68 bp, Homo sapiens
ttcttttcctctttgacaatttagtctcttatttaggtccatgtaattaatttcattccattattttt

SEQ ID NO: 28159 - DNA, 70 bp, Homo sapiens
tcctctttgacaatttagtctcttatttaggtccatgtaattaatttcattccattattttttagctgtt

SEQ ID NO: 28160 - DNA, 67 bp, Homo sapiens
tcttatttaggtccatgtaattaatttcattccattattttttagctgtttattctaaaaaacaaaa

SEQ ID NO: 28161 - DNA, 68 bp, Homo sapiens
catgtaattaatttcattccattattttttagctgtttattctaaaaaacaaaaattttcagccactc

SEQ ID NO: 28162 - DNA, 68 bp, Homo sapiens
ttcattccattattttttagctgtttattctaaaaaacaaaaattttcagccactcccatttattctc

SEQ ID NO: 28163 - DNA, 69 bp, Homo sapiens
tattttttagctgtttattctaaaaaacaaaaattttcagccactcccatttattctcccatgacatgg

SEQ ID NO: 28164 - DNA, 74 bp, Homo sapiens
aacaaaaattttcagccactcccatttattctcccatgacatggtcctatatagcagtacttaacacagtgcct

SEQ ID NO: 28165 - DNA, 83 bp, Homo sapiens
ttcagccactcccatttattctcccatgacatggtcctatatagcagtacttaacacagtgccttgcacatagtaggcattca

SEQ ID NO: 28166 - DNA, 79 bp, Homo sapiens
atttattctcccatgacatggtcctatatagcagtacttaacacagtgccttgcacatagtaggcattcagtaaatact

SEQ ID NO: 28167 - DNA, 85 bp, Homo sapiens
atgacatggtcctatatagcagtacttaacacagtgccttgcacatagtaggcattcagtaaatacttacatgcatgaatgaata

SEQ ID NO: 28168 - DNA, 81 bp, Homo sapiens
agtacttaacacagtgccttgcacatagtaggcattcagtaaatacttacatgcatgaatgaataatgtattttcagtgta

SEQ ID NO: 28169 - DNA, 81 bp, Homo sapiens
cacagtgccttgcacatagtaggcattcagtaaatacttacatgcatgaatgaataatgtattttcagtgtaacaaattta

SEQ ID NO: 28170 - DNA, 80 bp, Homo sapiens
gccttgcacatagtaggcattcagtaaatacttacatgcatgaatgaataatgtattttcagtgtaacaaatttattata

SEQ ID NO: 28171 - DNA, 75 bp, Homo sapiens
ggcattcagtaaatacttacatgcatgaatgaataatgtattttcagtgtaacaaatttattataaaagtgtagt

SEQ ID NO: 28172 - DNA, 74 bp, Homo sapiens
gtaaatacttacatgcatgaatgaataatgtattttcagtgtaacaaatttattataaaagtgtagttcgactc

SEQ ID NO: 28173 - DNA, 75 bp, Homo sapiens
catgcatgaatgaataatgtattttcagtgtaacaaatttattataaaagtgtagttcgactcttcttggtcttg

SEQ ID NO: 28174 - DNA, 71 bp, Homo sapiens
ttttcagtgtaacaaatttattataaaagtgtagttcgactcttcttggtcttggagtttgagagtacaga

SEQ ID NO: 28175 - DNA, 69 bp, Homo sapiens
aacaaatttattataaaagtgtagttcgactcttcttggtcttggagtttgagagtacagaattacagg

SEQ ID NO: 28176 - DNA, 73 bp, Homo sapiens
ttattataaaagtgtagttcgactcttcttggtcttggagtttgagagtacagaattacagggaatgaagaga

SEQ ID NO: 28177 - DNA, 72 bp, Homo sapiens
actcttcttggtcttggagtttgagagtacagaattacagggaatgaagagaggtataagtagatattttaa

SEQ ID NO: 28178 - DNA, 72 bp, Homo sapiens
agtttgagagtacagaattacagggaatgaagagaggtataagtagatattttaatggaaatgaagtataaa

SEQ ID NO: 28179 - DNA, 69 bp, Homo sapiens
gggaatgaagagaggtataagtagatattttaatggaaatgaagtataaattaataacttgacttaccc

SEQ ID NO: 28180 - DNA, 69 bp, Homo sapiens
gagaggtataagtagatattttaatggaaatgaagtataaattaataacttgacttacccctccataag

SEQ ID NO: 28181 - DNA, 70 bp, Homo sapiens
gatattttaatggaaatgaagtataaattaataacttgacttacccctccataagttactgctaactgga

SEQ ID NO: 28182 - DNA, 70 bp, Homo sapiens
agtataaattaataacttgacttacccctccataagttactgctaactggagatacccttgtatgcccaa

SEQ ID NO: 28183 - DNA, 70 bp, Homo sapiens
ttaataacttgacttacccctccataagttactgctaactggagatacccttgtatgcccaacctgtaaa

SEQ ID NO: 28184 - DNA, 69 bp, Homo sapiens
ttgacttacccctccataagttactgctaactggagatacccttgtatgcccaacctgtaaaggaaaaa

SEQ ID NO: 28185 - DNA, 70 bp, Homo sapiens
cataagttactgctaactggagatacccttgtatgcccaacctgtaaaggaaaaagttctatttctatat

SEQ ID NO: 28186 - DNA, 70 bp, Homo sapiens
actgctaactggagatacccttgtatgcccaacctgtaaaggaaaaagttctatttctatatttatagga

SEQ ID NO: 28187 - DNA, 71 bp, Homo sapiens
ccttgtatgcccaacctgtaaaggaaaaagttctatttctatatttataggacattcttctcagtcaagga

SEQ ID NO: 28188 - DNA, 70 bp, Homo sapiens
ccaacctgtaaaggaaaaagttctatttctatatttataggacattcttctcagtcaaggaacagtaaga

SEQ ID NO: 28189 - DNA, 70 bp, Homo sapiens
ggaaaaagttctatttctatatttataggacattcttctcagtcaaggaacagtaagaaatatgtaggtt

SEQ ID NO: 28190 - DNA, 76 bp, Homo sapiens
tttctatatttataggacattcttctcagtcaaggaacagtaagaaatatgtaggtttcaatcagttgctctcaac

SEQ ID NO: 28191 - DNA, 76 bp, Homo sapiens
attcttctcagtcaaggaacagtaagaaatatgtaggtttcaatcagttgctctcaaccctgactgcattttagaa

SEQ ID NO: 28192 - DNA, 76 bp, Homo sapiens
agtcaaggaacagtaagaaatatgtaggtttcaatcagttgctctcaaccctgactgcattttagaatcatttgga

SEQ ID NO: 28193 - DNA, 75 bp, Homo sapiens
cagtaagaaatatgtaggtttcaatcagttgctctcaaccctgactgcattttagaatcatttggagagttttta

SEQ ID NO: 28194 - DNA, 73 bp, Homo sapiens
aatatgtaggtttcaatcagttgctctcaaccctgactgcattttagaatcatttggagagtttttaaaaata

SEQ ID NO: 28195 - DNA, 77 bp, Homo sapiens
tttcaatcagttgctctcaaccctgactgcattttagaatcatttggagagtttttaaaaatatccatgcctgaatc

SEQ ID NO: 28196 - DNA, 75 bp, Homo sapiens
tctcaaccctgactgcattttagaatcatttggagagtttttaaaaatatccatgcctgaatcttgattcccatt

SEQ ID NO: 28197 - DNA, 75 bp, Homo sapiens
ccctgactgcattttagaatcatttggagagtttttaaaaatatccatgcctgaatcttgattcccattttcatg

SEQ ID NO: 28198 - DNA, 75 bp, Homo sapiens
ttggagagtttttaaaaatatccatgcctgaatcttgattcccattttcatgtaatttgagacaagacctggtca

SEQ ID NO: 28199 - DNA, 75 bp, Homo sapiens
ttaaaaatatccatgcctgaatcttgattcccattttcatgtaatttgagacaagacctggtcatcagtattttt

SEQ ID NO: 28200 - DNA, 75 bp, Homo sapiens
tatccatgcctgaatcttgattcccattttcatgtaatttgagacaagacctggtcatcagtattttttttaaag

SEQ ID NO: 28201 - DNA, 73 bp, Homo sapiens
ctgaatcttgattcccattttcatgtaatttgagacaagacctggtcatcagtattttttttaaagttctcca

SEQ ID NO: 28202 - DNA, 70 bp, Homo sapiens
cccattttcatgtaatttgagacaagacctggtcatcagtattttttttaaagttctccaggtaatttga

SEQ ID NO: 28203 - DNA, 71 bp, Homo sapiens
gtaatttgagacaagacctggtcatcagtattttttttaaagttctccaggtaatttgaatgtgcaggaag

SEQ ID NO: 28204 - DNA, 73 bp, Homo sapiens
acaagacctggtcatcagtattttttttaaagttctccaggtaatttgaatgtgcaggaaggattcagaatca

SEQ ID NO: 28205 - DNA, 72 bp, Homo sapiens
ggtcatcagtattttttttaaagttctccaggtaatttgaatgtgcaggaaggattcagaatcactggttta

SEQ ID NO: 28206 - DNA, 69 bp, Homo sapiens
tttttttaaagttctccaggtaatttgaatgtgcaggaaggattcagaatcactggtttaatttgttat

SEQ ID NO: 28207 - DNA, 72 bp, Homo sapiens
agttctccaggtaatttgaatgtgcaggaaggattcagaatcactggtttaatttgttattgaaaacagtac

SEQ ID NO: 28208 - DNA, 72 bp, Homo sapiens
ccaggtaatttgaatgtgcaggaaggattcagaatcactggtttaatttgttattgaaaacagtaccagtat

SEQ ID NO: 28209 - DNA, 70 bp, Homo sapiens
ggaaggattcagaatcactggtttaatttgttattgaaaacagtaccagtattaaatgtgtttcctcttc

SEQ ID NO: 28210 - DNA, 68 bp, Homo sapiens
gaatcactggtttaatttgttattgaaaacagtaccagtattaaatgtgtttcctcttccttcttttc

SEQ ID NO: 28211 - DNA, 71 bp, Homo sapiens
taatttgttattgaaaacagtaccagtattaaatgtgtttcctcttccttcttttctgtatgtatgtgtgg

SEQ ID NO: 28212 - DNA, 71 bp, Homo sapiens
tattgaaaacagtaccagtattaaatgtgtttcctcttccttcttttctgtatgtatgtgtggtttttgat

SEQ ID NO: 28213 - DNA, 69 bp, Homo sapiens
cagtaccagtattaaatgtgtttcctcttccttcttttctgtatgtatgtgtggtttttgattttttgt

SEQ ID NO: 28214 - DNA, 72 bp, Homo sapiens
ttgttgttttgtggccaccctttgcactagaccatcccttttattggtggtattggcctatattcccattga

SEQ ID NO: 28215 - DNA, 74 bp, Homo sapiens
ttttgtggccaccctttgcactagaccatcccttttattggtggtattggcctatattcccattgacaaatgca

SEQ ID NO: 28216 - DNA, 71 bp, Homo sapiens
accctttgcactagaccatcccttttattggtggtattggcctatattcccattgacaaatgcaattttta

SEQ ID NO: 28217 - DNA, 70 bp, Homo sapiens
ctagaccatcccttttattggtggtattggcctatattcccattgacaaatgcaatttttaattatttat

SEQ ID NO: 28218 - DNA, 67 bp, Homo sapiens
aattatttatttaatataggagtattttactgtttaatatttaaacaatgtttaatgtatttcatta

SEQ ID NO: 28219 - DNA, 68 bp, Homo sapiens
tttaatataggagtattttactgtttaatatttaaacaatgtttaatgtatttcattattaactagta

SEQ ID NO: 28220 - DNA, 68 bp, Homo sapiens
gagtattttactgtttaatatttaaacaatgtttaatgtatttcattattaactagtattatagtttg

SEQ ID NO: 28221 - DNA, 66 bp, Homo sapiens
tttactgtttaatatttaaacaatgtttaatgtatttcattattaactagtattatagtttgtttt

SEQ ID NO: 28222 - DNA, 67 bp, Homo sapiens
gtttaatgtatttcattattaactagtattatagtttgtttttttcccatgtctccataacttttac

SEQ ID NO: 28223 - DNA, 67 bp, Homo sapiens
ttcattattaactagtattatagtttgtttttttcccatgtctccataacttttactaacatttgtt

SEQ ID NO: 28224 - DNA, 69 bp, Homo sapiens
actagtattatagtttgtttttttcccatgtctccataacttttactaacatttgtttttagcagcaca

SEQ ID NO: 28225 - DNA, 71 bp, Homo sapiens
tttttcccatgtctccataacttttactaacatttgtttttagcagcacaacagtaatccatataaaaaca

SEQ ID NO: 28226 - DNA, 71 bp, Homo sapiens
ccatgtctccataacttttactaacatttgtttttagcagcacaacagtaatccatataaaaacaactaat

SEQ ID NO: 28227 - DNA, 72 bp, Homo sapiens
taacttttactaacatttgtttttagcagcacaacagtaatccatataaaaacaactaattcataatgagga

SEQ ID NO: 28228 - DNA, 74 bp, Homo sapiens
ctaacatttgtttttagcagcacaacagtaatccatataaaaacaactaattcataatgaggaaaatctcataa

SEQ ID NO: 28229 - DNA, 72 bp, Homo sapiens
atttgtttttagcagcacaacagtaatccatataaaaacaactaattcataatgaggaaaatctcataattt

SEQ ID NO: 28230 - DNA, 75 bp, Homo sapiens
tttagcagcacaacagtaatccatataaaaacaactaattcataatgaggaaaatctcataatttttaaggcaga

SEQ ID NO: 28231 - DNA, 75 bp, Homo sapiens
gcagcacaacagtaatccatataaaaacaactaattcataatgaggaaaatctcataatttttaaggcagaaaga

SEQ ID NO: 28232 - DNA, 71 bp, Homo sapiens
cagtaatccatataaaaacaactaattcataatgaggaaaatctcataatttttaaggcagaaagaagtat

SEQ ID NO: 28233 - DNA, 70 bp, Homo sapiens
tccatataaaaacaactaattcataatgaggaaaatctcataatttttaaggcagaaagaagtattaatt

SEQ ID NO: 28234 - DNA, 74 bp, Homo sapiens
actaattcataatgaggaaaatctcataatttttaaggcagaaagaagtattaatttttgatctgccatgtaga

SEQ ID NO: 28235 - DNA, 77 bp, Homo sapiens
ttcataatgaggaaaatctcataatttttaaggcagaaagaagtattaatttttgatctgccatgtagaatgagaca

SEQ ID NO: 28236 - DNA, 76 bp, Homo sapiens
cataatgaggaaaatctcataatttttaaggcagaaagaagtattaatttttgatctgccatgtagaatgagacaa

SEQ ID NO: 28237 - DNA, 76 bp, Homo sapiens
cataatttttaaggcagaaagaagtattaatttttgatctgccatgtagaatgagacaaatacagtttgcttatga

SEQ ID NO: 28238 - DNA, 75 bp, Homo sapiens
aggcagaaagaagtattaatttttgatctgccatgtagaatgagacaaatacagtttgcttatgaaaggaaagtg

SEQ ID NO: 28239 - DNA, 76 bp, Homo sapiens
gaaagaagtattaatttttgatctgccatgtagaatgagacaaatacagtttgcttatgaaaggaaagtggcatac

SEQ ID NO: 28240 - DNA, 75 bp, Homo sapiens
tttttgatctgccatgtagaatgagacaaatacagtttgcttatgaaaggaaagtggcatacttttaaattggtc

SEQ ID NO: 28241 - DNA, 76 bp, Homo sapiens
tgccatgtagaatgagacaaatacagtttgcttatgaaaggaaagtggcatacttttaaattggtctacacagaaa

SEQ ID NO: 28242 - DNA, 72 bp, Homo sapiens
agaatgagacaaatacagtttgcttatgaaaggaaagtggcatacttttaaattggtctacacagaaaagta

SEQ ID NO: 28243 - DNA, 69 bp, Homo sapiens
caaatacagtttgcttatgaaaggaaagtggcatacttttaaattggtctacacagaaaagtaaaagta

SEQ ID NO: 28244 - DNA, 69 bp, Homo sapiens
ttgcttatgaaaggaaagtggcatacttttaaattggtctacacagaaaagtaaaagtaaactattcat

SEQ ID NO: 28245 - DNA, 69 bp, Homo sapiens
cacagaaaagtaaaagtaaactattcatttaaataagattcattatctaataaatattgagggaatatt

SEQ ID NO: 28246 - DNA, 68 bp, Homo sapiens
gtaaaagtaaactattcatttaaataagattcattatctaataaatattgagggaatatttttcctaa

SEQ ID NO: 28247 - DNA, 67 bp, Homo sapiens
actattcatttaaataagattcattatctaataaatattgagggaatatttttcctaaataaaaatt

SEQ ID NO: 28248 - DNA, 70 bp, Homo sapiens
ataagattcattatctaataaatattgagggaatatttttcctaaataaaaatttttctgactgctaaca

SEQ ID NO: 28249 - DNA, 68 bp, Homo sapiens
tcattatctaataaatattgagggaatatttttcctaaataaaaatttttctgactgctaacaaaaat

SEQ ID NO: 28250 - DNA, 67 bp, Homo sapiens
atattgagggaatatttttcctaaataaaaatttttctgactgctaacaaaaattaaagtgattaca

SEQ ID NO: 28251 - DNA, 66 bp, Homo sapiens
gggaatatttttcctaaataaaaatttttctgactgctaacaaaaattaaagtgattacattgttc

SEQ ID NO: 28252 - DNA, 67 bp, Homo sapiens
ctgactgctaacaaaaattaaagtgattacattgttcttttttggaggggtggggaggaatatttgt

SEQ ID NO: 28253 - DNA, 66 bp, Homo sapiens
aattaaagtgattacattgttcttttttggaggggtggggaggaatatttgttgaactaaagtata

SEQ ID NO: 28254 - DNA, 66 bp, Homo sapiens
aagtgattacattgttcttttttggaggggtggggaggaatatttgttgaactaaagtatataaaa

SEQ ID NO: 28255 - DNA, 67 bp, Homo sapiens
tcttttttggaggggtggggaggaatatttgttgaactaaagtatataaaattttttgagactagca

SEQ ID NO: 28256 - DNA, 67 bp, Homo sapiens
ggaggggtggggaggaatatttgttgaactaaagtatataaaattttttgagactagcagtatattt

SEQ ID NO: 28257 - DNA, 70 bp, Homo sapiens
gggaggaatatttgttgaactaaagtatataaaattttttgagactagcagtatattttataatattaca

SEQ ID NO: 28258 - DNA, 71 bp, Homo sapiens
tgttgaactaaagtatataaaattttttgagactagcagtatattttataatattacaaatacaacaatta

SEQ ID NO: 28259 - DNA, 70 bp, Homo sapiens
ctaaagtatataaaattttttgagactagcagtatattttataatattacaaatacaacaattatttata

SEQ ID NO: 28260 - DNA, 74 bp, Homo sapiens
tgagactagcagtatattttataatattacaaatacaacaattatttataaaagctagtcaaattaatggctta

SEQ ID NO: 28261 - DNA, 71 bp, Homo sapiens
tattttataatattacaaatacaacaattatttataaaagctagtcaaattaatggcttagaaagtagctg

SEQ ID NO: 28262 - DNA, 70 bp, Homo sapiens
tattacaaatacaacaattatttataaaagctagtcaaattaatggcttagaaagtagctgtaaactttg

SEQ ID NO: 28263 - DNA, 69 bp, Homo sapiens
acaacaattatttataaaagctagtcaaattaatggcttagaaagtagctgtaaactttgtgttttgaa

SEQ ID NO: 28264 - DNA, 69 bp, Homo sapiens
tttataaaagctagtcaaattaatggcttagaaagtagctgtaaactttgtgttttgaaattgcttgtt

SEQ ID NO: 28265 - DNA, 71 bp, Homo sapiens
aaagctagtcaaattaatggcttagaaagtagctgtaaactttgtgttttgaaattgcttgtttaaatgca

SEQ ID NO: 28266 - DNA, 72 bp, Homo sapiens
taatggcttagaaagtagctgtaaactttgtgttttgaaattgcttgtttaaatgcaaaattatgagtaaga

SEQ ID NO: 28267 - DNA, 71 bp, Homo sapiens
gcttagaaagtagctgtaaactttgtgttttgaaattgcttgtttaaatgcaaaattatgagtaagataag

SEQ ID NO: 28268 - DNA, 70 bp, Homo sapiens
tagctgtaaactttgtgttttgaaattgcttgtttaaatgcaaaattatgagtaagataagtctttttaa

SEQ ID NO: 28269 - DNA, 66 bp, Homo sapiens
ctttgtgttttgaaattgcttgtttaaatgcaaaattatgagtaagataagtctttttaaattttt

SEQ ID NO: 28270 - DNA, 68 bp, Homo sapiens
tttttaaaaaaagattcttaataaagaaattattggtttgtctggttaaagtccatatagaatgctga

SEQ ID NO: 28271 - DNA, 69 bp, Homo sapiens
aaaagattcttaataaagaaattattggtttgtctggttaaagtccatatagaatgctgagaaataatt

SEQ ID NO: 28272 - DNA, 70 bp, Homo sapiens
cttaataaagaaattattggtttgtctggttaaagtccatatagaatgctgagaaataatttataaaata

SEQ ID NO: 28273 - DNA, 72 bp, Homo sapiens
gaaattattggtttgtctggttaaagtccatatagaatgctgagaaataatttataaaataagaactataga

SEQ ID NO: 28274 - DNA, 75 bp, Homo sapiens
gtctggttaaagtccatatagaatgctgagaaataatttataaaataagaactatagaaatttgttctcagctga

SEQ ID NO: 28275 - DNA, 76 bp, Homo sapiens
gtccatatagaatgctgagaaataatttataaaataagaactatagaaatttgttctcagctgaaaagttggcagc

SEQ ID NO: 28276 - DNA, 77 bp, Homo sapiens
atagaatgctgagaaataatttataaaataagaactatagaaatttgttctcagctgaaaagttggcagctgctctg

SEQ ID NO: 28277 - DNA, 73 bp, Homo sapiens
gagaaataatttataaaataagaactatagaaatttgttctcagctgaaaagttggcagctgctctgtttctt

SEQ ID NO: 28278 - DNA, 71 bp, Homo sapiens
aaaataagaactatagaaatttgttctcagctgaaaagttggcagctgctctgtttctttaaaaaagtaca

SEQ ID NO: 28279 - DNA, 73 bp, Homo sapiens
agaactatagaaatttgttctcagctgaaaagttggcagctgctctgtttctttaaaaaagtacaacatgaaa

SEQ ID NO: 28280 - DNA, 71 bp, Homo sapiens
gaaatttgttctcagctgaaaagttggcagctgctctgtttctttaaaaaagtacaacatgaaaatttaat

SEQ ID NO: 28281 - DNA, 72 bp, Homo sapiens
ctcagctgaaaagttggcagctgctctgtttctttaaaaaagtacaacatgaaaatttaattacattagcct

SEQ ID NO: 28282 - DNA, 71 bp, Homo sapiens
ggcagctgctctgtttctttaaaaaagtacaacatgaaaatttaattacattagccttaatattacttgac

SEQ ID NO: 28283 - DNA, 70 bp, Homo sapiens
ctgctctgtttctttaaaaaagtacaacatgaaaatttaattacattagccttaatattacttgactgaa

SEQ ID NO: 28284 - DNA, 68 bp, Homo sapiens
ctttaaaaaagtacaacatgaaaatttaattacattagccttaatattacttgactgaatttctacta

SEQ ID NO: 28285 - DNA, 72 bp, Homo sapiens
gtacaacatgaaaatttaattacattagccttaatattacttgactgaatttctactatttattcacttgtg

SEQ ID NO: 28286 - DNA, 73 bp, Homo sapiens
tttaattacattagccttaatattacttgactgaatttctactatttattcacttgtgtttgagattcaccca

SEQ ID NO: 28287 - DNA, 75 bp, Homo sapiens
ttacattagccttaatattacttgactgaatttctactatttattcacttgtgtttgagattcacccagctattc

SEQ ID NO: 28288 - DNA, 74 bp, Homo sapiens
cacttgtgtttgagattcacccagctattctaatgatagaaataaaaagtggagaaatgactaaagttgactta

SEQ ID NO: 28289 - DNA, 72 bp, Homo sapiens
gtgtttgagattcacccagctattctaatgatagaaataaaaagtggagaaatgactaaagttgacttaagt

SEQ ID NO: 28290 - DNA, 71 bp, Homo sapiens
cacccagctattctaatgatagaaataaaaagtggagaaatgactaaagttgacttaagttaagaattgga

SEQ ID NO: 28291 - DNA, 68 bp, Homo sapiens
aataaaaagtggagaaatgactaaagttgacttaagttaagaattggagtgggaattttgaaatgcca

SEQ ID NO: 28292 - DNA, 72 bp, Homo sapiens
ggagaaatgactaaagttgacttaagttaagaattggagtgggaattttgaaatgccatgtcctatatattc

SEQ ID NO: 28293 - DNA, 74 bp, Homo sapiens
aatgactaaagttgacttaagttaagaattggagtgggaattttgaaatgccatgtcctatatattctggcata

SEQ ID NO: 28294 - DNA, 76 bp, Homo sapiens
ttgacttaagttaagaattggagtgggaattttgaaatgccatgtcctatatattctggcatatttgttggcacat

SEQ ID NO: 28295 - DNA, 78 bp, Homo sapiens
ttaagaattggagtgggaattttgaaatgccatgtcctatatattctggcatatttgttggcacatttgcaagtatgt

SEQ ID NO: 28296 - DNA, 83 bp, Homo sapiens
ttttgaaatgccatgtcctatatattctggcatatttgttggcacatttgcaagtatgttgatcccagcattgtttatatctg

SEQ ID NO: 28297 - DNA, 82 bp, Homo sapiens
tgtcctatatattctggcatatttgttggcacatttgcaagtatgttgatcccagcattgtttatatctgttggaataataa

SEQ ID NO: 28298 - DNA, 76 bp, Homo sapiens
catatttgttggcacatttgcaagtatgttgatcccagcattgtttatatctgttggaataataactaaggaaaaa

SEQ ID NO: 28299 - DNA, 75 bp, Homo sapiens
ggcacatttgcaagtatgttgatcccagcattgtttatatctgttggaataataactaaggaaaaattgaaaatg

SEQ ID NO: 28300 - DNA, 74 bp, Homo sapiens
caagtatgttgatcccagcattgtttatatctgttggaataataactaaggaaaaattgaaaatgtataataga

SEQ ID NO: 28301 - DNA, 74 bp, Homo sapiens
gatcccagcattgtttatatctgttggaataataactaaggaaaaattgaaaatgtataatagatgtataaaga

SEQ ID NO: 28302 - DNA, 71 bp, Homo sapiens
ttgtttatatctgttggaataataactaaggaaaaattgaaaatgtataatagatgtataaagatttatat

SEQ ID NO: 28303 - DNA, 69 bp, Homo sapiens
ctgttggaataataactaaggaaaaattgaaaatgtataatagatgtataaagatttatatttagttag

SEQ ID NO: 28304 - DNA, 71 bp, Homo sapiens
ctaaggaaaaattgaaaatgtataatagatgtataaagatttatatttagttagtatataatagataatac

SEQ ID NO: 28305 - DNA, 72 bp, Homo sapiens
attgaaaatgtataatagatgtataaagatttatatttagttagtatataatagataatacttgcaggtttt

SEQ ID NO: 28306 - DNA, 73 bp, Homo sapiens
tgtataatagatgtataaagatttatatttagttagtatataatagataatacttgcaggttttttatgtgtt

SEQ ID NO: 28307 - DNA, 71 bp, Homo sapiens
tagatgtataaagatttatatttagttagtatataatagataatacttgcaggttttttatgtgttttggg

SEQ ID NO: 28308 - DNA, 70 bp, Homo sapiens
gatttatatttagttagtatataatagataatacttgcaggttttttatgtgttttgggtttctgtgtat

SEQ ID NO: 28309 - DNA, 69 bp, Homo sapiens
tagttagtatataatagataatacttgcaggttttttatgtgttttgggtttctgtgtattattttagg

SEQ ID NO: 28310 - DNA, 69 bp, Homo sapiens
taatagataatacttgcaggttttttatgtgttttgggtttctgtgtattattttaggtaatctttata

SEQ ID NO: 28311 - DNA, 68 bp, Homo sapiens
cttgcaggttttttatgtgttttgggtttctgtgtattattttaggtaatctttataagggcatcttg

SEQ ID NO: 28312 - DNA, 68 bp, Homo sapiens
ttttatgtgttttgggtttctgtgtattattttaggtaatctttataagggcatcttggaagttataa

SEQ ID NO: 28313 - DNA, 70 bp, Homo sapiens
gttttgggtttctgtgtattattttaggtaatctttataagggcatcttggaagttataaatatgtgcca

SEQ ID NO: 28314 - DNA, 71 bp, Homo sapiens
ctgtgtattattttaggtaatctttataagggcatcttggaagttataaatatgtgccatttactgaaaag

SEQ ID NO: 28315 - DNA, 71 bp, Homo sapiens
ttttaggtaatctttataagggcatcttggaagttataaatatgtgccatttactgaaaagtgggaagcat

SEQ ID NO: 28316 - DNA, 73 bp, Homo sapiens
atctttataagggcatcttggaagttataaatatgtgccatttactgaaaagtgggaagcatttttatatgag

SEQ ID NO: 28317 - DNA, 75 bp, Homo sapiens
gggcatcttggaagttataaatatgtgccatttactgaaaagtgggaagcatttttatatgagtaaagctaatga

SEQ ID NO: 28318 - DNA, 70 bp, Homo sapiens
aaatatgtgccatttactgaaaagtgggaagcatttttatatgagtaaagctaatgaaataaaactagtt

SEQ ID NO: 28319 - DNA, 70 bp, Homo sapiens
ccatttactgaaaagtgggaagcatttttatatgagtaaagctaatgaaataaaactagttttattgcca

SEQ ID NO: 28320 - DNA, 71 bp, Homo sapiens
tgagtaaagctaatgaaataaaactagttttattgccaaaattcaaaaagtggggttcatgctatgtcgaa

SEQ ID NO: 28321 - DNA, 71 bp, Homo sapiens
actgggcactcacgtggttaacggtcgcgggaagccgcggagcccgaacctgagactggacctgaggagac

SEQ ID NO: 28322 - DNA, 72 bp, Homo sapiens
ctcacgtggttaacggtcgcgggaagccgcggagcccgaacctgagactggacctgaggagacctcagcctc

SEQ ID NO: 28323 - DNA, 74 bp, Homo sapiens
aagccgcggagcccgaacctgagactggacctgaggagacctcagcctcggtgctcgggccgccccgcctctgc

SEQ ID NO: 28324 - DNA, 72 bp, Homo sapiens
cccgaacctgagactggacctgaggagacctcagcctcggtgctcgggccgccccgcctctgccggaaagtc

SEQ ID NO: 28325 - DNA, 74 bp, Homo sapiens
ctgagactggacctgaggagacctcagcctcggtgctcgggccgccccgcctctgccggaaagtccgcgccgcc

SEQ ID NO: 28326 - DNA, 74 bp, Homo sapiens
acctgaggagacctcagcctcggtgctcgggccgccccgcctctgccggaaagtccgcgccgccgctgccgcca

SEQ ID NO: 28327 - DNA, 73 bp, Homo sapiens
acctcagcctcggtgctcgggccgccccgcctctgccggaaagtccgcgccgccgctgccgccaccgtccgca

SEQ ID NO: 28328 - DNA, 74 bp, Homo sapiens
tcggtgctcgggccgccccgcctctgccggaaagtccgcgccgccgctgccgccaccgtccgcagcccgagcgc

SEQ ID NO: 28329 - DNA, 72 bp, Homo sapiens
ccccgcctctgccggaaagtccgcgccgccgctgccgccaccgtccgcagcccgagcgccccggagccgcag

SEQ ID NO: 28330 - DNA, 73 bp, Homo sapiens
cctctgccggaaagtccgcgccgccgctgccgccaccgtccgcagcccgagcgccccggagccgcaggccgcc

SEQ ID NO: 28331 - DNA, 75 bp, Homo sapiens
aaagtccgcgccgccgctgccgccaccgtccgcagcccgagcgccccggagccgcaggccgccgccgcgcagaga

SEQ ID NO: 28332 - DNA, 78 bp, Homo sapiens
gctgccgccaccgtccgcagcccgagcgccccggagccgcaggccgccgccgcgcagagacgccgcggctgcgactag

SEQ ID NO: 28333 - DNA, 76 bp, Homo sapiens
accgtccgcagcccgagcgccccggagccgcaggccgccgccgcgcagagacgccgcggctgcgactaggcgcgcc

SEQ ID NO: 28334 - DNA, 77 bp, Homo sapiens
cccgagcgccccggagccgcaggccgccgccgcgcagagacgccgcggctgcgactaggcgcgcccagccgcacgtg

SEQ ID NO: 28335 - DNA, 76 bp, Homo sapiens
cccggagccgcaggccgccgccgcgcagagacgccgcggctgcgactaggcgcgcccagccgcacgtggcggaccc

SEQ ID NO: 28336 - DNA, 75 bp, Homo sapiens
aggccgccgccgcgcagagacgccgcggctgcgactaggcgcgcccagccgcacgtggcggacccgcccccaggc

SEQ ID NO: 28337 - DNA, 76 bp, Homo sapiens
cgcgcagagacgccgcggctgcgactaggcgcgcccagccgcacgtggcggacccgcccccaggcccgcagtgtcc

SEQ ID NO: 28338 - DNA, 75 bp, Homo sapiens
agagacgccgcggctgcgactaggcgcgcccagccgcacgtggcggacccgcccccaggcccgcagtgtcctgga

SEQ ID NO: 28339 - DNA, 74 bp, Homo sapiens
tgcgactaggcgcgcccagccgcacgtggcggacccgcccccaggcccgcagtgtcctggaccccgcaggcctc

SEQ ID NO: 28340 - DNA, 73 bp, Homo sapiens
taggcgcgcccagccgcacgtggcggacccgcccccaggcccgcagtgtcctggaccccgcaggcctccgctc

SEQ ID NO: 28341 - DNA, 72 bp, Homo sapiens
agccgcacgtggcggacccgcccccaggcccgcagtgtcctggaccccgcaggcctccgctctcctgtcctc

SEQ ID NO: 28342 - DNA, 69 bp, Homo sapiens
gacccgcccccaggcccgcagtgtcctggaccccgcaggcctccgctctcctgtcctcggccccgtccc

SEQ ID NO: 28343 - DNA, 73 bp, Homo sapiens
caggcccgcagtgtcctggaccccgcaggcctccgctctcctgtcctcggccccgtccccagggccgcgatga

SEQ ID NO: 28344 - DNA, 73 bp, Homo sapiens
agtgtcctggaccccgcaggcctccgctctcctgtcctcggccccgtccccagggccgcgatgagcttcctga

SEQ ID NO: 28345 - DNA, 76 bp, Homo sapiens
tggaccccgcaggcctccgctctcctgtcctcggccccgtccccagggccgcgatgagcttcctgagccgacagca

SEQ ID NO: 28346 - DNA, 76 bp, Homo sapiens
aggcctccgctctcctgtcctcggccccgtccccagggccgcgatgagcttcctgagccgacagcagccgccgcca

SEQ ID NO: 28347 - DNA, 74 bp, Homo sapiens
ctctcctgtcctcggccccgtccccagggccgcgatgagcttcctgagccgacagcagccgccgccaccccgcc

SEQ ID NO: 28348 - DNA, 72 bp, Homo sapiens
ctcggccccgtccccagggccgcgatgagcttcctgagccgacagcagccgccgccaccccgccgcgccggg

SEQ ID NO: 28349 - DNA, 77 bp, Homo sapiens
agggccgcgatgagcttcctgagccgacagcagccgccgccaccccgccgcgccggggcggcctgcaccttgcggca

SEQ ID NO: 28350 - DNA, 79 bp, Homo sapiens
atgagcttcctgagccgacagcagccgccgccaccccgccgcgccggggcggcctgcaccttgcggcagaagctgatct

SEQ ID NO: 28351 - DNA, 79 bp, Homo sapiens
ttcctgagccgacagcagccgccgccaccccgccgcgccggggcggcctgcaccttgcggcagaagctgatcttctcgc

SEQ ID NO: 28352 - DNA, 80 bp, Homo sapiens
cagccgccgccaccccgccgcgccggggcggcctgcaccttgcggcagaagctgatcttctcgccctgcagcgactgtga

SEQ ID NO: 28353 - DNA, 79 bp, Homo sapiens
cgccaccccgccgcgccggggcggcctgcaccttgcggcagaagctgatcttctcgccctgcagcgactgtgaggagga

SEQ ID NO: 28354 - DNA, 80 bp, Homo sapiens
cgccgcgccggggcggcctgcaccttgcggcagaagctgatcttctcgccctgcagcgactgtgaggaggaggaagaaga

SEQ ID NO: 28355 - DNA, 74 bp, Homo sapiens
ggaggaggaggagggcagcggccacagcaccggggaggactcggcctttcaagagcccgactcgccgctgccgc

SEQ ID NO: 28356 - DNA, 73 bp, Homo sapiens
aggaggagggcagcggccacagcaccggggaggactcggcctttcaagagcccgactcgccgctgccgcccgc

SEQ ID NO: 28357 - DNA, 73 bp, Homo sapiens
gccacagcaccggggaggactcggcctttcaagagcccgactcgccgctgccgcccgcgcggagccccacgga

SEQ ID NO: 28358 - DNA, 71 bp, Homo sapiens
agcaccggggaggactcggcctttcaagagcccgactcgccgctgccgcccgcgcggagccccacggagcc

SEQ ID NO: 28359 - DNA, 70 bp, Homo sapiens
aggactcggcctttcaagagcccgactcgccgctgccgcccgcgcggagccccacggagcccgggcccga

SEQ ID NO: 28360 - DNA, 72 bp, Homo sapiens
ctttcaagagcccgactcgccgctgccgcccgcgcggagccccacggagcccgggcccgagcgccgccgctc

SEQ ID NO: 28361 - DNA, 70 bp, Homo sapiens
cccgactcgccgctgccgcccgcgcggagccccacggagcccgggcccgagcgccgccgctcgcccgggc

SEQ ID NO: 28362 - DNA, 69 bp, Homo sapiens
tgccgcccgcgcggagccccacggagcccgggcccgagcgccgccgctcgcccgggccggcccccggca

SEQ ID NO: 28363 - DNA, 67 bp, Homo sapiens
ggagccccacggagcccgggcccgagcgccgccgctcgcccgggccggcccccggcagccccggcga

SEQ ID NO: 28364 - DNA, 68 bp, Homo sapiens
acggagcccgggcccgagcgccgccgctcgcccgggccggcccccggcagccccggcgagctggagga

SEQ ID NO: 28365 - DNA, 72 bp, Homo sapiens
cgccgctcgcccgggccggcccccggcagccccggcgagctggaggaggacctgttgctgcccggcgcctgc

SEQ ID NO: 28366 - DNA, 70 bp, Homo sapiens
tcgcccgggccggcccccggcagccccggcgagctggaggaggacctgttgctgcccggcgcctgcccgg

SEQ ID NO: 28367 - DNA, 71 bp, Homo sapiens
agccccggcgagctggaggaggacctgttgctgcccggcgcctgcccgggcgcggacgaggcgggcggtgg

SEQ ID NO: 28368 - DNA, 71 bp, Homo sapiens
tggaggaggacctgttgctgcccggcgcctgcccgggcgcggacgaggcgggcggtggggcggagggcgac

SEQ ID NO: 28369 - DNA, 70 bp, Homo sapiens
acctgttgctgcccggcgcctgcccgggcgcggacgaggcgggcggtggggcggagggcgactcgtggga

SEQ ID NO: 28370 - DNA, 69 bp, Homo sapiens
ctgcccggcgcctgcccgggcgcggacgaggcgggcggtggggcggagggcgactcgtgggaggaggag

SEQ ID NO: 28371 - DNA, 69 bp, Homo sapiens
ctgcccgggcgcggacgaggcgggcggtggggcggagggcgactcgtgggaggaggagggcttcggctc

SEQ ID NO: 28372 - DNA, 69 bp, Homo sapiens
gggcgcggacgaggcgggcggtggggcggagggcgactcgtgggaggaggagggcttcggctcctcgtc

SEQ ID NO: 28373 - DNA, 70 bp, Homo sapiens
gacgaggcgggcggtggggcggagggcgactcgtgggaggaggagggcttcggctcctcgtcgccggtca

SEQ ID NO: 28374 - DNA, 68 bp, Homo sapiens
aggcgggcggtggggcggagggcgactcgtgggaggaggagggcttcggctcctcgtcgccggtcaag

SEQ ID NO: 28375 - DNA, 69 bp, Homo sapiens
ggcggtggggcggagggcgactcgtgggaggaggagggcttcggctcctcgtcgccggtcaagtcgccg

SEQ ID NO: 28376 - DNA, 69 bp, Homo sapiens
ggtggggcggagggcgactcgtgggaggaggagggcttcggctcctcgtcgccggtcaagtcgccggcg

SEQ ID NO: 28377 - DNA, 69 bp, Homo sapiens
ggcgactcgtgggaggaggagggcttcggctcctcgtcgccggtcaagtcgccggcggccccctacttc

SEQ ID NO: 28378 - DNA, 68 bp, Homo sapiens
actcgtgggaggaggagggcttcggctcctcgtcgccggtcaagtcgccggcggccccctacttcctg

SEQ ID NO: 28379 - DNA, 69 bp, Homo sapiens
ggaggaggagggcttcggctcctcgtcgccggtcaagtcgccggcggccccctacttcctgggtagctc

SEQ ID NO: 28380 - DNA, 69 bp, Homo sapiens
gaggagggcttcggctcctcgtcgccggtcaagtcgccggcggccccctacttcctgggtagctctttc

SEQ ID NO: 28381 - DNA, 68 bp, Homo sapiens
aggagggcttcggctcctcgtcgccggtcaagtcgccggcggccccctacttcctgggtagctctttc

SEQ ID NO: 28382 - DNA, 71 bp, Homo sapiens
ctcctcgtcgccggtcaagtcgccggcggccccctacttcctgggtagctctttctcgccggtgcgctgcg

SEQ ID NO: 28383 - DNA, 72 bp, Homo sapiens
ggtcaagtcgccggcggccccctacttcctgggtagctctttctcgccggtgcgctgcggcggcccaggaga

SEQ ID NO: 28384 - DNA, 73 bp, Homo sapiens
cctacttcctgggtagctctttctcgccggtgcgctgcggcggcccaggagatgcgtcgccgcggggttgcgg

SEQ ID NO: 28385 - DNA, 75 bp, Homo sapiens
ttcctgggtagctctttctcgccggtgcgctgcggcggcccaggagatgcgtcgccgcggggttgcggggcgcgc

SEQ ID NO: 28386 - DNA, 73 bp, Homo sapiens
tttctcgccggtgcgctgcggcggcccaggagatgcgtcgccgcggggttgcggggcgcgccgggcgggcgaa

SEQ ID NO: 28387 - DNA, 71 bp, Homo sapiens
cggcccaggagatgcgtcgccgcggggttgcggggcgcgccgggcgggcgaaggccgccgctcgccgcggc

SEQ ID NO: 28388 - DNA, 70 bp, Homo sapiens
aggagatgcgtcgccgcggggttgcggggcgcgccgggcgggcgaaggccgccgctcgccgcggccggac

SEQ ID NO: 28389 - DNA, 67 bp, Homo sapiens
ccgggcgggcgaaggccgccgctcgccgcggccggaccacccgggcaccccgccacacaagaccttc

SEQ ID NO: 28390 - DNA, 71 bp, Homo sapiens
aaggccgccgctcgccgcggccggaccacccgggcaccccgccacacaagaccttccgcaagctgcgactc

SEQ ID NO: 28391 - DNA, 71 bp, Homo sapiens
ctcgccgcggccggaccacccgggcaccccgccacacaagaccttccgcaagctgcgactcttcgacaccc

SEQ ID NO: 28392 - DNA, 72 bp, Homo sapiens
acccgggcaccccgccacacaagaccttccgcaagctgcgactcttcgacaccccgcacacgcccaaggtga

SEQ ID NO: 28393 - DNA, 75 bp, Homo sapiens
cccgccacacaagaccttccgcaagctgcgactcttcgacaccccgcacacgcccaaggtgagagcggcgggcgc

SEQ ID NO: 28394 - DNA, 71 bp, Homo sapiens
aagttggcagcccttgtgtttggccctgccccgaggttgtccgttgagattatgtaactgaacaatgggcc

SEQ ID NO: 28395 - DNA, 73 bp, Homo sapiens
ttgtgtttggccctgccccgaggttgtccgttgagattatgtaactgaacaatgggcctcgtctggaacttca

SEQ ID NO: 28396 - DNA, 72 bp, Homo sapiens
ccctgccccgaggttgtccgttgagattatgtaactgaacaatgggcctcgtctggaacttcatcttacaaa

SEQ ID NO: 28397 - DNA, 72 bp, Homo sapiens
aggttgtccgttgagattatgtaactgaacaatgggcctcgtctggaacttcatcttacaaaggggccgatc

SEQ ID NO: 28398 - DNA, 72 bp, Homo sapiens
ttgagattatgtaactgaacaatgggcctcgtctggaacttcatcttacaaaggggccgatcggcccgtccg

SEQ ID NO: 28399 - DNA, 70 bp, Homo sapiens
taactgaacaatgggcctcgtctggaacttcatcttacaaaggggccgatcggcccgtccgggtggccaa

SEQ ID NO: 28400 - DNA, 68 bp, Homo sapiens
aacaatgggcctcgtctggaacttcatcttacaaaggggccgatcggcccgtccgggtggccaaggat

SEQ ID NO: 28401 - DNA, 69 bp, Homo sapiens
tctggaacttcatcttacaaaggggccgatcggcccgtccgggtggccaaggatttgccgcccgttgag

SEQ ID NO: 28402 - DNA, 66 bp, Homo sapiens
atcttacaaaggggccgatcggcccgtccgggtggccaaggatttgccgcccgttgagtccgggcc

SEQ ID NO: 28403 - DNA, 65 bp, Homo sapiens
acaaaggggccgatcggcccgtccgggtggccaaggatttgccgcccgttgagtccgggccgccc

SEQ ID NO: 28404 - DNA, 68 bp, Homo sapiens
atcggcccgtccgggtggccaaggatttgccgcccgttgagtccgggccgccccgagcgtgtcagccc

SEQ ID NO: 28405 - DNA, 72 bp, Homo sapiens
ggtggccaaggatttgccgcccgttgagtccgggccgccccgagcgtgtcagccccgagtgcggcaccgata

SEQ ID NO: 28406 - DNA, 70 bp, Homo sapiens
aaggatttgccgcccgttgagtccgggccgccccgagcgtgtcagccccgagtgcggcaccgataacgcg

SEQ ID NO: 28407 - DNA, 73 bp, Homo sapiens
ccgttgagtccgggccgccccgagcgtgtcagccccgagtgcggcaccgataacgcggttcgcgaggatgctg

SEQ ID NO: 28408 - DNA, 74 bp, Homo sapiens
cccgagcgtgtcagccccgagtgcggcaccgataacgcggttcgcgaggatgctggagggtgccggcccggcca

SEQ ID NO: 28409 - DNA, 76 bp, Homo sapiens
tgtcagccccgagtgcggcaccgataacgcggttcgcgaggatgctggagggtgccggcccggccacctgacactc

SEQ ID NO: 28410 - DNA, 75 bp, Homo sapiens
agtgcggcaccgataacgcggttcgcgaggatgctggagggtgccggcccggccacctgacactcccgagccata

SEQ ID NO: 28411 - DNA, 73 bp, Homo sapiens
ataacgcggttcgcgaggatgctggagggtgccggcccggccacctgacactcccgagccataggatgccttt

SEQ ID NO: 28412 - DNA, 72 bp, Homo sapiens
cggttcgcgaggatgctggagggtgccggcccggccacctgacactcccgagccataggatgccttttaaac

SEQ ID NO: 28413 - DNA, 73 bp, Homo sapiens
atgctggagggtgccggcccggccacctgacactcccgagccataggatgccttttaaacgcggcgatcgggc

SEQ ID NO: 28414 - DNA, 70 bp, Homo sapiens
ccggcccggccacctgacactcccgagccataggatgccttttaaacgcggcgatcgggcctgtaatttg

SEQ ID NO: 28415 - DNA, 73 bp, Homo sapiens
cacctgacactcccgagccataggatgccttttaaacgcggcgatcgggcctgtaatttgggcggcgcgggca

SEQ ID NO: 28416 - DNA, 71 bp, Homo sapiens
acactcccgagccataggatgccttttaaacgcggcgatcgggcctgtaatttgggcggcgcgggcagaag

SEQ ID NO: 28417 - DNA, 69 bp, Homo sapiens
ataggatgccttttaaacgcggcgatcgggcctgtaatttgggcggcgcgggcagaaggagtttaaaga

SEQ ID NO: 28418 - DNA, 67 bp, Homo sapiens
acgcggcgatcgggcctgtaatttgggcggcgcgggcagaaggagtttaaagaaaaataattgtccc

SEQ ID NO: 28419 - DNA, 69 bp, Homo sapiens
ctgtaatttgggcggcgcgggcagaaggagtttaaagaaaaataattgtcccgccctgatcgtgtcgtg

SEQ ID NO: 28420 - DNA, 69 bp, Homo sapiens
atttgggcggcgcgggcagaaggagtttaaagaaaaataattgtcccgccctgatcgtgtcgtgtcgtg

SEQ ID NO: 28421 - DNA, 70 bp, Homo sapiens
cgggcagaaggagtttaaagaaaaataattgtcccgccctgatcgtgtcgtgtcgtgtggcgtggatggg

SEQ ID NO: 28422 - DNA, 69 bp, Homo sapiens
tttaaagaaaaataattgtcccgccctgatcgtgtcgtgtcgtgtggcgtggatgggggaaaggtctgg

SEQ ID NO: 28423 - DNA, 75 bp, Homo sapiens
ttgtcccgccctgatcgtgtcgtgtcgtgtggcgtggatgggggaaaggtctggggcatgcagggagactacgct

SEQ ID NO: 28424 - DNA, 76 bp, Homo sapiens
ctgatcgtgtcgtgtcgtgtggcgtggatgggggaaaggtctggggcatgcagggagactacgcttggacttggga

SEQ ID NO: 28425 - DNA, 72 bp, Homo sapiens
cgtgtcgtgtggcgtggatgggggaaaggtctggggcatgcagggagactacgcttggacttgggagtaaag

SEQ ID NO: 28426 - DNA, 73 bp, Homo sapiens
aaaggtctggggcatgcagggagactacgcttggacttgggagtaaaggctggccttccaagcatttacagtc

SEQ ID NO: 28427 - DNA, 78 bp, Homo sapiens
gcatgcagggagactacgcttggacttgggagtaaaggctggccttccaagcatttacagtcctacagactcatccta

SEQ ID NO: 28428 - DNA, 74 bp, Homo sapiens
agactacgcttggacttgggagtaaaggctggccttccaagcatttacagtcctacagactcatcctaagtcca

SEQ ID NO: 28429 - DNA, 76 bp, Homo sapiens
ttggacttgggagtaaaggctggccttccaagcatttacagtcctacagactcatcctaagtccaggcagtactga

SEQ ID NO: 28430 - DNA, 75 bp, Homo sapiens
agtaaaggctggccttccaagcatttacagtcctacagactcatcctaagtccaggcagtactgaggcctgtttc

SEQ ID NO: 28431 - DNA, 77 bp, Homo sapiens
tggccttccaagcatttacagtcctacagactcatcctaagtccaggcagtactgaggcctgtttctggacaaggtc

SEQ ID NO: 28432 - DNA, 76 bp, Homo sapiens
aagcatttacagtcctacagactcatcctaagtccaggcagtactgaggcctgtttctggacaaggtcttggccca

SEQ ID NO: 28433 - DNA, 75 bp, Homo sapiens
tcctacagactcatcctaagtccaggcagtactgaggcctgtttctggacaaggtcttggcccagcatttgtttt

SEQ ID NO: 28434 - DNA, 74 bp, Homo sapiens
agactcatcctaagtccaggcagtactgaggcctgtttctggacaaggtcttggcccagcatttgtttttatcg

SEQ ID NO: 28435 - DNA, 71 bp, Homo sapiens
ctaagtccaggcagtactgaggcctgtttctggacaaggtcttggcccagcatttgtttttatcgtgggtt

SEQ ID NO: 28436 - DNA, 72 bp, Homo sapiens
tactgaggcctgtttctggacaaggtcttggcccagcatttgtttttatcgtgggtttgcggtgcccagagt

SEQ ID NO: 28437 - DNA, 70 bp, Homo sapiens
ctgtttctggacaaggtcttggcccagcatttgtttttatcgtgggtttgcggtgcccagagtttggccg

SEQ ID NO: 28438 - DNA, 70 bp, Homo sapiens
aaggtcttggcccagcatttgtttttatcgtgggtttgcggtgcccagagtttggccggcctccgtgtga

SEQ ID NO: 28439 - DNA, 69 bp, Homo sapiens
atttgtttttatcgtgggtttgcggtgcccagagtttggccggcctccgtgtgattaggaacatcctac

SEQ ID NO: 28440 - DNA, 71 bp, Homo sapiens
tgggtttgcggtgcccagagtttggccggcctccgtgtgattaggaacatcctaccgtagataaggtatct

SEQ ID NO: 28441 - DNA, 70 bp, Homo sapiens
cggtgcccagagtttggccggcctccgtgtgattaggaacatcctaccgtagataaggtatcttaaagaa

SEQ ID NO: 28442 - DNA, 68 bp, Homo sapiens
agtttggccggcctccgtgtgattaggaacatcctaccgtagataaggtatcttaaagaaggaggtgt

SEQ ID NO: 28443 - DNA, 71 bp, Homo sapiens
ctccgtgtgattaggaacatcctaccgtagataaggtatcttaaagaaggaggtgttcagcacctgtgttt

SEQ ID NO: 28444 - DNA, 72 bp, Homo sapiens
tgtgattaggaacatcctaccgtagataaggtatcttaaagaaggaggtgttcagcacctgtgttttgaaag

SEQ ID NO: 28445 - DNA, 76 bp, Homo sapiens
tagataaggtatcttaaagaaggaggtgttcagcacctgtgttttgaaaggccttcgagtactgcgcagatgacca

SEQ ID NO: 28446 - DNA, 72 bp, Homo sapiens
ttaaagaaggaggtgttcagcacctgtgttttgaaaggccttcgagtactgcgcagatgaccacttttaaaa

SEQ ID NO: 28447 - DNA, 74 bp, Homo sapiens
aggtgttcagcacctgtgttttgaaaggccttcgagtactgcgcagatgaccacttttaaaactgcagatttta

SEQ ID NO: 28448 - DNA, 76 bp, Homo sapiens
ttgaaaggccttcgagtactgcgcagatgaccacttttaaaactgcagattttaaagctgatacttccagagatta

SEQ ID NO: 28449 - DNA, 76 bp, Homo sapiens
aggccttcgagtactgcgcagatgaccacttttaaaactgcagattttaaagctgatacttccagagattaagaca

SEQ ID NO: 28450 - DNA, 78 bp, Homo sapiens
tgcgcagatgaccacttttaaaactgcagattttaaagctgatacttccagagattaagacaagcctcgcatttgtaa

SEQ ID NO: 28451 - DNA, 72 bp, Homo sapiens
tttaaaactgcagattttaaagctgatacttccagagattaagacaagcctcgcatttgtaaggttaacagg

SEQ ID NO: 28452 - DNA, 71 bp, Homo sapiens
atacttccagagattaagacaagcctcgcatttgtaaggttaacagggaagatgcaccttttaaagtgagt

SEQ ID NO: 28453 - DNA, 69 bp, Homo sapiens
agagattaagacaagcctcgcatttgtaaggttaacagggaagatgcaccttttaaagtgagtttgttt

SEQ ID NO: 28454 - DNA, 67 bp, Homo sapiens
aagacaagcctcgcatttgtaaggttaacagggaagatgcaccttttaaagtgagtttgttttgttt

SEQ ID NO: 28455 - DNA, 69 bp, Homo sapiens
tcgcatttgtaaggttaacagggaagatgcaccttttaaagtgagtttgttttgttttcaatgtactgt

SEQ ID NO: 28456 - DNA, 72 bp, Homo sapiens
aggagtccagcggaggtggctatggaagccctatctagatgggggaggggagattttatggggctctcggac

SEQ ID NO: 28457 - DNA, 72 bp, Homo sapiens
cggaggtggctatggaagccctatctagatgggggaggggagattttatggggctctcggactgctttctat

SEQ ID NO: 28458 - DNA, 72 bp, Homo sapiens
ctatggaagccctatctagatgggggaggggagattttatggggctctcggactgctttctatttttggatg

SEQ ID NO: 28459 - DNA, 71 bp, Homo sapiens
ctatctagatgggggaggggagattttatggggctctcggactgctttctatttttggatgggttgaaaga

SEQ ID NO: 28460 - DNA, 67 bp, Homo sapiens
gggggaggggagattttatggggctctcggactgctttctatttttggatgggttgaaagaatttgt

SEQ ID NO: 28461 - DNA, 68 bp, Homo sapiens
ggagattttatggggctctcggactgctttctatttttggatgggttgaaagaatttgttaactttta

SEQ ID NO: 28462 - DNA, 70 bp, Homo sapiens
gggctctcggactgctttctatttttggatgggttgaaagaatttgttaacttttagccactagaatgaa

SEQ ID NO: 28463 - DNA, 69 bp, Homo sapiens
ctcggactgctttctatttttggatgggttgaaagaatttgttaacttttagccactagaatgaactta

SEQ ID NO: 28464 - DNA, 69 bp, Homo sapiens
ctatttttggatgggttgaaagaatttgttaacttttagccactagaatgaacttagttttaggcagca

SEQ ID NO: 28465 - DNA, 70 bp, Homo sapiens
ggatgggttgaaagaatttgttaacttttagccactagaatgaacttagttttaggcagcatttatattc

SEQ ID NO: 28466 - DNA, 67 bp, Homo sapiens
gaatttgttaacttttagccactagaatgaacttagttttaggcagcatttatattctttttagggt

SEQ ID NO: 28467 - DNA, 69 bp, Homo sapiens
gttaacttttagccactagaatgaacttagttttaggcagcatttatattctttttagggttagaggca

SEQ ID NO: 28468 - DNA, 70 bp, Homo sapiens
ccactagaatgaacttagttttaggcagcatttatattctttttagggttagaggcagattttacttggc

SEQ ID NO: 28469 - DNA, 67 bp, Homo sapiens
gaacttagttttaggcagcatttatattctttttagggttagaggcagattttacttggctattttt

SEQ ID NO: 28470 - DNA, 69 bp, Homo sapiens
ggcagcatttatattctttttagggttagaggcagattttacttggctatttttttcaagaaaagatag

SEQ ID NO: 28471 - DNA, 67 bp, Homo sapiens
atattctttttagggttagaggcagattttacttggctatttttttcaagaaaagatagttaatatc

SEQ ID NO: 28472 - DNA, 71 bp, Homo sapiens
tagggttagaggcagattttacttggctatttttttcaagaaaagatagttaatatccagcttcagtcttc

SEQ ID NO: 28473 - DNA, 71 bp, Homo sapiens
ggcagattttacttggctatttttttcaagaaaagatagttaatatccagcttcagtcttcctaaattagc

SEQ ID NO: 28474 - DNA, 71 bp, Homo sapiens
tacttggctatttttttcaagaaaagatagttaatatccagcttcagtcttcctaaattagccacaattta

SEQ ID NO: 28475 - DNA, 71 bp, Homo sapiens
ttttttcaagaaaagatagttaatatccagcttcagtcttcctaaattagccacaatttattttgcttgaa

SEQ ID NO: 28476 - DNA, 73 bp, Homo sapiens
caagaaaagatagttaatatccagcttcagtcttcctaaattagccacaatttattttgcttgaactctaaca

SEQ ID NO: 28477 - DNA, 72 bp, Homo sapiens
agttaatatccagcttcagtcttcctaaattagccacaatttattttgcttgaactctaacaaaggcttgtg

SEQ ID NO: 28478 - DNA, 73 bp, Homo sapiens
agcttcagtcttcctaaattagccacaatttattttgcttgaactctaacaaaggcttgtgtgttgctttcac

SEQ ID NO: 28479 - DNA, 74 bp, Homo sapiens
ttcctaaattagccacaatttattttgcttgaactctaacaaaggcttgtgtgttgctttcacctacgcattca

SEQ ID NO: 28480 - DNA, 74 bp, Homo sapiens
ccacaatttattttgcttgaactctaacaaaggcttgtgtgttgctttcacctacgcattcagccctatgaaag

SEQ ID NO: 28481 - DNA, 75 bp, Homo sapiens
attttgcttgaactctaacaaaggcttgtgtgttgctttcacctacgcattcagccctatgaaaggctcgttgaa

SEQ ID NO: 28482 - DNA, 74 bp, Homo sapiens
ttgaactctaacaaaggcttgtgtgttgctttcacctacgcattcagccctatgaaaggctcgttgaaggttag

SEQ ID NO: 28483 - DNA, 75 bp, Homo sapiens
tttcacctacgcattcagccctatgaaaggctcgttgaaggttaggttgagaaggctgactataggacttggatc

SEQ ID NO: 28484 - DNA, 69 bp, Homo sapiens
ctcgttgaaggttaggttgagaaggctgactataggacttggatcctaaaaattgtatttgtatttttc

SEQ ID NO: 28485 - DNA, 70 bp, Homo sapiens
gttgagaaggctgactataggacttggatcctaaaaattgtatttgtatttttctttccctagagtttgc

SEQ ID NO: 28486 - DNA, 69 bp, Homo sapiens
tataggacttggatcctaaaaattgtatttgtatttttctttccctagagtttgctctccaaagctcgg

SEQ ID NO: 28487 - DNA, 69 bp, Homo sapiens
tcctaaaaattgtatttgtatttttctttccctagagtttgctctccaaagctcggggaattgattcca

SEQ ID NO: 28488 - DNA, 71 bp, Homo sapiens
tatttgtatttttctttccctagagtttgctctccaaagctcggggaattgattccagctctgttaaactc

SEQ ID NO: 28489 - DNA, 68 bp, Homo sapiens
atttttctttccctagagtttgctctccaaagctcggggaattgattccagctctgttaaactccggg

SEQ ID NO: 28490 - DNA, 74 bp, Homo sapiens
tagagtttgctctccaaagctcggggaattgattccagctctgttaaactccggggtagttctctcttcatgga

SEQ ID NO: 28491 - DNA, 73 bp, Homo sapiens
tctccaaagctcggggaattgattccagctctgttaaactccggggtagttctctcttcatggatacagaaaa

SEQ ID NO: 28492 - DNA, 72 bp, Homo sapiens
aaagctcggggaattgattccagctctgttaaactccggggtagttctctcttcatggatacagaaaaatca

SEQ ID NO: 28493 - DNA, 70 bp, Homo sapiens
agctctgttaaactccggggtagttctctcttcatggatacagaaaaatcaggaaaaagggaatttgatg

SEQ ID NO: 28494 - DNA, 71 bp, Homo sapiens
aaactccggggtagttctctcttcatggatacagaaaaatcaggaaaaagggaatttgatgtgcgacagac

SEQ ID NO: 28495 - DNA, 77 bp, Homo sapiens
tagttctctcttcatggatacagaaaaatcaggaaaaagggaatttgatgtgcgacagactcctcaagtgaatatta

SEQ ID NO: 28496 - DNA, 75 bp, Homo sapiens
tcatggatacagaaaaatcaggaaaaagggaatttgatgtgcgacagactcctcaagtgaatattaatcctttta

SEQ ID NO: 28497 - DNA, 71 bp, Homo sapiens
aaaagggaatttgatgtgcgacagactcctcaagtgaatattaatccttttactccggattctttgttgct

SEQ ID NO: 28498 - DNA, 75 bp, Homo sapiens
aatttgatgtgcgacagactcctcaagtgaatattaatccttttactccggattctttgttgcttcattcctcag

SEQ ID NO: 28499 - DNA, 74 bp, Homo sapiens
acagactcctcaagtgaatattaatccttttactccggattctttgttgcttcattcctcaggacagtgtcgtc

SEQ ID NO: 28500 - DNA, 74 bp, Homo sapiens
tcaagtgaatattaatccttttactccggattctttgttgcttcattcctcaggacagtgtcgtcgtagaaaga

SEQ ID NO: 28501 - DNA, 71 bp, Homo sapiens
aatattaatccttttactccggattctttgttgcttcattcctcaggacagtgtcgtcgtagaaagagaac

SEQ ID NO: 28502 - DNA, 73 bp, Homo sapiens
tctttgttgcttcattcctcaggacagtgtcgtcgtagaaagagaacgtattggaatgagtaagtcgtttatt

SEQ ID NO: 28503 - DNA, 69 bp, Homo sapiens
aggacagtgtcgtcgtagaaagagaacgtattggaatgagtaagtcgtttatttaacagtttggttctc

SEQ ID NO: 28504 - DNA, 74 bp, Homo sapiens
gttcctatttaatggcatggatgtatctgtcagatatattgatagaaaaataacattttttttagttcctgtgg

SEQ ID NO: 28505 - DNA, 78 bp, Homo sapiens
atggcatggatgtatctgtcagatatattgatagaaaaataacattttttttagttcctgtggtgaagacatggaagc

SEQ ID NO: 28506 - DNA, 78 bp, Homo sapiens
tggatgtatctgtcagatatattgatagaaaaataacattttttttagttcctgtggtgaagacatggaagccagtga

SEQ ID NO: 28507 - DNA, 77 bp, Homo sapiens
ctgtcagatatattgatagaaaaataacattttttttagttcctgtggtgaagacatggaagccagtgattatgagc

SEQ ID NO: 28508 - DNA, 75 bp, Homo sapiens
gatagaaaaataacattttttttagttcctgtggtgaagacatggaagccagtgattatgagcttgaagatgaaa

SEQ ID NO: 28509 - DNA, 77 bp, Homo sapiens
taacattttttttagttcctgtggtgaagacatggaagccagtgattatgagcttgaagatgaaacaagacctgcta

SEQ ID NO: 28510 - DNA, 77 bp, Homo sapiens
ttttagttcctgtggtgaagacatggaagccagtgattatgagcttgaagatgaaacaagacctgctaaggtaaata

SEQ ID NO: 28511 - DNA, 76 bp, Homo sapiens
tggtgaagacatggaagccagtgattatgagcttgaagatgaaacaagacctgctaaggtaaatagctttttattt

SEQ ID NO: 28512 - DNA, 74 bp, Homo sapiens
aagacatggaagccagtgattatgagcttgaagatgaaacaagacctgctaaggtaaatagctttttattttta

SEQ ID NO: 28513 - DNA, 72 bp, Homo sapiens
actgttttcgtatatttgtattacatatatggaaacactttttattacagagaattacaattactgaaagca

SEQ ID NO: 28514 - DNA, 72 bp, Homo sapiens
tttgtattacatatatggaaacactttttattacagagaattacaattactgaaagcaatatgaagtcccgg

SEQ ID NO: 28515 - DNA, 74 bp, Homo sapiens
catatatggaaacactttttattacagagaattacaattactgaaagcaatatgaagtcccggtatacaacaga

SEQ ID NO: 28516 - DNA, 74 bp, Homo sapiens
acactttttattacagagaattacaattactgaaagcaatatgaagtcccggtatacaacagaatttcatgagc

SEQ ID NO: 28517 - DNA, 76 bp, Homo sapiens
ttacagagaattacaattactgaaagcaatatgaagtcccggtatacaacagaatttcatgagctagagaaaatcg

SEQ ID NO: 28518 - DNA, 76 bp, Homo sapiens
aattacaattactgaaagcaatatgaagtcccggtatacaacagaatttcatgagctagagaaaatcggctctgga

SEQ ID NO: 28519 - DNA, 76 bp, Homo sapiens
attactgaaagcaatatgaagtcccggtatacaacagaatttcatgagctagagaaaatcggctctggagaatttg

SEQ ID NO: 28520 - DNA, 74 bp, Homo sapiens
aatatgaagtcccggtatacaacagaatttcatgagctagagaaaatcggctctggagaatttggttctgtatt

SEQ ID NO: 28521 - DNA, 76 bp, Homo sapiens
cggtatacaacagaatttcatgagctagagaaaatcggctctggagaatttggttctgtatttaagtgtgtgaaga

SEQ ID NO: 28522 - DNA, 77 bp, Homo sapiens
aacagaatttcatgagctagagaaaatcggctctggagaatttggttctgtatttaagtgtgtgaagaggctggatg

SEQ ID NO: 28523 - DNA, 82 bp, Homo sapiens
ttcatgagctagagaaaatcggctctggagaatttggttctgtatttaagtgtgtgaagaggctggatggatgcatttatgc

SEQ ID NO: 28524 - DNA, 78 bp, Homo sapiens
agagaaaatcggctctggagaatttggttctgtatttaagtgtgtgaagaggctggatggatgcatttatgccattaa

SEQ ID NO: 28525 - DNA, 79 bp, Homo sapiens
ggctctggagaatttggttctgtatttaagtgtgtgaagaggctggatggatgcatttatgccattaagcgatcaaaaa

SEQ ID NO: 28526 - DNA, 77 bp, Homo sapiens
aatttggttctgtatttaagtgtgtgaagaggctggatggatgcatttatgccattaagcgatcaaaaaagccattg

SEQ ID NO: 28527 - DNA, 82 bp, Homo sapiens
tatttaagtgtgtgaagaggctggatggatgcatttatgccattaagcgatcaaaaaagccattggcgggctctgttgatga

SEQ ID NO: 28528 - DNA, 82 bp, Homo sapiens
tgaagaggctggatggatgcatttatgccattaagcgatcaaaaaagccattggcgggctctgttgatgagtatgtattaaa

SEQ ID NO: 28529 - DNA, 79 bp, Homo sapiens
ctggatggatgcatttatgccattaagcgatcaaaaaagccattggcgggctctgttgatgagtatgtattaaacattt

SEQ ID NO: 28530 - DNA, 74 bp, Homo sapiens
atttatgccattaagcgatcaaaaaagccattggcgggctctgttgatgagtatgtattaaacattttgtcttt

SEQ ID NO: 28531 - DNA, 73 bp, Homo sapiens
attaagcgatcaaaaaagccattggcgggctctgttgatgagtatgtattaaacattttgtcttttgctcttt

SEQ ID NO: 28532 - DNA, 80 bp, Homo sapiens
tgagtgaaaattatttaccattctattaatctcaaatttcttctaggcagaacgctttgagagaagtatatgctcatgca

SEQ ID NO: 28533 - DNA, 79 bp, Homo sapiens
aattatttaccattctattaatctcaaatttcttctaggcagaacgctttgagagaagtatatgctcatgcagtgcttg

SEQ ID NO: 28534 - DNA, 85 bp, Homo sapiens
attctattaatctcaaatttcttctaggcagaacgctttgagagaagtatatgctcatgcagtgcttggacagcattctcatgta

SEQ ID NO: 28535 - DNA, 84 bp, Homo sapiens
ctcaaatttcttctaggcagaacgctttgagagaagtatatgctcatgcagtgcttggacagcattctcatgtagttcgatatt

SEQ ID NO: 28536 - DNA, 86 bp, Homo sapiens
atttcttctaggcagaacgctttgagagaagtatatgctcatgcagtgcttggacagcattctcatgtagttcgatatttctctgc

SEQ ID NO: 28537 - DNA, 88 bp, Homo sapiens
agaacgctttgagagaagtatatgctcatgcagtgcttggacagcattctcatgtagttcgatatttctctgcgtgggcagaagatga

SEQ ID NO: 28538 - DNA, 93 bp, Homo sapiens
ttgagagaagtatatgctcatgcagtgcttggacagcattctcatgtagttcgatatttctctgcgtgggcagaagatgatcatatgcttata

SEQ ID NO: 28539 - DNA, 94 bp, Homo sapiens
tatatgctcatgcagtgcttggacagcattctcatgtagttcgatatttctctgcgtgggcagaagatgatcatatgcttatacagaatgaata

SEQ ID NO: 28540 - DNA, 88 bp, Homo sapiens
acagcattctcatgtagttcgatatttctctgcgtgggcagaagatgatcatatgcttatacagaatgaatattgtaatggtgagtga

SEQ ID NO: 28541 - DNA, 85 bp, Homo sapiens
atgtagttcgatatttctctgcgtgggcagaagatgatcatatgcttatacagaatgaatattgtaatggtgagtgatgtaatgg

SEQ ID NO: 28542 - DNA, 83 bp, Homo sapiens
atatttctctgcgtgggcagaagatgatcatatgcttatacagaatgaatattgtaatggtgagtgatgtaatggttttcttg

SEQ ID NO: 28543 - DNA, 84 bp, Homo sapiens
cgtgggcagaagatgatcatatgcttatacagaatgaatattgtaatggtgagtgatgtaatggttttcttgtgagcttgagaa

SEQ ID NO: 28544 - DNA, 84 bp, Homo sapiens
cagaagatgatcatatgcttatacagaatgaatattgtaatggtgagtgatgtaatggttttcttgtgagcttgagaaaatgaa

SEQ ID NO: 28545 - DNA, 82 bp, Homo sapiens
atcatatgcttatacagaatgaatattgtaatggtgagtgatgtaatggttttcttgtgagcttgagaaaatgaacatcgag

SEQ ID NO: 28546 - DNA, 76 bp, Homo sapiens
gaatattgtaatggtgagtgatgtaatggttttcttgtgagcttgagaaaatgaacatcgaggaaatatttatggt

SEQ ID NO: 28547 - DNA, 75 bp, Homo sapiens
ggtgagtgatgtaatggttttcttgtgagcttgagaaaatgaacatcgaggaaatatttatggttatctaaaatc

SEQ ID NO: 28548 - DNA, 74 bp, Homo sapiens
atggttttcttgtgagcttgagaaaatgaacatcgaggaaatatttatggttatctaaaatcttgctctatttc

SEQ ID NO: 28549 - DNA, 76 bp, Homo sapiens
tttcttgtgagcttgagaaaatgaacatcgaggaaatatttatggttatctaaaatcttgctctatttctgtcact

SEQ ID NO: 28550 - DNA, 74 bp, Homo sapiens
gcttgagaaaatgaacatcgaggaaatatttatggttatctaaaatcttgctctatttctgtcacttttatctt

SEQ ID NO: 28551 - DNA, 72 bp, Homo sapiens
atgaacatcgaggaaatatttatggttatctaaaatcttgctctatttctgtcacttttatcttttataaat

SEQ ID NO: 28552 - DNA, 72 bp, Homo sapiens
atatttatggttatctaaaatcttgctctatttctgtcacttttatcttttataaatttaaagatcagagac

SEQ ID NO: 28553 - DNA, 72 bp, Homo sapiens
ggttatctaaaatcttgctctatttctgtcacttttatcttttataaatttaaagatcagagacctaacata

SEQ ID NO: 28554 - DNA, 73 bp, Homo sapiens
tcttgctctatttctgtcacttttatcttttataaatttaaagatcagagacctaacataaatttcaagtaca

SEQ ID NO: 28555 - DNA, 70 bp, Homo sapiens
tctatttctgtcacttttatcttttataaatttaaagatcagagacctaacataaatttcaagtacaagg

SEQ ID NO: 28556 - DNA, 68 bp, Homo sapiens
tataaatttaaagatcagagacctaacataaatttcaagtacaaggttaaaaaccttgtcctttctga

SEQ ID NO: 28557 - DNA, 69 bp, Homo sapiens
aagatcagagacctaacataaatttcaagtacaaggttaaaaaccttgtcctttctgaagcaccttgta

SEQ ID NO: 28558 - DNA, 70 bp, Homo sapiens
cagagacctaacataaatttcaagtacaaggttaaaaaccttgtcctttctgaagcaccttgtacatatc

SEQ ID NO: 28559 - DNA, 69 bp, Homo sapiens
aatttcaagtacaaggttaaaaaccttgtcctttctgaagcaccttgtacatatctcagtagtagaact

SEQ ID NO: 28560 - DNA, 72 bp, Homo sapiens
tacaaggttaaaaaccttgtcctttctgaagcaccttgtacatatctcagtagtagaacttcgcatactatt

SEQ ID NO: 28561 - DNA, 74 bp, Homo sapiens
gttaaaaaccttgtcctttctgaagcaccttgtacatatctcagtagtagaacttcgcatactatttatgtgct

SEQ ID NO: 28562 - DNA, 79 bp, Homo sapiens
ctttctgaagcaccttgtacatatctcagtagtagaacttcgcatactatttatgtgcttgtcgctccaactgagcttt

SEQ ID NO: 28563 - DNA, 79 bp, Homo sapiens
aagcaccttgtacatatctcagtagtagaacttcgcatactatttatgtgcttgtcgctccaactgagctttttgacaa

SEQ ID NO: 28564 - DNA, 81 bp, Homo sapiens
tacatatctcagtagtagaacttcgcatactatttatgtgcttgtcgctccaactgagctttttgacaagactatggcctc

SEQ ID NO: 28565 - DNA, 80 bp, Homo sapiens
tagtagaacttcgcatactatttatgtgcttgtcgctccaactgagctttttgacaagactatggcctcgacacatatat

SEQ ID NO: 28566 - DNA, 78 bp, Homo sapiens
aacttcgcatactatttatgtgcttgtcgctccaactgagctttttgacaagactatggcctcgacacatatattttg

SEQ ID NO: 28567 - DNA, 77 bp, Homo sapiens
atttatgtgcttgtcgctccaactgagctttttgacaagactatggcctcgacacatatattttggtgtccgtagta

SEQ ID NO: 28568 - DNA, 76 bp, Homo sapiens
ttgtcgctccaactgagctttttgacaagactatggcctcgacacatatattttggtgtccgtagtacctagcgta

SEQ ID NO: 28569 - DNA, 75 bp, Homo sapiens
aactgagctttttgacaagactatggcctcgacacatatattttggtgtccgtagtacctagcgtagtgtgtgaa

SEQ ID NO: 28570 - DNA, 78 bp, Homo sapiens
tttgacaagactatggcctcgacacatatattttggtgtccgtagtacctagcgtagtgtgtgaagcatatagtatta

SEQ ID NO: 28571 - DNA, 78 bp, Homo sapiens
tatggcctcgacacatatattttggtgtccgtagtacctagcgtagtgtgtgaagcatatagtattatgaagtgttaa

SEQ ID NO: 28572 - DNA, 76 bp, Homo sapiens
acacatatattttggtgtccgtagtacctagcgtagtgtgtgaagcatatagtattatgaagtgttaagttgaata

SEQ ID NO: 28573 - DNA, 75 bp, Homo sapiens
atattttggtgtccgtagtacctagcgtagtgtgtgaagcatatagtattatgaagtgttaagttgaatagattc

SEQ ID NO: 28574 - DNA, 77 bp, Homo sapiens
tagtacctagcgtagtgtgtgaagcatatagtattatgaagtgttaagttgaatagattcttcctgtgtctggtctt

SEQ ID NO: 28575 - DNA, 77 bp, Homo sapiens
cgtagtgtgtgaagcatatagtattatgaagtgttaagttgaatagattcttcctgtgtctggtctttgatttccat

SEQ ID NO: 28576 - DNA, 81 bp, Homo sapiens
tgtgtgaagcatatagtattatgaagtgttaagttgaatagattcttcctgtgtctggtctttgatttccatttcatgtga

SEQ ID NO: 28577 - DNA, 80 bp, Homo sapiens
tatagtattatgaagtgttaagttgaatagattcttcctgtgtctggtctttgatttccatttcatgtgaggtgctgcta

SEQ ID NO: 28578 - DNA, 78 bp, Homo sapiens
atgaagtgttaagttgaatagattcttcctgtgtctggtctttgatttccatttcatgtgaggtgctgctaaaactga

SEQ ID NO: 28579 - DNA, 77 bp, Homo sapiens
aagttgaatagattcttcctgtgtctggtctttgatttccatttcatgtgaggtgctgctaaaactgatgtttgtta

SEQ ID NO: 28580 - DNA, 81 bp, Homo sapiens
tggtctttgatttccatttcatgtgaggtgctgctaaaactgatgtttgttagtcactgagtctctgttgatctaaattca

SEQ ID NO: 28581 - DNA, 76 bp, Homo sapiens
tttgttagtcactgagtctctgttgatctaaattcagctgtttctttaagcattctgtagtccggccctactccca

SEQ ID NO: 28582 - DNA, 74 bp, Homo sapiens
gtctctgttgatctaaattcagctgtttctttaagcattctgtagtccggccctactcccacgtatccaaccta

SEQ ID NO: 28583 - DNA, 74 bp, Homo sapiens
tgttgatctaaattcagctgtttctttaagcattctgtagtccggccctactcccacgtatccaacctagtcta

SEQ ID NO: 28584 - DNA, 71 bp, Homo sapiens
agctgtttctttaagcattctgtagtccggccctactcccacgtatccaacctagtctaccctagaatcca

SEQ ID NO: 28585 - DNA, 70 bp, Homo sapiens
ttaagcattctgtagtccggccctactcccacgtatccaacctagtctaccctagaatccactaacgctt

SEQ ID NO: 28586 - DNA, 69 bp, Homo sapiens
attctgtagtccggccctactcccacgtatccaacctagtctaccctagaatccactaacgctttatta

SEQ ID NO: 28587 - DNA, 68 bp, Homo sapiens
ccctactcccacgtatccaacctagtctaccctagaatccactaacgctttattatgttacattcttt

SEQ ID NO: 28588 - DNA, 69 bp, Homo sapiens
ctcccacgtatccaacctagtctaccctagaatccactaacgctttattatgttacattcttttagttc

SEQ ID NO: 28589 - DNA, 70 bp, Homo sapiens
aacctagtctaccctagaatccactaacgctttattatgttacattcttttagttctctagcttgtcgtc

SEQ ID NO: 28590 - DNA, 72 bp, Homo sapiens
tctaccctagaatccactaacgctttattatgttacattcttttagttctctagcttgtcgtctctccctcc

SEQ ID NO: 28591 - DNA, 71 bp, Homo sapiens
aatccactaacgctttattatgttacattcttttagttctctagcttgtcgtctctccctcctctccccta

SEQ ID NO: 28592 - DNA, 71 bp, Homo sapiens
tttattatgttacattcttttagttctctagcttgtcgtctctccctcctctcccctaaggatgaaacaaa

SEQ ID NO: 28593 - DNA, 74 bp, Homo sapiens
tacattcttttagttctctagcttgtcgtctctccctcctctcccctaaggatgaaacaaaacaggcatgtata

SEQ ID NO: 28594 - DNA, 74 bp, Homo sapiens
ttttagttctctagcttgtcgtctctccctcctctcccctaaggatgaaacaaaacaggcatgtatagattcaa

SEQ ID NO: 28595 - DNA, 75 bp, Homo sapiens
ttgtcgtctctccctcctctcccctaaggatgaaacaaaacaggcatgtatagattcaagtttggatgtcttgta

SEQ ID NO: 28596 - DNA, 75 bp, Homo sapiens
tccctcctctcccctaaggatgaaacaaaacaggcatgtatagattcaagtttggatgtcttgtatagctttcag

SEQ ID NO: 28597 - DNA, 74 bp, Homo sapiens
tcccctaaggatgaaacaaaacaggcatgtatagattcaagtttggatgtcttgtatagctttcagtttcggta

SEQ ID NO: 28598 - DNA, 74 bp, Homo sapiens
atgaaacaaaacaggcatgtatagattcaagtttggatgtcttgtatagctttcagtttcggtaagtccttcaa

SEQ ID NO: 28599 - DNA, 73 bp, Homo sapiens
atagattcaagtttggatgtcttgtatagctttcagtttcggtaagtccttcaagggccgacttatgtctctc

SEQ ID NO: 28600 - DNA, 69 bp, Homo sapiens
aagtttggatgtcttgtatagctttcagtttcggtaagtccttcaagggccgacttatgtctctccttt

SEQ ID NO: 28601 - DNA, 65 bp, Homo sapiens
ctttcagtttcggtaagtccttcaagggccgacttatgtctctccttttctattaaaaaccttta

SEQ ID NO: 28602 - DNA, 64 bp, Homo sapiens
tttcggtaagtccttcaagggccgacttatgtctctccttttctattaaaaacctttaccaaag

SEQ ID NO: 28603 - DNA, 68 bp, Homo sapiens
ttcaagggccgacttatgtctctccttttctattaaaaacctttaccaaagtcttggtcagaattctg

SEQ ID NO: 28604 - DNA, 68 bp, Homo sapiens
gccgacttatgtctctccttttctattaaaaacctttaccaaagtcttggtcagaattctggttctta

SEQ ID NO: 28605 - DNA, 68 bp, Homo sapiens
ctccttttctattaaaaacctttaccaaagtcttggtcagaattctggttcttatggacgtctgtcat

SEQ ID NO: 28606 - DNA, 70 bp, Homo sapiens
attaaaaacctttaccaaagtcttggtcagaattctggttcttatggacgtctgtcattattatatacca

SEQ ID NO: 28607 - DNA, 70 bp, Homo sapiens
aacctttaccaaagtcttggtcagaattctggttcttatggacgtctgtcattattatataccaaatctt

SEQ ID NO: 28608 - DNA, 71 bp, Homo sapiens
ggttcttatggacgtctgtcattattatataccaaatcttttatggattatttctcaacacttttgtagtt

SEQ ID NO: 28609 - DNA, 75 bp, Homo sapiens
gacgtctgtcattattatataccaaatcttttatggattatttctcaacacttttgtagtttataagtgtgatga

SEQ ID NO: 28610 - DNA, 72 bp, Homo sapiens
ttatataccaaatcttttatggattatttctcaacacttttgtagtttataagtgtgatgattgggttttca

SEQ ID NO: 28611 - DNA, 76 bp, Homo sapiens
tggattatttctcaacacttttgtagtttataagtgtgatgattgggttttcatactcaagtgtgaaatgtgcctc

SEQ ID NO: 28612 - DNA, 75 bp, Homo sapiens
tttctcaacacttttgtagtttataagtgtgatgattgggttttcatactcaagtgtgaaatgtgcctccctcaa

SEQ ID NO: 28613 - DNA, 73 bp, Homo sapiens
ttttgtagtttataagtgtgatgattgggttttcatactcaagtgtgaaatgtgcctccctcaaaccttgtta

SEQ ID NO: 28614 - DNA, 75 bp, Homo sapiens
atgtgcctccctcaaaccttgttacgacatcagcacattaccagtctgaaatgaaaaatatctgtagtttgtttc

SEQ ID NO: 28615 - DNA, 74 bp, Homo sapiens
tccctcaaaccttgttacgacatcagcacattaccagtctgaaatgaaaaatatctgtagtttgtttctatttc

SEQ ID NO: 28616 - DNA, 75 bp, Homo sapiens
ctcaaaccttgttacgacatcagcacattaccagtctgaaatgaaaaatatctgtagtttgtttctatttctgta

SEQ ID NO: 28617 - DNA, 76 bp, Homo sapiens
ccttgttacgacatcagcacattaccagtctgaaatgaaaaatatctgtagtttgtttctatttctgtatatcttc

SEQ ID NO: 28618 - DNA, 78 bp, Homo sapiens
gttacgacatcagcacattaccagtctgaaatgaaaaatatctgtagtttgtttctatttctgtatatcttctgtgaa

SEQ ID NO: 28619 - DNA, 81 bp, Homo sapiens
gacatcagcacattaccagtctgaaatgaaaaatatctgtagtttgtttctatttctgtatatcttctgtgaatatagaca

SEQ ID NO: 28620 - DNA, 78 bp, Homo sapiens
cagcacattaccagtctgaaatgaaaaatatctgtagtttgtttctatttctgtatatcttctgtgaatatagacaat

SEQ ID NO: 28621 - DNA, 75 bp, Homo sapiens
ccagtctgaaatgaaaaatatctgtagtttgtttctatttctgtatatcttctgtgaatatagacaatttagagt

SEQ ID NO: 28622 - DNA, 75 bp, Homo sapiens
atgaaaaatatctgtagtttgtttctatttctgtatatcttctgtgaatatagacaatttagagtttagtgaaca

SEQ ID NO: 28623 - DNA, 77 bp, Homo sapiens
tatctgtagtttgtttctatttctgtatatcttctgtgaatatagacaatttagagtttagtgaacacttgagagga

SEQ ID NO: 28624 - DNA, 77 bp, Homo sapiens
tctgtagtttgtttctatttctgtatatcttctgtgaatatagacaatttagagtttagtgaacacttgagaggaga

SEQ ID NO: 28625 - DNA, 75 bp, Homo sapiens
ctatttctgtatatcttctgtgaatatagacaatttagagtttagtgaacacttgagaggagataacaaaattta

SEQ ID NO: 28626 - DNA, 69 bp, Homo sapiens
gaacacttgagaggagataacaaaatttatttttgttgattcttattattccttaaataaacaagacca

SEQ ID NO: 28627 - DNA, 70 bp, Homo sapiens
gaggagataacaaaatttatttttgttgattcttattattccttaaataaacaagaccagttatctcata

SEQ ID NO: 28628 - DNA, 68 bp, Homo sapiens
tttatttttgttgattcttattattccttaaataaacaagaccagttatctcataacttgtaaataaa

SEQ ID NO: 28629 - DNA, 70 bp, Homo sapiens
ttgattcttattattccttaaataaacaagaccagttatctcataacttgtaaataaataagtggtgtag

SEQ ID NO: 28630 - DNA, 71 bp, Homo sapiens
ttattccttaaataaacaagaccagttatctcataacttgtaaataaataagtggtgtaggtatggattca

SEQ ID NO: 28631 - DNA, 69 bp, Homo sapiens
aaataaacaagaccagttatctcataacttgtaaataaataagtggtgtaggtatggattcaggttccc

SEQ ID NO: 28632 - DNA, 71 bp, Homo sapiens
acaagaccagttatctcataacttgtaaataaataagtggtgtaggtatggattcaggttccccatattta

SEQ ID NO: 28633 - DNA, 67 bp, Homo sapiens
acttgtaaataaataagtggtgtaggtatggattcaggttccccatatttaaaaacagtgaacaaaa

SEQ ID NO: 28634 - DNA, 69 bp, Homo sapiens
agtggtgtaggtatggattcaggttccccatatttaaaaacagtgaacaaaacagaagtaaaagatcca

SEQ ID NO: 28635 - DNA, 67 bp, Homo sapiens
gtaggtatggattcaggttccccatatttaaaaacagtgaacaaaacagaagtaaaagatccatttt

SEQ ID NO: 28636 - DNA, 67 bp, Homo sapiens
caggttccccatatttaaaaacagtgaacaaaacagaagtaaaagatccatttttcaaacctgattc

SEQ ID NO: 28637 - DNA, 68 bp, Homo sapiens
cccatatttaaaaacagtgaacaaaacagaagtaaaagatccatttttcaaacctgattcctcattat

SEQ ID NO: 28638 - DNA, 70 bp, Homo sapiens
cagtgaacaaaacagaagtaaaagatccatttttcaaacctgattcctcattatttaataaagttctcca

SEQ ID NO: 28639 - DNA, 69 bp, Homo sapiens
aacagaagtaaaagatccatttttcaaacctgattcctcattatttaataaagttctccacacttgaaa

SEQ ID NO: 28640 - DNA, 70 bp, Homo sapiens
aaagatccatttttcaaacctgattcctcattatttaataaagttctccacacttgaaagaacttgagtg

SEQ ID NO: 28641 - DNA, 73 bp, Homo sapiens
ttttcaaacctgattcctcattatttaataaagttctccacacttgaaagaacttgagtgtctagtatacagc

SEQ ID NO: 28642 - DNA, 73 bp, Homo sapiens
aaacctgattcctcattatttaataaagttctccacacttgaaagaacttgagtgtctagtatacagccttgc

SEQ ID NO: 28643 - DNA, 73 bp, Homo sapiens
ctcattatttaataaagttctccacacttgaaagaacttgagtgtctagtatacagccttgctgctagttttt

SEQ ID NO: 28644 - DNA, 76 bp, Homo sapiens
taataaagttctccacacttgaaagaacttgagtgtctagtatacagccttgctgctagtttttttcacacagctc

SEQ ID NO: 28645 - DNA, 76 bp, Homo sapiens
aaagaacttgagtgtctagtatacagccttgctgctagtttttttcacacagctcttgaaatgtttctattcatac

SEQ ID NO: 28646 - DNA, 77 bp, Homo sapiens
agtgtctagtatacagccttgctgctagtttttttcacacagctcttgaaatgtttctattcataccatcaaaatat

SEQ ID NO: 28647 - DNA, 78 bp, Homo sapiens
cagccttgctgctagtttttttcacacagctcttgaaatgtttctattcataccatcaaaatatttatgtaactatca

SEQ ID NO: 28648 - DNA, 77 bp, Homo sapiens
tgctgctagtttttttcacacagctcttgaaatgtttctattcataccatcaaaatatttatgtaactatcacaacc

SEQ ID NO: 28649 - DNA, 78 bp, Homo sapiens
ttcacacagctcttgaaatgtttctattcataccatcaaaatatttatgtaactatcacaaccttatggattattcta

SEQ ID NO: 28650 - DNA, 76 bp, Homo sapiens
cagctcttgaaatgtttctattcataccatcaaaatatttatgtaactatcacaaccttatggattattctatttc

SEQ ID NO: 28651 - DNA, 74 bp, Homo sapiens
tgtttctattcataccatcaaaatatttatgtaactatcacaaccttatggattattctatttcttaaccttca

SEQ ID NO: 28652 - DNA, 72 bp, Homo sapiens
tatttatgtaactatcacaaccttatggattattctatttcttaaccttcatttttcaggtattgcatttaa

SEQ ID NO: 28653 - DNA, 71 bp, Homo sapiens
gtaactatcacaaccttatggattattctatttcttaaccttcatttttcaggtattgcatttaacctaga

SEQ ID NO: 28654 - DNA, 70 bp, Homo sapiens
ccttatggattattctatttcttaaccttcatttttcaggtattgcatttaacctagaacaacttgacca

SEQ ID NO: 28655 - DNA, 72 bp, Homo sapiens
tattctatttcttaaccttcatttttcaggtattgcatttaacctagaacaacttgaccacaatgtcgtctc

SEQ ID NO: 28656 - DNA, 72 bp, Homo sapiens
cttaaccttcatttttcaggtattgcatttaacctagaacaacttgaccacaatgtcgtctccatttgatat

SEQ ID NO: 28657 - DNA, 73 bp, Homo sapiens
atttttcaggtattgcatttaacctagaacaacttgaccacaatgtcgtctccatttgatatttgttagacac

SEQ ID NO: 28658 - DNA, 74 bp, Homo sapiens
aggtattgcatttaacctagaacaacttgaccacaatgtcgtctccatttgatatttgttagacaccatctctt

SEQ ID NO: 28659 - DNA, 72 bp, Homo sapiens
atttaacctagaacaacttgaccacaatgtcgtctccatttgatatttgttagacaccatctcttttcagtt

SEQ ID NO: 28660 - DNA, 73 bp, Homo sapiens
agaacaacttgaccacaatgtcgtctccatttgatatttgttagacaccatctcttttcagtttccttctttc

SEQ ID NO: 28661 - DNA, 76 bp, Homo sapiens
cttctttctctttctcaccttcttgatgtgaataattctcttaacagaatagttcattagtagtccaggaatgtca

SEQ ID NO: 28662 - DNA, 78 bp, Homo sapiens
ctttctcaccttcttgatgtgaataattctcttaacagaatagttcattagtagtccaggaatgtcaaatatgtagca

SEQ ID NO: 28663 - DNA, 77 bp, Homo sapiens
cttcttgatgtgaataattctcttaacagaatagttcattagtagtccaggaatgtcaaatatgtagcaacctacca

SEQ ID NO: 28664 - DNA, 76 bp, Homo sapiens
gtgaataattctcttaacagaatagttcattagtagtccaggaatgtcaaatatgtagcaacctaccaatacatgg

SEQ ID NO: 28665 - DNA, 76 bp, Homo sapiens
cttaacagaatagttcattagtagtccaggaatgtcaaatatgtagcaacctaccaatacatggttgtgtaaatca

SEQ ID NO: 28666 - DNA, 78 bp, Homo sapiens
agaatagttcattagtagtccaggaatgtcaaatatgtagcaacctaccaatacatggttgtgtaaatcagatgattc

SEQ ID NO: 28667 - DNA, 77 bp, Homo sapiens
attagtagtccaggaatgtcaaatatgtagcaacctaccaatacatggttgtgtaaatcagatgattctgagaaaac

SEQ ID NO: 28668 - DNA, 77 bp, Homo sapiens
aatgtcaaatatgtagcaacctaccaatacatggttgtgtaaatcagatgattctgagaaaactcacgtgggcctgg

SEQ ID NO: 28669 - DNA, 77 bp, Homo sapiens
aaatatgtagcaacctaccaatacatggttgtgtaaatcagatgattctgagaaaactcacgtgggcctgggagata

SEQ ID NO: 28670 - DNA, 75 bp, Homo sapiens
aacctaccaatacatggttgtgtaaatcagatgattctgagaaaactcacgtgggcctgggagatagggaactga

SEQ ID NO: 28671 - DNA, 77 bp, Homo sapiens
atacatggttgtgtaaatcagatgattctgagaaaactcacgtgggcctgggagatagggaactgagtgagtagtct

SEQ ID NO: 28672 - DNA, 79 bp, Homo sapiens
taaatcagatgattctgagaaaactcacgtgggcctgggagatagggaactgagtgagtagtcttgctaccctctcaga

SEQ ID NO: 28673 - DNA, 75 bp, Homo sapiens
attctgagaaaactcacgtgggcctgggagatagggaactgagtgagtagtcttgctaccctctcagattacaaa

SEQ ID NO: 28674 - DNA, 72 bp, Homo sapiens
agaaaactcacgtgggcctgggagatagggaactgagtgagtagtcttgctaccctctcagattacaaaaac

SEQ ID NO: 28675 - DNA, 74 bp, Homo sapiens
gcctgggagatagggaactgagtgagtagtcttgctaccctctcagattacaaaaaccttgtcctgtaatgtta

SEQ ID NO: 28676 - DNA, 73 bp, Homo sapiens
atagggaactgagtgagtagtcttgctaccctctcagattacaaaaaccttgtcctgtaatgttagattataa

SEQ ID NO: 28677 - DNA, 72 bp, Homo sapiens
aactgagtgagtagtcttgctaccctctcagattacaaaaaccttgtcctgtaatgttagattataaaataa

SEQ ID NO: 28678 - DNA, 72 bp, Homo sapiens
gtagtcttgctaccctctcagattacaaaaaccttgtcctgtaatgttagattataaaataatctattgaaa

SEQ ID NO: 28679 - DNA, 69 bp, Homo sapiens
taccctctcagattacaaaaaccttgtcctgtaatgttagattataaaataatctattgaaaataagtt

SEQ ID NO: 28680 - DNA, 67 bp, Homo sapiens
gattacaaaaaccttgtcctgtaatgttagattataaaataatctattgaaaataagtttttattta

SEQ ID NO: 28681 - DNA, 74 bp, Homo sapiens
tgcctcggcctcttaaagcaatataaaactcttgaagaaaataaatagtcctgcatgaaacaggactgcctctt

SEQ ID NO: 28682 - DNA, 75 bp, Homo sapiens
tcttaaagcaatataaaactcttgaagaaaataaatagtcctgcatgaaacaggactgcctctttgtgtggctat

SEQ ID NO: 28683 - DNA, 74 bp, Homo sapiens
aatataaaactcttgaagaaaataaatagtcctgcatgaaacaggactgcctctttgtgtggctatttgtccta

SEQ ID NO: 28684 - DNA, 75 bp, Homo sapiens
ttgaagaaaataaatagtcctgcatgaaacaggactgcctctttgtgtggctatttgtcctacttagataaaaga

SEQ ID NO: 28685 - DNA, 72 bp, Homo sapiens
aaaataaatagtcctgcatgaaacaggactgcctctttgtgtggctatttgtcctacttagataaaagaaaa

SEQ ID NO: 28686 - DNA, 78 bp, Homo sapiens
tgcatgaaacaggactgcctctttgtgtggctatttgtcctacttagataaaagaaaatacgactatctggatgcatt

SEQ ID NO: 28687 - DNA, 74 bp, Homo sapiens
aaacaggactgcctctttgtgtggctatttgtcctacttagataaaagaaaatacgactatctggatgcatttg

SEQ ID NO: 28688 - DNA, 75 bp, Homo sapiens
ctctttgtgtggctatttgtcctacttagataaaagaaaatacgactatctggatgcatttgtgatctcttttgt

SEQ ID NO: 28689 - DNA, 75 bp, Homo sapiens
ctatttgtcctacttagataaaagaaaatacgactatctggatgcatttgtgatctcttttgtttcctgtgtcca

SEQ ID NO: 28690 - DNA, 74 bp, Homo sapiens
tacttagataaaagaaaatacgactatctggatgcatttgtgatctcttttgtttcctgtgtccaccgttcctc

SEQ ID NO: 28691 - DNA, 76 bp, Homo sapiens
taaaagaaaatacgactatctggatgcatttgtgatctcttttgtttcctgtgtccaccgttcctctctccacata

SEQ ID NO: 28692 - DNA, 75 bp, Homo sapiens
aaatacgactatctggatgcatttgtgatctcttttgtttcctgtgtccaccgttcctctctccacataaagctt

SEQ ID NO: 28693 - DNA, 78 bp, Homo sapiens
tctggatgcatttgtgatctcttttgtttcctgtgtccaccgttcctctctccacataaagctttgaatataccaata

SEQ ID NO: 28694 - DNA, 73 bp, Homo sapiens
atttgtgatctcttttgtttcctgtgtccaccgttcctctctccacataaagctttgaatataccaatagggc

SEQ ID NO: 28695 - DNA, 75 bp, Homo sapiens
ttgtttcctgtgtccaccgttcctctctccacataaagctttgaatataccaatagggctcatcttcacatcttt

SEQ ID NO: 28696 - DNA, 76 bp, Homo sapiens
tgtttcctgtgtccaccgttcctctctccacataaagctttgaatataccaatagggctcatcttcacatcttttc

SEQ ID NO: 28697 - DNA, 76 bp, Homo sapiens
tgtgtccaccgttcctctctccacataaagctttgaatataccaatagggctcatcttcacatcttttccacagtt

SEQ ID NO: 28698 - DNA, 76 bp, Homo sapiens
ttcctctctccacataaagctttgaatataccaatagggctcatcttcacatcttttccacagtttcactggaaaa

SEQ ID NO: 28699 - DNA, 76 bp, Homo sapiens
tctctccacataaagctttgaatataccaatagggctcatcttcacatcttttccacagtttcactggaaaaggat

SEQ ID NO: 28700 - DNA, 76 bp, Homo sapiens
cataaagctttgaatataccaatagggctcatcttcacatcttttccacagtttcactggaaaaggattctgatat

SEQ ID NO: 28701 - DNA, 75 bp, Homo sapiens
taaagctttgaatataccaatagggctcatcttcacatcttttccacagtttcactggaaaaggattctgatatt

SEQ ID NO: 28702 - DNA, 75 bp, Homo sapiens
agctttgaatataccaatagggctcatcttcacatcttttccacagtttcactggaaaaggattctgatatttat

SEQ ID NO: 28703 - DNA, 76 bp, Homo sapiens
gaatataccaatagggctcatcttcacatcttttccacagtttcactggaaaaggattctgatatttatttgtaca

SEQ ID NO: 28704 - DNA, 77 bp, Homo sapiens
taccaatagggctcatcttcacatcttttccacagtttcactggaaaaggattctgatatttatttgtacatgagta

SEQ ID NO: 28705 - DNA, 75 bp, Homo sapiens
aatagggctcatcttcacatcttttccacagtttcactggaaaaggattctgatatttatttgtacatgagtaac

SEQ ID NO: 28706 - DNA, 73 bp, Homo sapiens
cttcacatcttttccacagtttcactggaaaaggattctgatatttatttgtacatgagtaactgattccctt

SEQ ID NO: 28707 - DNA, 73 bp, Homo sapiens
cttttccacagtttcactggaaaaggattctgatatttatttgtacatgagtaactgattccctttattgtga

SEQ ID NO: 28708 - DNA, 72 bp, Homo sapiens
gtttcactggaaaaggattctgatatttatttgtacatgagtaactgattccctttattgtgatttaatttc

SEQ ID NO: 28709 - DNA, 74 bp, Homo sapiens
ggattctgatatttatttgtacatgagtaactgattccctttattgtgatttaatttccttattatcttattca

SEQ ID NO: 28710 - DNA, 74 bp, Homo sapiens
gatatttatttgtacatgagtaactgattccctttattgtgatttaatttccttattatcttattcatttgcat

SEQ ID NO: 28711 - DNA, 74 bp, Homo sapiens
tattgtgatttaatttccttattatcttattcatttgcattataagccttttatcttggtttggtgatagattg

SEQ ID NO: 28712 - DNA, 72 bp, Homo sapiens
taatttccttattatcttattcatttgcattataagccttttatcttggtttggtgatagattggaattaac

SEQ ID NO: 28713 - DNA, 73 bp, Homo sapiens
ttcatttgcattataagccttttatcttggtttggtgatagattggaattaacctgtataaacaagtgtagaa

SEQ ID NO: 28714 - DNA, 71 bp, Homo sapiens
gcattataagccttttatcttggtttggtgatagattggaattaacctgtataaacaagtgtagaaaaata

SEQ ID NO: 28715 - DNA, 72 bp, Homo sapiens
ttatcttggtttggtgatagattggaattaacctgtataaacaagtgtagaaaaatattgatggatagggaa

SEQ ID NO: 28716 - DNA, 73 bp, Homo sapiens
ttggtgatagattggaattaacctgtataaacaagtgtagaaaaatattgatggatagggaaagagaacctga

SEQ ID NO: 28717 - DNA, 73 bp, Homo sapiens
gattggaattaacctgtataaacaagtgtagaaaaatattgatggatagggaaagagaacctgaaatgtcaga

SEQ ID NO: 28718 - DNA, 70 bp, Homo sapiens
aacctgtataaacaagtgtagaaaaatattgatggatagggaaagagaacctgaaatgtcagaacctgtt

SEQ ID NO: 28719 - DNA, 76 bp, Homo sapiens
tataaacaagtgtagaaaaatattgatggatagggaaagagaacctgaaatgtcagaacctgttttgctctcatca

SEQ ID NO: 28720 - DNA, 73 bp, Homo sapiens
aaaaatattgatggatagggaaagagaacctgaaatgtcagaacctgttttgctctcatcacctttcttgccc

SEQ ID NO: 28721 - DNA, 75 bp, Homo sapiens
atggatagggaaagagaacctgaaatgtcagaacctgttttgctctcatcacctttcttgcccttctagcaataa

SEQ ID NO: 28722 - DNA, 74 bp, Homo sapiens
aaagagaacctgaaatgtcagaacctgttttgctctcatcacctttcttgcccttctagcaataagagaagaaa

SEQ ID NO: 28723 - DNA, 76 bp, Homo sapiens
aacctgaaatgtcagaacctgttttgctctcatcacctttcttgcccttctagcaataagagaagaaatgggcaca

SEQ ID NO: 28724 - DNA, 78 bp, Homo sapiens
agaacctgttttgctctcatcacctttcttgcccttctagcaataagagaagaaatgggcacagctatggttgctgga

SEQ ID NO: 28725 - DNA, 79 bp, Homo sapiens
ttgctctcatcacctttcttgcccttctagcaataagagaagaaatgggcacagctatggttgctggacctgctaaaaa

SEQ ID NO: 28726 - DNA, 77 bp, Homo sapiens
ttgcccttctagcaataagagaagaaatgggcacagctatggttgctggacctgctaaaaaagagaattagccatat

SEQ ID NO: 28727 - DNA, 76 bp, Homo sapiens
aataagagaagaaatgggcacagctatggttgctggacctgctaaaaaagagaattagccatattctttcttagca

SEQ ID NO: 28728 - DNA, 78 bp, Homo sapiens
agaaatgggcacagctatggttgctggacctgctaaaaaagagaattagccatattctttcttagcacatttgatcta

SEQ ID NO: 28729 - DNA, 77 bp, Homo sapiens
acagctatggttgctggacctgctaaaaaagagaattagccatattctttcttagcacatttgatctaggacttagc

SEQ ID NO: 28730 - DNA, 77 bp, Homo sapiens
ttgctggacctgctaaaaaagagaattagccatattctttcttagcacatttgatctaggacttagcctatcttgtc

SEQ ID NO: 28731 - DNA, 77 bp, Homo sapiens
atattctttcttagcacatttgatctaggacttagcctatcttgtctgacagcgttattggtttgctcccttctaga

SEQ ID NO: 28732 - DNA, 78 bp, Homo sapiens
ttcttagcacatttgatctaggacttagcctatcttgtctgacagcgttattggtttgctcccttctagagcactctt

SEQ ID NO: 28733 - DNA, 75 bp, Homo sapiens
acatttgatctaggacttagcctatcttgtctgacagcgttattggtttgctcccttctagagcactctttcccc

SEQ ID NO: 28734 - DNA, 74 bp, Homo sapiens
acttagcctatcttgtctgacagcgttattggtttgctcccttctagagcactctttcccctccctcagttcaa

SEQ ID NO: 28735 - DNA, 76 bp, Homo sapiens
tatcttgtctgacagcgttattggtttgctcccttctagagcactctttcccctccctcagttcaagatttgtaca

SEQ ID NO: 28736 - DNA, 73 bp, Homo sapiens
tattggtttgctcccttctagagcactctttcccctccctcagttcaagatttgtacaagtaaggagaacata

SEQ ID NO: 28737 - DNA, 73 bp, Homo sapiens
ttctagagcactctttcccctccctcagttcaagatttgtacaagtaaggagaacatacttaagactaagata

SEQ ID NO: 28738 - DNA, 70 bp, Homo sapiens
actctttcccctccctcagttcaagatttgtacaagtaaggagaacatacttaagactaagataccgaga

SEQ ID NO: 28739 - DNA, 71 bp, Homo sapiens
cagttcaagatttgtacaagtaaggagaacatacttaagactaagataccgagatgtataatttattttaa

SEQ ID NO: 28740 - DNA, 69 bp, Homo sapiens
tttgtacaagtaaggagaacatacttaagactaagataccgagatgtataatttattttaaaaacacat

SEQ ID NO: 28741 - DNA, 63 bp, Homo sapiens
atttattttaaaaacacatttgacgttatgttattttcttatttaaattataggacctccttt

SEQ ID NO: 28742 - DNA, 69 bp, Homo sapiens
aaaacacatttgacgttatgttattttcttatttaaattataggacctccttttctgactaatacatca

SEQ ID NO: 28743 - DNA, 68 bp, Homo sapiens
ttattttcttatttaaattataggacctccttttctgactaatacatcattgaccttcctaattttag

SEQ ID NO: 28744 - DNA, 71 bp, Homo sapiens
atttaaattataggacctccttttctgactaatacatcattgaccttcctaattttagtacccagctctga

SEQ ID NO: 28745 - DNA, 70 bp, Homo sapiens
aattataggacctccttttctgactaatacatcattgaccttcctaattttagtacccagctctgatttt

SEQ ID NO: 28746 - DNA, 70 bp, Homo sapiens
cctccttttctgactaatacatcattgaccttcctaattttagtacccagctctgatttttttattccta

SEQ ID NO: 28747 - DNA, 70 bp, Homo sapiens
acatcattgaccttcctaattttagtacccagctctgatttttttattcctaagccttaaacaggagata

SEQ ID NO: 28748 - DNA, 67 bp, Homo sapiens
gaccttcctaattttagtacccagctctgatttttttattcctaagccttaaacaggagatatttaa

SEQ ID NO: 28749 - DNA, 67 bp, Homo sapiens
ttcctaattttagtacccagctctgatttttttattcctaagccttaaacaggagatatttaaaaca

SEQ ID NO: 28750 - DNA, 70 bp, Homo sapiens
tagtacccagctctgatttttttattcctaagccttaaacaggagatatttaaaacaattcctcattgcc

SEQ ID NO: 28751 - DNA, 69 bp, Homo sapiens
agtacccagctctgatttttttattcctaagccttaaacaggagatatttaaaacaattcctcattgcc

SEQ ID NO: 28752 - DNA, 71 bp, Homo sapiens
ctctgatttttttattcctaagccttaaacaggagatatttaaaacaattcctcattgcctttgagatgaa

SEQ ID NO: 28753 - DNA, 70 bp, Homo sapiens
ttttattcctaagccttaaacaggagatatttaaaacaattcctcattgcctttgagatgaaatacaaac

SEQ ID NO: 28754 - DNA, 70 bp, Homo sapiens
tttattcctaagccttaaacaggagatatttaaaacaattcctcattgcctttgagatgaaatacaaact

SEQ ID NO: 28755 - DNA, 69 bp, Homo sapiens
cctaagccttaaacaggagatatttaaaacaattcctcattgcctttgagatgaaatacaaactttaaa

SEQ ID NO: 28756 - DNA, 67 bp, Homo sapiens
tttaaaacaattcctcattgcctttgagatgaaatacaaactttaaaagtttgaaaaaatataaaca

SEQ ID NO: 28757 - DNA, 70 bp, Homo sapiens
tcctcattgcctttgagatgaaatacaaactttaaaagtttgaaaaaatataaacaaattaactgattga

SEQ ID NO: 28758 - DNA, 68 bp, Homo sapiens
ttgcctttgagatgaaatacaaactttaaaagtttgaaaaaatataaacaaattaactgattgattta

SEQ ID NO: 28759 - DNA, 65 bp, Homo sapiens
ctttaaaagtttgaaaaaatataaacaaattaactgattgatttaactaattctataaaagcagg

SEQ ID NO: 28760 - DNA, 71 bp, Homo sapiens
gaaaaaatataaacaaattaactgattgatttaactaattctataaaagcaggttatggtctcattcatag

SEQ ID NO: 28761 - DNA, 73 bp, Homo sapiens
actgattgatttaactaattctataaaagcaggttatggtctcattcatagtaagagtagtataaattataac

SEQ ID NO: 28762 - DNA, 72 bp, Homo sapiens
ctataaaagcaggttatggtctcattcatagtaagagtagtataaattataactatactaaaatactgtctt

SEQ ID NO: 28763 - DNA, 72 bp, Homo sapiens
gcaggttatggtctcattcatagtaagagtagtataaattataactatactaaaatactgtctttttaccta

SEQ ID NO: 28764 - DNA, 71 bp, Homo sapiens
tggtctcattcatagtaagagtagtataaattataactatactaaaatactgtctttttacctataacatt

SEQ ID NO: 28765 - DNA, 70 bp, Homo sapiens
gtaagagtagtataaattataactatactaaaatactgtctttttacctataacatttatagacttgtca

SEQ ID NO: 28766 - DNA, 69 bp, Homo sapiens
tataaattataactatactaaaatactgtctttttacctataacatttatagacttgtcaagggtatgg

SEQ ID NO: 28767 - DNA, 67 bp, Homo sapiens
aactatactaaaatactgtctttttacctataacatttatagacttgtcaagggtatggggaaacag

SEQ ID NO: 28768 - DNA, 74 bp, Homo sapiens
aaatactgtctttttacctataacatttatagacttgtcaagggtatggggaaacaggtatgctcatgcattga

SEQ ID NO: 28769 - DNA, 77 bp, Homo sapiens
tttttacctataacatttatagacttgtcaagggtatggggaaacaggtatgctcatgcattgacaatgggcatata

SEQ ID NO: 28770 - DNA, 80 bp, Homo sapiens
ctataacatttatagacttgtcaagggtatggggaaacaggtatgctcatgcattgacaatgggcatatatattggtaca

SEQ ID NO: 28771 - DNA, 80 bp, Homo sapiens
tttatagacttgtcaagggtatggggaaacaggtatgctcatgcattgacaatgggcatatatattggtacagccttctc

SEQ ID NO: 28772 - DNA, 80 bp, Homo sapiens
aagggtatggggaaacaggtatgctcatgcattgacaatgggcatatatattggtacagccttctctgtggagaagagtg

SEQ ID NO: 28773 - DNA, 76 bp, Homo sapiens
taaaacacaccatctccatatattacaaatgtgcataccctttaacccagcaatttggcttctaggtgatatacta

SEQ ID NO: 28774 - DNA, 76 bp, Homo sapiens
tctccatatattacaaatgtgcataccctttaacccagcaatttggcttctaggtgatatactaaatgtacgtgaa

SEQ ID NO: 28775 - DNA, 73 bp, Homo sapiens
ttacaaatgtgcataccctttaacccagcaatttggcttctaggtgatatactaaatgtacgtgaaattacca

SEQ ID NO: 28776 - DNA, 73 bp, Homo sapiens
aatgtgcataccctttaacccagcaatttggcttctaggtgatatactaaatgtacgtgaaattaccaatgta

SEQ ID NO: 28777 - DNA, 70 bp, Homo sapiens
ataccctttaacccagcaatttggcttctaggtgatatactaaatgtacgtgaaattaccaatgtacaag

SEQ ID NO: 28778 - DNA, 70 bp, Homo sapiens
cctttaacccagcaatttggcttctaggtgatatactaaatgtacgtgaaattaccaatgtacaaggtta

SEQ ID NO: 28779 - DNA, 72 bp, Homo sapiens
ccagcaatttggcttctaggtgatatactaaatgtacgtgaaattaccaatgtacaaggttatttattaggc

SEQ ID NO: 28780 - DNA, 73 bp, Homo sapiens
cagcaatttggcttctaggtgatatactaaatgtacgtgaaattaccaatgtacaaggttatttattaggcca

SEQ ID NO: 28781 - DNA, 73 bp, Homo sapiens
ggcttctaggtgatatactaaatgtacgtgaaattaccaatgtacaaggttatttattaggccatagtatgta

SEQ ID NO: 28782 - DNA, 73 bp, Homo sapiens
gcttctaggtgatatactaaatgtacgtgaaattaccaatgtacaaggttatttattaggccatagtatgtaa

SEQ ID NO: 28783 - DNA, 73 bp, Homo sapiens
gatatactaaatgtacgtgaaattaccaatgtacaaggttatttattaggccatagtatgtaatagcaaaggc

SEQ ID NO: 28784 - DNA, 71 bp, Homo sapiens
actaaatgtacgtgaaattaccaatgtacaaggttatttattaggccatagtatgtaatagcaaaggcttg

SEQ ID NO: 28785 - DNA, 72 bp, Homo sapiens
atgtacgtgaaattaccaatgtacaaggttatttattaggccatagtatgtaatagcaaaggcttggaaata

SEQ ID NO: 28786 - DNA, 70 bp, Homo sapiens
cgtgaaattaccaatgtacaaggttatttattaggccatagtatgtaatagcaaaggcttggaaataatt

SEQ ID NO: 28787 - DNA, 70 bp, Homo sapiens
ccaatgtacaaggttatttattaggccatagtatgtaatagcaaaggcttggaaataattttaaaatgtc

SEQ ID NO: 28788 - DNA, 74 bp, Homo sapiens
tatttattaggccatagtatgtaatagcaaaggcttggaaataattttaaaatgtccatcaaatgagggactga

SEQ ID NO: 28789 - DNA, 75 bp, Homo sapiens
aggccatagtatgtaatagcaaaggcttggaaataattttaaaatgtccatcaaatgagggactgataaatgcat

SEQ ID NO: 28790 - DNA, 75 bp, Homo sapiens
gtgcccagccaataaatgcatttctactcaattatacaatggaattctataaagacaagaagaaatgggttgtct

SEQ ID NO: 28791 - DNA, 75 bp, Homo sapiens
cagccaataaatgcatttctactcaattatacaatggaattctataaagacaagaagaaatgggttgtctttgta

SEQ ID NO: 28792 - DNA, 76 bp, Homo sapiens
tgcatttctactcaattatacaatggaattctataaagacaagaagaaatgggttgtctttgtatattggtataga

SEQ ID NO: 28793 - DNA, 74 bp, Homo sapiens
ctcaattatacaatggaattctataaagacaagaagaaatgggttgtctttgtatattggtatagagtgatctt

SEQ ID NO: 28794 - DNA, 74 bp, Homo sapiens
ggaattctataaagacaagaagaaatgggttgtctttgtatattggtatagagtgatctttaagataatgaaca

SEQ ID NO: 28795 - DNA, 76 bp, Homo sapiens
ctataaagacaagaagaaatgggttgtctttgtatattggtatagagtgatctttaagataatgaacatatgctgt

SEQ ID NO: 28796 - DNA, 78 bp, Homo sapiens
caagaagaaatgggttgtctttgtatattggtatagagtgatctttaagataatgaacatatgctgttatttatgcaa

SEQ ID NO: 28797 - DNA, 76 bp, Homo sapiens
gggttgtctttgtatattggtatagagtgatctttaagataatgaacatatgctgttatttatgcaaaaagttgaa

SEQ ID NO: 28798 - DNA, 77 bp, Homo sapiens
tattggtatagagtgatctttaagataatgaacatatgctgttatttatgcaaaaagttgaaaagaatacatagacc

SEQ ID NO: 28799 - DNA, 78 bp, Homo sapiens
agagtgatctttaagataatgaacatatgctgttatttatgcaaaaagttgaaaagaatacatagacctgagctgggc

SEQ ID NO: 28800 - DNA, 76 bp, Homo sapiens
atctttaagataatgaacatatgctgttatttatgcaaaaagttgaaaagaatacatagacctgagctgggcgtgg

SEQ ID NO: 28801 - DNA, 76 bp, Homo sapiens
agctgcttgggagtctgaagcagggaatttgaatttgggtttgggaattctaggctgtagtgccgatctatgttga

SEQ ID NO: 28802 - DNA, 79 bp, Homo sapiens
gagtctgaagcagggaatttgaatttgggtttgggaattctaggctgtagtgccgatctatgttgagcatctatgccga

SEQ ID NO: 28803 - DNA, 79 bp, Homo sapiens
aagcagggaatttgaatttgggtttgggaattctaggctgtagtgccgatctatgttgagcatctatgccgatctatgc

SEQ ID NO: 28804 - DNA, 79 bp, Homo sapiens
aatttgaatttgggtttgggaattctaggctgtagtgccgatctatgttgagcatctatgccgatctatgccgatctaa

SEQ ID NO: 28805 - DNA, 84 bp, Homo sapiens
ggtttgggaattctaggctgtagtgccgatctatgttgagcatctatgccgatctatgccgatctaagttgagcatcagtatgg

SEQ ID NO: 28806 - DNA, 87 bp, Homo sapiens
aattctaggctgtagtgccgatctatgttgagcatctatgccgatctatgccgatctaagttgagcatcagtatggtgacctctgtg

SEQ ID NO: 28807 - DNA, 88 bp, Homo sapiens
tgtagtgccgatctatgttgagcatctatgccgatctatgccgatctaagttgagcatcagtatggtgacctctgtggagtggggcac

SEQ ID NO: 28808 - DNA, 85 bp, Homo sapiens
atctatgttgagcatctatgccgatctatgccgatctaagttgagcatcagtatggtgacctctgtggagtggggcaccaccagg

SEQ ID NO: 28809 - DNA, 81 bp, Homo sapiens
atctatgccgatctatgccgatctaagttgagcatcagtatggtgacctctgtggagtggggcaccaccaggttgcctaaa

SEQ ID NO: 28810 - DNA, 78 bp, Homo sapiens
ccgatctatgccgatctaagttgagcatcagtatggtgacctctgtggagtggggcaccaccaggttgcctaaagagg

SEQ ID NO: 28811 - DNA, 74 bp, Homo sapiens
atctaagttgagcatcagtatggtgacctctgtggagtggggcaccaccaggttgcctaaagaggggtaaactg

SEQ ID NO: 28812 - DNA, 72 bp, Homo sapiens
catcagtatggtgacctctgtggagtggggcaccaccaggttgcctaaagaggggtaaactggcctaagttg

SEQ ID NO: 28813 - DNA, 70 bp, Homo sapiens
tatggtgacctctgtggagtggggcaccaccaggttgcctaaagaggggtaaactggcctaagttggaaa

SEQ ID NO: 28814 - DNA, 70 bp, Homo sapiens
tggagtggggcaccaccaggttgcctaaagaggggtaaactggcctaagttggaaacagcacaagtcaaa

SEQ ID NO: 28815 - DNA, 70 bp, Homo sapiens
caccaccaggttgcctaaagaggggtaaactggcctaagttggaaacagcacaagtcaaaactcctatgc

SEQ ID NO: 28816 - DNA, 72 bp, Homo sapiens
ttgcctaaagaggggtaaactggcctaagttggaaacagcacaagtcaaaactcctatgctgataagtagtg

SEQ ID NO: 28817 - DNA, 73 bp, Homo sapiens
taaagaggggtaaactggcctaagttggaaacagcacaagtcaaaactcctatgctgataagtagtgggatca

SEQ ID NO: 28818 - DNA, 77 bp, Homo sapiens
taaactggcctaagttggaaacagcacaagtcaaaactcctatgctgataagtagtgggatcaagcctgtgaatagc

SEQ ID NO: 28819 - DNA, 79 bp, Homo sapiens
taagttggaaacagcacaagtcaaaactcctatgctgataagtagtgggatcaagcctgtgaatagccactggattcca

SEQ ID NO: 28820 - DNA, 81 bp, Homo sapiens
acaagtcaaaactcctatgctgataagtagtgggatcaagcctgtgaatagccactggattccagctgggcaacatagata

SEQ ID NO: 28821 - DNA, 81 bp, Homo sapiens
aactcctatgctgataagtagtgggatcaagcctgtgaatagccactggattccagctgggcaacatagatagaccctgtc

SEQ ID NO: 28822 - DNA, 72 bp, Homo sapiens
acaaaaaaaaagccaacctgataatactggtttactctgagaaagaaacaggtggattgctgaggtgtatga

SEQ ID NO: 28823 - DNA, 76 bp, Homo sapiens
aaaaagccaacctgataatactggtttactctgagaaagaaacaggtggattgctgaggtgtatgattgagagaga

SEQ ID NO: 28824 - DNA, 76 bp, Homo sapiens
ataatactggtttactctgagaaagaaacaggtggattgctgaggtgtatgattgagagagagactttacatttta

SEQ ID NO: 28825 - DNA, 74 bp, Homo sapiens
actggtttactctgagaaagaaacaggtggattgctgaggtgtatgattgagagagagactttacattttattt

SEQ ID NO: 28826 - DNA, 77 bp, Homo sapiens
gaaagaaacaggtggattgctgaggtgtatgattgagagagagactttacattttattttgtacccatgcaaatgta

SEQ ID NO: 28827 - DNA, 76 bp, Homo sapiens
aaacaggtggattgctgaggtgtatgattgagagagagactttacattttattttgtacccatgcaaatgtattac

SEQ ID NO: 28828 - DNA, 76 bp, Homo sapiens
attgctgaggtgtatgattgagagagagactttacattttattttgtacccatgcaaatgtattacctattgaaaa

SEQ ID NO: 28829 - DNA, 74 bp, Homo sapiens
tgtatgattgagagagagactttacattttattttgtacccatgcaaatgtattacctattgaaaaaacaataa

SEQ ID NO: 28830 - DNA, 68 bp, Homo sapiens
agagagagactttacattttattttgtacccatgcaaatgtattacctattgaaaaaacaataaaatt

SEQ ID NO: 28831 - DNA, 70 bp, Homo sapiens
cattttattttgtacccatgcaaatgtattacctattgaaaaaacaataaaattttgatttcacaagcag

SEQ ID NO: 28832 - DNA, 72 bp, Homo sapiens
tgtacccatgcaaatgtattacctattgaaaaaacaataaaattttgatttcacaagcaggttgaagggaga

SEQ ID NO: 28833 - DNA, 69 bp, Homo sapiens
gcaaatgtattacctattgaaaaaacaataaaattttgatttcacaagcaggttgaagggagaaggtcc

SEQ ID NO: 28834 - DNA, 67 bp, Homo sapiens
acctattgaaaaaacaataaaattttgatttcacaagcaggttgaagggagaaggtcctataaaata

SEQ ID NO: 28835 - DNA, 67 bp, Homo sapiens
aaacaataaaattttgatttcacaagcaggttgaagggagaaggtcctataaaataacactttcttg

SEQ ID NO: 28836 - DNA, 70 bp, Homo sapiens
atttcacaagcaggttgaagggagaaggtcctataaaataacactttcttggttgagattggttggttga

SEQ ID NO: 28837 - DNA, 70 bp, Homo sapiens
ttgaagggagaaggtcctataaaataacactttcttggttgagattggttggttgagactcatttggtaa

SEQ ID NO: 28838 - DNA, 70 bp, Homo sapiens
agaaggtcctataaaataacactttcttggttgagattggttggttgagactcatttggtaaagatggaa

SEQ ID NO: 28839 - DNA, 70 bp, Homo sapiens
cctataaaataacactttcttggttgagattggttggttgagactcatttggtaaagatggaagaaagaa

SEQ ID NO: 28840 - DNA, 74 bp, Homo sapiens
aatatttcagaaagaagaaaatgctaatattttctatctttgttaggtggaagtttagctgatgctataagtga

SEQ ID NO: 28841 - DNA, 73 bp, Homo sapiens
gaaagaagaaaatgctaatattttctatctttgttaggtggaagtttagctgatgctataagtgaaaactaca

SEQ ID NO: 28842 - DNA, 76 bp, Homo sapiens
atgctaatattttctatctttgttaggtggaagtttagctgatgctataagtgaaaactacagaatcatgagttac

SEQ ID NO: 28843 - DNA, 74 bp, Homo sapiens
tttctatctttgttaggtggaagtttagctgatgctataagtgaaaactacagaatcatgagttactttaaaga

SEQ ID NO: 28844 - DNA, 75 bp, Homo sapiens
tctttgttaggtggaagtttagctgatgctataagtgaaaactacagaatcatgagttactttaaagaagcagag

SEQ ID NO: 28845 - DNA, 75 bp, Homo sapiens
aagtttagctgatgctataagtgaaaactacagaatcatgagttactttaaagaagcagagttgaaggatctcct

SEQ ID NO: 28846 - DNA, 77 bp, Homo sapiens
tgatgctataagtgaaaactacagaatcatgagttactttaaagaagcagagttgaaggatctccttttgcaagttg

SEQ ID NO: 28847 - DNA, 74 bp, Homo sapiens
tataagtgaaaactacagaatcatgagttactttaaagaagcagagttgaaggatctccttttgcaagttggcc

SEQ ID NO: 28848 - DNA, 76 bp, Homo sapiens
tacagaatcatgagttactttaaagaagcagagttgaaggatctccttttgcaagttggccgaggcttgaggtata

SEQ ID NO: 28849 - DNA, 73 bp, Homo sapiens
agttactttaaagaagcagagttgaaggatctccttttgcaagttggccgaggcttgaggtatattcattcaa

SEQ ID NO: 28850 - DNA, 75 bp, Homo sapiens
tttaaagaagcagagttgaaggatctccttttgcaagttggccgaggcttgaggtatattcattcaatgtctttg

SEQ ID NO: 28851 - DNA, 77 bp, Homo sapiens
agttgaaggatctccttttgcaagttggccgaggcttgaggtatattcattcaatgtctttggttcacatggatata

SEQ ID NO: 28852 - DNA, 75 bp, Homo sapiens
atctccttttgcaagttggccgaggcttgaggtatattcattcaatgtctttggttcacatggatataaaaccta

SEQ ID NO: 28853 - DNA, 75 bp, Homo sapiens
tttgcaagttggccgaggcttgaggtatattcattcaatgtctttggttcacatggatataaaacctagtaagta

SEQ ID NO: 28854 - DNA, 77 bp, Homo sapiens
aggcttgaggtatattcattcaatgtctttggttcacatggatataaaacctagtaagtattgcagatcttctgacc

SEQ ID NO: 28855 - DNA, 78 bp, Homo sapiens
tatattcattcaatgtctttggttcacatggatataaaacctagtaagtattgcagatcttctgacctgtgttctttg

SEQ ID NO: 28856 - DNA, 70 bp, Homo sapiens
ctggttttattattattagtttggcttacataattaactgtttgacaggtaatattttcatatctcgaac

SEQ ID NO: 28857 - DNA, 72 bp, Homo sapiens
tattattagtttggcttacataattaactgtttgacaggtaatattttcatatctcgaacctcaatcccaaa

SEQ ID NO: 28858 - DNA, 74 bp, Homo sapiens
ttagtttggcttacataattaactgtttgacaggtaatattttcatatctcgaacctcaatcccaaatgctgcc

SEQ ID NO: 28859 - DNA, 76 bp, Homo sapiens
ttacataattaactgtttgacaggtaatattttcatatctcgaacctcaatcccaaatgctgcctctgaagaagga

SEQ ID NO: 28860 - DNA, 77 bp, Homo sapiens
aactgtttgacaggtaatattttcatatctcgaacctcaatcccaaatgctgcctctgaagaaggagacgaagatga

SEQ ID NO: 28861 - DNA, 78 bp, Homo sapiens
aatattttcatatctcgaacctcaatcccaaatgctgcctctgaagaaggagacgaagatgattgggcatccaacaaa

SEQ ID NO: 28862 - DNA, 77 bp, Homo sapiens
atatctcgaacctcaatcccaaatgctgcctctgaagaaggagacgaagatgattgggcatccaacaaagttatgtt

SEQ ID NO: 28863 - DNA, 74 bp, Homo sapiens
aacctcaatcccaaatgctgcctctgaagaaggagacgaagatgattgggcatccaacaaagttatgtttaaaa

SEQ ID NO: 28864 - DNA, 73 bp, Homo sapiens
aaatgctgcctctgaagaaggagacgaagatgattgggcatccaacaaagttatgtttaaaataggtaagaaa

SEQ ID NO: 28865 - DNA, 73 bp, Homo sapiens
tctgaagaaggagacgaagatgattgggcatccaacaaagttatgtttaaaataggtaagaaaggtaatcaga

SEQ ID NO: 28866 - DNA, 71 bp, Homo sapiens
gagacgaagatgattgggcatccaacaaagttatgtttaaaataggtaagaaaggtaatcagattattacc

SEQ ID NO: 28867 - DNA, 71 bp, Homo sapiens
aagatgattgggcatccaacaaagttatgtttaaaataggtaagaaaggtaatcagattattaccttcaga

SEQ ID NO: 28868 - DNA, 71 bp, Homo sapiens
ataggtaagaaaggtaatcagattattaccttcagataaagagaaggctgttttgtttttgctcttcactg

SEQ ID NO: 28869 - DNA, 73 bp, Homo sapiens
taaagagaaggctgttttgtttttgctcttcactgtaagtttttcaatacttctaggtgatcttgggcatgta

SEQ ID NO: 28870 - DNA, 73 bp, Homo sapiens
gttttgtttttgctcttcactgtaagtttttcaatacttctaggtgatcttgggcatgtaacaaggatctcca

SEQ ID NO: 28871 - DNA, 75 bp, Homo sapiens
tttttgctcttcactgtaagtttttcaatacttctaggtgatcttgggcatgtaacaaggatctccagtccacaa

SEQ ID NO: 28872 - DNA, 73 bp, Homo sapiens
actgtaagtttttcaatacttctaggtgatcttgggcatgtaacaaggatctccagtccacaagttgaagagg

SEQ ID NO: 28873 - DNA, 75 bp, Homo sapiens
ttcaatacttctaggtgatcttgggcatgtaacaaggatctccagtccacaagttgaagagggcgatagtcgttt

SEQ ID NO: 28874 - DNA, 76 bp, Homo sapiens
ttctaggtgatcttgggcatgtaacaaggatctccagtccacaagttgaagagggcgatagtcgttttcttgcaaa

SEQ ID NO: 28875 - DNA, 74 bp, Homo sapiens
atcttgggcatgtaacaaggatctccagtccacaagttgaagagggcgatagtcgttttcttgcaaatgaagtt

SEQ ID NO: 28876 - DNA, 73 bp, Homo sapiens
atgtaacaaggatctccagtccacaagttgaagagggcgatagtcgttttcttgcaaatgaagttttacagga

SEQ ID NO: 28877 - DNA, 70 bp, Homo sapiens
atctccagtccacaagttgaagagggcgatagtcgttttcttgcaaatgaagttttacaggaggtaattt

SEQ ID NO: 28878 - DNA, 68 bp, Homo sapiens
acaagttgaagagggcgatagtcgttttcttgcaaatgaagttttacaggaggtaatttttcttctcc

SEQ ID NO: 28879 - DNA, 68 bp, Homo sapiens
aagagggcgatagtcgttttcttgcaaatgaagttttacaggaggtaatttttcttctcccttaatca

SEQ ID NO: 28880 - DNA, 68 bp, Homo sapiens
gtcgttttcttgcaaatgaagttttacaggaggtaatttttcttctcccttaatcatagtttgctttg

SEQ ID NO: 28881 - DNA, 70 bp, Homo sapiens
aaaattgttttaattttacagaattatacccatctaccaaaagcagatatttttgcgcttgccctcacag

SEQ ID NO: 28882 - DNA, 74 bp, Homo sapiens
gttttaattttacagaattatacccatctaccaaaagcagatatttttgcgcttgccctcacagtggtatgtgc

SEQ ID NO: 28883 - DNA, 80 bp, Homo sapiens
ttacagaattatacccatctaccaaaagcagatatttttgcgcttgccctcacagtggtatgtgctgctggtgctgaacc

SEQ ID NO: 28884 - DNA, 81 bp, Homo sapiens
catctaccaaaagcagatatttttgcgcttgccctcacagtggtatgtgctgctggtgctgaacctcttccgagaaatgga

SEQ ID NO: 28885 - DNA, 81 bp, Homo sapiens
aaaagcagatatttttgcgcttgccctcacagtggtatgtgctgctggtgctgaacctcttccgagaaatggagatcaatg

SEQ ID NO: 28886 - DNA, 84 bp, Homo sapiens
atatttttgcgcttgccctcacagtggtatgtgctgctggtgctgaacctcttccgagaaatggagatcaatggcatgaaatca

SEQ ID NO: 28887 - DNA, 85 bp, Homo sapiens
tgccctcacagtggtatgtgctgctggtgctgaacctcttccgagaaatggagatcaatggcatgaaatcagacagggtagatta

SEQ ID NO: 28888 - DNA, 83 bp, Homo sapiens
tggtatgtgctgctggtgctgaacctcttccgagaaatggagatcaatggcatgaaatcagacagggtagattacctcggata

SEQ ID NO: 28889 - DNA, 80 bp, Homo sapiens
tgctggtgctgaacctcttccgagaaatggagatcaatggcatgaaatcagacagggtagattacctcggataccacaag

SEQ ID NO: 28890 - DNA, 78 bp, Homo sapiens
tgaacctcttccgagaaatggagatcaatggcatgaaatcagacagggtagattacctcggataccacaagtgctttc

SEQ ID NO: 28891 - DNA, 76 bp, Homo sapiens
cgagaaatggagatcaatggcatgaaatcagacagggtagattacctcggataccacaagtgctttcccaagaatt

SEQ ID NO: 28892 - DNA, 77 bp, Homo sapiens
aatggagatcaatggcatgaaatcagacagggtagattacctcggataccacaagtgctttcccaagaatttacaga

SEQ ID NO: 28893 - DNA, 73 bp, Homo sapiens
catgaaatcagacagggtagattacctcggataccacaagtgctttcccaagaatttacagagttgctaaaag

SEQ ID NO: 28894 - DNA, 72 bp, Homo sapiens
agacagggtagattacctcggataccacaagtgctttcccaagaatttacagagttgctaaaagtgagcatt

SEQ ID NO: 28895 - DNA, 73 bp, Homo sapiens
ggtagattacctcggataccacaagtgctttcccaagaatttacagagttgctaaaagtgagcattttatata

SEQ ID NO: 28896 - DNA, 75 bp, Homo sapiens
gataccacaagtgctttcccaagaatttacagagttgctaaaagtgagcattttatatatgaagccctttattga

SEQ ID NO: 28897 - DNA, 73 bp, Homo sapiens
tttattaaatgcatgtctttaccttcattttacttttctttttaaggttatgattcatccagatccagagaga

SEQ ID NO: 28898 - DNA, 74 bp, Homo sapiens
atgcatgtctttaccttcattttacttttctttttaaggttatgattcatccagatccagagagaagaccttca

SEQ ID NO: 28899 - DNA, 74 bp, Homo sapiens
tttaccttcattttacttttctttttaaggttatgattcatccagatccagagagaagaccttcagcaatggca

SEQ ID NO: 28900 - DNA, 77 bp, Homo sapiens
ttacttttctttttaaggttatgattcatccagatccagagagaagaccttcagcaatggcactggtaaagcattca

SEQ ID NO: 28901 - DNA, 80 bp, Homo sapiens
ttctttttaaggttatgattcatccagatccagagagaagaccttcagcaatggcactggtaaagcattcagtattgctg

SEQ ID NO: 28902 - DNA, 83 bp, Homo sapiens
atgattcatccagatccagagagaagaccttcagcaatggcactggtaaagcattcagtattgctgtccgcttctagaaagag

SEQ ID NO: 28903 - DNA, 82 bp, Homo sapiens
agatccagagagaagaccttcagcaatggcactggtaaagcattcagtattgctgtccgcttctagaaagagtgcagaacaa

SEQ ID NO: 28904 - DNA, 79 bp, Homo sapiens
agaagaccttcagcaatggcactggtaaagcattcagtattgctgtccgcttctagaaagagtgcagaacaattacgaa

SEQ ID NO: 28905 - DNA, 81 bp, Homo sapiens
ttcagcaatggcactggtaaagcattcagtattgctgtccgcttctagaaagagtgcagaacaattacgaatagaattgaa

SEQ ID NO: 28906 - DNA, 77 bp, Homo sapiens
actggtaaagcattcagtattgctgtccgcttctagaaagagtgcagaacaattacgaatagaattgaatgccgaaa

SEQ ID NO: 28907 - DNA, 76 bp, Homo sapiens
cattcagtattgctgtccgcttctagaaagagtgcagaacaattacgaatagaattgaatgccgaaaagttcaaaa

SEQ ID NO: 28908 - DNA, 73 bp, Homo sapiens
agtattgctgtccgcttctagaaagagtgcagaacaattacgaatagaattgaatgccgaaaagttcaaaaat

SEQ ID NO: 28909 - DNA, 71 bp, Homo sapiens
ccgcttctagaaagagtgcagaacaattacgaatagaattgaatgccgaaaagttcaaaaattcactttta

SEQ ID NO: 28910 - DNA, 71 bp, Homo sapiens
gagtgcagaacaattacgaatagaattgaatgccgaaaagttcaaaaattcacttttacaaaagtaagtga

SEQ ID NO: 28911 - DNA, 67 bp, Homo sapiens
gaacaattacgaatagaattgaatgccgaaaagttcaaaaattcacttttacaaaagtaagtgaggg

SEQ ID NO: 28912 - DNA, 66 bp, Homo sapiens
cgaatagaattgaatgccgaaaagttcaaaaattcacttttacaaaagtaagtgagggttttatgt

SEQ ID NO: 28913 - DNA, 64 bp, Homo sapiens
tgaatgccgaaaagttcaaaaattcacttttacaaaagtaagtgagggttttatgttttctttt

SEQ ID NO: 28914 - DNA, 76 bp, Homo sapiens
tcttagaatctcttcctaggaataataccttgttttctatttttatgtcagagaactcaagaaagcacagatggca

SEQ ID NO: 28915 - DNA, 78 bp, Homo sapiens
ttcctaggaataataccttgttttctatttttatgtcagagaactcaagaaagcacagatggcaaaagctgcagctga

SEQ ID NO: 28916 - DNA, 77 bp, Homo sapiens
aataataccttgttttctatttttatgtcagagaactcaagaaagcacagatggcaaaagctgcagctgaggaaaga

SEQ ID NO: 28917 - DNA, 81 bp, Homo sapiens
ttttctatttttatgtcagagaactcaagaaagcacagatggcaaaagctgcagctgaggaaagagcactcttcactgacc

SEQ ID NO: 28918 - DNA, 84 bp, Homo sapiens
tttatgtcagagaactcaagaaagcacagatggcaaaagctgcagctgaggaaagagcactcttcactgaccggatggccacta

SEQ ID NO: 28919 - DNA, 81 bp, Homo sapiens
aactcaagaaagcacagatggcaaaagctgcagctgaggaaagagcactcttcactgaccggatggccactaggtccacca

SEQ ID NO: 28920 - DNA, 81 bp, Homo sapiens
cacagatggcaaaagctgcagctgaggaaagagcactcttcactgaccggatggccactaggtccaccacccagagtaata

SEQ ID NO: 28921 - DNA, 78 bp, Homo sapiens
aaaagctgcagctgaggaaagagcactcttcactgaccggatggccactaggtccaccacccagagtaatagaacatc

SEQ ID NO: 28922 - DNA, 77 bp, Homo sapiens
gctgaggaaagagcactcttcactgaccggatggccactaggtccaccacccagagtaatagaacatctcgacttat

SEQ ID NO: 28923 - DNA, 75 bp, Homo sapiens
aagagcactcttcactgaccggatggccactaggtccaccacccagagtaatagaacatctcgacttattggaaa

SEQ ID NO: 28924 - DNA, 75 bp, Homo sapiens
atggccactaggtccaccacccagagtaatagaacatctcgacttattggaaagaaaatgaaccgctctgtcagc

SEQ ID NO: 28925 - DNA, 74 bp, Homo sapiens
ggtccaccacccagagtaatagaacatctcgacttattggaaagaaaatgaaccgctctgtcagccttactata

SEQ ID NO: 28926 - DNA, 76 bp, Homo sapiens
taatagaacatctcgacttattggaaagaaaatgaaccgctctgtcagccttactatatactgagctactcctttc

SEQ ID NO: 28927 - DNA, 74 bp, Homo sapiens
atctcgacttattggaaagaaaatgaaccgctctgtcagccttactatatactgagctactcctttcccacctc

SEQ ID NO: 28928 - DNA, 75 bp, Homo sapiens
aaatgaaccgctctgtcagccttactatatactgagctactcctttcccacctccccctgaacactgtgacaaga

SEQ ID NO: 28929 - DNA, 74 bp, Homo sapiens
ttactatatactgagctactcctttcccacctccccctgaacactgtgacaagaggaagctaggttgaaatcac

SEQ ID NO: 28930 - DNA, 75 bp, Homo sapiens
actgagctactcctttcccacctccccctgaacactgtgacaagaggaagctaggttgaaatcactgatagaatc

SEQ ID NO: 28931 - DNA, 76 bp, Homo sapiens
ccctgaacactgtgacaagaggaagctaggttgaaatcactgatagaatccagtttgcaattactttctcgattgg

SEQ ID NO: 28932 - DNA, 77 bp, Homo sapiens
tgtgacaagaggaagctaggttgaaatcactgatagaatccagtttgcaattactttctcgattggtgtcagtagtt

SEQ ID NO: 28933 - DNA, 74 bp, Homo sapiens
aagaggaagctaggttgaaatcactgatagaatccagtttgcaattactttctcgattggtgtcagtagtttta

SEQ ID NO: 28934 - DNA, 74 bp, Homo sapiens
gttgaaatcactgatagaatccagtttgcaattactttctcgattggtgtcagtagttttactgattaggactt

SEQ ID NO: 28935 - DNA, 76 bp, Homo sapiens
tcactgatagaatccagtttgcaattactttctcgattggtgtcagtagttttactgattaggacttttattgtga

SEQ ID NO: 28936 - DNA, 73 bp, Homo sapiens
gaatccagtttgcaattactttctcgattggtgtcagtagttttactgattaggacttttattgtgaattaca

SEQ ID NO: 28937 - DNA, 73 bp, Homo sapiens
gcaattactttctcgattggtgtcagtagttttactgattaggacttttattgtgaattacagttgaaagctg

SEQ ID NO: 28938 - DNA, 75 bp, Homo sapiens
cgattggtgtcagtagttttactgattaggacttttattgtgaattacagttgaaagctgtattttgatgattgc

SEQ ID NO: 28939 - DNA, 78 bp, Homo sapiens
tgtcagtagttttactgattaggacttttattgtgaattacagttgaaagctgtattttgatgattgctatgtcaggc

SEQ ID NO: 28940 - DNA, 79 bp, Homo sapiens
ttactgattaggacttttattgtgaattacagttgaaagctgtattttgatgattgctatgtcaggctttcatctaatc

SEQ ID NO: 28941 - DNA, 78 bp, Homo sapiens
acttttattgtgaattacagttgaaagctgtattttgatgattgctatgtcaggctttcatctaatcttaccagtctg

SEQ ID NO: 28942 - DNA, 81 bp, Homo sapiens
attgtgaattacagttgaaagctgtattttgatgattgctatgtcaggctttcatctaatcttaccagtctgtcttctgta

SEQ ID NO: 28943 - DNA, 83 bp, Homo sapiens
ttgaaagctgtattttgatgattgctatgtcaggctttcatctaatcttaccagtctgtcttctgtaggatgtgtcactgttg

SEQ ID NO: 28944 - DNA, 80 bp, Homo sapiens
attgctatgtcaggctttcatctaatcttaccagtctgtcttctgtaggatgtgtcactgttggatgttacaccagcctt

SEQ ID NO: 28945 - DNA, 79 bp, Homo sapiens
atgtcaggctttcatctaatcttaccagtctgtcttctgtaggatgtgtcactgttggatgttacaccagcctttccag

SEQ ID NO: 28946 - DNA, 78 bp, Homo sapiens
tcttctgtaggatgtgtcactgttggatgttacaccagcctttccagggttaaccactgtggtggtgtgctgcttata

SEQ ID NO: 28947 - DNA, 76 bp, Homo sapiens
atgtgtcactgttggatgttacaccagcctttccagggttaaccactgtggtggtgtgctgcttatagtttgctgt

SEQ ID NO: 28948 - DNA, 77 bp, Homo sapiens
ttggatgttacaccagcctttccagggttaaccactgtggtggtgtgctgcttatagtttgctgttgcattgtaata

SEQ ID NO: 28949 - DNA, 74 bp, Homo sapiens
gttacaccagcctttccagggttaaccactgtggtggtgtgctgcttatagtttgctgttgcattgtaataaaa

SEQ ID NO: 28950 - DNA, 73 bp, Homo sapiens
ctttccagggttaaccactgtggtggtgtgctgcttatagtttgctgttgcattgtaataaaaggtgtctttc

SEQ ID NO: 28951 - DNA, 75 bp, Homo sapiens
ttaaccactgtggtggtgtgctgcttatagtttgctgttgcattgtaataaaaggtgtctttccctgtagtgacc

SEQ ID NO: 28952 - DNA, 74 bp, Homo sapiens
tggtgtgctgcttatagtttgctgttgcattgtaataaaaggtgtctttccctgtagtgacctgtaaaaagtac

SEQ ID NO: 28953 - DNA, 70 bp, Homo sapiens
cttatagtttgctgttgcattgtaataaaaggtgtctttccctgtagtgacctgtaaaaagtactcaagg

SEQ ID NO: 28954 - DNA, 71 bp, Homo sapiens
ttgctgttgcattgtaataaaaggtgtctttccctgtagtgacctgtaaaaagtactcaagggctttatta

SEQ ID NO: 28955 - DNA, 70 bp, Homo sapiens
cattgtaataaaaggtgtctttccctgtagtgacctgtaaaaagtactcaagggctttattacagacata

SEQ ID NO: 28956 - DNA, 67 bp, Homo sapiens
aaaaggtgtctttccctgtagtgacctgtaaaaagtactcaagggctttattacagacataccctcc

SEQ ID NO: 28957 - DNA, 67 bp, Homo sapiens
acctgtaaaaagtactcaagggctttattacagacataccctccctttgaaaagggacatgctaaaa

SEQ ID NO: 28958 - DNA, 69 bp, Homo sapiens
aaaagtactcaagggctttattacagacataccctccctttgaaaagggacatgctaaaagactcatta

SEQ ID NO: 28959 - DNA, 73 bp, Homo sapiens
ctttattacagacataccctccctttgaaaagggacatgctaaaagactcattactactcagccttcaatgta

SEQ ID NO: 28960 - DNA, 74 bp, Homo sapiens
ttacagacataccctccctttgaaaagggacatgctaaaagactcattactactcagccttcaatgtacctgtg

SEQ ID NO: 28961 - DNA, 75 bp, Homo sapiens
tccctttgaaaagggacatgctaaaagactcattactactcagccttcaatgtacctgtgtgtccatcttatatt

SEQ ID NO: 28962 - DNA, 73 bp, Homo sapiens
aaaagggacatgctaaaagactcattactactcagccttcaatgtacctgtgtgtccatcttatatttctttt

SEQ ID NO: 28963 - DNA, 79 bp, Homo sapiens
ttttttaattgtgaattagacttgtatatcccactgggagcactttgtaggcattgcatgaaccatgggatgatgattc

SEQ ID NO: 28964 - DNA, 82 bp, Homo sapiens
ttgtgaattagacttgtatatcccactgggagcactttgtaggcattgcatgaaccatgggatgatgattctgtggaggtat

SEQ ID NO: 28965 - DNA, 83 bp, Homo sapiens
ccactgggagcactttgtaggcattgcatgaaccatgggatgatgattctgtggaggtattgccttgtgaatttgctgctatt

SEQ ID NO: 28966 - DNA, 80 bp, Homo sapiens
cactttgtaggcattgcatgaaccatgggatgatgattctgtggaggtattgccttgtgaatttgctgctattttagttt

SEQ ID NO: 28967 - DNA, 81 bp, Homo sapiens
tgtaggcattgcatgaaccatgggatgatgattctgtggaggtattgccttgtgaatttgctgctattttagttttgtctt

SEQ ID NO: 28968 - DNA, 78 bp, Homo sapiens
atgaaccatgggatgatgattctgtggaggtattgccttgtgaatttgctgctattttagttttgtctttgctgtaaa

SEQ ID NO: 28969 - DNA, 78 bp, Homo sapiens
tgatgattctgtggaggtattgccttgtgaatttgctgctattttagttttgtctttgctgtaaacttgtagcattaa

SEQ ID NO: 28970 - DNA, 76 bp, Homo sapiens
tgtggaggtattgccttgtgaatttgctgctattttagttttgtctttgctgtaaacttgtagcattaaacaatca

SEQ ID NO: 28971 - DNA, 74 bp, Homo sapiens
ggtattgccttgtgaatttgctgctattttagttttgtctttgctgtaaacttgtagcattaaacaatcattgt

SEQ ID NO: 28972 - DNA, 74 bp, Homo sapiens
tgaatttgctgctattttagttttgtctttgctgtaaacttgtagcattaaacaatcattgttgttaataggtc

SEQ ID NO: 28973 - DNA, 70 bp, Homo sapiens
agttttgtctttgctgtaaacttgtagcattaaacaatcattgttgttaataggtcttctttttgaaaca

SEQ ID NO: 28974 - DNA, 73 bp, Homo sapiens
ttgctgtaaacttgtagcattaaacaatcattgttgttaataggtcttctttttgaaacaattatgtgaaatg

SEQ ID NO: 28975 - DNA, 74 bp, Homo sapiens
cttgtagcattaaacaatcattgttgttaataggtcttctttttgaaacaattatgtgaaatgtatagctgctt

SEQ ID NO: 28976 - DNA, 77 bp, Homo sapiens
caatcattgttgttaataggtcttctttttgaaacaattatgtgaaatgtatagctgcttttgatgaaaagcagcta

SEQ ID NO: 28977 - DNA, 75 bp, Homo sapiens
gttgttaataggtcttctttttgaaacaattatgtgaaatgtatagctgcttttgatgaaaagcagctatttgcc

SEQ ID NO: 28978 - DNA, 72 bp, Homo sapiens
aggtcttctttttgaaacaattatgtgaaatgtatagctgcttttgatgaaaagcagctatttgcctttttt

SEQ ID NO: 28979 - DNA, 71 bp, Homo sapiens
tttttcctttgaactttgaagctagtgcattggaaaaatgcaccctttccctcctttggaatgctgtatta

SEQ ID NO: 28980 - DNA, 74 bp, Homo sapiens
tttgaactttgaagctagtgcattggaaaaatgcaccctttccctcctttggaatgctgtattaatgtagtata

SEQ ID NO: 28981 - DNA, 74 bp, Homo sapiens
ttgaagctagtgcattggaaaaatgcaccctttccctcctttggaatgctgtattaatgtagtataataattac

SEQ ID NO: 28982 - DNA, 71 bp, Homo sapiens
gcattggaaaaatgcaccctttccctcctttggaatgctgtattaatgtagtataataattactggttttg

SEQ ID NO: 28983 - DNA, 70 bp, Homo sapiens
gcaccctttccctcctttggaatgctgtattaatgtagtataataattactggttttgtaacttgttctg

SEQ ID NO: 28984 - DNA, 70 bp, Homo sapiens
ccctcctttggaatgctgtattaatgtagtataataattactggttttgtaacttgttctggtaatgtcc

SEQ ID NO: 28985 - DNA, 70 bp, Homo sapiens
ggaatgctgtattaatgtagtataataattactggttttgtaacttgttctggtaatgtccttcccggac

SEQ ID NO: 28986 - DNA, 67 bp, Homo sapiens
gtattaatgtagtataataattactggttttgtaacttgttctggtaatgtccttcccggactcttt

SEQ ID NO: 28987 - DNA, 65 bp, Homo sapiens
aataattactggttttgtaacttgttctggtaatgtccttcccggactctttttaaatgtctccc

SEQ ID NO: 28988 - DNA, 64 bp, Homo sapiens
tggttttgtaacttgttctggtaatgtccttcccggactctttttaaatgtctccccctaagtt

SEQ ID NO: 28989 - DNA, 65 bp, Homo sapiens
tgtaacttgttctggtaatgtccttcccggactctttttaaatgtctccccctaagttttatact

SEQ ID NO: 28990 - DNA, 66 bp, Homo sapiens
ctggtaatgtccttcccggactctttttaaatgtctccccctaagttttatacttgattgtattat

SEQ ID NO: 28991 - DNA, 65 bp, Homo sapiens
ccttcccggactctttttaaatgtctccccctaagttttatacttgattgtattattagtctgtt

SEQ ID NO: 28992 - DNA, 65 bp, Homo sapiens
actctttttaaatgtctccccctaagttttatacttgattgtattattagtctgtttttaaatgt

SEQ ID NO: 28993 - DNA, 64 bp, Homo sapiens
gtctccccctaagttttatacttgattgtattattagtctgtttttaaatgttttgcccggttt

SEQ ID NO: 28994 - DNA, 66 bp, Homo sapiens
cctaagttttatacttgattgtattattagtctgtttttaaatgttttgcccggtttttctcttca

SEQ ID NO: 28995 - DNA, 69 bp, Homo sapiens
atacttgattgtattattagtctgtttttaaatgttttgcccggtttttctcttcaatatttgtgtata

SEQ ID NO: 28996 - DNA, 67 bp, Homo sapiens
attagtctgtttttaaatgttttgcccggtttttctcttcaatatttgtgtatataaaccgatcttc

SEQ ID NO: 28997 - DNA, 70 bp, Homo sapiens
ttttaaatgttttgcccggtttttctcttcaatatttgtgtatataaaccgatcttcgtgatactgtaca

SEQ ID NO: 28998 - DNA, 74 bp, Homo sapiens
tgttttgcccggtttttctcttcaatatttgtgtatataaaccgatcttcgtgatactgtacatagctgtttga

SEQ ID NO: 28999 - DNA, 78 bp, Homo sapiens
ttttctcttcaatatttgtgtatataaaccgatcttcgtgatactgtacatagctgtttgaaatgccagaatgacttc

SEQ ID NO: 29000 - DNA, 79 bp, Homo sapiens
aatatttgtgtatataaaccgatcttcgtgatactgtacatagctgtttgaaatgccagaatgacttctgacattccaa

SEQ ID NO: 29001 - DNA, 78 bp, Homo sapiens
tgtgtatataaaccgatcttcgtgatactgtacatagctgtttgaaatgccagaatgacttctgacattccaagtttt

SEQ ID NO: 29002 - DNA, 76 bp, Homo sapiens
aaaccgatcttcgtgatactgtacatagctgtttgaaatgccagaatgacttctgacattccaagtttttcacaaa

SEQ ID NO: 29003 - DNA, 77 bp, Homo sapiens
cgtgatactgtacatagctgtttgaaatgccagaatgacttctgacattccaagtttttcacaaaatatattttatc

SEQ ID NO: 29004 - DNA, 79 bp, Homo sapiens
tacatagctgtttgaaatgccagaatgacttctgacattccaagtttttcacaaaatatattttatctgtgattagcca

SEQ ID NO: 29005 - DNA, 76 bp, Homo sapiens
gtttgaaatgccagaatgacttctgacattccaagtttttcacaaaatatattttatctgtgattagccatttgac

SEQ ID NO: 29006 - DNA, 76 bp, Homo sapiens
gaatgacttctgacattccaagtttttcacaaaatatattttatctgtgattagccatttgactaataatactggc

SEQ ID NO: 29007 - DNA, 77 bp, Homo sapiens
tctgacattccaagtttttcacaaaatatattttatctgtgattagccatttgactaataatactggctaacagatg

SEQ ID NO: 29008 - DNA, 74 bp, Homo sapiens
ccaagtttttcacaaaatatattttatctgtgattagccatttgactaataatactggctaacagatgttgaaa

SEQ ID NO: 29009 - DNA, 74 bp, Homo sapiens
aatatattttatctgtgattagccatttgactaataatactggctaacagatgttgaaaaaaattgtctgtttg

SEQ ID NO: 29010 - DNA, 72 bp, Homo sapiens
attttatctgtgattagccatttgactaataatactggctaacagatgttgaaaaaaattgtctgtttgttt

SEQ ID NO: 29011 - DNA, 70 bp, Homo sapiens
gactaataatactggctaacagatgttgaaaaaaattgtctgtttgttttctcattaattttggtctaaa

SEQ ID NO: 29012 - DNA, 71 bp, Homo sapiens
ctggctaacagatgttgaaaaaaattgtctgtttgttttctcattaattttggtctaaaacatgtttgcac

SEQ ID NO: 29013 - DNA, 71 bp, Homo sapiens
gatgttgaaaaaaattgtctgtttgttttctcattaattttggtctaaaacatgtttgcacttgtctttga

SEQ ID NO: 29014 - DNA, 69 bp, Homo sapiens
aaattgtctgtttgttttctcattaattttggtctaaaacatgtttgcacttgtctttgacttgtgttt

SEQ ID NO: 29015 - DNA, 70 bp, Homo sapiens
gtctgtttgttttctcattaattttggtctaaaacatgtttgcacttgtctttgacttgtgttttattaa

SEQ ID NO: 29016 - DNA, 74 bp, Homo sapiens
ttctcattaattttggtctaaaacatgtttgcacttgtctttgacttgtgttttattaacattgattggcatat

SEQ ID NO: 29017 - DNA, 75 bp, Homo sapiens
acatgtttgcacttgtctttgacttgtgttttattaacattgattggcatattaaaagtcactctgagcttacct

SEQ ID NO: 29018 - DNA, 75 bp, Homo sapiens
gcacttgtctttgacttgtgttttattaacattgattggcatattaaaagtcactctgagcttaccttaattgtc

SEQ ID NO: 29019 - DNA, 74 bp, Homo sapiens
cttgtgttttattaacattgattggcatattaaaagtcactctgagcttaccttaattgtctaaatccttgtga

SEQ ID NO: 29020 - DNA, 76 bp, Homo sapiens
cattgattggcatattaaaagtcactctgagcttaccttaattgtctaaatccttgtgatgcctgttttctaatat

SEQ ID NO: 29021 - DNA, 74 bp, Homo sapiens
catattaaaagtcactctgagcttaccttaattgtctaaatccttgtgatgcctgttttctaatattttatctc

SEQ ID NO: 29022 - DNA, 72 bp, Homo sapiens
ggcccggacgggtcggtggcgtagacgcggagcgcgcagctcacacctggcggccgcggtttccaggaggaa

SEQ ID NO: 29023 - DNA, 78 bp, Homo sapiens
tcggtggcgtagacgcggagcgcgcagctcacacctggcggccgcggtttccaggaggaagcaaggatgctttggaca

SEQ ID NO: 29024 - DNA, 79 bp, Homo sapiens
gtagacgcggagcgcgcagctcacacctggcggccgcggtttccaggaggaagcaaggatgctttggacactgtgcgtg

SEQ ID NO: 29025 - DNA, 78 bp, Homo sapiens
cgcagctcacacctggcggccgcggtttccaggaggaagcaaggatgctttggacactgtgcgtggcgcctccgcgga

SEQ ID NO: 29026 - DNA, 76 bp, Homo sapiens
ctcacacctggcggccgcggtttccaggaggaagcaaggatgctttggacactgtgcgtggcgcctccgcggagcc

SEQ ID NO: 29027 - DNA, 76 bp, Homo sapiens
cgcggtttccaggaggaagcaaggatgctttggacactgtgcgtggcgcctccgcggagcccccgcgctgccattc

SEQ ID NO: 29028 - DNA, 75 bp, Homo sapiens
aggaggaagcaaggatgctttggacactgtgcgtggcgcctccgcggagcccccgcgctgccattcccggccgtc

SEQ ID NO: 29029 - DNA, 74 bp, Homo sapiens
aaggatgctttggacactgtgcgtggcgcctccgcggagcccccgcgctgccattcccggccgtcgctcggtcc

SEQ ID NO: 29030 - DNA, 73 bp, Homo sapiens
actgtgcgtggcgcctccgcggagcccccgcgctgccattcccggccgtcgctcggtcctccgctgacgggaa

SEQ ID NO: 29031 - DNA, 72 bp, Homo sapiens
cgcctccgcggagcccccgcgctgccattcccggccgtcgctcggtcctccgctgacgggaagcaggaagtg

SEQ ID NO: 29032 - DNA, 72 bp, Homo sapiens
ccccgcgctgccattcccggccgtcgctcggtcctccgctgacgggaagcaggaagtggcggcgggcgtcgc

SEQ ID NO: 29033 - DNA, 75 bp, Homo sapiens
tgccattcccggccgtcgctcggtcctccgctgacgggaagcaggaagtggcggcgggcgtcgcgagcggtgaca

SEQ ID NO: 29034 - DNA, 73 bp, Homo sapiens
cccggccgtcgctcggtcctccgctgacgggaagcaggaagtggcggcgggcgtcgcgagcggtgacatcacg

SEQ ID NO: 29035 - DNA, 73 bp, Homo sapiens
ctcggtcctccgctgacgggaagcaggaagtggcggcgggcgtcgcgagcggtgacatcacgggggcgacggc

SEQ ID NO: 29036 - DNA, 72 bp, Homo sapiens
tgacgggaagcaggaagtggcggcgggcgtcgcgagcggtgacatcacgggggcgacggcggcgaagggcgg

SEQ ID NO: 29037 - DNA, 70 bp, Homo sapiens
aagcaggaagtggcggcgggcgtcgcgagcggtgacatcacgggggcgacggcggcgaagggcgggggcg

SEQ ID NO: 29038 - DNA, 72 bp, Homo sapiens
tggcggcgggcgtcgcgagcggtgacatcacgggggcgacggcggcgaagggcgggggcggaggaggagcga

SEQ ID NO: 29039 - DNA, 70 bp, Homo sapiens
cgtcgcgagcggtgacatcacgggggcgacggcggcgaagggcgggggcggaggaggagcgagccgggcc

SEQ ID NO: 29040 - DNA, 66 bp, Homo sapiens
cggtgacatcacgggggcgacggcggcgaagggcgggggcggaggaggagcgagccgggccggggg

SEQ ID NO: 29041 - DNA, 70 bp, Homo sapiens
gggcgacggcggcgaagggcgggggcggaggaggagcgagccgggccggggggcagctgcacagtctccg

SEQ ID NO: 29042 - DNA, 70 bp, Homo sapiens
cggcggcgaagggcgggggcggaggaggagcgagccgggccggggggcagctgcacagtctccgggatcc

SEQ ID NO: 29043 - DNA, 70 bp, Homo sapiens
cgggggcggaggaggagcgagccgggccggggggcagctgcacagtctccgggatccccaggcctggagg

SEQ ID NO: 29044 - DNA, 71 bp, Homo sapiens
ggaggaggagcgagccgggccggggggcagctgcacagtctccgggatccccaggcctggaggggggtctg

SEQ ID NO: 29045 - DNA, 71 bp, Homo sapiens
ccgggccggggggcagctgcacagtctccgggatccccaggcctggaggggggtctgtgcgcggccggctg

SEQ ID NO: 29046 - DNA, 76 bp, Homo sapiens
ggcagctgcacagtctccgggatccccaggcctggaggggggtctgtgcgcggccggctggctctgccccgcgtcc

SEQ ID NO: 29047 - DNA, 71 bp, Homo sapiens
tccgggatccccaggcctggaggggggtctgtgcgcggccggctggctctgccccgcgtccggtcccgagc

SEQ ID NO: 29048 - DNA, 69 bp, Homo sapiens
cctggaggggggtctgtgcgcggccggctggctctgccccgcgtccggtcccgagcgggcctccctcgg

SEQ ID NO: 29049 - DNA, 74 bp, Homo sapiens
ggtctgtgcgcggccggctggctctgccccgcgtccggtcccgagcgggcctccctcgggccagcccgatgtga

SEQ ID NO: 29050 - DNA, 73 bp, Homo sapiens
gtgcgcggccggctggctctgccccgcgtccggtcccgagcgggcctccctcgggccagcccgatgtgaccga

SEQ ID NO: 29051 - DNA, 74 bp, Homo sapiens
gctctgccccgcgtccggtcccgagcgggcctccctcgggccagcccgatgtgaccgagcccagcggagcctga

SEQ ID NO: 29052 - DNA, 73 bp, Homo sapiens
ccgcgtccggtcccgagcgggcctccctcgggccagcccgatgtgaccgagcccagcggagcctgagcaagga

SEQ ID NO: 29053 - DNA, 74 bp, Homo sapiens
tcccgagcgggcctccctcgggccagcccgatgtgaccgagcccagcggagcctgagcaaggagcgggtccgtc

SEQ ID NO: 29054 - DNA, 74 bp, Homo sapiens
ctccctcgggccagcccgatgtgaccgagcccagcggagcctgagcaaggagcgggtccgtcgcggagccggag

SEQ ID NO: 29055 - DNA, 74 bp, Homo sapiens
ccagcccgatgtgaccgagcccagcggagcctgagcaaggagcgggtccgtcgcggagccggagggcgggagga

SEQ ID NO: 29056 - DNA, 76 bp, Homo sapiens
atgtgaccgagcccagcggagcctgagcaaggagcgggtccgtcgcggagccggagggcgggaggaacatgacatc

SEQ ID NO: 29057 - DNA, 70 bp, Homo sapiens
aaggagcgggtccgtcgcggagccggagggcgggaggaacatgacatcgcggaggtgaggagccccgagg

SEQ ID NO: 29058 - DNA, 71 bp, Homo sapiens
gtccgtcgcggagccggagggcgggaggaacatgacatcgcggaggtgaggagccccgaggggcccggcgc

SEQ ID NO: 29059 - DNA, 69 bp, Homo sapiens
gctgacagtgtcttgtttttttattacttactttgtctttctttttaagatggtttcacccaaatatca

SEQ ID NO: 29060 - DNA, 67 bp, Homo sapiens
tgtttttttattacttactttgtctttctttttaagatggtttcacccaaatatcactggtgtggag

SEQ ID NO: 29061 - DNA, 69 bp, Homo sapiens
ttttattacttactttgtctttctttttaagatggtttcacccaaatatcactggtgtggaggcagaaa

SEQ ID NO: 29062 - DNA, 72 bp, Homo sapiens
ttgtctttctttttaagatggtttcacccaaatatcactggtgtggaggcagaaaacctactgttgacaaga

SEQ ID NO: 29063 - DNA, 73 bp, Homo sapiens
tttttaagatggtttcacccaaatatcactggtgtggaggcagaaaacctactgttgacaagaggagttgatg

SEQ ID NO: 29064 - DNA, 73 bp, Homo sapiens
tggtttcacccaaatatcactggtgtggaggcagaaaacctactgttgacaagaggagttgatggcagttttt

SEQ ID NO: 29065 - DNA, 74 bp, Homo sapiens
ccaaatatcactggtgtggaggcagaaaacctactgttgacaagaggagttgatggcagttttttggcaaggcc

SEQ ID NO: 29066 - DNA, 72 bp, Homo sapiens
tgtggaggcagaaaacctactgttgacaagaggagttgatggcagttttttggcaaggcctagtaaaagtaa

SEQ ID NO: 29067 - DNA, 68 bp, Homo sapiens
agaaaacctactgttgacaagaggagttgatggcagttttttggcaaggcctagtaaaagtaaccctg

SEQ ID NO: 29068 - DNA, 71 bp, Homo sapiens
tgttgacaagaggagttgatggcagttttttggcaaggcctagtaaaagtaaccctggagacttcacactt

SEQ ID NO: 29069 - DNA, 68 bp, Homo sapiens
aggagttgatggcagttttttggcaaggcctagtaaaagtaaccctggagacttcacactttccgtta

SEQ ID NO: 29070 - DNA, 66 bp, Homo sapiens
tggcagttttttggcaaggcctagtaaaagtaaccctggagacttcacactttccgttaggtaagt

SEQ ID NO: 29071 - DNA, 68 bp, Homo sapiens
tggcaaggcctagtaaaagtaaccctggagacttcacactttccgttaggtaagttggaatgaaaaga

SEQ ID NO: 29072 - DNA, 66 bp, Homo sapiens
aggcctagtaaaagtaaccctggagacttcacactttccgttaggtaagttggaatgaaaagagag

SEQ ID NO: 29073 - DNA, 71 bp, Homo sapiens
taactctttatttgtccccttgcctccctttccaatggactattttagaagaaatggagctgtcacccaca

SEQ ID NO: 29074 - DNA, 74 bp, Homo sapiens
ttatttgtccccttgcctccctttccaatggactattttagaagaaatggagctgtcacccacatcaagattca

SEQ ID NO: 29075 - DNA, 76 bp, Homo sapiens
ccttgcctccctttccaatggactattttagaagaaatggagctgtcacccacatcaagattcagaacactggtga

SEQ ID NO: 29076 - DNA, 79 bp, Homo sapiens
ttccaatggactattttagaagaaatggagctgtcacccacatcaagattcagaacactggtgattactatgacctgta

SEQ ID NO: 29077 - DNA, 77 bp, Homo sapiens
actattttagaagaaatggagctgtcacccacatcaagattcagaacactggtgattactatgacctgtatggaggg

SEQ ID NO: 29078 - DNA, 78 bp, Homo sapiens
aagaaatggagctgtcacccacatcaagattcagaacactggtgattactatgacctgtatggaggggagaaatttgc

SEQ ID NO: 29079 - DNA, 78 bp, Homo sapiens
tcacccacatcaagattcagaacactggtgattactatgacctgtatggaggggagaaatttgccactttggctgagt

SEQ ID NO: 29080 - DNA, 77 bp, Homo sapiens
atcaagattcagaacactggtgattactatgacctgtatggaggggagaaatttgccactttggctgagttggtcca

SEQ ID NO: 29081 - DNA, 75 bp, Homo sapiens
aacactggtgattactatgacctgtatggaggggagaaatttgccactttggctgagttggtccagtattacatg

SEQ ID NO: 29082 - DNA, 75 bp, Homo sapiens
attactatgacctgtatggaggggagaaatttgccactttggctgagttggtccagtattacatggaacatcacg

SEQ ID NO: 29083 - DNA, 74 bp, Homo sapiens
cctgtatggaggggagaaatttgccactttggctgagttggtccagtattacatggaacatcacgggcaattaa

SEQ ID NO: 29084 - DNA, 72 bp, Homo sapiens
aggggagaaatttgccactttggctgagttggtccagtattacatggaacatcacgggcaattaaaagagaa

SEQ ID NO: 29085 - DNA, 74 bp, Homo sapiens
aaatttgccactttggctgagttggtccagtattacatggaacatcacgggcaattaaaagagaagaatggaga

SEQ ID NO: 29086 - DNA, 79 bp, Homo sapiens
tggctgagttggtccagtattacatggaacatcacgggcaattaaaagagaagaatggagatgtcattgagcttaaata

SEQ ID NO: 29087 - DNA, 76 bp, Homo sapiens
agttggtccagtattacatggaacatcacgggcaattaaaagagaagaatggagatgtcattgagcttaaatatcc

SEQ ID NO: 29088 - DNA, 82 bp, Homo sapiens
tattacatggaacatcacgggcaattaaaagagaagaatggagatgtcattgagcttaaatatcctctgaactgtgcagatc

SEQ ID NO: 29089 - DNA, 80 bp, Homo sapiens
atcacgggcaattaaaagagaagaatggagatgtcattgagcttaaatatcctctgaactgtgcagatcctacctctgaa

SEQ ID NO: 29090 - DNA, 79 bp, Homo sapiens
ttaaaagagaagaatggagatgtcattgagcttaaatatcctctgaactgtgcagatcctacctctgaaaggtcagtaa

SEQ ID NO: 29091 - DNA, 78 bp, Homo sapiens
aagaatggagatgtcattgagcttaaatatcctctgaactgtgcagatcctacctctgaaaggtcagtaacattttag

SEQ ID NO: 29092 - DNA, 78 bp, Homo sapiens
atgtcattgagcttaaatatcctctgaactgtgcagatcctacctctgaaaggtcagtaacattttagtgaccacaaa

SEQ ID NO: 29093 - DNA, 78 bp, Homo sapiens
cttaaatatcctctgaactgtgcagatcctacctctgaaaggtcagtaacattttagtgaccacaaagtctgctgctc

SEQ ID NO: 29094 - DNA, 69 bp, Homo sapiens
tttttaaaaactttaggtggtttcatggacatctctctgggaaagaagcagagaaattattaactgaaa

SEQ ID NO: 29095 - DNA, 69 bp, Homo sapiens
aaaaactttaggtggtttcatggacatctctctgggaaagaagcagagaaattattaactgaaaaagga

SEQ ID NO: 29096 - DNA, 70 bp, Homo sapiens
ggtttcatggacatctctctgggaaagaagcagagaaattattaactgaaaaaggaaaacatggtagttt

SEQ ID NO: 29097 - DNA, 70 bp, Homo sapiens
ggacatctctctgggaaagaagcagagaaattattaactgaaaaaggaaaacatggtagttttcttgtac

SEQ ID NO: 29098 - DNA, 71 bp, Homo sapiens
tgggaaagaagcagagaaattattaactgaaaaaggaaaacatggtagttttcttgtacgagagagccaga

SEQ ID NO: 29099 - DNA, 70 bp, Homo sapiens
agagaaattattaactgaaaaaggaaaacatggtagttttcttgtacgagagagccagagccaccctgga

SEQ ID NO: 29100 - DNA, 69 bp, Homo sapiens
attattaactgaaaaaggaaaacatggtagttttcttgtacgagagagccagagccaccctggagattt

SEQ ID NO: 29101 - DNA, 69 bp, Homo sapiens
aaaaaggaaaacatggtagttttcttgtacgagagagccagagccaccctggagattttgttctttctg

SEQ ID NO: 29102 - DNA, 77 bp, Homo sapiens
atggtagttttcttgtacgagagagccagagccaccctggagattttgttctttctgtgcgcactggtgatgacaaa

SEQ ID NO: 29103 - DNA, 77 bp, Homo sapiens
ttttcttgtacgagagagccagagccaccctggagattttgttctttctgtgcgcactggtgatgacaaaggggaga

SEQ ID NO: 29104 - DNA, 80 bp, Homo sapiens
gagccagagccaccctggagattttgttctttctgtgcgcactggtgatgacaaaggggagagcaatgacggcaagtcta

SEQ ID NO: 29105 - DNA, 77 bp, Homo sapiens
caccctggagattttgttctttctgtgcgcactggtgatgacaaaggggagagcaatgacggcaagtctaaagtgac

SEQ ID NO: 29106 - DNA, 78 bp, Homo sapiens
attttgttctttctgtgcgcactggtgatgacaaaggggagagcaatgacggcaagtctaaagtgacccatgttatga

SEQ ID NO: 29107 - DNA, 82 bp, Homo sapiens
ttctttctgtgcgcactggtgatgacaaaggggagagcaatgacggcaagtctaaagtgacccatgttatgattcgctgtca

SEQ ID NO: 29108 - DNA, 78 bp, Homo sapiens
actggtgatgacaaaggggagagcaatgacggcaagtctaaagtgacccatgttatgattcgctgtcaggtaaatctc

SEQ ID NO: 29109 - DNA, 76 bp, Homo sapiens
acaaaggggagagcaatgacggcaagtctaaagtgacccatgttatgattcgctgtcaggtaaatctccagttgaa

SEQ ID NO: 29110 - DNA, 76 bp, Homo sapiens
agagcaatgacggcaagtctaaagtgacccatgttatgattcgctgtcaggtaaatctccagttgaaaaatgggtc

SEQ ID NO: 29111 - DNA, 76 bp, Homo sapiens
atgacggcaagtctaaagtgacccatgttatgattcgctgtcaggtaaatctccagttgaaaaatgggtctggcaa

SEQ ID NO: 29112 - DNA, 71 bp, Homo sapiens
taacataaaggtaacaaataataaatgtcatgtgtttatcttgaaaggaactgaaatacgacgttggtgga

SEQ ID NO: 29113 - DNA, 70 bp, Homo sapiens
aggtaacaaataataaatgtcatgtgtttatcttgaaaggaactgaaatacgacgttggtggaggagaac

SEQ ID NO: 29114 - DNA, 70 bp, Homo sapiens
aataataaatgtcatgtgtttatcttgaaaggaactgaaatacgacgttggtggaggagaacggtttgat

SEQ ID NO: 29115 - DNA, 71 bp, Homo sapiens
atgtgtttatcttgaaaggaactgaaatacgacgttggtggaggagaacggtttgattctttgacagatct

SEQ ID NO: 29116 - DNA, 72 bp, Homo sapiens
aactgaaatacgacgttggtggaggagaacggtttgattctttgacagatcttgtggaacattataagaaga

SEQ ID NO: 29117 - DNA, 73 bp, Homo sapiens
tacgacgttggtggaggagaacggtttgattctttgacagatcttgtggaacattataagaagaatcctatgg

SEQ ID NO: 29118 - DNA, 73 bp, Homo sapiens
ggagaacggtttgattctttgacagatcttgtggaacattataagaagaatcctatggtggaaacattgggta

SEQ ID NO: 29119 - DNA, 73 bp, Homo sapiens
acggtttgattctttgacagatcttgtggaacattataagaagaatcctatggtggaaacattgggtacagta

SEQ ID NO: 29120 - DNA, 78 bp, Homo sapiens
tgacagatcttgtggaacattataagaagaatcctatggtggaaacattgggtacagtactacaactcaagcaggtga

SEQ ID NO: 29121 - DNA, 77 bp, Homo sapiens
atcttgtggaacattataagaagaatcctatggtggaaacattgggtacagtactacaactcaagcaggtgagcaga

SEQ ID NO: 29122 - DNA, 77 bp, Homo sapiens
ttataagaagaatcctatggtggaaacattgggtacagtactacaactcaagcaggtgagcagattggaaagctcaa

SEQ ID NO: 29123 - DNA, 76 bp, Homo sapiens
aagaatcctatggtggaaacattgggtacagtactacaactcaagcaggtgagcagattggaaagctcaagctttc

SEQ ID NO: 29124 - DNA, 74 bp, Homo sapiens
tttctgtaatattttctttattttacatcaactgctgtactcgatcagccccttaacacgactcgtataaatgc

SEQ ID NO: 29125 - DNA, 75 bp, Homo sapiens
aatattttctttattttacatcaactgctgtactcgatcagccccttaacacgactcgtataaatgctgctgaaa

SEQ ID NO: 29126 - DNA, 78 bp, Homo sapiens
ttattttacatcaactgctgtactcgatcagccccttaacacgactcgtataaatgctgctgaaatagaaagcagagt

SEQ ID NO: 29127 - DNA, 77 bp, Homo sapiens
aactgctgtactcgatcagccccttaacacgactcgtataaatgctgctgaaatagaaagcagagttcgagaactaa

SEQ ID NO: 29128 - DNA, 77 bp, Homo sapiens
tactcgatcagccccttaacacgactcgtataaatgctgctgaaatagaaagcagagttcgagaactaagcaaatta

SEQ ID NO: 29129 - DNA, 77 bp, Homo sapiens
cccttaacacgactcgtataaatgctgctgaaatagaaagcagagttcgagaactaagcaaattagctgagaccaca

SEQ ID NO: 29130 - DNA, 78 bp, Homo sapiens
actcgtataaatgctgctgaaatagaaagcagagttcgagaactaagcaaattagctgagaccacagataaagtcaaa

SEQ ID NO: 29131 - DNA, 72 bp, Homo sapiens
aaagcagagttcgagaactaagcaaattagctgagaccacagataaagtcaaacaaggcttttgggaagaat

SEQ ID NO: 29132 - DNA, 72 bp, Homo sapiens
ttcgagaactaagcaaattagctgagaccacagataaagtcaaacaaggcttttgggaagaatttgaggtaa

SEQ ID NO: 29133 - DNA, 71 bp, Homo sapiens
ctaagcaaattagctgagaccacagataaagtcaaacaaggcttttgggaagaatttgaggtaagttatta

SEQ ID NO: 29134 - DNA, 67 bp, Homo sapiens
ctgagaccacagataaagtcaaacaaggcttttgggaagaatttgaggtaagttattaaaaaactgt

SEQ ID NO: 29135 - DNA, 64 bp, Homo sapiens
cagataaagtcaaacaaggcttttgggaagaatttgaggtaagttattaaaaaactgtttttac

SEQ ID NO: 29136 - DNA, 74 bp, Homo sapiens
tttctgtgactctttgacacgtaataatattgacttttctttctttccagacactacaacaacaggagtgcaaa

SEQ ID NO: 29137 - DNA, 74 bp, Homo sapiens
tctttgacacgtaataatattgacttttctttctttccagacactacaacaacaggagtgcaaacttctctaca

SEQ ID NO: 29138 - DNA, 73 bp, Homo sapiens
taataatattgacttttctttctttccagacactacaacaacaggagtgcaaacttctctacagccgaaaaga

SEQ ID NO: 29139 - DNA, 70 bp, Homo sapiens
acttttctttctttccagacactacaacaacaggagtgcaaacttctctacagccgaaaagagggtcaaa

SEQ ID NO: 29140 - DNA, 72 bp, Homo sapiens
tttctttccagacactacaacaacaggagtgcaaacttctctacagccgaaaagagggtcaaaggcaagaaa

SEQ ID NO: 29141 - DNA, 70 bp, Homo sapiens
agacactacaacaacaggagtgcaaacttctctacagccgaaaagagggtcaaaggcaagaaaacaaaaa

SEQ ID NO: 29142 - DNA, 73 bp, Homo sapiens
caaaaacaaaaatagatataaaaacatcctgccctgtaagtatcaatattccgctcagtaatagtcactcttg

SEQ ID NO: 29143 - DNA, 72 bp, Homo sapiens
aactgttttttcctgaagcagtccaggacttatgtgaccgtggtctctttttcttctagttgatcataccag

SEQ ID NO: 29144 - DNA, 74 bp, Homo sapiens
tttcctgaagcagtccaggacttatgtgaccgtggtctctttttcttctagttgatcataccagggttgtccta

SEQ ID NO: 29145 - DNA, 74 bp, Homo sapiens
agtccaggacttatgtgaccgtggtctctttttcttctagttgatcataccagggttgtcctacacgatggtga

SEQ ID NO: 29146 - DNA, 76 bp, Homo sapiens
cttatgtgaccgtggtctctttttcttctagttgatcataccagggttgtcctacacgatggtgatcccaatgagc

SEQ ID NO: 29147 - DNA, 79 bp, Homo sapiens
tctctttttcttctagttgatcataccagggttgtcctacacgatggtgatcccaatgagcctgtttcagattacatca

SEQ ID NO: 29148 - DNA, 80 bp, Homo sapiens
tttcttctagttgatcataccagggttgtcctacacgatggtgatcccaatgagcctgtttcagattacatcaatgcaaa

SEQ ID NO: 29149 - DNA, 84 bp, Homo sapiens
ttgatcataccagggttgtcctacacgatggtgatcccaatgagcctgtttcagattacatcaatgcaaatatcatcatggtaa

SEQ ID NO: 29150 - DNA, 81 bp, Homo sapiens
ggttgtcctacacgatggtgatcccaatgagcctgtttcagattacatcaatgcaaatatcatcatggtaagctttgcttt

SEQ ID NO: 29151 - DNA, 81 bp, Homo sapiens
acgatggtgatcccaatgagcctgtttcagattacatcaatgcaaatatcatcatggtaagctttgcttttcacagtgttt

SEQ ID NO: 29152 - DNA, 82 bp, Homo sapiens
atcccaatgagcctgtttcagattacatcaatgcaaatatcatcatggtaagctttgcttttcacagtgttttctgaccata

SEQ ID NO: 29153 - DNA, 81 bp, Homo sapiens
agcctgtttcagattacatcaatgcaaatatcatcatggtaagctttgcttttcacagtgttttctgaccatacatttcta

SEQ ID NO: 29154 - DNA, 81 bp, Homo sapiens
ttcagattacatcaatgcaaatatcatcatggtaagctttgcttttcacagtgttttctgaccatacatttctagcctatt

SEQ ID NO: 29155 - DNA, 66 bp, Homo sapiens
cctgaaagtaactttaaggtgtttgaaggattttcttcctaaatttctagcctgaatttgaaacca

SEQ ID NO: 29156 - DNA, 70 bp, Homo sapiens
taaggtgtttgaaggattttcttcctaaatttctagcctgaatttgaaaccaagtgcaacaattcaaagc

SEQ ID NO: 29157 - DNA, 69 bp, Homo sapiens
gtttgaaggattttcttcctaaatttctagcctgaatttgaaaccaagtgcaacaattcaaagcccaaa

SEQ ID NO: 29158 - DNA, 69 bp, Homo sapiens
tttcttcctaaatttctagcctgaatttgaaaccaagtgcaacaattcaaagcccaaaaagagttacat

SEQ ID NO: 29159 - DNA, 73 bp, Homo sapiens
aaagcccaaaaagagttacattgccacacaaggctgcctgcaaaacacggtgaatgacttttggcggatggtg

SEQ ID NO: 29160 - DNA, 74 bp, Homo sapiens
aaaagagttacattgccacacaaggctgcctgcaaaacacggtgaatgacttttggcggatggtgttccaagaa

SEQ ID NO: 29161 - DNA, 74 bp, Homo sapiens
ttacattgccacacaaggctgcctgcaaaacacggtgaatgacttttggcggatggtgttccaagaaaactccc

SEQ ID NO: 29162 - DNA, 73 bp, Homo sapiens
acacaaggctgcctgcaaaacacggtgaatgacttttggcggatggtgttccaagaaaactcccgagtgattg

SEQ ID NO: 29163 - DNA, 72 bp, Homo sapiens
caaaacacggtgaatgacttttggcggatggtgttccaagaaaactcccgagtgattgtcatgacaacgaaa

SEQ ID NO: 29164 - DNA, 72 bp, Homo sapiens
acggtgaatgacttttggcggatggtgttccaagaaaactcccgagtgattgtcatgacaacgaaagaagtg

SEQ ID NO: 29165 - DNA, 72 bp, Homo sapiens
acttttggcggatggtgttccaagaaaactcccgagtgattgtcatgacaacgaaagaagtggagagaggaa

SEQ ID NO: 29166 - DNA, 73 bp, Homo sapiens
gtgttccaagaaaactcccgagtgattgtcatgacaacgaaagaagtggagagaggaaaggtaaatcacagaa

SEQ ID NO: 29167 - DNA, 70 bp, Homo sapiens
aaaactcccgagtgattgtcatgacaacgaaagaagtggagagaggaaaggtaaatcacagaaacttctt

SEQ ID NO: 29168 - DNA, 73 bp, Homo sapiens
agtgattgtcatgacaacgaaagaagtggagagaggaaaggtaaatcacagaaacttcttttctgctaaactg

SEQ ID NO: 29169 - DNA, 76 bp, Homo sapiens
tttcagagttcacagaattaactttctttttttctgatctcttccagagtaaatgtgtcaaatactggcctgatga

SEQ ID NO: 29170 - DNA, 76 bp, Homo sapiens
agttcacagaattaactttctttttttctgatctcttccagagtaaatgtgtcaaatactggcctgatgagtatgc

SEQ ID NO: 29171 - DNA, 76 bp, Homo sapiens
actttctttttttctgatctcttccagagtaaatgtgtcaaatactggcctgatgagtatgctctaaaagaatatg

SEQ ID NO: 29172 - DNA, 82 bp, Homo sapiens
ttttctgatctcttccagagtaaatgtgtcaaatactggcctgatgagtatgctctaaaagaatatggcgtcatgcgtgtta

SEQ ID NO: 29173 - DNA, 80 bp, Homo sapiens
ttccagagtaaatgtgtcaaatactggcctgatgagtatgctctaaaagaatatggcgtcatgcgtgttaggaacgtcaa

SEQ ID NO: 29174 - DNA, 78 bp, Homo sapiens
gtaaatgtgtcaaatactggcctgatgagtatgctctaaaagaatatggcgtcatgcgtgttaggaacgtcaaagaaa

SEQ ID NO: 29175 - DNA, 80 bp, Homo sapiens
aaatactggcctgatgagtatgctctaaaagaatatggcgtcatgcgtgttaggaacgtcaaagaaagcgccgctcatga

SEQ ID NO: 29176 - DNA, 82 bp, Homo sapiens
tgatgagtatgctctaaaagaatatggcgtcatgcgtgttaggaacgtcaaagaaagcgccgctcatgactatacgctaaga

SEQ ID NO: 29177 - DNA, 76 bp, Homo sapiens
ctctaaaagaatatggcgtcatgcgtgttaggaacgtcaaagaaagcgccgctcatgactatacgctaagagaact

SEQ ID NO: 29178 - DNA, 75 bp, Homo sapiens
aaagaatatggcgtcatgcgtgttaggaacgtcaaagaaagcgccgctcatgactatacgctaagagaacttaaa

SEQ ID NO: 29179 - DNA, 71 bp, Homo sapiens
atgcgtgttaggaacgtcaaagaaagcgccgctcatgactatacgctaagagaacttaaactttcaaaggt

SEQ ID NO: 29180 - DNA, 71 bp, Homo sapiens
ttaggaacgtcaaagaaagcgccgctcatgactatacgctaagagaacttaaactttcaaaggttggacaa

SEQ ID NO: 29181 - DNA, 70 bp, Homo sapiens
aaagaaagcgccgctcatgactatacgctaagagaacttaaactttcaaaggttggacaagtaagtatat

SEQ ID NO: 29182 - DNA, 74 bp, Homo sapiens
gctcatgactatacgctaagagaacttaaactttcaaaggttggacaagtaagtatattgtcgtattctagaga

SEQ ID NO: 29183 - DNA, 70 bp, Homo sapiens
gactatacgctaagagaacttaaactttcaaaggttggacaagtaagtatattgtcgtattctagagact

SEQ ID NO: 29184 - DNA, 67 bp, Homo sapiens
aacctcttgatttatttaattcttttctggtttttcttggctctactccaggggaatacggagagaa

SEQ ID NO: 29185 - DNA, 69 bp, Homo sapiens
ttatttaattcttttctggtttttcttggctctactccaggggaatacggagagaacggtctggcaata

SEQ ID NO: 29186 - DNA, 69 bp, Homo sapiens
ttctggtttttcttggctctactccaggggaatacggagagaacggtctggcaataccactttcggacc

SEQ ID NO: 29187 - DNA, 69 bp, Homo sapiens
tttttcttggctctactccaggggaatacggagagaacggtctggcaataccactttcggacctggccg

SEQ ID NO: 29188 - DNA, 71 bp, Homo sapiens
tctactccaggggaatacggagagaacggtctggcaataccactttcggacctggccggaccacggcgtgc

SEQ ID NO: 29189 - DNA, 70 bp, Homo sapiens
aatacggagagaacggtctggcaataccactttcggacctggccggaccacggcgtgcccagcgaccctg

SEQ ID NO: 29190 - DNA, 69 bp, Homo sapiens
agagaacggtctggcaataccactttcggacctggccggaccacggcgtgcccagcgaccctgggggcg

SEQ ID NO: 29191 - DNA, 72 bp, Homo sapiens
tggcaataccactttcggacctggccggaccacggcgtgcccagcgaccctgggggcgtgctggacttcctg

SEQ ID NO: 29192 - DNA, 70 bp, Homo sapiens
ccactttcggacctggccggaccacggcgtgcccagcgaccctgggggcgtgctggacttcctggaggag

SEQ ID NO: 29193 - DNA, 74 bp, Homo sapiens
acctggccggaccacggcgtgcccagcgaccctgggggcgtgctggacttcctggaggaggtgcaccataagca

SEQ ID NO: 29194 - DNA, 79 bp, Homo sapiens
accacggcgtgcccagcgaccctgggggcgtgctggacttcctggaggaggtgcaccataagcaggagagcatcatgga

SEQ ID NO: 29195 - DNA, 79 bp, Homo sapiens
agcgaccctgggggcgtgctggacttcctggaggaggtgcaccataagcaggagagcatcatggatgcagggccggtcg

SEQ ID NO: 29196 - DNA, 85 bp, Homo sapiens
gggcgtgctggacttcctggaggaggtgcaccataagcaggagagcatcatggatgcagggccggtcgtggtgcactgcaggtga

SEQ ID NO: 29197 - DNA, 85 bp, Homo sapiens
ctggacttcctggaggaggtgcaccataagcaggagagcatcatggatgcagggccggtcgtggtgcactgcaggtgacagctcc

SEQ ID NO: 29198 - DNA, 88 bp, Homo sapiens
tggaggaggtgcaccataagcaggagagcatcatggatgcagggccggtcgtggtgcactgcaggtgacagctcctgctgcccctcta

SEQ ID NO: 29199 - DNA, 86 bp, Homo sapiens
accataagcaggagagcatcatggatgcagggccggtcgtggtgcactgcaggtgacagctcctgctgcccctctaggccacagcc

SEQ ID NO: 29200 - DNA, 85 bp, Homo sapiens
aggagagcatcatggatgcagggccggtcgtggtgcactgcaggtgacagctcctgctgcccctctaggccacagcctgtccctg

SEQ ID NO: 29201 - DNA, 84 bp, Homo sapiens
atcatggatgcagggccggtcgtggtgcactgcaggtgacagctcctgctgcccctctaggccacagcctgtccctgtctccta

SEQ ID NO: 29202 - DNA, 80 bp, Homo sapiens
agggccggtcgtggtgcactgcaggtgacagctcctgctgcccctctaggccacagcctgtccctgtctcctagcgccca

SEQ ID NO: 29203 - DNA, 82 bp, Homo sapiens
tggtgcactgcaggtgacagctcctgctgcccctctaggccacagcctgtccctgtctcctagcgcccagggcttgctttta

SEQ ID NO: 29204 - DNA, 76 bp, Homo sapiens
aggtgacagctcctgctgcccctctaggccacagcctgtccctgtctcctagcgcccagggcttgcttttacctac

SEQ ID NO: 29205 - DNA, 75 bp, Homo sapiens
tcctgctgcccctctaggccacagcctgtccctgtctcctagcgcccagggcttgcttttacctacccactccta

SEQ ID NO: 29206 - DNA, 73 bp, Homo sapiens
ctctaggccacagcctgtccctgtctcctagcgcccagggcttgcttttacctacccactcctagctctttaa

SEQ ID NO: 29207 - DNA, 72 bp, Homo sapiens
cagcctgtccctgtctcctagcgcccagggcttgcttttacctacccactcctagctctttaactgtaggaa

SEQ ID NO: 29208 - DNA, 70 bp, Homo sapiens
ctgtctcctagcgcccagggcttgcttttacctacccactcctagctctttaactgtaggaagaatttaa

SEQ ID NO: 29209 - DNA, 70 bp, Homo sapiens
tagcgcccagggcttgcttttacctacccactcctagctctttaactgtaggaagaatttaatatctgtt

SEQ ID NO: 29210 - DNA, 73 bp, Homo sapiens
cttgcttttacctacccactcctagctctttaactgtaggaagaatttaatatctgtttgaggcatagagcaa

SEQ ID NO: 29211 - DNA, 74 bp, Homo sapiens
ttttacctacccactcctagctctttaactgtaggaagaatttaatatctgtttgaggcatagagcaactgcat

SEQ ID NO: 29212 - DNA, 77 bp, Homo sapiens
actcctagctctttaactgtaggaagaatttaatatctgtttgaggcatagagcaactgcattgagggacattttga

SEQ ID NO: 29213 - DNA, 78 bp, Homo sapiens
taactgtaggaagaatttaatatctgtttgaggcatagagcaactgcattgagggacattttgatcccaaggcatatt

SEQ ID NO: 29214 - DNA, 78 bp, Homo sapiens
aagaatttaatatctgtttgaggcatagagcaactgcattgagggacattttgatcccaaggcatatttctcctagac

SEQ ID NO: 29215 - DNA, 79 bp, Homo sapiens
tttaatatctgtttgaggcatagagcaactgcattgagggacattttgatcccaaggcatatttctcctagaccctaca

SEQ ID NO: 29216 - DNA, 81 bp, Homo sapiens
gtttgaggcatagagcaactgcattgagggacattttgatcccaaggcatatttctcctagaccctacagcactgccattg

SEQ ID NO: 29217 - DNA, 83 bp, Homo sapiens
tagagcaactgcattgagggacattttgatcccaaggcatatttctcctagaccctacagcactgccattggccatggccatg

SEQ ID NO: 29218 - DNA, 83 bp, Homo sapiens
attgagggacattttgatcccaaggcatatttctcctagaccctacagcactgccattggccatggccatggcaacatgctca

SEQ ID NO: 29219 - DNA, 80 bp, Homo sapiens
attttgatcccaaggcatatttctcctagaccctacagcactgccattggccatggccatggcaacatgctcagttaaaa

SEQ ID NO: 29220 - DNA, 81 bp, Homo sapiens
aaggcatatttctcctagaccctacagcactgccattggccatggccatggcaacatgctcagttaaaacagcaaagacta

SEQ ID NO: 29221 - DNA, 83 bp, Homo sapiens
ttctcctagaccctacagcactgccattggccatggccatggcaacatgctcagttaaaacagcaaagactaagtcagcatta

SEQ ID NO: 29222 - DNA, 87 bp, Homo sapiens
tacagcactgccattggccatggccatggcaacatgctcagttaaaacagcaaagactaagtcagcattatctctgagtccaccaga

SEQ ID NO: 29223 - DNA, 82 bp, Homo sapiens
ccattggccatggccatggcaacatgctcagttaaaacagcaaagactaagtcagcattatctctgagtccaccagaagttg

SEQ ID NO: 29224 - DNA, 82 bp, Homo sapiens
atggccatggcaacatgctcagttaaaacagcaaagactaagtcagcattatctctgagtccaccagaagttgtgcattaaa

SEQ ID NO: 29225 - DNA, 78 bp, Homo sapiens
ctcagttaaaacagcaaagactaagtcagcattatctctgagtccaccagaagttgtgcattaaacaacttcatcctg

SEQ ID NO: 29226 - DNA, 80 bp, Homo sapiens
aacagcaaagactaagtcagcattatctctgagtccaccagaagttgtgcattaaacaacttcatcctggctctgcagtt

SEQ ID NO: 29227 - DNA, 79 bp, Homo sapiens
actaagtcagcattatctctgagtccaccagaagttgtgcattaaacaacttcatcctggctctgcagtttctccttat

SEQ ID NO: 29228 - DNA, 80 bp, Homo sapiens
attatctctgagtccaccagaagttgtgcattaaacaacttcatcctggctctgcagtttctccttattcttcatgatgt

SEQ ID NO: 29229 - DNA, 78 bp, Homo sapiens
agtccaccagaagttgtgcattaaacaacttcatcctggctctgcagtttctccttattcttcatgatgtttgctttg

SEQ ID NO: 29230 - DNA, 75 bp, Homo sapiens
gttttgagtctgaaacccccatgaatgattctgttgtccctgctttttgtccttctgcccgcagtgctggaattg

SEQ ID NO: 29231 - DNA, 76 bp, Homo sapiens
tctgaaacccccatgaatgattctgttgtccctgctttttgtccttctgcccgcagtgctggaattggccggacag

SEQ ID NO: 29232 - DNA, 76 bp, Homo sapiens
atgaatgattctgttgtccctgctttttgtccttctgcccgcagtgctggaattggccggacagggacgttcattg

SEQ ID NO: 29233 - DNA, 76 bp, Homo sapiens
attctgttgtccctgctttttgtccttctgcccgcagtgctggaattggccggacagggacgttcattgtgattga

SEQ ID NO: 29234 - DNA, 77 bp, Homo sapiens
cctgctttttgtccttctgcccgcagtgctggaattggccggacagggacgttcattgtgattgatattcttattga

SEQ ID NO: 29235 - DNA, 83 bp, Homo sapiens
tgtccttctgcccgcagtgctggaattggccggacagggacgttcattgtgattgatattcttattgacatcatcagagagaa

SEQ ID NO: 29236 - DNA, 80 bp, Homo sapiens
tggaattggccggacagggacgttcattgtgattgatattcttattgacatcatcagagagaaaggtgggtcatctggtg

SEQ ID NO: 29237 - DNA, 79 bp, Homo sapiens
ccggacagggacgttcattgtgattgatattcttattgacatcatcagagagaaaggtgggtcatctggtgggcaagaa

SEQ ID NO: 29238 - DNA, 80 bp, Homo sapiens
acgttcattgtgattgatattcttattgacatcatcagagagaaaggtgggtcatctggtgggcaagaagcgacagtttc

SEQ ID NO: 29239 - DNA, 79 bp, Homo sapiens
ttgtgattgatattcttattgacatcatcagagagaaaggtgggtcatctggtgggcaagaagcgacagtttctgtttt

SEQ ID NO: 29240 - DNA, 75 bp, Homo sapiens
atattcttattgacatcatcagagagaaaggtgggtcatctggtgggcaagaagcgacagtttctgtttttagtt

SEQ ID NO: 29241 - DNA, 76 bp, Homo sapiens
ctggctctgcagtttctctttattcttcatgatgtttccttcgtaggtgttgactgcgatattgacgttcccaaaa

SEQ ID NO: 29242 - DNA, 75 bp, Homo sapiens
ctgcagtttctctttattcttcatgatgtttccttcgtaggtgttgactgcgatattgacgttcccaaaaccatc

SEQ ID NO: 29243 - DNA, 75 bp, Homo sapiens
tttattcttcatgatgtttccttcgtaggtgttgactgcgatattgacgttcccaaaaccatccagatggtgcgg

SEQ ID NO: 29244 - DNA, 77 bp, Homo sapiens
atgatgtttccttcgtaggtgttgactgcgatattgacgttcccaaaaccatccagatggtgcggtctcagaggtca

SEQ ID NO: 29245 - DNA, 76 bp, Homo sapiens
ttccttcgtaggtgttgactgcgatattgacgttcccaaaaccatccagatggtgcggtctcagaggtcagggatg

SEQ ID NO: 29246 - DNA, 78 bp, Homo sapiens
ggtgttgactgcgatattgacgttcccaaaaccatccagatggtgcggtctcagaggtcagggatggtccagacagaa

SEQ ID NO: 29247 - DNA, 77 bp, Homo sapiens
atattgacgttcccaaaaccatccagatggtgcggtctcagaggtcagggatggtccagacagaagcacagtaccga

SEQ ID NO: 29248 - DNA, 81 bp, Homo sapiens
atggtccagacagaagcacagtaccgatttatctatatggcggtccagcattatattgaaacactacagcgcaggattgaa

SEQ ID NO: 29249 - DNA, 82 bp, Homo sapiens
agacagaagcacagtaccgatttatctatatggcggtccagcattatattgaaacactacagcgcaggattgaagaagagca

SEQ ID NO: 29250 - DNA, 79 bp, Homo sapiens
acagtaccgatttatctatatggcggtccagcattatattgaaacactacagcgcaggattgaagaagagcaggtacca

SEQ ID NO: 29251 - DNA, 81 bp, Homo sapiens
tttatctatatggcggtccagcattatattgaaacactacagcgcaggattgaagaagagcaggtaccagcctgagggctg

SEQ ID NO: 29252 - DNA, 84 bp, Homo sapiens
gtccagcattatattgaaacactacagcgcaggattgaagaagagcaggtaccagcctgagggctggcatgcggattctcattc

SEQ ID NO: 29253 - DNA, 74 bp, Homo sapiens
ttaaaataaccattgtccctcacatgtgcactcttccaaatttcagaaaagcaagaggaaagggcacgaatata

SEQ ID NO: 29254 - DNA, 75 bp, Homo sapiens
ataaccattgtccctcacatgtgcactcttccaaatttcagaaaagcaagaggaaagggcacgaatatacaaata

SEQ ID NO: 29255 - DNA, 76 bp, Homo sapiens
ctcacatgtgcactcttccaaatttcagaaaagcaagaggaaagggcacgaatatacaaatattaagtattctcta

SEQ ID NO: 29256 - DNA, 71 bp, Homo sapiens
actcttccaaatttcagaaaagcaagaggaaagggcacgaatatacaaatattaagtattctctagcggac

SEQ ID NO: 29257 - DNA, 71 bp, Homo sapiens
aaatttcagaaaagcaagaggaaagggcacgaatatacaaatattaagtattctctagcggaccagacgag

SEQ ID NO: 29258 - DNA, 75 bp, Homo sapiens
aaaagcaagaggaaagggcacgaatatacaaatattaagtattctctagcggaccagacgagtggagatcagagc

SEQ ID NO: 29259 - DNA, 74 bp, Homo sapiens
aaagggcacgaatatacaaatattaagtattctctagcggaccagacgagtggagatcagagccctctcccgcc

SEQ ID NO: 29260 - DNA, 75 bp, Homo sapiens
aatatacaaatattaagtattctctagcggaccagacgagtggagatcagagccctctcccgccttgtactccaa

SEQ ID NO: 29261 - DNA, 74 bp, Homo sapiens
aaatattaagtattctctagcggaccagacgagtggagatcagagccctctcccgccttgtactccaacgccac

SEQ ID NO: 29262 - DNA, 78 bp, Homo sapiens
tattctctagcggaccagacgagtggagatcagagccctctcccgccttgtactccaacgccaccctgtgcagagtaa

SEQ ID NO: 29263 - DNA, 78 bp, Homo sapiens
cagacgagtggagatcagagccctctcccgccttgtactccaacgccaccctgtgcagagtaagtagtgctgaaggaa

SEQ ID NO: 29264 - DNA, 75 bp, Homo sapiens
gagatcagagccctctcccgccttgtactccaacgccaccctgtgcagagtaagtagtgctgaaggaaattcttt

SEQ ID NO: 29265 - DNA, 72 bp, Homo sapiens
agagccctctcccgccttgtactccaacgccaccctgtgcagagtaagtagtgctgaaggaaattcttttta

SEQ ID NO: 29266 - DNA, 78 bp, Homo sapiens
tttcttttctctccagaatgagagaagacagtgctagagtctatgaaaacgtgggcctgatgcaacagcagaaaagtt

SEQ ID NO: 29267 - DNA, 83 bp, Homo sapiens
ttctctccagaatgagagaagacagtgctagagtctatgaaaacgtgggcctgatgcaacagcagaaaagtttcagatgagaa

SEQ ID NO: 29268 - DNA, 80 bp, Homo sapiens
aatgagagaagacagtgctagagtctatgaaaacgtgggcctgatgcaacagcagaaaagtttcagatgagaaaacctgc

SEQ ID NO: 29269 - DNA, 77 bp, Homo sapiens
agtgctagagtctatgaaaacgtgggcctgatgcaacagcagaaaagtttcagatgagaaaacctgccaaaacttca

SEQ ID NO: 29270 - DNA, 78 bp, Homo sapiens
tctatgaaaacgtgggcctgatgcaacagcagaaaagtttcagatgagaaaacctgccaaaacttcagcacagaaata

SEQ ID NO: 29271 - DNA, 76 bp, Homo sapiens
cagcagaaaagtttcagatgagaaaacctgccaaaacttcagcacagaaataggtatttaaatgcaagtgctctat

SEQ ID NO: 29272 - DNA, 74 bp, Homo sapiens
gtttcagatgagaaaacctgccaaaacttcagcacagaaataggtatttaaatgcaagtgctctattggttaat

SEQ ID NO: 29273 - DNA, 74 bp, Homo sapiens
gatgagaaaacctgccaaaacttcagcacagaaataggtatttaaatgcaagtgctctattggttaattgttta

SEQ ID NO: 29274 - DNA, 69 bp, Homo sapiens
gcttttagatatatgttccttaaaaactcttaacttatttcttccccagatgtggactttcaccctctc

SEQ ID NO: 29275 - DNA, 65 bp, Homo sapiens
atgttccttaaaaactcttaacttatttcttccccagatgtggactttcaccctctccctaaaaa

SEQ ID NO: 29276 - DNA, 68 bp, Homo sapiens
taaaaactcttaacttatttcttccccagatgtggactttcaccctctccctaaaaagatcaagaaca

SEQ ID NO: 29277 - DNA, 70 bp, Homo sapiens
ttaacttatttcttccccagatgtggactttcaccctctccctaaaaagatcaagaacagacgcaagaaa

SEQ ID NO: 29278 - DNA, 72 bp, Homo sapiens
ttcttccccagatgtggactttcaccctctccctaaaaagatcaagaacagacgcaagaaagtttatgtgaa

SEQ ID NO: 29279 - DNA, 72 bp, Homo sapiens
ttcaccctctccctaaaaagatcaagaacagacgcaagaaagtttatgtgaagacagaatttggatttggaa

SEQ ID NO: 29280 - DNA, 74 bp, Homo sapiens
tatgtgaagacagaatttggatttggaaggcttgcaatgtggttgactaccttttgataagcaaaatttgaaac

SEQ ID NO: 29281 - DNA, 71 bp, Homo sapiens
agacagaatttggatttggaaggcttgcaatgtggttgactaccttttgataagcaaaatttgaaaccatt

SEQ ID NO: 29282 - DNA, 71 bp, Homo sapiens
ttggatttggaaggcttgcaatgtggttgactaccttttgataagcaaaatttgaaaccatttaaagacca

SEQ ID NO: 29283 - DNA, 69 bp, Homo sapiens
aaggcttgcaatgtggttgactaccttttgataagcaaaatttgaaaccatttaaagaccactgtattt

SEQ ID NO: 29284 - DNA, 69 bp, Homo sapiens
atgtggttgactaccttttgataagcaaaatttgaaaccatttaaagaccactgtattttaactcaaca

SEQ ID NO: 29285 - DNA, 68 bp, Homo sapiens
ccttttgataagcaaaatttgaaaccatttaaagaccactgtattttaactcaacaatacctgcttcc

SEQ ID NO: 29286 - DNA, 69 bp, Homo sapiens
gcaaaatttgaaaccatttaaagaccactgtattttaactcaacaatacctgcttcccaattactcatt

SEQ ID NO: 29287 - DNA, 71 bp, Homo sapiens
aaccatttaaagaccactgtattttaactcaacaatacctgcttcccaattactcatttcctcagataaga

SEQ ID NO: 29288 - DNA, 73 bp, Homo sapiens
aaagaccactgtattttaactcaacaatacctgcttcccaattactcatttcctcagataagaagaaatcatc

SEQ ID NO: 29289 - DNA, 76 bp, Homo sapiens
attttaactcaacaatacctgcttcccaattactcatttcctcagataagaagaaatcatctctacaatgtagaca

SEQ ID NO: 29290 - DNA, 78 bp, Homo sapiens
actcaacaatacctgcttcccaattactcatttcctcagataagaagaaatcatctctacaatgtagacaacattata

SEQ ID NO: 29291 - DNA, 77 bp, Homo sapiens
acctgcttcccaattactcatttcctcagataagaagaaatcatctctacaatgtagacaacattatattttataga

SEQ ID NO: 29292 - DNA, 76 bp, Homo sapiens
ttactcatttcctcagataagaagaaatcatctctacaatgtagacaacattatattttatagaatttgtttgaaa

SEQ ID NO: 29293 - DNA, 78 bp, Homo sapiens
tcctcagataagaagaaatcatctctacaatgtagacaacattatattttatagaatttgtttgaaattgaggaagca

SEQ ID NO: 29294 - DNA, 74 bp, Homo sapiens
gaagaaatcatctctacaatgtagacaacattatattttatagaatttgtttgaaattgaggaagcagttaaat

SEQ ID NO: 29295 - DNA, 77 bp, Homo sapiens
catctctacaatgtagacaacattatattttatagaatttgtttgaaattgaggaagcagttaaattgtgcgctgta

SEQ ID NO: 29296 - DNA, 76 bp, Homo sapiens
atgtagacaacattatattttatagaatttgtttgaaattgaggaagcagttaaattgtgcgctgtattttgcaga

SEQ ID NO: 29297 - DNA, 74 bp, Homo sapiens
agaatttgtttgaaattgaggaagcagttaaattgtgcgctgtattttgcagattatggggattcaaattctag

SEQ ID NO: 29298 - DNA, 75 bp, Homo sapiens
tgaaattgaggaagcagttaaattgtgcgctgtattttgcagattatggggattcaaattctagtaataggcttt

SEQ ID NO: 29299 - DNA, 73 bp, Homo sapiens
gaggaagcagttaaattgtgcgctgtattttgcagattatggggattcaaattctagtaataggcttttttat

SEQ ID NO: 29300 - DNA, 70 bp, Homo sapiens
gttaaattgtgcgctgtattttgcagattatggggattcaaattctagtaataggcttttttatttttat

SEQ ID NO: 29301 - DNA, 68 bp, Homo sapiens
tttttttttcctcattgttggggatgatgagaagaaatgatttgggaaaattaagtaacaacgaccta

SEQ ID NO: 29302 - DNA, 69 bp, Homo sapiens
ttttcctcattgttggggatgatgagaagaaatgatttgggaaaattaagtaacaacgacctagaaaag

SEQ ID NO: 29303 - DNA, 72 bp, Homo sapiens
gagaagaaatgatttgggaaaattaagtaacaacgacctagaaaagtgagaacaatctcatttaccatcatg

SEQ ID NO: 29304 - DNA, 73 bp, Homo sapiens
atgatttgggaaaattaagtaacaacgacctagaaaagtgagaacaatctcatttaccatcatgtatccagta

SEQ ID NO: 29305 - DNA, 74 bp, Homo sapiens
aattaagtaacaacgacctagaaaagtgagaacaatctcatttaccatcatgtatccagtagtggataattcat

SEQ ID NO: 29306 - DNA, 77 bp, Homo sapiens
taacaacgacctagaaaagtgagaacaatctcatttaccatcatgtatccagtagtggataattcattttgatggct

SEQ ID NO: 29307 - DNA, 78 bp, Homo sapiens
gaacaatctcatttaccatcatgtatccagtagtggataattcattttgatggcttctatttttggccaaatgagaat

SEQ ID NO: 29308 - DNA, 80 bp, Homo sapiens
tatccagtagtggataattcattttgatggcttctatttttggccaaatgagaattaagccagtgcctgagactgtcaga

SEQ ID NO: 29309 - DNA, 79 bp, Homo sapiens
tagtggataattcattttgatggcttctatttttggccaaatgagaattaagccagtgcctgagactgtcagaagttga

SEQ ID NO: 29310 - DNA, 75 bp, Homo sapiens
aattcattttgatggcttctatttttggccaaatgagaattaagccagtgcctgagactgtcagaagttgacctt

SEQ ID NO: 29311 - DNA, 77 bp, Homo sapiens
cttctatttttggccaaatgagaattaagccagtgcctgagactgtcagaagttgacctttgcactggcattaaaga

SEQ ID NO: 29312 - DNA, 78 bp, Homo sapiens
atttttggccaaatgagaattaagccagtgcctgagactgtcagaagttgacctttgcactggcattaaagagtcata

SEQ ID NO: 29313 - DNA, 77 bp, Homo sapiens
aaatgagaattaagccagtgcctgagactgtcagaagttgacctttgcactggcattaaagagtcatagaaaaagaa

SEQ ID NO: 29314 - DNA, 80 bp, Homo sapiens
cagtgcctgagactgtcagaagttgacctttgcactggcattaaagagtcatagaaaaagaatcatggatatttatgaat

SEQ ID NO: 29315 - DNA, 76 bp, Homo sapiens
agactgtcagaagttgacctttgcactggcattaaagagtcatagaaaaagaatcatggatatttatgaattaagg

SEQ ID NO: 29316 - DNA, 75 bp, Homo sapiens
cagaagttgacctttgcactggcattaaagagtcatagaaaaagaatcatggatatttatgaattaaggtaagag

SEQ ID NO: 29317 - DNA, 74 bp, Homo sapiens
acctttgcactggcattaaagagtcatagaaaaagaatcatggatatttatgaattaaggtaagaggtgtggct

SEQ ID NO: 29318 - DNA, 71 bp, Homo sapiens
tggcattaaagagtcatagaaaaagaatcatggatatttatgaattaaggtaagaggtgtggctttttttt

SEQ ID NO: 29319 - DNA, 68 bp, Homo sapiens
tttttcttttttccagccgttgaccaattatagttcggctgttgactgagaagtttgtggtgggaaaa

SEQ ID NO: 29320 - DNA, 71 bp, Homo sapiens
ttttccagccgttgaccaattatagttcggctgttgactgagaagtttgtggtgggaaaacgtttgccata

SEQ ID NO: 29321 - DNA, 71 bp, Homo sapiens
gttgactgagaagtttgtggtgggaaaacgtttgccatattttctttgcatttgaataattgtcttgtact

SEQ ID NO: 29322 - DNA, 68 bp, Homo sapiens
ggtgggaaaacgtttgccatattttctttgcatttgaataattgtcttgtacttagaaaaaaggcgtc

SEQ ID NO: 29323 - DNA, 73 bp, Homo sapiens
cgtttgccatattttctttgcatttgaataattgtcttgtacttagaaaaaaggcgtctatgaatgaccagtg

SEQ ID NO: 29324 - DNA, 72 bp, Homo sapiens
tttctttgcatttgaataattgtcttgtacttagaaaaaaggcgtctatgaatgaccagtgtttttggtcgc

SEQ ID NO: 29325 - DNA, 71 bp, Homo sapiens
catttgaataattgtcttgtacttagaaaaaaggcgtctatgaatgaccagtgtttttggtcgccaaatgt

SEQ ID NO: 29326 - DNA, 73 bp, Homo sapiens
ataattgtcttgtacttagaaaaaaggcgtctatgaatgaccagtgtttttggtcgccaaatgttgctgacaa

SEQ ID NO: 29327 - DNA, 71 bp, Homo sapiens
ttagaaaaaaggcgtctatgaatgaccagtgtttttggtcgccaaatgttgctgacaaacttatcccaaaa

SEQ ID NO: 29328 - DNA, 69 bp, Homo sapiens
aaaaaggcgtctatgaatgaccagtgtttttggtcgccaaatgttgctgacaaacttatcccaaaactt

SEQ ID NO: 29329 - DNA, 71 bp, Homo sapiens
ctatgaatgaccagtgtttttggtcgccaaatgttgctgacaaacttatcccaaaactttagtggcttaaa

SEQ ID NO: 29330 - DNA, 68 bp, Homo sapiens
aatgaccagtgtttttggtcgccaaatgttgctgacaaacttatcccaaaactttagtggcttaaaaa

SEQ ID NO: 29331 - DNA, 65 bp, Homo sapiens
agtgtttttggtcgccaaatgttgctgacaaacttatcccaaaactttagtggcttaaaaaaacc

SEQ ID NO: 29332 - DNA, 66 bp, Homo sapiens
gtttttggtcgccaaatgttgctgacaaacttatcccaaaactttagtggcttaaaaaaacctgcc

SEQ ID NO: 29333 - DNA, 67 bp, Homo sapiens
tcgccaaatgttgctgacaaacttatcccaaaactttagtggcttaaaaaaacctgcccccaactgt

SEQ ID NO: 29334 - DNA, 65 bp, Homo sapiens
aaatgttgctgacaaacttatcccaaaactttagtggcttaaaaaaacctgcccccaactgttag

SEQ ID NO: 29335 - DNA, 66 bp, Homo sapiens
aaacttatcccaaaactttagtggcttaaaaaaacctgcccccaactgttagtcaatctgagctgg

SEQ ID NO: 29336 - DNA, 71 bp, Homo sapiens
ttatcccaaaactttagtggcttaaaaaaacctgcccccaactgttagtcaatctgagctgggctcagctg

SEQ ID NO: 29337 - DNA, 72 bp, Homo sapiens
actttagtggcttaaaaaaacctgcccccaactgttagtcaatctgagctgggctcagctgggctgttcttc

SEQ ID NO: 29338 - DNA, 78 bp, Homo sapiens
aaaaacctgcccccaactgttagtcaatctgagctgggctcagctgggctgttcttctgccagcctgcaggtggccac

SEQ ID NO: 29339 - DNA, 87 bp, Homo sapiens
ttagtcaatctgagctgggctcagctgggctgttcttctgccagcctgcaggtggccactcatgtggtcagcaggtcggcggagaga

SEQ ID NO: 29340 - DNA, 85 bp, Homo sapiens
aatctgagctgggctcagctgggctgttcttctgccagcctgcaggtggccactcatgtggtcagcaggtcggcggagagactgg

SEQ ID NO: 29341 - DNA, 85 bp, Homo sapiens
tcagctgggctgttcttctgccagcctgcaggtggccactcatgtggtcagcaggtcggcggagagactgggatggctgggcttc

SEQ ID NO: 29342 - DNA, 84 bp, Homo sapiens
aggtggccactcatgtggtcagcaggtcggcggagagactgggatggctgggcttctctctctgcctgcagtcctgagtctctc

SEQ ID NO: 29343 - DNA, 80 bp, Homo sapiens
caggtcggcggagagactgggatggctgggcttctctctctgcctgcagtcctgagtctctccttcttcgtgtagtctct

SEQ ID NO: 29344 - DNA, 82 bp, Homo sapiens
gagagactgggatggctgggcttctctctctgcctgcagtcctgagtctctccttcttcgtgtagtctctttcagtggcctg

SEQ ID NO: 29345 - DNA, 81 bp, Homo sapiens
actgggatggctgggcttctctctctgcctgcagtcctgagtctctccttcttcgtgtagtctctttcagtggcctggctg

SEQ ID NO: 29346 - DNA, 81 bp, Homo sapiens
cttctctctctgcctgcagtcctgagtctctccttcttcgtgtagtctctttcagtggcctggctggcagggtagctagac

SEQ ID NO: 29347 - DNA, 85 bp, Homo sapiens
tctgcctgcagtcctgagtctctccttcttcgtgtagtctctttcagtggcctggctggcagggtagctagacctctcacatgca

SEQ ID NO: 29348 - DNA, 83 bp, Homo sapiens
agtcctgagtctctccttcttcgtgtagtctctttcagtggcctggctggcagggtagctagacctctcacatgcagctcaga

SEQ ID NO: 29349 - DNA, 84 bp, Homo sapiens
tctctccttcttcgtgtagtctctttcagtggcctggctggcagggtagctagacctctcacatgcagctcagagctcccaaga

SEQ ID NO: 29350 - DNA, 84 bp, Homo sapiens
ctttcagtggcctggctggcagggtagctagacctctcacatgcagctcagagctcccaagagctcaaaagcagaaatggccag

SEQ ID NO: 29351 - DNA, 84 bp, Homo sapiens
tggctggcagggtagctagacctctcacatgcagctcagagctcccaagagctcaaaagcagaaatggccaggccttctgaaaa

SEQ ID NO: 29352 - DNA, 80 bp, Homo sapiens
agggtagctagacctctcacatgcagctcagagctcccaagagctcaaaagcagaaatggccaggccttctgaaaactta

SEQ ID NO: 29353 - DNA, 79 bp, Homo sapiens
acctctcacatgcagctcagagctcccaagagctcaaaagcagaaatggccaggccttctgaaaacttaagtccagaat

SEQ ID NO: 29354 - DNA, 80 bp, Homo sapiens
acatgcagctcagagctcccaagagctcaaaagcagaaatggccaggccttctgaaaacttaagtccagaattgtcacag

SEQ ID NO: 29355 - DNA, 74 bp, Homo sapiens
agctcccaagagctcaaaagcagaaatggccaggccttctgaaaacttaagtccagaattgtcacagtgtccct

SEQ ID NO: 29356 - DNA, 73 bp, Homo sapiens
aagagctcaaaagcagaaatggccaggccttctgaaaacttaagtccagaattgtcacagtgtcccttctact

SEQ ID NO: 29357 - DNA, 74 bp, Homo sapiens
agaaatggccaggccttctgaaaacttaagtccagaattgtcacagtgtcccttctacttccctctattgatga

SEQ ID NO: 29358 - DNA, 75 bp, Homo sapiens
atgatgatgatggttttttctaatcagaagaaagctggggtatgccctctacttactaaacaagtcacaagccca

SEQ ID NO: 29359 - DNA, 74 bp, Homo sapiens
gttttttctaatcagaagaaagctggggtatgccctctacttactaaacaagtcacaagcccagctcagattca

SEQ ID NO: 29360 - DNA, 75 bp, Homo sapiens
ttctaatcagaagaaagctggggtatgccctctacttactaaacaagtcacaagcccagctcagattcaagaaaa

SEQ ID NO: 29361 - DNA, 73 bp, Homo sapiens
agaaagctggggtatgccctctacttactaaacaagtcacaagcccagctcagattcaagaaaagggtgtgaa

SEQ ID NO: 29362 - DNA, 76 bp, Homo sapiens
tatgccctctacttactaaacaagtcacaagcccagctcagattcaagaaaagggtgtgaagtagaggtgcagtta

SEQ ID NO: 29363 - DNA, 74 bp, Homo sapiens
tctacttactaaacaagtcacaagcccagctcagattcaagaaaagggtgtgaagtagaggtgcagttaagtgg

SEQ ID NO: 29364 - DNA, 72 bp, Homo sapiens
aaacaagtcacaagcccagctcagattcaagaaaagggtgtgaagtagaggtgcagttaagtggggggccac

SEQ ID NO: 29365 - DNA, 70 bp, Homo sapiens
attcaagaaaagggtgtgaagtagaggtgcagttaagtggggggccactagtctaacagacggtcacaac

SEQ ID NO: 29366 - DNA, 71 bp, Homo sapiens
aaaagggtgtgaagtagaggtgcagttaagtggggggccactagtctaacagacggtcacaaccagtgcca

SEQ ID NO: 29367 - DNA, 71 bp, Homo sapiens
aagtagaggtgcagttaagtggggggccactagtctaacagacggtcacaaccagtgccatggaaaaccaa

SEQ ID NO: 29368 - DNA, 71 bp, Homo sapiens
agttaagtggggggccactagtctaacagacggtcacaaccagtgccatggaaaaccaaggatattagcaa

SEQ ID NO: 29369 - DNA, 74 bp, Homo sapiens
agacggtcacaaccagtgccatggaaaaccaaggatattagcaaaagcagaagttgctagtgaccttgggaagc

SEQ ID NO: 29370 - DNA, 75 bp, Homo sapiens
agtgccatggaaaaccaaggatattagcaaaagcagaagttgctagtgaccttgggaagccgaagctgcttacag

SEQ ID NO: 29371 - DNA, 75 bp, Homo sapiens
atggaaaaccaaggatattagcaaaagcagaagttgctagtgaccttgggaagccgaagctgcttacagtagctg

SEQ ID NO: 29372 - DNA, 75 bp, Homo sapiens
ggaagccgaagctgcttacagtagctgggacaagctgaaagtcagactaagaaataaagagagggccttcaagaa

SEQ ID NO: 29373 - DNA, 77 bp, Homo sapiens
ctgcttacagtagctgggacaagctgaaagtcagactaagaaataaagagagggccttcaagaagcttcctgaatga

SEQ ID NO: 29374 - DNA, 77 bp, Homo sapiens
gtagctgggacaagctgaaagtcagactaagaaataaagagagggccttcaagaagcttcctgaatgatttctgcta

SEQ ID NO: 29375 - DNA, 75 bp, Homo sapiens
gggacaagctgaaagtcagactaagaaataaagagagggccttcaagaagcttcctgaatgatttctgctagccc

SEQ ID NO: 29376 - DNA, 74 bp, Homo sapiens
agtcagactaagaaataaagagagggccttcaagaagcttcctgaatgatttctgctagccctgagcctatttt

SEQ ID NO: 29377 - DNA, 73 bp, Homo sapiens
aagaaataaagagagggccttcaagaagcttcctgaatgatttctgctagccctgagcctatttttggaacca

SEQ ID NO: 29378 - DNA, 74 bp, Homo sapiens
aagagagggccttcaagaagcttcctgaatgatttctgctagccctgagcctatttttggaaccagcacttggg

SEQ ID NO: 29379 - DNA, 76 bp, Homo sapiens
ttcaagaagcttcctgaatgatttctgctagccctgagcctatttttggaaccagcacttggggaaactgatcttg

SEQ ID NO: 29380 - DNA, 75 bp, Homo sapiens
atttctgctagccctgagcctatttttggaaccagcacttggggaaactgatcttgtgaggatggatgtgtttag

SEQ ID NO: 29381 - DNA, 74 bp, Homo sapiens
tgagcctatttttggaaccagcacttggggaaactgatcttgtgaggatggatgtgtttagggacacagggctt

SEQ ID NO: 29382 - DNA, 74 bp, Homo sapiens
tatttttggaaccagcacttggggaaactgatcttgtgaggatggatgtgtttagggacacagggcttttgaga

SEQ ID NO: 29383 - DNA, 76 bp, Homo sapiens
agcacttggggaaactgatcttgtgaggatggatgtgtttagggacacagggcttttgagagcagcaccaccccac

SEQ ID NO: 29384 - DNA, 73 bp, Homo sapiens
tagggacacagggcttttgagagcagcaccaccccactggggcatccccagacttgggaaacgtgactctttc

SEQ ID NO: 29385 - DNA, 73 bp, Homo sapiens
agggcttttgagagcagcaccaccccactggggcatccccagacttgggaaacgtgactctttcttaatgcca

SEQ ID NO: 29386 - DNA, 71 bp, Homo sapiens
agcagcaccaccccactggggcatccccagacttgggaaacgtgactctttcttaatgccactgggtttta

SEQ ID NO: 29387 - DNA, 71 bp, Homo sapiens
cccactggggcatccccagacttgggaaacgtgactctttcttaatgccactgggttttagtcaggccaca

SEQ ID NO: 29388 - DNA, 72 bp, Homo sapiens
gggcatccccagacttgggaaacgtgactctttcttaatgccactgggttttagtcaggccacagtgagaag

SEQ ID NO: 29389 - DNA, 71 bp, Homo sapiens
acttgggaaacgtgactctttcttaatgccactgggttttagtcaggccacagtgagaaggaacagcccta

SEQ ID NO: 29390 - DNA, 75 bp, Homo sapiens
gaaggaacagccctaacaggcctccagccaggttgaatgagctcatttttgttgtagccaaccagtaagatttgc

SEQ ID NO: 29391 - DNA, 75 bp, Homo sapiens
ccctaacaggcctccagccaggttgaatgagctcatttttgttgtagccaaccagtaagatttgctaatgttcta

SEQ ID NO: 29392 - DNA, 75 bp, Homo sapiens
aggcctccagccaggttgaatgagctcatttttgttgtagccaaccagtaagatttgctaatgttctacattaag

SEQ ID NO: 29393 - DNA, 75 bp, Homo sapiens
aggttgaatgagctcatttttgttgtagccaaccagtaagatttgctaatgttctacattaagtgccttctccaa

SEQ ID NO: 29394 - DNA, 76 bp, Homo sapiens
aatgagctcatttttgttgtagccaaccagtaagatttgctaatgttctacattaagtgccttctccaaagacatc

SEQ ID NO: 29395 - DNA, 77 bp, Homo sapiens
aaccagtaagatttgctaatgttctacattaagtgccttctccaaagacatccctctttgcctcatatgttgaatca

SEQ ID NO: 29396 - DNA, 80 bp, Homo sapiens
ttctacattaagtgccttctccaaagacatccctctttgcctcatatgttgaatcatccagtgcggatatttcaatgaaa

SEQ ID NO: 29397 - DNA, 79 bp, Homo sapiens
tccaaagacatccctctttgcctcatatgttgaatcatccagtgcggatatttcaatgaaaatatcattggttgacttt

SEQ ID NO: 29398 - DNA, 80 bp, Homo sapiens
tccctctttgcctcatatgttgaatcatccagtgcggatatttcaatgaaaatatcattggttgacttttgtgatggtaa

SEQ ID NO: 29399 - DNA, 82 bp, Homo sapiens
tttgcctcatatgttgaatcatccagtgcggatatttcaatgaaaatatcattggttgacttttgtgatggtaataatgcta

SEQ ID NO: 29400 - DNA, 81 bp, Homo sapiens
atgttgaatcatccagtgcggatatttcaatgaaaatatcattggttgacttttgtgatggtaataatgctatggcatctt

SEQ ID NO: 29401 - DNA, 81 bp, Homo sapiens
gatatttcaatgaaaatatcattggttgacttttgtgatggtaataatgctatggcatctttgccatgaagttgtggcctc

SEQ ID NO: 29402 - DNA, 80 bp, Homo sapiens
atatttcaatgaaaatatcattggttgacttttgtgatggtaataatgctatggcatctttgccatgaagttgtggcctc

SEQ ID NO: 29403 - DNA, 78 bp, Homo sapiens
aaatatcattggttgacttttgtgatggtaataatgctatggcatctttgccatgaagttgtggcctccttggattct

SEQ ID NO: 29404 - DNA, 81 bp, Homo sapiens
atatcattggttgacttttgtgatggtaataatgctatggcatctttgccatgaagttgtggcctccttggattcttctga

SEQ ID NO: 29405 - DNA, 78 bp, Homo sapiens
ttggttgacttttgtgatggtaataatgctatggcatctttgccatgaagttgtggcctccttggattcttctgactt

SEQ ID NO: 29406 - DNA, 78 bp, Homo sapiens
atggtaataatgctatggcatctttgccatgaagttgtggcctccttggattcttctgactttggcttctgaaaggaa

SEQ ID NO: 29407 - DNA, 78 bp, Homo sapiens
aatgctatggcatctttgccatgaagttgtggcctccttggattcttctgactttggcttctgaaaggaaggcctaga

SEQ ID NO: 29408 - DNA, 75 bp, Homo sapiens
atctttgccatgaagttgtggcctccttggattcttctgactttggcttctgaaaggaaggcctagatccagccc

SEQ ID NO: 29409 - DNA, 74 bp, Homo sapiens
atgaagttgtggcctccttggattcttctgactttggcttctgaaaggaaggcctagatccagccctggtggta

SEQ ID NO: 29410 - DNA, 73 bp, Homo sapiens
ctccttggattcttctgactttggcttctgaaaggaaggcctagatccagccctggtggtagttcctttctga

SEQ ID NO: 29411 - DNA, 74 bp, Homo sapiens
tttggcttctgaaaggaaggcctagatccagccctggtggtagttcctttctgaggtctctcagtcccttgaga

SEQ ID NO: 29412 - DNA, 70 bp, Homo sapiens
aaaggaaggcctagatccagccctggtggtagttcctttctgaggtctctcagtcccttgagactttggg

SEQ ID NO: 29413 - DNA, 74 bp, Homo sapiens
tagatccagccctggtggtagttcctttctgaggtctctcagtcccttgagactttggggtagtttggctgcca

SEQ ID NO: 29414 - DNA, 77 bp, Homo sapiens
ttcctttctgaggtctctcagtcccttgagactttggggtagtttggctgccattctcactgacaaaatgtatatca

SEQ ID NO: 29415 - DNA, 77 bp, Homo sapiens
ttctgaggtctctcagtcccttgagactttggggtagtttggctgccattctcactgacaaaatgtatatcagcccc

SEQ ID NO: 29416 - DNA, 73 bp, Homo sapiens
agtcccttgagactttggggtagtttggctgccattctcactgacaaaatgtatatcagcccccacctccacc

SEQ ID NO: 29417 - DNA, 71 bp, Homo sapiens
actttggggtagtttggctgccattctcactgacaaaatgtatatcagcccccacctccaccccccaatat

SEQ ID NO: 29418 - DNA, 73 bp, Homo sapiens
tagtttggctgccattctcactgacaaaatgtatatcagcccccacctccaccccccaatattccttgaactt

SEQ ID NO: 29419 - DNA, 74 bp, Homo sapiens
ccattctcactgacaaaatgtatatcagcccccacctccaccccccaatattccttgaactttgaattgcttca

SEQ ID NO: 29420 - DNA, 73 bp, Homo sapiens
actgacaaaatgtatatcagcccccacctccaccccccaatattccttgaactttgaattgcttcagaacaca

SEQ ID NO: 29421 - DNA, 72 bp, Homo sapiens
aaatgtatatcagcccccacctccaccccccaatattccttgaactttgaattgcttcagaacacaggtgtg

SEQ ID NO: 29422 - DNA, 71 bp, Homo sapiens
cccacctccaccccccaatattccttgaactttgaattgcttcagaacacaggtgtggcctgaaggtattc

SEQ ID NO: 29423 - DNA, 70 bp, Homo sapiens
accccccaatattccttgaactttgaattgcttcagaacacaggtgtggcctgaaggtattcccttatta

SEQ ID NO: 29424 - DNA, 71 bp, Homo sapiens
aatattccttgaactttgaattgcttcagaacacaggtgtggcctgaaggtattcccttattagggaagtg

SEQ ID NO: 29425 - DNA, 75 bp, Homo sapiens
actttgaattgcttcagaacacaggtgtggcctgaaggtattcccttattagggaagtgtcactgctgtcttcta

SEQ ID NO: 29426 - DNA, 71 bp, Homo sapiens
aggtgtggcctgaaggtattcccttattagggaagtgtcactgctgtcttctagtcaaacttgtaaagaaa

SEQ ID NO: 29427 - DNA, 71 bp, Homo sapiens
tggcctgaaggtattcccttattagggaagtgtcactgctgtcttctagtcaaacttgtaaagaaaaagat

SEQ ID NO: 29428 - DNA, 72 bp, Homo sapiens
tattcccttattagggaagtgtcactgctgtcttctagtcaaacttgtaaagaaaaagattccagttcagta

SEQ ID NO: 29429 - DNA, 77 bp, Homo sapiens
ctgctgtcttctagtcaaacttgtaaagaaaaagattccagttcagtatttgcagcaagaagcttgaatgctgttct

SEQ ID NO: 29430 - DNA, 74 bp, Homo sapiens
gtcttctagtcaaacttgtaaagaaaaagattccagttcagtatttgcagcaagaagcttgaatgctgttcttt

SEQ ID NO: 29431 - DNA, 78 bp, Homo sapiens
aaaaagattccagttcagtatttgcagcaagaagcttgaatgctgttctttttatcgcattgttacatcgactcattc

SEQ ID NO: 29432 - DNA, 79 bp, Homo sapiens
agttcagtatttgcagcaagaagcttgaatgctgttctttttatcgcattgttacatcgactcattctccattttgctt

SEQ ID NO: 29433 - DNA, 78 bp, Homo sapiens
tatttgcagcaagaagcttgaatgctgttctttttatcgcattgttacatcgactcattctccattttgctttggttt

SEQ ID NO: 29434 - DNA, 75 bp, Homo sapiens
aagcttgaatgctgttctttttatcgcattgttacatcgactcattctccattttgctttggttttgtcttgact

SEQ ID NO: 29435 - DNA, 76 bp, Homo sapiens
aatgctgttctttttatcgcattgttacatcgactcattctccattttgctttggttttgtcttgacttgacttga

SEQ ID NO: 29436 - DNA, 73 bp, Homo sapiens
ctttttatcgcattgttacatcgactcattctccattttgctttggttttgtcttgacttgacttgactttgg

SEQ ID NO: 29437 - DNA, 70 bp, Homo sapiens
attgttacatcgactcattctccattttgctttggttttgtcttgacttgacttgactttgggggtaaag

SEQ ID NO: 29438 - DNA, 71 bp, Homo sapiens
tcgactcattctccattttgctttggttttgtcttgacttgacttgactttgggggtaaagtctttcacca

SEQ ID NO: 29439 - DNA, 69 bp, Homo sapiens
ttttgctttggttttgtcttgacttgacttgactttgggggtaaagtctttcaccagcacacaagagtt

SEQ ID NO: 29440 - DNA, 71 bp, Homo sapiens
gttttgtcttgacttgacttgactttgggggtaaagtctttcaccagcacacaagagtttgattgtacaaa

SEQ ID NO: 29441 - DNA, 73 bp, Homo sapiens
gtcttgacttgacttgactttgggggtaaagtctttcaccagcacacaagagtttgattgtacaaatatatct

SEQ ID NO: 29442 - DNA, 74 bp, Homo sapiens
acttgactttgggggtaaagtctttcaccagcacacaagagtttgattgtacaaatatatcttctgcattaaca

SEQ ID NO: 29443 - DNA, 81 bp, Homo sapiens
acacaagagtttgattgtacaaatatatcttctgcattaacatctctgcctgttgcttaagatcagttgcttttatactca

SEQ ID NO: 29444 - DNA, 81 bp, Homo sapiens
agtttgattgtacaaatatatcttctgcattaacatctctgcctgttgcttaagatcagttgcttttatactcagaatgga

SEQ ID NO: 29445 - DNA, 80 bp, Homo sapiens
aaatatatcttctgcattaacatctctgcctgttgcttaagatcagttgcttttatactcagaatggaaatacctgatct

SEQ ID NO: 29446 - DNA, 80 bp, Homo sapiens
tgcattaacatctctgcctgttgcttaagatcagttgcttttatactcagaatggaaatacctgatcttggctagttttg

SEQ ID NO: 29447 - DNA, 76 bp, Homo sapiens
gcctgttgcttaagatcagttgcttttatactcagaatggaaatacctgatcttggctagttttgttataagatat

SEQ ID NO: 29448 - DNA, 75 bp, Homo sapiens
ttatactcagaatggaaatacctgatcttggctagttttgttataagatattgatttcatttagatttccctcca

SEQ ID NO: 29449 - DNA, 73 bp, Homo sapiens
aaatacctgatcttggctagttttgttataagatattgatttcatttagatttccctccacgaggtcagcaaa

SEQ ID NO: 29450 - DNA, 75 bp, Homo sapiens
tcttggctagttttgttataagatattgatttcatttagatttccctccacgaggtcagcaaactatcatgttct

SEQ ID NO: 29451 - DNA, 75 bp, Homo sapiens
ttataagatattgatttcatttagatttccctccacgaggtcagcaaactatcatgttcttatgtaaacttaggc

SEQ ID NO: 29452 - DNA, 74 bp, Homo sapiens
agatattgatttcatttagatttccctccacgaggtcagcaaactatcatgttcttatgtaaacttaggccaag

SEQ ID NO: 29453 - DNA, 75 bp, Homo sapiens
tttagatttccctccacgaggtcagcaaactatcatgttcttatgtaaacttaggccaaggccagagttatcata

SEQ ID NO: 29454 - DNA, 75 bp, Homo sapiens
ttccctccacgaggtcagcaaactatcatgttcttatgtaaacttaggccaaggccagagttatcatagtcccta

SEQ ID NO: 29455 - DNA, 76 bp, Homo sapiens
tcagcaaactatcatgttcttatgtaaacttaggccaaggccagagttatcatagtccctaggttgctacggctta

SEQ ID NO: 29456 - DNA, 74 bp, Homo sapiens
aaactatcatgttcttatgtaaacttaggccaaggccagagttatcatagtccctaggttgctacggcttatca

SEQ ID NO: 29457 - DNA, 74 bp, Homo sapiens
ttatgtaaacttaggccaaggccagagttatcatagtccctaggttgctacggcttatcatgtgcttggtaaaa

SEQ ID NO: 29458 - DNA, 73 bp, Homo sapiens
aaacttaggccaaggccagagttatcatagtccctaggttgctacggcttatcatgtgcttggtaaaaggtga

SEQ ID NO: 29459 - DNA, 77 bp, Homo sapiens
aaggccagagttatcatagtccctaggttgctacggcttatcatgtgcttggtaaaaggtgatcgcaggttctcaga

SEQ ID NO: 29460 - DNA, 82 bp, Homo sapiens
atcgcaggttctcagacgagtttactttacatgagatggaatcaggcagagaggctgggatgatggagaaagctcgaggtga

SEQ ID NO: 29461 - DNA, 77 bp, Homo sapiens
agacgagtttactttacatgagatggaatcaggcagagaggctgggatgatggagaaagctcgaggtgaagttttaa

SEQ ID NO: 29462 - DNA, 75 bp, Homo sapiens
agtttactttacatgagatggaatcaggcagagaggctgggatgatggagaaagctcgaggtgaagttttaaaaa

SEQ ID NO: 29463 - DNA, 73 bp, Homo sapiens
agatggaatcaggcagagaggctgggatgatggagaaagctcgaggtgaagttttaaaaaaaaagttgtggaa

SEQ ID NO: 29464 - DNA, 69 bp, Homo sapiens
aggcagagaggctgggatgatggagaaagctcgaggtgaagttttaaaaaaaaagttgtggaaaggaaa

SEQ ID NO: 29465 - DNA, 67 bp, Homo sapiens
gctgggatgatggagaaagctcgaggtgaagttttaaaaaaaaagttgtggaaaggaaagttccaaa

SEQ ID NO: 29466 - DNA, 64 bp, Homo sapiens
atggagaaagctcgaggtgaagttttaaaaaaaaagttgtggaaaggaaagttccaaagaggtg

SEQ ID NO: 29467 - DNA, 63 bp, Homo sapiens
ctcgaggtgaagttttaaaaaaaaagttgtggaaaggaaagttccaaagaggtggtttctgag

SEQ ID NO: 29468 - DNA, 64 bp, Homo sapiens
agttttaaaaaaaaagttgtggaaaggaaagttccaaagaggtggtttctgaggaagtcagagc

SEQ ID NO: 29469 - DNA, 75 bp, Homo sapiens
ttccaaagaggtggtttctgaggaagtcagagcgcccagggccagagcagtcagtaatgggtgaatgaggttgtt

SEQ ID NO: 29470 - DNA, 75 bp, Homo sapiens
agaggtggtttctgaggaagtcagagcgcccagggccagagcagtcagtaatgggtgaatgaggttgtttggaaa

SEQ ID NO: 29471 - DNA, 77 bp, Homo sapiens
aggaagtcagagcgcccagggccagagcagtcagtaatgggtgaatgaggttgtttggaaagtcggtgtgacagaca

SEQ ID NO: 29472 - DNA, 80 bp, Homo sapiens
gccagagcagtcagtaatgggtgaatgaggttgtttggaaagtcggtgtgacagacacatggatgccatctacttctagg

SEQ ID NO: 29473 - DNA, 77 bp, Homo sapiens
gtgaatgaggttgtttggaaagtcggtgtgacagacacatggatgccatctacttctaggttgctggtgggtattaa

SEQ ID NO: 29474 - DNA, 77 bp, Homo sapiens
aggttgtttggaaagtcggtgtgacagacacatggatgccatctacttctaggttgctggtgggtattaaatatgca

SEQ ID NO: 29475 - DNA, 81 bp, Homo sapiens
tggaaagtcggtgtgacagacacatggatgccatctacttctaggttgctggtgggtattaaatatgcacaatattccata

SEQ ID NO: 29476 - DNA, 81 bp, Homo sapiens
acagacacatggatgccatctacttctaggttgctggtgggtattaaatatgcacaatattccatagctcactgaggattt

SEQ ID NO: 29477 - DNA, 78 bp, Homo sapiens
atggatgccatctacttctaggttgctggtgggtattaaatatgcacaatattccatagctcactgaggattttaaaa

SEQ ID NO: 29478 - DNA, 76 bp, Homo sapiens
ccatctacttctaggttgctggtgggtattaaatatgcacaatattccatagctcactgaggattttaaaattata

SEQ ID NO: 29479 - DNA, 76 bp, Homo sapiens
ctaggttgctggtgggtattaaatatgcacaatattccatagctcactgaggattttaaaattataagcataggat

SEQ ID NO: 29480 - DNA, 74 bp, Homo sapiens
ggtgggtattaaatatgcacaatattccatagctcactgaggattttaaaattataagcataggattttatatt

SEQ ID NO: 29481 - DNA, 74 bp, Homo sapiens
tgcacaatattccatagctcactgaggattttaaaattataagcataggattttatattttggggtgaaagaat

SEQ ID NO: 29482 - DNA, 75 bp, Homo sapiens
tccatagctcactgaggattttaaaattataagcataggattttatattttggggtgaaagaattatctggcaca

SEQ ID NO: 29483 - DNA, 73 bp, Homo sapiens
gctcactgaggattttaaaattataagcataggattttatattttggggtgaaagaattatctggcacattag

SEQ ID NO: 29484 - DNA, 70 bp, Homo sapiens
ttaaaattataagcataggattttatattttggggtgaaagaattatctggcacattaggtattggagtt

SEQ ID NO: 29485 - DNA, 70 bp, Homo sapiens
attataagcataggattttatattttggggtgaaagaattatctggcacattaggtattggagtttaaaa

SEQ ID NO: 29486 - DNA, 67 bp, Homo sapiens
gattttatattttggggtgaaagaattatctggcacattaggtattggagtttaaaaaaaaagccaa

SEQ ID NO: 29487 - DNA, 69 bp, Homo sapiens
tggggtgaaagaattatctggcacattaggtattggagtttaaaaaaaaagccaaatttcacagtctta

SEQ ID NO: 29488 - DNA, 65 bp, Homo sapiens
atctggcacattaggtattggagtttaaaaaaaaagccaaatttcacagtcttaataactttttt

SEQ ID NO: 29489 - DNA, 70 bp, Homo sapiens
ttttttaaaaaaaactaaaaggcgcttcatgtccagtgtgtggcccttctgaaacttatggtcatctctc

SEQ ID NO: 29490 - DNA, 73 bp, Homo sapiens
aaaaactaaaaggcgcttcatgtccagtgtgtggcccttctgaaacttatggtcatctctcccactgaaacca

SEQ ID NO: 29491 - DNA, 74 bp, Homo sapiens
taaaaggcgcttcatgtccagtgtgtggcccttctgaaacttatggtcatctctcccactgaaaccaaggtctt

SEQ ID NO: 29492 - DNA, 75 bp, Homo sapiens
atgtccagtgtgtggcccttctgaaacttatggtcatctctcccactgaaaccaaggtcttttcaaatgtggcta

SEQ ID NO: 29493 - DNA, 73 bp, Homo sapiens
tgtgtggcccttctgaaacttatggtcatctctcccactgaaaccaaggtcttttcaaatgtggctaaatggg

SEQ ID NO: 29494 - DNA, 75 bp, Homo sapiens
ttctgaaacttatggtcatctctcccactgaaaccaaggtcttttcaaatgtggctaaatggggatgaggagaca

SEQ ID NO: 29495 - DNA, 73 bp, Homo sapiens
ttatggtcatctctcccactgaaaccaaggtcttttcaaatgtggctaaatggggatgaggagacacgggtag

SEQ ID NO: 29496 - DNA, 70 bp, Homo sapiens
atctctcccactgaaaccaaggtcttttcaaatgtggctaaatggggatgaggagacacgggtaggactt

SEQ ID NO: 29497 - DNA, 69 bp, Homo sapiens
ccactgaaaccaaggtcttttcaaatgtggctaaatggggatgaggagacacgggtaggactttcttgg

SEQ ID NO: 29498 - DNA, 73 bp, Homo sapiens
tcttttcaaatgtggctaaatggggatgaggagacacgggtaggactttcttggtgtgtgtgcattctttaaa

SEQ ID NO: 29499 - DNA, 73 bp, Homo sapiens
aaatgtggctaaatggggatgaggagacacgggtaggactttcttggtgtgtgtgcattctttaaagagccaa

SEQ ID NO: 29500 - DNA, 73 bp, Homo sapiens
ctaaatggggatgaggagacacgggtaggactttcttggtgtgtgtgcattctttaaagagccaagttgcttc

SEQ ID NO: 29501 - DNA, 72 bp, Homo sapiens
atggggatgaggagacacgggtaggactttcttggtgtgtgtgcattctttaaagagccaagttgcttcggg

SEQ ID NO: 29502 - DNA, 72 bp, Homo sapiens
atgaggagacacgggtaggactttcttggtgtgtgtgcattctttaaagagccaagttgcttcggggaaaca

SEQ ID NO: 29503 - DNA, 73 bp, Homo sapiens
taggactttcttggtgtgtgtgcattctttaaagagccaagttgcttcggggaaacagccaggaaaatggtca

SEQ ID NO: 29504 - DNA, 70 bp, Homo sapiens
tgcattctttaaagagccaagttgcttcggggaaacagccaggaaaatggtcaagattatttttagaggt

SEQ ID NO: 29505 - DNA, 67 bp, Homo sapiens
tttaaagagccaagttgcttcggggaaacagccaggaaaatggtcaagattatttttagaggttatt

SEQ ID NO: 29506 - DNA, 66 bp, Homo sapiens
ccaagttgcttcggggaaacagccaggaaaatggtcaagattatttttagaggttattttattggg

SEQ ID NO: 29507 - DNA, 67 bp, Homo sapiens
gccaggaaaatggtcaagattatttttagaggttattttattggggattttaagaactaataacatc

SEQ ID NO: 29508 - DNA, 66 bp, Homo sapiens
ggtcaagattatttttagaggttattttattggggattttaagaactaataacatcttgagttatt

SEQ ID NO: 29509 - DNA, 65 bp, Homo sapiens
ttttagaggttattttattggggattttaagaactaataacatcttgagttatttttaattcagg

SEQ ID NO: 29510 - DNA, 67 bp, Homo sapiens
gttattttattggggattttaagaactaataacatcttgagttatttttaattcagggggatgtgga

SEQ ID NO: 29511 - DNA, 67 bp, Homo sapiens
gggattttaagaactaataacatcttgagttatttttaattcagggggatgtggaaaggtttgcaat

SEQ ID NO: 29512 - DNA, 69 bp, Homo sapiens
agaactaataacatcttgagttatttttaattcagggggatgtggaaaggtttgcaattgtcaagtgtt

SEQ ID NO: 29513 - DNA, 71 bp, Homo sapiens
catcttgagttatttttaattcagggggatgtggaaaggtttgcaattgtcaagtgttttgttgtagctta

SEQ ID NO: 29514 - DNA, 71 bp, Homo sapiens
tatttttaattcagggggatgtggaaaggtttgcaattgtcaagtgttttgttgtagcttagtatccataa

SEQ ID NO: 29515 - DNA, 71 bp, Homo sapiens
ttaattcagggggatgtggaaaggtttgcaattgtcaagtgttttgttgtagcttagtatccataagggaa

SEQ ID NO: 29516 - DNA, 71 bp, Homo sapiens
aaggtttgcaattgtcaagtgttttgttgtagcttagtatccataagggaaacttagactatagacataac

SEQ ID NO: 29517 - DNA, 72 bp, Homo sapiens
attgtcaagtgttttgttgtagcttagtatccataagggaaacttagactatagacataactacaaagccag

SEQ ID NO: 29518 - DNA, 73 bp, Homo sapiens
ttttgttgtagcttagtatccataagggaaacttagactatagacataactacaaagccagtgcagcttttgt

SEQ ID NO: 29519 - DNA, 74 bp, Homo sapiens
agcttagtatccataagggaaacttagactatagacataactacaaagccagtgcagcttttgttttctgtatg

SEQ ID NO: 29520 - DNA, 72 bp, Homo sapiens
ccataagggaaacttagactatagacataactacaaagccagtgcagcttttgttttctgtatgttgttggg

SEQ ID NO: 29521 - DNA, 72 bp, Homo sapiens
aacttagactatagacataactacaaagccagtgcagcttttgttttctgtatgttgttgggggatcaactt

SEQ ID NO: 29522 - DNA, 78 bp, Homo sapiens
ctacaaagccagtgcagcttttgttttctgtatgttgttgggggatcaactttcacacatagcaagcacatggcctcc

SEQ ID NO: 29523 - DNA, 79 bp, Homo sapiens
agcttttgttttctgtatgttgttgggggatcaactttcacacatagcaagcacatggcctccctgatgtcaggatgcc

SEQ ID NO: 29524 - DNA, 79 bp, Homo sapiens
ttttctgtatgttgttgggggatcaactttcacacatagcaagcacatggcctccctgatgtcaggatgcctttgttag

SEQ ID NO: 29525 - DNA, 81 bp, Homo sapiens
tatgttgttgggggatcaactttcacacatagcaagcacatggcctccctgatgtcaggatgcctttgttaggatctgtat

SEQ ID NO: 29526 - DNA, 79 bp, Homo sapiens
atcaactttcacacatagcaagcacatggcctccctgatgtcaggatgcctttgttaggatctgtatttgcccttaatt

SEQ ID NO: 29527 - DNA, 74 bp, Homo sapiens
aagcacatggcctccctgatgtcaggatgcctttgttaggatctgtatttgcccttaattttgttgaaatcttt

SEQ ID NO: 29528 - DNA, 71 bp, Homo sapiens
tccctgatgtcaggatgcctttgttaggatctgtatttgcccttaattttgttgaaatcttttttccttct

SEQ ID NO: 29529 - DNA, 67 bp, Homo sapiens
gcctttgttaggatctgtatttgcccttaattttgttgaaatcttttttccttcttcctcttgaaaa

SEQ ID NO: 29530 - DNA, 66 bp, Homo sapiens
aggatctgtatttgcccttaattttgttgaaatcttttttccttcttcctcttgaaaagttccaaa

SEQ ID NO: 29531 - DNA, 64 bp, Homo sapiens
tttgcccttaattttgttgaaatcttttttccttcttcctcttgaaaagttccaaaatatagtt

SEQ ID NO: 29532 - DNA, 70 bp, Homo sapiens
tgttgaaatcttttttccttcttcctcttgaaaagttccaaaatatagtttattgtatctttcatcacta

SEQ ID NO: 29533 - DNA, 67 bp, Homo sapiens
tttttccttcttcctcttgaaaagttccaaaatatagtttattgtatctttcatcactaaaaatttg

SEQ ID NO: 29534 - DNA, 72 bp, Homo sapiens
attgtatctttcatcactaaaaatttgttcctttttcactatgggcagttcacacaaggcaaaaactattga

SEQ ID NO: 29535 - DNA, 71 bp, Homo sapiens
ttcatcactaaaaatttgttcctttttcactatgggcagttcacacaaggcaaaaactattgaacagttgg

SEQ ID NO: 29536 - DNA, 68 bp, Homo sapiens
aaatttgttcctttttcactatgggcagttcacacaaggcaaaaactattgaacagttggttttagtg

SEQ ID NO: 29537 - DNA, 70 bp, Homo sapiens
ctttttcactatgggcagttcacacaaggcaaaaactattgaacagttggttttagtgtgttgtataact

SEQ ID NO: 29538 - DNA, 73 bp, Homo sapiens
cagttcacacaaggcaaaaactattgaacagttggttttagtgtgttgtataactttgctgtatatcaaacta

SEQ ID NO: 29539 - DNA, 71 bp, Homo sapiens
aggcaaaaactattgaacagttggttttagtgtgttgtataactttgctgtatatcaaactaattttgaca

SEQ ID NO: 29540 - DNA, 74 bp, Homo sapiens
ttttagtgtgttgtataactttgctgtatatcaaactaattttgacaagttttcatcctaagcctcaaatcatg

SEQ ID NO: 29541 - DNA, 75 bp, Homo sapiens
gtgtgttgtataactttgctgtatatcaaactaattttgacaagttttcatcctaagcctcaaatcatgtaatta

SEQ ID NO: 29542 - DNA, 74 bp, Homo sapiens
ctttgctgtatatcaaactaattttgacaagttttcatcctaagcctcaaatcatgtaattaataatttgcctg

SEQ ID NO: 29543 - DNA, 72 bp, Homo sapiens
gtatatcaaactaattttgacaagttttcatcctaagcctcaaatcatgtaattaataatttgcctgtttat

SEQ ID NO: 29544 - DNA, 74 bp, Homo sapiens
tttgacaagttttcatcctaagcctcaaatcatgtaattaataatttgcctgtttatttatgacctaattgtga

SEQ ID NO: 29545 - DNA, 73 bp, Homo sapiens
caagttttcatcctaagcctcaaatcatgtaattaataatttgcctgtttatttatgacctaattgtgattct

SEQ ID NO: 29546 - DNA, 73 bp, Homo sapiens
tcctaagcctcaaatcatgtaattaataatttgcctgtttatttatgacctaattgtgattcttttattaata

SEQ ID NO: 29547 - DNA, 71 bp, Homo sapiens
aatcatgtaattaataatttgcctgtttatttatgacctaattgtgattcttttattaataaaagctaatg

SEQ ID NO: 29548 - DNA, 69 bp, Homo sapiens
ataatttgcctgtttatttatgacctaattgtgattcttttattaataaaagctaatgggaaaaggatc

SEQ ID NO: 29549 - DNA, 70 bp, Homo sapiens
gcctgtttatttatgacctaattgtgattcttttattaataaaagctaatgggaaaaggatccctgatta

SEQ ID NO: 29550 - DNA, 73 bp, Homo sapiens
tgacctaattgtgattcttttattaataaaagctaatgggaaaaggatccctgattaagctgatgactagacc

SEQ ID NO: 29551 - DNA, 72 bp, Homo sapiens
gtgattcttttattaataaaagctaatgggaaaaggatccctgattaagctgatgactagacctacaattaa

SEQ ID NO: 29552 - DNA, 75 bp, Homo sapiens
taaaagctaatgggaaaaggatccctgattaagctgatgactagacctacaattaattttcctgcagtatatgaa

SEQ ID NO: 29553 - DNA, 75 bp, Homo sapiens
atgggaaaaggatccctgattaagctgatgactagacctacaattaattttcctgcagtatatgaagtattgtac

SEQ ID NO: 29554 - DNA, 77 bp, Homo sapiens
gatccctgattaagctgatgactagacctacaattaattttcctgcagtatatgaagtattgtaccagagtattaaa

SEQ ID NO: 29555 - DNA, 72 bp, Homo sapiens
actagacctacaattaattttcctgcagtatatgaagtattgtaccagagtattaaaagatatgtaatattt

SEQ ID NO: 29556 - DNA, 74 bp, Homo sapiens
aattttcctgcagtatatgaagtattgtaccagagtattaaaagatatgtaatattttattgataaatctatcc

SEQ ID NO: 29557 - DNA, 74 bp, Homo sapiens
cctgcagtatatgaagtattgtaccagagtattaaaagatatgtaatattttattgataaatctatcctttaaa

SEQ ID NO: 29558 - DNA, 71 bp, Homo sapiens
tgaagtattgtaccagagtattaaaagatatgtaatattttattgataaatctatcctttaaaaggaatac

SEQ ID NO: 29559 - DNA, 69 bp, Homo sapiens
cagagtattaaaagatatgtaatattttattgataaatctatcctttaaaaggaatacgttttaggatg

SEQ ID NO: 29560 - DNA, 71 bp, Homo sapiens
aaagatatgtaatattttattgataaatctatcctttaaaaggaatacgttttaggatgtcatcattttga

SEQ ID NO: 29561 - DNA, 74 bp, Homo sapiens
gtaatattttattgataaatctatcctttaaaaggaatacgttttaggatgtcatcattttgatgtgaatcatg

SEQ ID NO: 29562 - DNA, 76 bp, Homo sapiens
ttattgataaatctatcctttaaaaggaatacgttttaggatgtcatcattttgatgtgaatcatgtaaatgttga

SEQ ID NO: 29563 - DNA, 76 bp, Homo sapiens
ctatcctttaaaaggaatacgttttaggatgtcatcattttgatgtgaatcatgtaaatgttgataatatgctgtt

SEQ ID NO: 29564 - DNA, 77 bp, Homo sapiens
aaaaggaatacgttttaggatgtcatcattttgatgtgaatcatgtaaatgttgataatatgctgtttattatacat

SEQ ID NO: 29565 - DNA, 80 bp, Homo sapiens
tacgttttaggatgtcatcattttgatgtgaatcatgtaaatgttgataatatgctgtttattatacatttagtgtttca

SEQ ID NO: 29566 - DNA, 83 bp, Homo sapiens
gatgtcatcattttgatgtgaatcatgtaaatgttgataatatgctgtttattatacatttagtgtttcaagagattcactta

SEQ ID NO: 29567 - DNA, 79 bp, Homo sapiens
ttgatgtgaatcatgtaaatgttgataatatgctgtttattatacatttagtgtttcaagagattcacttaattgcctt

SEQ ID NO: 29568 - DNA, 76 bp, Homo sapiens
atcatgtaaatgttgataatatgctgtttattatacatttagtgtttcaagagattcacttaattgcctttttgcc

SEQ ID NO: 29569 - DNA, 76 bp, Homo sapiens
tgataatatgctgtttattatacatttagtgtttcaagagattcacttaattgcctttttgcccacgtatattatg

SEQ ID NO: 29570 - DNA, 75 bp, Homo sapiens
tgctgtttattatacatttagtgtttcaagagattcacttaattgcctttttgcccacgtatattatgtagtcta

SEQ ID NO: 29571 - DNA, 73 bp, Homo sapiens
acatttagtgtttcaagagattcacttaattgcctttttgcccacgtatattatgtagtctatttgcaactgt

SEQ ID NO: 29572 - DNA, 73 bp, Homo sapiens
gtgtttcaagagattcacttaattgcctttttgcccacgtatattatgtagtctatttgcaactgttcttaaa

SEQ ID NO: 29573 - DNA, 73 bp, Homo sapiens
gagattcacttaattgcctttttgcccacgtatattatgtagtctatttgcaactgttcttaaaaaaatgaca

SEQ ID NO: 29574 - DNA, 71 bp, Homo sapiens
tgcctttttgcccacgtatattatgtagtctatttgcaactgttcttaaaaaaatgacattaaaagaatag

SEQ ID NO: 29575 - DNA, 72 bp, Homo sapiens
gcccacgtatattatgtagtctatttgcaactgttcttaaaaaaatgacattaaaagaatagtttatgtaga

SEQ ID NO: 29576 - DNA, 71 bp, Homo sapiens
ttatgtagtctatttgcaactgttcttaaaaaaatgacattaaaagaatagtttatgtagagaaacattag

SEQ ID NO: 29577 - DNA, 72 bp, Homo sapiens
tagtctatttgcaactgttcttaaaaaaatgacattaaaagaatagtttatgtagagaaacattagtggatg

SEQ ID NO: 29578 - DNA, 70 bp, Homo sapiens
tgttcttaaaaaaatgacattaaaagaatagtttatgtagagaaacattagtggatgttaattgtctccc

SEQ ID NO: 29579 - DNA, 70 bp, Homo sapiens
aaaaatgacattaaaagaatagtttatgtagagaaacattagtggatgttaattgtctccccacctatat

SEQ ID NO: 29580 - DNA, 71 bp, Homo sapiens
gacattaaaagaatagtttatgtagagaaacattagtggatgttaattgtctccccacctatatttatggg

SEQ ID NO: 29581 - DNA, 78 bp, Homo sapiens
tgttaattgtctccccacctatatttatgggtgttagcgcaactgctttgctagttgcaaagctgtattatcagagta

SEQ ID NO: 29582 - DNA, 76 bp, Homo sapiens
attgtctccccacctatatttatgggtgttagcgcaactgctttgctagttgcaaagctgtattatcagagtaaaa

SEQ ID NO: 29583 - DNA, 67 bp, Homo sapiens
gggcgccggctgcgggtgggaggagagaccgggaggccggccgggctgcgtcccgggtccccgcgcc

SEQ ID NO: 29584 - DNA, 68 bp, Homo sapiens
tgcgggtgggaggagagaccgggaggccggccgggctgcgtcccgggtccccgcgccgcgccgcgacc

SEQ ID NO: 29585 - DNA, 70 bp, Homo sapiens
tgggaggagagaccgggaggccggccgggctgcgtcccgggtccccgcgccgcgccgcgacctgcagacc

SEQ ID NO: 29586 - DNA, 67 bp, Homo sapiens
accgggaggccggccgggctgcgtcccgggtccccgcgccgcgccgcgacctgcagaccccgccgcc

SEQ ID NO: 29587 - DNA, 70 bp, Homo sapiens
cgggctgcgtcccgggtccccgcgccgcgccgcgacctgcagaccccgccgccgcgctcgggcccgtctc

SEQ ID NO: 29588 - DNA, 71 bp, Homo sapiens
tgcgtcccgggtccccgcgccgcgccgcgacctgcagaccccgccgccgcgctcgggcccgtctcccacgc

SEQ ID NO: 29589 - DNA, 69 bp, Homo sapiens
cccgcgccgcgccgcgacctgcagaccccgccgccgcgctcgggcccgtctcccacgcccccgccgccc

SEQ ID NO: 29590 - DNA, 69 bp, Homo sapiens
ccgcgacctgcagaccccgccgccgcgctcgggcccgtctcccacgcccccgccgccccgcgcgcccaa

SEQ ID NO: 29591 - DNA, 69 bp, Homo sapiens
tgcagaccccgccgccgcgctcgggcccgtctcccacgcccccgccgccccgcgcgcccaactccgccg

SEQ ID NO: 29592 - DNA, 67 bp, Homo sapiens
cgccgccgcgctcgggcccgtctcccacgcccccgccgccccgcgcgcccaactccgccggccgccc

SEQ ID NO: 29593 - DNA, 65 bp, Homo sapiens
ctcgggcccgtctcccacgcccccgccgccccgcgcgcccaactccgccggccgccccgccccgc

SEQ ID NO: 29594 - DNA, 67 bp, Homo sapiens
cccgcgcgcccaactccgccggccgccccgccccgccccgcgcgctccagacccccggggcggctgc

SEQ ID NO: 29595 - DNA, 68 bp, Homo sapiens
ccccgccccgccccgcgcgctccagacccccggggcggctgccgggagagatgctggaagaaacttct

SEQ ID NO: 29596 - DNA, 70 bp, Homo sapiens
ccccgcgcgctccagacccccggggcggctgccgggagagatgctggaagaaacttcttaaatgaccgcg

SEQ ID NO: 29597 - DNA, 72 bp, Homo sapiens
tccagacccccggggcggctgccgggagagatgctggaagaaacttcttaaatgaccgcgtctggctggccg

SEQ ID NO: 29598 - DNA, 73 bp, Homo sapiens
cggggcggctgccgggagagatgctggaagaaacttcttaaatgaccgcgtctggctggccgtggagcctttc

SEQ ID NO: 29599 - DNA, 73 bp, Homo sapiens
ctgccgggagagatgctggaagaaacttcttaaatgaccgcgtctggctggccgtggagcctttctgggttgg

SEQ ID NO: 29600 - DNA, 71 bp, Homo sapiens
atgctggaagaaacttcttaaatgaccgcgtctggctggccgtggagcctttctgggttggggagaggaaa

SEQ ID NO: 29601 - DNA, 68 bp, Homo sapiens
aagaaacttcttaaatgaccgcgtctggctggccgtggagcctttctgggttggggagaggaaaggaa

SEQ ID NO: 29602 - DNA, 68 bp, Homo sapiens
ttaaatgaccgcgtctggctggccgtggagcctttctgggttggggagaggaaaggaaagtggaaaaa

SEQ ID NO: 29603 - DNA, 68 bp, Homo sapiens
tctggctggccgtggagcctttctgggttggggagaggaaaggaaagtggaaaaaacctgagaacttc

SEQ ID NO: 29604 - DNA, 68 bp, Homo sapiens
cgtggagcctttctgggttggggagaggaaaggaaagtggaaaaaacctgagaacttcctgatctctc

SEQ ID NO: 29605 - DNA, 72 bp, Homo sapiens
tttctgggttggggagaggaaaggaaagtggaaaaaacctgagaacttcctgatctctctcgctgtgagaca

SEQ ID NO: 29606 - DNA, 77 bp, Homo sapiens
gggagaggaaaggaaagtggaaaaaacctgagaacttcctgatctctctcgctgtgagacatgtctgagactcctgc

SEQ ID NO: 29607 - DNA, 81 bp, Homo sapiens
aggaaagtggaaaaaacctgagaacttcctgatctctctcgctgtgagacatgtctgagactcctgctcagtgtagcatta

SEQ ID NO: 29608 - DNA, 79 bp, Homo sapiens
aaaaaacctgagaacttcctgatctctctcgctgtgagacatgtctgagactcctgctcagtgtagcattaaggtaaaa

SEQ ID NO: 29609 - DNA, 82 bp, Homo sapiens
acctgagaacttcctgatctctctcgctgtgagacatgtctgagactcctgctcagtgtagcattaaggtaaaaatcttctc

SEQ ID NO: 29610 - DNA, 81 bp, Homo sapiens
ttcctgatctctctcgctgtgagacatgtctgagactcctgctcagtgtagcattaaggtaaaaatcttctcccctccttc

SEQ ID NO: 29611 - DNA, 78 bp, Homo sapiens
gctgtgagacatgtctgagactcctgctcagtgtagcattaaggtaaaaatcttctcccctccttctacgtggtggaa

SEQ ID NO: 29612 - DNA, 74 bp, Homo sapiens
agacatgtctgagactcctgctcagtgtagcattaaggtaaaaatcttctcccctccttctacgtggtggaaac

SEQ ID NO: 29613 - DNA, 68 bp, Homo sapiens
tcgcggcgcgaggcccccgttgccgagcgcgggcgcggggggcggagctcggcggagacggggaaggg

SEQ ID NO: 29614 - DNA, 68 bp, Homo sapiens
cccgttgccgagcgcgggcgcggggggcggagctcggcggagacggggaaggggtcgccgtggctgcc

SEQ ID NO: 29615 - DNA, 68 bp, Homo sapiens
agcgcgggcgcggggggcggagctcggcggagacggggaaggggtcgccgtggctgccggtcctcgag

SEQ ID NO: 29616 - DNA, 67 bp, Homo sapiens
ggcgcggggggcggagctcggcggagacggggaaggggtcgccgtggctgccggtcctcgagttggg

SEQ ID NO: 29617 - DNA, 71 bp, Homo sapiens
agctcggcggagacggggaaggggtcgccgtggctgccggtcctcgagttgggggctgccgcggacactgc

SEQ ID NO: 29618 - DNA, 71 bp, Homo sapiens
agacggggaaggggtcgccgtggctgccggtcctcgagttgggggctgccgcggacactgctaggcagacg

SEQ ID NO: 29619 - DNA, 72 bp, Homo sapiens
aaggggtcgccgtggctgccggtcctcgagttgggggctgccgcggacactgctaggcagacggcgagtacc

SEQ ID NO: 29620 - DNA, 74 bp, Homo sapiens
ccgtggctgccggtcctcgagttgggggctgccgcggacactgctaggcagacggcgagtaccgagcgcgggtg

SEQ ID NO: 29621 - DNA, 73 bp, Homo sapiens
cggtcctcgagttgggggctgccgcggacactgctaggcagacggcgagtaccgagcgcgggtggccgcggtg

SEQ ID NO: 29622 - DNA, 73 bp, Homo sapiens
agttgggggctgccgcggacactgctaggcagacggcgagtaccgagcgcgggtggccgcggtgtccgtgggc

SEQ ID NO: 29623 - DNA, 79 bp, Homo sapiens
gcggacactgctaggcagacggcgagtaccgagcgcgggtggccgcggtgtccgtgggccacgctcagctgcggtcaga

SEQ ID NO: 29624 - DNA, 81 bp, Homo sapiens
tgctaggcagacggcgagtaccgagcgcgggtggccgcggtgtccgtgggccacgctcagctgcggtcagaggcgacatga

SEQ ID NO: 29625 - DNA, 78 bp, Homo sapiens
agacggcgagtaccgagcgcgggtggccgcggtgtccgtgggccacgctcagctgcggtcagaggcgacatgagtgcc

SEQ ID NO: 29626 - DNA, 80 bp, Homo sapiens
taccgagcgcgggtggccgcggtgtccgtgggccacgctcagctgcggtcagaggcgacatgagtgccgcggggctgctg

SEQ ID NO: 29627 - DNA, 77 bp, Homo sapiens
cgggtggccgcggtgtccgtgggccacgctcagctgcggtcagaggcgacatgagtgccgcggggctgctggccccg

SEQ ID NO: 29628 - DNA, 76 bp, Homo sapiens
cggtgtccgtgggccacgctcagctgcggtcagaggcgacatgagtgccgcggggctgctggccccggccccggcc

SEQ ID NO: 29629 - DNA, 73 bp, Homo sapiens
ccaggctggagcgccgccggcccccgagtactaccccgaggaggatgaagagctggagagcgccgaggacgac

SEQ ID NO: 29630 - DNA, 75 bp, Homo sapiens
agcgccgccggcccccgagtactaccccgaggaggatgaagagctggagagcgccgaggacgacgagcgcagctg

SEQ ID NO: 29631 - DNA, 73 bp, Homo sapiens
ccggcccccgagtactaccccgaggaggatgaagagctggagagcgccgaggacgacgagcgcagctgtcggg

SEQ ID NO: 29632 - DNA, 76 bp, Homo sapiens
agtactaccccgaggaggatgaagagctggagagcgccgaggacgacgagcgcagctgtcggggccgcgagtcgga

SEQ ID NO: 29633 - DNA, 77 bp, Homo sapiens
aggaggatgaagagctggagagcgccgaggacgacgagcgcagctgtcggggccgcgagtcggacgaaggtgagtcc

SEQ ID NO: 29634 - DNA, 78 bp, Homo sapiens
aagagctggagagcgccgaggacgacgagcgcagctgtcggggccgcgagtcggacgaaggtgagtcctgccgctcgc

SEQ ID NO: 29635 - DNA, 75 bp, Homo sapiens
agagcgccgaggacgacgagcgcagctgtcggggccgcgagtcggacgaaggtgagtcctgccgctcgcccggcc

SEQ ID NO: 29636 - DNA, 73 bp, Homo sapiens
acgacgagcgcagctgtcggggccgcgagtcggacgaaggtgagtcctgccgctcgcccggccgcccggagcg

SEQ ID NO: 29637 - DNA, 73 bp, Homo sapiens
gtgtcaggtgacgccaactccgtgaattatgattttaactagcccctatttcctaactttattcagacactga

SEQ ID NO: 29638 - DNA, 72 bp, Homo sapiens
aactccgtgaattatgattttaactagcccctatttcctaactttattcagacactgaggatgctagtgaaa

SEQ ID NO: 29639 - DNA, 74 bp, Homo sapiens
attatgattttaactagcccctatttcctaactttattcagacactgaggatgctagtgaaactgacctggcaa

SEQ ID NO: 29640 - DNA, 75 bp, Homo sapiens
attttaactagcccctatttcctaactttattcagacactgaggatgctagtgaaactgacctggcaaagcatga

SEQ ID NO: 29641 - DNA, 80 bp, Homo sapiens
ctatttcctaactttattcagacactgaggatgctagtgaaactgacctggcaaagcatgatgaagaagactatgtagaa

SEQ ID NO: 29642 - DNA, 81 bp, Homo sapiens
tcctaactttattcagacactgaggatgctagtgaaactgacctggcaaagcatgatgaagaagactatgtagaaatgaag

SEQ ID NO: 29643 - DNA, 84 bp, Homo sapiens
agacactgaggatgctagtgaaactgacctggcaaagcatgatgaagaagactatgtagaaatgaaggaacagtgagtatgata

SEQ ID NO: 29644 - DNA, 84 bp, Homo sapiens
atgctagtgaaactgacctggcaaagcatgatgaagaagactatgtagaaatgaaggaacagtgagtatgatatgcctatgtct

SEQ ID NO: 29645 - DNA, 80 bp, Homo sapiens
aaactgacctggcaaagcatgatgaagaagactatgtagaaatgaaggaacagtgagtatgatatgcctatgtctttttg

SEQ ID NO: 29646 - DNA, 83 bp, Homo sapiens
gcaaagcatgatgaagaagactatgtagaaatgaaggaacagtgagtatgatatgcctatgtctttttggaacatagaattga

SEQ ID NO: 29647 - DNA, 81 bp, Homo sapiens
atgatgaagaagactatgtagaaatgaaggaacagtgagtatgatatgcctatgtctttttggaacatagaattgacaaca

SEQ ID NO: 29648 - DNA, 79 bp, Homo sapiens
gaagactatgtagaaatgaaggaacagtgagtatgatatgcctatgtctttttggaacatagaattgacaacatcttta

SEQ ID NO: 29649 - DNA, 74 bp, Homo sapiens
tttttttttataggatgtatcaggacaaactggcttctctcaagaggcagttgcaacaactgcaagaaggttgg

SEQ ID NO: 29650 - DNA, 80 bp, Homo sapiens
tttataggatgtatcaggacaaactggcttctctcaagaggcagttgcaacaactgcaagaaggttggtgtgtgattgaa

SEQ ID NO: 29651 - DNA, 82 bp, Homo sapiens
tatcaggacaaactggcttctctcaagaggcagttgcaacaactgcaagaaggttggtgtgtgattgaatcctgcatttcta

SEQ ID NO: 29652 - DNA, 80 bp, Homo sapiens
aactggcttctctcaagaggcagttgcaacaactgcaagaaggttggtgtgtgattgaatcctgcatttctaaatatgct

SEQ ID NO: 29653 - DNA, 81 bp, Homo sapiens
tctcaagaggcagttgcaacaactgcaagaaggttggtgtgtgattgaatcctgcatttctaaatatgcttcttaatatta

SEQ ID NO: 29654 - DNA, 76 bp, Homo sapiens
agttgcaacaactgcaagaaggttggtgtgtgattgaatcctgcatttctaaatatgcttcttaatattacaaacc

SEQ ID NO: 29655 - DNA, 74 bp, Homo sapiens
gcaaaatgtagagcagatttatattcacaataattttatttttcaaatgttcaaaatcaggtacattacaggaa

SEQ ID NO: 29656 - DNA, 76 bp, Homo sapiens
gagcagatttatattcacaataattttatttttcaaatgttcaaaatcaggtacattacaggaatatcagaagaga

SEQ ID NO: 29657 - DNA, 75 bp, Homo sapiens
gatttatattcacaataattttatttttcaaatgttcaaaatcaggtacattacaggaatatcagaagagaatga

SEQ ID NO: 29658 - DNA, 73 bp, Homo sapiens
taattttatttttcaaatgttcaaaatcaggtacattacaggaatatcagaagagaatgaaaaaactagatca

SEQ ID NO: 29659 - DNA, 77 bp, Homo sapiens
tttcaaatgttcaaaatcaggtacattacaggaatatcagaagagaatgaaaaaactagatcagcagtacaaagaga

SEQ ID NO: 29660 - DNA, 77 bp, Homo sapiens
atgttcaaaatcaggtacattacaggaatatcagaagagaatgaaaaaactagatcagcagtacaaagagaggatac

SEQ ID NO: 29661 - DNA, 77 bp, Homo sapiens
gtacattacaggaatatcagaagagaatgaaaaaactagatcagcagtacaaagagaggatacggaatgcaggtaag

SEQ ID NO: 29662 - DNA, 76 bp, Homo sapiens
ggaatatcagaagagaatgaaaaaactagatcagcagtacaaagagaggatacggaatgcaggtaaggctccttta

SEQ ID NO: 29663 - DNA, 74 bp, Homo sapiens
aagagaatgaaaaaactagatcagcagtacaaagagaggatacggaatgcaggtaaggctcctttaaatggcaa

SEQ ID NO: 29664 - DNA, 75 bp, Homo sapiens
aaaaactagatcagcagtacaaagagaggatacggaatgcaggtaaggctcctttaaatggcaatgaatcatctt

SEQ ID NO: 29665 - DNA, 80 bp, Homo sapiens
tagatcagcagtacaaagagaggatacggaatgcaggtaaggctcctttaaatggcaatgaatcatctttcaatgtttga

SEQ ID NO: 29666 - DNA, 75 bp, Homo sapiens
gtacaaagagaggatacggaatgcaggtaaggctcctttaaatggcaatgaatcatctttcaatgtttgaccatt

SEQ ID NO: 29667 - DNA, 78 bp, Homo sapiens
aattactgcttctaaatgaatgctaacatcactgtctagaaaggtggcacagcctagcaaatctaattgcacttttta

SEQ ID NO: 29668 - DNA, 81 bp, Homo sapiens
ttctaaatgaatgctaacatcactgtctagaaaggtggcacagcctagcaaatctaattgcactttttatctcttgcagaa

SEQ ID NO: 29669 - DNA, 79 bp, Homo sapiens
aatgctaacatcactgtctagaaaggtggcacagcctagcaaatctaattgcactttttatctcttgcagaactcttcc

SEQ ID NO: 29670 - DNA, 79 bp, Homo sapiens
tgtctagaaaggtggcacagcctagcaaatctaattgcactttttatctcttgcagaactcttcctccagctggaagta

SEQ ID NO: 29671 - DNA, 76 bp, Homo sapiens
aaaggtggcacagcctagcaaatctaattgcactttttatctcttgcagaactcttcctccagctggaagtaagta

SEQ ID NO: 29672 - DNA, 75 bp, Homo sapiens
cctagcaaatctaattgcactttttatctcttgcagaactcttcctccagctggaagtaagtaccacggatcttc

SEQ ID NO: 29673 - DNA, 73 bp, Homo sapiens
atctaattgcactttttatctcttgcagaactcttcctccagctggaagtaagtaccacggatcttctgggtt

SEQ ID NO: 29674 - DNA, 74 bp, Homo sapiens
tttttatctcttgcagaactcttcctccagctggaagtaagtaccacggatcttctgggtttgcaggccctgtc

SEQ ID NO: 29675 - DNA, 77 bp, Homo sapiens
atctcttgcagaactcttcctccagctggaagtaagtaccacggatcttctgggtttgcaggccctgtctgagactg

SEQ ID NO: 29676 - DNA, 76 bp, Homo sapiens
aactcttcctccagctggaagtaagtaccacggatcttctgggtttgcaggccctgtctgagactggaatcttgca

SEQ ID NO: 29677 - DNA, 78 bp, Homo sapiens
agctggaagtaagtaccacggatcttctgggtttgcaggccctgtctgagactggaatcttgcagtcctgatctggtg

SEQ ID NO: 29678 - DNA, 76 bp, Homo sapiens
agtaagtaccacggatcttctgggtttgcaggccctgtctgagactggaatcttgcagtcctgatctggtggcttt

SEQ ID NO: 29679 - DNA, 74 bp, Homo sapiens
gctcccagggctgtgtactcccagcccgtgtttctcttttgctcagactgaacaagtggaacgaaattacatta

SEQ ID NO: 29680 - DNA, 71 bp, Homo sapiens
ctgtgtactcccagcccgtgtttctcttttgctcagactgaacaagtggaacgaaattacattaaagaaaa

SEQ ID NO: 29681 - DNA, 70 bp, Homo sapiens
tactcccagcccgtgtttctcttttgctcagactgaacaagtggaacgaaattacattaaagaaaagaag

SEQ ID NO: 29682 - DNA, 72 bp, Homo sapiens
tttctcttttgctcagactgaacaagtggaacgaaattacattaaagaaaagaaggcagcagtgaaagaatt

SEQ ID NO: 29683 - DNA, 73 bp, Homo sapiens
cttttgctcagactgaacaagtggaacgaaattacattaaagaaaagaaggcagcagtgaaagaatttgaaga

SEQ ID NO: 29684 - DNA, 70 bp, Homo sapiens
actgaacaagtggaacgaaattacattaaagaaaagaaggcagcagtgaaagaatttgaagacaagaagg

SEQ ID NO: 29685 - DNA, 73 bp, Homo sapiens
tggaacgaaattacattaaagaaaagaaggcagcagtgaaagaatttgaagacaagaaggttgagctgaaaga

SEQ ID NO: 29686 - DNA, 73 bp, Homo sapiens
attacattaaagaaaagaaggcagcagtgaaagaatttgaagacaagaaggttgagctgaaagagaacctgat

SEQ ID NO: 29687 - DNA, 77 bp, Homo sapiens
aaagaaggcagcagtgaaagaatttgaagacaagaaggttgagctgaaagagaacctgattgctgagctagaagaaa

SEQ ID NO: 29688 - DNA, 76 bp, Homo sapiens
agcagtgaaagaatttgaagacaagaaggttgagctgaaagagaacctgattgctgagctagaagaaaagaagaaa

SEQ ID NO: 29689 - DNA, 75 bp, Homo sapiens
aatttgaagacaagaaggttgagctgaaagagaacctgattgctgagctagaagaaaagaagaaaatgattgaaa

SEQ ID NO: 29690 - DNA, 75 bp, Homo sapiens
agacaagaaggttgagctgaaagagaacctgattgctgagctagaagaaaagaagaaaatgattgaaaatgaaaa

SEQ ID NO: 29691 - DNA, 78 bp, Homo sapiens
agctgaaagagaacctgattgctgagctagaagaaaagaagaaaatgattgaaaatgaaaagctgacaatggaactga

SEQ ID NO: 29692 - DNA, 77 bp, Homo sapiens
aagagaacctgattgctgagctagaagaaaagaagaaaatgattgaaaatgaaaagctgacaatggaactgactgga

SEQ ID NO: 29693 - DNA, 75 bp, Homo sapiens
attgctgagctagaagaaaagaagaaaatgattgaaaatgaaaagctgacaatggaactgactggaggtaggaaa

SEQ ID NO: 29694 - DNA, 71 bp, Homo sapiens
agaaaagaagaaaatgattgaaaatgaaaagctgacaatggaactgactggaggtaggaaagccctatggg

SEQ ID NO: 29695 - DNA, 72 bp, Homo sapiens
aaaatgattgaaaatgaaaagctgacaatggaactgactggaggtaggaaagccctatggggtgggatcttg

SEQ ID NO: 29696 - DNA, 76 bp, Homo sapiens
acttcaagtgggagttggatagatttacccattccattcttgccacagattctatggaggtgaaacctatcatgac

SEQ ID NO: 29697 - DNA, 76 bp, Homo sapiens
aagtgggagttggatagatttacccattccattcttgccacagattctatggaggtgaaacctatcatgaccagaa

SEQ ID NO: 29698 - DNA, 77 bp, Homo sapiens
atagatttacccattccattcttgccacagattctatggaggtgaaacctatcatgaccagaaagttgcggaggcga

SEQ ID NO: 29699 - DNA, 77 bp, Homo sapiens
attccattcttgccacagattctatggaggtgaaacctatcatgaccagaaagttgcggaggcgaccaaatgatccc

SEQ ID NO: 29700 - DNA, 76 bp, Homo sapiens
attcttgccacagattctatggaggtgaaacctatcatgaccagaaagttgcggaggcgaccaaatgatcccgtcc

SEQ ID NO: 29701 - DNA, 75 bp, Homo sapiens
agattctatggaggtgaaacctatcatgaccagaaagttgcggaggcgaccaaatgatcccgtccccatcccaga

SEQ ID NO: 29702 - DNA, 73 bp, Homo sapiens
aggtgaaacctatcatgaccagaaagttgcggaggcgaccaaatgatcccgtccccatcccagacaagaggag

SEQ ID NO: 29703 - DNA, 76 bp, Homo sapiens
tatcatgaccagaaagttgcggaggcgaccaaatgatcccgtccccatcccagacaagaggaggaaacctgctcca

SEQ ID NO: 29704 - DNA, 73 bp, Homo sapiens
aaagttgcggaggcgaccaaatgatcccgtccccatcccagacaagaggaggaaacctgctccagatatccat

SEQ ID NO: 29705 - DNA, 75 bp, Homo sapiens
cggaggcgaccaaatgatcccgtccccatcccagacaagaggaggaaacctgctccagatatccatttacatcaa

SEQ ID NO: 29706 - DNA, 73 bp, Homo sapiens
aaatgatcccgtccccatcccagacaagaggaggaaacctgctccagatatccatttacatcaagccttaacc

SEQ ID NO: 29707 - DNA, 71 bp, Homo sapiens
cccatcccagacaagaggaggaaacctgctccagatatccatttacatcaagccttaaccgcctttctttt

SEQ ID NO: 29708 - DNA, 72 bp, Homo sapiens
gtaccattgtgttgattactctttgcctggaaactgtacttttcacatacagtcctttaactctcaacaccc

SEQ ID NO: 29709 - DNA, 70 bp, Homo sapiens
attactctttgcctggaaactgtacttttcacatacagtcctttaactctcaacaccccagctaaactat

SEQ ID NO: 29710 - DNA, 70 bp, Homo sapiens
tttgcctggaaactgtacttttcacatacagtcctttaactctcaacaccccagctaaactatttgttaa

SEQ ID NO: 29711 - DNA, 71 bp, Homo sapiens
aaactgtacttttcacatacagtcctttaactctcaacaccccagctaaactatttgttaacagatgaaca

SEQ ID NO: 29712 - DNA, 78 bp, Homo sapiens
tttcacatacagtcctttaactctcaacaccccagctaaactatttgttaacagatgaacagatcatggaggatctga

SEQ ID NO: 29713 - DNA, 76 bp, Homo sapiens
tttaactctcaacaccccagctaaactatttgttaacagatgaacagatcatggaggatctgagaacattaaataa

SEQ ID NO: 29714 - DNA, 73 bp, Homo sapiens
aacaccccagctaaactatttgttaacagatgaacagatcatggaggatctgagaacattaaataaggtacgg

SEQ ID NO: 29715 - DNA, 74 bp, Homo sapiens
cagctaaactatttgttaacagatgaacagatcatggaggatctgagaacattaaataaggtacggtttgactt

SEQ ID NO: 29716 - DNA, 73 bp, Homo sapiens
ctatttgttaacagatgaacagatcatggaggatctgagaacattaaataaggtacggtttgacttttttgat

SEQ ID NO: 29717 - DNA, 73 bp, Homo sapiens
tgaacagatcatggaggatctgagaacattaaataaggtacggtttgacttttttgatttatttgaaaactca

SEQ ID NO: 29718 - DNA, 71 bp, Homo sapiens
agatcatggaggatctgagaacattaaataaggtacggtttgacttttttgatttatttgaaaactcaggc

SEQ ID NO: 29719 - DNA, 68 bp, Homo sapiens
ggatctgagaacattaaataaggtacggtttgacttttttgatttatttgaaaactcaggcttttgtg

SEQ ID NO: 29720 - DNA, 73 bp, Homo sapiens
acttgttaatcattatgatacctttgacacctgaagttgcacctgaaatgattttctctaagattttttgttg

SEQ ID NO: 29721 - DNA, 78 bp, Homo sapiens
tgttgttgttcttcctacagcttaagtcacccaagagaccaggtgagtgcatgatgtgttggcatttgtgcaaccttt

SEQ ID NO: 29722 - DNA, 79 bp, Homo sapiens
ttgttcttcctacagcttaagtcacccaagagaccaggtgagtgcatgatgtgttggcatttgtgcaacctttttatca

SEQ ID NO: 29723 - DNA, 77 bp, Homo sapiens
cttaagtcacccaagagaccaggtgagtgcatgatgtgttggcatttgtgcaacctttttatcatgttgttggaaaa

SEQ ID NO: 29724 - DNA, 78 bp, Homo sapiens
ccaagagaccaggtgagtgcatgatgtgttggcatttgtgcaacctttttatcatgttgttggaaaagggtgtgaata

SEQ ID NO: 29725 - DNA, 78 bp, Homo sapiens
accaggtgagtgcatgatgtgttggcatttgtgcaacctttttatcatgttgttggaaaagggtgtgaatacctgtca

SEQ ID NO: 29726 - DNA, 79 bp, Homo sapiens
atgtgtttgttacattcttagtcacgtaagtattggtttcctccagcatctccatcctctcctgagcacttgcctgcaa

SEQ ID NO: 29727 - DNA, 78 bp, Homo sapiens
tttgttacattcttagtcacgtaagtattggtttcctccagcatctccatcctctcctgagcacttgcctgcaacacc

SEQ ID NO: 29728 - DNA, 79 bp, Homo sapiens
tcttagtcacgtaagtattggtttcctccagcatctccatcctctcctgagcacttgcctgcaacacccgcggaatctc

SEQ ID NO: 29729 - DNA, 79 bp, Homo sapiens
gtaagtattggtttcctccagcatctccatcctctcctgagcacttgcctgcaacacccgcggaatctccagcccagag

SEQ ID NO: 29730 - DNA, 82 bp, Homo sapiens
ctccagcatctccatcctctcctgagcacttgcctgcaacacccgcggaatctccagcccagaggttcgaagctcggataga

SEQ ID NO: 29731 - DNA, 81 bp, Homo sapiens
tccatcctctcctgagcacttgcctgcaacacccgcggaatctccagcccagaggttcgaagctcggatagaagatggcaa

SEQ ID NO: 29732 - DNA, 80 bp, Homo sapiens
tctcctgagcacttgcctgcaacacccgcggaatctccagcccagaggttcgaagctcggatagaagatggcaaactgta

SEQ ID NO: 29733 - DNA, 78 bp, Homo sapiens
ttgcctgcaacacccgcggaatctccagcccagaggttcgaagctcggatagaagatggcaaactgtactatgacaaa

SEQ ID NO: 29734 - DNA, 75 bp, Homo sapiens
aacacccgcggaatctccagcccagaggttcgaagctcggatagaagatggcaaactgtactatgacaaaagatg

SEQ ID NO: 29735 - DNA, 77 bp, Homo sapiens
tctccagcccagaggttcgaagctcggatagaagatggcaaactgtactatgacaaaagatggtatgttatgggaaa

SEQ ID NO: 29736 - DNA, 74 bp, Homo sapiens
agaggttcgaagctcggatagaagatggcaaactgtactatgacaaaagatggtatgttatgggaaaacctgga

SEQ ID NO: 29737 - DNA, 74 bp, Homo sapiens
aagctcggatagaagatggcaaactgtactatgacaaaagatggtatgttatgggaaaacctggactagtaaga

SEQ ID NO: 29738 - DNA, 79 bp, Homo sapiens
tttttgtcaggtaccacaagagccaggccatctatctggagtcaaaggacaaccagaaactgagctgcgtgatcagttc

SEQ ID NO: 29739 - DNA, 83 bp, Homo sapiens
taccacaagagccaggccatctatctggagtcaaaggacaaccagaaactgagctgcgtgatcagttctgtaggagccaatga

SEQ ID NO: 29740 - DNA, 81 bp, Homo sapiens
aagagccaggccatctatctggagtcaaaggacaaccagaaactgagctgcgtgatcagttctgtaggagccaatgaggtg

SEQ ID NO: 29741 - DNA, 79 bp, Homo sapiens
atctatctggagtcaaaggacaaccagaaactgagctgcgtgatcagttctgtaggagccaatgaggtgggaaccacac

SEQ ID NO: 29742 - DNA, 77 bp, Homo sapiens
agtcaaaggacaaccagaaactgagctgcgtgatcagttctgtaggagccaatgaggtgggaaccacactccctcac

SEQ ID NO: 29743 - DNA, 75 bp, Homo sapiens
aaccagaaactgagctgcgtgatcagttctgtaggagccaatgaggtgggaaccacactccctcacctttaggga

SEQ ID NO: 29744 - DNA, 78 bp, Homo sapiens
tgagctgcgtgatcagttctgtaggagccaatgaggtgggaaccacactccctcacctttagggaagcaaaatgtgta

SEQ ID NO: 29745 - DNA, 74 bp, Homo sapiens
ctcttctgtatttaacttttcatcttgttccctttcctctcccctgcagatctgggtgaggaagacaagtgaca

SEQ ID NO: 29746 - DNA, 74 bp, Homo sapiens
atttaacttttcatcttgttccctttcctctcccctgcagatctgggtgaggaagacaagtgacagcaccaaga

SEQ ID NO: 29747 - DNA, 79 bp, Homo sapiens
ttcatcttgttccctttcctctcccctgcagatctgggtgaggaagacaagtgacagcaccaagatgaggatctacctg

SEQ ID NO: 29748 - DNA, 81 bp, Homo sapiens
tttcctctcccctgcagatctgggtgaggaagacaagtgacagcaccaagatgaggatctacctgggccagcttcagcgcg

SEQ ID NO: 29749 - DNA, 84 bp, Homo sapiens
ctgcagatctgggtgaggaagacaagtgacagcaccaagatgaggatctacctgggccagcttcagcgcgggctcttcgtgatc

SEQ ID NO: 29750 - DNA, 81 bp, Homo sapiens
atctgggtgaggaagacaagtgacagcaccaagatgaggatctacctgggccagcttcagcgcgggctcttcgtgatccgc

SEQ ID NO: 29751 - DNA, 81 bp, Homo sapiens
aggaagacaagtgacagcaccaagatgaggatctacctgggccagcttcagcgcgggctcttcgtgatccgccggcgctca

SEQ ID NO: 29752 - DNA, 82 bp, Homo sapiens
agcaccaagatgaggatctacctgggccagcttcagcgcgggctcttcgtgatccgccggcgctcagctgcttgactttcta

SEQ ID NO: 29753 - DNA, 82 bp, Homo sapiens
aagatgaggatctacctgggccagcttcagcgcgggctcttcgtgatccgccggcgctcagctgcttgactttctacagtgc

SEQ ID NO: 29754 - DNA, 81 bp, Homo sapiens
atctacctgggccagcttcagcgcgggctcttcgtgatccgccggcgctcagctgcttgactttctacagtgctcttctct

SEQ ID NO: 29755 - DNA, 78 bp, Homo sapiens
agcttcagcgcgggctcttcgtgatccgccggcgctcagctgcttgactttctacagtgctcttctcttgaccctttt

SEQ ID NO: 29756 - DNA, 77 bp, Homo sapiens
cgggctcttcgtgatccgccggcgctcagctgcttgactttctacagtgctcttctcttgaccctttttctggagtg

SEQ ID NO: 29757 - DNA, 75 bp, Homo sapiens
tgatccgccggcgctcagctgcttgactttctacagtgctcttctcttgaccctttttctggagtgggttttatt

SEQ ID NO: 29758 - DNA, 72 bp, Homo sapiens
cggcgctcagctgcttgactttctacagtgctcttctcttgaccctttttctggagtgggttttatttttgt

SEQ ID NO: 29759 - DNA, 66 bp, Homo sapiens
ttttgttttgtttcgttttctccttaatagaaaaatgttaacttactgggaatagctactcagcct

SEQ ID NO: 29760 - DNA, 69 bp, Homo sapiens
ttgtttcgttttctccttaatagaaaaatgttaacttactgggaatagctactcagccttggaaatgga

SEQ ID NO: 29761 - DNA, 70 bp, Homo sapiens
tgtttcgttttctccttaatagaaaaatgttaacttactgggaatagctactcagccttggaaatggaga

SEQ ID NO: 29762 - DNA, 75 bp, Homo sapiens
ttctccttaatagaaaaatgttaacttactgggaatagctactcagccttggaaatggagagcactgcagtgaat

SEQ ID NO: 29763 - DNA, 74 bp, Homo sapiens
cttaatagaaaaatgttaacttactgggaatagctactcagccttggaaatggagagcactgcagtgaattctt

SEQ ID NO: 29764 - DNA, 75 bp, Homo sapiens
ttaatagaaaaatgttaacttactgggaatagctactcagccttggaaatggagagcactgcagtgaattcttta

SEQ ID NO: 29765 - DNA, 74 bp, Homo sapiens
aaatgttaacttactgggaatagctactcagccttggaaatggagagcactgcagtgaattctttagggcactt

SEQ ID NO: 29766 - DNA, 74 bp, Homo sapiens
aatgttaacttactgggaatagctactcagccttggaaatggagagcactgcagtgaattctttagggcacttt

SEQ ID NO: 29767 - DNA, 78 bp, Homo sapiens
tactgggaatagctactcagccttggaaatggagagcactgcagtgaattctttagggcacttttgtggccggatgct

SEQ ID NO: 29768 - DNA, 77 bp, Homo sapiens
atagctactcagccttggaaatggagagcactgcagtgaattctttagggcacttttgtggccggatgcttccaact

SEQ ID NO: 29769 - DNA, 77 bp, Homo sapiens
tagctactcagccttggaaatggagagcactgcagtgaattctttagggcacttttgtggccggatgcttccaactt

SEQ ID NO: 29770 - DNA, 75 bp, Homo sapiens
agcactgcagtgaattctttagggcacttttgtggccggatgcttccaactttgtcagtcttttctgcctcaact

SEQ ID NO: 29771 - DNA, 72 bp, Homo sapiens
agtgaattctttagggcacttttgtggccggatgcttccaactttgtcagtcttttctgcctcaacttcttc

SEQ ID NO: 29772 - DNA, 75 bp, Homo sapiens
tctttagggcacttttgtggccggatgcttccaactttgtcagtcttttctgcctcaacttcttccagacatcag

SEQ ID NO: 29773 - DNA, 79 bp, Homo sapiens
tgtggccggatgcttccaactttgtcagtcttttctgcctcaacttcttccagacatcagtcaccatgagactgtttta

SEQ ID NO: 29774 - DNA, 77 bp, Homo sapiens
atgcttccaactttgtcagtcttttctgcctcaacttcttccagacatcagtcaccatgagactgttttactttcag

SEQ ID NO: 29775 - DNA, 75 bp, Homo sapiens
aactttgtcagtcttttctgcctcaacttcttccagacatcagtcaccatgagactgttttactttcaggcgtat

SEQ ID NO: 29776 - DNA, 74 bp, Homo sapiens
ttttctgcctcaacttcttccagacatcagtcaccatgagactgttttactttcaggcgtattggggggtttga

SEQ ID NO: 29777 - DNA, 72 bp, Homo sapiens
tcaacttcttccagacatcagtcaccatgagactgttttactttcaggcgtattggggggtttgatttactt

SEQ ID NO: 29778 - DNA, 68 bp, Homo sapiens
atcagtcaccatgagactgttttactttcaggcgtattggggggtttgatttactttccttttatttc

SEQ ID NO: 29779 - DNA, 64 bp, Homo sapiens
atgagactgttttactttcaggcgtattggggggtttgatttactttccttttatttctttatt

SEQ ID NO: 29780 - DNA, 69 bp, Homo sapiens
tttttgcttatacttgtttttgaaaacctcctctgagtttgaagggacagctatttttattgattatct

SEQ ID NO: 29781 - DNA, 70 bp, Homo sapiens
cttgtttttgaaaacctcctctgagtttgaagggacagctatttttattgattatctttaagtctctcta

SEQ ID NO: 29782 - DNA, 73 bp, Homo sapiens
ttgaaaacctcctctgagtttgaagggacagctatttttattgattatctttaagtctctctaccatggagaa

SEQ ID NO: 29783 - DNA, 76 bp, Homo sapiens
tctgagtttgaagggacagctatttttattgattatctttaagtctctctaccatggagaagagcaggaagggata

SEQ ID NO: 29784 - DNA, 77 bp, Homo sapiens
atttttattgattatctttaagtctctctaccatggagaagagcaggaagggatacactctccagtgcattttcatg

SEQ ID NO: 29785 - DNA, 79 bp, Homo sapiens
tattgattatctttaagtctctctaccatggagaagagcaggaagggatacactctccagtgcattttcatgttttgaa

SEQ ID NO: 29786 - DNA, 82 bp, Homo sapiens
tctaccatggagaagagcaggaagggatacactctccagtgcattttcatgttttgaatctgattagtggatcacgtagcta

SEQ ID NO: 29787 - DNA, 77 bp, Homo sapiens
aagagcaggaagggatacactctccagtgcattttcatgttttgaatctgattagtggatcacgtagctactttccc

SEQ ID NO: 29788 - DNA, 78 bp, Homo sapiens
ggatacactctccagtgcattttcatgttttgaatctgattagtggatcacgtagctactttccctgtcgcgtccaat

SEQ ID NO: 29789 - DNA, 78 bp, Homo sapiens
tctccagtgcattttcatgttttgaatctgattagtggatcacgtagctactttccctgtcgcgtccaattcactatt

SEQ ID NO: 29790 - DNA, 76 bp, Homo sapiens
ttttcatgttttgaatctgattagtggatcacgtagctactttccctgtcgcgtccaattcactatttgcccagaa

SEQ ID NO: 29791 - DNA, 75 bp, Homo sapiens
ttagtggatcacgtagctactttccctgtcgcgtccaattcactatttgcccagaagcttggggcagaggtccta

SEQ ID NO: 29792 - DNA, 76 bp, Homo sapiens
atcacgtagctactttccctgtcgcgtccaattcactatttgcccagaagcttggggcagaggtcctagcaggaga

SEQ ID NO: 29793 - DNA, 78 bp, Homo sapiens
tactttccctgtcgcgtccaattcactatttgcccagaagcttggggcagaggtcctagcaggagatgatgaattctc

SEQ ID NO: 29794 - DNA, 78 bp, Homo sapiens
cgtccaattcactatttgcccagaagcttggggcagaggtcctagcaggagatgatgaattctcgtggctctcggcct

SEQ ID NO: 29795 - DNA, 79 bp, Homo sapiens
actatttgcccagaagcttggggcagaggtcctagcaggagatgatgaattctcgtggctctcggccttctcagagaaa

SEQ ID NO: 29796 - DNA, 81 bp, Homo sapiens
gggcagaggtcctagcaggagatgatgaattctcgtggctctcggccttctcagagaaataaatgctttgtgtaacatctg

SEQ ID NO: 29797 - DNA, 82 bp, Homo sapiens
aggtcctagcaggagatgatgaattctcgtggctctcggccttctcagagaaataaatgctttgtgtaacatctgtgcacac

SEQ ID NO: 29798 - DNA, 82 bp, Homo sapiens
aggagatgatgaattctcgtggctctcggccttctcagagaaataaatgctttgtgtaacatctgtgcacaccatccattcc

SEQ ID NO: 29799 - DNA, 82 bp, Homo sapiens
aattctcgtggctctcggccttctcagagaaataaatgctttgtgtaacatctgtgcacaccatccattccgctcgctgagc

SEQ ID NO: 29800 - DNA, 82 bp, Homo sapiens
tctcggccttctcagagaaataaatgctttgtgtaacatctgtgcacaccatccattccgctcgctgagcgatggaaaagct

SEQ ID NO: 29801 - DNA, 84 bp, Homo sapiens
ttgtgtaacatctgtgcacaccatccattccgctcgctgagcgatggaaaagcttgcctggaagactatgtgcactgaagtaaa

SEQ ID NO: 29802 - DNA, 76 bp, Homo sapiens
accatccattccgctcgctgagcgatggaaaagcttgcctggaagactatgtgcactgaagtaaatggggttgggg

SEQ ID NO: 29803 - DNA, 75 bp, Homo sapiens
cgctcgctgagcgatggaaaagcttgcctggaagactatgtgcactgaagtaaatggggttgggggaggggacat

SEQ ID NO: 29804 - DNA, 72 bp, Homo sapiens
atggaaaagcttgcctggaagactatgtgcactgaagtaaatggggttgggggaggggacatttcatattta

SEQ ID NO: 29805 - DNA, 72 bp, Homo sapiens
aaagcttgcctggaagactatgtgcactgaagtaaatggggttgggggaggggacatttcatatttataatg

SEQ ID NO: 29806 - DNA, 74 bp, Homo sapiens
agactatgtgcactgaagtaaatggggttgggggaggggacatttcatatttataatgtgctgaaggtaccata

SEQ ID NO: 29807 - DNA, 69 bp, Homo sapiens
actgaagtaaatggggttgggggaggggacatttcatatttataatgtgctgaaggtaccatattttaa

SEQ ID NO: 29808 - DNA, 71 bp, Homo sapiens
gttgggggaggggacatttcatatttataatgtgctgaaggtaccatattttaaatgttatttaatgcagg

SEQ ID NO: 29809 - DNA, 74 bp, Homo sapiens
gggacatttcatatttataatgtgctgaaggtaccatattttaaatgttatttaatgcaggtgatttattcaaa

SEQ ID NO: 29810 - DNA, 74 bp, Homo sapiens
catatttataatgtgctgaaggtaccatattttaaatgttatttaatgcaggtgatttattcaaacatttgttc

SEQ ID NO: 29811 - DNA, 74 bp, Homo sapiens
ttataatgtgctgaaggtaccatattttaaatgttatttaatgcaggtgatttattcaaacatttgttctagct

SEQ ID NO: 29812 - DNA, 75 bp, Homo sapiens
tgctgaaggtaccatattttaaatgttatttaatgcaggtgatttattcaaacatttgttctagcttaagctgga

SEQ ID NO: 29813 - DNA, 74 bp, Homo sapiens
gtaccatattttaaatgttatttaatgcaggtgatttattcaaacatttgttctagcttaagctggaataagca

SEQ ID NO: 29814 - DNA, 74 bp, Homo sapiens
catattttaaatgttatttaatgcaggtgatttattcaaacatttgttctagcttaagctggaataagcagtgg

SEQ ID NO: 29815 - DNA, 76 bp, Homo sapiens
ttaaatgttatttaatgcaggtgatttattcaaacatttgttctagcttaagctggaataagcagtggtcatttca

SEQ ID NO: 29816 - DNA, 76 bp, Homo sapiens
tgttatttaatgcaggtgatttattcaaacatttgttctagcttaagctggaataagcagtggtcatttcagaagt

SEQ ID NO: 29817 - DNA, 75 bp, Homo sapiens
gttatttaatgcaggtgatttattcaaacatttgttctagcttaagctggaataagcagtggtcatttcagaagt

SEQ ID NO: 29818 - DNA, 76 bp, Homo sapiens
atgcaggtgatttattcaaacatttgttctagcttaagctggaataagcagtggtcatttcagaagttttcatttg

SEQ ID NO: 29819 - DNA, 72 bp, Homo sapiens
aaacatttgttctagcttaagctggaataagcagtggtcatttcagaagttttcatttgtaattccttcctc

SEQ ID NO: 29820 - DNA, 73 bp, Homo sapiens
ttctagcttaagctggaataagcagtggtcatttcagaagttttcatttgtaattccttcctctcccttgttc

SEQ ID NO: 29821 - DNA, 71 bp, Homo sapiens
tggaataagcagtggtcatttcagaagttttcatttgtaattccttcctctcccttgttcccaagtaggta

SEQ ID NO: 29822 - DNA, 69 bp, Homo sapiens
tggtcatttcagaagttttcatttgtaattccttcctctcccttgttcccaagtaggtagtagtaagta

SEQ ID NO: 29823 - DNA, 71 bp, Homo sapiens
tcccttgttcccaagtaggtagtagtaagtatgtgccacaggctgattatctgggtaatcttttacgggtg

SEQ ID NO: 29824 - DNA, 72 bp, Homo sapiens
ttcccaagtaggtagtagtaagtatgtgccacaggctgattatctgggtaatcttttacgggtgggaggtga

SEQ ID NO: 29825 - DNA, 77 bp, Homo sapiens
tagtagtaagtatgtgccacaggctgattatctgggtaatcttttacgggtgggaggtgagattgatagtgcaataa

SEQ ID NO: 29826 - DNA, 82 bp, Homo sapiens
tatgtgccacaggctgattatctgggtaatcttttacgggtgggaggtgagattgatagtgcaataatcagtgatctataga

SEQ ID NO: 29827 - DNA, 80 bp, Homo sapiens
ctgattatctgggtaatcttttacgggtgggaggtgagattgatagtgcaataatcagtgatctatagaccctcatgcac

SEQ ID NO: 29828 - DNA, 81 bp, Homo sapiens
tatctgggtaatcttttacgggtgggaggtgagattgatagtgcaataatcagtgatctatagaccctcatgcacgattca

SEQ ID NO: 29829 - DNA, 79 bp, Homo sapiens
atcttttacgggtgggaggtgagattgatagtgcaataatcagtgatctatagaccctcatgcacgattcaagtttcac

SEQ ID NO: 29830 - DNA, 89 bp, Homo sapiens
gaggtgagattgatagtgcaataatcagtgatctatagaccctcatgcacgattcaagtttcactcttgtggctgatgccattattgca

SEQ ID NO: 29831 - DNA, 88 bp, Homo sapiens
agattgatagtgcaataatcagtgatctatagaccctcatgcacgattcaagtttcactcttgtggctgatgccattattgcacattg

SEQ ID NO: 29832 - DNA, 85 bp, Homo sapiens
ataatcagtgatctatagaccctcatgcacgattcaagtttcactcttgtggctgatgccattattgcacattggccattccaaa

SEQ ID NO: 29833 - DNA, 83 bp, Homo sapiens
agtgatctatagaccctcatgcacgattcaagtttcactcttgtggctgatgccattattgcacattggccattccaaacctg

SEQ ID NO: 29834 - DNA, 81 bp, Homo sapiens
cctcatgcacgattcaagtttcactcttgtggctgatgccattattgcacattggccattccaaacctgtggagaactttg

SEQ ID NO: 29835 - DNA, 79 bp, Homo sapiens
acgattcaagtttcactcttgtggctgatgccattattgcacattggccattccaaacctgtggagaactttgttgtca

SEQ ID NO: 29836 - DNA, 83 bp, Homo sapiens
ttcactcttgtggctgatgccattattgcacattggccattccaaacctgtggagaactttgttgtcaggccctgagcgctca

SEQ ID NO: 29837 - DNA, 83 bp, Homo sapiens
tggctgatgccattattgcacattggccattccaaacctgtggagaactttgttgtcaggccctgagcgctcacagcttcatt

SEQ ID NO: 29838 - DNA, 79 bp, Homo sapiens
attattgcacattggccattccaaacctgtggagaactttgttgtcaggccctgagcgctcacagcttcatttggccca

SEQ ID NO: 29839 - DNA, 76 bp, Homo sapiens
attggccattccaaacctgtggagaactttgttgtcaggccctgagcgctcacagcttcatttggcccaggttgaa

SEQ ID NO: 29840 - DNA, 80 bp, Homo sapiens
actttgttgtcaggccctgagcgctcacagcttcatttggcccaggttgaagacaaggaaagctctgctgtggctgcctc

SEQ ID NO: 29841 - DNA, 81 bp, Homo sapiens
aggccctgagcgctcacagcttcatttggcccaggttgaagacaaggaaagctctgctgtggctgcctctggactgacacc

SEQ ID NO: 29842 - DNA, 80 bp, Homo sapiens
tcacagcttcatttggcccaggttgaagacaaggaaagctctgctgtggctgcctctggactgacaccctccctaatgag

SEQ ID NO: 29843 - DNA, 79 bp, Homo sapiens
atttggcccaggttgaagacaaggaaagctctgctgtggctgcctctggactgacaccctccctaatgagtcctgatga

SEQ ID NO: 29844 - DNA, 79 bp, Homo sapiens
gttgaagacaaggaaagctctgctgtggctgcctctggactgacaccctccctaatgagtcctgatgaaacagcctttc

SEQ ID NO: 29845 - DNA, 80 bp, Homo sapiens
tctgctgtggctgcctctggactgacaccctccctaatgagtcctgatgaaacagcctttcctacatccttccctcactc

SEQ ID NO: 29846 - DNA, 78 bp, Homo sapiens
tgcctctggactgacaccctccctaatgagtcctgatgaaacagcctttcctacatccttccctcactcccatgattg

SEQ ID NO: 29847 - DNA, 77 bp, Homo sapiens
tgacaccctccctaatgagtcctgatgaaacagcctttcctacatccttccctcactcccatgattggagaaatgat

SEQ ID NO: 29848 - DNA, 78 bp, Homo sapiens
cctaatgagtcctgatgaaacagcctttcctacatccttccctcactcccatgattggagaaatgattcattgggtga

SEQ ID NO: 29849 - DNA, 78 bp, Homo sapiens
agtcctgatgaaacagcctttcctacatccttccctcactcccatgattggagaaatgattcattgggtgatgagtgt

SEQ ID NO: 29850 - DNA, 74 bp, Homo sapiens
acagcctttcctacatccttccctcactcccatgattggagaaatgattcattgggtgatgagtgttggggttt

SEQ ID NO: 29851 - DNA, 75 bp, Homo sapiens
tttcctacatccttccctcactcccatgattggagaaatgattcattgggtgatgagtgttggggttttctatac

SEQ ID NO: 29852 - DNA, 79 bp, Homo sapiens
atgattggagaaatgattcattgggtgatgagtgttggggttttctatactcatgttgccatcttgagatgttcaaaaa

SEQ ID NO: 29853 - DNA, 74 bp, Homo sapiens
ttcattgggtgatgagtgttggggttttctatactcatgttgccatcttgagatgttcaaaaaatttggggtta

SEQ ID NO: 29854 - DNA, 72 bp, Homo sapiens
agtgttggggttttctatactcatgttgccatcttgagatgttcaaaaaatttggggttagagcaactgtta

SEQ ID NO: 29855 - DNA, 81 bp, Homo sapiens
tatactcatgttgccatcttgagatgttcaaaaaatttggggttagagcaactgttagcgtctctatgagcaatcagtaga

SEQ ID NO: 29856 - DNA, 77 bp, Homo sapiens
atcttgagatgttcaaaaaatttggggttagagcaactgttagcgtctctatgagcaatcagtagaacttacacatc

SEQ ID NO: 29857 - DNA, 76 bp, Homo sapiens
ttagagcaactgttagcgtctctatgagcaatcagtagaacttacacatcctaggaaatctttctttgtaagtaat

SEQ ID NO: 29858 - DNA, 74 bp, Homo sapiens
ctgttagcgtctctatgagcaatcagtagaacttacacatcctaggaaatctttctttgtaagtaattcttttg

SEQ ID NO: 29859 - DNA, 76 bp, Homo sapiens
tctctatgagcaatcagtagaacttacacatcctaggaaatctttctttgtaagtaattcttttggtctcaagtga

SEQ ID NO: 29860 - DNA, 72 bp, Homo sapiens
caatcagtagaacttacacatcctaggaaatctttctttgtaagtaattcttttggtctcaagtgattctct

SEQ ID NO: 29861 - DNA, 78 bp, Homo sapiens
caagtgattctcttcatgttgtctcttgatgtacatacccccaagcaagttggggggactgtgatgacaattaaatca

SEQ ID NO: 29862 - DNA, 77 bp, Homo sapiens
aagtgattctcttcatgttgtctcttgatgtacatacccccaagcaagttggggggactgtgatgacaattaaatca

SEQ ID NO: 29863 - DNA, 75 bp, Homo sapiens
tgttgtctcttgatgtacatacccccaagcaagttggggggactgtgatgacaattaaatcaccttctctgaagt

SEQ ID NO: 29864 - DNA, 77 bp, Homo sapiens
atgtacatacccccaagcaagttggggggactgtgatgacaattaaatcaccttctctgaagttctggctctgcaga

SEQ ID NO: 29865 - DNA, 76 bp, Homo sapiens
caagcaagttggggggactgtgatgacaattaaatcaccttctctgaagttctggctctgcagagaccaaacctta

SEQ ID NO: 29866 - DNA, 75 bp, Homo sapiens
aagttggggggactgtgatgacaattaaatcaccttctctgaagttctggctctgcagagaccaaaccttactga

SEQ ID NO: 29867 - DNA, 79 bp, Homo sapiens
tgatgacaattaaatcaccttctctgaagttctggctctgcagagaccaaaccttactgacttgtacagacttgtacaa

SEQ ID NO: 29868 - DNA, 75 bp, Homo sapiens
ttaaatcaccttctctgaagttctggctctgcagagaccaaaccttactgacttgtacagacttgtacaagtaaa

SEQ ID NO: 29869 - DNA, 74 bp, Homo sapiens
accttctctgaagttctggctctgcagagaccaaaccttactgacttgtacagacttgtacaagtaaagactta

SEQ ID NO: 29870 - DNA, 75 bp, Homo sapiens
ttctggctctgcagagaccaaaccttactgacttgtacagacttgtacaagtaaagacttatacagatagatttt

SEQ ID NO: 29871 - DNA, 73 bp, Homo sapiens
ctctgcagagaccaaaccttactgacttgtacagacttgtacaagtaaagacttatacagatagatttttgtt

SEQ ID NO: 29872 - DNA, 68 bp, Homo sapiens
accaaaccttactgacttgtacagacttgtacaagtaaagacttatacagatagatttttgttttaac

SEQ ID NO: 29873 - DNA, 69 bp, Homo sapiens
ctgacttgtacagacttgtacaagtaaagacttatacagatagatttttgttttaacttacaatccgtt

SEQ ID NO: 29874 - DNA, 67 bp, Homo sapiens
cagacttgtacaagtaaagacttatacagatagatttttgttttaacttacaatccgttttttcctc

SEQ ID NO: 29875 - DNA, 63 bp, Homo sapiens
acaagtaaagacttatacagatagatttttgttttaacttacaatccgttttttcctcttttt

SEQ ID NO: 29876 - DNA, 68 bp, Homo sapiens
ttttttttttctggtgttggagtcttatttagaaaacaggataaatgacgctgttatcaaaagttgcc

SEQ ID NO: 29877 - DNA, 69 bp, Homo sapiens
tttttttttctggtgttggagtcttatttagaaaacaggataaatgacgctgttatcaaaagttgcctg

SEQ ID NO: 29878 - DNA, 71 bp, Homo sapiens
tggtgttggagtcttatttagaaaacaggataaatgacgctgttatcaaaagttgcctggggttctgtatt

SEQ ID NO: 29879 - DNA, 71 bp, Homo sapiens
ttggagtcttatttagaaaacaggataaatgacgctgttatcaaaagttgcctggggttctgtatttcttc

SEQ ID NO: 29880 - DNA, 72 bp, Homo sapiens
tttagaaaacaggataaatgacgctgttatcaaaagttgcctggggttctgtatttcttctctgccctccaa

SEQ ID NO: 29881 - DNA, 75 bp, Homo sapiens
ataaatgacgctgttatcaaaagttgcctggggttctgtatttcttctctgccctccaatccccgactgctatga

SEQ ID NO: 29882 - DNA, 73 bp, Homo sapiens
aaaagttgcctggggttctgtatttcttctctgccctccaatccccgactgctatgatgtttactacagtgaa

SEQ ID NO: 29883 - DNA, 74 bp, Homo sapiens
ccctccaatccccgactgctatgatgtttactacagtgaacccagcccatggtaaacacaggcttcacctgttc

SEQ ID NO: 29884 - DNA, 74 bp, Homo sapiens
cccgactgctatgatgtttactacagtgaacccagcccatggtaaacacaggcttcacctgttcttgtttgtta

SEQ ID NO: 29885 - DNA, 75 bp, Homo sapiens
tatgatgtttactacagtgaacccagcccatggtaaacacaggcttcacctgttcttgtttgttagccttgactg

SEQ ID NO: 29886 - DNA, 73 bp, Homo sapiens
gtttactacagtgaacccagcccatggtaaacacaggcttcacctgttcttgtttgttagccttgactgtgag

SEQ ID NO: 29887 - DNA, 72 bp, Homo sapiens
aacccagcccatggtaaacacaggcttcacctgttcttgtttgttagccttgactgtgaggcaggacttccc

SEQ ID NO: 29888 - DNA, 74 bp, Homo sapiens
tggtaaacacaggcttcacctgttcttgtttgttagccttgactgtgaggcaggacttccctcgcttgaactgt

SEQ ID NO: 29889 - DNA, 77 bp, Homo sapiens
ttcacctgttcttgtttgttagccttgactgtgaggcaggacttccctcgcttgaactgttacacatacgatgtgtg

SEQ ID NO: 29890 - DNA, 81 bp, Homo sapiens
tgttcttgtttgttagccttgactgtgaggcaggacttccctcgcttgaactgttacacatacgatgtgtgtgtcacatca

SEQ ID NO: 29891 - DNA, 81 bp, Homo sapiens
ttgtttgttagccttgactgtgaggcaggacttccctcgcttgaactgttacacatacgatgtgtgtgtcacatcacatat

SEQ ID NO: 29892 - DNA, 82 bp, Homo sapiens
tgtttgttagccttgactgtgaggcaggacttccctcgcttgaactgttacacatacgatgtgtgtgtcacatcacatattg

SEQ ID NO: 29893 - DNA, 85 bp, Homo sapiens
ttagccttgactgtgaggcaggacttccctcgcttgaactgttacacatacgatgtgtgtgtcacatcacatattgtgcagctgt

SEQ ID NO: 29894 - DNA, 83 bp, Homo sapiens
aggcaggacttccctcgcttgaactgttacacatacgatgtgtgtgtcacatcacatattgtgcagctgttggttttcatgta

SEQ ID NO: 29895 - DNA, 86 bp, Homo sapiens
ctcgcttgaactgttacacatacgatgtgtgtgtcacatcacatattgtgcagctgttggttttcatgtagtgccctgcgatggaa

SEQ ID NO: 29896 - DNA, 85 bp, Homo sapiens
ttacacatacgatgtgtgtgtcacatcacatattgtgcagctgttggttttcatgtagtgccctgcgatggaaattagatatatt

SEQ ID NO: 29897 - DNA, 82 bp, Homo sapiens
acatcacatattgtgcagctgttggttttcatgtagtgccctgcgatggaaattagatatatttcatgtatttttccattga

SEQ ID NO: 29898 - DNA, 78 bp, Homo sapiens
atattgtgcagctgttggttttcatgtagtgccctgcgatggaaattagatatatttcatgtatttttccattgaagg

SEQ ID NO: 29899 - DNA, 78 bp, Homo sapiens
tttcatgtagtgccctgcgatggaaattagatatatttcatgtatttttccattgaaggtggagtttttcaatgatca

SEQ ID NO: 29900 - DNA, 76 bp, Homo sapiens
gccctgcgatggaaattagatatatttcatgtatttttccattgaaggtggagtttttcaatgatcatgtgttttg

SEQ ID NO: 29901 - DNA, 75 bp, Homo sapiens
tggaaattagatatatttcatgtatttttccattgaaggtggagtttttcaatgatcatgtgttttgtcctccta

SEQ ID NO: 29902 - DNA, 73 bp, Homo sapiens
tttcatgtatttttccattgaaggtggagtttttcaatgatcatgtgttttgtcctcctaaacagtataccaa

SEQ ID NO: 29903 - DNA, 70 bp, Homo sapiens
tttttccattgaaggtggagtttttcaatgatcatgtgttttgtcctcctaaacagtataccaaagtttg

SEQ ID NO: 29904 - DNA, 70 bp, Homo sapiens
cattgaaggtggagtttttcaatgatcatgtgttttgtcctcctaaacagtataccaaagtttgttttta

SEQ ID NO: 29905 - DNA, 70 bp, Homo sapiens
ggagtttttcaatgatcatgtgttttgtcctcctaaacagtataccaaagtttgtttttatagttgagga

SEQ ID NO: 29906 - DNA, 71 bp, Homo sapiens
tcatgtgttttgtcctcctaaacagtataccaaagtttgtttttatagttgaggattgtattgataaccac

SEQ ID NO: 29907 - DNA, 69 bp, Homo sapiens
tgttttgtcctcctaaacagtataccaaagtttgtttttatagttgaggattgtattgataaccactgg

SEQ ID NO: 29908 - DNA, 70 bp, Homo sapiens
ctaaacagtataccaaagtttgtttttatagttgaggattgtattgataaccactggggttccgcattga

SEQ ID NO: 29909 - DNA, 70 bp, Homo sapiens
caaagtttgtttttatagttgaggattgtattgataaccactggggttccgcattgaagcaggaacaaat

SEQ ID NO: 29910 - DNA, 71 bp, Homo sapiens
tttttatagttgaggattgtattgataaccactggggttccgcattgaagcaggaacaaattgcctctttt

SEQ ID NO: 29911 - DNA, 73 bp, Homo sapiens
tagttgaggattgtattgataaccactggggttccgcattgaagcaggaacaaattgcctctttttctggcct

SEQ ID NO: 29912 - DNA, 74 bp, Homo sapiens
ttgtattgataaccactggggttccgcattgaagcaggaacaaattgcctctttttctggccttctctgtggga

SEQ ID NO: 29913 - DNA, 72 bp, Homo sapiens
actggggttccgcattgaagcaggaacaaattgcctctttttctggccttctctgtgggacctctgcttttg

SEQ ID NO: 29914 - DNA, 76 bp, Homo sapiens
gcattgaagcaggaacaaattgcctctttttctggccttctctgtgggacctctgcttttgtgaagcaactattta

SEQ ID NO: 29915 - DNA, 72 bp, Homo sapiens
aggaacaaattgcctctttttctggccttctctgtgggacctctgcttttgtgaagcaactatttatttgaa

SEQ ID NO: 29916 - DNA, 72 bp, Homo sapiens
aaattgcctctttttctggccttctctgtgggacctctgcttttgtgaagcaactatttatttgaagaccag

SEQ ID NO: 29917 - DNA, 73 bp, Homo sapiens
ttctggccttctctgtgggacctctgcttttgtgaagcaactatttatttgaagaccagggtatgggcacttt

SEQ ID NO: 29918 - DNA, 74 bp, Homo sapiens
ttctctgtgggacctctgcttttgtgaagcaactatttatttgaagaccagggtatgggcacttttgccttctc

SEQ ID NO: 29919 - DNA, 74 bp, Homo sapiens
ctctgcttttgtgaagcaactatttatttgaagaccagggtatgggcacttttgccttctctcctctctgactt

SEQ ID NO: 29920 - DNA, 73 bp, Homo sapiens
cttttgtgaagcaactatttatttgaagaccagggtatgggcacttttgccttctctcctctctgacttttga

SEQ ID NO: 29921 - DNA, 71 bp, Homo sapiens
aactatttatttgaagaccagggtatgggcacttttgccttctctcctctctgacttttgagggtattgag

SEQ ID NO: 29922 - DNA, 72 bp, Homo sapiens
tttgaagaccagggtatgggcacttttgccttctctcctctctgacttttgagggtattgagggcgccctta

SEQ ID NO: 29923 - DNA, 73 bp, Homo sapiens
acttttgccttctctcctctctgacttttgagggtattgagggcgcccttagtcatagtctcgactccgccat

SEQ ID NO: 29924 - DNA, 75 bp, Homo sapiens
ctcctctctgacttttgagggtattgagggcgcccttagtcatagtctcgactccgccattgccttctcctcggc

SEQ ID NO: 29925 - DNA, 75 bp, Homo sapiens
cgcccttagtcatagtctcgactccgccattgccttctcctcggcgtcctcacaactcttaattgggcctagtga

SEQ ID NO: 29926 - DNA, 75 bp, Homo sapiens
ttagtcatagtctcgactccgccattgccttctcctcggcgtcctcacaactcttaattgggcctagtgaaaatg

SEQ ID NO: 29927 - DNA, 73 bp, Homo sapiens
tctcgactccgccattgccttctcctcggcgtcctcacaactcttaattgggcctagtgaaaatgggggcagg

SEQ ID NO: 29928 - DNA, 74 bp, Homo sapiens
tcctcggcgtcctcacaactcttaattgggcctagtgaaaatgggggcaggtgagaagtccattttgagaatca

SEQ ID NO: 29929 - DNA, 75 bp, Homo sapiens
tcacaactcttaattgggcctagtgaaaatgggggcaggtgagaagtccattttgagaatcagcatagtaaatta

SEQ ID NO: 29930 - DNA, 74 bp, Homo sapiens
ttaattgggcctagtgaaaatgggggcaggtgagaagtccattttgagaatcagcatagtaaattacatttcta

SEQ ID NO: 29931 - DNA, 75 bp, Homo sapiens
ctagtgaaaatgggggcaggtgagaagtccattttgagaatcagcatagtaaattacatttctaatcccagagga

SEQ ID NO: 29932 - DNA, 73 bp, Homo sapiens
ggggcaggtgagaagtccattttgagaatcagcatagtaaattacatttctaatcccagaggacttaatattt

SEQ ID NO: 29933 - DNA, 72 bp, Homo sapiens
aggtgagaagtccattttgagaatcagcatagtaaattacatttctaatcccagaggacttaatattttctt

SEQ ID NO: 29934 - DNA, 71 bp, Homo sapiens
attacatttctaatcccagaggacttaatattttcttttgtcaccccagaggtgaaaaatcagcagttgaa

SEQ ID NO: 29935 - DNA, 74 bp, Homo sapiens
aggacttaatattttcttttgtcaccccagaggtgaaaaatcagcagttgaagcctgacaggcctcagtggtga

SEQ ID NO: 29936 - DNA, 78 bp, Homo sapiens
aggtgaaaaatcagcagttgaagcctgacaggcctcagtggtgaccaggaacagaagcagccttcctgttagtagatg

SEQ ID NO: 29937 - DNA, 77 bp, Homo sapiens
aaatcagcagttgaagcctgacaggcctcagtggtgaccaggaacagaagcagccttcctgttagtagatgggggta

SEQ ID NO: 29938 - DNA, 76 bp, Homo sapiens
gttgaagcctgacaggcctcagtggtgaccaggaacagaagcagccttcctgttagtagatgggggtacttctgtg

SEQ ID NO: 29939 - DNA, 75 bp, Homo sapiens
acaggcctcagtggtgaccaggaacagaagcagccttcctgttagtagatgggggtacttctgtggtgggcagaa

SEQ ID NO: 29940 - DNA, 73 bp, Homo sapiens
tgaccaggaacagaagcagccttcctgttagtagatgggggtacttctgtggtgggcagaagccttactaaag

SEQ ID NO: 29941 - DNA, 70 bp, Homo sapiens
cttcctgttagtagatgggggtacttctgtggtgggcagaagccttactaaaggggaagacagactttga

SEQ ID NO: 29942 - DNA, 70 bp, Homo sapiens
tagtagatgggggtacttctgtggtgggcagaagccttactaaaggggaagacagactttgaagtttcta

SEQ ID NO: 29943 - DNA, 70 bp, Homo sapiens
gtacttctgtggtgggcagaagccttactaaaggggaagacagactttgaagtttctagacgagaaggag

SEQ ID NO: 29944 - DNA, 72 bp, Homo sapiens
tggtgggcagaagccttactaaaggggaagacagactttgaagtttctagacgagaaggaggctagcttcta

SEQ ID NO: 29945 - DNA, 70 bp, Homo sapiens
agaagccttactaaaggggaagacagactttgaagtttctagacgagaaggaggctagcttctagcctgg

SEQ ID NO: 29946 - DNA, 72 bp, Homo sapiens
tactaaaggggaagacagactttgaagtttctagacgagaaggaggctagcttctagcctgggtggccatta

SEQ ID NO: 29947 - DNA, 72 bp, Homo sapiens
tttgaagtttctagacgagaaggaggctagcttctagcctgggtggccattattccaaaaggtcattgtttc

SEQ ID NO: 29948 - DNA, 75 bp, Homo sapiens
gctagcttctagcctgggtggccattattccaaaaggtcattgtttctcactagaccccagggcaccagatgaat

SEQ ID NO: 29949 - DNA, 73 bp, Homo sapiens
ctagcctgggtggccattattccaaaaggtcattgtttctcactagaccccagggcaccagatgaatttccaa

SEQ ID NO: 29950 - DNA, 70 bp, Homo sapiens
tattccaaaaggtcattgtttctcactagaccccagggcaccagatgaatttccaagtttaaactctttc

SEQ ID NO: 29951 - DNA, 71 bp, Homo sapiens
ttgtttctcactagaccccagggcaccagatgaatttccaagtttaaactctttcctgcaggtgattactt

SEQ ID NO: 29952 - DNA, 69 bp, Homo sapiens
actagaccccagggcaccagatgaatttccaagtttaaactctttcctgcaggtgattactttgaaaaa

SEQ ID NO: 29953 - DNA, 69 bp, Homo sapiens
agggcaccagatgaatttccaagtttaaactctttcctgcaggtgattactttgaaaaaggttggtcca

SEQ ID NO: 29954 - DNA, 68 bp, Homo sapiens
aagtttaaactctttcctgcaggtgattactttgaaaaaggttggtccagaccattttgatcaagaac

SEQ ID NO: 29955 - DNA, 71 bp, Homo sapiens
aaactctttcctgcaggtgattactttgaaaaaggttggtccagaccattttgatcaagaacctgtatatg

SEQ ID NO: 29956 - DNA, 76 bp, Homo sapiens
tactttgaaaaaggttggtccagaccattttgatcaagaacctgtatatgtgttgtgttagaggcatctgcctcaa

SEQ ID NO: 29957 - DNA, 78 bp, Homo sapiens
aaaggttggtccagaccattttgatcaagaacctgtatatgtgttgtgttagaggcatctgcctcaagtctatgtaca

SEQ ID NO: 29958 - DNA, 81 bp, Homo sapiens
tcaagaacctgtatatgtgttgtgttagaggcatctgcctcaagtctatgtacagtgtttgctgcgggtgtgttccaatat

SEQ ID NO: 29959 - DNA, 80 bp, Homo sapiens
tatatgtgttgtgttagaggcatctgcctcaagtctatgtacagtgtttgctgcgggtgtgttccaatattcattttacc

SEQ ID NO: 29960 - DNA, 75 bp, Homo sapiens
catctgcctcaagtctatgtacagtgtttgctgcgggtgtgttccaatattcattttacctctgcttgggggttt

SEQ ID NO: 29961 - DNA, 72 bp, Homo sapiens
aagtctatgtacagtgtttgctgcgggtgtgttccaatattcattttacctctgcttgggggttttgtgtgt

SEQ ID NO: 29962 - DNA, 68 bp, Homo sapiens
gtttgctgcgggtgtgttccaatattcattttacctctgcttgggggttttgtgtgttcccctccccc

SEQ ID NO: 29963 - DNA, 70 bp, Homo sapiens
gtgtgttccaatattcattttacctctgcttgggggttttgtgtgttcccctccccccatgccctgccta

SEQ ID NO: 29964 - DNA, 66 bp, Homo sapiens
ttacctctgcttgggggttttgtgtgttcccctccccccatgccctgcctacccccttttccctga

SEQ ID NO: 29965 - DNA, 65 bp, Homo sapiens
tgttcccctccccccatgccctgcctacccccttttccctgaaccacgtccttttgaataatttc

SEQ ID NO: 29966 - DNA, 70 bp, Homo sapiens
tgcctacccccttttccctgaaccacgtccttttgaataatttccagatggatttctgtagccataccaa

SEQ ID NO: 29967 - DNA, 73 bp, Homo sapiens
ctgaaccacgtccttttgaataatttccagatggatttctgtagccataccaaagccagggtgttttcattca

SEQ ID NO: 29968 - DNA, 75 bp, Homo sapiens
ttttgaataatttccagatggatttctgtagccataccaaagccagggtgttttcattcatgcggatactagtat

SEQ ID NO: 29969 - DNA, 75 bp, Homo sapiens
aataatttccagatggatttctgtagccataccaaagccagggtgttttcattcatgcggatactagtatttata

SEQ ID NO: 29970 - DNA, 77 bp, Homo sapiens
gatttctgtagccataccaaagccagggtgttttcattcatgcggatactagtatttatagatgtctgactacctaa

SEQ ID NO: 29971 - DNA, 75 bp, Homo sapiens
tagccataccaaagccagggtgttttcattcatgcggatactagtatttatagatgtctgactacctaacttaat

SEQ ID NO: 29972 - DNA, 71 bp, Homo sapiens
accaaagccagggtgttttcattcatgcggatactagtatttatagatgtctgactacctaacttaatttt

SEQ ID NO: 29973 - DNA, 71 bp, Homo sapiens
gggtgttttcattcatgcggatactagtatttatagatgtctgactacctaacttaatttttgtttttgaa

SEQ ID NO: 29974 - DNA, 71 bp, Homo sapiens
tcatgcggatactagtatttatagatgtctgactacctaacttaatttttgtttttgaacttctaattggg

SEQ ID NO: 29975 - DNA, 69 bp, Homo sapiens
ctagtatttatagatgtctgactacctaacttaatttttgtttttgaacttctaattggggccagtgta

SEQ ID NO: 29976 - DNA, 67 bp, Homo sapiens
ctgactacctaacttaatttttgtttttgaacttctaattggggccagtgtaaggtcgatcccagag

SEQ ID NO: 29977 - DNA, 73 bp, Homo sapiens
aatttttgtttttgaacttctaattggggccagtgtaaggtcgatcccagaggctgatctgcaaatcaagcta

SEQ ID NO: 29978 - DNA, 77 bp, Homo sapiens
tttttgaacttctaattggggccagtgtaaggtcgatcccagaggctgatctgcaaatcaagctacatgtatttgtg

SEQ ID NO: 29979 - DNA, 78 bp, Homo sapiens
acttctaattggggccagtgtaaggtcgatcccagaggctgatctgcaaatcaagctacatgtatttgtgtataagac

SEQ ID NO: 29980 - DNA, 80 bp, Homo sapiens
tcgatcccagaggctgatctgcaaatcaagctacatgtatttgtgtataagaccctgtgttcaggactgggtgacttttc

SEQ ID NO: 29981 - DNA, 77 bp, Homo sapiens
aggctgatctgcaaatcaagctacatgtatttgtgtataagaccctgtgttcaggactgggtgacttttctaagaaa

SEQ ID NO: 29982 - DNA, 76 bp, Homo sapiens
atctgcaaatcaagctacatgtatttgtgtataagaccctgtgttcaggactgggtgacttttctaagaaatatgg

SEQ ID NO: 29983 - DNA, 71 bp, Homo sapiens
ctacatgtatttgtgtataagaccctgtgttcaggactgggtgacttttctaagaaatatggggtttagaa

SEQ ID NO: 29984 - DNA, 70 bp, Homo sapiens
tgtatttgtgtataagaccctgtgttcaggactgggtgacttttctaagaaatatggggtttagaatggg

SEQ ID NO: 29985 - DNA, 70 bp, Homo sapiens
tataagaccctgtgttcaggactgggtgacttttctaagaaatatggggtttagaatggggttgactgta

SEQ ID NO: 29986 - DNA, 68 bp, Homo sapiens
tgtgttcaggactgggtgacttttctaagaaatatggggtttagaatggggttgactgtattttttaa

SEQ ID NO: 29987 - DNA, 65 bp, Homo sapiens
ctgggtgacttttctaagaaatatggggtttagaatggggttgactgtattttttaacctaattc

SEQ ID NO: 29988 - DNA, 68 bp, Homo sapiens
ctaagaaatatggggtttagaatggggttgactgtattttttaacctaattctggagagaagattgta

SEQ ID NO: 29989 - DNA, 66 bp, Homo sapiens
aatatggggtttagaatggggttgactgtattttttaacctaattctggagagaagattgtatttt

SEQ ID NO: 29990 - DNA, 66 bp, Homo sapiens
ttagaatggggttgactgtattttttaacctaattctggagagaagattgtattttttacagtttt

SEQ ID NO: 29991 - DNA, 65 bp, Homo sapiens
gactgtattttttaacctaattctggagagaagattgtattttttacagttttttgggtttggct

SEQ ID NO: 29992 - DNA, 67 bp, Homo sapiens
tttaacctaattctggagagaagattgtattttttacagttttttgggtttggcttccttctcacat

SEQ ID NO: 29993 - DNA, 67 bp, Homo sapiens
gagaagattgtattttttacagttttttgggtttggcttccttctcacatttctttagctttgaatt

SEQ ID NO: 29994 - DNA, 65 bp, Homo sapiens
ttttacagttttttgggtttggcttccttctcacatttctttagctttgaatttttactaaataa

SEQ ID NO: 29995 - DNA, 67 bp, Homo sapiens
tttgggtttggcttccttctcacatttctttagctttgaatttttactaaataaatttcctcctgat

SEQ ID NO: 29996 - DNA, 67 bp, Homo sapiens
gtttggcttccttctcacatttctttagctttgaatttttactaaataaatttcctcctgattaatt

SEQ ID NO: 29997 - DNA, 70 bp, Homo sapiens
ttttttttttctcatctgggaatttgaaatctcggtgcttactgttacaccaatttgtccaaagagttga

SEQ ID NO: 29998 - DNA, 73 bp, Homo sapiens
ttctcatctgggaatttgaaatctcggtgcttactgttacaccaatttgtccaaagagttgaaatcactttaa

SEQ ID NO: 29999 - DNA, 73 bp, Homo sapiens
aatttgaaatctcggtgcttactgttacaccaatttgtccaaagagttgaaatcactttaatgccagaacatg

SEQ ID NO: 30000 - DNA, 72 bp, Homo sapiens
aaatctcggtgcttactgttacaccaatttgtccaaagagttgaaatcactttaatgccagaacatggtaaa

SEQ ID NO: 30001 - DNA, 75 bp, Homo sapiens
tactgttacaccaatttgtccaaagagttgaaatcactttaatgccagaacatggtaaatttgcagccatttcaa

SEQ ID NO: 30002 - DNA, 77 bp, Homo sapiens
tacaccaatttgtccaaagagttgaaatcactttaatgccagaacatggtaaatttgcagccatttcaagcaggtga

SEQ ID NO: 30003 - DNA, 75 bp, Homo sapiens
tccaaagagttgaaatcactttaatgccagaacatggtaaatttgcagccatttcaagcaggtgatggtcttttt

SEQ ID NO: 30004 - DNA, 75 bp, Homo sapiens
gttgaaatcactttaatgccagaacatggtaaatttgcagccatttcaagcaggtgatggtctttttttataaca

SEQ ID NO: 30005 - DNA, 73 bp, Homo sapiens
tttaatgccagaacatggtaaatttgcagccatttcaagcaggtgatggtctttttttataacatcgttaacg

SEQ ID NO: 30006 - DNA, 70 bp, Homo sapiens
atggtaaatttgcagccatttcaagcaggtgatggtctttttttataacatcgttaacgggtaccattaa

SEQ ID NO: 30007 - DNA, 72 bp, Homo sapiens
atttgcagccatttcaagcaggtgatggtctttttttataacatcgttaacgggtaccattaaatattctga

SEQ ID NO: 30008 - DNA, 71 bp, Homo sapiens
catttcaagcaggtgatggtctttttttataacatcgttaacgggtaccattaaatattctgagaggtgaa

SEQ ID NO: 30009 - DNA, 69 bp, Homo sapiens
caggtgatggtctttttttataacatcgttaacgggtaccattaaatattctgagaggtgaatgtaaaa

SEQ ID NO: 30010 - DNA, 68 bp, Homo sapiens
ttttataacatcgttaacgggtaccattaaatattctgagaggtgaatgtaaaatataaaaggtatag

SEQ ID NO: 30011 - DNA, 63 bp, Homo sapiens
aacgggtaccattaaatattctgagaggtgaatgtaaaatataaaaggtataggttttttttt

SEQ ID NO: 30012 - DNA, 72 bp, Homo sapiens
ttttaaagaaaacaataaactttcaaagagaaaaccagcatgaagtctgtattgtatccattgacttgataa

SEQ ID NO: 30013 - DNA, 75 bp, Homo sapiens
gaaaacaataaactttcaaagagaaaaccagcatgaagtctgtattgtatccattgacttgataagtgatagaaa

SEQ ID NO: 30014 - DNA, 73 bp, Homo sapiens
aaactttcaaagagaaaaccagcatgaagtctgtattgtatccattgacttgataagtgatagaaatttattt

SEQ ID NO: 30015 - DNA, 75 bp, Homo sapiens
gagaaaaccagcatgaagtctgtattgtatccattgacttgataagtgatagaaatttattttaggtttttgatc

SEQ ID NO: 30016 - DNA, 77 bp, Homo sapiens
gcatgaagtctgtattgtatccattgacttgataagtgatagaaatttattttaggtttttgatccattgcttatgg

SEQ ID NO: 30017 - DNA, 71 bp, Homo sapiens
tccattgacttgataagtgatagaaatttattttaggtttttgatccattgcttatggggaaaggaagtta

SEQ ID NO: 30018 - DNA, 70 bp, Homo sapiens
gataagtgatagaaatttattttaggtttttgatccattgcttatggggaaaggaagttagggcagagga

SEQ ID NO: 30019 - DNA, 67 bp, Homo sapiens
aatttattttaggtttttgatccattgcttatggggaaaggaagttagggcagaggaagggatattc

SEQ ID NO: 30020 - DNA, 71 bp, Homo sapiens
ttatggggaaaggaagttagggcagaggaagggatattctagacatttaattcttagtgaagactaagata

SEQ ID NO: 30021 - DNA, 73 bp, Homo sapiens
aaaggaagttagggcagaggaagggatattctagacatttaattcttagtgaagactaagatacagaatgatg

SEQ ID NO: 30022 - DNA, 77 bp, Homo sapiens
cagaggaagggatattctagacatttaattcttagtgaagactaagatacagaatgatgtcaggctaatactcagtt

SEQ ID NO: 30023 - DNA, 77 bp, Homo sapiens
gaagggatattctagacatttaattcttagtgaagactaagatacagaatgatgtcaggctaatactcagttttgta

SEQ ID NO: 30024 - DNA, 76 bp, Homo sapiens
acatttaattcttagtgaagactaagatacagaatgatgtcaggctaatactcagttttgtaaagagcaatctggg

SEQ ID NO: 30025 - DNA, 74 bp, Homo sapiens
actaagatacagaatgatgtcaggctaatactcagttttgtaaagagcaatctggggtgttgacccttaaatgt

SEQ ID NO: 30026 - DNA, 76 bp, Homo sapiens
atacagaatgatgtcaggctaatactcagttttgtaaagagcaatctggggtgttgacccttaaatgtttgtgcac

SEQ ID NO: 30027 - DNA, 74 bp, Homo sapiens
tgtcaggctaatactcagttttgtaaagagcaatctggggtgttgacccttaaatgtttgtgcactcttcttgt

SEQ ID NO: 30028 - DNA, 75 bp, Homo sapiens
taatactcagttttgtaaagagcaatctggggtgttgacccttaaatgtttgtgcactcttcttgttgcagataa

SEQ ID NO: 30029 - DNA, 74 bp, Homo sapiens
tttgtaaagagcaatctggggtgttgacccttaaatgtttgtgcactcttcttgttgcagataaaagtcattaa

SEQ ID NO: 30030 - DNA, 73 bp, Homo sapiens
aatctggggtgttgacccttaaatgtttgtgcactcttcttgttgcagataaaagtcattaaaaatcaagtga

SEQ ID NO: 30031 - DNA, 75 bp, Homo sapiens
gttgacccttaaatgtttgtgcactcttcttgttgcagataaaagtcattaaaaatcaagtgaatagaatggatc

SEQ ID NO: 30032 - DNA, 75 bp, Homo sapiens
atgtttgtgcactcttcttgttgcagataaaagtcattaaaaatcaagtgaatagaatggatcttgggtggaaaa

SEQ ID NO: 30033 - DNA, 76 bp, Homo sapiens
tgtgcactcttcttgttgcagataaaagtcattaaaaatcaagtgaatagaatggatcttgggtggaaaaacaatc

SEQ ID NO: 30034 - DNA, 74 bp, Homo sapiens
tcttgttgcagataaaagtcattaaaaatcaagtgaatagaatggatcttgggtggaaaaacaatcttgaaata

SEQ ID NO: 30035 - DNA, 72 bp, Homo sapiens
aagtcattaaaaatcaagtgaatagaatggatcttgggtggaaaaacaatcttgaaataaacttgtgattga

SEQ ID NO: 30036 - DNA, 74 bp, Homo sapiens
aaatcaagtgaatagaatggatcttgggtggaaaaacaatcttgaaataaacttgtgattgaggatattgttca

SEQ ID NO: 30037 - DNA, 76 bp, Homo sapiens
gtgaatagaatggatcttgggtggaaaaacaatcttgaaataaacttgtgattgaggatattgttcatttggtgca

SEQ ID NO: 30038 - DNA, 76 bp, Homo sapiens
tggatcttgggtggaaaaacaatcttgaaataaacttgtgattgaggatattgttcatttggtgcatgattaagga

SEQ ID NO: 30039 - DNA, 75 bp, Homo sapiens
ggtggaaaaacaatcttgaaataaacttgtgattgaggatattgttcatttggtgcatgattaaggaggatattg

SEQ ID NO: 30040 - DNA, 71 bp, Homo sapiens
tttcattgtctctctccccctcccctcttcctgcccttatttttaacagcaggaacgaatttcatatacac

SEQ ID NO: 30041 - DNA, 70 bp, Homo sapiens
ctccccctcccctcttcctgcccttatttttaacagcaggaacgaatttcatatacacctccagagagcc

SEQ ID NO: 30042 - DNA, 73 bp, Homo sapiens
cctcttcctgcccttatttttaacagcaggaacgaatttcatatacacctccagagagcccagtgccgagtta

SEQ ID NO: 30043 - DNA, 72 bp, Homo sapiens
cccttatttttaacagcaggaacgaatttcatatacacctccagagagcccagtgccgagttacgcttcctc

SEQ ID NO: 30044 - DNA, 74 bp, Homo sapiens
atttttaacagcaggaacgaatttcatatacacctccagagagcccagtgccgagttacgcttcctcgacgcca

SEQ ID NO: 30045 - DNA, 75 bp, Homo sapiens
aggaacgaatttcatatacacctccagagagcccagtgccgagttacgcttcctcgacgccacttcatgttccag

SEQ ID NO: 30046 - DNA, 81 bp, Homo sapiens
tttcatatacacctccagagagcccagtgccgagttacgcttcctcgacgccacttcatgttccagtgcctcgagcgctca

SEQ ID NO: 30047 - DNA, 79 bp, Homo sapiens
acctccagagagcccagtgccgagttacgcttcctcgacgccacttcatgttccagtgcctcgagcgctcaggatggag

SEQ ID NO: 30048 - DNA, 79 bp, Homo sapiens
ccagtgccgagttacgcttcctcgacgccacttcatgttccagtgcctcgagcgctcaggatggaggaagactcgatcc

SEQ ID NO: 30049 - DNA, 79 bp, Homo sapiens
ccgagttacgcttcctcgacgccacttcatgttccagtgcctcgagcgctcaggatggaggaagactcgatccgcctgc

SEQ ID NO: 30050 - DNA, 84 bp, Homo sapiens
ttcctcgacgccacttcatgttccagtgcctcgagcgctcaggatggaggaagactcgatccgcctgcctgcgcacctgcgtga

SEQ ID NO: 30051 - DNA, 83 bp, Homo sapiens
acttcatgttccagtgcctcgagcgctcaggatggaggaagactcgatccgcctgcctgcgcacctgcgtgagtgttcgtgac

SEQ ID NO: 30052 - DNA, 82 bp, Homo sapiens
ttccagtgcctcgagcgctcaggatggaggaagactcgatccgcctgcctgcgcacctgcgtgagtgttcgtgacccgagag

SEQ ID NO: 30053 - DNA, 80 bp, Homo sapiens
agcgctcaggatggaggaagactcgatccgcctgcctgcgcacctgcgtgagtgttcgtgacccgagagggacagaggat

SEQ ID NO: 30054 - DNA, 81 bp, Homo sapiens
ctttctttctgcctcatgctctctccaacaggcttgcagccaatttactggagcagggatgacgtagcccagtggctcaag

SEQ ID NO: 30055 - DNA, 83 bp, Homo sapiens
tgcctcatgctctctccaacaggcttgcagccaatttactggagcagggatgacgtagcccagtggctcaagtgggctgaaaa

SEQ ID NO: 30056 - DNA, 79 bp, Homo sapiens
tctctccaacaggcttgcagccaatttactggagcagggatgacgtagcccagtggctcaagtgggctgaaaatgagtt

SEQ ID NO: 30057 - DNA, 76 bp, Homo sapiens
aacaggcttgcagccaatttactggagcagggatgacgtagcccagtggctcaagtgggctgaaaatgagttttct

SEQ ID NO: 30058 - DNA, 73 bp, Homo sapiens
caatttactggagcagggatgacgtagcccagtggctcaagtgggctgaaaatgagttttctttaaggccaat

SEQ ID NO: 30059 - DNA, 77 bp, Homo sapiens
tactggagcagggatgacgtagcccagtggctcaagtgggctgaaaatgagttttctttaaggccaattgacagcaa

SEQ ID NO: 30060 - DNA, 74 bp, Homo sapiens
atgacgtagcccagtggctcaagtgggctgaaaatgagttttctttaaggccaattgacagcaacacgtttgaa

SEQ ID NO: 30061 - DNA, 74 bp, Homo sapiens
agtggctcaagtgggctgaaaatgagttttctttaaggccaattgacagcaacacgtttgaaatgaatggcaaa

SEQ ID NO: 30062 - DNA, 73 bp, Homo sapiens
aagtgggctgaaaatgagttttctttaaggccaattgacagcaacacgtttgaaatgaatggcaaagctctcc

SEQ ID NO: 30063 - DNA, 76 bp, Homo sapiens
aaatgagttttctttaaggccaattgacagcaacacgtttgaaatgaatggcaaagctctcctgctgctgaccaaa

SEQ ID NO: 30064 - DNA, 76 bp, Homo sapiens
tttctttaaggccaattgacagcaacacgtttgaaatgaatggcaaagctctcctgctgctgaccaaagaggactt

SEQ ID NO: 30065 - DNA, 81 bp, Homo sapiens
aattgacagcaacacgtttgaaatgaatggcaaagctctcctgctgctgaccaaagaggactttcgctatcgatctcctca

SEQ ID NO: 30066 - DNA, 80 bp, Homo sapiens
aacacgtttgaaatgaatggcaaagctctcctgctgctgaccaaagaggactttcgctatcgatctcctcattcaggtga

SEQ ID NO: 30067 - DNA, 83 bp, Homo sapiens
tttgaaatgaatggcaaagctctcctgctgctgaccaaagaggactttcgctatcgatctcctcattcaggtgagagtctgga

SEQ ID NO: 30068 - DNA, 84 bp, Homo sapiens
atggcaaagctctcctgctgctgaccaaagaggactttcgctatcgatctcctcattcaggtgagagtctggactcttggcata

SEQ ID NO: 30069 - DNA, 83 bp, Homo sapiens
ctgctgctgaccaaagaggactttcgctatcgatctcctcattcaggtgagagtctggactcttggcatatgcccaacttgga

SEQ ID NO: 30070 - DNA, 69 bp, Homo sapiens
aaaaacatctttccatttctcgatttccctttcctttttctttccaggtgatgtgctctatgaactcct

SEQ ID NO: 30071 - DNA, 75 bp, Homo sapiens
tttccatttctcgatttccctttcctttttctttccaggtgatgtgctctatgaactccttcagcatattctgaa

SEQ ID NO: 30072 - DNA, 77 bp, Homo sapiens
tctcgatttccctttcctttttctttccaggtgatgtgctctatgaactccttcagcatattctgaagcagaggaaa

SEQ ID NO: 30073 - DNA, 75 bp, Homo sapiens
cctttttctttccaggtgatgtgctctatgaactccttcagcatattctgaagcagaggaaacctcggattcttt

SEQ ID NO: 30074 - DNA, 78 bp, Homo sapiens
ttctttccaggtgatgtgctctatgaactccttcagcatattctgaagcagaggaaacctcggattcttttttcacca

SEQ ID NO: 30075 - DNA, 76 bp, Homo sapiens
atgtgctctatgaactccttcagcatattctgaagcagaggaaacctcggattcttttttcaccattcttccaccc

SEQ ID NO: 30076 - DNA, 74 bp, Homo sapiens
tatgaactccttcagcatattctgaagcagaggaaacctcggattcttttttcaccattcttccaccctggaaa

SEQ ID NO: 30077 - DNA, 75 bp, Homo sapiens
ttcagcatattctgaagcagaggaaacctcggattcttttttcaccattcttccaccctggaaactctatacaca

SEQ ID NO: 30078 - DNA, 70 bp, Homo sapiens
aaacctcggattcttttttcaccattcttccaccctggaaactctatacacacacagccggaggtcatac

SEQ ID NO: 30079 - DNA, 78 bp, Homo sapiens
tcttttttcaccattcttccaccctggaaactctatacacacacagccggaggtcatactgcatcagaaccatgaaga

SEQ ID NO: 30080 - DNA, 77 bp, Homo sapiens
accattcttccaccctggaaactctatacacacacagccggaggtcatactgcatcagaaccatgaagaaggtactg

SEQ ID NO: 30081 - DNA, 75 bp, Homo sapiens
accctggaaactctatacacacacagccggaggtcatactgcatcagaaccatgaagaaggtactggaagaggtt

SEQ ID NO: 30082 - DNA, 75 bp, Homo sapiens
aaactctatacacacacagccggaggtcatactgcatcagaaccatgaagaaggtactggaagaggtttctcttt

SEQ ID NO: 30083 - DNA, 78 bp, Homo sapiens
tacacacacagccggaggtcatactgcatcagaaccatgaagaaggtactggaagaggtttctcttttcttgcctgag

SEQ ID NO: 30084 - DNA, 74 bp, Homo sapiens
aggtcatactgcatcagaaccatgaagaaggtactggaagaggtttctcttttcttgcctgaggtttagacaaa

SEQ ID NO: 30085 - DNA, 74 bp, Homo sapiens
atactgcatcagaaccatgaagaaggtactggaagaggtttctcttttcttgcctgaggtttagacaaatccag

SEQ ID NO: 30086 - DNA, 69 bp, Homo sapiens
catgaagaaggtactggaagaggtttctcttttcttgcctgaggtttagacaaatccaggaagtttaat

SEQ ID NO: 30087 - DNA, 67 bp, Homo sapiens
aaggtactggaagaggtttctcttttcttgcctgaggtttagacaaatccaggaagtttaattgtta

SEQ ID NO: 30088 - DNA, 68 bp, Homo sapiens
aggtttctcttttcttgcctgaggtttagacaaatccaggaagtttaattgttaacttgataagctgg

SEQ ID NO: 30089 - DNA, 71 bp, Homo sapiens
tttcttgcctgaggtttagacaaatccaggaagtttaattgttaacttgataagctggtcttcttcgtgta

SEQ ID NO: 30090 - DNA, 70 bp, Homo sapiens
tgaggtttagacaaatccaggaagtttaattgttaacttgataagctggtcttcttcgtgtaagttcact

SEQ ID NO: 30091 - DNA, 71 bp, Homo sapiens
ccaggaagtttaattgttaacttgataagctggtcttcttcgtgtaagttcacttttcattcagtagacaa

SEQ ID NO: 30092 - DNA, 74 bp, Homo sapiens
aattgttaacttgataagctggtcttcttcgtgtaagttcacttttcattcagtagacaattattgagtgctta

SEQ ID NO: 30093 - DNA, 76 bp, Homo sapiens
cttgataagctggtcttcttcgtgtaagttcacttttcattcagtagacaattattgagtgcttactatgtacaaa

SEQ ID NO: 30094 - DNA, 75 bp, Homo sapiens
tggtcttcttcgtgtaagttcacttttcattcagtagacaattattgagtgcttactatgtacaaaatacactct

SEQ ID NO: 30095 - DNA, 75 bp, Homo sapiens
gtgtaagttcacttttcattcagtagacaattattgagtgcttactatgtacaaaatacactcttggttccctga

SEQ ID NO: 30096 - DNA, 77 bp, Homo sapiens
ttttcattcagtagacaattattgagtgcttactatgtacaaaatacactcttggttccctgaagctcacgatcaaa

SEQ ID NO: 30097 - DNA, 77 bp, Homo sapiens
agtagacaattattgagtgcttactatgtacaaaatacactcttggttccctgaagctcacgatcaaagcgaagcag

SEQ ID NO: 30098 - DNA, 83 bp, Homo sapiens
tgagtgcttactatgtacaaaatacactcttggttccctgaagctcacgatcaaagcgaagcagtgagatggatgtacacaga

SEQ ID NO: 30099 - DNA, 82 bp, Homo sapiens
ttactatgtacaaaatacactcttggttccctgaagctcacgatcaaagcgaagcagtgagatggatgtacacagaagcaca

SEQ ID NO: 30100 - DNA, 82 bp, Homo sapiens
tcttggttccctgaagctcacgatcaaagcgaagcagtgagatggatgtacacagaagcacagaagcgtaaccatatagtag

SEQ ID NO: 30101 - DNA, 79 bp, Homo sapiens
acgatcaaagcgaagcagtgagatggatgtacacagaagcacagaagcgtaaccatatagtaggcaccgtaaaggtgtg

SEQ ID NO: 30102 - DNA, 76 bp, Homo sapiens
aagcagtgagatggatgtacacagaagcacagaagcgtaaccatatagtaggcaccgtaaaggtgtggtggaaggg

SEQ ID NO: 30103 - DNA, 77 bp, Homo sapiens
agatggatgtacacagaagcacagaagcgtaaccatatagtaggcaccgtaaaggtgtggtggaagggtccatgaca

SEQ ID NO: 30104 - DNA, 76 bp, Homo sapiens
agaagcacagaagcgtaaccatatagtaggcaccgtaaaggtgtggtggaagggtccatgacagccaggtgcagga

SEQ ID NO: 30105 - DNA, 75 bp, Homo sapiens
acagaagcgtaaccatatagtaggcaccgtaaaggtgtggtggaagggtccatgacagccaggtgcaggaagcag

SEQ ID NO: 30106 - DNA, 75 bp, Homo sapiens
atatagtaggcaccgtaaaggtgtggtggaagggtccatgacagccaggtgcaggaagcagggtcttctcataaa

SEQ ID NO: 30107 - DNA, 74 bp, Homo sapiens
gtaggcaccgtaaaggtgtggtggaagggtccatgacagccaggtgcaggaagcagggtcttctcataaaggaa

SEQ ID NO: 30108 - DNA, 76 bp, Homo sapiens
aaggtgtggtggaagggtccatgacagccaggtgcaggaagcagggtcttctcataaaggaagcaactctggagta

SEQ ID NO: 30109 - DNA, 80 bp, Homo sapiens
gtggaagggtccatgacagccaggtgcaggaagcagggtcttctcataaaggaagcaactctggagtatgccttagagca

SEQ ID NO: 30110 - DNA, 80 bp, Homo sapiens
atgacagccaggtgcaggaagcagggtcttctcataaaggaagcaactctggagtatgccttagagcagtgctccccacc

SEQ ID NO: 30111 - DNA, 75 bp, Homo sapiens
ggtgcaggaagcagggtcttctcataaaggaagcaactctggagtatgccttagagcagtgctccccaccctttt

SEQ ID NO: 30112 - DNA, 75 bp, Homo sapiens
aagcagggtcttctcataaaggaagcaactctggagtatgccttagagcagtgctccccaccctttttggcacca

SEQ ID NO: 30113 - DNA, 86 bp, Homo sapiens
gtgacagatcatcagccattagattcccgtaaggagtgtgcaactagatcccgcgcatgcacagttcatgatagcgtttgtgcttc

SEQ ID NO: 30114 - DNA, 84 bp, Homo sapiens
atcagccattagattcccgtaaggagtgtgcaactagatcccgcgcatgcacagttcatgatagcgtttgtgcttctatgagaa

SEQ ID NO: 30115 - DNA, 82 bp, Homo sapiens
attagattcccgtaaggagtgtgcaactagatcccgcgcatgcacagttcatgatagcgtttgtgcttctatgagaatctaa

SEQ ID NO: 30116 - DNA, 85 bp, Homo sapiens
tctaatgccgctgctgatctgacaggacgtgggactcaggcggtaatacgagcagtggggagcagctctagatacagatgaagct

SEQ ID NO: 30117 - DNA, 86 bp, Homo sapiens
tgctgatctgacaggacgtgggactcaggcggtaatacgagcagtggggagcagctctagatacagatgaagcttcactcacttgc

SEQ ID NO: 30118 - DNA, 82 bp, Homo sapiens
atctgacaggacgtgggactcaggcggtaatacgagcagtggggagcagctctagatacagatgaagcttcactcacttgcc

SEQ ID NO: 30119 - DNA, 78 bp, Homo sapiens
acgtgggactcaggcggtaatacgagcagtggggagcagctctagatacagatgaagcttcactcacttgcccccacc

SEQ ID NO: 30120 - DNA, 72 bp, Homo sapiens
cctaacaggccatggactggtaccagtcagtgacctggaggttggggaccccgccttagaaatccagcagga

SEQ ID NO: 30121 - DNA, 75 bp, Homo sapiens
catggactggtaccagtcagtgacctggaggttggggaccccgccttagaaatccagcaggattctgataagcaa

SEQ ID NO: 30122 - DNA, 76 bp, Homo sapiens
taccagtcagtgacctggaggttggggaccccgccttagaaatccagcaggattctgataagcaaggatgaagtga

SEQ ID NO: 30123 - DNA, 75 bp, Homo sapiens
agtcagtgacctggaggttggggaccccgccttagaaatccagcaggattctgataagcaaggatgaagtgaaga

SEQ ID NO: 30124 - DNA, 75 bp, Homo sapiens
tgacctggaggttggggaccccgccttagaaatccagcaggattctgataagcaaggatgaagtgaagaacattc

SEQ ID NO: 30125 - DNA, 73 bp, Homo sapiens
acctggaggttggggaccccgccttagaaatccagcaggattctgataagcaaggatgaagtgaagaacattc

SEQ ID NO: 30126 - DNA, 74 bp, Homo sapiens
aggttggggaccccgccttagaaatccagcaggattctgataagcaaggatgaagtgaagaacattccaggcaa

SEQ ID NO: 30127 - DNA, 76 bp, Homo sapiens
ggaccccgccttagaaatccagcaggattctgataagcaaggatgaagtgaagaacattccaggcaaagaaaatga

SEQ ID NO: 30128 - DNA, 76 bp, Homo sapiens
ccgccttagaaatccagcaggattctgataagcaaggatgaagtgaagaacattccaggcaaagaaaatgacgtaa

SEQ ID NO: 30129 - DNA, 73 bp, Homo sapiens
agcaggattctgataagcaaggatgaagtgaagaacattccaggcaaagaaaatgacgtaagggtggggtaag

SEQ ID NO: 30130 - DNA, 72 bp, Homo sapiens
tgataagcaaggatgaagtgaagaacattccaggcaaagaaaatgacgtaagggtggggtaaggctttgaaa

SEQ ID NO: 30131 - DNA, 71 bp, Homo sapiens
aagaacattccaggcaaagaaaatgacgtaagggtggggtaaggctttgaaatagagagcaattagatgac

SEQ ID NO: 30132 - DNA, 72 bp, Homo sapiens
caggcaaagaaaatgacgtaagggtggggtaaggctttgaaatagagagcaattagatgacttggattataa

SEQ ID NO: 30133 - DNA, 71 bp, Homo sapiens
agaaaatgacgtaagggtggggtaaggctttgaaatagagagcaattagatgacttggattataaagctta

SEQ ID NO: 30134 - DNA, 71 bp, Homo sapiens
acgtaagggtggggtaaggctttgaaatagagagcaattagatgacttggattataaagcttatcttctcc

SEQ ID NO: 30135 - DNA, 73 bp, Homo sapiens
gggtaaggctttgaaatagagagcaattagatgacttggattataaagcttatcttctcccactcttttatta

SEQ ID NO: 30136 - DNA, 73 bp, Homo sapiens
tttgaaatagagagcaattagatgacttggattataaagcttatcttctcccactcttttattacagaaaatt

SEQ ID NO: 30137 - DNA, 74 bp, Homo sapiens
gagcaattagatgacttggattataaagcttatcttctcccactcttttattacagaaaatttcaaacatactc

SEQ ID NO: 30138 - DNA, 73 bp, Homo sapiens
gatgacttggattataaagcttatcttctcccactcttttattacagaaaatttcaaacatactccaaataga

SEQ ID NO: 30139 - DNA, 69 bp, Homo sapiens
attataaagcttatcttctcccactcttttattacagaaaatttcaaacatactccaaatagaataaaa

SEQ ID NO: 30140 - DNA, 78 bp, Homo sapiens
aaaataaataaacccttctgagccatcacccttgccttcacaatgatcagcattttgtcattgcagagctagtccaag

SEQ ID NO: 30141 - DNA, 80 bp, Homo sapiens
aaataaacccttctgagccatcacccttgccttcacaatgatcagcattttgtcattgcagagctagtccaaggagctta

SEQ ID NO: 30142 - DNA, 84 bp, Homo sapiens
ttctgagccatcacccttgccttcacaatgatcagcattttgtcattgcagagctagtccaaggagcttagcttggaaccagag

SEQ ID NO: 30143 - DNA, 81 bp, Homo sapiens
cttgccttcacaatgatcagcattttgtcattgcagagctagtccaaggagcttagcttggaaccagagtgtggagaactt

SEQ ID NO: 30144 - DNA, 82 bp, Homo sapiens
ttcacaatgatcagcattttgtcattgcagagctagtccaaggagcttagcttggaaccagagtgtggagaactttgatttc

SEQ ID NO: 30145 - DNA, 79 bp, Homo sapiens
agcattttgtcattgcagagctagtccaaggagcttagcttggaaccagagtgtggagaactttgatttctggaatatg

SEQ ID NO: 30146 - DNA, 77 bp, Homo sapiens
attgcagagctagtccaaggagcttagcttggaaccagagtgtggagaactttgatttctggaatatggaggaaaga

SEQ ID NO: 30147 - DNA, 74 bp, Homo sapiens
agctagtccaaggagcttagcttggaaccagagtgtggagaactttgatttctggaatatggaggaaagaaatg

SEQ ID NO: 30148 - DNA, 73 bp, Homo sapiens
aaggagcttagcttggaaccagagtgtggagaactttgatttctggaatatggaggaaagaaatgggaagtca

SEQ ID NO: 30149 - DNA, 71 bp, Homo sapiens
gaaccagagtgtggagaactttgatttctggaatatggaggaaagaaatgggaagtcattggagagttttt

SEQ ID NO: 30150 - DNA, 72 bp, Homo sapiens
agagtgtggagaactttgatttctggaatatggaggaaagaaatgggaagtcattggagagttttttagcaa

SEQ ID NO: 30151 - DNA, 69 bp, Homo sapiens
ctttgatttctggaatatggaggaaagaaatgggaagtcattggagagttttttagcaaggggtaataa

SEQ ID NO: 30152 - DNA, 68 bp, Homo sapiens
tggaatatggaggaaagaaatgggaagtcattggagagttttttagcaaggggtaataaaagttggaa

SEQ ID NO: 30153 - DNA, 64 bp, Homo sapiens
aaatgggaagtcattggagagttttttagcaaggggtaataaaagttggaagaaggaaagaaaa

SEQ ID NO: 30154 - DNA, 70 bp, Homo sapiens
aaaaaaaaacccaaatctatgaactcagtgttgggccagggctttctgcatagggcaccaaaggaggctg

SEQ ID NO: 30155 - DNA, 72 bp, Homo sapiens
aaacccaaatctatgaactcagtgttgggccagggctttctgcatagggcaccaaaggaggctggttagagt

SEQ ID NO: 30156 - DNA, 77 bp, Homo sapiens
tatgaactcagtgttgggccagggctttctgcatagggcaccaaaggaggctggttagagttcactcagtggcggtg

SEQ ID NO: 30157 - DNA, 74 bp, Homo sapiens
ttgggccagggctttctgcatagggcaccaaaggaggctggttagagttcactcagtggcggtgtttatttcaa

SEQ ID NO: 30158 - DNA, 73 bp, Homo sapiens
agggctttctgcatagggcaccaaaggaggctggttagagttcactcagtggcggtgtttatttcaagtgtcc

SEQ ID NO: 30159 - DNA, 74 bp, Homo sapiens
gctttctgcatagggcaccaaaggaggctggttagagttcactcagtggcggtgtttatttcaagtgtcccagt

SEQ ID NO: 30160 - DNA, 71 bp, Homo sapiens
atagggcaccaaaggaggctggttagagttcactcagtggcggtgtttatttcaagtgtcccagttgttcc

SEQ ID NO: 30161 - DNA, 71 bp, Homo sapiens
aaaggaggctggttagagttcactcagtggcggtgtttatttcaagtgtcccagttgttcctcttaatcat

SEQ ID NO: 30162 - DNA, 73 bp, Homo sapiens
gttagagttcactcagtggcggtgtttatttcaagtgtcccagttgttcctcttaatcattggtagaaagcaa

SEQ ID NO: 30163 - DNA, 72 bp, Homo sapiens
agttcactcagtggcggtgtttatttcaagtgtcccagttgttcctcttaatcattggtagaaagcaaaaga

SEQ ID NO: 30164 - DNA, 69 bp, Homo sapiens
cggtgtttatttcaagtgtcccagttgttcctcttaatcattggtagaaagcaaaagaccagaatttaa

SEQ ID NO: 30165 - DNA, 70 bp, Homo sapiens
tatttcaagtgtcccagttgttcctcttaatcattggtagaaagcaaaagaccagaatttaatttaggcc

SEQ ID NO: 30166 - DNA, 69 bp, Homo sapiens
cagttgttcctcttaatcattggtagaaagcaaaagaccagaatttaatttaggccctggacctagttc

SEQ ID NO: 30167 - DNA, 69 bp, Homo sapiens
atcattggtagaaagcaaaagaccagaatttaatttaggccctggacctagttccagaataggtgttgg

SEQ ID NO: 30168 - DNA, 68 bp, Homo sapiens
aaagcaaaagaccagaatttaatttaggccctggacctagttccagaataggtgttggggcacagaaa

SEQ ID NO: 30169 - DNA, 68 bp, Homo sapiens
agaatttaatttaggccctggacctagttccagaataggtgttggggcacagaaatagagtataaaaa

SEQ ID NO: 30170 - DNA, 68 bp, Homo sapiens
taatttaggccctggacctagttccagaataggtgttggggcacagaaatagagtataaaaaccttac

SEQ ID NO: 30171 - DNA, 70 bp, Homo sapiens
cctggacctagttccagaataggtgttggggcacagaaatagagtataaaaaccttacttgaggccaggc

SEQ ID NO: 30172 - DNA, 71 bp, Homo sapiens
tctcaaaaacaccaaaccaaagcgaaaggaaaccttacttgagcaccattgcattaaacagttgaacagct

SEQ ID NO: 30173 - DNA, 74 bp, Homo sapiens
aacaccaaaccaaagcgaaaggaaaccttacttgagcaccattgcattaaacagttgaacagcttgagcactca

SEQ ID NO: 30174 - DNA, 77 bp, Homo sapiens
accaaagcgaaaggaaaccttacttgagcaccattgcattaaacagttgaacagcttgagcactcagtgatggatcg

SEQ ID NO: 30175 - DNA, 79 bp, Homo sapiens
aaggaaaccttacttgagcaccattgcattaaacagttgaacagcttgagcactcagtgatggatcgtgcctctgaggg

SEQ ID NO: 30176 - DNA, 87 bp, Homo sapiens
ttgagcaccattgcattaaacagttgaacagcttgagcactcagtgatggatcgtgcctctgagggtcatgatcctcctgctcggat

SEQ ID NO: 30177 - DNA, 86 bp, Homo sapiens
attgcattaaacagttgaacagcttgagcactcagtgatggatcgtgcctctgagggtcatgatcctcctgctcggattggtcaga

SEQ ID NO: 30178 - DNA, 85 bp, Homo sapiens
aaacagttgaacagcttgagcactcagtgatggatcgtgcctctgagggtcatgatcctcctgctcggattggtcagaccacaga

SEQ ID NO: 30179 - DNA, 87 bp, Homo sapiens
ttgagcactcagtgatggatcgtgcctctgagggtcatgatcctcctgctcggattggtcagaccacagacgtccaaacgtgcatca

SEQ ID NO: 30180 - DNA, 82 bp, Homo sapiens
agtgatggatcgtgcctctgagggtcatgatcctcctgctcggattggtcagaccacagacgtccaaacgtgcatcagtttc

SEQ ID NO: 30181 - DNA, 83 bp, Homo sapiens
tggatcgtgcctctgagggtcatgatcctcctgctcggattggtcagaccacagacgtccaaacgtgcatcagtttcttcatg

SEQ ID NO: 30182 - DNA, 77 bp, Homo sapiens
atgatcctcctgctcggattggtcagaccacagacgtccaaacgtgcatcagtttcttcatgtgtacttttccttag

SEQ ID NO: 30183 - DNA, 77 bp, Homo sapiens
tcggattggtcagaccacagacgtccaaacgtgcatcagtttcttcatgtgtacttttccttaggtgcagattacta

SEQ ID NO: 30184 - DNA, 75 bp, Homo sapiens
agaccacagacgtccaaacgtgcatcagtttcttcatgtgtacttttccttaggtgcagattactagggacctca

SEQ ID NO: 30185 - DNA, 73 bp, Homo sapiens
acagacgtccaaacgtgcatcagtttcttcatgtgtacttttccttaggtgcagattactagggacctcaaac

SEQ ID NO: 30186 - DNA, 71 bp, Homo sapiens
aaacgtgcatcagtttcttcatgtgtacttttccttaggtgcagattactagggacctcaaaccctggtcc

SEQ ID NO: 30187 - DNA, 69 bp, Homo sapiens
tttcttcatgtgtacttttccttaggtgcagattactagggacctcaaaccctggtcccttggggcatt

SEQ ID NO: 30188 - DNA, 66 bp, Homo sapiens
tacttttccttaggtgcagattactagggacctcaaaccctggtcccttggggcatttccttaaaa

SEQ ID NO: 30189 - DNA, 71 bp, Homo sapiens
ttccttaggtgcagattactagggacctcaaaccctggtcccttggggcatttccttaaaatgattgctca

SEQ ID NO: 30190 - DNA, 71 bp, Homo sapiens
agattactagggacctcaaaccctggtcccttggggcatttccttaaaatgattgctcatccccaagagca

SEQ ID NO: 30191 - DNA, 70 bp, Homo sapiens
cctcaaaccctggtcccttggggcatttccttaaaatgattgctcatccccaagagcagggctaacaatt

SEQ ID NO: 30192 - DNA, 69 bp, Homo sapiens
accctggtcccttggggcatttccttaaaatgattgctcatccccaagagcagggctaacaattttgtt

SEQ ID NO: 30193 - DNA, 72 bp, Homo sapiens
gggcatttccttaaaatgattgctcatccccaagagcagggctaacaattttgttttgttgttggcaaacca

SEQ ID NO: 30194 - DNA, 71 bp, Homo sapiens
atgattgctcatccccaagagcagggctaacaattttgttttgttgttggcaaaccaaaaaatgagaagtt

SEQ ID NO: 30195 - DNA, 66 bp, Homo sapiens
cccaagagcagggctaacaattttgttttgttgttggcaaaccaaaaaatgagaagtttcttgttt

SEQ ID NO: 30196 - DNA, 66 bp, Homo sapiens
gcagggctaacaattttgttttgttgttggcaaaccaaaaaatgagaagtttcttgtttttcctaa

SEQ ID NO: 30197 - DNA, 66 bp, Homo sapiens
ttgttttgttgttggcaaaccaaaaaatgagaagtttcttgtttttcctaattaacacttcacaaa

SEQ ID NO: 30198 - DNA, 69 bp, Homo sapiens
tgttggcaaaccaaaaaatgagaagtttcttgtttttcctaattaacacttcacaaaagagagcctgac

SEQ ID NO: 30199 - DNA, 68 bp, Homo sapiens
aaccaaaaaatgagaagtttcttgtttttcctaattaacacttcacaaaagagagcctgactccaggc

SEQ ID NO: 30200 - DNA, 72 bp, Homo sapiens
aatgagaagtttcttgtttttcctaattaacacttcacaaaagagagcctgactccaggcgatgacaccacc

SEQ ID NO: 30201 - DNA, 74 bp, Homo sapiens
gtttttcctaattaacacttcacaaaagagagcctgactccaggcgatgacaccacctccttgtgccaagcatt

SEQ ID NO: 30202 - DNA, 79 bp, Homo sapiens
tcctaattaacacttcacaaaagagagcctgactccaggcgatgacaccacctccttgtgccaagcatttcacagcagg

SEQ ID NO: 30203 - DNA, 80 bp, Homo sapiens
agagcctgactccaggcgatgacaccacctccttgtgccaagcatttcacagcagggcccctcgcttccgtgatggagaa

SEQ ID NO: 30204 - DNA, 79 bp, Homo sapiens
caggcgatgacaccacctccttgtgccaagcatttcacagcagggcccctcgcttccgtgatggagaacgaacagcatt

SEQ ID NO: 30205 - DNA, 80 bp, Homo sapiens
atgacaccacctccttgtgccaagcatttcacagcagggcccctcgcttccgtgatggagaacgaacagcatttcgtgca

SEQ ID NO: 30206 - DNA, 80 bp, Homo sapiens
ttgtgccaagcatttcacagcagggcccctcgcttccgtgatggagaacgaacagcatttcgtgcacgctccctgccttc

SEQ ID NO: 30207 - DNA, 78 bp, Homo sapiens
ccaagcatttcacagcagggcccctcgcttccgtgatggagaacgaacagcatttcgtgcacgctccctgccttcctc

SEQ ID NO: 30208 - DNA, 77 bp, Homo sapiens
acagcagggcccctcgcttccgtgatggagaacgaacagcatttcgtgcacgctccctgccttcctctcatcctttc

SEQ ID NO: 30209 - DNA, 78 bp, Homo sapiens
tcgcttccgtgatggagaacgaacagcatttcgtgcacgctccctgccttcctctcatcctttcctcccctcactcta

SEQ ID NO: 30210 - DNA, 76 bp, Homo sapiens
atggagaacgaacagcatttcgtgcacgctccctgccttcctctcatcctttcctcccctcactctacccttgcta

SEQ ID NO: 30211 - DNA, 75 bp, Homo sapiens
atttcgtgcacgctccctgccttcctctcatcctttcctcccctcactctacccttgctaaatttagcagctgcc

SEQ ID NO: 30212 - DNA, 72 bp, Homo sapiens
ctctcatcctttcctcccctcactctacccttgctaaatttagcagctgccctcctcccccaattcagttat

SEQ ID NO: 30213 - DNA, 77 bp, Homo sapiens
ttgctaaatttagcagctgccctcctcccccaattcagttattcattcttttgctcttcctgccatgtgcatttccg

SEQ ID NO: 30214 - DNA, 77 bp, Homo sapiens
ccctcctcccccaattcagttattcattcttttgctcttcctgccatgtgcatttccggcttgcataatagccacca

SEQ ID NO: 30215 - DNA, 82 bp, Homo sapiens
caattcagttattcattcttttgctcttcctgccatgtgcatttccggcttgcataatagccaccagccactccagagaaga

SEQ ID NO: 30216 - DNA, 80 bp, Homo sapiens
agttattcattcttttgctcttcctgccatgtgcatttccggcttgcataatagccaccagccactccagagaagaggag

SEQ ID NO: 30217 - DNA, 81 bp, Homo sapiens
tgccatgtgcatttccggcttgcataatagccaccagccactccagagaagaggaggtgggtttactgaagcttgacatta

SEQ ID NO: 30218 - DNA, 76 bp, Homo sapiens
atttccggcttgcataatagccaccagccactccagagaagaggaggtgggtttactgaagcttgacattaaggca

SEQ ID NO: 30219 - DNA, 74 bp, Homo sapiens
aatagccaccagccactccagagaagaggaggtgggtttactgaagcttgacattaaggcaaggaatatattac

SEQ ID NO: 30220 - DNA, 72 bp, Homo sapiens
actccagagaagaggaggtgggtttactgaagcttgacattaaggcaaggaatatattacctagcctgcctt

SEQ ID NO: 30221 - DNA, 73 bp, Homo sapiens
agaggaggtgggtttactgaagcttgacattaaggcaaggaatatattacctagcctgcctttcagatacaaa

SEQ ID NO: 30222 - DNA, 73 bp, Homo sapiens
aagcttgacattaaggcaaggaatatattacctagcctgcctttcagatacaaagggtatgtgatgggttttc

SEQ ID NO: 30223 - DNA, 72 bp, Homo sapiens
acattaaggcaaggaatatattacctagcctgcctttcagatacaaagggtatgtgatgggttttctttctg

SEQ ID NO: 30224 - DNA, 72 bp, Homo sapiens
aatatattacctagcctgcctttcagatacaaagggtatgtgatgggttttctttctgtctcttagtctttc

SEQ ID NO: 30225 - DNA, 73 bp, Homo sapiens
tagcctgcctttcagatacaaagggtatgtgatgggttttctttctgtctcttagtctttctctcattatttt

SEQ ID NO: 30226 - DNA, 70 bp, Homo sapiens
gcctttcagatacaaagggtatgtgatgggttttctttctgtctcttagtctttctctcattattttttt

SEQ ID NO: 30227 - DNA, 71 bp, Homo sapiens
tacaaagggtatgtgatgggttttctttctgtctcttagtctttctctcattattttttttgttaatctca

SEQ ID NO: 30228 - DNA, 71 bp, Homo sapiens
tgatgggttttctttctgtctcttagtctttctctcattattttttttgttaatctcatttggaatttagc

SEQ ID NO: 30229 - DNA, 69 bp, Homo sapiens
ctttctgtctcttagtctttctctcattattttttttgttaatctcatttggaatttagccccatttta

SEQ ID NO: 30230 - DNA, 69 bp, Homo sapiens
cttagtctttctctcattattttttttgttaatctcatttggaatttagccccattttattcctgagtg

SEQ ID NO: 30231 - DNA, 71 bp, Homo sapiens
ctctcattattttttttgttaatctcatttggaatttagccccattttattcctgagtgtgattggaggct

SEQ ID NO: 30232 - DNA, 72 bp, Homo sapiens
tttttttgttaatctcatttggaatttagccccattttattcctgagtgtgattggaggcttatggtctctc

SEQ ID NO: 30233 - DNA, 76 bp, Homo sapiens
ttgttaatctcatttggaatttagccccattttattcctgagtgtgattggaggcttatggtctctcctcctcaca

SEQ ID NO: 30234 - DNA, 74 bp, Homo sapiens
atttggaatttagccccattttattcctgagtgtgattggaggcttatggtctctcctcctcacagatccttcc

SEQ ID NO: 30235 - DNA, 73 bp, Homo sapiens
cccattttattcctgagtgtgattggaggcttatggtctctcctcctcacagatccttcctcttttccctttg

SEQ ID NO: 30236 - DNA, 75 bp, Homo sapiens
ttattcctgagtgtgattggaggcttatggtctctcctcctcacagatccttcctcttttccctttggcctgatt

SEQ ID NO: 30237 - DNA, 78 bp, Homo sapiens
tgtgattggaggcttatggtctctcctcctcacagatccttcctcttttccctttggcctgatttgactcagcagtag

SEQ ID NO: 30238 - DNA, 75 bp, Homo sapiens
ttatggtctctcctcctcacagatccttcctcttttccctttggcctgatttgactcagcagtaggtgtgtttgt

SEQ ID NO: 30239 - DNA, 82 bp, Homo sapiens
tttggcctgatttgactcagcagtaggtgtgtttgttgttctcatttgcaggagctcagcaatagagaaagctggcttactc

SEQ ID NO: 30240 - DNA, 82 bp, Homo sapiens
agtaggtgtgtttgttgttctcatttgcaggagctcagcaatagagaaagctggcttactctgagagctgctcgcaaaccaa

SEQ ID NO: 30241 - DNA, 83 bp, Homo sapiens
tttgttgttctcatttgcaggagctcagcaatagagaaagctggcttactctgagagctgctcgcaaaccaagtaaatacaga

SEQ ID NO: 30242 - DNA, 86 bp, Homo sapiens
tgttctcatttgcaggagctcagcaatagagaaagctggcttactctgagagctgctcgcaaaccaagtaaatacagatgtgccac

SEQ ID NO: 30243 - DNA, 85 bp, Homo sapiens
gagctcagcaatagagaaagctggcttactctgagagctgctcgcaaaccaagtaaatacagatgtgccaccgcatacgctgtaa

SEQ ID NO: 30244 - DNA, 82 bp, Homo sapiens
atagagaaagctggcttactctgagagctgctcgcaaaccaagtaaatacagatgtgccaccgcatacgctgtaatgagctt

SEQ ID NO: 30245 - DNA, 83 bp, Homo sapiens
aaagctggcttactctgagagctgctcgcaaaccaagtaaatacagatgtgccaccgcatacgctgtaatgagctttctctca

SEQ ID NO: 30246 - DNA, 84 bp, Homo sapiens
ttactctgagagctgctcgcaaaccaagtaaatacagatgtgccaccgcatacgctgtaatgagctttctctcaagtattatga

SEQ ID NO: 30247 - DNA, 79 bp, Homo sapiens
ctcgcaaaccaagtaaatacagatgtgccaccgcatacgctgtaatgagctttctctcaagtattatgatgttggtggt

SEQ ID NO: 30248 - DNA, 79 bp, Homo sapiens
aaaccaagtaaatacagatgtgccaccgcatacgctgtaatgagctttctctcaagtattatgatgttggtggttgtga

SEQ ID NO: 30249 - DNA, 82 bp, Homo sapiens
aatacagatgtgccaccgcatacgctgtaatgagctttctctcaagtattatgatgttggtggttgtgagctcagtaggtaa

SEQ ID NO: 30250 - DNA, 82 bp, Homo sapiens
tacgctgtaatgagctttctctcaagtattatgatgttggtggttgtgagctcagtaggtaagaggatggagctaatgaggc

SEQ ID NO: 30251 - DNA, 77 bp, Homo sapiens
aagtattatgatgttggtggttgtgagctcagtaggtaagaggatggagctaatgaggccgaggtcaagggtgtcat

SEQ ID NO: 30252 - DNA, 81 bp, Homo sapiens
atgatgttggtggttgtgagctcagtaggtaagaggatggagctaatgaggccgaggtcaagggtgtcattgccctgcaga

SEQ ID NO: 30253 - DNA, 80 bp, Homo sapiens
tggttgtgagctcagtaggtaagaggatggagctaatgaggccgaggtcaagggtgtcattgccctgcagaccagttagc

SEQ ID NO: 30254 - DNA, 79 bp, Homo sapiens
agtaggtaagaggatggagctaatgaggccgaggtcaagggtgtcattgccctgcagaccagttagctctgcttcagac

SEQ ID NO: 30255 - DNA, 79 bp, Homo sapiens
aggtcaagggtgtcattgccctgcagaccagttagctctgcttcagacccagctcttaaaagtagtgcattttcagaga

SEQ ID NO: 30256 - DNA, 79 bp, Homo sapiens
cctgcagaccagttagctctgcttcagacccagctcttaaaagtagtgcattttcagagaccattccttaaagctcatg

SEQ ID NO: 30257 - DNA, 77 bp, Homo sapiens
agttagctctgcttcagacccagctcttaaaagtagtgcattttcagagaccattccttaaagctcatggccaggaa

SEQ ID NO: 30258 - DNA, 78 bp, Homo sapiens
ttcagacccagctcttaaaagtagtgcattttcagagaccattccttaaagctcatggccaggaagcaaggtctgaga

SEQ ID NO: 30259 - DNA, 78 bp, Homo sapiens
agctcttaaaagtagtgcattttcagagaccattccttaaagctcatggccaggaagcaaggtctgagagcatgtccg

SEQ ID NO: 30260 - DNA, 80 bp, Homo sapiens
taaaagtagtgcattttcagagaccattccttaaagctcatggccaggaagcaaggtctgagagcatgtccgggcgcatg

SEQ ID NO: 30261 - DNA, 82 bp, Homo sapiens
attttcagagaccattccttaaagctcatggccaggaagcaaggtctgagagcatgtccgggcgcatgtgctccagtgaaca

SEQ ID NO: 30262 - DNA, 83 bp, Homo sapiens
accattccttaaagctcatggccaggaagcaaggtctgagagcatgtccgggcgcatgtgctccagtgaacaggtgcacacaa

SEQ ID NO: 30263 - DNA, 85 bp, Homo sapiens
ttaaagctcatggccaggaagcaaggtctgagagcatgtccgggcgcatgtgctccagtgaacaggtgcacacaacaaggagaga

SEQ ID NO: 30264 - DNA, 81 bp, Homo sapiens
aggaagcaaggtctgagagcatgtccgggcgcatgtgctccagtgaacaggtgcacacaacaaggagagaagtgtaggtct

SEQ ID NO: 30265 - DNA, 80 bp, Homo sapiens
aaggtctgagagcatgtccgggcgcatgtgctccagtgaacaggtgcacacaacaaggagagaagtgtaggtctttatcc

SEQ ID NO: 30266 - DNA, 78 bp, Homo sapiens
atgtccgggcgcatgtgctccagtgaacaggtgcacacaacaaggagagaagtgtaggtctttatccggtggtatcca

SEQ ID NO: 30267 - DNA, 78 bp, Homo sapiens
cgcatgtgctccagtgaacaggtgcacacaacaaggagagaagtgtaggtctttatccggtggtatccagggagaaga

SEQ ID NO: 30268 - DNA, 75 bp, Homo sapiens
tccagtgaacaggtgcacacaacaaggagagaagtgtaggtctttatccggtggtatccagggagaagagctttc

SEQ ID NO: 30269 - DNA, 74 bp, Homo sapiens
aggtgcacacaacaaggagagaagtgtaggtctttatccggtggtatccagggagaagagctttccaaggcaca

SEQ ID NO: 30270 - DNA, 73 bp, Homo sapiens
aacaaggagagaagtgtaggtctttatccggtggtatccagggagaagagctttccaaggcacagaagtgata

SEQ ID NO: 30271 - DNA, 74 bp, Homo sapiens
agagaagtgtaggtctttatccggtggtatccagggagaagagctttccaaggcacagaagtgatatgaagagg

SEQ ID NO: 30272 - DNA, 74 bp, Homo sapiens
aggtctttatccggtggtatccagggagaagagctttccaaggcacagaagtgatatgaagaggtggccctctc

SEQ ID NO: 30273 - DNA, 79 bp, Homo sapiens
acagaagtgatatgaagaggtggccctctccctatcctcctgcctttcagctatatggtgcccttgatgacaaagagaa

SEQ ID NO: 30274 - DNA, 82 bp, Homo sapiens
tggccctctccctatcctcctgcctttcagctatatggtgcccttgatgacaaagagaacaagtagagaggtgcatggatca

SEQ ID NO: 30275 - DNA, 80 bp, Homo sapiens
ctatcctcctgcctttcagctatatggtgcccttgatgacaaagagaacaagtagagaggtgcatggatcagtacaagtt

SEQ ID NO: 30276 - DNA, 81 bp, Homo sapiens
tcctgcctttcagctatatggtgcccttgatgacaaagagaacaagtagagaggtgcatggatcagtacaagtttcctgcc

SEQ ID NO: 30277 - DNA, 80 bp, Homo sapiens
agctatatggtgcccttgatgacaaagagaacaagtagagaggtgcatggatcagtacaagtttcctgcctccagctact

SEQ ID NO: 30278 - DNA, 79 bp, Homo sapiens
cccttgatgacaaagagaacaagtagagaggtgcatggatcagtacaagtttcctgcctccagctacttcctctctctc

SEQ ID NO: 30279 - DNA, 78 bp, Homo sapiens
atgacaaagagaacaagtagagaggtgcatggatcagtacaagtttcctgcctccagctacttcctctctctctccct

SEQ ID NO: 30280 - DNA, 74 bp, Homo sapiens
tctctctctcccttcttctccactgaaaagaaaaaaatccagctcaacataaattgtttccagaatcaatactg

SEQ ID NO: 30281 - DNA, 71 bp, Homo sapiens
cccttcttctccactgaaaagaaaaaaatccagctcaacataaattgtttccagaatcaatactgttccat

SEQ ID NO: 30282 - DNA, 74 bp, Homo sapiens
tctccactgaaaagaaaaaaatccagctcaacataaattgtttccagaatcaatactgttccatttaattatga

SEQ ID NO: 30283 - DNA, 75 bp, Homo sapiens
gaaaaaaatccagctcaacataaattgtttccagaatcaatactgttccatttaattatgaaggataacagatga

SEQ ID NO: 30284 - DNA, 79 bp, Homo sapiens
cataaattgtttccagaatcaatactgttccatttaattatgaaggataacagatgattgatgtgggcatatgttaaca

SEQ ID NO: 30285 - DNA, 82 bp, Homo sapiens
tccagaatcaatactgttccatttaattatgaaggataacagatgattgatgtgggcatatgttaacatacagaaagatctg

SEQ ID NO: 30286 - DNA, 82 bp, Homo sapiens
tcaatactgttccatttaattatgaaggataacagatgattgatgtgggcatatgttaacatacagaaagatctggttctga

SEQ ID NO: 30287 - DNA, 77 bp, Homo sapiens
ccatttaattatgaaggataacagatgattgatgtgggcatatgttaacatacagaaagatctggttctgaaaaaaa

SEQ ID NO: 30288 - DNA, 78 bp, Homo sapiens
atgaaggataacagatgattgatgtgggcatatgttaacatacagaaagatctggttctgaaaaaaaaatctgtcaag

SEQ ID NO: 30289 - DNA, 79 bp, Homo sapiens
cagatgattgatgtgggcatatgttaacatacagaaagatctggttctgaaaaaaaaatctgtcaagtgaaattataca

SEQ ID NO: 30290 - DNA, 77 bp, Homo sapiens
gatgtgggcatatgttaacatacagaaagatctggttctgaaaaaaaaatctgtcaagtgaaattatacatatcaaa

SEQ ID NO: 30291 - DNA, 74 bp, Homo sapiens
tgttaacatacagaaagatctggttctgaaaaaaaaatctgtcaagtgaaattatacatatcaaatattacttc

SEQ ID NO: 30292 - DNA, 74 bp, Homo sapiens
tacagaaagatctggttctgaaaaaaaaatctgtcaagtgaaattatacatatcaaatattacttccccagtga

SEQ ID NO: 30293 - DNA, 70 bp, Homo sapiens
ctggttctgaaaaaaaaatctgtcaagtgaaattatacatatcaaatattacttccccagtgatttattt

SEQ ID NO: 30294 - DNA, 71 bp, Homo sapiens
aaaaatctgtcaagtgaaattatacatatcaaatattacttccccagtgatttattttacataactgggaa

SEQ ID NO: 30295 - DNA, 74 bp, Homo sapiens
tgtcaagtgaaattatacatatcaaatattacttccccagtgatttattttacataactgggaatacagttcca

SEQ ID NO: 30296 - DNA, 69 bp, Homo sapiens
caaatattacttccccagtgatttattttacataactgggaatacagttccatataaaagtatgttaac

SEQ ID NO: 30297 - DNA, 77 bp, Homo sapiens
tttacataactgggaatacagttccatataaaagtatgttaacccaagatgacacatgttgctgccaacttggcata

SEQ ID NO: 30298 - DNA, 73 bp, Homo sapiens
atataaaagtatgttaacccaagatgacacatgttgctgccaacttggcataggtaagtaggtaggtgggtag

SEQ ID NO: 30299 - DNA, 72 bp, Homo sapiens
aaagtatgttaacccaagatgacacatgttgctgccaacttggcataggtaagtaggtaggtgggtaggtaa

SEQ ID NO: 30300 - DNA, 73 bp, Homo sapiens
aacccaagatgacacatgttgctgccaacttggcataggtaagtaggtaggtgggtaggtaagtaggtggata

SEQ ID NO: 30301 - DNA, 73 bp, Homo sapiens
atgttgctgccaacttggcataggtaagtaggtaggtgggtaggtaagtaggtggataggtggataggaatga

SEQ ID NO: 30302 - DNA, 71 bp, Homo sapiens
ccaacttggcataggtaagtaggtaggtgggtaggtaagtaggtggataggtggataggaatgacagaatg

SEQ ID NO: 30303 - DNA, 70 bp, Homo sapiens
ataggtaagtaggtaggtgggtaggtaagtaggtggataggtggataggaatgacagaatggaaagagaa

SEQ ID NO: 30304 - DNA, 70 bp, Homo sapiens
aagtaggtaggtgggtaggtaagtaggtggataggtggataggaatgacagaatggaaagagaacaaggc

SEQ ID NO: 30305 - DNA, 73 bp, Homo sapiens
ggtaggtaagtaggtggataggtggataggaatgacagaatggaaagagaacaaggcccaactcagctgttaa

SEQ ID NO: 30306 - DNA, 79 bp, Homo sapiens
ggtggataggtggataggaatgacagaatggaaagagaacaaggcccaactcagctgttaagcagcctggcacaatgaa

SEQ ID NO: 30307 - DNA, 82 bp, Homo sapiens
ataggtggataggaatgacagaatggaaagagaacaaggcccaactcagctgttaagcagcctggcacaatgaagcatgcac

SEQ ID NO: 30308 - DNA, 82 bp, Homo sapiens
aatgacagaatggaaagagaacaaggcccaactcagctgttaagcagcctggcacaatgaagcatgcacggtcaagtgcaaa

SEQ ID NO: 30309 - DNA, 83 bp, Homo sapiens
gaaagagaacaaggcccaactcagctgttaagcagcctggcacaatgaagcatgcacggtcaagtgcaaacagaaggcatcat

SEQ ID NO: 30310 - DNA, 83 bp, Homo sapiens
agaacaaggcccaactcagctgttaagcagcctggcacaatgaagcatgcacggtcaagtgcaaacagaaggcatcattcaac

SEQ ID NO: 30311 - DNA, 83 bp, Homo sapiens
ttaagcagcctggcacaatgaagcatgcacggtcaagtgcaaacagaaggcatcattcaaccgccttgtgatttcacctcgtc

SEQ ID NO: 30312 - DNA, 81 bp, Homo sapiens
cacaatgaagcatgcacggtcaagtgcaaacagaaggcatcattcaaccgccttgtgatttcacctcgtcgtggccacaaa

SEQ ID NO: 30313 - DNA, 78 bp, Homo sapiens
aagcatgcacggtcaagtgcaaacagaaggcatcattcaaccgccttgtgatttcacctcgtcgtggccacaaactta

SEQ ID NO: 30314 - DNA, 76 bp, Homo sapiens
aacagaaggcatcattcaaccgccttgtgatttcacctcgtcgtggccacaaacttaaccagttcagacattcata

SEQ ID NO: 30315 - DNA, 76 bp, Homo sapiens
atttcacctcgtcgtggccacaaacttaaccagttcagacattcataatttcacaatgggcatttatatcacagta

SEQ ID NO: 30316 - DNA, 81 bp, Homo sapiens
accagttcagacattcataatttcacaatgggcatttatatcacagtacaaatgtgtcttgctcaatctagcaccagttcc

SEQ ID NO: 30317 - DNA, 81 bp, Homo sapiens
attcataatttcacaatgggcatttatatcacagtacaaatgtgtcttgctcaatctagcaccagttccccacatgtatcc

SEQ ID NO: 30318 - DNA, 82 bp, Homo sapiens
ttcacaatgggcatttatatcacagtacaaatgtgtcttgctcaatctagcaccagttccccacatgtatcctctatgactt

SEQ ID NO: 30319 - DNA, 81 bp, Homo sapiens
atttatatcacagtacaaatgtgtcttgctcaatctagcaccagttccccacatgtatcctctatgactttcttacattga

SEQ ID NO: 30320 - DNA, 78 bp, Homo sapiens
agtacaaatgtgtcttgctcaatctagcaccagttccccacatgtatcctctatgactttcttacattgaaacttaca

SEQ ID NO: 30321 - DNA, 78 bp, Homo sapiens
aatgtgtcttgctcaatctagcaccagttccccacatgtatcctctatgactttcttacattgaaacttacattgaaa

SEQ ID NO: 30322 - DNA, 77 bp, Homo sapiens
atctagcaccagttccccacatgtatcctctatgactttcttacattgaaacttacattgaaatcatgccttcgtta

SEQ ID NO: 30323 - DNA, 75 bp, Homo sapiens
agttccccacatgtatcctctatgactttcttacattgaaacttacattgaaatcatgccttcgttagtagccac

SEQ ID NO: 30324 - DNA, 79 bp, Homo sapiens
atgtatcctctatgactttcttacattgaaacttacattgaaatcatgccttcgttagtagccacgtggcagtgctaga

SEQ ID NO: 30325 - DNA, 78 bp, Homo sapiens
tatgactttcttacattgaaacttacattgaaatcatgccttcgttagtagccacgtggcagtgctagaagctaggaa

SEQ ID NO: 30326 - DNA, 76 bp, Homo sapiens
tttcttacattgaaacttacattgaaatcatgccttcgttagtagccacgtggcagtgctagaagctaggaagttg

SEQ ID NO: 30327 - DNA, 77 bp, Homo sapiens
aaacttacattgaaatcatgccttcgttagtagccacgtggcagtgctagaagctaggaagttggtgttagctcaga

SEQ ID NO: 30328 - DNA, 77 bp, Homo sapiens
atgccttcgttagtagccacgtggcagtgctagaagctaggaagttggtgttagctcagaggttcacctccatgccc

SEQ ID NO: 30329 - DNA, 80 bp, Homo sapiens
tagtagccacgtggcagtgctagaagctaggaagttggtgttagctcagaggttcacctccatgccctgacagtagacga

SEQ ID NO: 30330 - DNA, 83 bp, Homo sapiens
agtgctagaagctaggaagttggtgttagctcagaggttcacctccatgccctgacagtagacgaggatgatcatcatgctaa

SEQ ID NO: 30331 - DNA, 81 bp, Homo sapiens
aagctaggaagttggtgttagctcagaggttcacctccatgccctgacagtagacgaggatgatcatcatgctaattcaaa

SEQ ID NO: 30332 - DNA, 82 bp, Homo sapiens
aagttggtgttagctcagaggttcacctccatgccctgacagtagacgaggatgatcatcatgctaattcaaactctctata

SEQ ID NO: 30333 - DNA, 82 bp, Homo sapiens
cctgacagtagacgaggatgatcatcatgctaattcaaactctctatatgtgaacatttgttacctctataatgtactccat

SEQ ID NO: 30334 - DNA, 84 bp, Homo sapiens
tagacgaggatgatcatcatgctaattcaaactctctatatgtgaacatttgttacctctataatgtactccattctgaaatca

SEQ ID NO: 30335 - DNA, 85 bp, Homo sapiens
atcatcatgctaattcaaactctctatatgtgaacatttgttacctctataatgtactccattctgaaatcacatcatggcttga

SEQ ID NO: 30336 - DNA, 81 bp, Homo sapiens
ctaattcaaactctctatatgtgaacatttgttacctctataatgtactccattctgaaatcacatcatggcttgagcaaa

SEQ ID NO: 30337 - DNA, 82 bp, Homo sapiens
tgaacatttgttacctctataatgtactccattctgaaatcacatcatggcttgagcaaagcagtcctcagattacacttac

SEQ ID NO: 30338 - DNA, 81 bp, Homo sapiens
tttgttacctctataatgtactccattctgaaatcacatcatggcttgagcaaagcagtcctcagattacacttacctcta

SEQ ID NO: 30339 - DNA, 81 bp, Homo sapiens
tctataatgtactccattctgaaatcacatcatggcttgagcaaagcagtcctcagattacacttacctctagaaaaacca

SEQ ID NO: 30340 - DNA, 79 bp, Homo sapiens
attctgaaatcacatcatggcttgagcaaagcagtcctcagattacacttacctctagaaaaaccagcattttcactct

SEQ ID NO: 30341 - DNA, 76 bp, Homo sapiens
aaatcacatcatggcttgagcaaagcagtcctcagattacacttacctctagaaaaaccagcattttcactctttt

SEQ ID NO: 30342 - DNA, 65 bp, Homo sapiens
acttacctctagaaaaaccagcattttcactctttttccttacttattagttatgggaagggagg

SEQ ID NO: 30343 - DNA, 66 bp, Homo sapiens
agcattttcactctttttccttacttattagttatgggaagggagggtgattttatataattaggt

SEQ ID NO: 30344 - DNA, 68 bp, Homo sapiens
gggagggtgattttatataattaggttaaccttataatttttcacccataccaacacacttatgacag

SEQ ID NO: 30345 - DNA, 73 bp, Homo sapiens
ttaggttaaccttataatttttcacccataccaacacacttatgacagtgacacagggctccagcaataagta

SEQ ID NO: 30346 - DNA, 77 bp, Homo sapiens
ttataatttttcacccataccaacacacttatgacagtgacacagggctccagcaataagtaagccaggactacata

SEQ ID NO: 30347 - DNA, 80 bp, Homo sapiens
ttcacccataccaacacacttatgacagtgacacagggctccagcaataagtaagccaggactacatatcaaatattcag

SEQ ID NO: 30348 - DNA, 79 bp, Homo sapiens
aacacacttatgacagtgacacagggctccagcaataagtaagccaggactacatatcaaatattcaggcaaaaccaga

SEQ ID NO: 30349 - DNA, 79 bp, Homo sapiens
tatgacagtgacacagggctccagcaataagtaagccaggactacatatcaaatattcaggcaaaaccagaaccagaac

SEQ ID NO: 30350 - DNA, 76 bp, Homo sapiens
agggctccagcaataagtaagccaggactacatatcaaatattcaggcaaaaccagaaccagaaccatcctcgaca

SEQ ID NO: 30351 - DNA, 72 bp, Homo sapiens
aataagtaagccaggactacatatcaaatattcaggcaaaaccagaaccagaaccatcctcgacaaacaaac

SEQ ID NO: 30352 - DNA, 74 bp, Homo sapiens
taagccaggactacatatcaaatattcaggcaaaaccagaaccagaaccatcctcgacaaacaaactggggtga

SEQ ID NO: 30353 - DNA, 75 bp, Homo sapiens
actacatatcaaatattcaggcaaaaccagaaccagaaccatcctcgacaaacaaactggggtgagtgtgtgtga

SEQ ID NO: 30354 - DNA, 76 bp, Homo sapiens
atattcaggcaaaaccagaaccagaaccatcctcgacaaacaaactggggtgagtgtgtgtgagtatgtatgtata

SEQ ID NO: 30355 - DNA, 76 bp, Homo sapiens
agaaccatcctcgacaaacaaactggggtgagtgtgtgtgagtatgtatgtatattttaaaggatgagatctggaa

SEQ ID NO: 30356 - DNA, 74 bp, Homo sapiens
tcgacaaacaaactggggtgagtgtgtgtgagtatgtatgtatattttaaaggatgagatctggaaaccgggaa

SEQ ID NO: 30357 - DNA, 70 bp, Homo sapiens
agtgtgtgtgagtatgtatgtatattttaaaggatgagatctggaaaccgggaaaccaggtcctaaccct

SEQ ID NO: 30358 - DNA, 71 bp, Homo sapiens
agtatgtatgtatattttaaaggatgagatctggaaaccgggaaaccaggtcctaacccttcattctgcca

SEQ ID NO: 30359 - DNA, 72 bp, Homo sapiens
atattttaaaggatgagatctggaaaccgggaaaccaggtcctaacccttcattctgccagaacagatcata

SEQ ID NO: 30360 - DNA, 73 bp, Homo sapiens
taaaggatgagatctggaaaccgggaaaccaggtcctaacccttcattctgccagaacagatcataagggcta

SEQ ID NO: 30361 - DNA, 77 bp, Homo sapiens
tcctaacccttcattctgccagaacagatcataagggctaagtttctcattcctctggctctgtctccccagttata

SEQ ID NO: 30362 - DNA, 76 bp, Homo sapiens
cttcattctgccagaacagatcataagggctaagtttctcattcctctggctctgtctccccagttataagaaggg

SEQ ID NO: 30363 - DNA, 73 bp, Homo sapiens
gaacagatcataagggctaagtttctcattcctctggctctgtctccccagttataagaagggggttaggcta

SEQ ID NO: 30364 - DNA, 71 bp, Homo sapiens
atcataagggctaagtttctcattcctctggctctgtctccccagttataagaagggggttaggctaaatg

SEQ ID NO: 30365 - DNA, 72 bp, Homo sapiens
taagtttctcattcctctggctctgtctccccagttataagaagggggttaggctaaatggtttctgcagtc

SEQ ID NO: 30366 - DNA, 72 bp, Homo sapiens
ctctgtctccccagttataagaagggggttaggctaaatggtttctgcagtctcttacagctctcaaatccc

SEQ ID NO: 30367 - DNA, 71 bp, Homo sapiens
agttataagaagggggttaggctaaatggtttctgcagtctcttacagctctcaaatccccacattacgtc

SEQ ID NO: 30368 - DNA, 71 bp, Homo sapiens
agaagggggttaggctaaatggtttctgcagtctcttacagctctcaaatccccacattacgtccaaggaa

SEQ ID NO: 30369 - DNA, 74 bp, Homo sapiens
ttaggctaaatggtttctgcagtctcttacagctctcaaatccccacattacgtccaaggaacctgagtcttcc

SEQ ID NO: 30370 - DNA, 77 bp, Homo sapiens
tctcttacagctctcaaatccccacattacgtccaaggaacctgagtcttcctgggtgatatgaagataagacatat

SEQ ID NO: 30371 - DNA, 72 bp, Homo sapiens
acattacgtccaaggaacctgagtcttcctgggtgatatgaagataagacatattcccttccctcagggtct

SEQ ID NO: 30372 - DNA, 75 bp, Homo sapiens
caaggaacctgagtcttcctgggtgatatgaagataagacatattcccttccctcagggtcttgagcatctaaaa

SEQ ID NO: 30373 - DNA, 76 bp, Homo sapiens
ctgagtcttcctgggtgatatgaagataagacatattcccttccctcagggtcttgagcatctaaaatctagaaaa

SEQ ID NO: 30374 - DNA, 79 bp, Homo sapiens
atatgaagataagacatattcccttccctcagggtcttgagcatctaaaatctagaaaatcatagcagtgtcctgcctg

SEQ ID NO: 30375 - DNA, 79 bp, Homo sapiens
tccctcagggtcttgagcatctaaaatctagaaaatcatagcagtgtcctgcctggtgttgctcagaagcgggagaaaa

SEQ ID NO: 30376 - DNA, 79 bp, Homo sapiens
gtcttgagcatctaaaatctagaaaatcatagcagtgtcctgcctggtgttgctcagaagcgggagaaaatctcttctt

SEQ ID NO: 30377 - DNA, 77 bp, Homo sapiens
atctaaaatctagaaaatcatagcagtgtcctgcctggtgttgctcagaagcgggagaaaatctcttctttcctcat

SEQ ID NO: 30378 - DNA, 77 bp, Homo sapiens
aaaatcatagcagtgtcctgcctggtgttgctcagaagcgggagaaaatctcttctttcctcatttgtctcacctta

SEQ ID NO: 30379 - DNA, 78 bp, Homo sapiens
atagcagtgtcctgcctggtgttgctcagaagcgggagaaaatctcttctttcctcatttgtctcaccttattcagaa

SEQ ID NO: 30380 - DNA, 76 bp, Homo sapiens
cctggtgttgctcagaagcgggagaaaatctcttctttcctcatttgtctcaccttattcagaacttcagataatg

SEQ ID NO: 30381 - DNA, 77 bp, Homo sapiens
tgttgctcagaagcgggagaaaatctcttctttcctcatttgtctcaccttattcagaacttcagataatgttgccc

SEQ ID NO: 30382 - DNA, 75 bp, Homo sapiens
aagcgggagaaaatctcttctttcctcatttgtctcaccttattcagaacttcagataatgttgcccctctgaga

SEQ ID NO: 30383 - DNA, 79 bp, Homo sapiens
aatctcttctttcctcatttgtctcaccttattcagaacttcagataatgttgcccctctgagagtggcagcaagagta

SEQ ID NO: 30384 - DNA, 81 bp, Homo sapiens
tcatttgtctcaccttattcagaacttcagataatgttgcccctctgagagtggcagcaagagtagcgtcattcacttatt

SEQ ID NO: 30385 - DNA, 83 bp, Homo sapiens
tattcagaacttcagataatgttgcccctctgagagtggcagcaagagtagcgtcattcacttatttcatcataaaaagctca

SEQ ID NO: 30386 - DNA, 80 bp, Homo sapiens
ttcagataatgttgcccctctgagagtggcagcaagagtagcgtcattcacttatttcatcataaaaagctcagtttaag

SEQ ID NO: 30387 - DNA, 76 bp, Homo sapiens
agagtggcagcaagagtagcgtcattcacttatttcatcataaaaagctcagtttaaggacattctttttccttga

SEQ ID NO: 30388 - DNA, 74 bp, Homo sapiens
gcgtcattcacttatttcatcataaaaagctcagtttaaggacattctttttccttgactgttgtgactcattt

SEQ ID NO: 30389 - DNA, 72 bp, Homo sapiens
cttatttcatcataaaaagctcagtttaaggacattctttttccttgactgttgtgactcattttatctttg

SEQ ID NO: 30390 - DNA, 73 bp, Homo sapiens
tttaaggacattctttttccttgactgttgtgactcattttatctttgtaatatgaattagaatgcaggtagg

SEQ ID NO: 30391 - DNA, 75 bp, Homo sapiens
tctttttccttgactgttgtgactcattttatctttgtaatatgaattagaatgcaggtaggtagttatgtagaa

SEQ ID NO: 30392 - DNA, 75 bp, Homo sapiens
tccttgactgttgtgactcattttatctttgtaatatgaattagaatgcaggtaggtagttatgtagaaaggagg

SEQ ID NO: 30393 - DNA, 73 bp, Homo sapiens
gttgtgactcattttatctttgtaatatgaattagaatgcaggtaggtagttatgtagaaaggaggtaaaata

SEQ ID NO: 30394 - DNA, 72 bp, Homo sapiens
atctttgtaatatgaattagaatgcaggtaggtagttatgtagaaaggaggtaaaataaacaatgatattac

SEQ ID NO: 30395 - DNA, 73 bp, Homo sapiens
tatgaattagaatgcaggtaggtagttatgtagaaaggaggtaaaataaacaatgatattacttccttcacaa

SEQ ID NO: 30396 - DNA, 70 bp, Homo sapiens
gaatgcaggtaggtagttatgtagaaaggaggtaaaataaacaatgatattacttccttcacaaaaacca

SEQ ID NO: 30397 - DNA, 69 bp, Homo sapiens
gtaggtagttatgtagaaaggaggtaaaataaacaatgatattacttccttcacaaaaaccaggaggca

SEQ ID NO: 30398 - DNA, 70 bp, Homo sapiens
gtagaaaggaggtaaaataaacaatgatattacttccttcacaaaaaccaggaggcaaagcatctttaga

SEQ ID NO: 30399 - DNA, 72 bp, Homo sapiens
gtaaaataaacaatgatattacttccttcacaaaaaccaggaggcaaagcatctttagaaatatcaaagcag

SEQ ID NO: 30400 - DNA, 73 bp, Homo sapiens
aaacaatgatattacttccttcacaaaaaccaggaggcaaagcatctttagaaatatcaaagcagtaaatgac

SEQ ID NO: 30401 - DNA, 72 bp, Homo sapiens
atattacttccttcacaaaaaccaggaggcaaagcatctttagaaatatcaaagcagtaaatgactataaaa

SEQ ID NO: 30402 - DNA, 71 bp, Homo sapiens
cttcacaaaaaccaggaggcaaagcatctttagaaatatcaaagcagtaaatgactataaaataaatttat

SEQ ID NO: 30403 - DNA, 75 bp, Homo sapiens
atatcaaagcagtaaatgactataaaataaatttattttgtcacgtgcagttgtgatgataacttcttttcacac

SEQ ID NO: 30404 - DNA, 70 bp, Homo sapiens
gactataaaataaatttattttgtcacgtgcagttgtgatgataacttcttttcacaccttaggttcttt

SEQ ID NO: 30405 - DNA, 68 bp, Homo sapiens
aatttattttgtcacgtgcagttgtgatgataacttcttttcacaccttaggttcttttattttgggt

SEQ ID NO: 30406 - DNA, 69 bp, Homo sapiens
tttgtcacgtgcagttgtgatgataacttcttttcacaccttaggttcttttattttgggttttatccc

SEQ ID NO: 30407 - DNA, 67 bp, Homo sapiens
gcagttgtgatgataacttcttttcacaccttaggttcttttattttgggttttatccccttaaata

SEQ ID NO: 30408 - DNA, 67 bp, Homo sapiens
tttttttaattgtcatttgtcctctagtgttagaactactggaatattggccccccaaaaactcaac

SEQ ID NO: 30409 - DNA, 69 bp, Homo sapiens
tgtcatttgtcctctagtgttagaactactggaatattggccccccaaaaactcaacggaaacataaaa

SEQ ID NO: 30410 - DNA, 67 bp, Homo sapiens
tttgtcctctagtgttagaactactggaatattggccccccaaaaactcaacggaaacataaaataa

SEQ ID NO: 30411 - DNA, 65 bp, Homo sapiens
agtgttagaactactggaatattggccccccaaaaactcaacggaaacataaaataagcctccct

SEQ ID NO: 30412 - DNA, 66 bp, Homo sapiens
ctactggaatattggccccccaaaaactcaacggaaacataaaataagcctcccttctgggctaaa

SEQ ID NO: 30413 - DNA, 68 bp, Homo sapiens
attggccccccaaaaactcaacggaaacataaaataagcctcccttctgggctaaagtctctgaatga

SEQ ID NO: 30414 - DNA, 72 bp, Homo sapiens
aaaaactcaacggaaacataaaataagcctcccttctgggctaaagtctctgaatgagaccagctccacaga

SEQ ID NO: 30415 - DNA, 74 bp, Homo sapiens
aaacataaaataagcctcccttctgggctaaagtctctgaatgagaccagctccacagaatcaccccatgggac

SEQ ID NO: 30416 - DNA, 78 bp, Homo sapiens
aaaataagcctcccttctgggctaaagtctctgaatgagaccagctccacagaatcaccccatgggactggatatgca

SEQ ID NO: 30417 - DNA, 81 bp, Homo sapiens
ttctgggctaaagtctctgaatgagaccagctccacagaatcaccccatgggactggatatgcagtctgtagggagaagga

SEQ ID NO: 30418 - DNA, 82 bp, Homo sapiens
taaagtctctgaatgagaccagctccacagaatcaccccatgggactggatatgcagtctgtagggagaaggagcaagatcc

SEQ ID NO: 30419 - DNA, 81 bp, Homo sapiens
tgagaccagctccacagaatcaccccatgggactggatatgcagtctgtagggagaaggagcaagatccggatttctcaaa

SEQ ID NO: 30420 - DNA, 79 bp, Homo sapiens
tccacagaatcaccccatgggactggatatgcagtctgtagggagaaggagcaagatccggatttctcaaacgttctca

SEQ ID NO: 30421 - DNA, 77 bp, Homo sapiens
aatcaccccatgggactggatatgcagtctgtagggagaaggagcaagatccggatttctcaaacgttctcatccca

SEQ ID NO: 30422 - DNA, 76 bp, Homo sapiens
atgggactggatatgcagtctgtagggagaaggagcaagatccggatttctcaaacgttctcatcccatcaccccc

SEQ ID NO: 30423 - DNA, 78 bp, Homo sapiens
tatgcagtctgtagggagaaggagcaagatccggatttctcaaacgttctcatcccatcacccccttggagcttgata

SEQ ID NO: 30424 - DNA, 75 bp, Homo sapiens
tgtagggagaaggagcaagatccggatttctcaaacgttctcatcccatcacccccttggagcttgataatttca

SEQ ID NO: 30425 - DNA, 74 bp, Homo sapiens
aaggagcaagatccggatttctcaaacgttctcatcccatcacccccttggagcttgataatttcagctcttta

SEQ ID NO: 30426 - DNA, 75 bp, Homo sapiens
aagatccggatttctcaaacgttctcatcccatcacccccttggagcttgataatttcagctctttagttgcatc

SEQ ID NO: 30427 - DNA, 75 bp, Homo sapiens
atccggatttctcaaacgttctcatcccatcacccccttggagcttgataatttcagctctttagttgcatcctg

SEQ ID NO: 30428 - DNA, 77 bp, Homo sapiens
atttctcaaacgttctcatcccatcacccccttggagcttgataatttcagctctttagttgcatcctgtcctctgc

SEQ ID NO: 30429 - DNA, 78 bp, Homo sapiens
atcccatcacccccttggagcttgataatttcagctctttagttgcatcctgtcctctgccccatcaaagagattatg

SEQ ID NO: 30430 - DNA, 79 bp, Homo sapiens
ccttggagcttgataatttcagctctttagttgcatcctgtcctctgccccatcaaagagattatggggcagtgattct

SEQ ID NO: 30431 - DNA, 80 bp, Homo sapiens
ttggagcttgataatttcagctctttagttgcatcctgtcctctgccccatcaaagagattatggggcagtgattcttaa

SEQ ID NO: 30432 - DNA, 79 bp, Homo sapiens
ttgataatttcagctctttagttgcatcctgtcctctgccccatcaaagagattatggggcagtgattcttaatcactt

SEQ ID NO: 30433 - DNA, 79 bp, Homo sapiens
tctttagttgcatcctgtcctctgccccatcaaagagattatggggcagtgattcttaatcactttaatttgcagatat

SEQ ID NO: 30434 - DNA, 81 bp, Homo sapiens
atcctgtcctctgccccatcaaagagattatggggcagtgattcttaatcactttaatttgcagatattcacacatgcagg

SEQ ID NO: 30435 - DNA, 82 bp, Homo sapiens
tgccccatcaaagagattatggggcagtgattcttaatcactttaatttgcagatattcacacatgcagggctgagattgtt

SEQ ID NO: 30436 - DNA, 82 bp, Homo sapiens
atcaaagagattatggggcagtgattcttaatcactttaatttgcagatattcacacatgcagggctgagattgtttctgta

SEQ ID NO: 30437 - DNA, 82 bp, Homo sapiens
agtgattcttaatcactttaatttgcagatattcacacatgcagggctgagattgtttctgtagcactggatgcagttttaa

SEQ ID NO: 30438 - DNA, 81 bp, Homo sapiens
aatcactttaatttgcagatattcacacatgcagggctgagattgtttctgtagcactggatgcagttttaaggtggcagt

SEQ ID NO: 30439 - DNA, 85 bp, Homo sapiens
atttgcagatattcacacatgcagggctgagattgtttctgtagcactggatgcagttttaaggtggcagttctgctctgggaca

SEQ ID NO: 30440 - DNA, 83 bp, Homo sapiens
attcacacatgcagggctgagattgtttctgtagcactggatgcagttttaaggtggcagttctgctctgggacagctcttta

SEQ ID NO: 30441 - DNA, 80 bp, Homo sapiens
gctgagattgtttctgtagcactggatgcagttttaaggtggcagttctgctctgggacagctctttatcacaaggtaaa

SEQ ID NO: 30442 - DNA, 78 bp, Homo sapiens
tttctgtagcactggatgcagttttaaggtggcagttctgctctgggacagctctttatcacaaggtaaacatggaaa

SEQ ID NO: 30443 - DNA, 77 bp, Homo sapiens
agttttaaggtggcagttctgctctgggacagctctttatcacaaggtaaacatggaaatcgcaagtgatgaggaga

SEQ ID NO: 30444 - DNA, 78 bp, Homo sapiens
aggtggcagttctgctctgggacagctctttatcacaaggtaaacatggaaatcgcaagtgatgaggagaactttcaa

SEQ ID NO: 30445 - DNA, 79 bp, Homo sapiens
ctctgggacagctctttatcacaaggtaaacatggaaatcgcaagtgatgaggagaactttcaagcatcgaagtgcaat

SEQ ID NO: 30446 - DNA, 80 bp, Homo sapiens
agctctttatcacaaggtaaacatggaaatcgcaagtgatgaggagaactttcaagcatcgaagtgcaattgatctcaat

SEQ ID NO: 30447 - DNA, 79 bp, Homo sapiens
ttatcacaaggtaaacatggaaatcgcaagtgatgaggagaactttcaagcatcgaagtgcaattgatctcaatttttc

SEQ ID NO: 30448 - DNA, 78 bp, Homo sapiens
gtaaacatggaaatcgcaagtgatgaggagaactttcaagcatcgaagtgcaattgatctcaatttttcttacaacta

SEQ ID NO: 30449 - DNA, 79 bp, Homo sapiens
aactttcaagcatcgaagtgcaattgatctcaatttttcttacaactagcacatgggaatggctcaataattgagagaa

SEQ ID NO: 30450 - DNA, 78 bp, Homo sapiens
atcgaagtgcaattgatctcaatttttcttacaactagcacatgggaatggctcaataattgagagaagtcatttctt

SEQ ID NO: 30451 - DNA, 78 bp, Homo sapiens
caattgatctcaatttttcttacaactagcacatgggaatggctcaataattgagagaagtcatttctttgtgaaaga

SEQ ID NO: 30452 - DNA, 75 bp, Homo sapiens
aatttttcttacaactagcacatgggaatggctcaataattgagagaagtcatttctttgtgaaagatggagagg

SEQ ID NO: 30453 - DNA, 82 bp, Homo sapiens
tacaactagcacatgggaatggctcaataattgagagaagtcatttctttgtgaaagatggagagggtggcatgtgttctgc

SEQ ID NO: 30454 - DNA, 77 bp, Homo sapiens
aataattgagagaagtcatttctttgtgaaagatggagagggtggcatgtgttctgcgatggcccacagaagtttta

SEQ ID NO: 30455 - DNA, 78 bp, Homo sapiens
ttgagagaagtcatttctttgtgaaagatggagagggtggcatgtgttctgcgatggcccacagaagttttatttata

SEQ ID NO: 30456 - DNA, 76 bp, Homo sapiens
aaagatggagagggtggcatgtgttctgcgatggcccacagaagttttatttatatgattgctttattgaggggaa

SEQ ID NO: 30457 - DNA, 75 bp, Homo sapiens
agagggtggcatgtgttctgcgatggcccacagaagttttatttatatgattgctttattgaggggaatcgtacc

SEQ ID NO: 30458 - DNA, 74 bp, Homo sapiens
atgtgttctgcgatggcccacagaagttttatttatatgattgctttattgaggggaatcgtacccctcctgcc

SEQ ID NO: 30459 - DNA, 71 bp, Homo sapiens
atggcccacagaagttttatttatatgattgctttattgaggggaatcgtacccctcctgccccaccacca

SEQ ID NO: 30460 - DNA, 67 bp, Homo sapiens
aagttttatttatatgattgctttattgaggggaatcgtacccctcctgccccaccaccaaacccaa

SEQ ID NO: 30461 - DNA, 70 bp, Homo sapiens
tatttatatgattgctttattgaggggaatcgtacccctcctgccccaccaccaaacccaagtgcccaaa

SEQ ID NO: 30462 - DNA, 68 bp, Homo sapiens
attgctttattgaggggaatcgtacccctcctgccccaccaccaaacccaagtgcccaaagactgctt

SEQ ID NO: 30463 - DNA, 69 bp, Homo sapiens
ggaatcgtacccctcctgccccaccaccaaacccaagtgcccaaagactgctttggcagaaggaagttg

SEQ ID NO: 30464 - DNA, 69 bp, Homo sapiens
ccctcctgccccaccaccaaacccaagtgcccaaagactgctttggcagaaggaagttgtatacaattt

SEQ ID NO: 30465 - DNA, 71 bp, Homo sapiens
ccaccaccaaacccaagtgcccaaagactgctttggcagaaggaagttgtatacaattttaatgagataat

SEQ ID NO: 30466 - DNA, 70 bp, Homo sapiens
accaaacccaagtgcccaaagactgctttggcagaaggaagttgtatacaattttaatgagataattaaa

SEQ ID NO: 30467 - DNA, 76 bp, Homo sapiens
gtgcccaaagactgctttggcagaaggaagttgtatacaattttaatgagataattaaagaagatgaggtatatga

SEQ ID NO: 30468 - DNA, 75 bp, Homo sapiens
gactgctttggcagaaggaagttgtatacaattttaatgagataattaaagaagatgaggtatatgaatctggtt

SEQ ID NO: 30469 - DNA, 71 bp, Homo sapiens
gcagaaggaagttgtatacaattttaatgagataattaaagaagatgaggtatatgaatctggtttttttt

SEQ ID NO: 30470 - DNA, 73 bp, Homo sapiens
taacaaaataatagctaacatttattgggtccttgttgtgtgccggccctgttctaagctcttatatctttga

SEQ ID NO: 30471 - DNA, 74 bp, Homo sapiens
atagctaacatttattgggtccttgttgtgtgccggccctgttctaagctcttatatctttgaatcatttaatc

SEQ ID NO: 30472 - DNA, 74 bp, Homo sapiens
taacatttattgggtccttgttgtgtgccggccctgttctaagctcttatatctttgaatcatttaatcctcac

SEQ ID NO: 30473 - DNA, 74 bp, Homo sapiens
tccttgttgtgtgccggccctgttctaagctcttatatctttgaatcatttaatcctcaccacaaccctataaa

SEQ ID NO: 30474 - DNA, 74 bp, Homo sapiens
tgccggccctgttctaagctcttatatctttgaatcatttaatcctcaccacaaccctataaagaaggtgatat

SEQ ID NO: 30475 - DNA, 74 bp, Homo sapiens
gccctgttctaagctcttatatctttgaatcatttaatcctcaccacaaccctataaagaaggtgatattatta

SEQ ID NO: 30476 - DNA, 73 bp, Homo sapiens
gctcttatatctttgaatcatttaatcctcaccacaaccctataaagaaggtgatattattacctccacttta

SEQ ID NO: 30477 - DNA, 73 bp, Homo sapiens
ctttgaatcatttaatcctcaccacaaccctataaagaaggtgatattattacctccactttatagatgaaga

SEQ ID NO: 30478 - DNA, 71 bp, Homo sapiens
aatcctcaccacaaccctataaagaaggtgatattattacctccactttatagatgaagaaataaagatta

SEQ ID NO: 30479 - DNA, 72 bp, Homo sapiens
caccacaaccctataaagaaggtgatattattacctccactttatagatgaagaaataaagattaagagcaa

SEQ ID NO: 30480 - DNA, 73 bp, Homo sapiens
taaagaaggtgatattattacctccactttatagatgaagaaataaagattaagagcaataaagtaacatgcc

SEQ ID NO: 30481 - DNA, 72 bp, Homo sapiens
ggtgatattattacctccactttatagatgaagaaataaagattaagagcaataaagtaacatgccccaaaa

SEQ ID NO: 30482 - DNA, 75 bp, Homo sapiens
ctccactttatagatgaagaaataaagattaagagcaataaagtaacatgccccaaaatcaagtagcaacgctga

SEQ ID NO: 30483 - DNA, 76 bp, Homo sapiens
tccactttatagatgaagaaataaagattaagagcaataaagtaacatgccccaaaatcaagtagcaacgctgaga

SEQ ID NO: 30484 - DNA, 74 bp, Homo sapiens
tagatgaagaaataaagattaagagcaataaagtaacatgccccaaaatcaagtagcaacgctgagatttaaac

SEQ ID NO: 30485 - DNA, 72 bp, Homo sapiens
gaagaaataaagattaagagcaataaagtaacatgccccaaaatcaagtagcaacgctgagatttaaaccca

SEQ ID NO: 30486 - DNA, 70 bp, Homo sapiens
aaataaagattaagagcaataaagtaacatgccccaaaatcaagtagcaacgctgagatttaaacccagg

SEQ ID NO: 30487 - DNA, 71 bp, Homo sapiens
aataaagattaagagcaataaagtaacatgccccaaaatcaagtagcaacgctgagatttaaacccaggtg

SEQ ID NO: 30488 - DNA, 71 bp, Homo sapiens
attaagagcaataaagtaacatgccccaaaatcaagtagcaacgctgagatttaaacccaggtggggttga

SEQ ID NO: 30489 - DNA, 73 bp, Homo sapiens
aagagcaataaagtaacatgccccaaaatcaagtagcaacgctgagatttaaacccaggtggggttgatgcca

SEQ ID NO: 30490 - DNA, 76 bp, Homo sapiens
agtaacatgccccaaaatcaagtagcaacgctgagatttaaacccaggtggggttgatgccagtgcctgcattcat

SEQ ID NO: 30491 - DNA, 77 bp, Homo sapiens
acatgccccaaaatcaagtagcaacgctgagatttaaacccaggtggggttgatgccagtgcctgcattcattccac

SEQ ID NO: 30492 - DNA, 77 bp, Homo sapiens
gatttaaacccaggtggggttgatgccagtgcctgcattcattccactgcgcagaatgaggagaccaaaatacattt

SEQ ID NO: 30493 - DNA, 78 bp, Homo sapiens
aaacccaggtggggttgatgccagtgcctgcattcattccactgcgcagaatgaggagaccaaaatacattttcataa

SEQ ID NO: 30494 - DNA, 81 bp, Homo sapiens
gggttgatgccagtgcctgcattcattccactgcgcagaatgaggagaccaaaatacattttcataaatatttgtagtgta

SEQ ID NO: 30495 - DNA, 80 bp, Homo sapiens
tgcctgcattcattccactgcgcagaatgaggagaccaaaatacattttcataaatatttgtagtgtaggcgccctgaaa

SEQ ID NO: 30496 - DNA, 76 bp, Homo sapiens
attcattccactgcgcagaatgaggagaccaaaatacattttcataaatatttgtagtgtaggcgccctgaaaata

SEQ ID NO: 30497 - DNA, 78 bp, Homo sapiens
gcagaatgaggagaccaaaatacattttcataaatatttgtagtgtaggcgccctgaaaatagagcacatgattgaaa

SEQ ID NO: 30498 - DNA, 76 bp, Homo sapiens
aaaatacattttcataaatatttgtagtgtaggcgccctgaaaatagagcacatgattgaaagacgagtagcagta

SEQ ID NO: 30499 - DNA, 80 bp, Homo sapiens
atttgtagtgtaggcgccctgaaaatagagcacatgattgaaagacgagtagcagtagtggagatgagaacgccaaagca

SEQ ID NO: 30500 - DNA, 79 bp, Homo sapiens
taggcgccctgaaaatagagcacatgattgaaagacgagtagcagtagtggagatgagaacgccaaagcagttttcagg

SEQ ID NO: 30501 - DNA, 80 bp, Homo sapiens
aaaatagagcacatgattgaaagacgagtagcagtagtggagatgagaacgccaaagcagttttcaggtcagctgactgg

SEQ ID NO: 30502 - DNA, 80 bp, Homo sapiens
acatgattgaaagacgagtagcagtagtggagatgagaacgccaaagcagttttcaggtcagctgactggggctacagtg

SEQ ID NO: 30503 - DNA, 79 bp, Homo sapiens
aaagacgagtagcagtagtggagatgagaacgccaaagcagttttcaggtcagctgactggggctacagtgtgtggcag

SEQ ID NO: 30504 - DNA, 80 bp, Homo sapiens
tagtggagatgagaacgccaaagcagttttcaggtcagctgactggggctacagtgtgtggcaggtcctgcttacattac

SEQ ID NO: 30505 - DNA, 79 bp, Homo sapiens
atgagaacgccaaagcagttttcaggtcagctgactggggctacagtgtgtggcaggtcctgcttacattactgccaaa

SEQ ID NO: 30506 - DNA, 77 bp, Homo sapiens
aagcagttttcaggtcagctgactggggctacagtgtgtggcaggtcctgcttacattactgccaaatttgtactaa

SEQ ID NO: 30507 - DNA, 77 bp, Homo sapiens
ttttcaggtcagctgactggggctacagtgtgtggcaggtcctgcttacattactgccaaatttgtactaaacaatg

SEQ ID NO: 30508 - DNA, 78 bp, Homo sapiens
tacagtgtgtggcaggtcctgcttacattactgccaaatttgtactaaacaatgtcaaagatgacttctgggactcca

SEQ ID NO: 30509 - DNA, 76 bp, Homo sapiens
tggcaggtcctgcttacattactgccaaatttgtactaaacaatgtcaaagatgacttctgggactccaaagtatg

SEQ ID NO: 30510 - DNA, 75 bp, Homo sapiens
cttacattactgccaaatttgtactaaacaatgtcaaagatgacttctgggactccaaagtatgtctagttcata

SEQ ID NO: 30511 - DNA, 74 bp, Homo sapiens
attactgccaaatttgtactaaacaatgtcaaagatgacttctgggactccaaagtatgtctagttcataatat

SEQ ID NO: 30512 - DNA, 76 bp, Homo sapiens
aaacaatgtcaaagatgacttctgggactccaaagtatgtctagttcataatattaaaaactcatgctgagttgga

SEQ ID NO: 30513 - DNA, 75 bp, Homo sapiens
caaagtatgtctagttcataatattaaaaactcatgctgagttggaccgaattcacccttctagatcattaactc

SEQ ID NO: 30514 - DNA, 72 bp, Homo sapiens
ttaaaaactcatgctgagttggaccgaattcacccttctagatcattaactcccttgggatgggccgtctta

SEQ ID NO: 30515 - DNA, 74 bp, Homo sapiens
atgctgagttggaccgaattcacccttctagatcattaactcccttgggatgggccgtcttagcatcacgaaaa

SEQ ID NO: 30516 - DNA, 73 bp, Homo sapiens
ttggaccgaattcacccttctagatcattaactcccttgggatgggccgtcttagcatcacgaaaatctccca

SEQ ID NO: 30517 - DNA, 75 bp, Homo sapiens
attcacccttctagatcattaactcccttgggatgggccgtcttagcatcacgaaaatctcccagcctgtgagaa

SEQ ID NO: 30518 - DNA, 77 bp, Homo sapiens
tagatcattaactcccttgggatgggccgtcttagcatcacgaaaatctcccagcctgtgagaactgtgggttctga

SEQ ID NO: 30519 - DNA, 76 bp, Homo sapiens
aactcccttgggatgggccgtcttagcatcacgaaaatctcccagcctgtgagaactgtgggttctgagccaggca

SEQ ID NO: 30520 - DNA, 80 bp, Homo sapiens
atgggccgtcttagcatcacgaaaatctcccagcctgtgagaactgtgggttctgagccaggcaccggcttctgagagca

SEQ ID NO: 30521 - DNA, 83 bp, Homo sapiens
tcttagcatcacgaaaatctcccagcctgtgagaactgtgggttctgagccaggcaccggcttctgagagcagacacactggc

SEQ ID NO: 30522 - DNA, 80 bp, Homo sapiens
aaaatctcccagcctgtgagaactgtgggttctgagccaggcaccggcttctgagagcagacacactggctgtcacctac

SEQ ID NO: 30523 - DNA, 83 bp, Homo sapiens
ttctgagccaggcaccggcttctgagagcagacacactggctgtcacctaccccctgaggagccagcccctcagtgcaggtca

SEQ ID NO: 30524 - DNA, 79 bp, Homo sapiens
accggcttctgagagcagacacactggctgtcacctaccccctgaggagccagcccctcagtgcaggtcacgccttgaa

SEQ ID NO: 30525 - DNA, 81 bp, Homo sapiens
cttctgagagcagacacactggctgtcacctaccccctgaggagccagcccctcagtgcaggtcacgccttgaaagctggc

SEQ ID NO: 30526 - DNA, 77 bp, Homo sapiens
acactggctgtcacctaccccctgaggagccagcccctcagtgcaggtcacgccttgaaagctggcccctctctaca

SEQ ID NO: 30527 - DNA, 77 bp, Homo sapiens
tgtcacctaccccctgaggagccagcccctcagtgcaggtcacgccttgaaagctggcccctctctacagcggctta

SEQ ID NO: 30528 - DNA, 76 bp, Homo sapiens
cagcccctcagtgcaggtcacgccttgaaagctggcccctctctacagcggcttagtaggtaacaggtagacgcat

SEQ ID NO: 30529 - DNA, 76 bp, Homo sapiens
ctcagtgcaggtcacgccttgaaagctggcccctctctacagcggcttagtaggtaacaggtagacgcattcttta

SEQ ID NO: 30530 - DNA, 76 bp, Homo sapiens
acgccttgaaagctggcccctctctacagcggcttagtaggtaacaggtagacgcattctttagctgctcaagtca

SEQ ID NO: 30531 - DNA, 78 bp, Homo sapiens
aaagctggcccctctctacagcggcttagtaggtaacaggtagacgcattctttagctgctcaagtcacatcctgtca

SEQ ID NO: 30532 - DNA, 78 bp, Homo sapiens
ctctctacagcggcttagtaggtaacaggtagacgcattctttagctgctcaagtcacatcctgtcactggttgtaaa

SEQ ID NO: 30533 - DNA, 76 bp, Homo sapiens
gcttagtaggtaacaggtagacgcattctttagctgctcaagtcacatcctgtcactggttgtaaacccactcgat

SEQ ID NO: 30534 - DNA, 77 bp, Homo sapiens
gtaacaggtagacgcattctttagctgctcaagtcacatcctgtcactggttgtaaacccactcgattctctagtct

SEQ ID NO: 30535 - DNA, 79 bp, Homo sapiens
ggtagacgcattctttagctgctcaagtcacatcctgtcactggttgtaaacccactcgattctctagtcttgctggaa

SEQ ID NO: 30536 - DNA, 81 bp, Homo sapiens
ttctttagctgctcaagtcacatcctgtcactggttgtaaacccactcgattctctagtcttgctggaatcgtgttgatga

SEQ ID NO: 30537 - DNA, 79 bp, Homo sapiens
aagtcacatcctgtcactggttgtaaacccactcgattctctagtcttgctggaatcgtgttgatgactgcagggtcaa

SEQ ID NO: 30538 - DNA, 78 bp, Homo sapiens
atcctgtcactggttgtaaacccactcgattctctagtcttgctggaatcgtgttgatgactgcagggtcaaggaggc

SEQ ID NO: 30539 - DNA, 78 bp, Homo sapiens
ctggttgtaaacccactcgattctctagtcttgctggaatcgtgttgatgactgcagggtcaaggaggctgtgggctg

SEQ ID NO: 30540 - DNA, 79 bp, Homo sapiens
tagtcttgctggaatcgtgttgatgactgcagggtcaaggaggctgtgggctggggtttgacatctttgttacacatat

SEQ ID NO: 30541 - DNA, 78 bp, Homo sapiens
ttgatgactgcagggtcaaggaggctgtgggctggggtttgacatctttgttacacatattaaccacggaatacatga

SEQ ID NO: 30542 - DNA, 76 bp, Homo sapiens
actgcagggtcaaggaggctgtgggctggggtttgacatctttgttacacatattaaccacggaatacatgacaga

SEQ ID NO: 30543 - DNA, 80 bp, Homo sapiens
ctggggtttgacatctttgttacacatattaaccacggaatacatgacagagccagagagcatgccggcacgtatatgcg

SEQ ID NO: 30544 - DNA, 81 bp, Homo sapiens
atattaaccacggaatacatgacagagccagagagcatgccggcacgtatatgcgtgcactctacatcccccgactacctg

SEQ ID NO: 30545 - DNA, 79 bp, Homo sapiens
acagagccagagagcatgccggcacgtatatgcgtgcactctacatcccccgactacctgggttctaatcccagctccc

SEQ ID NO: 30546 - DNA, 76 bp, Homo sapiens
agagcatgccggcacgtatatgcgtgcactctacatcccccgactacctgggttctaatcccagctccccagttta

SEQ ID NO: 30547 - DNA, 72 bp, Homo sapiens
acgtatatgcgtgcactctacatcccccgactacctgggttctaatcccagctccccagtttaccggctgtg

SEQ ID NO: 30548 - DNA, 74 bp, Homo sapiens
atgcgtgcactctacatcccccgactacctgggttctaatcccagctccccagtttaccggctgtgtgacttca

SEQ ID NO: 30549 - DNA, 73 bp, Homo sapiens
tctacatcccccgactacctgggttctaatcccagctccccagtttaccggctgtgtgacttcaggcaactgc

SEQ ID NO: 30550 - DNA, 72 bp, Homo sapiens
actacctgggttctaatcccagctccccagtttaccggctgtgtgacttcaggcaactgccttgggtctcag

SEQ ID NO: 30551 - DNA, 75 bp, Homo sapiens
tctaatcccagctccccagtttaccggctgtgtgacttcaggcaactgccttgggtctcaggtctctacctgtaa

SEQ ID NO: 30552 - DNA, 72 bp, Homo sapiens
agctccccagtttaccggctgtgtgacttcaggcaactgccttgggtctcaggtctctacctgtaaaagaag

SEQ ID NO: 30553 - DNA, 72 bp, Homo sapiens
agtttaccggctgtgtgacttcaggcaactgccttgggtctcaggtctctacctgtaaaagaaggaaaatga

SEQ ID NO: 30554 - DNA, 70 bp, Homo sapiens
aggcaactgccttgggtctcaggtctctacctgtaaaagaaggaaaatgacaggacctatctcaaagggt

SEQ ID NO: 30555 - DNA, 71 bp, Homo sapiens
ttgggtctcaggtctctacctgtaaaagaaggaaaatgacaggacctatctcaaagggttgacataagaaa

SEQ ID NO: 30556 - DNA, 70 bp, Homo sapiens
aggtctctacctgtaaaagaaggaaaatgacaggacctatctcaaagggttgacataagaaagaaatgag

SEQ ID NO: 30557 - DNA, 72 bp, Homo sapiens
tacctgtaaaagaaggaaaatgacaggacctatctcaaagggttgacataagaaagaaatgagtctccagcc

SEQ ID NO: 30558 - DNA, 69 bp, Homo sapiens
caaaagaagaaagaaatgagttaatacggaaaatgcccttagaatagccaagcattcggtaaatgttat

SEQ ID NO: 30559 - DNA, 75 bp, Homo sapiens
agaaatgagttaatacggaaaatgcccttagaatagccaagcattcggtaaatgttattcattatcatgattcaa

SEQ ID NO: 30560 - DNA, 77 bp, Homo sapiens
taatacggaaaatgcccttagaatagccaagcattcggtaaatgttattcattatcatgattcaatatttctggctg

SEQ ID NO: 30561 - DNA, 76 bp, Homo sapiens
cggaaaatgcccttagaatagccaagcattcggtaaatgttattcattatcatgattcaatatttctggctgttat

SEQ ID NO: 30562 - DNA, 75 bp, Homo sapiens
agaatagccaagcattcggtaaatgttattcattatcatgattcaatatttctggctgttatttggttgtttccc

SEQ ID NO: 30563 - DNA, 72 bp, Homo sapiens
aagcattcggtaaatgttattcattatcatgattcaatatttctggctgttatttggttgtttccccccctc

SEQ ID NO: 30564 - DNA, 73 bp, Homo sapiens
gtaaatgttattcattatcatgattcaatatttctggctgttatttggttgtttccccccctctgtttgtgta

SEQ ID NO: 30565 - DNA, 70 bp, Homo sapiens
attcattatcatgattcaatatttctggctgttatttggttgtttccccccctctgtttgtgtaaatttt

SEQ ID NO: 30566 - DNA, 66 bp, Homo sapiens
ctggctgttatttggttgtttccccccctctgtttgtgtaaatttttaattgggataaaatacaca

SEQ ID NO: 30567 - DNA, 64 bp, Homo sapiens
ttgtttccccccctctgtttgtgtaaatttttaattgggataaaatacacaacatttacaattt

SEQ ID NO: 30568 - DNA, 68 bp, Homo sapiens
tgggataaaatacacaacatttacaattttaaccatttttaggtgtacttcagtagtggtaagtctat

SEQ ID NO: 30569 - DNA, 73 bp, Homo sapiens
tacacaacatttacaattttaaccatttttaggtgtacttcagtagtggtaagtctattcacaatgttgtgca

SEQ ID NO: 30570 - DNA, 71 bp, Homo sapiens
catttacaattttaaccatttttaggtgtacttcagtagtggtaagtctattcacaatgttgtgcagttgg

SEQ ID NO: 30571 - DNA, 70 bp, Homo sapiens
ttaaccatttttaggtgtacttcagtagtggtaagtctattcacaatgttgtgcagttggtttttccttc

SEQ ID NO: 30572 - DNA, 69 bp, Homo sapiens
tttttaggtgtacttcagtagtggtaagtctattcacaatgttgtgcagttggtttttccttccacttt

SEQ ID NO: 30573 - DNA, 73 bp, Homo sapiens
tcagtagtggtaagtctattcacaatgttgtgcagttggtttttccttccacttttcttaaccattctcaata

SEQ ID NO: 30574 - DNA, 74 bp, Homo sapiens
taagtctattcacaatgttgtgcagttggtttttccttccacttttcttaaccattctcaatatcgcaactaca

SEQ ID NO: 30575 - DNA, 72 bp, Homo sapiens
acaatgttgtgcagttggtttttccttccacttttcttaaccattctcaatatcgcaactacatccactttg

SEQ ID NO: 30576 - DNA, 74 bp, Homo sapiens
ttgtgcagttggtttttccttccacttttcttaaccattctcaatatcgcaactacatccactttgtgcaaaca

SEQ ID NO: 30577 - DNA, 72 bp, Homo sapiens
gtttttccttccacttttcttaaccattctcaatatcgcaactacatccactttgtgcaaacatcaggtttg

SEQ ID NO: 30578 - DNA, 75 bp, Homo sapiens
acttttcttaaccattctcaatatcgcaactacatccactttgtgcaaacatcaggtttgtgcaccttatacgta

SEQ ID NO: 30579 - DNA, 75 bp, Homo sapiens
ttaaccattctcaatatcgcaactacatccactttgtgcaaacatcaggtttgtgcaccttatacgtagggaagg

SEQ ID NO: 30580 - DNA, 75 bp, Homo sapiens
aatatcgcaactacatccactttgtgcaaacatcaggtttgtgcaccttatacgtagggaagggccattgcctcc

SEQ ID NO: 30581 - DNA, 75 bp, Homo sapiens
tttgtgcaaacatcaggtttgtgcaccttatacgtagggaagggccattgcctccctcactgttatccaagaaca

SEQ ID NO: 30582 - DNA, 76 bp, Homo sapiens
ttatacgtagggaagggccattgcctccctcactgttatccaagaacacctttgaggattcatctgcactatgatt

SEQ ID NO: 30583 - DNA, 76 bp, Homo sapiens
aagggccattgcctccctcactgttatccaagaacacctttgaggattcatctgcactatgatttctgtgggaaaa

SEQ ID NO: 30584 - DNA, 77 bp, Homo sapiens
ttatccaagaacacctttgaggattcatctgcactatgatttctgtgggaaaatacatttaaagtgccagtcttcat

SEQ ID NO: 30585 - DNA, 76 bp, Homo sapiens
aagaacacctttgaggattcatctgcactatgatttctgtgggaaaatacatttaaagtgccagtcttcattactc

SEQ ID NO: 30586 - DNA, 79 bp, Homo sapiens
tttgaggattcatctgcactatgatttctgtgggaaaatacatttaaagtgccagtcttcattactctcagaacacggc

SEQ ID NO: 30587 - DNA, 77 bp, Homo sapiens
tctgcactatgatttctgtgggaaaatacatttaaagtgccagtcttcattactctcagaacacggcctgtttggaa

SEQ ID NO: 30588 - DNA, 73 bp, Homo sapiens
atgatttctgtgggaaaatacatttaaagtgccagtcttcattactctcagaacacggcctgtttggaagtaa

SEQ ID NO: 30589 - DNA, 75 bp, Homo sapiens
aaatacatttaaagtgccagtcttcattactctcagaacacggcctgtttggaagtaagcactgcttgcatttta

SEQ ID NO: 30590 - DNA, 75 bp, Homo sapiens
atttaaagtgccagtcttcattactctcagaacacggcctgtttggaagtaagcactgcttgcattttatgtccc

SEQ ID NO: 30591 - DNA, 79 bp, Homo sapiens
attactctcagaacacggcctgtttggaagtaagcactgcttgcattttatgtccccttgcagtatctggcgagcgctg

SEQ ID NO: 30592 - DNA, 77 bp, Homo sapiens
aacacggcctgtttggaagtaagcactgcttgcattttatgtccccttgcagtatctggcgagcgctgggtcctcca

SEQ ID NO: 30593 - DNA, 77 bp, Homo sapiens
tgtttggaagtaagcactgcttgcattttatgtccccttgcagtatctggcgagcgctgggtcctccatgacccctt

SEQ ID NO: 30594 - DNA, 75 bp, Homo sapiens
actgcttgcattttatgtccccttgcagtatctggcgagcgctgggtcctccatgacccctttggaacctttgta

SEQ ID NO: 30595 - DNA, 72 bp, Homo sapiens
ttttatgtccccttgcagtatctggcgagcgctgggtcctccatgacccctttggaacctttgtattaatct

SEQ ID NO: 30596 - DNA, 74 bp, Homo sapiens
tatctggcgagcgctgggtcctccatgacccctttggaacctttgtattaatcttctggctgtctcctttaaga

SEQ ID NO: 30597 - DNA, 69 bp, Homo sapiens
tccatgacccctttggaacctttgtattaatcttctggctgtctcctttaagaactacaagattaacct

SEQ ID NO: 30598 - DNA, 68 bp, Homo sapiens
ccctttggaacctttgtattaatcttctggctgtctcctttaagaactacaagattaacctttttgca

SEQ ID NO: 30599 - DNA, 68 bp, Homo sapiens
aacctttgtattaatcttctggctgtctcctttaagaactacaagattaacctttttgcagccctttc

SEQ ID NO: 30600 - DNA, 71 bp, Homo sapiens
ttaatcttctggctgtctcctttaagaactacaagattaacctttttgcagccctttctgttctgggattc

SEQ ID NO: 30601 - DNA, 74 bp, Homo sapiens
tgtctcctttaagaactacaagattaacctttttgcagccctttctgttctgggattcttgaatctggcagcag

SEQ ID NO: 30602 - DNA, 72 bp, Homo sapiens
tttaagaactacaagattaacctttttgcagccctttctgttctgggattcttgaatctggcagcaggtaac

SEQ ID NO: 30603 - DNA, 74 bp, Homo sapiens
attaacctttttgcagccctttctgttctgggattcttgaatctggcagcaggtaacgacaggtcccatcagaa

SEQ ID NO: 30604 - DNA, 76 bp, Homo sapiens
tttttgcagccctttctgttctgggattcttgaatctggcagcaggtaacgacaggtcccatcagaaacaggtcaa

SEQ ID NO: 30605 - DNA, 78 bp, Homo sapiens
ttctgggattcttgaatctggcagcaggtaacgacaggtcccatcagaaacaggtcaagatcttgacttcctgccctc

SEQ ID NO: 30606 - DNA, 78 bp, Homo sapiens
cttgaatctggcagcaggtaacgacaggtcccatcagaaacaggtcaagatcttgacttcctgccctccctgggagca

SEQ ID NO: 30607 - DNA, 73 bp, Homo sapiens
aggtaacgacaggtcccatcagaaacaggtcaagatcttgacttcctgccctccctgggagcagggcccacga

SEQ ID NO: 30608 - DNA, 74 bp, Homo sapiens
aggtcccatcagaaacaggtcaagatcttgacttcctgccctccctgggagcagggcccacgagcaccacttaa

SEQ ID NO: 30609 - DNA, 71 bp, Homo sapiens
agaaacaggtcaagatcttgacttcctgccctccctgggagcagggcccacgagcaccacttaacaccttt

SEQ ID NO: 30610 - DNA, 70 bp, Homo sapiens
aggtcaagatcttgacttcctgccctccctgggagcagggcccacgagcaccacttaacacctttttccc

SEQ ID NO: 30611 - DNA, 71 bp, Homo sapiens
tcttgacttcctgccctccctgggagcagggcccacgagcaccacttaacacctttttcccctgacccagc

SEQ ID NO: 30612 - DNA, 71 bp, Homo sapiens
ctccctgggagcagggcccacgagcaccacttaacacctttttcccctgacccagcctcattccagccttc

SEQ ID NO: 30613 - DNA, 73 bp, Homo sapiens
acgagcaccacttaacacctttttcccctgacccagcctcattccagccttctgcaagtcctgctttcctctc

SEQ ID NO: 30614 - DNA, 71 bp, Homo sapiens
ttaacacctttttcccctgacccagcctcattccagccttctgcaagtcctgctttcctctccaggacctt

SEQ ID NO: 30615 - DNA, 71 bp, Homo sapiens
acctttttcccctgacccagcctcattccagccttctgcaagtcctgctttcctctccaggacctttgttc

SEQ ID NO: 30616 - DNA, 75 bp, Homo sapiens
acccagcctcattccagccttctgcaagtcctgctttcctctccaggacctttgttcctgctttgcttcctatat

SEQ ID NO: 30617 - DNA, 78 bp, Homo sapiens
ttctgcaagtcctgctttcctctccaggacctttgttcctgctttgcttcctatatttcagggcctagggcagcatga

SEQ ID NO: 30618 - DNA, 74 bp, Homo sapiens
tgctttcctctccaggacctttgttcctgctttgcttcctatatttcagggcctagggcagcatgaccttttac

SEQ ID NO: 30619 - DNA, 74 bp, Homo sapiens
tctccaggacctttgttcctgctttgcttcctatatttcagggcctagggcagcatgaccttttaccttctgac

SEQ ID NO: 30620 - DNA, 77 bp, Homo sapiens
tttgcttcctatatttcagggcctagggcagcatgaccttttaccttctgacccttgcccctgctgcagcatgtgtt

SEQ ID NO: 30621 - DNA, 78 bp, Homo sapiens
ttcctatatttcagggcctagggcagcatgaccttttaccttctgacccttgcccctgctgcagcatgtgttttgtga

SEQ ID NO: 30622 - DNA, 76 bp, Homo sapiens
agggcctagggcagcatgaccttttaccttctgacccttgcccctgctgcagcatgtgttttgtgacggagtgtag

SEQ ID NO: 30623 - DNA, 79 bp, Homo sapiens
agcatgaccttttaccttctgacccttgcccctgctgcagcatgtgttttgtgacggagtgtagggactggattgtgca

SEQ ID NO: 30624 - DNA, 77 bp, Homo sapiens
accttttaccttctgacccttgcccctgctgcagcatgtgttttgtgacggagtgtagggactggattgtgcagaga

SEQ ID NO: 30625 - DNA, 82 bp, Homo sapiens
ttctgacccttgcccctgctgcagcatgtgttttgtgacggagtgtagggactggattgtgcagagaccctctttgcatctg

SEQ ID NO: 30626 - DNA, 81 bp, Homo sapiens
ccctgctgcagcatgtgttttgtgacggagtgtagggactggattgtgcagagaccctctttgcatctgtctgggccctcg

SEQ ID NO: 30627 - DNA, 77 bp, Homo sapiens
atgtgttttgtgacggagtgtagggactggattgtgcagagaccctctttgcatctgtctgggccctcggcctatta

SEQ ID NO: 30628 - DNA, 77 bp, Homo sapiens
ttttgtgacggagtgtagggactggattgtgcagagaccctctttgcatctgtctgggccctcggcctattacagga

SEQ ID NO: 30629 - DNA, 74 bp, Homo sapiens
agtgtagggactggattgtgcagagaccctctttgcatctgtctgggccctcggcctattacaggagggacccc

SEQ ID NO: 30630 - DNA, 74 bp, Homo sapiens
actggattgtgcagagaccctctttgcatctgtctgggccctcggcctattacaggagggacccctcacccttc

SEQ ID NO: 30631 - DNA, 74 bp, Homo sapiens
agagaccctctttgcatctgtctgggccctcggcctattacaggagggacccctcacccttcctgcctgcacca

SEQ ID NO: 30632 - DNA, 72 bp, Homo sapiens
tgtctgggccctcggcctattacaggagggacccctcacccttcctgcctgcaccagggtcctccaactgga

SEQ ID NO: 30633 - DNA, 71 bp, Homo sapiens
tacaggagggacccctcacccttcctgcctgcaccagggtcctccaactggaggctgcttttagccctagg

SEQ ID NO: 30634 - DNA, 75 bp, Homo sapiens
ctcacccttcctgcctgcaccagggtcctccaactggaggctgcttttagccctagggctagcgtgctctcttaa

SEQ ID NO: 30635 - DNA, 72 bp, Homo sapiens
aactggaggctgcttttagccctagggctagcgtgctctcttaagccagaagttttaggggcaagagatccc

SEQ ID NO: 30636 - DNA, 78 bp, Homo sapiens
tgcttttagccctagggctagcgtgctctcttaagccagaagttttaggggcaagagatccctaatatgcatgaatga

SEQ ID NO: 30637 - DNA, 79 bp, Homo sapiens
ttagccctagggctagcgtgctctcttaagccagaagttttaggggcaagagatccctaatatgcatgaatgactctca

SEQ ID NO: 30638 - DNA, 81 bp, Homo sapiens
tagcgtgctctcttaagccagaagttttaggggcaagagatccctaatatgcatgaatgactctcacaagacaggcaggaa

SEQ ID NO: 30639 - DNA, 79 bp, Homo sapiens
tcttaagccagaagttttaggggcaagagatccctaatatgcatgaatgactctcacaagacaggcaggaagtctccaa

SEQ ID NO: 30640 - DNA, 78 bp, Homo sapiens
agaagttttaggggcaagagatccctaatatgcatgaatgactctcacaagacaggcaggaagtctccaagagacttc

SEQ ID NO: 30641 - DNA, 78 bp, Homo sapiens
taggggcaagagatccctaatatgcatgaatgactctcacaagacaggcaggaagtctccaagagacttcctttaccc

SEQ ID NO: 30642 - DNA, 75 bp, Homo sapiens
atccctaatatgcatgaatgactctcacaagacaggcaggaagtctccaagagacttcctttacccctagggaaa

SEQ ID NO: 30643 - DNA, 76 bp, Homo sapiens
atgaatgactctcacaagacaggcaggaagtctccaagagacttcctttacccctagggaaatgccatctgatctt

SEQ ID NO: 30644 - DNA, 77 bp, Homo sapiens
catctgatctttgagataaggggctgggagcagtttgatttcatctccagagaaggaagccctcagttaaggggtca

SEQ ID NO: 30645 - DNA, 74 bp, Homo sapiens
atctttgagataaggggctgggagcagtttgatttcatctccagagaaggaagccctcagttaaggggtcatct

SEQ ID NO: 30646 - DNA, 73 bp, Homo sapiens
ataaggggctgggagcagtttgatttcatctccagagaaggaagccctcagttaaggggtcatcttgctcttt

SEQ ID NO: 30647 - DNA, 74 bp, Homo sapiens
atttcatctccagagaaggaagccctcagttaaggggtcatcttgctcttttccccactccagggcctctctgc

SEQ ID NO: 30648 - DNA, 74 bp, Homo sapiens
aagccctcagttaaggggtcatcttgctcttttccccactccagggcctctctgccttatctctgtgccacctg

SEQ ID NO: 30649 - DNA, 74 bp, Homo sapiens
gttaaggggtcatcttgctcttttccccactccagggcctctctgccttatctctgtgccacctgtgaccccag

SEQ ID NO: 30650 - DNA, 78 bp, Homo sapiens
cccactccagggcctctctgccttatctctgtgccacctgtgaccccaggccttatacatgattgagaggattaccca

SEQ ID NO: 30651 - DNA, 79 bp, Homo sapiens
tccagggcctctctgccttatctctgtgccacctgtgaccccaggccttatacatgattgagaggattacccaaacaga

SEQ ID NO: 30652 - DNA, 78 bp, Homo sapiens
ggcctctctgccttatctctgtgccacctgtgaccccaggccttatacatgattgagaggattacccaaacagaccta

SEQ ID NO: 30653 - DNA, 79 bp, Homo sapiens
tctctgccttatctctgtgccacctgtgaccccaggccttatacatgattgagaggattacccaaacagacctaattga

SEQ ID NO: 30654 - DNA, 75 bp, Homo sapiens
ccttatctctgtgccacctgtgaccccaggccttatacatgattgagaggattacccaaacagacctaattgact

SEQ ID NO: 30655 - DNA, 76 bp, Homo sapiens
ttatctctgtgccacctgtgaccccaggccttatacatgattgagaggattacccaaacagacctaattgacttat

SEQ ID NO: 30656 - DNA, 75 bp, Homo sapiens
tgtgccacctgtgaccccaggccttatacatgattgagaggattacccaaacagacctaattgacttattggaaa

SEQ ID NO: 30657 - DNA, 73 bp, Homo sapiens
acctgtgaccccaggccttatacatgattgagaggattacccaaacagacctaattgacttattggaaatcca

SEQ ID NO: 30658 - DNA, 73 bp, Homo sapiens
tgaccccaggccttatacatgattgagaggattacccaaacagacctaattgacttattggaaatccaatcct

SEQ ID NO: 30659 - DNA, 73 bp, Homo sapiens
ccaggccttatacatgattgagaggattacccaaacagacctaattgacttattggaaatccaatcctttgat

SEQ ID NO: 30660 - DNA, 72 bp, Homo sapiens
gccttatacatgattgagaggattacccaaacagacctaattgacttattggaaatccaatcctttgatttt

SEQ ID NO: 30661 - DNA, 71 bp, Homo sapiens
ccttatacatgattgagaggattacccaaacagacctaattgacttattggaaatccaatcctttgatttt

SEQ ID NO: 30662 - DNA, 70 bp, Homo sapiens
gattgagaggattacccaaacagacctaattgacttattggaaatccaatcctttgattttttaattcac

SEQ ID NO: 30663 - DNA, 67 bp, Homo sapiens
ttacccaaacagacctaattgacttattggaaatccaatcctttgattttttaattcacttcttttg

SEQ ID NO: 30664 - DNA, 72 bp, Homo sapiens
cagacctaattgacttattggaaatccaatcctttgattttttaattcacttcttttgtgctgctttatgga

SEQ ID NO: 30665 - DNA, 70 bp, Homo sapiens
aaatccaatcctttgattttttaattcacttcttttgtgctgctttatggagacaaaggagactccccta

SEQ ID NO: 30666 - DNA, 74 bp, Homo sapiens
tttgattttttaattcacttcttttgtgctgctttatggagacaaaggagactcccctatactgcctgtgaaga

SEQ ID NO: 30667 - DNA, 81 bp, Homo sapiens
ttttgtgctgctttatggagacaaaggagactcccctatactgcctgtgaagagcaagacagtctgcagccccgactgtga

SEQ ID NO: 30668 - DNA, 79 bp, Homo sapiens
agacaaaggagactcccctatactgcctgtgaagagcaagacagtctgcagccccgactgtgaggactgtgaggcctcc

SEQ ID NO: 30669 - DNA, 88 bp, Homo sapiens
tcccctatactgcctgtgaagagcaagacagtctgcagccccgactgtgaggactgtgaggcctcctgtgtcagcagatgtgcatgta

SEQ ID NO: 30670 - DNA, 90 bp, Homo sapiens
tactgcctgtgaagagcaagacagtctgcagccccgactgtgaggactgtgaggcctcctgtgtcagcagatgtgcatgtactctctgta

SEQ ID NO: 30671 - DNA, 87 bp, Homo sapiens
aagagcaagacagtctgcagccccgactgtgaggactgtgaggcctcctgtgtcagcagatgtgcatgtactctctgtactgatccc

SEQ ID NO: 30672 - DNA, 85 bp, Homo sapiens
acagtctgcagccccgactgtgaggactgtgaggcctcctgtgtcagcagatgtgcatgtactctctgtactgatcccctggaaa

SEQ ID NO: 30673 - DNA, 82 bp, Homo sapiens
cgactgtgaggactgtgaggcctcctgtgtcagcagatgtgcatgtactctctgtactgatcccctggaaaggtggcctgtt

SEQ ID NO: 30674 - DNA, 82 bp, Homo sapiens
aggactgtgaggcctcctgtgtcagcagatgtgcatgtactctctgtactgatcccctggaaaggtggcctgtttgaaagca

SEQ ID NO: 30675 - DNA, 81 bp, Homo sapiens
aggcctcctgtgtcagcagatgtgcatgtactctctgtactgatcccctggaaaggtggcctgtttgaaagcagtcctgcc

SEQ ID NO: 30676 - DNA, 83 bp, Homo sapiens
tcagcagatgtgcatgtactctctgtactgatcccctggaaaggtggcctgtttgaaagcagtcctgcccaggcctgcagtaa

SEQ ID NO: 30677 - DNA, 77 bp, Homo sapiens
tactctctgtactgatcccctggaaaggtggcctgtttgaaagcagtcctgcccaggcctgcagtaatgaagattaa

SEQ ID NO: 30678 - DNA, 76 bp, Homo sapiens
tcccctggaaaggtggcctgtttgaaagcagtcctgcccaggcctgcagtaatgaagattaagcctcagagtacta

SEQ ID NO: 30679 - DNA, 75 bp, Homo sapiens
aaaggtggcctgtttgaaagcagtcctgcccaggcctgcagtaatgaagattaagcctcagagtactacaggtta

SEQ ID NO: 30680 - DNA, 74 bp, Homo sapiens
tttgaaagcagtcctgcccaggcctgcagtaatgaagattaagcctcagagtactacaggttacccattttgtt

SEQ ID NO: 30681 - DNA, 70 bp, Homo sapiens
agattaagcctcagagtactacaggttacccattttgttttgtttagcccctttcatcaaatgcttataa

SEQ ID NO: 30682 - DNA, 69 bp, Homo sapiens
gagtactacaggttacccattttgttttgtttagcccctttcatcaaatgcttataaaattctaggagc

SEQ ID NO: 30683 - DNA, 67 bp, Homo sapiens
ggttacccattttgttttgtttagcccctttcatcaaatgcttataaaattctaggagcttacctag

SEQ ID NO: 30684 - DNA, 69 bp, Homo sapiens
ttgttttgtttagcccctttcatcaaatgcttataaaattctaggagcttacctagggtttattgttga

SEQ ID NO: 30685 - DNA, 70 bp, Homo sapiens
gtttagcccctttcatcaaatgcttataaaattctaggagcttacctagggtttattgttgataacctca

SEQ ID NO: 30686 - DNA, 73 bp, Homo sapiens
tataaaattctaggagcttacctagggtttattgttgataacctcaaacatatgtgaatcatccactccaaac

SEQ ID NO: 30687 - DNA, 72 bp, Homo sapiens
aattctaggagcttacctagggtttattgttgataacctcaaacatatgtgaatcatccactccaaactagg

SEQ ID NO: 30688 - DNA, 71 bp, Homo sapiens
cttacctagggtttattgttgataacctcaaacatatgtgaatcatccactccaaactagggcagttttct

SEQ ID NO: 30689 - DNA, 75 bp, Homo sapiens
tttattgttgataacctcaaacatatgtgaatcatccactccaaactagggcagttttcttctcaggccctccaa

SEQ ID NO: 30690 - DNA, 73 bp, Homo sapiens
ataacctcaaacatatgtgaatcatccactccaaactagggcagttttcttctcaggccctccaagggagttc

SEQ ID NO: 30691 - DNA, 73 bp, Homo sapiens
aaacatatgtgaatcatccactccaaactagggcagttttcttctcaggccctccaagggagttcggtgacat

SEQ ID NO: 30692 - DNA, 74 bp, Homo sapiens
aatcatccactccaaactagggcagttttcttctcaggccctccaagggagttcggtgacattggcacattgtg

SEQ ID NO: 30693 - DNA, 72 bp, Homo sapiens
aaactagggcagttttcttctcaggccctccaagggagttcggtgacattggcacattgtggggatgaatag

SEQ ID NO: 30694 - DNA, 75 bp, Homo sapiens
agttttcttctcaggccctccaagggagttcggtgacattggcacattgtggggatgaataggctgaaatgccag

SEQ ID NO: 30695 - DNA, 78 bp, Homo sapiens
tctcaggccctccaagggagttcggtgacattggcacattgtggggatgaataggctgaaatgccaggtacacagtta

SEQ ID NO: 30696 - DNA, 75 bp, Homo sapiens
aagggagttcggtgacattggcacattgtggggatgaataggctgaaatgccaggtacacagttagtggaaagac

SEQ ID NO: 30697 - DNA, 76 bp, Homo sapiens
agttcggtgacattggcacattgtggggatgaataggctgaaatgccaggtacacagttagtggaaagactccaaa

SEQ ID NO: 30698 - DNA, 75 bp, Homo sapiens
attggcacattgtggggatgaataggctgaaatgccaggtacacagttagtggaaagactccaaaccaagcaaag

SEQ ID NO: 30699 - DNA, 73 bp, Homo sapiens
gggatgaataggctgaaatgccaggtacacagttagtggaaagactccaaaccaagcaaaggttgaacgtcag

SEQ ID NO: 30700 - DNA, 70 bp, Homo sapiens
aaatgccaggtacacagttagtggaaagactccaaaccaagcaaaggttgaacgtcaggtaactggagta

SEQ ID NO: 30701 - DNA, 67 bp, Homo sapiens
aaagactccaaaccaagcaaaggttgaacgtcaggtaactggagtagggggtgtattagttagctag

SEQ ID NO: 30702 - DNA, 67 bp, Homo sapiens
aaaggttgaacgtcaggtaactggagtagggggtgtattagttagctagggccgctgtaacaaagta

SEQ ID NO: 30703 - DNA, 66 bp, Homo sapiens
aacgtcaggtaactggagtagggggtgtattagttagctagggccgctgtaacaaagtaccccaaa

SEQ ID NO: 30704 - DNA, 65 bp, Homo sapiens
gagtagggggtgtattagttagctagggccgctgtaacaaagtaccccaaacggggtggcttaaa

SEQ ID NO: 30705 - DNA, 72 bp, Homo sapiens
ttaaacaacagatatttattatctcacttttctgggggctagaagtccaaggtcaacgtgtgccagagttgg

SEQ ID NO: 30706 - DNA, 71 bp, Homo sapiens
aacagatatttattatctcacttttctgggggctagaagtccaaggtcaacgtgtgccagagttggttcct

SEQ ID NO: 30707 - DNA, 73 bp, Homo sapiens
acttttctgggggctagaagtccaaggtcaacgtgtgccagagttggttccttctgagagagctgtgaggtag

SEQ ID NO: 30708 - DNA, 79 bp, Homo sapiens
tagaagtccaaggtcaacgtgtgccagagttggttccttctgagagagctgtgaggtaggatctgttccatgactctct

SEQ ID NO: 30709 - DNA, 77 bp, Homo sapiens
aaggtcaacgtgtgccagagttggttccttctgagagagctgtgaggtaggatctgttccatgactctcttctcgtt

SEQ ID NO: 30710 - DNA, 78 bp, Homo sapiens
gtgtgccagagttggttccttctgagagagctgtgaggtaggatctgttccatgactctcttctcgtttctggtggtt

SEQ ID NO: 30711 - DNA, 79 bp, Homo sapiens
tggttccttctgagagagctgtgaggtaggatctgttccatgactctcttctcgtttctggtggtttgctggcaagctt

SEQ ID NO: 30712 - DNA, 81 bp, Homo sapiens
ttctgagagagctgtgaggtaggatctgttccatgactctcttctcgtttctggtggtttgctggcaagctttggcattcc

SEQ ID NO: 30713 - DNA, 79 bp, Homo sapiens
tgtgaggtaggatctgttccatgactctcttctcgtttctggtggtttgctggcaagctttggcattccttgccttgga

SEQ ID NO: 30714 - DNA, 79 bp, Homo sapiens
tccatgactctcttctcgtttctggtggtttgctggcaagctttggcattccttgccttggaggtctctgccttcatct

SEQ ID NO: 30715 - DNA, 79 bp, Homo sapiens
tcttctcgtttctggtggtttgctggcaagctttggcattccttgccttggaggtctctgccttcatcttcacctgcat

SEQ ID NO: 30716 - DNA, 80 bp, Homo sapiens
tggtttgctggcaagctttggcattccttgccttggaggtctctgccttcatcttcacctgcattcttcccctgtgtatg

SEQ ID NO: 30717 - DNA, 80 bp, Homo sapiens
gcaagctttggcattccttgccttggaggtctctgccttcatcttcacctgcattcttcccctgtgtatgtctggaagtc

SEQ ID NO: 30718 - DNA, 81 bp, Homo sapiens
tggcattccttgccttggaggtctctgccttcatcttcacctgcattcttcccctgtgtatgtctggaagtccagagtata

SEQ ID NO: 30719 - DNA, 76 bp, Homo sapiens
ccttggaggtctctgccttcatcttcacctgcattcttcccctgtgtatgtctggaagtccagagtatacttttta

SEQ ID NO: 30720 - DNA, 76 bp, Homo sapiens
aggtctctgccttcatcttcacctgcattcttcccctgtgtatgtctggaagtccagagtatactttttataaaga

SEQ ID NO: 30721 - DNA, 77 bp, Homo sapiens
ttcatcttcacctgcattcttcccctgtgtatgtctggaagtccagagtatactttttataaagacaccagtcatat

SEQ ID NO: 30722 - DNA, 76 bp, Homo sapiens
cagtcatattggatgtttaaaatgacctcatcctaactaattacatctgcaaggaccgtctttccaaataagatca

SEQ ID NO: 30723 - DNA, 73 bp, Homo sapiens
ctcatcctaactaattacatctgcaaggaccgtctttccaaataagatcacatcctgagggtactaggggtta

SEQ ID NO: 30724 - DNA, 71 bp, Homo sapiens
gttaggacttcaacttatgaattttgggggagagatagtcaacccataatgggcataagagaccgggagtg

SEQ ID NO: 30725 - DNA, 73 bp, Homo sapiens
caacttatgaattttgggggagagatagtcaacccataatgggcataagagaccgggagtggtatatgaaata

SEQ ID NO: 30726 - DNA, 72 bp, Homo sapiens
aattttgggggagagatagtcaacccataatgggcataagagaccgggagtggtatatgaaatatagtttga

SEQ ID NO: 30727 - DNA, 75 bp, Homo sapiens
agagatagtcaacccataatgggcataagagaccgggagtggtatatgaaatatagtttgaattccacctcaaga

SEQ ID NO: 30728 - DNA, 73 bp, Homo sapiens
tagtcaacccataatgggcataagagaccgggagtggtatatgaaatatagtttgaattccacctcaagacct

SEQ ID NO: 30729 - DNA, 75 bp, Homo sapiens
taatgggcataagagaccgggagtggtatatgaaatatagtttgaattccacctcaagaccttgagcttatgact

SEQ ID NO: 30730 - DNA, 76 bp, Homo sapiens
taagagaccgggagtggtatatgaaatatagtttgaattccacctcaagaccttgagcttatgacttctgtctagc

SEQ ID NO: 30731 - DNA, 79 bp, Homo sapiens
atatagtttgaattccacctcaagaccttgagcttatgacttctgtctagctctgtgtatcattcatacttcccactaa

SEQ ID NO: 30732 - DNA, 77 bp, Homo sapiens
tttgaattccacctcaagaccttgagcttatgacttctgtctagctctgtgtatcattcatacttcccactaatttt

SEQ ID NO: 30733 - DNA, 75 bp, Homo sapiens
acctcaagaccttgagcttatgacttctgtctagctctgtgtatcattcatacttcccactaatttttaacaaaa

SEQ ID NO: 30734 - DNA, 73 bp, Homo sapiens
tctagctctgtgtatcattcatacttcccactaatttttaacaaaatgactgggagagggagaaagtgaaacc

SEQ ID NO: 30735 - DNA, 72 bp, Homo sapiens
tatcattcatacttcccactaatttttaacaaaatgactgggagagggagaaagtgaaacccagtggactga

SEQ ID NO: 30736 - DNA, 68 bp, Homo sapiens
atacttcccactaatttttaacaaaatgactgggagagggagaaagtgaaacccagtggactgaggct

SEQ ID NO: 30737 - DNA, 73 bp, Homo sapiens
aaaatgactgggagagggagaaagtgaaacccagtggactgaggcttgagtgagcattacctcctgggcctgt

SEQ ID NO: 30738 - DNA, 75 bp, Homo sapiens
agagggagaaagtgaaacccagtggactgaggcttgagtgagcattacctcctgggcctgttgatttgcgtctcc

SEQ ID NO: 30739 - DNA, 76 bp, Homo sapiens
agaaagtgaaacccagtggactgaggcttgagtgagcattacctcctgggcctgttgatttgcgtctccctggtga

SEQ ID NO: 30740 - DNA, 78 bp, Homo sapiens
agtggactgaggcttgagtgagcattacctcctgggcctgttgatttgcgtctccctggtgaccttcttctctgacca

SEQ ID NO: 30741 - DNA, 78 bp, Homo sapiens
aggcttgagtgagcattacctcctgggcctgttgatttgcgtctccctggtgaccttcttctctgaccagcatccgtg

SEQ ID NO: 30742 - DNA, 77 bp, Homo sapiens
agtgagcattacctcctgggcctgttgatttgcgtctccctggtgaccttcttctctgaccagcatccgtgggctta

SEQ ID NO: 30743 - DNA, 73 bp, Homo sapiens
acctcctgggcctgttgatttgcgtctccctggtgaccttcttctctgaccagcatccgtgggcttagggaaa

SEQ ID NO: 30744 - DNA, 74 bp, Homo sapiens
ttgatttgcgtctccctggtgaccttcttctctgaccagcatccgtgggcttagggaaagcacggtggtggaaa

SEQ ID NO: 30745 - DNA, 75 bp, Homo sapiens
gtctccctggtgaccttcttctctgaccagcatccgtgggcttagggaaagcacggtggtggaaatgtgatcctg

SEQ ID NO: 30746 - DNA, 78 bp, Homo sapiens
accttcttctctgaccagcatccgtgggcttagggaaagcacggtggtggaaatgtgatcctggtgtgtgagatgcaa

SEQ ID NO: 30747 - DNA, 80 bp, Homo sapiens
tctgaccagcatccgtgggcttagggaaagcacggtggtggaaatgtgatcctggtgtgtgagatgcaaacttgatctta

SEQ ID NO: 30748 - DNA, 75 bp, Homo sapiens
atccgtgggcttagggaaagcacggtggtggaaatgtgatcctggtgtgtgagatgcaaacttgatcttagcctt

SEQ ID NO: 30749 - DNA, 77 bp, Homo sapiens
cttagggaaagcacggtggtggaaatgtgatcctggtgtgtgagatgcaaacttgatcttagcctttgctctccctg

SEQ ID NO: 30750 - DNA, 77 bp, Homo sapiens
aagcacggtggtggaaatgtgatcctggtgtgtgagatgcaaacttgatcttagcctttgctctccctggaaactta

SEQ ID NO: 30751 - DNA, 75 bp, Homo sapiens
aaatgtgatcctggtgtgtgagatgcaaacttgatcttagcctttgctctccctggaaacttatcggtcaaaact

SEQ ID NO: 30752 - DNA, 71 bp, Homo sapiens
agatgcaaacttgatcttagcctttgctctccctggaaacttatcggtcaaaactttcactaaaggcagtt

SEQ ID NO: 30753 - DNA, 67 bp, Homo sapiens
aaacttgatcttagcctttgctctccctggaaacttatcggtcaaaactttcactaaaggcagtttt

SEQ ID NO: 30754 - DNA, 64 bp, Homo sapiens
ctccctggaaacttatcggtcaaaactttcactaaaggcagttttttgtctgtttgtttaggtt

SEQ ID NO: 30755 - DNA, 64 bp, Homo sapiens
ggtcaaaactttcactaaaggcagttttttgtctgtttgtttaggtttactggttatttattat

SEQ ID NO: 30756 - DNA, 66 bp, Homo sapiens
gtctgtttgtttaggtttactggttatttattatttatagcatggttaaattgggtcaaattttta

SEQ ID NO: 30757 - DNA, 68 bp, Homo sapiens
tgtttaggtttactggttatttattatttatagcatggttaaattgggtcaaatttttatgaattgta

SEQ ID NO: 30758 - DNA, 69 bp, Homo sapiens
gtttactggttatttattatttatagcatggttaaattgggtcaaatttttatgaattgtaagtagaga

SEQ ID NO: 30759 - DNA, 69 bp, Homo sapiens
tactggttatttattatttatagcatggttaaattgggtcaaatttttatgaattgtaagtagagaaac

SEQ ID NO: 30760 - DNA, 68 bp, Homo sapiens
atttattatttatagcatggttaaattgggtcaaatttttatgaattgtaagtagagaaacttttcta

SEQ ID NO: 30761 - DNA, 69 bp, Homo sapiens
ttatttatagcatggttaaattgggtcaaatttttatgaattgtaagtagagaaacttttctaataaga

SEQ ID NO: 30762 - DNA, 69 bp, Homo sapiens
tttatagcatggttaaattgggtcaaatttttatgaattgtaagtagagaaacttttctaataagagga

SEQ ID NO: 30763 - DNA, 68 bp, Homo sapiens
gcatggttaaattgggtcaaatttttatgaattgtaagtagagaaacttttctaataagaggaaagga

SEQ ID NO: 30764 - DNA, 68 bp, Homo sapiens
attgggtcaaatttttatgaattgtaagtagagaaacttttctaataagaggaaaggataagaaatca

SEQ ID NO: 30765 - DNA, 68 bp, Homo sapiens
ggtcaaatttttatgaattgtaagtagagaaacttttctaataagaggaaaggataagaaatcagacc

SEQ ID NO: 30766 - DNA, 66 bp, Homo sapiens
ttgtaagtagagaaacttttctaataagaggaaaggataagaaatcagacctttttgtaaagaaaa

SEQ ID NO: 30767 - DNA, 64 bp, Homo sapiens
gaaacttttctaataagaggaaaggataagaaatcagacctttttgtaaagaaaattaccccac

SEQ ID NO: 30768 - DNA, 63 bp, Homo sapiens
aagaggaaaggataagaaatcagacctttttgtaaagaaaattaccccacttaaagtcctggt

SEQ ID NO: 30769 - DNA, 64 bp, Homo sapiens
gataagaaatcagacctttttgtaaagaaaattaccccacttaaagtcctggtttattttaggc

SEQ ID NO: 30770 - DNA, 64 bp, Homo sapiens
aaaattaccccacttaaagtcctggtttattttaggccgtttggcagtgagaagaagggattat

SEQ ID NO: 30771 - DNA, 71 bp, Homo sapiens
tggtttattttaggccgtttggcagtgagaagaagggattatttgtgtctgacagaggtctacaaggaaaa

SEQ ID NO: 30772 - DNA, 69 bp, Homo sapiens
attttaggccgtttggcagtgagaagaagggattatttgtgtctgacagaggtctacaaggaaaaaggt

SEQ ID NO: 30773 - DNA, 69 bp, Homo sapiens
aagaagggattatttgtgtctgacagaggtctacaaggaaaaaggtttgggatcagaaaacacttccaa

SEQ ID NO: 30774 - DNA, 71 bp, Homo sapiens
attatttgtgtctgacagaggtctacaaggaaaaaggtttgggatcagaaaacacttccaaccagaatgac

SEQ ID NO: 30775 - DNA, 69 bp, Homo sapiens
acagaggtctacaaggaaaaaggtttgggatcagaaaacacttccaaccagaatgacggttccctgcca

SEQ ID NO: 30776 - DNA, 69 bp, Homo sapiens
tctacaaggaaaaaggtttgggatcagaaaacacttccaaccagaatgacggttccctgccagtccttg

SEQ ID NO: 30777 - DNA, 67 bp, Homo sapiens
aaaaggtttgggatcagaaaacacttccaaccagaatgacggttccctgccagtccttggtctttct

SEQ ID NO: 30778 - DNA, 70 bp, Homo sapiens
tgggatcagaaaacacttccaaccagaatgacggttccctgccagtccttggtctttcttcctcccttcc

SEQ ID NO: 30779 - DNA, 75 bp, Homo sapiens
ttctgtgcccacatggactaattatgtctggctttccctccctcttccttgtatatttcccttccatatcaagac

SEQ ID NO: 30780 - DNA, 73 bp, Homo sapiens
acatggactaattatgtctggctttccctccctcttccttgtatatttcccttccatatcaagaccttcagaa

SEQ ID NO: 30781 - DNA, 72 bp, Homo sapiens
actaattatgtctggctttccctccctcttccttgtatatttcccttccatatcaagaccttcagaatgagg

SEQ ID NO: 30782 - DNA, 73 bp, Homo sapiens
gctttccctccctcttccttgtatatttcccttccatatcaagaccttcagaatgagggcaatgtggataatt

SEQ ID NO: 30783 - DNA, 72 bp, Homo sapiens
cctcttccttgtatatttcccttccatatcaagaccttcagaatgagggcaatgtggataatttcccagttt

SEQ ID NO: 30784 - DNA, 75 bp, Homo sapiens
tccttgtatatttcccttccatatcaagaccttcagaatgagggcaatgtggataatttcccagttttccagctg

SEQ ID NO: 30785 - DNA, 78 bp, Homo sapiens
cttccatatcaagaccttcagaatgagggcaatgtggataatttcccagttttccagctgggcagctcaccaagaaca

SEQ ID NO: 30786 - DNA, 76 bp, Homo sapiens
atatcaagaccttcagaatgagggcaatgtggataatttcccagttttccagctgggcagctcaccaagaacaaac

SEQ ID NO: 30787 - DNA, 74 bp, Homo sapiens
aatgtggataatttcccagttttccagctgggcagctcaccaagaacaaacccagacatcaaggccagaccaaa

SEQ ID NO: 30788 - DNA, 72 bp, Homo sapiens
ggataatttcccagttttccagctgggcagctcaccaagaacaaacccagacatcaaggccagaccaaaaaa

SEQ ID NO: 30789 - DNA, 71 bp, Homo sapiens
atttcccagttttccagctgggcagctcaccaagaacaaacccagacatcaaggccagaccaaaaaaatct

SEQ ID NO: 30790 - DNA, 73 bp, Homo sapiens
ggcagctcaccaagaacaaacccagacatcaaggccagaccaaaaaaatcttcttgttttagacagaagactc

SEQ ID NO: 30791 - DNA, 71 bp, Homo sapiens
ctcaccaagaacaaacccagacatcaaggccagaccaaaaaaatcttcttgttttagacagaagactccta

SEQ ID NO: 30792 - DNA, 70 bp, Homo sapiens
accaagaacaaacccagacatcaaggccagaccaaaaaaatcttcttgttttagacagaagactcctaca

SEQ ID NO: 30793 - DNA, 71 bp, Homo sapiens
aagaacaaacccagacatcaaggccagaccaaaaaaatcttcttgttttagacagaagactcctacatctg

SEQ ID NO: 30794 - DNA, 70 bp, Homo sapiens
acaaacccagacatcaaggccagaccaaaaaaatcttcttgttttagacagaagactcctacatctgggg

SEQ ID NO: 30795 - DNA, 73 bp, Homo sapiens
agacatcaaggccagaccaaaaaaatcttcttgttttagacagaagactcctacatctgggggatttaatgca

SEQ ID NO: 30796 - DNA, 72 bp, Homo sapiens
acatcaaggccagaccaaaaaaatcttcttgttttagacagaagactcctacatctgggggatttaatgcac

SEQ ID NO: 30797 - DNA, 71 bp, Homo sapiens
cagaccaaaaaaatcttcttgttttagacagaagactcctacatctgggggatttaatgcacccactgtcc

SEQ ID NO: 30798 - DNA, 77 bp, Homo sapiens
ttcttgttttagacagaagactcctacatctgggggatttaatgcacccactgtccgctcagtgcatttcctgtgtc

SEQ ID NO: 30799 - DNA, 80 bp, Homo sapiens
tcctacatctgggggatttaatgcacccactgtccgctcagtgcatttcctgtgtccggagcttctctgcctgccggctc

SEQ ID NO: 30800 - DNA, 82 bp, Homo sapiens
tgtccgctcagtgcatttcctgtgtccggagcttctctgcctgccggctctggtctcgtaagtttccatgccctgctgccaa

SEQ ID NO: 30801 - DNA, 77 bp, Homo sapiens
atttcctgtgtccggagcttctctgcctgccggctctggtctcgtaagtttccatgccctgctgccaacttataata

SEQ ID NO: 30802 - DNA, 78 bp, Homo sapiens
ctgtgtccggagcttctctgcctgccggctctggtctcgtaagtttccatgccctgctgccaacttataataacagag

SEQ ID NO: 30803 - DNA, 82 bp, Homo sapiens
cggctctggtctcgtaagtttccatgccctgctgccaacttataataacagaggcggcaggcagcaggctgagaatgtcata

SEQ ID NO: 30804 - DNA, 83 bp, Homo sapiens
tctcgtaagtttccatgccctgctgccaacttataataacagaggcggcaggcagcaggctgagaatgtcatagcctactcca

SEQ ID NO: 30805 - DNA, 83 bp, Homo sapiens
aagtttccatgccctgctgccaacttataataacagaggcggcaggcagcaggctgagaatgtcatagcctactccatacatg

SEQ ID NO: 30806 - DNA, 89 bp, Homo sapiens
tgctgccaacttataataacagaggcggcaggcagcaggctgagaatgtcatagcctactccatacatgggcactgctttgcagactga

SEQ ID NO: 30807 - DNA, 85 bp, Homo sapiens
ttataataacagaggcggcaggcagcaggctgagaatgtcatagcctactccatacatgggcactgctttgcagactgaaacaaa

SEQ ID NO: 30808 - DNA, 87 bp, Homo sapiens
taacagaggcggcaggcagcaggctgagaatgtcatagcctactccatacatgggcactgctttgcagactgaaacaaagcttgcag

SEQ ID NO: 30809 - DNA, 87 bp, Homo sapiens
aggcagcaggctgagaatgtcatagcctactccatacatgggcactgctttgcagactgaaacaaagcttgcagggtctcattgcag

SEQ ID NO: 30810 - DNA, 85 bp, Homo sapiens
aggctgagaatgtcatagcctactccatacatgggcactgctttgcagactgaaacaaagcttgcagggtctcattgcaggcctc

SEQ ID NO: 30811 - DNA, 87 bp, Homo sapiens
tgtcatagcctactccatacatgggcactgctttgcagactgaaacaaagcttgcagggtctcattgcaggcctctcagccttgaca

SEQ ID NO: 30812 - DNA, 84 bp, Homo sapiens
tactccatacatgggcactgctttgcagactgaaacaaagcttgcagggtctcattgcaggcctctcagccttgacagtggttg

SEQ ID NO: 30813 - DNA, 81 bp, Homo sapiens
ctttgcagactgaaacaaagcttgcagggtctcattgcaggcctctcagccttgacagtggttgtgcccagaccaccagga

SEQ ID NO: 30814 - DNA, 79 bp, Homo sapiens
aacaaagcttgcagggtctcattgcaggcctctcagccttgacagtggttgtgcccagaccaccaggagcctggaatta

SEQ ID NO: 30815 - DNA, 76 bp, Homo sapiens
agggtctcattgcaggcctctcagccttgacagtggttgtgcccagaccaccaggagcctggaattaaataccctc

SEQ ID NO: 30816 - DNA, 75 bp, Homo sapiens
tcagccttgacagtggttgtgcccagaccaccaggagcctggaattaaataccctcggatccagttctctactgt

SEQ ID NO: 30817 - DNA, 73 bp, Homo sapiens
cagtggttgtgcccagaccaccaggagcctggaattaaataccctcggatccagttctctactgttaatgtta

SEQ ID NO: 30818 - DNA, 74 bp, Homo sapiens
accaggagcctggaattaaataccctcggatccagttctctactgttaatgttatcagcttcatcaagtacttc

SEQ ID NO: 30819 - DNA, 76 bp, Homo sapiens
tggaattaaataccctcggatccagttctctactgttaatgttatcagcttcatcaagtacttcctctttgagtga

SEQ ID NO: 30820 - DNA, 79 bp, Homo sapiens
taatgttatcagcttcatcaagtacttcctctttgagtgatatctgtggagaaataaataaatcaagctcctccaagtc

SEQ ID NO: 30821 - DNA, 76 bp, Homo sapiens
agcttcatcaagtacttcctctttgagtgatatctgtggagaaataaataaatcaagctcctccaagtcctgttcc

SEQ ID NO: 30822 - DNA, 76 bp, Homo sapiens
agtacttcctctttgagtgatatctgtggagaaataaataaatcaagctcctccaagtcctgttcctgcctggatc

SEQ ID NO: 30823 - DNA, 76 bp, Homo sapiens
agtgatatctgtggagaaataaataaatcaagctcctccaagtcctgttcctgcctggatcctgagtccaaagtaa

SEQ ID NO: 30824 - DNA, 75 bp, Homo sapiens
tatctgtggagaaataaataaatcaagctcctccaagtcctgttcctgcctggatcctgagtccaaagtaaaatc

SEQ ID NO: 30825 - DNA, 74 bp, Homo sapiens
ataaataaatcaagctcctccaagtcctgttcctgcctggatcctgagtccaaagtaaaatctgagttggatta

SEQ ID NO: 30826 - DNA, 76 bp, Homo sapiens
aatcaagctcctccaagtcctgttcctgcctggatcctgagtccaaagtaaaatctgagttggattatccaaagca

SEQ ID NO: 30827 - DNA, 74 bp, Homo sapiens
aagtcctgttcctgcctggatcctgagtccaaagtaaaatctgagttggattatccaaagcactatcaccctcc

SEQ ID NO: 30828 - DNA, 77 bp, Homo sapiens
ctgcctggatcctgagtccaaagtaaaatctgagttggattatccaaagcactatcaccctcctgcattgttcccaa

SEQ ID NO: 30829 - DNA, 75 bp, Homo sapiens
atcctgagtccaaagtaaaatctgagttggattatccaaagcactatcaccctcctgcattgttcccaaggtctg

SEQ ID NO: 30830 - DNA, 73 bp, Homo sapiens
aaagtaaaatctgagttggattatccaaagcactatcaccctcctgcattgttcccaaggtctgggcaggaac

SEQ ID NO: 30831 - DNA, 76 bp, Homo sapiens
atctgagttggattatccaaagcactatcaccctcctgcattgttcccaaggtctgggcaggaacggagagtgaaa

SEQ ID NO: 30832 - DNA, 76 bp, Homo sapiens
aaagcactatcaccctcctgcattgttcccaaggtctgggcaggaacggagagtgaaatctctccaggacattaca

SEQ ID NO: 30833 - DNA, 72 bp, Homo sapiens
attgttcccaaggtctgggcaggaacggagagtgaaatctctccaggacattacatcagttcctcctttacc

SEQ ID NO: 30834 - DNA, 75 bp, Homo sapiens
tctgggcaggaacggagagtgaaatctctccaggacattacatcagttcctcctttacccttggcatgaaagttc

SEQ ID NO: 30835 - DNA, 73 bp, Homo sapiens
agtgaaatctctccaggacattacatcagttcctcctttacccttggcatgaaagttcttcctctcctggtcc

SEQ ID NO: 30836 - DNA, 70 bp, Homo sapiens
attacatcagttcctcctttacccttggcatgaaagttcttcctctcctggtcctcccagacttcctaag

SEQ ID NO: 30837 - DNA, 71 bp, Homo sapiens
ttcctcctttacccttggcatgaaagttcttcctctcctggtcctcccagacttcctaaggcctgccctga

SEQ ID NO: 30838 - DNA, 76 bp, Homo sapiens
ttggcatgaaagttcttcctctcctggtcctcccagacttcctaaggcctgccctgagtgcacacccacacactaa

SEQ ID NO: 30839 - DNA, 72 bp, Homo sapiens
aaagttcttcctctcctggtcctcccagacttcctaaggcctgccctgagtgcacacccacacactaagcct

SEQ ID NO: 30840 - DNA, 77 bp, Homo sapiens
tcctggtcctcccagacttcctaaggcctgccctgagtgcacacccacacactaagccttgaagcccaggacatcaa

SEQ ID NO: 30841 - DNA, 76 bp, Homo sapiens
tcctcccagacttcctaaggcctgccctgagtgcacacccacacactaagccttgaagcccaggacatcaaagaaa

SEQ ID NO: 30842 - DNA, 77 bp, Homo sapiens
ttcctaaggcctgccctgagtgcacacccacacactaagccttgaagcccaggacatcaaagaaagcctgcaggtaa

SEQ ID NO: 30843 - DNA, 74 bp, Homo sapiens
acacccacacactaagccttgaagcccaggacatcaaagaaagcctgcaggtaaccagattactgaccaacgcc

SEQ ID NO: 30844 - DNA, 73 bp, Homo sapiens
actaagccttgaagcccaggacatcaaagaaagcctgcaggtaaccagattactgaccaacgcctgtgaccgt

SEQ ID NO: 30845 - DNA, 72 bp, Homo sapiens
aggacatcaaagaaagcctgcaggtaaccagattactgaccaacgcctgtgaccgttttgaaatttataaga

SEQ ID NO: 30846 - DNA, 70 bp, Homo sapiens
aaagaaagcctgcaggtaaccagattactgaccaacgcctgtgaccgttttgaaatttataagatgggaa

SEQ ID NO: 30847 - DNA, 70 bp, Homo sapiens
aggtaaccagattactgaccaacgcctgtgaccgttttgaaatttataagatgggaaatggattcaggaa

SEQ ID NO: 30848 - DNA, 69 bp, Homo sapiens
attactgaccaacgcctgtgaccgttttgaaatttataagatgggaaatggattcaggaaatgggattt

SEQ ID NO: 30849 - DNA, 73 bp, Homo sapiens
gtgaccgttttgaaatttataagatgggaaatggattcaggaaatgggatttttcaatacatggtcttcatca

SEQ ID NO: 30850 - DNA, 73 bp, Homo sapiens
gaaatttataagatgggaaatggattcaggaaatgggatttttcaatacatggtcttcatcatccttaagtat

SEQ ID NO: 30851 - DNA, 72 bp, Homo sapiens
agatgggaaatggattcaggaaatgggatttttcaatacatggtcttcatcatccttaagtatttttaagcc

SEQ ID NO: 30852 - DNA, 72 bp, Homo sapiens
tggattcaggaaatgggatttttcaatacatggtcttcatcatccttaagtatttttaagccttaataagct

SEQ ID NO: 30853 - DNA, 72 bp, Homo sapiens
caatacatggtcttcatcatccttaagtatttttaagccttaataagcttttaagtaaagagagacattctg

SEQ ID NO: 30854 - DNA, 72 bp, Homo sapiens
gtcttcatcatccttaagtatttttaagccttaataagcttttaagtaaagagagacattctgtaaatggca

SEQ ID NO: 30855 - DNA, 71 bp, Homo sapiens
tcatccttaagtatttttaagccttaataagcttttaagtaaagagagacattctgtaaatggcatttaga

SEQ ID NO: 30856 - DNA, 71 bp, Homo sapiens
gccttaataagcttttaagtaaagagagacattctgtaaatggcatttagaagaaaatataggaaagttca

SEQ ID NO: 30857 - DNA, 73 bp, Homo sapiens
gagagacattctgtaaatggcatttagaagaaaatataggaaagttcaaactggaactgtcttcaatagttgt

SEQ ID NO: 30858 - DNA, 73 bp, Homo sapiens
gtaaatggcatttagaagaaaatataggaaagttcaaactggaactgtcttcaatagttgtttacagtgatca

SEQ ID NO: 30859 - DNA, 74 bp, Homo sapiens
ggcatttagaagaaaatataggaaagttcaaactggaactgtcttcaatagttgtttacagtgatcatattctg

SEQ ID NO: 30860 - DNA, 74 bp, Homo sapiens
aatataggaaagttcaaactggaactgtcttcaatagttgtttacagtgatcatattctgtgacaaatgaaaag

SEQ ID NO: 30861 - DNA, 74 bp, Homo sapiens
aaagttcaaactggaactgtcttcaatagttgtttacagtgatcatattctgtgacaaatgaaaagtggaccag

SEQ ID NO: 30862 - DNA, 76 bp, Homo sapiens
tggaactgtcttcaatagttgtttacagtgatcatattctgtgacaaatgaaaagtggaccagggacaaaagataa

SEQ ID NO: 30863 - DNA, 75 bp, Homo sapiens
gtcttcaatagttgtttacagtgatcatattctgtgacaaatgaaaagtggaccagggacaaaagataaatacat

SEQ ID NO: 30864 - DNA, 74 bp, Homo sapiens
agttgtttacagtgatcatattctgtgacaaatgaaaagtggaccagggacaaaagataaatacatttctatgg

SEQ ID NO: 30865 - DNA, 79 bp, Homo sapiens
tgacaaatgaaaagtggaccagggacaaaagataaatacatttctatgggcagcagaattgacatccatattatctata

SEQ ID NO: 30866 - DNA, 76 bp, Homo sapiens
tgaaaagtggaccagggacaaaagataaatacatttctatgggcagcagaattgacatccatattatctataaaag

SEQ ID NO: 30867 - DNA, 74 bp, Homo sapiens
ggaccagggacaaaagataaatacatttctatgggcagcagaattgacatccatattatctataaaaggaaagt

SEQ ID NO: 30868 - DNA, 76 bp, Homo sapiens
gataaatacatttctatgggcagcagaattgacatccatattatctataaaaggaaagtttgccttgtctacaaaa

SEQ ID NO: 30869 - DNA, 77 bp, Homo sapiens
catttctatgggcagcagaattgacatccatattatctataaaaggaaagtttgccttgtctacaaaagattacaga

SEQ ID NO: 30870 - DNA, 76 bp, Homo sapiens
atgggcagcagaattgacatccatattatctataaaaggaaagtttgccttgtctacaaaagattacagatcattt

SEQ ID NO: 30871 - DNA, 75 bp, Homo sapiens
tgacatccatattatctataaaaggaaagtttgccttgtctacaaaagattacagatcattttagttggtgccca

SEQ ID NO: 30872 - DNA, 72 bp, Homo sapiens
ttatctataaaaggaaagtttgccttgtctacaaaagattacagatcattttagttggtgcccagtaagcat

SEQ ID NO: 30873 - DNA, 74 bp, Homo sapiens
taaaaggaaagtttgccttgtctacaaaagattacagatcattttagttggtgcccagtaagcatttctatgca

SEQ ID NO: 30874 - DNA, 74 bp, Homo sapiens
tttgccttgtctacaaaagattacagatcattttagttggtgcccagtaagcatttctatgcatttgggttaaa

SEQ ID NO: 30875 - DNA, 72 bp, Homo sapiens
attttagttggtgcccagtaagcatttctatgcatttgggttaaagtgaggaagttagtgcttgtctttcca

SEQ ID NO: 30876 - DNA, 74 bp, Homo sapiens
cccagtaagcatttctatgcatttgggttaaagtgaggaagttagtgcttgtctttccaacctatatccttgca

SEQ ID NO: 30877 - DNA, 71 bp, Homo sapiens
atttctatgcatttgggttaaagtgaggaagttagtgcttgtctttccaacctatatccttgcaaggttaa

SEQ ID NO: 30878 - DNA, 66 bp, Homo sapiens
aggaagttagtgcttgtctttccaacctatatccttgcaaggttaattaagcactttaaaaaaaaa

SEQ ID NO: 30879 - DNA, 66 bp, Homo sapiens
aaaaaaaaagctttttataacaggaaatatcaaacctatacaaaagtaaagagaattgtgtaatga

SEQ ID NO: 30880 - DNA, 72 bp, Homo sapiens
gctttttataacaggaaatatcaaacctatacaaaagtaaagagaattgtgtaatgaatcaccatgtaccca

SEQ ID NO: 30881 - DNA, 74 bp, Homo sapiens
caggaaatatcaaacctatacaaaagtaaagagaattgtgtaatgaatcaccatgtacccatcaccagttttga

SEQ ID NO: 30882 - DNA, 75 bp, Homo sapiens
ggaaatatcaaacctatacaaaagtaaagagaattgtgtaatgaatcaccatgtacccatcaccagttttgatga

SEQ ID NO: 30883 - DNA, 76 bp, Homo sapiens
caaacctatacaaaagtaaagagaattgtgtaatgaatcaccatgtacccatcaccagttttgatgatcaactcaa

SEQ ID NO: 30884 - DNA, 79 bp, Homo sapiens
tatacaaaagtaaagagaattgtgtaatgaatcaccatgtacccatcaccagttttgatgatcaactcaaggccaatca

SEQ ID NO: 30885 - DNA, 78 bp, Homo sapiens
aaagtaaagagaattgtgtaatgaatcaccatgtacccatcaccagttttgatgatcaactcaaggccaatcatgtct

SEQ ID NO: 30886 - DNA, 81 bp, Homo sapiens
taaagagaattgtgtaatgaatcaccatgtacccatcaccagttttgatgatcaactcaaggccaatcatgtcttcctctg

SEQ ID NO: 30887 - DNA, 81 bp, Homo sapiens
aattgtgtaatgaatcaccatgtacccatcaccagttttgatgatcaactcaaggccaatcatgtcttcctctgtggtcta

SEQ ID NO: 30888 - DNA, 81 bp, Homo sapiens
taatgaatcaccatgtacccatcaccagttttgatgatcaactcaaggccaatcatgtcttcctctgtggtctacctcctc

SEQ ID NO: 30889 - DNA, 80 bp, Homo sapiens
aatcaccatgtacccatcaccagttttgatgatcaactcaaggccaatcatgtcttcctctgtggtctacctcctctctc

SEQ ID NO: 30890 - DNA, 79 bp, Homo sapiens
atgtacccatcaccagttttgatgatcaactcaaggccaatcatgtcttcctctgtggtctacctcctctctccttcac

SEQ ID NO: 30891 - DNA, 79 bp, Homo sapiens
cagttttgatgatcaactcaaggccaatcatgtcttcctctgtggtctacctcctctctccttcaccatcccagattat

SEQ ID NO: 30892 - DNA, 80 bp, Homo sapiens
ttgatgatcaactcaaggccaatcatgtcttcctctgtggtctacctcctctctccttcaccatcccagattattttaca

SEQ ID NO: 30893 - DNA, 77 bp, Homo sapiens
actcaaggccaatcatgtcttcctctgtggtctacctcctctctccttcaccatcccagattattttacagcaaatc

SEQ ID NO: 30894 - DNA, 77 bp, Homo sapiens
atgtcttcctctgtggtctacctcctctctccttcaccatcccagattattttacagcaaatctcagatatataatt

SEQ ID NO: 30895 - DNA, 76 bp, Homo sapiens
tgtggtctacctcctctctccttcaccatcccagattattttacagcaaatctcagatatataatttcccttgtaa

SEQ ID NO: 30896 - DNA, 76 bp, Homo sapiens
ctcctctctccttcaccatcccagattattttacagcaaatctcagatatataatttcccttgtaaatagtatcaa

SEQ ID NO: 30897 - DNA, 77 bp, Homo sapiens
tctccttcaccatcccagattattttacagcaaatctcagatatataatttcccttgtaaatagtatcaacaggctg

SEQ ID NO: 30898 - DNA, 75 bp, Homo sapiens
ccatcccagattattttacagcaaatctcagatatataatttcccttgtaaatagtatcaacaggctgggcgcgg

SEQ ID NO: 30899 - DNA, 72 bp, Homo sapiens
aaaaaaaatagtgtcaacataggtctcaaaaaaagactataaaatcataatagaaccatcatatcacttgaa

SEQ ID NO: 30900 - DNA, 74 bp, Homo sapiens
gtgtcaacataggtctcaaaaaaagactataaaatcataatagaaccatcatatcacttgaaaactagtagttc

SEQ ID NO: 30901 - DNA, 72 bp, Homo sapiens
cataggtctcaaaaaaagactataaaatcataatagaaccatcatatcacttgaaaactagtagttcctcgg

SEQ ID NO: 30902 - DNA, 74 bp, Homo sapiens
aaaagactataaaatcataatagaaccatcatatcacttgaaaactagtagttcctcggtatcatcaaataatc

SEQ ID NO: 30903 - DNA, 77 bp, Homo sapiens
aaaatcataatagaaccatcatatcacttgaaaactagtagttcctcggtatcatcaaataatctgctagtgttcac

SEQ ID NO: 30904 - DNA, 76 bp, Homo sapiens
aatagaaccatcatatcacttgaaaactagtagttcctcggtatcatcaaataatctgctagtgttcactttttgc

SEQ ID NO: 30905 - DNA, 77 bp, Homo sapiens
atatcacttgaaaactagtagttcctcggtatcatcaaataatctgctagtgttcactttttgccaaccatctcata

SEQ ID NO: 30906 - DNA, 74 bp, Homo sapiens
acttgaaaactagtagttcctcggtatcatcaaataatctgctagtgttcactttttgccaaccatctcataaa

SEQ ID NO: 30907 - DNA, 74 bp, Homo sapiens
gtagttcctcggtatcatcaaataatctgctagtgttcactttttgccaaccatctcataaatgttttttacag

SEQ ID NO: 30908 - DNA, 76 bp, Homo sapiens
cggtatcatcaaataatctgctagtgttcactttttgccaaccatctcataaatgttttttacagtttggatcaga

SEQ ID NO: 30909 - DNA, 75 bp, Homo sapiens
taatctgctagtgttcactttttgccaaccatctcataaatgttttttacagtttggatcagaatccaaacaaca

SEQ ID NO: 30910 - DNA, 75 bp, Homo sapiens
gctagtgttcactttttgccaaccatctcataaatgttttttacagtttggatcagaatccaaacaacatctata

SEQ ID NO: 30911 - DNA, 76 bp, Homo sapiens
ctttttgccaaccatctcataaatgttttttacagtttggatcagaatccaaacaacatctatacattgcagatgg

SEQ ID NO: 30912 - DNA, 77 bp, Homo sapiens
ccatctcataaatgttttttacagtttggatcagaatccaaacaacatctatacattgcagatggttaacgtatctc

SEQ ID NO: 30913 - DNA, 72 bp, Homo sapiens
gttttttacagtttggatcagaatccaaacaacatctatacattgcagatggttaacgtatctcttaagttt

SEQ ID NO: 30914 - DNA, 73 bp, Homo sapiens
cagtttggatcagaatccaaacaacatctatacattgcagatggttaacgtatctcttaagtttttttcaacc

SEQ ID NO: 30915 - DNA, 71 bp, Homo sapiens
gaatccaaacaacatctatacattgcagatggttaacgtatctcttaagtttttttcaacctataggttcc

SEQ ID NO: 30916 - DNA, 74 bp, Homo sapiens
caaacaacatctatacattgcagatggttaacgtatctcttaagtttttttcaacctataggttcccatctgca

SEQ ID NO: 30917 - DNA, 72 bp, Homo sapiens
tatacattgcagatggttaacgtatctcttaagtttttttcaacctataggttcccatctgcaaccttcttg

SEQ ID NO: 30918 - DNA, 70 bp, Homo sapiens
agatggttaacgtatctcttaagtttttttcaacctataggttcccatctgcaaccttcttgtgtgtgtg

SEQ ID NO: 30919 - DNA, 72 bp, Homo sapiens
acgtatctcttaagtttttttcaacctataggttcccatctgcaaccttcttgtgtgtgtgtttgagcagtc

SEQ ID NO: 30920 - DNA, 72 bp, Homo sapiens
ttttttcaacctataggttcccatctgcaaccttcttgtgtgtgtgtttgagcagtccctctcttcaggttt

SEQ ID NO: 30921 - DNA, 72 bp, Homo sapiens
ctataggttcccatctgcaaccttcttgtgtgtgtgtttgagcagtccctctcttcaggtttttttaaagaa

SEQ ID NO: 30922 - DNA, 74 bp, Homo sapiens
ccatctgcaaccttcttgtgtgtgtgtttgagcagtccctctcttcaggtttttttaaagaagtcagccataat

SEQ ID NO: 30923 - DNA, 72 bp, Homo sapiens
accttcttgtgtgtgtgtttgagcagtccctctcttcaggtttttttaaagaagtcagccataattagtata

SEQ ID NO: 30924 - DNA, 74 bp, Homo sapiens
gtgtgtgtttgagcagtccctctcttcaggtttttttaaagaagtcagccataattagtatattcgtatatata

SEQ ID NO: 30925 - DNA, 73 bp, Homo sapiens
gtttgagcagtccctctcttcaggtttttttaaagaagtcagccataattagtatattcgtatatataatata

SEQ ID NO: 30926 - DNA, 80 bp, Homo sapiens
attatatatattagcgtaggcttatatatactatgtaagtatatacttatatagtattagtatatactatatatcatata

SEQ ID NO: 30927 - DNA, 76 bp, Homo sapiens
tactatatatcatactatgcatatatagtatattagtataatctccccctgtacatagtttctttttttcctctgg

SEQ ID NO: 30928 - DNA, 75 bp, Homo sapiens
catactatgcatatatagtatattagtataatctccccctgtacatagtttctttttttcctctggttgctttca

SEQ ID NO: 30929 - DNA, 72 bp, Homo sapiens
gcatatatagtatattagtataatctccccctgtacatagtttctttttttcctctggttgctttcaagatt

SEQ ID NO: 30930 - DNA, 69 bp, Homo sapiens
agtatattagtataatctccccctgtacatagtttctttttttcctctggttgctttcaagattttctc

SEQ ID NO: 30931 - DNA, 69 bp, Homo sapiens
ttctctttatttttggttttcagcagtttgactatggtgtacctgggtgtggtttttattttacatatc

SEQ ID NO: 30932 - DNA, 70 bp, Homo sapiens
ttttggttttcagcagtttgactatggtgtacctgggtgtggtttttattttacatatcttacttgagat

SEQ ID NO: 30933 - DNA, 72 bp, Homo sapiens
ttttcagcagtttgactatggtgtacctgggtgtggtttttattttacatatcttacttgagattcttggac

SEQ ID NO: 30934 - DNA, 70 bp, Homo sapiens
gactatggtgtacctgggtgtggtttttattttacatatcttacttgagattcttggaccttcgaattta

SEQ ID NO: 30935 - DNA, 69 bp, Homo sapiens
gtgtacctgggtgtggtttttattttacatatcttacttgagattcttggaccttcgaatttactgttg

SEQ ID NO: 30936 - DNA, 70 bp, Homo sapiens
gtggtttttattttacatatcttacttgagattcttggaccttcgaatttactgttgttgataatgttgt

SEQ ID NO: 30937 - DNA, 73 bp, Homo sapiens
ttacatatcttacttgagattcttggaccttcgaatttactgttgttgataatgttgttaccaaatttgagga

SEQ ID NO: 30938 - DNA, 74 bp, Homo sapiens
tacttgagattcttggaccttcgaatttactgttgttgataatgttgttaccaaatttgaggacaatctagcca

SEQ ID NO: 30939 - DNA, 70 bp, Homo sapiens
gaccttcgaatttactgttgttgataatgttgttaccaaatttgaggacaatctagccattattttttaa

SEQ ID NO: 30940 - DNA, 72 bp, Homo sapiens
tactgttgttgataatgttgttaccaaatttgaggacaatctagccattattttttaatttattctactctg

SEQ ID NO: 30941 - DNA, 69 bp, Homo sapiens
ttgataatgttgttaccaaatttgaggacaatctagccattattttttaatttattctactctgttttt

SEQ ID NO: 30942 - DNA, 70 bp, Homo sapiens
tattttttaatttattctactctgtttttttctatattctccttcttggacaccaattacatgtgtgtta

SEQ ID NO: 30943 - DNA, 73 bp, Homo sapiens
tttattctactctgtttttttctatattctccttcttggacaccaattacatgtgtgttagaccacgtgatat

SEQ ID NO: 30944 - DNA, 74 bp, Homo sapiens
actctgtttttttctatattctccttcttggacaccaattacatgtgtgttagaccacgtgatattgttccaca

SEQ ID NO: 30945 - DNA, 77 bp, Homo sapiens
ttctatattctccttcttggacaccaattacatgtgtgttagaccacgtgatattgttccacaggtcactgaggatt

SEQ ID NO: 30946 - DNA, 77 bp, Homo sapiens
tatattctccttcttggacaccaattacatgtgtgttagaccacgtgatattgttccacaggtcactgaggatttgt

SEQ ID NO: 30947 - DNA, 75 bp, Homo sapiens
tccttcttggacaccaattacatgtgtgttagaccacgtgatattgttccacaggtcactgaggatttgttttgt

SEQ ID NO: 30948 - DNA, 74 bp, Homo sapiens
cttcttggacaccaattacatgtgtgttagaccacgtgatattgttccacaggtcactgaggatttgttttgtt

SEQ ID NO: 30949 - DNA, 73 bp, Homo sapiens
aattacatgtgtgttagaccacgtgatattgttccacaggtcactgaggatttgttttgtttggatttcattt

SEQ ID NO: 30950 - DNA, 73 bp, Homo sapiens
attacatgtgtgttagaccacgtgatattgttccacaggtcactgaggatttgttttgtttggatttcatttt

SEQ ID NO: 30951 - DNA, 74 bp, Homo sapiens
atgtgtgttagaccacgtgatattgttccacaggtcactgaggatttgttttgtttggatttcatttttactga

SEQ ID NO: 30952 - DNA, 74 bp, Homo sapiens
ttagaccacgtgatattgttccacaggtcactgaggatttgttttgtttggatttcatttttactgatctgtct

SEQ ID NO: 30953 - DNA, 74 bp, Homo sapiens
cacgtgatattgttccacaggtcactgaggatttgttttgtttggatttcatttttactgatctgtcttcaaat

SEQ ID NO: 30954 - DNA, 73 bp, Homo sapiens
cgtgatattgttccacaggtcactgaggatttgttttgtttggatttcatttttactgatctgtcttcaaatt

SEQ ID NO: 30955 - DNA, 71 bp, Homo sapiens
gttccacaggtcactgaggatttgttttgtttggatttcatttttactgatctgtcttcaaattttctaac

SEQ ID NO: 30956 - DNA, 69 bp, Homo sapiens
caggtcactgaggatttgttttgtttggatttcatttttactgatctgtcttcaaattttctaaccctt

SEQ ID NO: 30957 - DNA, 73 bp, Homo sapiens
tggatttcatttttactgatctgtcttcaaattttctaaccctttcttctctcatctccgttctgctattaag

SEQ ID NO: 30958 - DNA, 75 bp, Homo sapiens
tcatttttactgatctgtcttcaaattttctaaccctttcttctctcatctccgttctgctattaagtccatcta

SEQ ID NO: 30959 - DNA, 71 bp, Homo sapiens
ctgtcttcaaattttctaaccctttcttctctcatctccgttctgctattaagtccatctagtccggtctt

SEQ ID NO: 30960 - DNA, 75 bp, Homo sapiens
cctttcttctctcatctccgttctgctattaagtccatctagtccggtctttcatttcagatattatacttttca

SEQ ID NO: 30961 - DNA, 77 bp, Homo sapiens
ttctctcatctccgttctgctattaagtccatctagtccggtctttcatttcagatattatacttttcagttataga

SEQ ID NO: 30962 - DNA, 73 bp, Homo sapiens
ctccgttctgctattaagtccatctagtccggtctttcatttcagatattatacttttcagttatagaatctt

SEQ ID NO: 30963 - DNA, 72 bp, Homo sapiens
ctattaagtccatctagtccggtctttcatttcagatattatacttttcagttatagaatctttattttgcc

SEQ ID NO: 30964 - DNA, 69 bp, Homo sapiens
catctagtccggtctttcatttcagatattatacttttcagttatagaatctttattttgccttttttt

SEQ ID NO: 30965 - DNA, 71 bp, Homo sapiens
gcctttttttttaattccatttcccttttggcagcctgtatgtgtcatcatttattacaaccatgattttc

SEQ ID NO: 30966 - DNA, 74 bp, Homo sapiens
taattccatttcccttttggcagcctgtatgtgtcatcatttattacaaccatgattttcttttagggcttgaa

SEQ ID NO: 30967 - DNA, 72 bp, Homo sapiens
tttcccttttggcagcctgtatgtgtcatcatttattacaaccatgattttcttttagggcttgaacttatt

SEQ ID NO: 30968 - DNA, 77 bp, Homo sapiens
tttggcagcctgtatgtgtcatcatttattacaaccatgattttcttttagggcttgaacttatttataatagctgc

SEQ ID NO: 30969 - DNA, 74 bp, Homo sapiens
gtatgtgtcatcatttattacaaccatgattttcttttagggcttgaacttatttataatagctgctgtaaagt

SEQ ID NO: 30970 - DNA, 68 bp, Homo sapiens
acaaccatgattttcttttagggcttgaacttatttataatagctgctgtaaagtttttctgtttgtt

SEQ ID NO: 30971 - DNA, 75 bp, Homo sapiens
tgaacttatttataatagctgctgtaaagtttttctgtttgtttgtgttaactccaacatctgcattatctcagg

SEQ ID NO: 30972 - DNA, 75 bp, Homo sapiens
ttataatagctgctgtaaagtttttctgtttgtttgtgttaactccaacatctgcattatctcaggttctgtttc

SEQ ID NO: 30973 - DNA, 75 bp, Homo sapiens
tagctgctgtaaagtttttctgtttgtttgtgttaactccaacatctgcattatctcaggttctgtttcttttga

SEQ ID NO: 30974 - DNA, 71 bp, Homo sapiens
aagtttttctgtttgtttgtgttaactccaacatctgcattatctcaggttctgtttcttttgatggcctt

SEQ ID NO: 30975 - DNA, 75 bp, Homo sapiens
tttgtttgtgttaactccaacatctgcattatctcaggttctgtttcttttgatggcctttcctccttattatga

SEQ ID NO: 30976 - DNA, 78 bp, Homo sapiens
taactccaacatctgcattatctcaggttctgtttcttttgatggcctttcctccttattatgagtcacatgtttgta

SEQ ID NO: 30977 - DNA, 76 bp, Homo sapiens
aacatctgcattatctcaggttctgtttcttttgatggcctttcctccttattatgagtcacatgtttgtatttct

SEQ ID NO: 30978 - DNA, 76 bp, Homo sapiens
tcaggttctgtttcttttgatggcctttcctccttattatgagtcacatgtttgtatttcttctcatatctagaaa

SEQ ID NO: 30979 - DNA, 82 bp, Homo sapiens
tttgatggcctttcctccttattatgagtcacatgtttgtatttcttctcatatctagaaaattgtgactggatgctgagca

SEQ ID NO: 30980 - DNA, 83 bp, Homo sapiens
tttcctccttattatgagtcacatgtttgtatttcttctcatatctagaaaattgtgactggatgctgagcacattgagacac

SEQ ID NO: 30981 - DNA, 85 bp, Homo sapiens
ttattatgagtcacatgtttgtatttcttctcatatctagaaaattgtgactggatgctgagcacattgagacactggattgtgt

SEQ ID NO: 30982 - DNA, 86 bp, Homo sapiens
ttatgagtcacatgtttgtatttcttctcatatctagaaaattgtgactggatgctgagcacattgagacactggattgtgttcta

SEQ ID NO: 30983 - DNA, 82 bp, Homo sapiens
atatctagaaaattgtgactggatgctgagcacattgagacactggattgtgttctattccactgaagagtattgacttttg

SEQ ID NO: 30984 - DNA, 82 bp, Homo sapiens
tatctagaaaattgtgactggatgctgagcacattgagacactggattgtgttctattccactgaagagtattgacttttgt

SEQ ID NO: 30985 - DNA, 82 bp, Homo sapiens
tagaaaattgtgactggatgctgagcacattgagacactggattgtgttctattccactgaagagtattgacttttgttcta

SEQ ID NO: 30986 - DNA, 81 bp, Homo sapiens
aattgtgactggatgctgagcacattgagacactggattgtgttctattccactgaagagtattgacttttgttctaggag

SEQ ID NO: 30987 - DNA, 82 bp, Homo sapiens
tggatgctgagcacattgagacactggattgtgttctattccactgaagagtattgacttttgttctaggaggcaatcaaat

SEQ ID NO: 30988 - DNA, 78 bp, Homo sapiens
agcacattgagacactggattgtgttctattccactgaagagtattgacttttgttctaggaggcaatcaaattactg

SEQ ID NO: 30989 - DNA, 74 bp, Homo sapiens
attgtgttctattccactgaagagtattgacttttgttctaggaggcaatcaaattactggccagttactttga

SEQ ID NO: 30990 - DNA, 75 bp, Homo sapiens
tattccactgaagagtattgacttttgttctaggaggcaatcaaattactggccagttactttgaatctgtagag

SEQ ID NO: 30991 - DNA, 74 bp, Homo sapiens
tattgacttttgttctaggaggcaatcaaattactggccagttactttgaatctgtagaggcatggtcttacgt

SEQ ID NO: 30992 - DNA, 72 bp, Homo sapiens
tagaggcatggtcttacgtttcattaggtccaatctgtttctattttgccttttgcccttagcagatcccct

SEQ ID NO: 30993 - DNA, 70 bp, Homo sapiens
gtcttacgtttcattaggtccaatctgtttctattttgccttttgcccttagcagatccccttgtcctag

SEQ ID NO: 30994 - DNA, 67 bp, Homo sapiens
attaggtccaatctgtttctattttgccttttgcccttagcagatccccttgtcctagggtttttac

SEQ ID NO: 30995 - DNA, 68 bp, Homo sapiens
aatctgtttctattttgccttttgcccttagcagatccccttgtcctagggtttttactcctacattg

SEQ ID NO: 30996 - DNA, 69 bp, Homo sapiens
attttgccttttgcccttagcagatccccttgtcctagggtttttactcctacattgtggccattctgg

SEQ ID NO: 30997 - DNA, 69 bp, Homo sapiens
ttttgcccttagcagatccccttgtcctagggtttttactcctacattgtggccattctggggtaacaa

SEQ ID NO: 30998 - DNA, 68 bp, Homo sapiens
atccccttgtcctagggtttttactcctacattgtggccattctggggtaacaaacagcctgaagtgt

SEQ ID NO: 30999 - DNA, 70 bp, Homo sapiens
cttgtcctagggtttttactcctacattgtggccattctggggtaacaaacagcctgaagtgtttacaga

SEQ ID NO: 31000 - DNA, 72 bp, Homo sapiens
tttttactcctacattgtggccattctggggtaacaaacagcctgaagtgtttacagagcctttgaacttga

SEQ ID NO: 31001 - DNA, 76 bp, Homo sapiens
tacattgtggccattctggggtaacaaacagcctgaagtgtttacagagcctttgaacttgatgagactcaaactc

SEQ ID NO: 31002 - DNA, 81 bp, Homo sapiens
tgaagtgtttacagagcctttgaacttgatgagactcaaactctgaactctgtctccactgcagtagccagtagctgaggt

SEQ ID NO: 31003 - DNA, 80 bp, Homo sapiens
tgtttacagagcctttgaacttgatgagactcaaactctgaactctgtctccactgcagtagccagtagctgaggtttcc

SEQ ID NO: 31004 - DNA, 79 bp, Homo sapiens
tttgaacttgatgagactcaaactctgaactctgtctccactgcagtagccagtagctgaggtttccgcttagatcttt

SEQ ID NO: 31005 - DNA, 80 bp, Homo sapiens
atgagactcaaactctgaactctgtctccactgcagtagccagtagctgaggtttccgcttagatcttttgattatacaa

SEQ ID NO: 31006 - DNA, 78 bp, Homo sapiens
ctctgaactctgtctccactgcagtagccagtagctgaggtttccgcttagatcttttgattatacaactgttgcttt

SEQ ID NO: 31007 - DNA, 79 bp, Homo sapiens
tgtctccactgcagtagccagtagctgaggtttccgcttagatcttttgattatacaactgttgcttttcactgaactc

SEQ ID NO: 31008 - DNA, 76 bp, Homo sapiens
actgcagtagccagtagctgaggtttccgcttagatcttttgattatacaactgttgcttttcactgaactccaaa

SEQ ID NO: 31009 - DNA, 72 bp, Homo sapiens
agtagctgaggtttccgcttagatcttttgattatacaactgttgcttttcactgaactccaaagggtctcc

SEQ ID NO: 31010 - DNA, 71 bp, Homo sapiens
aggtttccgcttagatcttttgattatacaactgttgcttttcactgaactccaaagggtctccctggcac

SEQ ID NO: 31011 - DNA, 73 bp, Homo sapiens
ttagatcttttgattatacaactgttgcttttcactgaactccaaagggtctccctggcacttgggctattcg

SEQ ID NO: 31012 - DNA, 74 bp, Homo sapiens
tttgattatacaactgttgcttttcactgaactccaaagggtctccctggcacttgggctattcggtaatcaga

SEQ ID NO: 31013 - DNA, 71 bp, Homo sapiens
aactgttgcttttcactgaactccaaagggtctccctggcacttgggctattcggtaatcagacaagaatt

SEQ ID NO: 31014 - DNA, 71 bp, Homo sapiens
actgaactccaaagggtctccctggcacttgggctattcggtaatcagacaagaatttgaggaagctttta

SEQ ID NO: 31015 - DNA, 76 bp, Homo sapiens
tctccctggcacttgggctattcggtaatcagacaagaatttgaggaagcttttacatgccaatttaatcactctc

SEQ ID NO: 31016 - DNA, 73 bp, Homo sapiens
acttgggctattcggtaatcagacaagaatttgaggaagcttttacatgccaatttaatcactctcccctctg

SEQ ID NO: 31017 - DNA, 74 bp, Homo sapiens
attcggtaatcagacaagaatttgaggaagcttttacatgccaatttaatcactctcccctctgtggctcccac

SEQ ID NO: 31018 - DNA, 73 bp, Homo sapiens
aagaatttgaggaagcttttacatgccaatttaatcactctcccctctgtggctcccactgtatgggatttgt

SEQ ID NO: 31019 - DNA, 73 bp, Homo sapiens
aggaagcttttacatgccaatttaatcactctcccctctgtggctcccactgtatgggatttgtttcttcaat

SEQ ID NO: 31020 - DNA, 75 bp, Homo sapiens
tttacatgccaatttaatcactctcccctctgtggctcccactgtatgggatttgtttcttcaattttctgccat

SEQ ID NO: 31021 - DNA, 78 bp, Homo sapiens
tcccctctgtggctcccactgtatgggatttgtttcttcaattttctgccattctggcagctacctactctatctcaa

SEQ ID NO: 31022 - DNA, 77 bp, Homo sapiens
tgtatgggatttgtttcttcaattttctgccattctggcagctacctactctatctcaagcaactttctgtttatct

SEQ ID NO: 31023 - DNA, 75 bp, Homo sapiens
atttgtttcttcaattttctgccattctggcagctacctactctatctcaagcaactttctgtttatcttctaac

SEQ ID NO: 31024 - DNA, 78 bp, Homo sapiens
ccattctggcagctacctactctatctcaagcaactttctgtttatcttctaactgcccctgtgctgcacggactggg

SEQ ID NO: 31025 - DNA, 80 bp, Homo sapiens
tactctatctcaagcaactttctgtttatcttctaactgcccctgtgctgcacggactggggaggaacatgcagcatagg

SEQ ID NO: 31026 - DNA, 77 bp, Homo sapiens
aactttctgtttatcttctaactgcccctgtgctgcacggactggggaggaacatgcagcatagggcagttaggaga

SEQ ID NO: 31027 - DNA, 82 bp, Homo sapiens
tgtttatcttctaactgcccctgtgctgcacggactggggaggaacatgcagcatagggcagttaggagatcaacagaatca

SEQ ID NO: 31028 - DNA, 79 bp, Homo sapiens
taactgcccctgtgctgcacggactggggaggaacatgcagcatagggcagttaggagatcaacagaatcagggggaaa

SEQ ID NO: 31029 - DNA, 79 bp, Homo sapiens
tgctgcacggactggggaggaacatgcagcatagggcagttaggagatcaacagaatcagggggaaagctgtttaaata

SEQ ID NO: 31030 - DNA, 75 bp, Homo sapiens
actggggaggaacatgcagcatagggcagttaggagatcaacagaatcagggggaaagctgtttaaatatggacc

SEQ ID NO: 31031 - DNA, 79 bp, Homo sapiens
aacatgcagcatagggcagttaggagatcaacagaatcagggggaaagctgtttaaatatggacctcactctgtgcagt

SEQ ID NO: 31032 - DNA, 74 bp, Homo sapiens
atagggcagttaggagatcaacagaatcagggggaaagctgtttaaatatggacctcactctgtgcagttccct

SEQ ID NO: 31033 - DNA, 74 bp, Homo sapiens
agttaggagatcaacagaatcagggggaaagctgtttaaatatggacctcactctgtgcagttcccttctttca

SEQ ID NO: 31034 - DNA, 74 bp, Homo sapiens
atcaacagaatcagggggaaagctgtttaaatatggacctcactctgtgcagttcccttctttcaagagtgaaa

SEQ ID NO: 31035 - DNA, 71 bp, Homo sapiens
aagctgtttaaatatggacctcactctgtgcagttcccttctttcaagagtgaaatcctctccggtttttg

SEQ ID NO: 31036 - DNA, 67 bp, Homo sapiens
ttcccttctttcaagagtgaaatcctctccggtttttgtctgcccttgataccttcaaatagttttt

SEQ ID NO: 31037 - DNA, 69 bp, Homo sapiens
ctttcaagagtgaaatcctctccggtttttgtctgcccttgataccttcaaatagttttttcaatgtat

SEQ ID NO: 31038 - DNA, 69 bp, Homo sapiens
tgaaatcctctccggtttttgtctgcccttgataccttcaaatagttttttcaatgtatttaatatggt

SEQ ID NO: 31039 - DNA, 69 bp, Homo sapiens
gtctgcccttgataccttcaaatagttttttcaatgtatttaatatggtttctttcatttctacccgta

SEQ ID NO: 31040 - DNA, 66 bp, Homo sapiens
ttttttcaatgtatttaatatggtttctttcatttctacccgtaagaaggttagtttggtacacgc

SEQ ID NO: 31041 - DNA, 69 bp, Homo sapiens
atgtatttaatatggtttctttcatttctacccgtaagaaggttagtttggtacacgccactctgctat

SEQ ID NO: 31042 - DNA, 70 bp, Homo sapiens
taatatggtttctttcatttctacccgtaagaaggttagtttggtacacgccactctgctattgttgaac

SEQ ID NO: 31043 - DNA, 69 bp, Homo sapiens
cgtaagaaggttagtttggtacacgccactctgctattgttgaactgaaattgcccctttccttgttta

SEQ ID NO: 31044 - DNA, 69 bp, Homo sapiens
aaggttagtttggtacacgccactctgctattgttgaactgaaattgcccctttccttgtttagataag

SEQ ID NO: 31045 - DNA, 76 bp, Homo sapiens
gtacacgccactctgctattgttgaactgaaattgcccctttccttgtttagataagtggtggcagatcataaata

SEQ ID NO: 31046 - DNA, 75 bp, Homo sapiens
actctgctattgttgaactgaaattgcccctttccttgtttagataagtggtggcagatcataaatacttcatct

SEQ ID NO: 31047 - DNA, 73 bp, Homo sapiens
attgttgaactgaaattgcccctttccttgtttagataagtggtggcagatcataaatacttcatcttgcttt

SEQ ID NO: 31048 - DNA, 79 bp, Homo sapiens
tttccttgtttagataagtggtggcagatcataaatacttcatcttgcttttcgtatctaaccatagattctgatgcta

SEQ ID NO: 31049 - DNA, 79 bp, Homo sapiens
ataagtggtggcagatcataaatacttcatcttgcttttcgtatctaaccatagattctgatgctagtccttagcaaaa

SEQ ID NO: 31050 - DNA, 82 bp, Homo sapiens
gtggcagatcataaatacttcatcttgcttttcgtatctaaccatagattctgatgctagtccttagcaaaatatcaagata

SEQ ID NO: 31051 - DNA, 78 bp, Homo sapiens
aaatacttcatcttgcttttcgtatctaaccatagattctgatgctagtccttagcaaaatatcaagatactcctcat

SEQ ID NO: 31052 - DNA, 76 bp, Homo sapiens
atcttgcttttcgtatctaaccatagattctgatgctagtccttagcaaaatatcaagatactcctcattcctttt

SEQ ID NO: 31053 - DNA, 71 bp, Homo sapiens
ctgatgctagtccttagcaaaatatcaagatactcctcattcctttttacttttacgtagtactccatttt

SEQ ID NO: 31054 - DNA, 69 bp, Homo sapiens
gtccttagcaaaatatcaagatactcctcattcctttttacttttacgtagtactccattttttagaga

SEQ ID NO: 31055 - DNA, 70 bp, Homo sapiens
aaatatcaagatactcctcattcctttttacttttacgtagtactccattttttagagatatatactata

SEQ ID NO: 31056 - DNA, 69 bp, Homo sapiens
gatactcctcattcctttttacttttacgtagtactccattttttagagatatatactataatttatta

SEQ ID NO: 31057 - DNA, 67 bp, Homo sapiens
cctttttacttttacgtagtactccattttttagagatatatactataatttattaaatcagtcttc

SEQ ID NO: 31058 - DNA, 76 bp, Homo sapiens
tacgtagtactccattttttagagatatatactataatttattaaatcagtcttctattgatagctattccaatga

SEQ ID NO: 31059 - DNA, 78 bp, Homo sapiens
gtactccattttttagagatatatactataatttattaaatcagtcttctattgatagctattccaatgatgaggcac

SEQ ID NO: 31060 - DNA, 81 bp, Homo sapiens
agagatatatactataatttattaaatcagtcttctattgatagctattccaatgatgaggcacttgaatttatggcagtg

SEQ ID NO: 31061 - DNA, 78 bp, Homo sapiens
actataatttattaaatcagtcttctattgatagctattccaatgatgaggcacttgaatttatggcagtgggttata

SEQ ID NO: 31062 - DNA, 80 bp, Homo sapiens
tttattaaatcagtcttctattgatagctattccaatgatgaggcacttgaatttatggcagtgggttatacagtagtca

SEQ ID NO: 31063 - DNA, 80 bp, Homo sapiens
atcagtcttctattgatagctattccaatgatgaggcacttgaatttatggcagtgggttatacagtagtcacaaaataa

SEQ ID NO: 31064 - DNA, 79 bp, Homo sapiens
tattgatagctattccaatgatgaggcacttgaatttatggcagtgggttatacagtagtcacaaaataagccctttgc

SEQ ID NO: 31065 - DNA, 75 bp, Homo sapiens
gcacttgaatttatggcagtgggttatacagtagtcacaaaataagccctttgccttcaaggagatgatctttta

SEQ ID NO: 31066 - DNA, 72 bp, Homo sapiens
aatttatggcagtgggttatacagtagtcacaaaataagccctttgccttcaaggagatgatcttttaatat

SEQ ID NO: 31067 - DNA, 73 bp, Homo sapiens
cagtagtcacaaaataagccctttgccttcaaggagatgatcttttaatattgtgaacaatatttttgttcag

SEQ ID NO: 31068 - DNA, 79 bp, Homo sapiens
aataagccctttgccttcaaggagatgatcttttaatattgtgaacaatatttttgttcagtgatcatatgatagatga

SEQ ID NO: 31069 - DNA, 81 bp, Homo sapiens
gccctttgccttcaaggagatgatcttttaatattgtgaacaatatttttgttcagtgatcatatgatagatgagatctag

SEQ ID NO: 31070 - DNA, 82 bp, Homo sapiens
ttcaaggagatgatcttttaatattgtgaacaatatttttgttcagtgatcatatgatagatgagatctagtagaactttca

SEQ ID NO: 31071 - DNA, 78 bp, Homo sapiens
gatcttttaatattgtgaacaatatttttgttcagtgatcatatgatagatgagatctagtagaactttcaaaaaaga

SEQ ID NO: 31072 - DNA, 64 bp, Homo sapiens
caaaaaagaaaaaagtccgcattttcttcttaaccctgtgtaaaacttaaaaccactatgtctg

SEQ ID NO: 31073 - DNA, 66 bp, Homo sapiens
aaagaaaaaagtccgcattttcttcttaaccctgtgtaaaacttaaaaccactatgtctgtctctg

SEQ ID NO: 31074 - DNA, 68 bp, Homo sapiens
aaagtccgcattttcttcttaaccctgtgtaaaacttaaaaccactatgtctgtctctgtttactgac

SEQ ID NO: 31075 - DNA, 70 bp, Homo sapiens
gcattttcttcttaaccctgtgtaaaacttaaaaccactatgtctgtctctgtttactgaccctatcaaa

SEQ ID NO: 31076 - DNA, 69 bp, Homo sapiens
tcttcttaaccctgtgtaaaacttaaaaccactatgtctgtctctgtttactgaccctatcaaattacg

SEQ ID NO: 31077 - DNA, 70 bp, Homo sapiens
taaccctgtgtaaaacttaaaaccactatgtctgtctctgtttactgaccctatcaaattacggaattca

SEQ ID NO: 31078 - DNA, 70 bp, Homo sapiens
gtaaaacttaaaaccactatgtctgtctctgtttactgaccctatcaaattacggaattcactttatgtg

SEQ ID NO: 31079 - DNA, 76 bp, Homo sapiens
aaccactatgtctgtctctgtttactgaccctatcaaattacggaattcactttatgtgttcttcatatatgtata

SEQ ID NO: 31080 - DNA, 75 bp, Homo sapiens
actgaccctatcaaattacggaattcactttatgtgttcttcatatatgtatattatcttaatggacaaaggtga

SEQ ID NO: 31081 - DNA, 77 bp, Homo sapiens
ctatcaaattacggaattcactttatgtgttcttcatatatgtatattatcttaatggacaaaggtgatatgtttga

SEQ ID NO: 31082 - DNA, 76 bp, Homo sapiens
cggaattcactttatgtgttcttcatatatgtatattatcttaatggacaaaggtgatatgtttgacttgctttac

SEQ ID NO: 31083 - DNA, 77 bp, Homo sapiens
catatatgtatattatcttaatggacaaaggtgatatgtttgacttgctttacttagaactgtggacaattctttga

SEQ ID NO: 31084 - DNA, 74 bp, Homo sapiens
attatcttaatggacaaaggtgatatgtttgacttgctttacttagaactgtggacaattctttgaccagaaca

SEQ ID NO: 31085 - DNA, 74 bp, Homo sapiens
ttaatggacaaaggtgatatgtttgacttgctttacttagaactgtggacaattctttgaccagaacaaggaca

SEQ ID NO: 31086 - DNA, 79 bp, Homo sapiens
tgatatgtttgacttgctttacttagaactgtggacaattctttgaccagaacaaggacagcaagcatgcacatccttt

SEQ ID NO: 31087 - DNA, 78 bp, Homo sapiens
tttacttagaactgtggacaattctttgaccagaacaaggacagcaagcatgcacatccttttggtgagactgccctg

SEQ ID NO: 31088 - DNA, 79 bp, Homo sapiens
aactgtggacaattctttgaccagaacaaggacagcaagcatgcacatccttttggtgagactgccctgggaacagatg

SEQ ID NO: 31089 - DNA, 81 bp, Homo sapiens
aattctttgaccagaacaaggacagcaagcatgcacatccttttggtgagactgccctgggaacagatgtggccagagaga

SEQ ID NO: 31090 - DNA, 82 bp, Homo sapiens
agaacaaggacagcaagcatgcacatccttttggtgagactgccctgggaacagatgtggccagagagagttcattgagttg

SEQ ID NO: 31091 - DNA, 83 bp, Homo sapiens
ggacagcaagcatgcacatccttttggtgagactgccctgggaacagatgtggccagagagagttcattgagttgggtgtgga

SEQ ID NO: 31092 - DNA, 78 bp, Homo sapiens
acatccttttggtgagactgccctgggaacagatgtggccagagagagttcattgagttgggtgtggagccgtgtaga

SEQ ID NO: 31093 - DNA, 77 bp, Homo sapiens
ttttggtgagactgccctgggaacagatgtggccagagagagttcattgagttgggtgtggagccgtgtagaaatcc

SEQ ID NO: 31094 - DNA, 74 bp, Homo sapiens
ccctgggaacagatgtggccagagagagttcattgagttgggtgtggagccgtgtagaaatccccatttttatg

SEQ ID NO: 31095 - DNA, 75 bp, Homo sapiens
aacagatgtggccagagagagttcattgagttgggtgtggagccgtgtagaaatccccatttttatgggcagatt

SEQ ID NO: 31096 - DNA, 74 bp, Homo sapiens
ccagagagagttcattgagttgggtgtggagccgtgtagaaatccccatttttatgggcagatttctgtccttc

SEQ ID NO: 31097 - DNA, 74 bp, Homo sapiens
agccgtgtagaaatccccatttttatgggcagatttctgtccttctgcaccttagcagggacttctggagccag

SEQ ID NO: 31098 - DNA, 75 bp, Homo sapiens
agaaatccccatttttatgggcagatttctgtccttctgcaccttagcagggacttctggagccaggtgtgtgcc

SEQ ID NO: 31099 - DNA, 75 bp, Homo sapiens
atttttatgggcagatttctgtccttctgcaccttagcagggacttctggagccaggtgtgtgccggtccattcc

SEQ ID NO: 31100 - DNA, 74 bp, Homo sapiens
agatttctgtccttctgcaccttagcagggacttctggagccaggtgtgtgccggtccattccccgacccagcc

SEQ ID NO: 31101 - DNA, 79 bp, Homo sapiens
ttctggagccaggtgtgtgccggtccattccccgacccagccctcagagctacttctcttgctgagctgtgtacacttc

SEQ ID NO: 31102 - DNA, 79 bp, Homo sapiens
aggtgtgtgccggtccattccccgacccagccctcagagctacttctcttgctgagctgtgtacacttctgatgttatc

SEQ ID NO: 31103 - DNA, 83 bp, Homo sapiens
ggtccattccccgacccagccctcagagctacttctcttgctgagctgtgtacacttctgatgttatcctcgctcacatgtca

SEQ ID NO: 31104 - DNA, 85 bp, Homo sapiens
ccgacccagccctcagagctacttctcttgctgagctgtgtacacttctgatgttatcctcgctcacatgtcaccagcttgcaac

SEQ ID NO: 31105 - DNA, 86 bp, Homo sapiens
agccctcagagctacttctcttgctgagctgtgtacacttctgatgttatcctcgctcacatgtcaccagcttgcaactttgagtg

SEQ ID NO: 31106 - DNA, 86 bp, Homo sapiens
tacttctcttgctgagctgtgtacacttctgatgttatcctcgctcacatgtcaccagcttgcaactttgagtgggatgagttaga

SEQ ID NO: 31107 - DNA, 86 bp, Homo sapiens
ttgctgagctgtgtacacttctgatgttatcctcgctcacatgtcaccagcttgcaactttgagtgggatgagttagaggtgtcca

SEQ ID NO: 31108 - DNA, 84 bp, Homo sapiens
tgtgtacacttctgatgttatcctcgctcacatgtcaccagcttgcaactttgagtgggatgagttagaggtgtccatccatcc

SEQ ID NO: 31109 - DNA, 84 bp, Homo sapiens
ttctgatgttatcctcgctcacatgtcaccagcttgcaactttgagtgggatgagttagaggtgtccatccatcctgcttcttc

SEQ ID NO: 31110 - DNA, 80 bp, Homo sapiens
atcctcgctcacatgtcaccagcttgcaactttgagtgggatgagttagaggtgtccatccatcctgcttcttccttact

SEQ ID NO: 31111 - DNA, 81 bp, Homo sapiens
tttgagtgggatgagttagaggtgtccatccatcctgcttcttccttacttctgcctgtctctgagcactcaggagcaaag

SEQ ID NO: 31112 - DNA, 79 bp, Homo sapiens
agttagaggtgtccatccatcctgcttcttccttacttctgcctgtctctgagcactcaggagcaaagtgctcccaaaa

SEQ ID NO: 31113 - DNA, 79 bp, Homo sapiens
ttacttctgcctgtctctgagcactcaggagcaaagtgctcccaaaagttctttcaagttcagtaagattgtcattctg

SEQ ID NO: 31114 - DNA, 77 bp, Homo sapiens
ctgtctctgagcactcaggagcaaagtgctcccaaaagttctttcaagttcagtaagattgtcattctgtaaattgg

SEQ ID NO: 31115 - DNA, 74 bp, Homo sapiens
agcactcaggagcaaagtgctcccaaaagttctttcaagttcagtaagattgtcattctgtaaattggggccac

SEQ ID NO: 31116 - DNA, 76 bp, Homo sapiens
agcaaagtgctcccaaaagttctttcaagttcagtaagattgtcattctgtaaattggggccactgtgcatgctta

SEQ ID NO: 31117 - DNA, 75 bp, Homo sapiens
tcccaaaagttctttcaagttcagtaagattgtcattctgtaaattggggccactgtgcatgcttagagcaggtt

SEQ ID NO: 31118 - DNA, 75 bp, Homo sapiens
aagttctttcaagttcagtaagattgtcattctgtaaattggggccactgtgcatgcttagagcaggttttggtg

SEQ ID NO: 31119 - DNA, 79 bp, Homo sapiens
ttcagtaagattgtcattctgtaaattggggccactgtgcatgcttagagcaggttttggtgtgactttgtgtcatagt

SEQ ID NO: 31120 - DNA, 78 bp, Homo sapiens
attgtcattctgtaaattggggccactgtgcatgcttagagcaggttttggtgtgactttgtgtcatagtttctatat

SEQ ID NO: 31121 - DNA, 81 bp, Homo sapiens
taaattggggccactgtgcatgcttagagcaggttttggtgtgactttgtgtcatagtttctatattgcagtgacagatgt

SEQ ID NO: 31122 - DNA, 86 bp, Homo sapiens
cactgtgcatgcttagagcaggttttggtgtgactttgtgtcatagtttctatattgcagtgacagatgttgtcatgagtacacag

SEQ ID NO: 31123 - DNA, 83 bp, Homo sapiens
tgcttagagcaggttttggtgtgactttgtgtcatagtttctatattgcagtgacagatgttgtcatgagtacacaggttcta

SEQ ID NO: 31124 - DNA, 81 bp, Homo sapiens
aggttttggtgtgactttgtgtcatagtttctatattgcagtgacagatgttgtcatgagtacacaggttctagaatctga

SEQ ID NO: 31125 - DNA, 84 bp, Homo sapiens
tgactttgtgtcatagtttctatattgcagtgacagatgttgtcatgagtacacaggttctagaatctgactggagtctggttc

SEQ ID NO: 31126 - DNA, 84 bp, Homo sapiens
ttgtgtcatagtttctatattgcagtgacagatgttgtcatgagtacacaggttctagaatctgactggagtctggttctataa

SEQ ID NO: 31127 - DNA, 82 bp, Homo sapiens
tttctatattgcagtgacagatgttgtcatgagtacacaggttctagaatctgactggagtctggttctataatctcctaac

SEQ ID NO: 31128 - DNA, 82 bp, Homo sapiens
agtgacagatgttgtcatgagtacacaggttctagaatctgactggagtctggttctataatctcctaactggctgtgtgac

SEQ ID NO: 31129 - DNA, 79 bp, Homo sapiens
atgttgtcatgagtacacaggttctagaatctgactggagtctggttctataatctcctaactggctgtgtgaccttgg

SEQ ID NO: 31130 - DNA, 68 bp, Homo sapiens
gttatttaacttctttacgcctcagttttatcatctgtaaaataggggtactagtggtatctcttggt

SEQ ID NO: 31131 - DNA, 70 bp, Homo sapiens
taacttctttacgcctcagttttatcatctgtaaaataggggtactagtggtatctcttggttaggagtg

SEQ ID NO: 31132 - DNA, 75 bp, Homo sapiens
tcagttttatcatctgtaaaataggggtactagtggtatctcttggttaggagtgtcatgagtgtcataaggttg

SEQ ID NO: 31133 - DNA, 73 bp, Homo sapiens
tttatcatctgtaaaataggggtactagtggtatctcttggttaggagtgtcatgagtgtcataaggttgggg

SEQ ID NO: 31134 - DNA, 68 bp, Homo sapiens
taaaataggggtactagtggtatctcttggttaggagtgtcatgagtgtcataaggttgggggttttt

SEQ ID NO: 31135 - DNA, 67 bp, Homo sapiens
ggtactagtggtatctcttggttaggagtgtcatgagtgtcataaggttgggggtttttttcttttt

SEQ ID NO: 31136 - DNA, 75 bp, Homo sapiens
cgcacccagccaggagtgctataagttttaaacagtgaaatccagcatctaagatatagttattactaataatta

SEQ ID NO: 31137 - DNA, 74 bp, Homo sapiens
ccagccaggagtgctataagttttaaacagtgaaatccagcatctaagatatagttattactaataattattac

SEQ ID NO: 31138 - DNA, 73 bp, Homo sapiens
gtgctataagttttaaacagtgaaatccagcatctaagatatagttattactaataattattactaatattat

SEQ ID NO: 31139 - DNA, 75 bp, Homo sapiens
aacagtgaaatccagcatctaagatatagttattactaataattattactaatattattaacattatcactaata

SEQ ID NO: 31140 - DNA, 75 bp, Homo sapiens
tccagcatctaagatatagttattactaataattattactaatattattaacattatcactaatactaataactc

SEQ ID NO: 31141 - DNA, 73 bp, Homo sapiens
catctaagatatagttattactaataattattactaatattattaacattatcactaatactaataactccta

SEQ ID NO: 31142 - DNA, 74 bp, Homo sapiens
tattactaataattattactaatattattaacattatcactaatactaataactcctagagttagagaatatga

SEQ ID NO: 31143 - DNA, 72 bp, Homo sapiens
ctaataattattactaatattattaacattatcactaatactaataactcctagagttagagaatatgaaaa

SEQ ID NO: 31144 - DNA, 72 bp, Homo sapiens
actaatattattaacattatcactaatactaataactcctagagttagagaatatgaaaattttagttgtga

SEQ ID NO: 31145 - DNA, 73 bp, Homo sapiens
taacattatcactaatactaataactcctagagttagagaatatgaaaattttagttgtgaaaatgtaagtca

SEQ ID NO: 31146 - DNA, 73 bp, Homo sapiens
ctaatactaataactcctagagttagagaatatgaaaattttagttgtgaaaatgtaagtcaatgaaagcatc

SEQ ID NO: 31147 - DNA, 75 bp, Homo sapiens
ctaataactcctagagttagagaatatgaaaattttagttgtgaaaatgtaagtcaatgaaagcatctagagaga

SEQ ID NO: 31148 - DNA, 74 bp, Homo sapiens
ctagagttagagaatatgaaaattttagttgtgaaaatgtaagtcaatgaaagcatctagagagaaacctgtaa

SEQ ID NO: 31149 - DNA, 71 bp, Homo sapiens
atgaaaattttagttgtgaaaatgtaagtcaatgaaagcatctagagagaaacctgtaagaacccttccac

SEQ ID NO: 31150 - DNA, 72 bp, Homo sapiens
ttttagttgtgaaaatgtaagtcaatgaaagcatctagagagaaacctgtaagaacccttccacctctgaaa

SEQ ID NO: 31151 - DNA, 72 bp, Homo sapiens
agtcaatgaaagcatctagagagaaacctgtaagaacccttccacctctgaaagcgacgtagaagagttaaa

SEQ ID NO: 31152 - DNA, 71 bp, Homo sapiens
atctagagagaaacctgtaagaacccttccacctctgaaagcgacgtagaagagttaaatgatggccaaaa

SEQ ID NO: 31153 - DNA, 69 bp, Homo sapiens
agaaacctgtaagaacccttccacctctgaaagcgacgtagaagagttaaatgatggccaaaagatggg

SEQ ID NO: 31154 - DNA, 71 bp, Homo sapiens
taagaacccttccacctctgaaagcgacgtagaagagttaaatgatggccaaaagatggggcatggaagtt

SEQ ID NO: 31155 - DNA, 73 bp, Homo sapiens
ttccacctctgaaagcgacgtagaagagttaaatgatggccaaaagatggggcatggaagtttggcttccttg

SEQ ID NO: 31156 - DNA, 73 bp, Homo sapiens
aaagcgacgtagaagagttaaatgatggccaaaagatggggcatggaagtttggcttccttgtgcctacaggc

SEQ ID NO: 31157 - DNA, 75 bp, Homo sapiens
gagttaaatgatggccaaaagatggggcatggaagtttggcttccttgtgcctacaggccacaggtaggtcatta

SEQ ID NO: 31158 - DNA, 73 bp, Homo sapiens
aaatgatggccaaaagatggggcatggaagtttggcttccttgtgcctacaggccacaggtaggtcattaacg

SEQ ID NO: 31159 - DNA, 73 bp, Homo sapiens
aaaagatggggcatggaagtttggcttccttgtgcctacaggccacaggtaggtcattaacggaatgcttgta

SEQ ID NO: 31160 - DNA, 73 bp, Homo sapiens
tggaagtttggcttccttgtgcctacaggccacaggtaggtcattaacggaatgcttgtagacatccttaggt

SEQ ID NO: 31161 - DNA, 76 bp, Homo sapiens
cttccttgtgcctacaggccacaggtaggtcattaacggaatgcttgtagacatccttaggttgtctggcaataga

SEQ ID NO: 31162 - DNA, 75 bp, Homo sapiens
ttgtgcctacaggccacaggtaggtcattaacggaatgcttgtagacatccttaggttgtctggcaatagaaaaa

SEQ ID NO: 31163 - DNA, 75 bp, Homo sapiens
acaggtaggtcattaacggaatgcttgtagacatccttaggttgtctggcaatagaaaaatagtttcaatatgca

SEQ ID NO: 31164 - DNA, 75 bp, Homo sapiens
gtcattaacggaatgcttgtagacatccttaggttgtctggcaatagaaaaatagtttcaatatgcacaccttaa

SEQ ID NO: 31165 - DNA, 74 bp, Homo sapiens
acggaatgcttgtagacatccttaggttgtctggcaatagaaaaatagtttcaatatgcacaccttaaggccag

SEQ ID NO: 31166 - DNA, 69 bp, Homo sapiens
aaaaaaaaatatgcacccttcaaattgttaagcagtgaaaaagacactgcattctggggagaaaggtcc

SEQ ID NO: 31167 - DNA, 71 bp, Homo sapiens
cccttcaaattgttaagcagtgaaaaagacactgcattctggggagaaaggtcctttacacatacctacac

SEQ ID NO: 31168 - DNA, 74 bp, Homo sapiens
tgttaagcagtgaaaaagacactgcattctggggagaaaggtcctttacacatacctacacgctcctccattta

SEQ ID NO: 31169 - DNA, 71 bp, Homo sapiens
aaaaagacactgcattctggggagaaaggtcctttacacatacctacacgctcctccatttaccgcctgta

SEQ ID NO: 31170 - DNA, 71 bp, Homo sapiens
attctggggagaaaggtcctttacacatacctacacgctcctccatttaccgcctgtagagccgcagggag

SEQ ID NO: 31171 - DNA, 71 bp, Homo sapiens
agaaaggtcctttacacatacctacacgctcctccatttaccgcctgtagagccgcagggagtttcctgtc

SEQ ID NO: 31172 - DNA, 75 bp, Homo sapiens
tcctttacacatacctacacgctcctccatttaccgcctgtagagccgcagggagtttcctgtcctgccaactca

SEQ ID NO: 31173 - DNA, 73 bp, Homo sapiens
atacctacacgctcctccatttaccgcctgtagagccgcagggagtttcctgtcctgccaactcactggggtc

SEQ ID NO: 31174 - DNA, 74 bp, Homo sapiens
ctcctccatttaccgcctgtagagccgcagggagtttcctgtcctgccaactcactggggtctgtgattgtctt

SEQ ID NO: 31175 - DNA, 75 bp, Homo sapiens
tttaccgcctgtagagccgcagggagtttcctgtcctgccaactcactggggtctgtgattgtctttccctctgc

SEQ ID NO: 31176 - DNA, 78 bp, Homo sapiens
tagagccgcagggagtttcctgtcctgccaactcactggggtctgtgattgtctttccctctgctccacagataactg

SEQ ID NO: 31177 - DNA, 77 bp, Homo sapiens
agtttcctgtcctgccaactcactggggtctgtgattgtctttccctctgctccacagataactgtgtccagaggac

SEQ ID NO: 31178 - DNA, 77 bp, Homo sapiens
ctgtcctgccaactcactggggtctgtgattgtctttccctctgctccacagataactgtgtccagaggacccccag

SEQ ID NO: 31179 - DNA, 75 bp, Homo sapiens
aactcactggggtctgtgattgtctttccctctgctccacagataactgtgtccagaggacccccaggccatccg

SEQ ID NO: 31180 - DNA, 76 bp, Homo sapiens
actggggtctgtgattgtctttccctctgctccacagataactgtgtccagaggacccccaggccatccgtggata

SEQ ID NO: 31181 - DNA, 79 bp, Homo sapiens
gggtctgtgattgtctttccctctgctccacagataactgtgtccagaggacccccaggccatccgtggataatgtgca

SEQ ID NO: 31182 - DNA, 80 bp, Homo sapiens
tgtgattgtctttccctctgctccacagataactgtgtccagaggacccccaggccatccgtggataatgtgcaccataa

SEQ ID NO: 31183 - DNA, 77 bp, Homo sapiens
attgtctttccctctgctccacagataactgtgtccagaggacccccaggccatccgtggataatgtgcaccataac

SEQ ID NO: 31184 - DNA, 77 bp, Homo sapiens
ttccctctgctccacagataactgtgtccagaggacccccaggccatccgtggataatgtgcaccataaccctccca

SEQ ID NO: 31185 - DNA, 74 bp, Homo sapiens
agataactgtgtccagaggacccccaggccatccgtggataatgtgcaccataaccctcccaccattgaactgt

SEQ ID NO: 31186 - DNA, 75 bp, Homo sapiens
actgtgtccagaggacccccaggccatccgtggataatgtgcaccataaccctcccaccattgaactgttgcacc

SEQ ID NO: 31187 - DNA, 75 bp, Homo sapiens
cccccaggccatccgtggataatgtgcaccataaccctcccaccattgaactgttgcaccgctccaggtcaccta

SEQ ID NO: 31188 - DNA, 78 bp, Homo sapiens
atccgtggataatgtgcaccataaccctcccaccattgaactgttgcaccgctccaggtcacctatcacgacaaatca

SEQ ID NO: 31189 - DNA, 76 bp, Homo sapiens
taatgtgcaccataaccctcccaccattgaactgttgcaccgctccaggtcacctatcacgacaaatcaccggcct

SEQ ID NO: 31190 - DNA, 74 bp, Homo sapiens
ataaccctcccaccattgaactgttgcaccgctccaggtcacctatcacgacaaatcaccggccttctcctgac

SEQ ID NO: 31191 - DNA, 74 bp, Homo sapiens
cctcccaccattgaactgttgcaccgctccaggtcacctatcacgacaaatcaccggccttctcctgaccccga

SEQ ID NO: 31192 - DNA, 75 bp, Homo sapiens
ttgaactgttgcaccgctccaggtcacctatcacgacaaatcaccggccttctcctgaccccgagcagcggcccc

SEQ ID NO: 31193 - DNA, 71 bp, Homo sapiens
accgctccaggtcacctatcacgacaaatcaccggccttctcctgaccccgagcagcggcccctccggtcc

SEQ ID NO: 31194 - DNA, 71 bp, Homo sapiens
tcacctatcacgacaaatcaccggccttctcctgaccccgagcagcggcccctccggtcccccctggacaa

SEQ ID NO: 31195 - DNA, 72 bp, Homo sapiens
tcacgacaaatcaccggccttctcctgaccccgagcagcggcccctccggtcccccctggacaacatgatcc

SEQ ID NO: 31196 - DNA, 72 bp, Homo sapiens
tcaccggccttctcctgaccccgagcagcggcccctccggtcccccctggacaacatgatccgccgcctctc

SEQ ID NO: 31197 - DNA, 75 bp, Homo sapiens
tgaccccgagcagcggcccctccggtcccccctggacaacatgatccgccgcctctccccggctgagagagctca

SEQ ID NO: 31198 - DNA, 73 bp, Homo sapiens
agcagcggcccctccggtcccccctggacaacatgatccgccgcctctccccggctgagagagctcagggacc

SEQ ID NO: 31199 - DNA, 74 bp, Homo sapiens
ctccggtcccccctggacaacatgatccgccgcctctccccggctgagagagctcagggacccaggccgcacca

SEQ ID NO: 31200 - DNA, 76 bp, Homo sapiens
cctggacaacatgatccgccgcctctccccggctgagagagctcagggacccaggccgcaccaggagaacaaccac

SEQ ID NO: 31201 - DNA, 76 bp, Homo sapiens
acaacatgatccgccgcctctccccggctgagagagctcagggacccaggccgcaccaggagaacaaccaccagga

SEQ ID NO: 31202 - DNA, 74 bp, Homo sapiens
gcctctccccggctgagagagctcagggacccaggccgcaccaggagaacaaccaccaggagtcctaccctctg

SEQ ID NO: 31203 - DNA, 76 bp, Homo sapiens
ccggctgagagagctcagggacccaggccgcaccaggagaacaaccaccaggagtcctaccctctgtcagtgtctc

SEQ ID NO: 31204 - DNA, 76 bp, Homo sapiens
gctcagggacccaggccgcaccaggagaacaaccaccaggagtcctaccctctgtcagtgtctcccatggagaata

SEQ ID NO: 31205 - DNA, 76 bp, Homo sapiens
acccaggccgcaccaggagaacaaccaccaggagtcctaccctctgtcagtgtctcccatggagaataatcactgc

SEQ ID NO: 31206 - DNA, 76 bp, Homo sapiens
accaggagaacaaccaccaggagtcctaccctctgtcagtgtctcccatggagaataatcactgcccagcgtcctc

SEQ ID NO: 31207 - DNA, 76 bp, Homo sapiens
agaacaaccaccaggagtcctaccctctgtcagtgtctcccatggagaataatcactgcccagcgtcctccgagtc

SEQ ID NO: 31208 - DNA, 76 bp, Homo sapiens
agtcctaccctctgtcagtgtctcccatggagaataatcactgcccagcgtcctccgagtcccacccgaagccatc

SEQ ID NO: 31209 - DNA, 77 bp, Homo sapiens
taccctctgtcagtgtctcccatggagaataatcactgcccagcgtcctccgagtcccacccgaagccatccagccc

SEQ ID NO: 31210 - DNA, 75 bp, Homo sapiens
agtgtctcccatggagaataatcactgcccagcgtcctccgagtcccacccgaagccatccagcccccggcagga

SEQ ID NO: 31211 - DNA, 77 bp, Homo sapiens
agaataatcactgcccagcgtcctccgagtcccacccgaagccatccagcccccggcaggagagcacacgcgtgatc

SEQ ID NO: 31212 - DNA, 79 bp, Homo sapiens
aatcactgcccagcgtcctccgagtcccacccgaagccatccagcccccggcaggagagcacacgcgtgatccagctga

SEQ ID NO: 31213 - DNA, 84 bp, Homo sapiens
tcccacccgaagccatccagcccccggcaggagagcacacgcgtgatccagctgatgcccagccccatcatgcaccctctgatc

SEQ ID NO: 31214 - DNA, 83 bp, Homo sapiens
aagccatccagcccccggcaggagagcacacgcgtgatccagctgatgcccagccccatcatgcaccctctgatcctgaaccc

SEQ ID NO: 31215 - DNA, 81 bp, Homo sapiens
ccccggcaggagagcacacgcgtgatccagctgatgcccagccccatcatgcaccctctgatcctgaacccccggcactcc

SEQ ID NO: 31216 - DNA, 82 bp, Homo sapiens
agagcacacgcgtgatccagctgatgcccagccccatcatgcaccctctgatcctgaacccccggcactccgtggatttcaa

SEQ ID NO: 31217 - DNA, 80 bp, Homo sapiens
acacgcgtgatccagctgatgcccagccccatcatgcaccctctgatcctgaacccccggcactccgtggatttcaaaca

SEQ ID NO: 31218 - DNA, 79 bp, Homo sapiens
agctgatgcccagccccatcatgcaccctctgatcctgaacccccggcactccgtggatttcaaacagtccaggctctc

SEQ ID NO: 31219 - DNA, 75 bp, Homo sapiens
agccccatcatgcaccctctgatcctgaacccccggcactccgtggatttcaaacagtccaggctctccgaggac

SEQ ID NO: 31220 - DNA, 76 bp, Homo sapiens
atgcaccctctgatcctgaacccccggcactccgtggatttcaaacagtccaggctctccgaggacgggctgcata

SEQ ID NO: 31221 - DNA, 74 bp, Homo sapiens
ctctgatcctgaacccccggcactccgtggatttcaaacagtccaggctctccgaggacgggctgcatagggaa

SEQ ID NO: 31222 - DNA, 70 bp, Homo sapiens
aacccccggcactccgtggatttcaaacagtccaggctctccgaggacgggctgcatagggaagggaagc

SEQ ID NO: 31223 - DNA, 79 bp, Homo sapiens
ggaagcccatcaacctctctcatcgggaagacctggcttacatgaaccacatcatggtctctgtctccccgcctgaaga

SEQ ID NO: 31224 - DNA, 82 bp, Homo sapiens
atcaacctctctcatcgggaagacctggcttacatgaaccacatcatggtctctgtctccccgcctgaagagcacgccatgc

SEQ ID NO: 31225 - DNA, 82 bp, Homo sapiens
tctctcatcgggaagacctggcttacatgaaccacatcatggtctctgtctccccgcctgaagagcacgccatgcccattgg

SEQ ID NO: 31226 - DNA, 81 bp, Homo sapiens
aagacctggcttacatgaaccacatcatggtctctgtctccccgcctgaagagcacgccatgcccattgggagaatagcag

SEQ ID NO: 31227 - DNA, 83 bp, Homo sapiens
ttacatgaaccacatcatggtctctgtctccccgcctgaagagcacgccatgcccattgggagaatagcaggtgagtgagttc

SEQ ID NO: 31228 - DNA, 83 bp, Homo sapiens
tctgtctccccgcctgaagagcacgccatgcccattgggagaatagcaggtgagtgagttcccctctcgccgctccagcatca

SEQ ID NO: 31229 - DNA, 70 bp, Homo sapiens
aacaagaaacattttcaacagtgttttcttgcccttttcctctgtagactgtagactgctttgggattac

SEQ ID NO: 31230 - DNA, 72 bp, Homo sapiens
aaacattttcaacagtgttttcttgcccttttcctctgtagactgtagactgctttgggattacgtctatca

SEQ ID NO: 31231 - DNA, 74 bp, Homo sapiens
aacagtgttttcttgcccttttcctctgtagactgtagactgctttgggattacgtctatcagttgctttctga

SEQ ID NO: 31232 - DNA, 73 bp, Homo sapiens
cccttttcctctgtagactgtagactgctttgggattacgtctatcagttgctttctgacagccggtacgaaa

SEQ ID NO: 31233 - DNA, 76 bp, Homo sapiens
ttcctctgtagactgtagactgctttgggattacgtctatcagttgctttctgacagccggtacgaaaacttcatc

SEQ ID NO: 31234 - DNA, 75 bp, Homo sapiens
tagactgctttgggattacgtctatcagttgctttctgacagccggtacgaaaacttcatccgatgggaggacaa

SEQ ID NO: 31235 - DNA, 73 bp, Homo sapiens
tttgggattacgtctatcagttgctttctgacagccggtacgaaaacttcatccgatgggaggacaaagaatc

SEQ ID NO: 31236 - DNA, 73 bp, Homo sapiens
ttacgtctatcagttgctttctgacagccggtacgaaaacttcatccgatgggaggacaaagaatccaaaata

SEQ ID NO: 31237 - DNA, 71 bp, Homo sapiens
agttgctttctgacagccggtacgaaaacttcatccgatgggaggacaaagaatccaaaatattccggata

SEQ ID NO: 31238 - DNA, 70 bp, Homo sapiens
acagccggtacgaaaacttcatccgatgggaggacaaagaatccaaaatattccggatagtggatcccaa

SEQ ID NO: 31239 - DNA, 70 bp, Homo sapiens
gtacgaaaacttcatccgatgggaggacaaagaatccaaaatattccggatagtggatcccaacggactg

SEQ ID NO: 31240 - DNA, 73 bp, Homo sapiens
ttcatccgatgggaggacaaagaatccaaaatattccggatagtggatcccaacggactggctcgactgtggg

SEQ ID NO: 31241 - DNA, 70 bp, Homo sapiens
aggacaaagaatccaaaatattccggatagtggatcccaacggactggctcgactgtggggaaaccataa

SEQ ID NO: 31242 - DNA, 68 bp, Homo sapiens
aatccaaaatattccggatagtggatcccaacggactggctcgactgtggggaaaccataaggtaaaa

SEQ ID NO: 31243 - DNA, 72 bp, Homo sapiens
atattccggatagtggatcccaacggactggctcgactgtggggaaaccataaggtaaaagggcagcagata

SEQ ID NO: 31244 - DNA, 75 bp, Homo sapiens
tagtggatcccaacggactggctcgactgtggggaaaccataaggtaaaagggcagcagatatctgctccataaa

SEQ ID NO: 31245 - DNA, 71 bp, Homo sapiens
tttcattgtgtctttgtgctttttttctcccttcctcctttgaacaaacagaacagaacaaacatgaccta

SEQ ID NO: 31246 - DNA, 71 bp, Homo sapiens
tttgtgctttttttctcccttcctcctttgaacaaacagaacagaacaaacatgacctatgagaaaatgtc

SEQ ID NO: 31247 - DNA, 73 bp, Homo sapiens
tttttctcccttcctcctttgaacaaacagaacagaacaaacatgacctatgagaaaatgtccagagccctgc

SEQ ID NO: 31248 - DNA, 76 bp, Homo sapiens
tcctttgaacaaacagaacagaacaaacatgacctatgagaaaatgtccagagccctgcgccactactacaaacta

SEQ ID NO: 31249 - DNA, 76 bp, Homo sapiens
aaacagaacagaacaaacatgacctatgagaaaatgtccagagccctgcgccactactacaaactaaacattatca

SEQ ID NO: 31250 - DNA, 75 bp, Homo sapiens
aacagaacaaacatgacctatgagaaaatgtccagagccctgcgccactactacaaactaaacattatcaggaag

SEQ ID NO: 31251 - DNA, 76 bp, Homo sapiens
atgacctatgagaaaatgtccagagccctgcgccactactacaaactaaacattatcaggaaggagccaggacaaa

SEQ ID NO: 31252 - DNA, 72 bp, Homo sapiens
aaaatgtccagagccctgcgccactactacaaactaaacattatcaggaaggagccaggacaaaggcttttg

SEQ ID NO: 31253 - DNA, 74 bp, Homo sapiens
agagccctgcgccactactacaaactaaacattatcaggaaggagccaggacaaaggcttttgttcaggtagca

SEQ ID NO: 31254 - DNA, 70 bp, Homo sapiens
ccactactacaaactaaacattatcaggaaggagccaggacaaaggcttttgttcaggtagcacttcctt

SEQ ID NO: 31255 - DNA, 69 bp, Homo sapiens
actacaaactaaacattatcaggaaggagccaggacaaaggcttttgttcaggtagcacttcctttttc

SEQ ID NO: 31256 - DNA, 68 bp, Homo sapiens
aaacattatcaggaaggagccaggacaaaggcttttgttcaggtagcacttcctttttctcctttcct

SEQ ID NO: 31257 - DNA, 68 bp, Homo sapiens
tttaggaaaatggaatctcttacctcctccacttcttcttccaaaggtttatgaaaaccccagatgaa

SEQ ID NO: 31258 - DNA, 70 bp, Homo sapiens
aaaatggaatctcttacctcctccacttcttcttccaaaggtttatgaaaaccccagatgaaatcatgag

SEQ ID NO: 31259 - DNA, 72 bp, Homo sapiens
tcttacctcctccacttcttcttccaaaggtttatgaaaaccccagatgaaatcatgagtggccgaacagac

SEQ ID NO: 31260 - DNA, 72 bp, Homo sapiens
acttcttcttccaaaggtttatgaaaaccccagatgaaatcatgagtggccgaacagaccgtctggagcacc

SEQ ID NO: 31261 - DNA, 74 bp, Homo sapiens
ttcttccaaaggtttatgaaaaccccagatgaaatcatgagtggccgaacagaccgtctggagcacctagagtc

SEQ ID NO: 31262 - DNA, 78 bp, Homo sapiens
tttatgaaaaccccagatgaaatcatgagtggccgaacagaccgtctggagcacctagagtcccaggagctggatgaa

SEQ ID NO: 31263 - DNA, 80 bp, Homo sapiens
cagatgaaatcatgagtggccgaacagaccgtctggagcacctagagtcccaggagctggatgaacaaatataccaagaa

SEQ ID NO: 31264 - DNA, 79 bp, Homo sapiens
aaatcatgagtggccgaacagaccgtctggagcacctagagtcccaggagctggatgaacaaatataccaagaagatga

SEQ ID NO: 31265 - DNA, 78 bp, Homo sapiens
ccgaacagaccgtctggagcacctagagtcccaggagctggatgaacaaatataccaagaagatgaatgctgaaggaa

SEQ ID NO: 31266 - DNA, 78 bp, Homo sapiens
agaccgtctggagcacctagagtcccaggagctggatgaacaaatataccaagaagatgaatgctgaaggaaccaaca

SEQ ID NO: 31267 - DNA, 77 bp, Homo sapiens
acctagagtcccaggagctggatgaacaaatataccaagaagatgaatgctgaaggaaccaacagtccacctcagcg

SEQ ID NO: 31268 - DNA, 79 bp, Homo sapiens
agtcccaggagctggatgaacaaatataccaagaagatgaatgctgaaggaaccaacagtccacctcagcgggccagca

SEQ ID NO: 31269 - DNA, 76 bp, Homo sapiens
atgaacaaatataccaagaagatgaatgctgaaggaaccaacagtccacctcagcgggccagcagcccagggaacc

SEQ ID NO: 31270 - DNA, 75 bp, Homo sapiens
aaatataccaagaagatgaatgctgaaggaaccaacagtccacctcagcgggccagcagcccagggaacccctgc

SEQ ID NO: 31271 - DNA, 75 bp, Homo sapiens
agaagatgaatgctgaaggaaccaacagtccacctcagcgggccagcagcccagggaacccctgcccaccaggat

SEQ ID NO: 31272 - DNA, 76 bp, Homo sapiens
tgaaggaaccaacagtccacctcagcgggccagcagcccagggaacccctgcccaccaggattgctggaagtgtga

SEQ ID NO: 31273 - DNA, 74 bp, Homo sapiens
aaccaacagtccacctcagcgggccagcagcccagggaacccctgcccaccaggattgctggaagtgtgacgga

SEQ ID NO: 31274 - DNA, 76 bp, Homo sapiens
acctcagcgggccagcagcccagggaacccctgcccaccaggattgctggaagtgtgacggagcaggcgggctgag

SEQ ID NO: 31275 - DNA, 75 bp, Homo sapiens
agcagcccagggaacccctgcccaccaggattgctggaagtgtgacggagcaggcgggctgaggagagtggaaaa

SEQ ID NO: 31276 - DNA, 73 bp, Homo sapiens
ccagggaacccctgcccaccaggattgctggaagtgtgacggagcaggcgggctgaggagagtggaaaaggaa

SEQ ID NO: 31277 - DNA, 76 bp, Homo sapiens
ctgcccaccaggattgctggaagtgtgacggagcaggcgggctgaggagagtggaaaaggaagcgacccagaaatg

SEQ ID NO: 31278 - DNA, 75 bp, Homo sapiens
attgctggaagtgtgacggagcaggcgggctgaggagagtggaaaaggaagcgacccagaaatggcagggacact

SEQ ID NO: 31279 - DNA, 76 bp, Homo sapiens
aagtgtgacggagcaggcgggctgaggagagtggaaaaggaagcgacccagaaatggcagggacacttctcttgca

SEQ ID NO: 31280 - DNA, 75 bp, Homo sapiens
caggcgggctgaggagagtggaaaaggaagcgacccagaaatggcagggacacttctcttgcagaccaagaggga

SEQ ID NO: 31281 - DNA, 74 bp, Homo sapiens
ctgaggagagtggaaaaggaagcgacccagaaatggcagggacacttctcttgcagaccaagagggaccctgga

SEQ ID NO: 31282 - DNA, 74 bp, Homo sapiens
tggaaaaggaagcgacccagaaatggcagggacacttctcttgcagaccaagagggaccctggagcaccttaga

SEQ ID NO: 31283 - DNA, 73 bp, Homo sapiens
aagcgacccagaaatggcagggacacttctcttgcagaccaagagggaccctggagcaccttagacaaactac

SEQ ID NO: 31284 - DNA, 73 bp, Homo sapiens
acacttctcttgcagaccaagagggaccctggagcaccttagacaaactacccagcacaggcggggctggaat

SEQ ID NO: 31285 - DNA, 74 bp, Homo sapiens
aagagggaccctggagcaccttagacaaactacccagcacaggcggggctggaattctggcggagggcatgagc

SEQ ID NO: 31286 - DNA, 79 bp, Homo sapiens
tggagcaccttagacaaactacccagcacaggcggggctggaattctggcggagggcatgagcctgggactccatgtca

SEQ ID NO: 31287 - DNA, 76 bp, Homo sapiens
actacccagcacaggcggggctggaattctggcggagggcatgagcctgggactccatgtcacgtttccttctgat

SEQ ID NO: 31288 - DNA, 76 bp, Homo sapiens
acaggcggggctggaattctggcggagggcatgagcctgggactccatgtcacgtttccttctgatttggaatctc

SEQ ID NO: 31289 - DNA, 77 bp, Homo sapiens
aattctggcggagggcatgagcctgggactccatgtcacgtttccttctgatttggaatctctccatctgtaattcc

SEQ ID NO: 31290 - DNA, 77 bp, Homo sapiens
agggcatgagcctgggactccatgtcacgtttccttctgatttggaatctctccatctgtaattcctcaccctcacc

SEQ ID NO: 31291 - DNA, 76 bp, Homo sapiens
atgagcctgggactccatgtcacgtttccttctgatttggaatctctccatctgtaattcctcaccctcacccttc

SEQ ID NO: 31292 - DNA, 74 bp, Homo sapiens
tccatgtcacgtttccttctgatttggaatctctccatctgtaattcctcaccctcacccttccaccgttgtta

SEQ ID NO: 31293 - DNA, 74 bp, Homo sapiens
ttccttctgatttggaatctctccatctgtaattcctcaccctcacccttccaccgttgttagtatcatggtgt

SEQ ID NO: 31294 - DNA, 71 bp, Homo sapiens
atttggaatctctccatctgtaattcctcaccctcacccttccaccgttgttagtatcatggtgtttttgt

SEQ ID NO: 31295 - DNA, 70 bp, Homo sapiens
aatctctccatctgtaattcctcaccctcacccttccaccgttgttagtatcatggtgtttttgtttttg

SEQ ID NO: 31296 - DNA, 73 bp, Homo sapiens
tttttgttttaagaacctgcagtttgactcttcatcgttcatctaggggaagacatctgatgttgttttccta

SEQ ID NO: 31297 - DNA, 76 bp, Homo sapiens
tttaagaacctgcagtttgactcttcatcgttcatctaggggaagacatctgatgttgttttcctatggaaatata

SEQ ID NO: 31298 - DNA, 79 bp, Homo sapiens
cctgcagtttgactcttcatcgttcatctaggggaagacatctgatgttgttttcctatggaaatatatatctattata

SEQ ID NO: 31299 - DNA, 76 bp, Homo sapiens
atatattttttgcaaatctcacaaagtgcggcaagcccagctggtcaggaaagagaatacttgcagaggggttcag

SEQ ID NO: 31300 - DNA, 75 bp, Homo sapiens
tttttgcaaatctcacaaagtgcggcaagcccagctggtcaggaaagagaatacttgcagaggggttcaggttcc

SEQ ID NO: 31301 - DNA, 74 bp, Homo sapiens
atctcacaaagtgcggcaagcccagctggtcaggaaagagaatacttgcagaggggttcaggttcctctttttc

SEQ ID NO: 31302 - DNA, 75 bp, Homo sapiens
gcaagcccagctggtcaggaaagagaatacttgcagaggggttcaggttcctctttttcctgccacgtggatcag

SEQ ID NO: 31303 - DNA, 73 bp, Homo sapiens
ctggtcaggaaagagaatacttgcagaggggttcaggttcctctttttcctgccacgtggatcaggtctgttc

SEQ ID NO: 31304 - DNA, 71 bp, Homo sapiens
aaagagaatacttgcagaggggttcaggttcctctttttcctgccacgtggatcaggtctgttcctgttac

SEQ ID NO: 31305 - DNA, 71 bp, Homo sapiens
aatacttgcagaggggttcaggttcctctttttcctgccacgtggatcaggtctgttcctgttactgttgg

SEQ ID NO: 31306 - DNA, 71 bp, Homo sapiens
gttcaggttcctctttttcctgccacgtggatcaggtctgttcctgttactgttgggtcttggctgaaaaa

SEQ ID NO: 31307 - DNA, 69 bp, Homo sapiens
ggttcctctttttcctgccacgtggatcaggtctgttcctgttactgttgggtcttggctgaaaaaaaa

SEQ ID NO: 31308 - DNA, 77 bp, Homo sapiens
ttttctctctcttgctctgttcttcccttggtcccctctgtcctcccgccctgcctgcagttgagattcagatgcct

SEQ ID NO: 31309 - DNA, 79 bp, Homo sapiens
tcttgctctgttcttcccttggtcccctctgtcctcccgccctgcctgcagttgagattcagatgccttctgacagagt

SEQ ID NO: 31310 - DNA, 78 bp, Homo sapiens
ttcttcccttggtcccctctgtcctcccgccctgcctgcagttgagattcagatgccttctgacagagttcagcctct

SEQ ID NO: 31311 - DNA, 80 bp, Homo sapiens
ttggtcccctctgtcctcccgccctgcctgcagttgagattcagatgccttctgacagagttcagcctcttggagagtct

SEQ ID NO: 31312 - DNA, 81 bp, Homo sapiens
tgtcctcccgccctgcctgcagttgagattcagatgccttctgacagagttcagcctcttggagagtcttggggattgttg

SEQ ID NO: 31313 - DNA, 81 bp, Homo sapiens
ccgccctgcctgcagttgagattcagatgccttctgacagagttcagcctcttggagagtcttggggattgttggcaccta

SEQ ID NO: 31314 - DNA, 79 bp, Homo sapiens
agttgagattcagatgccttctgacagagttcagcctcttggagagtcttggggattgttggcacctaaacagaatcag

SEQ ID NO: 31315 - DNA, 81 bp, Homo sapiens
ttgagattcagatgccttctgacagagttcagcctcttggagagtcttggggattgttggcacctaaacagaatcagtgac

SEQ ID NO: 31316 - DNA, 78 bp, Homo sapiens
attcagatgccttctgacagagttcagcctcttggagagtcttggggattgttggcacctaaacagaatcagtgaccc

SEQ ID NO: 31317 - DNA, 75 bp, Homo sapiens
cttctgacagagttcagcctcttggagagtcttggggattgttggcacctaaacagaatcagtgacccgggtgct

SEQ ID NO: 31318 - DNA, 74 bp, Homo sapiens
agttcagcctcttggagagtcttggggattgttggcacctaaacagaatcagtgacccgggtgctttgtggcca

SEQ ID NO: 31319 - DNA, 79 bp, Homo sapiens
tcttggagagtcttggggattgttggcacctaaacagaatcagtgacccgggtgctttgtggccagcagcacagaatca

SEQ ID NO: 31320 - DNA, 76 bp, Homo sapiens
agagtcttggggattgttggcacctaaacagaatcagtgacccgggtgctttgtggccagcagcacagaatcaaac

SEQ ID NO: 31321 - DNA, 78 bp, Homo sapiens
attgttggcacctaaacagaatcagtgacccgggtgctttgtggccagcagcacagaatcaaacccgcatcccagcat

SEQ ID NO: 31322 - DNA, 79 bp, Homo sapiens
taaacagaatcagtgacccgggtgctttgtggccagcagcacagaatcaaacccgcatcccagcattgggccacccatc

SEQ ID NO: 31323 - DNA, 83 bp, Homo sapiens
gtgctttgtggccagcagcacagaatcaaacccgcatcccagcattgggccacccatctgagggaggccaaaatcatcacaga

SEQ ID NO: 31324 - DNA, 86 bp, Homo sapiens
ttgtggccagcagcacagaatcaaacccgcatcccagcattgggccacccatctgagggaggccaaaatcatcacagatgctgctg

SEQ ID NO: 31325 - DNA, 87 bp, Homo sapiens
aaacccgcatcccagcattgggccacccatctgagggaggccaaaatcatcacagatgctgctgtgctgcagacagatacatgctag

SEQ ID NO: 31326 - DNA, 90 bp, Homo sapiens
atcccagcattgggccacccatctgagggaggccaaaatcatcacagatgctgctgtgctgcagacagatacatgctagtccagagagcc

SEQ ID NO: 31327 - DNA, 91 bp, Homo sapiens
cacccatctgagggaggccaaaatcatcacagatgctgctgtgctgcagacagatacatgctagtccagagagccgcccctgagatggctg

SEQ ID NO: 31328 - DNA, 92 bp, Homo sapiens
atctgagggaggccaaaatcatcacagatgctgctgtgctgcagacagatacatgctagtccagagagccgcccctgagatggctgtgagaa

SEQ ID NO: 31329 - DNA, 91 bp, Homo sapiens
aaaatcatcacagatgctgctgtgctgcagacagatacatgctagtccagagagccgcccctgagatggctgtgagaaccatgtgtctaag

SEQ ID NO: 31330 - DNA, 90 bp, Homo sapiens
agatgctgctgtgctgcagacagatacatgctagtccagagagccgcccctgagatggctgtgagaaccatgtgtctaaggcgtaagata

SEQ ID NO: 31331 - DNA, 87 bp, Homo sapiens
tgtgctgcagacagatacatgctagtccagagagccgcccctgagatggctgtgagaaccatgtgtctaaggcgtaagataaggatg

SEQ ID NO: 31332 - DNA, 82 bp, Homo sapiens
agacagatacatgctagtccagagagccgcccctgagatggctgtgagaaccatgtgtctaaggcgtaagataaggatggaa

SEQ ID NO: 31333 - DNA, 79 bp, Homo sapiens
ctagtccagagagccgcccctgagatggctgtgagaaccatgtgtctaaggcgtaagataaggatggaaggctgtccaa

SEQ ID NO: 31334 - DNA, 76 bp, Homo sapiens
agagccgcccctgagatggctgtgagaaccatgtgtctaaggcgtaagataaggatggaaggctgtccaagttatt

SEQ ID NO: 31335 - DNA, 77 bp, Homo sapiens
tgagatggctgtgagaaccatgtgtctaaggcgtaagataaggatggaaggctgtccaagttatttggaaggcctcg

SEQ ID NO: 31336 - DNA, 76 bp, Homo sapiens
tgtgagaaccatgtgtctaaggcgtaagataaggatggaaggctgtccaagttatttggaaggcctcggcagcttg

SEQ ID NO: 31337 - DNA, 74 bp, Homo sapiens
atgtgtctaaggcgtaagataaggatggaaggctgtccaagttatttggaaggcctcggcagcttgggattagc

SEQ ID NO: 31338 - DNA, 73 bp, Homo sapiens
taaggcgtaagataaggatggaaggctgtccaagttatttggaaggcctcggcagcttgggattagcttggga

SEQ ID NO: 31339 - DNA, 75 bp, Homo sapiens
aaggctgtccaagttatttggaaggcctcggcagcttgggattagcttgggagcgcagcgctgcaaagtggaaaa

SEQ ID NO: 31340 - DNA, 77 bp, Homo sapiens
aaggcctcggcagcttgggattagcttgggagcgcagcgctgcaaagtggaaaatatgaaaagaccacacaggccca

SEQ ID NO: 31341 - DNA, 78 bp, Homo sapiens
attagcttgggagcgcagcgctgcaaagtggaaaatatgaaaagaccacacaggcccagcagtccagaaactgggcaa

SEQ ID NO: 31342 - DNA, 75 bp, Homo sapiens
ctgcaaagtggaaaatatgaaaagaccacacaggcccagcagtccagaaactgggcaaaaatattctgcagtggg

SEQ ID NO: 31343 - DNA, 72 bp, Homo sapiens
aatatgaaaagaccacacaggcccagcagtccagaaactgggcaaaaatattctgcagtggggatttatttt

SEQ ID NO: 31344 - DNA, 71 bp, Homo sapiens
aaaagaccacacaggcccagcagtccagaaactgggcaaaaatattctgcagtggggatttatttttccaa

SEQ ID NO: 31345 - DNA, 72 bp, Homo sapiens
acaggcccagcagtccagaaactgggcaaaaatattctgcagtggggatttatttttccaaagcaggtaaca

SEQ ID NO: 31346 - DNA, 73 bp, Homo sapiens
tccagaaactgggcaaaaatattctgcagtggggatttatttttccaaagcaggtaacagaggctagtgagaa

SEQ ID NO: 31347 - DNA, 71 bp, Homo sapiens
aactgggcaaaaatattctgcagtggggatttatttttccaaagcaggtaacagaggctagtgagaaagaa

SEQ ID NO: 31348 - DNA, 72 bp, Homo sapiens
aaatattctgcagtggggatttatttttccaaagcaggtaacagaggctagtgagaaagaaaagctcctctc

SEQ ID NO: 31349 - DNA, 72 bp, Homo sapiens
gggatttatttttccaaagcaggtaacagaggctagtgagaaagaaaagctcctctctgctccattccaaag

SEQ ID NO: 31350 - DNA, 74 bp, Homo sapiens
ttatttttccaaagcaggtaacagaggctagtgagaaagaaaagctcctctctgctccattccaaaggccatct

SEQ ID NO: 31351 - DNA, 75 bp, Homo sapiens
aaagcaggtaacagaggctagtgagaaagaaaagctcctctctgctccattccaaaggccatcttgtggtcagtt

SEQ ID NO: 31352 - DNA, 78 bp, Homo sapiens
ggctagtgagaaagaaaagctcctctctgctccattccaaaggccatcttgtggtcagtttcatgccctcacctgatt

SEQ ID NO: 31353 - DNA, 76 bp, Homo sapiens
gtgagaaagaaaagctcctctctgctccattccaaaggccatcttgtggtcagtttcatgccctcacctgattttt

SEQ ID NO: 31354 - DNA, 66 bp, Homo sapiens
tttttttttcaattcctaaccttttttaaagtttcctggtctccactggacacagagctttggaga

SEQ ID NO: 31355 - DNA, 68 bp, Homo sapiens
ttttcaattcctaaccttttttaaagtttcctggtctccactggacacagagctttggagacggagga

SEQ ID NO: 31356 - DNA, 77 bp, Homo sapiens
ttaaagtttcctggtctccactggacacagagctttggagacggaggatcccagagggcagtctcagttgcaatcag

SEQ ID NO: 31357 - DNA, 82 bp, Homo sapiens
ctggtctccactggacacagagctttggagacggaggatcccagagggcagtctcagttgcaatcagtgtgtgcccagcctg

SEQ ID NO: 31358 - DNA, 81 bp, Homo sapiens
cacagagctttggagacggaggatcccagagggcagtctcagttgcaatcagtgtgtgcccagcctgggcagacaggaaat

SEQ ID NO: 31359 - DNA, 79 bp, Homo sapiens
agctttggagacggaggatcccagagggcagtctcagttgcaatcagtgtgtgcccagcctgggcagacaggaaattcc

SEQ ID NO: 31360 - DNA, 79 bp, Homo sapiens
ggatcccagagggcagtctcagttgcaatcagtgtgtgcccagcctgggcagacaggaaattcctcggatacattattt

SEQ ID NO: 31361 - DNA, 77 bp, Homo sapiens
agagggcagtctcagttgcaatcagtgtgtgcccagcctgggcagacaggaaattcctcggatacattattttttct

SEQ ID NO: 31362 - DNA, 75 bp, Homo sapiens
ttctttctttcatagctgtgtctcagaaaggacccatttgtggctctttttcacctcaaaataagatcgatggta

SEQ ID NO: 31363 - DNA, 76 bp, Homo sapiens
ttcatagctgtgtctcagaaaggacccatttgtggctctttttcacctcaaaataagatcgatggtatcttgtaaa

SEQ ID NO: 31364 - DNA, 74 bp, Homo sapiens
tgtgtctcagaaaggacccatttgtggctctttttcacctcaaaataagatcgatggtatcttgtaaaatgagg

SEQ ID NO: 31365 - DNA, 71 bp, Homo sapiens
aaaggacccatttgtggctctttttcacctcaaaataagatcgatggtatcttgtaaaatgagggtagtgc

SEQ ID NO: 31366 - DNA, 72 bp, Homo sapiens
tggctctttttcacctcaaaataagatcgatggtatcttgtaaaatgagggtagtgccacttcttagtattt

SEQ ID NO: 31367 - DNA, 72 bp, Homo sapiens
tttcacctcaaaataagatcgatggtatcttgtaaaatgagggtagtgccacttcttagtatttttgaaagc

SEQ ID NO: 31368 - DNA, 72 bp, Homo sapiens
tcaaaataagatcgatggtatcttgtaaaatgagggtagtgccacttcttagtatttttgaaagctgtttta

SEQ ID NO: 31369 - DNA, 69 bp, Homo sapiens
atcgatggtatcttgtaaaatgagggtagtgccacttcttagtatttttgaaagctgttttagattttt

SEQ ID NO: 31370 - DNA, 71 bp, Homo sapiens
ttttttttccttttctagccatctaaattgactcttccaatataggtctcagaaatccaatatttggagta

SEQ ID NO: 31371 - DNA, 73 bp, Homo sapiens
tccttttctagccatctaaattgactcttccaatataggtctcagaaatccaatatttggagtacaatttctt

SEQ ID NO: 31372 - DNA, 74 bp, Homo sapiens
agccatctaaattgactcttccaatataggtctcagaaatccaatatttggagtacaatttcttttaatccaga

SEQ ID NO: 31373 - DNA, 74 bp, Homo sapiens
tgactcttccaatataggtctcagaaatccaatatttggagtacaatttcttttaatccagattacacctgcct

SEQ ID NO: 31374 - DNA, 69 bp, Homo sapiens
agaaatccaatatttggagtacaatttcttttaatccagattacacctgccttacaaagcaccccctcc

SEQ ID NO: 31375 - DNA, 68 bp, Homo sapiens
aatatttggagtacaatttcttttaatccagattacacctgccttacaaagcaccccctccttgttcc

SEQ ID NO: 31376 - DNA, 70 bp, Homo sapiens
ttcttttaatccagattacacctgccttacaaagcaccccctccttgttcccctctgtttcctctactca

SEQ ID NO: 31377 - DNA, 69 bp, Homo sapiens
cctgccttacaaagcaccccctccttgttcccctctgtttcctctactcagttgggggagaaactcaca

SEQ ID NO: 31378 - DNA, 74 bp, Homo sapiens
cttgttcccctctgtttcctctactcagttgggggagaaactcacagctcctccgggatacatatgtgccctca

SEQ ID NO: 31379 - DNA, 80 bp, Homo sapiens
tgtttcctctactcagttgggggagaaactcacagctcctccgggatacatatgtgccctcagcagcagctcccaggtga

SEQ ID NO: 31380 - DNA, 79 bp, Homo sapiens
tactcagttgggggagaaactcacagctcctccgggatacatatgtgccctcagcagcagctcccaggtgaagttacca

SEQ ID NO: 31381 - DNA, 77 bp, Homo sapiens
gggagaaactcacagctcctccgggatacatatgtgccctcagcagcagctcccaggtgaagttaccagacccctgg

SEQ ID NO: 31382 - DNA, 77 bp, Homo sapiens
aaactcacagctcctccgggatacatatgtgccctcagcagcagctcccaggtgaagttaccagacccctgggcttc

SEQ ID NO: 31383 - DNA, 75 bp, Homo sapiens
tccgggatacatatgtgccctcagcagcagctcccaggtgaagttaccagacccctgggcttctccccagctttt

SEQ ID NO: 31384 - DNA, 76 bp, Homo sapiens
atacatatgtgccctcagcagcagctcccaggtgaagttaccagacccctgggcttctccccagctttttctgagt

SEQ ID NO: 31385 - DNA, 78 bp, Homo sapiens
tatgtgccctcagcagcagctcccaggtgaagttaccagacccctgggcttctccccagctttttctgagttgagtca

SEQ ID NO: 31386 - DNA, 73 bp, Homo sapiens
tcccaggtgaagttaccagacccctgggcttctccccagctttttctgagttgagtcagacatgtagagtttg

SEQ ID NO: 31387 - DNA, 71 bp, Homo sapiens
aggtgaagttaccagacccctgggcttctccccagctttttctgagttgagtcagacatgtagagtttggg

SEQ ID NO: 31388 - DNA, 73 bp, Homo sapiens
aagttaccagacccctgggcttctccccagctttttctgagttgagtcagacatgtagagtttgggtcacaca

SEQ ID NO: 31389 - DNA, 73 bp, Homo sapiens
agttaccagacccctgggcttctccccagctttttctgagttgagtcagacatgtagagtttgggtcacacag

SEQ ID NO: 31390 - DNA, 74 bp, Homo sapiens
cccctgggcttctccccagctttttctgagttgagtcagacatgtagagtttgggtcacacaggcaagaggaat

SEQ ID NO: 31391 - DNA, 75 bp, Homo sapiens
tgggcttctccccagctttttctgagttgagtcagacatgtagagtttgggtcacacaggcaagaggaattttcc

SEQ ID NO: 31392 - DNA, 74 bp, Homo sapiens
ccagctttttctgagttgagtcagacatgtagagtttgggtcacacaggcaagaggaattttccctcggcctta

SEQ ID NO: 31393 - DNA, 75 bp, Homo sapiens
ttttctgagttgagtcagacatgtagagtttgggtcacacaggcaagaggaattttccctcggccttactgacaa

SEQ ID NO: 31394 - DNA, 70 bp, Homo sapiens
atgtagagtttgggtcacacaggcaagaggaattttccctcggccttactgacaaggacaccaacctagg

SEQ ID NO: 31395 - DNA, 74 bp, Homo sapiens
tcacacaggcaagaggaattttccctcggccttactgacaaggacaccaacctagggtgcaaacagatggacta

SEQ ID NO: 31396 - DNA, 71 bp, Homo sapiens
aagaggaattttccctcggccttactgacaaggacaccaacctagggtgcaaacagatggactatggttca

SEQ ID NO: 31397 - DNA, 71 bp, Homo sapiens
aattttccctcggccttactgacaaggacaccaacctagggtgcaaacagatggactatggttcaaggaca

SEQ ID NO: 31398 - DNA, 78 bp, Homo sapiens
accaacctagggtgcaaacagatggactatggttcaaggacactggaattgaggagctgatcaaggctctcttcagcc

SEQ ID NO: 31399 - DNA, 81 bp, Homo sapiens
aaacagatggactatggttcaaggacactggaattgaggagctgatcaaggctctcttcagccttgctctgtccctgcctc

SEQ ID NO: 31400 - DNA, 83 bp, Homo sapiens
atggactatggttcaaggacactggaattgaggagctgatcaaggctctcttcagccttgctctgtccctgcctcttatcaga

SEQ ID NO: 31401 - DNA, 85 bp, Homo sapiens
ttcaaggacactggaattgaggagctgatcaaggctctcttcagccttgctctgtccctgcctcttatcagagcacaggtagaca

SEQ ID NO: 31402 - DNA, 85 bp, Homo sapiens
ctggaattgaggagctgatcaaggctctcttcagccttgctctgtccctgcctcttatcagagcacaggtagacacacgggcata

SEQ ID NO: 31403 - DNA, 85 bp, Homo sapiens
agctgatcaaggctctcttcagccttgctctgtccctgcctcttatcagagcacaggtagacacacgggcatagccagcccactc

SEQ ID NO: 31404 - DNA, 81 bp, Homo sapiens
aaggctctcttcagccttgctctgtccctgcctcttatcagagcacaggtagacacacgggcatagccagcccactcctac

SEQ ID NO: 31405 - DNA, 82 bp, Homo sapiens
tgtccctgcctcttatcagagcacaggtagacacacgggcatagccagcccactcctactgtcacaggcgccccaccattca

SEQ ID NO: 31406 - DNA, 79 bp, Homo sapiens
tcttatcagagcacaggtagacacacgggcatagccagcccactcctactgtcacaggcgccccaccattcaaccttcc

SEQ ID NO: 31407 - DNA, 76 bp, Homo sapiens
agagcacaggtagacacacgggcatagccagcccactcctactgtcacaggcgccccaccattcaaccttccggga

SEQ ID NO: 31408 - DNA, 75 bp, Homo sapiens
tagacacacgggcatagccagcccactcctactgtcacaggcgccccaccattcaaccttccgggaggtcaggga

SEQ ID NO: 31409 - DNA, 72 bp, Homo sapiens
actcctactgtcacaggcgccccaccattcaaccttccgggaggtcagggaccttctatatgaggcgagtgg

SEQ ID NO: 31410 - DNA, 77 bp, Homo sapiens
attcaaccttccgggaggtcagggaccttctatatgaggcgagtgggtctcagtctgcttgaatggtgatgagattc

SEQ ID NO: 31411 - DNA, 84 bp, Homo sapiens
tccgggaggtcagggaccttctatatgaggcgagtgggtctcagtctgcttgaatggtgatgagattctgctggatctcagcac

SEQ ID NO: 31412 - DNA, 86 bp, Homo sapiens
ggaccttctatatgaggcgagtgggtctcagtctgcttgaatggtgatgagattctgctggatctcagcacgctgcaggtgtcttt

SEQ ID NO: 31413 - DNA, 91 bp, Homo sapiens
ctatatgaggcgagtgggtctcagtctgcttgaatggtgatgagattctgctggatctcagcacgctgcaggtgtcttttgagagcattca

SEQ ID NO: 31414 - DNA, 89 bp, Homo sapiens
agtgggtctcagtctgcttgaatggtgatgagattctgctggatctcagcacgctgcaggtgtcttttgagagcattcagtaggacatg

SEQ ID NO: 31415 - DNA, 87 bp, Homo sapiens
aatggtgatgagattctgctggatctcagcacgctgcaggtgtcttttgagagcattcagtaggacatggtgatccctatttcagcc

SEQ ID NO: 31416 - DNA, 87 bp, Homo sapiens
agattctgctggatctcagcacgctgcaggtgtcttttgagagcattcagtaggacatggtgatccctatttcagcctctaagatga

SEQ ID NO: 31417 - DNA, 85 bp, Homo sapiens
tctcagcacgctgcaggtgtcttttgagagcattcagtaggacatggtgatccctatttcagcctctaagatgactggtattcta

SEQ ID NO: 31418 - DNA, 82 bp, Homo sapiens
ctgcaggtgtcttttgagagcattcagtaggacatggtgatccctatttcagcctctaagatgactggtattctatctgaaa

SEQ ID NO: 31419 - DNA, 84 bp, Homo sapiens
tcttttgagagcattcagtaggacatggtgatccctatttcagcctctaagatgactggtattctatctgaaatgcagagatta

SEQ ID NO: 31420 - DNA, 82 bp, Homo sapiens
cattcagtaggacatggtgatccctatttcagcctctaagatgactggtattctatctgaaatgcagagattaagccaaata

SEQ ID NO: 31421 - DNA, 82 bp, Homo sapiens
gacatggtgatccctatttcagcctctaagatgactggtattctatctgaaatgcagagattaagccaaatacctgatgtat

SEQ ID NO: 31422 - DNA, 80 bp, Homo sapiens
atccctatttcagcctctaagatgactggtattctatctgaaatgcagagattaagccaaatacctgatgtattgtgaaa

SEQ ID NO: 31423 - DNA, 80 bp, Homo sapiens
agcctctaagatgactggtattctatctgaaatgcagagattaagccaaatacctgatgtattgtgaaagccactgattt

SEQ ID NO: 31424 - DNA, 79 bp, Homo sapiens
gtattctatctgaaatgcagagattaagccaaatacctgatgtattgtgaaagccactgattttaagaatggagagaaa

SEQ ID NO: 31425 - DNA, 74 bp, Homo sapiens
gattaagccaaatacctgatgtattgtgaaagccactgattttaagaatggagagaaagggattttttactgca

SEQ ID NO: 31426 - DNA, 76 bp, Homo sapiens
atgtattgtgaaagccactgattttaagaatggagagaaagggattttttactgcatccctctgtatgaatatgaa

SEQ ID NO: 31427 - DNA, 75 bp, Homo sapiens
aaagccactgattttaagaatggagagaaagggattttttactgcatccctctgtatgaatatgaaatcagagac

SEQ ID NO: 31428 - DNA, 77 bp, Homo sapiens
ttttaagaatggagagaaagggattttttactgcatccctctgtatgaatatgaaatcagagaccagggcatgatgt

SEQ ID NO: 31429 - DNA, 80 bp, Homo sapiens
agagaaagggattttttactgcatccctctgtatgaatatgaaatcagagaccagggcatgatgttgctaggattagagc

SEQ ID NO: 31430 - DNA, 84 bp, Homo sapiens
catccctctgtatgaatatgaaatcagagaccagggcatgatgttgctaggattagagcctctcagtctggcctcttcacccaa

SEQ ID NO: 31431 - DNA, 83 bp, Homo sapiens
atatgaaatcagagaccagggcatgatgttgctaggattagagcctctcagtctggcctcttcacccaagtgcaagaactcag

SEQ ID NO: 31432 - DNA, 80 bp, Homo sapiens
accagggcatgatgttgctaggattagagcctctcagtctggcctcttcacccaagtgcaagaactcagtctcttactgt

SEQ ID NO: 31433 - DNA, 80 bp, Homo sapiens
atgatgttgctaggattagagcctctcagtctggcctcttcacccaagtgcaagaactcagtctcttactgttcaaagaa

SEQ ID NO: 31434 - DNA, 77 bp, Homo sapiens
ctaggattagagcctctcagtctggcctcttcacccaagtgcaagaactcagtctcttactgttcaaagaatcttaa

SEQ ID NO: 31435 - DNA, 78 bp, Homo sapiens
tctcagtctggcctcttcacccaagtgcaagaactcagtctcttactgttcaaagaatcttaacagttgaattatgga

SEQ ID NO: 31436 - DNA, 74 bp, Homo sapiens
gcctcttcacccaagtgcaagaactcagtctcttactgttcaaagaatcttaacagttgaattatggagggaaa

SEQ ID NO: 31437 - DNA, 71 bp, Homo sapiens
ccaagtgcaagaactcagtctcttactgttcaaagaatcttaacagttgaattatggagggaaattccctt

SEQ ID NO: 31438 - DNA, 69 bp, Homo sapiens
aagaactcagtctcttactgttcaaagaatcttaacagttgaattatggagggaaattcccttttgccc

SEQ ID NO: 31439 - DNA, 71 bp, Homo sapiens
tcttactgttcaaagaatcttaacagttgaattatggagggaaattcccttttgccccaagcatttctata

SEQ ID NO: 31440 - DNA, 70 bp, Homo sapiens
cttaacagttgaattatggagggaaattcccttttgccccaagcatttctatatttaaagcaatatccca

SEQ ID NO: 31441 - DNA, 70 bp, Homo sapiens
aattatggagggaaattcccttttgccccaagcatttctatatttaaagcaatatcccaggagaatatgt

SEQ ID NO: 31442 - DNA, 70 bp, Homo sapiens
agggaaattcccttttgccccaagcatttctatatttaaagcaatatcccaggagaatatgttagactta

SEQ ID NO: 31443 - DNA, 74 bp, Homo sapiens
ccttttgccccaagcatttctatatttaaagcaatatcccaggagaatatgttagacttaggatgataccttca

SEQ ID NO: 31444 - DNA, 76 bp, Homo sapiens
aagcatttctatatttaaagcaatatcccaggagaatatgttagacttaggatgataccttcagccacttgaagaa

SEQ ID NO: 31445 - DNA, 76 bp, Homo sapiens
ctatatttaaagcaatatcccaggagaatatgttagacttaggatgataccttcagccacttgaagaagaaataga

SEQ ID NO: 31446 - DNA, 77 bp, Homo sapiens
atatcccaggagaatatgttagacttaggatgataccttcagccacttgaagaagaaatagaaggcgctcattccaa

SEQ ID NO: 31447 - DNA, 76 bp, Homo sapiens
agaatatgttagacttaggatgataccttcagccacttgaagaagaaatagaaggcgctcattccaatatagtctt

SEQ ID NO: 31448 - DNA, 75 bp, Homo sapiens
atgttagacttaggatgataccttcagccacttgaagaagaaatagaaggcgctcattccaatatagtctttatt

SEQ ID NO: 31449 - DNA, 78 bp, Homo sapiens
taggatgataccttcagccacttgaagaagaaatagaaggcgctcattccaatatagtctttatttcccattcagata

SEQ ID NO: 31450 - DNA, 76 bp, Homo sapiens
ccttcagccacttgaagaagaaatagaaggcgctcattccaatatagtctttatttcccattcagatacaggttga

SEQ ID NO: 31451 - DNA, 76 bp, Homo sapiens
cttgaagaagaaatagaaggcgctcattccaatatagtctttatttcccattcagatacaggttgagcatccctaa

SEQ ID NO: 31452 - DNA, 67 bp, Homo sapiens
aggttgagcatccctaatctgaacagttaaaacccccaaatgccccaaaatccaaaccttcctgaac

SEQ ID NO: 31453 - DNA, 68 bp, Homo sapiens
atccctaatctgaacagttaaaacccccaaatgccccaaaatccaaaccttcctgaacgctatgacac

SEQ ID NO: 31454 - DNA, 68 bp, Homo sapiens
aacagttaaaacccccaaatgccccaaaatccaaaccttcctgaacgctatgacaccatgagtggaaa

SEQ ID NO: 31455 - DNA, 69 bp, Homo sapiens
ttaaaacccccaaatgccccaaaatccaaaccttcctgaacgctatgacaccatgagtggaaaattcca

SEQ ID NO: 31456 - DNA, 71 bp, Homo sapiens
aaatgccccaaaatccaaaccttcctgaacgctatgacaccatgagtggaaaattccacacctaacaaaca

SEQ ID NO: 31457 - DNA, 71 bp, Homo sapiens
aaaatccaaaccttcctgaacgctatgacaccatgagtggaaaattccacacctaacaaacacatttgctt

SEQ ID NO: 31458 - DNA, 76 bp, Homo sapiens
ttcctgaacgctatgacaccatgagtggaaaattccacacctaacaaacacatttgctttcttatggttcaatgta

SEQ ID NO: 31459 - DNA, 75 bp, Homo sapiens
tatgacaccatgagtggaaaattccacacctaacaaacacatttgctttcttatggttcaatgtacacaaactgt

SEQ ID NO: 31460 - DNA, 72 bp, Homo sapiens
ccatgagtggaaaattccacacctaacaaacacatttgctttcttatggttcaatgtacacaaactgtttta

SEQ ID NO: 31461 - DNA, 74 bp, Homo sapiens
tccacacctaacaaacacatttgctttcttatggttcaatgtacacaaactgttttatatagaaaatgatttca

SEQ ID NO: 31462 - DNA, 71 bp, Homo sapiens
acctaacaaacacatttgctttcttatggttcaatgtacacaaactgttttatatagaaaatgatttcaaa

SEQ ID NO: 31463 - DNA, 72 bp, Homo sapiens
ttgctttcttatggttcaatgtacacaaactgttttatatagaaaatgatttcaaatatcataaaattacct

SEQ ID NO: 31464 - DNA, 73 bp, Homo sapiens
ttcttatggttcaatgtacacaaactgttttatatagaaaatgatttcaaatatcataaaattaccttcaggc

SEQ ID NO: 31465 - DNA, 75 bp, Homo sapiens
accttcaggctatgtgtataaagtatatatgagccataaatgaattttgtgtttagactttgtgtccatccccaa

SEQ ID NO: 31466 - DNA, 68 bp, Homo sapiens
catacacaaatattccaggatacaaaaaaaaacatttaaaaatccgagacccagaacacttctggtcc

SEQ ID NO: 31467 - DNA, 74 bp, Homo sapiens
tcccaagcatttcagataagggatatcaatctgtactaccaataaggatttcgtaattcccctaactgcaaatg

SEQ ID NO: 31468 - DNA, 74 bp, Homo sapiens
ttcagataagggatatcaatctgtactaccaataaggatttcgtaattcccctaactgcaaatgtcctcttcat

SEQ ID NO: 31469 - DNA, 72 bp, Homo sapiens
ataagggatatcaatctgtactaccaataaggatttcgtaattcccctaactgcaaatgtcctcttcatttg

SEQ ID NO: 31470 - DNA, 74 bp, Homo sapiens
tcaatctgtactaccaataaggatttcgtaattcccctaactgcaaatgtcctcttcatttgttctttatgaga

SEQ ID NO: 31471 - DNA, 69 bp, Homo sapiens
ctaccaataaggatttcgtaattcccctaactgcaaatgtcctcttcatttgttctttatgagaaaacc

SEQ ID NO: 31472 - DNA, 69 bp, Homo sapiens
atttcgtaattcccctaactgcaaatgtcctcttcatttgttctttatgagaaaacccgggtagtgcca

SEQ ID NO: 31473 - DNA, 73 bp, Homo sapiens
cctaactgcaaatgtcctcttcatttgttctttatgagaaaacccgggtagtgccagcacctggatacagtat

SEQ ID NO: 31474 - DNA, 73 bp, Homo sapiens
tcatttgttctttatgagaaaacccgggtagtgccagcacctggatacagtatttacaccctgcagaccctaa

SEQ ID NO: 31475 - DNA, 71 bp, Homo sapiens
ttctttatgagaaaacccgggtagtgccagcacctggatacagtatttacaccctgcagaccctaaagatt

SEQ ID NO: 31476 - DNA, 71 bp, Homo sapiens
aaaacccgggtagtgccagcacctggatacagtatttacaccctgcagaccctaaagatttcagattcagt

SEQ ID NO: 31477 - DNA, 78 bp, Homo sapiens
tagtgccagcacctggatacagtatttacaccctgcagaccctaaagatttcagattcagttagcaaaccttgatgaa

SEQ ID NO: 31478 - DNA, 79 bp, Homo sapiens
tacagtatttacaccctgcagaccctaaagatttcagattcagttagcaaaccttgatgaagcacctgctggacactga

SEQ ID NO: 31479 - DNA, 79 bp, Homo sapiens
ctgcagaccctaaagatttcagattcagttagcaaaccttgatgaagcacctgctggacactgagggacccaaagctca

SEQ ID NO: 31480 - DNA, 80 bp, Homo sapiens
taaagatttcagattcagttagcaaaccttgatgaagcacctgctggacactgagggacccaaagctcaatcagccataa

SEQ ID NO: 31481 - DNA, 79 bp, Homo sapiens
atttcagattcagttagcaaaccttgatgaagcacctgctggacactgagggacccaaagctcaatcagccataatccc

SEQ ID NO: 31482 - DNA, 79 bp, Homo sapiens
ttagcaaaccttgatgaagcacctgctggacactgagggacccaaagctcaatcagccataatccctgctttcagagtt

SEQ ID NO: 31483 - DNA, 78 bp, Homo sapiens
aaaccttgatgaagcacctgctggacactgagggacccaaagctcaatcagccataatccctgctttcagagtttata

SEQ ID NO: 31484 - DNA, 80 bp, Homo sapiens
ccttgatgaagcacctgctggacactgagggacccaaagctcaatcagccataatccctgctttcagagtttatattgta

SEQ ID NO: 31485 - DNA, 79 bp, Homo sapiens
agcacctgctggacactgagggacccaaagctcaatcagccataatccctgctttcagagtttatattgtacctgccta

SEQ ID NO: 31486 - DNA, 77 bp, Homo sapiens
acctgctggacactgagggacccaaagctcaatcagccataatccctgctttcagagtttatattgtacctgcctaa

SEQ ID NO: 31487 - DNA, 77 bp, Homo sapiens
tggacactgagggacccaaagctcaatcagccataatccctgctttcagagtttatattgtacctgcctaatccacc

SEQ ID NO: 31488 - DNA, 75 bp, Homo sapiens
acactgagggacccaaagctcaatcagccataatccctgctttcagagtttatattgtacctgcctaatccaccc

SEQ ID NO: 31489 - DNA, 73 bp, Homo sapiens
agggacccaaagctcaatcagccataatccctgctttcagagtttatattgtacctgcctaatccacccggcg

SEQ ID NO: 31490 - DNA, 78 bp, Homo sapiens
caaagctcaatcagccataatccctgctttcagagtttatattgtacctgcctaatccacccggcgtgactcatttca

SEQ ID NO: 31491 - DNA, 77 bp, Homo sapiens
aagctcaatcagccataatccctgctttcagagtttatattgtacctgcctaatccacccggcgtgactcatttcaa

SEQ ID NO: 31492 - DNA, 76 bp, Homo sapiens
aatcagccataatccctgctttcagagtttatattgtacctgcctaatccacccggcgtgactcatttcaacacta

SEQ ID NO: 31493 - DNA, 74 bp, Homo sapiens
ccataatccctgctttcagagtttatattgtacctgcctaatccacccggcgtgactcatttcaacactaagta

SEQ ID NO: 31494 - DNA, 73 bp, Homo sapiens
cctaatccacccggcgtgactcatttcaacactaagtactaggggtgttgtcaggagacaaatctgaagtcag

SEQ ID NO: 31495 - DNA, 75 bp, Homo sapiens
cgtgactcatttcaacactaagtactaggggtgttgtcaggagacaaatctgaagtcaggagaggaaaatgcaaa

SEQ ID NO: 31496 - DNA, 73 bp, Homo sapiens
atttcaacactaagtactaggggtgttgtcaggagacaaatctgaagtcaggagaggaaaatgcaaaggagcc

SEQ ID NO: 31497 - DNA, 82 bp, Homo sapiens
gtgttgtcaggagacaaatctgaagtcaggagaggaaaatgcaaaggagccctgccgtgtgatggatgtgcattctcacttg

SEQ ID NO: 31498 - DNA, 81 bp, Homo sapiens
gaggaaaatgcaaaggagccctgccgtgtgatggatgtgcattctcacttgggtcttgaagttctcattcctacatctcaa

SEQ ID NO: 31499 - DNA, 82 bp, Homo sapiens
aaatgcaaaggagccctgccgtgtgatggatgtgcattctcacttgggtcttgaagttctcattcctacatctcaagctagc

SEQ ID NO: 31500 - DNA, 85 bp, Homo sapiens
ctgccgtgtgatggatgtgcattctcacttgggtcttgaagttctcattcctacatctcaagctagccaggcagtctcctctcta

SEQ ID NO: 31501 - DNA, 84 bp, Homo sapiens
atggatgtgcattctcacttgggtcttgaagttctcattcctacatctcaagctagccaggcagtctcctctctatcagaagaa

SEQ ID NO: 31502 - DNA, 81 bp, Homo sapiens
attctcacttgggtcttgaagttctcattcctacatctcaagctagccaggcagtctcctctctatcagaagaaagcactg

SEQ ID NO: 31503 - DNA, 80 bp, Homo sapiens
ttgggtcttgaagttctcattcctacatctcaagctagccaggcagtctcctctctatcagaagaaagcactggtaattg

SEQ ID NO: 31504 - DNA, 82 bp, Homo sapiens
ttgaagttctcattcctacatctcaagctagccaggcagtctcctctctatcagaagaaagcactggtaattggctagactg

SEQ ID NO: 31505 - DNA, 82 bp, Homo sapiens
attcctacatctcaagctagccaggcagtctcctctctatcagaagaaagcactggtaattggctagactggctatgttgaa

SEQ ID NO: 31506 - DNA, 80 bp, Homo sapiens
aagctagccaggcagtctcctctctatcagaagaaagcactggtaattggctagactggctatgttgaaggtaacatgaa

SEQ ID NO: 31507 - DNA, 79 bp, Homo sapiens
aggcagtctcctctctatcagaagaaagcactggtaattggctagactggctatgttgaaggtaacatgaactctaaga

SEQ ID NO: 31508 - DNA, 79 bp, Homo sapiens
ctctctatcagaagaaagcactggtaattggctagactggctatgttgaaggtaacatgaactctaagatcttgaccca

SEQ ID NO: 31509 - DNA, 75 bp, Homo sapiens
agaaagcactggtaattggctagactggctatgttgaaggtaacatgaactctaagatcttgacccagggcgact

SEQ ID NO: 31510 - DNA, 73 bp, Homo sapiens
ctggtaattggctagactggctatgttgaaggtaacatgaactctaagatcttgacccagggcgacttggttt

SEQ ID NO: 31511 - DNA, 74 bp, Homo sapiens
ttggctagactggctatgttgaaggtaacatgaactctaagatcttgacccagggcgacttggttttgcttaag

SEQ ID NO: 31512 - DNA, 74 bp, Homo sapiens
gtaacatgaactctaagatcttgacccagggcgacttggttttgcttaaggtggcatcaccaatgttccaaatc

SEQ ID NO: 31513 - DNA, 70 bp, Homo sapiens
agggcgacttggttttgcttaaggtggcatcaccaatgttccaaatcctttagggagatgagggtatccc

SEQ ID NO: 31514 - DNA, 71 bp, Homo sapiens
tggttttgcttaaggtggcatcaccaatgttccaaatcctttagggagatgagggtatccccacagaaaaa

SEQ ID NO: 31515 - DNA, 72 bp, Homo sapiens
taaggtggcatcaccaatgttccaaatcctttagggagatgagggtatccccacagaaaaagaggaataata

SEQ ID NO: 31516 - DNA, 69 bp, Homo sapiens
aatgttccaaatcctttagggagatgagggtatccccacagaaaaagaggaataatagaccaatggatt

SEQ ID NO: 31517 - DNA, 72 bp, Homo sapiens
gagatgagggtatccccacagaaaaagaggaataatagaccaatggattttctcctttcaccagtatgtttg

SEQ ID NO: 31518 - DNA, 69 bp, Homo sapiens
agggtatccccacagaaaaagaggaataatagaccaatggattttctcctttcaccagtatgtttggaa

SEQ ID NO: 31519 - DNA, 71 bp, Homo sapiens
agaaaaagaggaataatagaccaatggattttctcctttcaccagtatgtttggaaccctctgatccaatg

SEQ ID NO: 31520 - DNA, 74 bp, Homo sapiens
aataatagaccaatggattttctcctttcaccagtatgtttggaaccctctgatccaatgtcttttgatactga

SEQ ID NO: 31521 - DNA, 76 bp, Homo sapiens
caatggattttctcctttcaccagtatgtttggaaccctctgatccaatgtcttttgatactgatctcttgtccaa

SEQ ID NO: 31522 - DNA, 76 bp, Homo sapiens
ttttctcctttcaccagtatgtttggaaccctctgatccaatgtcttttgatactgatctcttgtccaaatgagaa

SEQ ID NO: 31523 - DNA, 78 bp, Homo sapiens
tttggaaccctctgatccaatgtcttttgatactgatctcttgtccaaatgagaatgtcgctttagctgaaattcaaa

SEQ ID NO: 31524 - DNA, 80 bp, Homo sapiens
tactgatctcttgtccaaatgagaatgtcgctttagctgaaattcaaatggctgtgacaatttaccgaaatgatgaagta

SEQ ID NO: 31525 - DNA, 77 bp, Homo sapiens
tgtccaaatgagaatgtcgctttagctgaaattcaaatggctgtgacaatttaccgaaatgatgaagtaaccaccat

SEQ ID NO: 31526 - DNA, 76 bp, Homo sapiens
aatgagaatgtcgctttagctgaaattcaaatggctgtgacaatttaccgaaatgatgaagtaaccaccattccca

SEQ ID NO: 31527 - DNA, 75 bp, Homo sapiens
ttagctgaaattcaaatggctgtgacaatttaccgaaatgatgaagtaaccaccattcccacctttcactgccta

SEQ ID NO: 31528 - DNA, 73 bp, Homo sapiens
aaattcaaatggctgtgacaatttaccgaaatgatgaagtaaccaccattcccacctttcactgcctaggctc

SEQ ID NO: 31529 - DNA, 71 bp, Homo sapiens
aatttaccgaaatgatgaagtaaccaccattcccacctttcactgcctaggctccaagtctgaatacattt

SEQ ID NO: 31530 - DNA, 73 bp, Homo sapiens
aaatgatgaagtaaccaccattcccacctttcactgcctaggctccaagtctgaatacatttttgaaatagga

SEQ ID NO: 31531 - DNA, 70 bp, Homo sapiens
taaccaccattcccacctttcactgcctaggctccaagtctgaatacatttttgaaataggaactccctt

SEQ ID NO: 31532 - DNA, 70 bp, Homo sapiens
ttcccacctttcactgcctaggctccaagtctgaatacatttttgaaataggaactcccttttgcaaaaa

SEQ ID NO: 31533 - DNA, 68 bp, Homo sapiens
actgcctaggctccaagtctgaatacatttttgaaataggaactcccttttgcaaaaaagaaacctgg

SEQ ID NO: 31534 - DNA, 68 bp, Homo sapiens
ctccaagtctgaatacatttttgaaataggaactcccttttgcaaaaaagaaacctgggtgtcaggga

SEQ ID NO: 31535 - DNA, 67 bp, Homo sapiens
aatacatttttgaaataggaactcccttttgcaaaaaagaaacctgggtgtcagggaggtgaagtga

SEQ ID NO: 31536 - DNA, 68 bp, Homo sapiens
tttgaaataggaactcccttttgcaaaaaagaaacctgggtgtcagggaggtgaagtgacttgcccta

SEQ ID NO: 31537 - DNA, 73 bp, Homo sapiens
aactcccttttgcaaaaaagaaacctgggtgtcagggaggtgaagtgacttgccctaggagcagacagcatgc

SEQ ID NO: 31538 - DNA, 74 bp, Homo sapiens
aaaaaagaaacctgggtgtcagggaggtgaagtgacttgccctaggagcagacagcatgccaagaatggaatta

SEQ ID NO: 31539 - DNA, 78 bp, Homo sapiens
aaacctgggtgtcagggaggtgaagtgacttgccctaggagcagacagcatgccaagaatggaattaggctcaggatc

SEQ ID NO: 31540 - DNA, 83 bp, Homo sapiens
agtgacttgccctaggagcagacagcatgccaagaatggaattaggctcaggatccagcctgggctcaccctgtgtggctcat

SEQ ID NO: 31541 - DNA, 83 bp, Homo sapiens
cttgccctaggagcagacagcatgccaagaatggaattaggctcaggatccagcctgggctcaccctgtgtggctcattccca

SEQ ID NO: 31542 - DNA, 79 bp, Homo sapiens
agacagcatgccaagaatggaattaggctcaggatccagcctgggctcaccctgtgtggctcattcccacccaggaaac

SEQ ID NO: 31543 - DNA, 77 bp, Homo sapiens
caagaatggaattaggctcaggatccagcctgggctcaccctgtgtggctcattcccacccaggaaactgaagataa

SEQ ID NO: 31544 - DNA, 72 bp, Homo sapiens
aggatccagcctgggctcaccctgtgtggctcattcccacccaggaaactgaagataaaagatttgggaaaa

SEQ ID NO: 31545 - DNA, 66 bp, Homo sapiens
caggaaactgaagataaaagatttgggaaaacacaccaagaaaaaggggcagttttctttgcccaa

SEQ ID NO: 31546 - DNA, 66 bp, Homo sapiens
aactgaagataaaagatttgggaaaacacaccaagaaaaaggggcagttttctttgcccaagcatt

SEQ ID NO: 31547 - DNA, 67 bp, Homo sapiens
aaagatttgggaaaacacaccaagaaaaaggggcagttttctttgcccaagcatttggtgctagtta

SEQ ID NO: 31548 - DNA, 70 bp, Homo sapiens
aaaacacaccaagaaaaaggggcagttttctttgcccaagcatttggtgctagttagaggctgttcactc

SEQ ID NO: 31549 - DNA, 73 bp, Homo sapiens
ccaagaaaaaggggcagttttctttgcccaagcatttggtgctagttagaggctgttcactctctcctgctcc

SEQ ID NO: 31550 - DNA, 75 bp, Homo sapiens
agttttctttgcccaagcatttggtgctagttagaggctgttcactctctcctgctcctcttcggagtagaaata

SEQ ID NO: 31551 - DNA, 78 bp, Homo sapiens
tttgcccaagcatttggtgctagttagaggctgttcactctctcctgctcctcttcggagtagaaataaaggctgtga

SEQ ID NO: 31552 - DNA, 76 bp, Homo sapiens
atttggtgctagttagaggctgttcactctctcctgctcctcttcggagtagaaataaaggctgtgacacaaggaa

SEQ ID NO: 31553 - DNA, 76 bp, Homo sapiens
ctagttagaggctgttcactctctcctgctcctcttcggagtagaaataaaggctgtgacacaaggaagccagtgg

SEQ ID NO: 31554 - DNA, 74 bp, Homo sapiens
ctgttcactctctcctgctcctcttcggagtagaaataaaggctgtgacacaaggaagccagtggggtgggagg

SEQ ID NO: 31555 - DNA, 72 bp, Homo sapiens
tcctcttcggagtagaaataaaggctgtgacacaaggaagccagtggggtgggagggaggcaccataatccc

SEQ ID NO: 31556 - DNA, 70 bp, Homo sapiens
gtagaaataaaggctgtgacacaaggaagccagtggggtgggagggaggcaccataatccctccctaaaa

SEQ ID NO: 31557 - DNA, 71 bp, Homo sapiens
tgtgacacaaggaagccagtggggtgggagggaggcaccataatccctccctaaaacccacagaagactaa

SEQ ID NO: 31558 - DNA, 68 bp, Homo sapiens
ggggtgggagggaggcaccataatccctccctaaaacccacagaagactaacctgatactcttttgac

SEQ ID NO: 31559 - DNA, 73 bp, Homo sapiens
ggaggcaccataatccctccctaaaacccacagaagactaacctgatactcttttgacccaactgcatcaaca

SEQ ID NO: 31560 - DNA, 71 bp, Homo sapiens
ataatccctccctaaaacccacagaagactaacctgatactcttttgacccaactgcatcaacactaaaca

SEQ ID NO: 31561 - DNA, 77 bp, Homo sapiens
acagaagactaacctgatactcttttgacccaactgcatcaacactaaacagctgcagaccccctgaatctttcaca

SEQ ID NO: 31562 - DNA, 78 bp, Homo sapiens
actaacctgatactcttttgacccaactgcatcaacactaaacagctgcagaccccctgaatctttcacacatgccaa

SEQ ID NO: 31563 - DNA, 79 bp, Homo sapiens
atactcttttgacccaactgcatcaacactaaacagctgcagaccccctgaatctttcacacatgccaagtgaacattc

SEQ ID NO: 31564 - DNA, 81 bp, Homo sapiens
aactgcatcaacactaaacagctgcagaccccctgaatctttcacacatgccaagtgaacattcttgatgatttctctttg

SEQ ID NO: 31565 - DNA, 80 bp, Homo sapiens
atcaacactaaacagctgcagaccccctgaatctttcacacatgccaagtgaacattcttgatgatttctctttgtgacc

SEQ ID NO: 31566 - DNA, 79 bp, Homo sapiens
aaacagctgcagaccccctgaatctttcacacatgccaagtgaacattcttgatgatttctctttgtgaccgcaaccac

SEQ ID NO: 31567 - DNA, 78 bp, Homo sapiens
ccctgaatctttcacacatgccaagtgaacattcttgatgatttctctttgtgaccgcaaccacctgcaaaccagaac

SEQ ID NO: 31568 - DNA, 79 bp, Homo sapiens
ttcacacatgccaagtgaacattcttgatgatttctctttgtgaccgcaaccacctgcaaaccagaacgactctagaat

SEQ ID NO: 31569 - DNA, 74 bp, Homo sapiens
ccaagtgaacattcttgatgatttctctttgtgaccgcaaccacctgcaaaccagaacgactctagaatttcct

SEQ ID NO: 31570 - DNA, 72 bp, Homo sapiens
aacattcttgatgatttctctttgtgaccgcaaccacctgcaaaccagaacgactctagaatttccttcccc

SEQ ID NO: 31571 - DNA, 67 bp, Homo sapiens
atttctctttgtgaccgcaaccacctgcaaaccagaacgactctagaatttccttccccgcccccct

SEQ ID NO: 31572 - DNA, 66 bp, Homo sapiens
tttgtgaccgcaaccacctgcaaaccagaacgactctagaatttccttccccgcccccctttttgt

SEQ ID NO: 31573 - DNA, 63 bp, Homo sapiens
aaccacctgcaaaccagaacgactctagaatttccttccccgcccccctttttgtttagtttc

SEQ ID NO: 31574 - DNA, 63 bp, Homo sapiens
aaaccagaacgactctagaatttccttccccgcccccctttttgtttagtttctaatctcttg

SEQ ID NO: 31575 - DNA, 64 bp, Homo sapiens
aacgactctagaatttccttccccgcccccctttttgtttagtttctaatctcttgtttatgag

SEQ ID NO: 31576 - DNA, 64 bp, Homo sapiens
tccttccccgcccccctttttgtttagtttctaatctcttgtttatgaggtgtggggtttataa

SEQ ID NO: 31577 - DNA, 66 bp, Homo sapiens
cccccctttttgtttagtttctaatctcttgtttatgaggtgtggggtttataagggactgaatca

SEQ ID NO: 31578 - DNA, 71 bp, Homo sapiens
tgtttagtttctaatctcttgtttatgaggtgtggggtttataagggactgaatcaaatgaatgtaacaaa

SEQ ID NO: 31579 - DNA, 70 bp, Homo sapiens
gtttctaatctcttgtttatgaggtgtggggtttataagggactgaatcaaatgaatgtaacaaaaaaga

SEQ ID NO: 31580 - DNA, 72 bp, Homo sapiens
aaaaatgccttttctcagggccagtgagttgcaaataatttttaaagaaaagcctataattacatcatctca

SEQ ID NO: 31581 - DNA, 72 bp, Homo sapiens
gccttttctcagggccagtgagttgcaaataatttttaaagaaaagcctataattacatcatctcaataaat

SEQ ID NO: 31582 - DNA, 77 bp, Homo sapiens
agagaaatgacgcaccacagggtacatcagatgaatcagaaattacattgtttggacttcaaaacagtgtttactga

SEQ ID NO: 31583 - DNA, 75 bp, Homo sapiens
cacagggtacatcagatgaatcagaaattacattgtttggacttcaaaacagtgtttactgactctgggcttaaa

SEQ ID NO: 31584 - DNA, 75 bp, Homo sapiens
tacatcagatgaatcagaaattacattgtttggacttcaaaacagtgtttactgactctgggcttaaacttctag

SEQ ID NO: 31585 - DNA, 71 bp, Homo sapiens
aatcagaaattacattgtttggacttcaaaacagtgtttactgactctgggcttaaacttctagtccactc

SEQ ID NO: 31586 - DNA, 70 bp, Homo sapiens
aattacattgtttggacttcaaaacagtgtttactgactctgggcttaaacttctagtccactcctagaa

SEQ ID NO: 31587 - DNA, 69 bp, Homo sapiens
acttcaaaacagtgtttactgactctgggcttaaacttctagtccactcctagaacagaaaccctcaaa

SEQ ID NO: 31588 - DNA, 69 bp, Homo sapiens
aaacagtgtttactgactctgggcttaaacttctagtccactcctagaacagaaaccctcaaagttcaa

SEQ ID NO: 31589 - DNA, 69 bp, Homo sapiens
ttactgactctgggcttaaacttctagtccactcctagaacagaaaccctcaaagttcaagagtggttt

SEQ ID NO: 31590 - DNA, 67 bp, Homo sapiens
gcttaaacttctagtccactcctagaacagaaaccctcaaagttcaagagtggttttttttgtacaa

SEQ ID NO: 31591 - DNA, 67 bp, Homo sapiens
cttctagtccactcctagaacagaaaccctcaaagttcaagagtggttttttttgtacaattgttta

SEQ ID NO: 31592 - DNA, 67 bp, Homo sapiens
actcctagaacagaaaccctcaaagttcaagagtggttttttttgtacaattgtttatacaaattca

SEQ ID NO: 31593 - DNA, 66 bp, Homo sapiens
cagaaaccctcaaagttcaagagtggttttttttgtacaattgtttatacaaattcaacaaaggta

SEQ ID NO: 31594 - DNA, 68 bp, Homo sapiens
ttcaagagtggttttttttgtacaattgtttatacaaattcaacaaaggtaaaatcgcatcagggaag

SEQ ID NO: 31595 - DNA, 67 bp, Homo sapiens
ggttttttttgtacaattgtttatacaaattcaacaaaggtaaaatcgcatcagggaaggtctagga

SEQ ID NO: 31596 - DNA, 70 bp, Homo sapiens
tacaattgtttatacaaattcaacaaaggtaaaatcgcatcagggaaggtctaggaaacaccaccttaca

SEQ ID NO: 31597 - DNA, 69 bp, Homo sapiens
ttgtttatacaaattcaacaaaggtaaaatcgcatcagggaaggtctaggaaacaccaccttacaacaa

SEQ ID NO: 31598 - DNA, 70 bp, Homo sapiens
attcaacaaaggtaaaatcgcatcagggaaggtctaggaaacaccaccttacaacaatggcacttataaa

SEQ ID NO: 31599 - DNA, 73 bp, Homo sapiens
taaaatcgcatcagggaaggtctaggaaacaccaccttacaacaatggcacttataaatgcagaactttacaa

SEQ ID NO: 31600 - DNA, 71 bp, Homo sapiens
atcagggaaggtctaggaaacaccaccttacaacaatggcacttataaatgcagaactttacaactaggaa

SEQ ID NO: 31601 - DNA, 74 bp, Homo sapiens
tctaggaaacaccaccttacaacaatggcacttataaatgcagaactttacaactaggaaatagccatgttaca

SEQ ID NO: 31602 - DNA, 71 bp, Homo sapiens
aaacaccaccttacaacaatggcacttataaatgcagaactttacaactaggaaatagccatgttacaaac

SEQ ID NO: 31603 - DNA, 75 bp, Homo sapiens
tacaacaatggcacttataaatgcagaactttacaactaggaaatagccatgttacaaacctaaatgagaactca

SEQ ID NO: 31604 - DNA, 73 bp, Homo sapiens
agaactttacaactaggaaatagccatgttacaaacctaaatgagaactcaactcacacttcagaggagagaa

SEQ ID NO: 31605 - DNA, 74 bp, Homo sapiens
tttacaactaggaaatagccatgttacaaacctaaatgagaactcaactcacacttcagaggagagaagcaaaa

SEQ ID NO: 31606 - DNA, 73 bp, Homo sapiens
aaatagccatgttacaaacctaaatgagaactcaactcacacttcagaggagagaagcaaaagcaaaagaaag

SEQ ID NO: 31607 - DNA, 74 bp, Homo sapiens
atgttacaaacctaaatgagaactcaactcacacttcagaggagagaagcaaaagcaaaagaaaggctatgtgg

SEQ ID NO: 31608 - DNA, 77 bp, Homo sapiens
ctaaatgagaactcaactcacacttcagaggagagaagcaaaagcaaaagaaaggctatgtgggagcatttattcta

SEQ ID NO: 31609 - DNA, 76 bp, Homo sapiens
aactcaactcacacttcagaggagagaagcaaaagcaaaagaaaggctatgtgggagcatttattctacgtcttga

SEQ ID NO: 31610 - DNA, 77 bp, Homo sapiens
tcagaggagagaagcaaaagcaaaagaaaggctatgtgggagcatttattctacgtcttgactcactgtataaatta

SEQ ID NO: 31611 - DNA, 77 bp, Homo sapiens
gaagcaaaagcaaaagaaaggctatgtgggagcatttattctacgtcttgactcactgtataaattagatctatgta

SEQ ID NO: 31612 - DNA, 80 bp, Homo sapiens
aaaggctatgtgggagcatttattctacgtcttgactcactgtataaattagatctatgtaagtacaagagctcatgctg

SEQ ID NO: 31613 - DNA, 82 bp, Homo sapiens
agcatttattctacgtcttgactcactgtataaattagatctatgtaagtacaagagctcatgctggagcagaacctcctga

SEQ ID NO: 31614 - DNA, 82 bp, Homo sapiens
actcactgtataaattagatctatgtaagtacaagagctcatgctggagcagaacctcctgagtgcaaaggctgaagtcgaa

SEQ ID NO: 31615 - DNA, 79 bp, Homo sapiens
taaattagatctatgtaagtacaagagctcatgctggagcagaacctcctgagtgcaaaggctgaagtcgaaattttaa

SEQ ID NO: 31616 - DNA, 76 bp, Homo sapiens
taagtacaagagctcatgctggagcagaacctcctgagtgcaaaggctgaagtcgaaattttaaaatttgagaaaa

SEQ ID NO: 31617 - DNA, 75 bp, Homo sapiens
atgctggagcagaacctcctgagtgcaaaggctgaagtcgaaattttaaaatttgagaaaagtgaattctctaca

SEQ ID NO: 31618 - DNA, 71 bp, Homo sapiens
agaacctcctgagtgcaaaggctgaagtcgaaattttaaaatttgagaaaagtgaattctctacagaggaa

SEQ ID NO: 31619 - DNA, 71 bp, Homo sapiens
ctcctgagtgcaaaggctgaagtcgaaattttaaaatttgagaaaagtgaattctctacagaggaaacttg

SEQ ID NO: 31620 - DNA, 70 bp, Homo sapiens
gtcgaaattttaaaatttgagaaaagtgaattctctacagaggaaacttggcagagtatcttactttgac

SEQ ID NO: 31621 - DNA, 71 bp, Homo sapiens
aaatttgagaaaagtgaattctctacagaggaaacttggcagagtatcttactttgactataatttacatt

SEQ ID NO: 31622 - DNA, 77 bp, Homo sapiens
attctctacagaggaaacttggcagagtatcttactttgactataatttacatttatccacaacatgctcatgtaac

SEQ ID NO: 31623 - DNA, 77 bp, Homo sapiens
gaaacttggcagagtatcttactttgactataatttacatttatccacaacatgctcatgtaactcttgaggtacaa

SEQ ID NO: 31624 - DNA, 78 bp, Homo sapiens
agtatcttactttgactataatttacatttatccacaacatgctcatgtaactcttgaggtacaaagcagactctcaa

SEQ ID NO: 31625 - DNA, 77 bp, Homo sapiens
atttacatttatccacaacatgctcatgtaactcttgaggtacaaagcagactctcaacttccagttaaacatgctt

SEQ ID NO: 31626 - DNA, 75 bp, Homo sapiens
atgctcatgtaactcttgaggtacaaagcagactctcaacttccagttaaacatgcttttaagtggaaggtctta

SEQ ID NO: 31627 - DNA, 73 bp, Homo sapiens
tgtaactcttgaggtacaaagcagactctcaacttccagttaaacatgcttttaagtggaaggtcttagccta

SEQ ID NO: 31628 - DNA, 70 bp, Homo sapiens
aggtacaaagcagactctcaacttccagttaaacatgcttttaagtggaaggtcttagcctactttgtta

SEQ ID NO: 31629 - DNA, 71 bp, Homo sapiens
actctcaacttccagttaaacatgcttttaagtggaaggtcttagcctactttgttagatctgggcacatt

SEQ ID NO: 31630 - DNA, 75 bp, Homo sapiens
acatgcttttaagtggaaggtcttagcctactttgttagatctgggcacatttgtagatgggttgtgtcgatgaa

SEQ ID NO: 31631 - DNA, 74 bp, Homo sapiens
ttttaagtggaaggtcttagcctactttgttagatctgggcacatttgtagatgggttgtgtcgatgaagtaca

SEQ ID NO: 31632 - DNA, 72 bp, Homo sapiens
aaggtcttagcctactttgttagatctgggcacatttgtagatgggttgtgtcgatgaagtacacgttaaat

SEQ ID NO: 31633 - DNA, 73 bp, Homo sapiens
tttgttagatctgggcacatttgtagatgggttgtgtcgatgaagtacacgttaaattctctcctaccttaag

SEQ ID NO: 31634 - DNA, 75 bp, Homo sapiens
tagatctgggcacatttgtagatgggttgtgtcgatgaagtacacgttaaattctctcctaccttaaggaaatca

SEQ ID NO: 31635 - DNA, 69 bp, Homo sapiens
atttgtagatgggttgtgtcgatgaagtacacgttaaattctctcctaccttaaggaaatcaggaaaat

SEQ ID NO: 31636 - DNA, 71 bp, Homo sapiens
gttgtgtcgatgaagtacacgttaaattctctcctaccttaaggaaatcaggaaaattggcaatctcaaaa

SEQ ID NO: 31637 - DNA, 71 bp, Homo sapiens
gtcgatgaagtacacgttaaattctctcctaccttaaggaaatcaggaaaattggcaatctcaaaacaata

SEQ ID NO: 31638 - DNA, 70 bp, Homo sapiens
ctcctaccttaaggaaatcaggaaaattggcaatctcaaaacaataaaaacactggtatgcattcaaacc

SEQ ID NO: 31639 - DNA, 72 bp, Homo sapiens
ccttaaggaaatcaggaaaattggcaatctcaaaacaataaaaacactggtatgcattcaaaccttgcataa

SEQ ID NO: 31640 - DNA, 71 bp, Homo sapiens
ttggcaatctcaaaacaataaaaacactggtatgcattcaaaccttgcataaataacttttaaacaatttg

SEQ ID NO: 31641 - DNA, 68 bp, Homo sapiens
acaataaaaacactggtatgcattcaaaccttgcataaataacttttaaacaatttgtacaaaaatag

SEQ ID NO: 31642 - DNA, 72 bp, Homo sapiens
aacactggtatgcattcaaaccttgcataaataacttttaaacaatttgtacaaaaatagttctgcataatg

SEQ ID NO: 31643 - DNA, 74 bp, Homo sapiens
gtatgcattcaaaccttgcataaataacttttaaacaatttgtacaaaaatagttctgcataatgtaagatgta

SEQ ID NO: 31644 - DNA, 70 bp, Homo sapiens
ccttgcataaataacttttaaacaatttgtacaaaaatagttctgcataatgtaagatgtaacaaaacca

SEQ ID NO: 31645 - DNA, 67 bp, Homo sapiens
aaataacttttaaacaatttgtacaaaaatagttctgcataatgtaagatgtaacaaaaccaaccaa

SEQ ID NO: 31646 - DNA, 72 bp, Homo sapiens
ccaaccaaacaaaaaaaagtgtcaagacggcagcagatgtggtgtgtggtccactttatgtcaacacccaaa

SEQ ID NO: 31647 - DNA, 72 bp, Homo sapiens
caaacaaaaaaaagtgtcaagacggcagcagatgtggtgtgtggtccactttatgtcaacacccaaaacctc

SEQ ID NO: 31648 - DNA, 71 bp, Homo sapiens
aaaaaaaagtgtcaagacggcagcagatgtggtgtgtggtccactttatgtcaacacccaaaacctcggtg

SEQ ID NO: 31649 - DNA, 75 bp, Homo sapiens
aaagtgtcaagacggcagcagatgtggtgtgtggtccactttatgtcaacacccaaaacctcggtgttgcaagga

SEQ ID NO: 31650 - DNA, 75 bp, Homo sapiens
aagacggcagcagatgtggtgtgtggtccactttatgtcaacacccaaaacctcggtgttgcaaggaatgaagtg

SEQ ID NO: 31651 - DNA, 73 bp, Homo sapiens
agatgtggtgtgtggtccactttatgtcaacacccaaaacctcggtgttgcaaggaatgaagtgtccaaaaca

SEQ ID NO: 31652 - DNA, 72 bp, Homo sapiens
atgtggtgtgtggtccactttatgtcaacacccaaaacctcggtgttgcaaggaatgaagtgtccaaaacac

SEQ ID NO: 31653 - DNA, 72 bp, Homo sapiens
tgtgtggtccactttatgtcaacacccaaaacctcggtgttgcaaggaatgaagtgtccaaaacaccactac

SEQ ID NO: 31654 - DNA, 71 bp, Homo sapiens
tccactttatgtcaacacccaaaacctcggtgttgcaaggaatgaagtgtccaaaacaccactaccactaa

SEQ ID NO: 31655 - DNA, 68 bp, Homo sapiens
acccaaaacctcggtgttgcaaggaatgaagtgtccaaaacaccactaccactaacagaaactcctaa

SEQ ID NO: 31656 - DNA, 75 bp, Homo sapiens
atgaagtgtccaaaacaccactaccactaacagaaactcctaagctcatgcttcagtatgagaatttctccgaag

SEQ ID NO: 31657 - DNA, 76 bp, Homo sapiens
actcctaagctcatgcttcagtatgagaatttctccgaagtccaccctcctctccgacaggaatgtcttcttgtaa

SEQ ID NO: 31658 - DNA, 76 bp, Homo sapiens
taagctcatgcttcagtatgagaatttctccgaagtccaccctcctctccgacaggaatgtcttcttgtaaaggcc

SEQ ID NO: 31659 - DNA, 71 bp, Homo sapiens
gtatgagaatttctccgaagtccaccctcctctccgacaggaatgtcttcttgtaaaggccgccttagaaa

SEQ ID NO: 31660 - DNA, 69 bp, Homo sapiens
agaatttctccgaagtccaccctcctctccgacaggaatgtcttcttgtaaaggccgccttagaaatgg

SEQ ID NO: 31661 - DNA, 73 bp, Homo sapiens
aagtccaccctcctctccgacaggaatgtcttcttgtaaaggccgccttagaaatggtccagaaagcagtgca

SEQ ID NO: 31662 - DNA, 75 bp, Homo sapiens
tctccgacaggaatgtcttcttgtaaaggccgccttagaaatggtccagaaagcagtgcagttacgattcagaaa

SEQ ID NO: 31663 - DNA, 73 bp, Homo sapiens
aggaatgtcttcttgtaaaggccgccttagaaatggtccagaaagcagtgcagttacgattcagaaagaccaa

SEQ ID NO: 31664 - DNA, 72 bp, Homo sapiens
tcttcttgtaaaggccgccttagaaatggtccagaaagcagtgcagttacgattcagaaagaccaaaggaaa

SEQ ID NO: 31665 - DNA, 73 bp, Homo sapiens
aaggccgccttagaaatggtccagaaagcagtgcagttacgattcagaaagaccaaaggaaagtgtcggctca

SEQ ID NO: 31666 - DNA, 73 bp, Homo sapiens
aaatggtccagaaagcagtgcagttacgattcagaaagaccaaaggaaagtgtcggctcactcatcccccaaa

SEQ ID NO: 31667 - DNA, 70 bp, Homo sapiens
aaagcagtgcagttacgattcagaaagaccaaaggaaagtgtcggctcactcatcccccaaacgggtggt

SEQ ID NO: 31668 - DNA, 69 bp, Homo sapiens
agttacgattcagaaagaccaaaggaaagtgtcggctcactcatcccccaaacgggtggttgaacagct

SEQ ID NO: 31669 - DNA, 69 bp, Homo sapiens
attcagaaagaccaaaggaaagtgtcggctcactcatcccccaaacgggtggttgaacagcttctccct

SEQ ID NO: 31670 - DNA, 70 bp, Homo sapiens
aaaggaaagtgtcggctcactcatcccccaaacgggtggttgaacagcttctcccttggaaagacttgca

SEQ ID NO: 31671 - DNA, 71 bp, Homo sapiens
aagtgtcggctcactcatcccccaaacgggtggttgaacagcttctcccttggaaagacttgcaaaatgga

SEQ ID NO: 31672 - DNA, 70 bp, Homo sapiens
actcatcccccaaacgggtggttgaacagcttctcccttggaaagacttgcaaaatggaattgcgttgtg

SEQ ID NO: 31673 - DNA, 70 bp, Homo sapiens
aaacgggtggttgaacagcttctcccttggaaagacttgcaaaatggaattgcgttgtggtctgttgtcc

SEQ ID NO: 31674 - DNA, 73 bp, Homo sapiens
ttgaacagcttctcccttggaaagacttgcaaaatggaattgcgttgtggtctgttgtcccacgttccaaatg

SEQ ID NO: 31675 - DNA, 70 bp, Homo sapiens
aagacttgcaaaatggaattgcgttgtggtctgttgtcccacgttccaaatggaaaataaaagccctcat

SEQ ID NO: 31676 - DNA, 68 bp, Homo sapiens
aaaatggaattgcgttgtggtctgttgtcccacgttccaaatggaaaataaaagccctcatttttgta

SEQ ID NO: 31677 - DNA, 68 bp, Homo sapiens
aattgcgttgtggtctgttgtcccacgttccaaatggaaaataaaagccctcatttttgtaaagtctc

SEQ ID NO: 31678 - DNA, 68 bp, Homo sapiens
tggtctgttgtcccacgttccaaatggaaaataaaagccctcatttttgtaaagtctctcccctccca

SEQ ID NO: 31679 - DNA, 67 bp, Homo sapiens
tcccacgttccaaatggaaaataaaagccctcatttttgtaaagtctctcccctcccagagcccgcc

SEQ ID NO: 31680 - DNA, 67 bp, Homo sapiens
atggaaaataaaagccctcatttttgtaaagtctctcccctcccagagcccgccccgtatttacata

SEQ ID NO: 31681 - DNA, 67 bp, Homo sapiens
taaaagccctcatttttgtaaagtctctcccctcccagagcccgccccgtatttacatacttatcct

SEQ ID NO: 31682 - DNA, 68 bp, Homo sapiens
atttttgtaaagtctctcccctcccagagcccgccccgtatttacatacttatccttggactaactca

SEQ ID NO: 31683 - DNA, 69 bp, Homo sapiens
ccagagcccgccccgtatttacatacttatccttggactaactcagtttttgcaggagtttttcttcta

SEQ ID NO: 31684 - DNA, 68 bp, Homo sapiens
ccccgtatttacatacttatccttggactaactcagtttttgcaggagtttttcttctacttgcccaa

SEQ ID NO: 31685 - DNA, 70 bp, Homo sapiens
atttacatacttatccttggactaactcagtttttgcaggagtttttcttctacttgcccaaactggaca

SEQ ID NO: 31686 - DNA, 74 bp, Homo sapiens
ttatccttggactaactcagtttttgcaggagtttttcttctacttgcccaaactggacactcacagacatctc

SEQ ID NO: 31687 - DNA, 74 bp, Homo sapiens
actaactcagtttttgcaggagtttttcttctacttgcccaaactggacactcacagacatctcggctatgaac

SEQ ID NO: 31688 - DNA, 78 bp, Homo sapiens
tttttgcaggagtttttcttctacttgcccaaactggacactcacagacatctcggctatgaactgctcacagccttc

SEQ ID NO: 31689 - DNA, 79 bp, Homo sapiens
ttttcttctacttgcccaaactggacactcacagacatctcggctatgaactgctcacagccttccttggtgacttgct

SEQ ID NO: 31690 - DNA, 83 bp, Homo sapiens
tacttgcccaaactggacactcacagacatctcggctatgaactgctcacagccttccttggtgacttgcttgcagtacctca

SEQ ID NO: 31691 - DNA, 82 bp, Homo sapiens
aaactggacactcacagacatctcggctatgaactgctcacagccttccttggtgacttgcttgcagtacctcaggtcaata

SEQ ID NO: 31692 - DNA, 84 bp, Homo sapiens
actcacagacatctcggctatgaactgctcacagccttccttggtgacttgcttgcagtacctcaggtcaatatgacagatgtt

SEQ ID NO: 31693 - DNA, 83 bp, Homo sapiens
ggctatgaactgctcacagccttccttggtgacttgcttgcagtacctcaggtcaatatgacagatgtttccacagcgtttga

SEQ ID NO: 31694 - DNA, 80 bp, Homo sapiens
aactgctcacagccttccttggtgacttgcttgcagtacctcaggtcaatatgacagatgtttccacagcgtttgaagaa

SEQ ID NO: 31695 - DNA, 78 bp, Homo sapiens
acagccttccttggtgacttgcttgcagtacctcaggtcaatatgacagatgtttccacagcgtttgaagaaggacag

SEQ ID NO: 31696 - DNA, 83 bp, Homo sapiens
tgacttgcttgcagtacctcaggtcaatatgacagatgtttccacagcgtttgaagaaggacaggcactgatcagtgacctta

SEQ ID NO: 31697 - DNA, 83 bp, Homo sapiens
ttgcagtacctcaggtcaatatgacagatgtttccacagcgtttgaagaaggacaggcactgatcagtgaccttattgcagtc

SEQ ID NO: 31698 - DNA, 82 bp, Homo sapiens
tttgaagaaggacaggcactgatcagtgaccttattgcagtctgcagagaagaaatagtaatgtgaggtgtgaaggccagga

SEQ ID NO: 31699 - DNA, 80 bp, Homo sapiens
tgtagctgtcagacggctgagggggcctcaagtgcatcctggcagttacctgtcggtggtaaggcagcacttggtgtgaa

SEQ ID NO: 31700 - DNA, 77 bp, Homo sapiens
agacggctgagggggcctcaagtgcatcctggcagttacctgtcggtggtaaggcagcacttggtgtgaagtgagac

SEQ ID NO: 31701 - DNA, 78 bp, Homo sapiens
gggcctcaagtgcatcctggcagttacctgtcggtggtaaggcagcacttggtgtgaagtgagacctggaggcccagc

SEQ ID NO: 31702 - DNA, 78 bp, Homo sapiens
tgcatcctggcagttacctgtcggtggtaaggcagcacttggtgtgaagtgagacctggaggcccagctggctccttt

SEQ ID NO: 31703 - DNA, 74 bp, Homo sapiens
agttacctgtcggtggtaaggcagcacttggtgtgaagtgagacctggaggcccagctggctccttttctgagt

SEQ ID NO: 31704 - DNA, 76 bp, Homo sapiens
ctgtcggtggtaaggcagcacttggtgtgaagtgagacctggaggcccagctggctccttttctgagttgtctttg

SEQ ID NO: 31705 - DNA, 75 bp, Homo sapiens
taaggcagcacttggtgtgaagtgagacctggaggcccagctggctccttttctgagttgtctttgggtactaat

SEQ ID NO: 31706 - DNA, 72 bp, Homo sapiens
acttggtgtgaagtgagacctggaggcccagctggctccttttctgagttgtctttgggtactaatttgggc

SEQ ID NO: 31707 - DNA, 70 bp, Homo sapiens
aagtgagacctggaggcccagctggctccttttctgagttgtctttgggtactaatttgggccctctttg

SEQ ID NO: 31708 - DNA, 73 bp, Homo sapiens
aggcccagctggctccttttctgagttgtctttgggtactaatttgggccctctttggaggctcattcatgcc

SEQ ID NO: 31709 - DNA, 74 bp, Homo sapiens
ctccttttctgagttgtctttgggtactaatttgggccctctttggaggctcattcatgcccagccagcattct

SEQ ID NO: 31710 - DNA, 76 bp, Homo sapiens
ttctgagttgtctttgggtactaatttgggccctctttggaggctcattcatgcccagccagcattcttcctggct

SEQ ID NO: 31711 - DNA, 77 bp, Homo sapiens
ttgggtactaatttgggccctctttggaggctcattcatgcccagccagcattcttcctggcttgtggttcacatat

SEQ ID NO: 31712 - DNA, 77 bp, Homo sapiens
taatttgggccctctttggaggctcattcatgcccagccagcattcttcctggcttgtggttcacatattccccaaa

SEQ ID NO: 31713 - DNA, 78 bp, Homo sapiens
tctttggaggctcattcatgcccagccagcattcttcctggcttgtggttcacatattccccaaaactggagcccaaa

SEQ ID NO: 31714 - DNA, 77 bp, Homo sapiens
tcattcatgcccagccagcattcttcctggcttgtggttcacatattccccaaaactggagcccaaagacccttcca

SEQ ID NO: 31715 - DNA, 72 bp, Homo sapiens
ccagccagcattcttcctggcttgtggttcacatattccccaaaactggagcccaaagacccttccaacaaa

SEQ ID NO: 31716 - DNA, 70 bp, Homo sapiens
attcttcctggcttgtggttcacatattccccaaaactggagcccaaagacccttccaacaaagaagcta

SEQ ID NO: 31717 - DNA, 68 bp, Homo sapiens
cttgtggttcacatattccccaaaactggagcccaaagacccttccaacaaagaagctagaaggaaaa

SEQ ID NO: 31718 - DNA, 66 bp, Homo sapiens
acatattccccaaaactggagcccaaagacccttccaacaaagaagctagaaggaaaagactttct

SEQ ID NO: 31719 - DNA, 66 bp, Homo sapiens
caaaactggagcccaaagacccttccaacaaagaagctagaaggaaaagactttctttggtccctc

SEQ ID NO: 31720 - DNA, 72 bp, Homo sapiens
ttctcccacggagtgttaggcagacccgatgggggcccctgactcaccagacaggttgatctcggttaagga

SEQ ID NO: 31721 - DNA, 71 bp, Homo sapiens
agtgttaggcagacccgatgggggcccctgactcaccagacaggttgatctcggttaaggagtctcgggtg

SEQ ID NO: 31722 - DNA, 73 bp, Homo sapiens
taggcagacccgatgggggcccctgactcaccagacaggttgatctcggttaaggagtctcgggtggtggtgc

SEQ ID NO: 31723 - DNA, 75 bp, Homo sapiens
ggggcccctgactcaccagacaggttgatctcggttaaggagtctcgggtggtggtgccaacagcagtgagcagg

SEQ ID NO: 31724 - DNA, 77 bp, Homo sapiens
actcaccagacaggttgatctcggttaaggagtctcgggtggtggtgccaacagcagtgagcaggttgatagactgg

SEQ ID NO: 31725 - DNA, 77 bp, Homo sapiens
agacaggttgatctcggttaaggagtctcgggtggtggtgccaacagcagtgagcaggttgatagactggtcggtga

SEQ ID NO: 31726 - DNA, 75 bp, Homo sapiens
atctcggttaaggagtctcgggtggtggtgccaacagcagtgagcaggttgatagactggtcggtgacgtggtta

SEQ ID NO: 31727 - DNA, 77 bp, Homo sapiens
taaggagtctcgggtggtggtgccaacagcagtgagcaggttgatagactggtcggtgacgtggttacagtaactga

SEQ ID NO: 31728 - DNA, 77 bp, Homo sapiens
gggtggtggtgccaacagcagtgagcaggttgatagactggtcggtgacgtggttacagtaactgaggtggagcttg

SEQ ID NO: 31729 - DNA, 79 bp, Homo sapiens
aacagcagtgagcaggttgatagactggtcggtgacgtggttacagtaactgaggtggagcttggagagcaggggcatg

SEQ ID NO: 31730 - DNA, 79 bp, Homo sapiens
agcaggttgatagactggtcggtgacgtggttacagtaactgaggtggagcttggagagcaggggcatgtggcggatga

SEQ ID NO: 31731 - DNA, 82 bp, Homo sapiens
ttgatagactggtcggtgacgtggttacagtaactgaggtggagcttggagagcaggggcatgtggcggatgatgagccgca

SEQ ID NO: 31732 - DNA, 84 bp, Homo sapiens
gtgacgtggttacagtaactgaggtggagcttggagagcaggggcatgtggcggatgatgagccgcagggaggcatctgtgatg

SEQ ID NO: 31733 - DNA, 84 bp, Homo sapiens
gtggttacagtaactgaggtggagcttggagagcaggggcatgtggcggatgatgagccgcagggaggcatctgtgatgtccag

SEQ ID NO: 31734 - DNA, 88 bp, Homo sapiens
taactgaggtggagcttggagagcaggggcatgtggcggatgatgagccgcagggaggcatctgtgatgtccaggcctgccaggcgca

SEQ ID NO: 31735 - DNA, 88 bp, Homo sapiens
ttggagagcaggggcatgtggcggatgatgagccgcagggaggcatctgtgatgtccaggcctgccaggcgcagctccacgatgttcc

SEQ ID NO: 31736 - DNA, 85 bp, Homo sapiens
aggggcatgtggcggatgatgagccgcagggaggcatctgtgatgtccaggcctgccaggcgcagctccacgatgttccggagct

SEQ ID NO: 31737 - DNA, 87 bp, Homo sapiens
atgtggcggatgatgagccgcagggaggcatctgtgatgtccaggcctgccaggcgcagctccacgatgttccggagcttgctccga

SEQ ID NO: 31738 - DNA, 89 bp, Homo sapiens
tgatgagccgcagggaggcatctgtgatgtccaggcctgccaggcgcagctccacgatgttccggagcttgctccgattgtccatctga

SEQ ID NO: 31739 - DNA, 83 bp, Homo sapiens
aggcatctgtgatgtccaggcctgccaggcgcagctccacgatgttccggagcttgctccgattgtccatctgacctggtggg

SEQ ID NO: 31740 - DNA, 83 bp, Homo sapiens
tgtgatgtccaggcctgccaggcgcagctccacgatgttccggagcttgctccgattgtccatctgacctggtggggcaggaa

SEQ ID NO: 31741 - DNA, 78 bp, Homo sapiens
aggcctgccaggcgcagctccacgatgttccggagcttgctccgattgtccatctgacctggtggggcaggaaggagg

SEQ ID NO: 31742 - DNA, 76 bp, Homo sapiens
aggcgcagctccacgatgttccggagcttgctccgattgtccatctgacctggtggggcaggaaggagggggcaac

SEQ ID NO: 31743 - DNA, 73 bp, Homo sapiens
tctagctcgctcaccccacccccacagaaacccccagcctggcaactcacctggcctgttgtctgtgggcggg

SEQ ID NO: 31744 - DNA, 71 bp, Homo sapiens
cccacccccacagaaacccccagcctggcaactcacctggcctgttgtctgtgggcggggacaggagatcc

SEQ ID NO: 31745 - DNA, 76 bp, Homo sapiens
acagaaacccccagcctggcaactcacctggcctgttgtctgtgggcggggacaggagatcccgcatctgggcatc

SEQ ID NO: 31746 - DNA, 77 bp, Homo sapiens
cagcctggcaactcacctggcctgttgtctgtgggcggggacaggagatcccgcatctgggcatcctttagtccctc

SEQ ID NO: 31747 - DNA, 74 bp, Homo sapiens
aactcacctggcctgttgtctgtgggcggggacaggagatcccgcatctgggcatcctttagtccctccaccca

SEQ ID NO: 31748 - DNA, 75 bp, Homo sapiens
cctgttgtctgtgggcggggacaggagatcccgcatctgggcatcctttagtccctccacccactggacatccag

SEQ ID NO: 31749 - DNA, 75 bp, Homo sapiens
tgtctgtgggcggggacaggagatcccgcatctgggcatcctttagtccctccacccactggacatccagggtcc

SEQ ID NO: 31750 - DNA, 75 bp, Homo sapiens
acaggagatcccgcatctgggcatcctttagtccctccacccactggacatccagggtccggagcagcggacaac

SEQ ID NO: 31751 - DNA, 77 bp, Homo sapiens
ccgcatctgggcatcctttagtccctccacccactggacatccagggtccggagcagcggacaactggagctgcaaa

SEQ ID NO: 31752 - DNA, 76 bp, Homo sapiens
gcatcctttagtccctccacccactggacatccagggtccggagcagcggacaactggagctgcaaagggccgaga

SEQ ID NO: 31753 - DNA, 73 bp, Homo sapiens
ctttagtccctccacccactggacatccagggtccggagcagcggacaactggagctgcaaagggccgagacc

SEQ ID NO: 31754 - DNA, 80 bp, Homo sapiens
acccactggacatccagggtccggagcagcggacaactggagctgcaaagggccgagaccgcgatccatgagcagcctga

SEQ ID NO: 31755 - DNA, 81 bp, Homo sapiens
acatccagggtccggagcagcggacaactggagctgcaaagggccgagaccgcgatccatgagcagcctgacagcaccaag

SEQ ID NO: 31756 - DNA, 80 bp, Homo sapiens
ggtccggagcagcggacaactggagctgcaaagggccgagaccgcgatccatgagcagcctgacagcaccaagtcccgga

SEQ ID NO: 31757 - DNA, 78 bp, Homo sapiens
agcggacaactggagctgcaaagggccgagaccgcgatccatgagcagcctgacagcaccaagtcccggagccctggg

SEQ ID NO: 31758 - DNA, 76 bp, Homo sapiens
ctgcaaagggccgagaccgcgatccatgagcagcctgacagcaccaagtcccggagccctggggggacatagaaaa

SEQ ID NO: 31759 - DNA, 73 bp, Homo sapiens
aagggccgagaccgcgatccatgagcagcctgacagcaccaagtcccggagccctggggggacatagaaaagg

SEQ ID NO: 31760 - DNA, 74 bp, Homo sapiens
accgcgatccatgagcagcctgacagcaccaagtcccggagccctggggggacatagaaaagggtgaaggtcag

SEQ ID NO: 31761 - DNA, 84 bp, Homo sapiens
agccctcactgcagcagacacactcggggccactggcccagggctcaccaggcagccggttgatgagccagctcagctgcttct

SEQ ID NO: 31762 - DNA, 83 bp, Homo sapiens
agcagacacactcggggccactggcccagggctcaccaggcagccggttgatgagccagctcagctgcttcttggagatattg

SEQ ID NO: 31763 - DNA, 81 bp, Homo sapiens
acactcggggccactggcccagggctcaccaggcagccggttgatgagccagctcagctgcttcttggagatattggtcca

SEQ ID NO: 31764 - DNA, 82 bp, Homo sapiens
actggcccagggctcaccaggcagccggttgatgagccagctcagctgcttcttggagatattggtccagctgaggtcgagg

SEQ ID NO: 31765 - DNA, 84 bp, Homo sapiens
gctcaccaggcagccggttgatgagccagctcagctgcttcttggagatattggtccagctgaggtcgagggagacgggctgtc

SEQ ID NO: 31766 - DNA, 83 bp, Homo sapiens
cagccggttgatgagccagctcagctgcttcttggagatattggtccagctgaggtcgagggagacgggctgtcgccggatga

SEQ ID NO: 31767 - DNA, 86 bp, Homo sapiens
gttgatgagccagctcagctgcttcttggagatattggtccagctgaggtcgagggagacgggctgtcgccggatgatgccactca

SEQ ID NO: 31768 - DNA, 84 bp, Homo sapiens
agctcagctgcttcttggagatattggtccagctgaggtcgagggagacgggctgtcgccggatgatgccactcagcatcaggg

SEQ ID NO: 31769 - DNA, 83 bp, Homo sapiens
ttcttggagatattggtccagctgaggtcgagggagacgggctgtcgccggatgatgccactcagcatcaggggtgtgataga

SEQ ID NO: 31770 - DNA, 83 bp, Homo sapiens
agatattggtccagctgaggtcgagggagacgggctgtcgccggatgatgccactcagcatcaggggtgtgatagacttgcag

SEQ ID NO: 31771 - DNA, 82 bp, Homo sapiens
ctgaggtcgagggagacgggctgtcgccggatgatgccactcagcatcaggggtgtgatagacttgcagtggttcaggtcaa

SEQ ID NO: 31772 - DNA, 83 bp, Homo sapiens
ggagacgggctgtcgccggatgatgccactcagcatcaggggtgtgatagacttgcagtggttcaggtcaatgcgggtccaca

SEQ ID NO: 31773 - DNA, 83 bp, Homo sapiens
tgtcgccggatgatgccactcagcatcaggggtgtgatagacttgcagtggttcaggtcaatgcgggtccacaaccgcttatc

SEQ ID NO: 31774 - DNA, 84 bp, Homo sapiens
atgatgccactcagcatcaggggtgtgatagacttgcagtggttcaggtcaatgcgggtccacaaccgcttatcgcagcacctg

SEQ ID NO: 31775 - DNA, 80 bp, Homo sapiens
ccactcagcatcaggggtgtgatagacttgcagtggttcaggtcaatgcgggtccacaaccgcttatcgcagcacctggg

SEQ ID NO: 31776 - DNA, 75 bp, Homo sapiens
gggtgtgatagacttgcagtggttcaggtcaatgcgggtccacaaccgcttatcgcagcacctggggaccggccc

SEQ ID NO: 31777 - DNA, 73 bp, Homo sapiens
atagacttgcagtggttcaggtcaatgcgggtccacaaccgcttatcgcagcacctggggaccggccccgtgg

SEQ ID NO: 31778 - DNA, 74 bp, Homo sapiens
gttcaggtcaatgcgggtccacaaccgcttatcgcagcacctggggaccggccccgtggggacacatcgtcaga

SEQ ID NO: 31779 - DNA, 80 bp, Homo sapiens
tgccgcctgagccttaacctagagccctacacaggccgccgctcaccagcggttccaggtcctgcagacccgcatgcaca

SEQ ID NO: 31780 - DNA, 79 bp, Homo sapiens
cctgagccttaacctagagccctacacaggccgccgctcaccagcggttccaggtcctgcagacccgcatgcacacaca

SEQ ID NO: 31781 - DNA, 78 bp, Homo sapiens
aacctagagccctacacaggccgccgctcaccagcggttccaggtcctgcagacccgcatgcacacacacaggtcttg

SEQ ID NO: 31782 - DNA, 83 bp, Homo sapiens
tacacaggccgccgctcaccagcggttccaggtcctgcagacccgcatgcacacacacaggtcttggtggctgaggtagctga

SEQ ID NO: 31783 - DNA, 83 bp, Homo sapiens
gctcaccagcggttccaggtcctgcagacccgcatgcacacacacaggtcttggtggctgaggtagctgaagacggccatcca

SEQ ID NO: 31784 - DNA, 80 bp, Homo sapiens
agcggttccaggtcctgcagacccgcatgcacacacacaggtcttggtggctgaggtagctgaagacggccatccacacc

SEQ ID NO: 31785 - DNA, 84 bp, Homo sapiens
aggtcctgcagacccgcatgcacacacacaggtcttggtggctgaggtagctgaagacggccatccacacctccctgtgcatga

SEQ ID NO: 31786 - DNA, 82 bp, Homo sapiens
agacccgcatgcacacacacaggtcttggtggctgaggtagctgaagacggccatccacacctccctgtgcatgacgtgggc

SEQ ID NO: 31787 - DNA, 80 bp, Homo sapiens
acacacaggtcttggtggctgaggtagctgaagacggccatccacacctccctgtgcatgacgtgggctgccccatcgtc

SEQ ID NO: 31788 - DNA, 78 bp, Homo sapiens
aggtcttggtggctgaggtagctgaagacggccatccacacctccctgtgcatgacgtgggctgccccatcgtccagg

SEQ ID NO: 31789 - DNA, 78 bp, Homo sapiens
aggtagctgaagacggccatccacacctccctgtgcatgacgtgggctgccccatcgtccaggggtagcgagtcaggc

SEQ ID NO: 31790 - DNA, 76 bp, Homo sapiens
ctgaagacggccatccacacctccctgtgcatgacgtgggctgccccatcgtccaggggtagcgagtcaggcgggg

SEQ ID NO: 31791 - DNA, 76 bp, Homo sapiens
ccatccacacctccctgtgcatgacgtgggctgccccatcgtccaggggtagcgagtcaggcggggggctgatggg

SEQ ID NO: 31792 - DNA, 74 bp, Homo sapiens
atgacgtgggctgccccatcgtccaggggtagcgagtcaggcggggggctgatggggggtggccggatcacatg

SEQ ID NO: 31793 - DNA, 76 bp, Homo sapiens
cccatcgtccaggggtagcgagtcaggcggggggctgatggggggtggccggatcacatggcgctccatctggata

SEQ ID NO: 31794 - DNA, 76 bp, Homo sapiens
gtccaggggtagcgagtcaggcggggggctgatggggggtggccggatcacatggcgctccatctggatacacttg

SEQ ID NO: 31795 - DNA, 77 bp, Homo sapiens
tagcgagtcaggcggggggctgatggggggtggccggatcacatggcgctccatctggatacacttgggcggggaca

SEQ ID NO: 31796 - DNA, 73 bp, Homo sapiens
ggggctgatggggggtggccggatcacatggcgctccatctggatacacttgggcggggacacggagggtggg

SEQ ID NO: 31797 - DNA, 71 bp, Homo sapiens
gggggtggccggatcacatggcgctccatctggatacacttgggcggggacacggagggtgggggccggga

SEQ ID NO: 31798 - DNA, 75 bp, Homo sapiens
tggccggatcacatggcgctccatctggatacacttgggcggggacacggagggtgggggccgggagatgacacg

SEQ ID NO: 31799 - DNA, 71 bp, Homo sapiens
acatggcgctccatctggatacacttgggcggggacacggagggtgggggccgggagatgacacggggcgg

SEQ ID NO: 31800 - DNA, 72 bp, Homo sapiens
atctggatacacttgggcggggacacggagggtgggggccgggagatgacacggggcgggctgcgcaggctg

SEQ ID NO: 31801 - DNA, 69 bp, Homo sapiens
acacttgggcggggacacggagggtgggggccgggagatgacacggggcgggctgcgcaggctgggccc

SEQ ID NO: 31802 - DNA, 74 bp, Homo sapiens
acacggagggtgggggccgggagatgacacggggcgggctgcgcaggctgggccccagctggtgccgcagctcc

SEQ ID NO: 31803 - DNA, 74 bp, Homo sapiens
ccgggagatgacacggggcgggctgcgcaggctgggccccagctggtgccgcagctcccggggggtgccgttga

SEQ ID NO: 31804 - DNA, 75 bp, Homo sapiens
gggcgggctgcgcaggctgggccccagctggtgccgcagctcccggggggtgccgttgagccccttgctgaagcg

SEQ ID NO: 31805 - DNA, 75 bp, Homo sapiens
ggctgcgcaggctgggccccagctggtgccgcagctcccggggggtgccgttgagccccttgctgaagcggtggg

SEQ ID NO: 31806 - DNA, 76 bp, Homo sapiens
gccccagctggtgccgcagctcccggggggtgccgttgagccccttgctgaagcggtggggacgctcgcagatgcc

SEQ ID NO: 31807 - DNA, 74 bp, Homo sapiens
agctggtgccgcagctcccggggggtgccgttgagccccttgctgaagcggtggggacgctcgcagatgcccgg

SEQ ID NO: 31808 - DNA, 70 bp, Homo sapiens
tcccggggggtgccgttgagccccttgctgaagcggtggggacgctcgcagatgcccgggggccgcttgg

SEQ ID NO: 31809 - DNA, 76 bp, Homo sapiens
ttgagccccttgctgaagcggtggggacgctcgcagatgcccgggggccgcttgggctcctcgccctcgctctcag

SEQ ID NO: 31810 - DNA, 77 bp, Homo sapiens
tgaagcggtggggacgctcgcagatgcccgggggccgcttgggctcctcgccctcgctctcaggctccgacttgatg

SEQ ID NO: 31811 - DNA, 78 bp, Homo sapiens
ggacgctcgcagatgcccgggggccgcttgggctcctcgccctcgctctcaggctccgacttgatgggctgctggttc

SEQ ID NO: 31812 - DNA, 78 bp, Homo sapiens
tcgcagatgcccgggggccgcttgggctcctcgccctcgctctcaggctccgacttgatgggctgctggttctcgttg

SEQ ID NO: 31813 - DNA, 75 bp, Homo sapiens
ccgggggccgcttgggctcctcgccctcgctctcaggctccgacttgatgggctgctggttctcgttggccaggc

SEQ ID NO: 31814 - DNA, 80 bp, Homo sapiens
caggctgttctccgtcctctggatctcgtggttgagctccttgctcagctccctgctcagctccttgttgggaagccgcc

SEQ ID NO: 31815 - DNA, 80 bp, Homo sapiens
tgttctccgtcctctggatctcgtggttgagctccttgctcagctccctgctcagctccttgttgggaagccgccgcttc

SEQ ID NO: 31816 - DNA, 82 bp, Homo sapiens
tctggatctcgtggttgagctccttgctcagctccctgctcagctccttgttgggaagccgccgcttccggcgcatcttcac

SEQ ID NO: 31817 - DNA, 79 bp, Homo sapiens
tggttgagctccttgctcagctccctgctcagctccttgttgggaagccgccgcttccggcgcatcttcaccttcttct

SEQ ID NO: 31818 - DNA, 74 bp, Homo sapiens
tccctgctcagctccttgttgggaagccgccgcttccggcgcatcttcaccttcttcttctcctccgggccctc

SEQ ID NO: 31819 - DNA, 72 bp, Homo sapiens
tcagctccttgttgggaagccgccgcttccggcgcatcttcaccttcttcttctcctccgggccctcggccc

SEQ ID NO: 31820 - DNA, 69 bp, Homo sapiens
tgttgggaagccgccgcttccggcgcatcttcaccttcttcttctcctccgggccctcggccccttcgg

SEQ ID NO: 31821 - DNA, 69 bp, Homo sapiens
ccgccgcttccggcgcatcttcaccttcttcttctcctccgggccctcggccccttcggtgctgggtcc

SEQ ID NO: 31822 - DNA, 68 bp, Homo sapiens
cggcgcatcttcaccttcttcttctcctccgggccctcggccccttcggtgctgggtcccgcggtggg

SEQ ID NO: 31823 - DNA, 68 bp, Homo sapiens
ttcttcttctcctccgggccctcggccccttcggtgctgggtcccgcggtgggggagctggagcggga

SEQ ID NO: 31824 - DNA, 68 bp, Homo sapiens
ttctcctccgggccctcggccccttcggtgctgggtcccgcggtgggggagctggagcgggagtggtc

SEQ ID NO: 31825 - DNA, 70 bp, Homo sapiens
ctcggccccttcggtgctgggtcccgcggtgggggagctggagcgggagtggtcgctctccctggtcttg

SEQ ID NO: 31826 - DNA, 68 bp, Homo sapiens
cccttcggtgctgggtcccgcggtgggggagctggagcgggagtggtcgctctccctggtcttggggg

SEQ ID NO: 31827 - DNA, 70 bp, Homo sapiens
gtcccgcggtgggggagctggagcgggagtggtcgctctccctggtcttggggggcgcctcgggcagttc

SEQ ID NO: 31828 - DNA, 70 bp, Homo sapiens
tgggggagctggagcgggagtggtcgctctccctggtcttggggggcgcctcgggcagttcgtcctcggg

SEQ ID NO: 31829 - DNA, 71 bp, Homo sapiens
gagcgggagtggtcgctctccctggtcttggggggcgcctcgggcagttcgtcctcgggttcctgcttgaa

SEQ ID NO: 31830 - DNA, 70 bp, Homo sapiens
agtggtcgctctccctggtcttggggggcgcctcgggcagttcgtcctcgggttcctgcttgaagcgccg

SEQ ID NO: 31831 - DNA, 68 bp, Homo sapiens
cctggtcttggggggcgcctcgggcagttcgtcctcgggttcctgcttgaagcgccggaggggcttgt

SEQ ID NO: 31832 - DNA, 73 bp, Homo sapiens
gggggcgcctcgggcagttcgtcctcgggttcctgcttgaagcgccggaggggcttgttggccagcgccatgc

SEQ ID NO: 31833 - DNA, 73 bp, Homo sapiens
ttcgtcctcgggttcctgcttgaagcgccggaggggcttgttggccagcgccatgcggtcctcggcgttcttc

SEQ ID NO: 31834 - DNA, 76 bp, Homo sapiens
ttcctgcttgaagcgccggaggggcttgttggccagcgccatgcggtcctcggcgttcttccaggaccgccgctga

SEQ ID NO: 31835 - DNA, 77 bp, Homo sapiens
gggcttgttggccagcgccatgcggtcctcggcgttcttccaggaccgccgctgagggcgagagcggagacgcgtca

SEQ ID NO: 31836 - DNA, 79 bp, Homo sapiens
tgttggccagcgccatgcggtcctcggcgttcttccaggaccgccgctgagggcgagagcggagacgcgtcagcctctg

SEQ ID NO: 31837 - DNA, 76 bp, Homo sapiens
gggactgtggcccagggagctgcggtgcagctctaaccgctcaggcctggggcacaggagggaggggaagatggta

SEQ ID NO: 31838 - DNA, 72 bp, Homo sapiens
cccagggagctgcggtgcagctctaaccgctcaggcctggggcacaggagggaggggaagatggtacctttt

SEQ ID NO: 31839 - DNA, 72 bp, Homo sapiens
ctgcggtgcagctctaaccgctcaggcctggggcacaggagggaggggaagatggtacctttttcctgaaaa

SEQ ID NO: 31840 - DNA, 69 bp, Homo sapiens
ctctaaccgctcaggcctggggcacaggagggaggggaagatggtacctttttcctgaaaagcttatct

SEQ ID NO: 31841 - DNA, 68 bp, Homo sapiens
accgctcaggcctggggcacaggagggaggggaagatggtacctttttcctgaaaagcttatcttctt

SEQ ID NO: 31842 - DNA, 72 bp, Homo sapiens
ggcacaggagggaggggaagatggtacctttttcctgaaaagcttatcttctttgccaggtttgagctgtca

SEQ ID NO: 31843 - DNA, 69 bp, Homo sapiens
ggaggggaagatggtacctttttcctgaaaagcttatcttctttgccaggtttgagctgtcacgaaaaa

SEQ ID NO: 31844 - DNA, 69 bp, Homo sapiens
aagatggtacctttttcctgaaaagcttatcttctttgccaggtttgagctgtcacgaaaaagaaagga

SEQ ID NO: 31845 - DNA, 70 bp, Homo sapiens
acctttttcctgaaaagcttatcttctttgccaggtttgagctgtcacgaaaaagaaaggacgcagagct

SEQ ID NO: 31846 - DNA, 72 bp, Homo sapiens
aaaagcttatcttctttgccaggtttgagctgtcacgaaaaagaaaggacgcagagcttgctccccgggctc

SEQ ID NO: 31847 - DNA, 72 bp, Homo sapiens
atcttctttgccaggtttgagctgtcacgaaaaagaaaggacgcagagcttgctccccgggctcgtgggatt

SEQ ID NO: 31848 - DNA, 72 bp, Homo sapiens
aggtttgagctgtcacgaaaaagaaaggacgcagagcttgctccccgggctcgtgggatttggtctcctcga

SEQ ID NO: 31849 - DNA, 76 bp, Homo sapiens
actcgccagtccccggggcctcaggagggcgtgcgtcgtgggagcacctgctgctggaagtaagtgagactggatc

SEQ ID NO: 31850 - DNA, 75 bp, Homo sapiens
cccggggcctcaggagggcgtgcgtcgtgggagcacctgctgctggaagtaagtgagactggatctccaccaggg

SEQ ID NO: 31851 - DNA, 83 bp, Homo sapiens
tcaggagggcgtgcgtcgtgggagcacctgctgctggaagtaagtgagactggatctccaccaggggctgaggctgctgccta

SEQ ID NO: 31852 - DNA, 81 bp, Homo sapiens
gggcgtgcgtcgtgggagcacctgctgctggaagtaagtgagactggatctccaccaggggctgaggctgctgcctagagg

SEQ ID NO: 31853 - DNA, 81 bp, Homo sapiens
gagcacctgctgctggaagtaagtgagactggatctccaccaggggctgaggctgctgcctagagggggcctcggcgagag

SEQ ID NO: 31854 - DNA, 80 bp, Homo sapiens
tgctggaagtaagtgagactggatctccaccaggggctgaggctgctgcctagagggggcctcggcgagaggtgagagga

SEQ ID NO: 31855 - DNA, 77 bp, Homo sapiens
aagtaagtgagactggatctccaccaggggctgaggctgctgcctagagggggcctcggcgagaggtgagaggagga

SEQ ID NO: 31856 - DNA, 74 bp, Homo sapiens
agactggatctccaccaggggctgaggctgctgcctagagggggcctcggcgagaggtgagaggaggaaccggg

SEQ ID NO: 31857 - DNA, 71 bp, Homo sapiens
ccaggggctgaggctgctgcctagagggggcctcggcgagaggtgagaggaggaaccgggggacgtttgaa

SEQ ID NO: 31858 - DNA, 73 bp, Homo sapiens
ggctgctgcctagagggggcctcggcgagaggtgagaggaggaaccgggggacgtttgaagcgatgaggccta

SEQ ID NO: 31859 - DNA, 68 bp, Homo sapiens
cctagagggggcctcggcgagaggtgagaggaggaaccgggggacgtttgaagcgatgaggcctaaag

SEQ ID NO: 31860 - DNA, 68 bp, Homo sapiens
ctcggcgagaggtgagaggaggaaccgggggacgtttgaagcgatgaggcctaaaggggggtggagtg

SEQ ID NO: 31861 - DNA, 66 bp, Homo sapiens
aggtgagaggaggaaccgggggacgtttgaagcgatgaggcctaaaggggggtggagtgggaagag

SEQ ID NO: 31862 - DNA, 66 bp, Homo sapiens
aggaggaaccgggggacgtttgaagcgatgaggcctaaaggggggtggagtgggaagaggagtgac

SEQ ID NO: 31863 - DNA, 69 bp, Homo sapiens
agaccaacccctttgcctcccagcccctcctggtccgtacccgcttgcgtccactcagctcctggggct

SEQ ID NO: 31864 - DNA, 71 bp, Homo sapiens
ctttgcctcccagcccctcctggtccgtacccgcttgcgtccactcagctcctggggcttctcgtatttcc

SEQ ID NO: 31865 - DNA, 76 bp, Homo sapiens
tccgtacccgcttgcgtccactcagctcctggggcttctcgtatttccgcttcttcctcaggtgcacgtcgtcaga

SEQ ID NO: 31866 - DNA, 79 bp, Homo sapiens
ttgcgtccactcagctcctggggcttctcgtatttccgcttcttcctcaggtgcacgtcgtcagactttctgcgcagaa

SEQ ID NO: 31867 - DNA, 77 bp, Homo sapiens
tcagctcctggggcttctcgtatttccgcttcttcctcaggtgcacgtcgtcagactttctgcgcagaaggccgtcc

SEQ ID NO: 31868 - DNA, 75 bp, Homo sapiens
gggcttctcgtatttccgcttcttcctcaggtgcacgtcgtcagactttctgcgcagaaggccgtccggcggcac

SEQ ID NO: 31869 - DNA, 75 bp, Homo sapiens
tctcgtatttccgcttcttcctcaggtgcacgtcgtcagactttctgcgcagaaggccgtccggcggcaccttct

SEQ ID NO: 31870 - DNA, 78 bp, Homo sapiens
ttcttcctcaggtgcacgtcgtcagactttctgcgcagaaggccgtccggcggcaccttcttcgagtgctcatccgac

SEQ ID NO: 31871 - DNA, 77 bp, Homo sapiens
aggtgcacgtcgtcagactttctgcgcagaaggccgtccggcggcaccttcttcgagtgctcatccgacctgcgccg

SEQ ID NO: 31872 - DNA, 78 bp, Homo sapiens
tcagactttctgcgcagaaggccgtccggcggcaccttcttcgagtgctcatccgacctgcgccggggcgcctcctca

SEQ ID NO: 31873 - DNA, 75 bp, Homo sapiens
agaaggccgtccggcggcaccttcttcgagtgctcatccgacctgcgccggggcgcctcctcacactcactcctc

SEQ ID NO: 31874 - DNA, 76 bp, Homo sapiens
cggcaccttcttcgagtgctcatccgacctgcgccggggcgcctcctcacactcactcctccgcttggcaggttcc

SEQ ID NO: 31875 - DNA, 77 bp, Homo sapiens
ttcttcgagtgctcatccgacctgcgccggggcgcctcctcacactcactcctccgcttggcaggttcctgcccttc

SEQ ID NO: 31876 - DNA, 77 bp, Homo sapiens
tgctcatccgacctgcgccggggcgcctcctcacactcactcctccgcttggcaggttcctgcccttccttgttgtc

SEQ ID NO: 31877 - DNA, 74 bp, Homo sapiens
tgcgccggggcgcctcctcacactcactcctccgcttggcaggttcctgcccttccttgttgtcccggttcatc

SEQ ID NO: 31878 - DNA, 75 bp, Homo sapiens
cctcctcacactcactcctccgcttggcaggttcctgcccttccttgttgtcccggttcatcttctgctccttga

SEQ ID NO: 31879 - DNA, 75 bp, Homo sapiens
acactcactcctccgcttggcaggttcctgcccttccttgttgtcccggttcatcttctgctccttgagcaggga

SEQ ID NO: 31880 - DNA, 73 bp, Homo sapiens
gttcctgcccttccttgttgtcccggttcatcttctgctccttgagcagggagccgggcaggttggaggcgta

SEQ ID NO: 31881 - DNA, 73 bp, Homo sapiens
ttccttgttgtcccggttcatcttctgctccttgagcagggagccgggcaggttggaggcgtacttaaagcca

SEQ ID NO: 31882 - DNA, 74 bp, Homo sapiens
tgttgtcccggttcatcttctgctccttgagcagggagccgggcaggttggaggcgtacttaaagccagggcca

SEQ ID NO: 31883 - DNA, 74 bp, Homo sapiens
atcttctgctccttgagcagggagccgggcaggttggaggcgtacttaaagccagggccacgcttttgcttgta

SEQ ID NO: 31884 - DNA, 71 bp, Homo sapiens
cttgagcagggagccgggcaggttggaggcgtacttaaagccagggccacgcttttgcttgtaggccaaaa

SEQ ID NO: 31885 - DNA, 69 bp, Homo sapiens
agggagccgggcaggttggaggcgtacttaaagccagggccacgcttttgcttgtaggccaaaaagaga

SEQ ID NO: 31886 - DNA, 71 bp, Homo sapiens
aggttggaggcgtacttaaagccagggccacgcttttgcttgtaggccaaaaagagagaatgaacagacca

SEQ ID NO: 31887 - DNA, 71 bp, Homo sapiens
gtacttaaagccagggccacgcttttgcttgtaggccaaaaagagagaatgaacagaccaactgtatacct

SEQ ID NO: 31888 - DNA, 68 bp, Homo sapiens
cccaggcccgcccctctcccgactgaccctgggacttggagcccggcactcactttcccggtcttgcc

SEQ ID NO: 31889 - DNA, 68 bp, Homo sapiens
cccctctcccgactgaccctgggacttggagcccggcactcactttcccggtcttgccggcgtggtta

SEQ ID NO: 31890 - DNA, 70 bp, Homo sapiens
gactgaccctgggacttggagcccggcactcactttcccggtcttgccggcgtggttacacttcggacac

SEQ ID NO: 31891 - DNA, 71 bp, Homo sapiens
tgggacttggagcccggcactcactttcccggtcttgccggcgtggttacacttcggacactcccagcagt

SEQ ID NO: 31892 - DNA, 71 bp, Homo sapiens
ttggagcccggcactcactttcccggtcttgccggcgtggttacacttcggacactcccagcagtttggaa

SEQ ID NO: 31893 - DNA, 71 bp, Homo sapiens
actcactttcccggtcttgccggcgtggttacacttcggacactcccagcagtttggaagctcgtcgttga

SEQ ID NO: 31894 - DNA, 74 bp, Homo sapiens
gtcttgccggcgtggttacacttcggacactcccagcagtttggaagctcgtcgttgaccacaccctctgactc

SEQ ID NO: 31895 - DNA, 74 bp, Homo sapiens
cgtggttacacttcggacactcccagcagtttggaagctcgtcgttgaccacaccctctgactccttaatctgc

SEQ ID NO: 31896 - DNA, 74 bp, Homo sapiens
ttacacttcggacactcccagcagtttggaagctcgtcgttgaccacaccctctgactccttaatctgcgggga

SEQ ID NO: 31897 - DNA, 75 bp, Homo sapiens
tcccagcagtttggaagctcgtcgttgaccacaccctctgactccttaatctgcggggaacaccaggactcagaa

SEQ ID NO: 31898 - DNA, 72 bp, Homo sapiens
agtttggaagctcgtcgttgaccacaccctctgactccttaatctgcggggaacaccaggactcagaagagg

SEQ ID NO: 31899 - DNA, 72 bp, Homo sapiens
gtcgttgaccacaccctctgactccttaatctgcggggaacaccaggactcagaagagggacgggcggagaa

SEQ ID NO: 31900 - DNA, 77 bp, Homo sapiens
tacctgccccagagcgtcagcaccacctgtccccactgggccactcaccttaaggcatccagggtggatgatttcat

SEQ ID NO: 31901 - DNA, 81 bp, Homo sapiens
agagcgtcagcaccacctgtccccactgggccactcaccttaaggcatccagggtggatgatttcattgcagatggagcac

SEQ ID NO: 31902 - DNA, 83 bp, Homo sapiens
accacctgtccccactgggccactcaccttaaggcatccagggtggatgatttcattgcagatggagcactccatgagcatga

SEQ ID NO: 31903 - DNA, 81 bp, Homo sapiens
ccactgggccactcaccttaaggcatccagggtggatgatttcattgcagatggagcactccatgagcatgaggttaaact

SEQ ID NO: 31904 - DNA, 81 bp, Homo sapiens
actcaccttaaggcatccagggtggatgatttcattgcagatggagcactccatgagcatgaggttaaacttgccttcctc

SEQ ID NO: 31905 - DNA, 80 bp, Homo sapiens
ccttaaggcatccagggtggatgatttcattgcagatggagcactccatgagcatgaggttaaacttgccttcctcctct

SEQ ID NO: 31906 - DNA, 79 bp, Homo sapiens
agggtggatgatttcattgcagatggagcactccatgagcatgaggttaaacttgccttcctcctcttccaccgtgtct

SEQ ID NO: 31907 - DNA, 79 bp, Homo sapiens
atgatttcattgcagatggagcactccatgagcatgaggttaaacttgccttcctcctcttccaccgtgtcttccttcc

SEQ ID NO: 31908 - DNA, 75 bp, Homo sapiens
atggagcactccatgagcatgaggttaaacttgccttcctcctcttccaccgtgtcttccttccccgcctcgcca

SEQ ID NO: 31909 - DNA, 74 bp, Homo sapiens
tccatgagcatgaggttaaacttgccttcctcctcttccaccgtgtcttccttccccgcctcgccacacacaag

SEQ ID NO: 31910 - DNA, 71 bp, Homo sapiens
atgaggttaaacttgccttcctcctcttccaccgtgtcttccttccccgcctcgccacacacaaggcacac

SEQ ID NO: 31911 - DNA, 71 bp, Homo sapiens
taaacttgccttcctcctcttccaccgtgtcttccttccccgcctcgccacacacaaggcacacggcggtg

SEQ ID NO: 31912 - DNA, 76 bp, Homo sapiens
ctcctcttccaccgtgtcttccttccccgcctcgccacacacaaggcacacggcggtgtggggcagcactggctga

SEQ ID NO: 31913 - DNA, 77 bp, Homo sapiens
tccaccgtgtcttccttccccgcctcgccacacacaaggcacacggcggtgtggggcagcactggctgaggagccag

SEQ ID NO: 31914 - DNA, 77 bp, Homo sapiens
ttccttccccgcctcgccacacacaaggcacacggcggtgtggggcagcactggctgaggagccagggagaacaaga

SEQ ID NO: 31915 - DNA, 79 bp, Homo sapiens
cctcgccacacacaaggcacacggcggtgtggggcagcactggctgaggagccagggagaacaagacaagtcatcaggg

SEQ ID NO: 31916 - DNA, 88 bp, Homo sapiens
acgcaggggcctgaatcgagcgcagggctgggcgggggccgcactcaccgcgatgcactgccgcatgatgcagctctgcttcatgcgc

SEQ ID NO: 31917 - DNA, 86 bp, Homo sapiens
ggcctgaatcgagcgcagggctgggcgggggccgcactcaccgcgatgcactgccgcatgatgcagctctgcttcatgcgcccggg

SEQ ID NO: 31918 - DNA, 81 bp, Homo sapiens
cagggctgggcgggggccgcactcaccgcgatgcactgccgcatgatgcagctctgcttcatgcgcccggggcccccgaac

SEQ ID NO: 31919 - DNA, 82 bp, Homo sapiens
ggcgggggccgcactcaccgcgatgcactgccgcatgatgcagctctgcttcatgcgcccggggcccccgaacttcttcatg

SEQ ID NO: 31920 - DNA, 85 bp, Homo sapiens
ccgcactcaccgcgatgcactgccgcatgatgcagctctgcttcatgcgcccggggcccccgaacttcttcatgtccttgcagaa

SEQ ID NO: 31921 - DNA, 86 bp, Homo sapiens
atgcactgccgcatgatgcagctctgcttcatgcgcccggggcccccgaacttcttcatgtccttgcagaagtggcactctccgca

SEQ ID NO: 31922 - DNA, 83 bp, Homo sapiens
gcatgatgcagctctgcttcatgcgcccggggcccccgaacttcttcatgtccttgcagaagtggcactctccgcactcggtc

SEQ ID NO: 31923 - DNA, 78 bp, Homo sapiens
agctctgcttcatgcgcccggggcccccgaacttcttcatgtccttgcagaagtggcactctccgcactcggtccgca

SEQ ID NO: 31924 - DNA, 75 bp, Homo sapiens
atgcgcccggggcccccgaacttcttcatgtccttgcagaagtggcactctccgcactcggtccgcaggcaggcc

SEQ ID NO: 31925 - DNA, 79 bp, Homo sapiens
ggcccccgaacttcttcatgtccttgcagaagtggcactctccgcactcggtccgcaggcaggcctcgcacttgcggca

SEQ ID NO: 31926 - DNA, 80 bp, Homo sapiens
aacttcttcatgtccttgcagaagtggcactctccgcactcggtccgcaggcaggcctcgcacttgcggcatcgcgtccg

SEQ ID NO: 31927 - DNA, 82 bp, Homo sapiens
tccttgcagaagtggcactctccgcactcggtccgcaggcaggcctcgcacttgcggcatcgcgtccggcgccgccgagctc

SEQ ID NO: 31928 - DNA, 80 bp, Homo sapiens
agaagtggcactctccgcactcggtccgcaggcaggcctcgcacttgcggcatcgcgtccggcgccgccgagctcctgcc

SEQ ID NO: 31929 - DNA, 78 bp, Homo sapiens
actctccgcactcggtccgcaggcaggcctcgcacttgcggcatcgcgtccggcgccgccgagctcctgccgttgtcc

SEQ ID NO: 31930 - DNA, 76 bp, Homo sapiens
actcggtccgcaggcaggcctcgcacttgcggcatcgcgtccggcgccgccgagctcctgccgttgtccggttggc

SEQ ID NO: 31931 - DNA, 74 bp, Homo sapiens
aggcctcgcacttgcggcatcgcgtccggcgccgccgagctcctgccgttgtccggttggcggccaacttcacc

SEQ ID NO: 31932 - DNA, 75 bp, Homo sapiens
tcgcacttgcggcatcgcgtccggcgccgccgagctcctgccgttgtccggttggcggccaacttcaccgcggag

SEQ ID NO: 31933 - DNA, 70 bp, Homo sapiens
atcgcgtccggcgccgccgagctcctgccgttgtccggttggcggccaacttcaccgcggaggccgggcc

SEQ ID NO: 31934 - DNA, 70 bp, Homo sapiens
ccggcgccgccgagctcctgccgttgtccggttggcggccaacttcaccgcggaggccgggcccagcttc

SEQ ID NO: 31935 - DNA, 68 bp, Homo sapiens
tcctgccgttgtccggttggcggccaacttcaccgcggaggccgggcccagcttccccttgggccgac

SEQ ID NO: 31936 - DNA, 67 bp, Homo sapiens
cgttgtccggttggcggccaacttcaccgcggaggccgggcccagcttccccttgggccgacccaca

SEQ ID NO: 31937 - DNA, 70 bp, Homo sapiens
ttggcggccaacttcaccgcggaggccgggcccagcttccccttgggccgacccacagcccggttctgca

SEQ ID NO: 31938 - DNA, 67 bp, Homo sapiens
aacttcaccgcggaggccgggcccagcttccccttgggccgacccacagcccggttctgcaggggaa

SEQ ID NO: 31939 - DNA, 72 bp, Homo sapiens
gccgggcccagcttccccttgggccgacccacagcccggttctgcaggggaacagacacgactggtcagatg

SEQ ID NO: 31940 - DNA, 68 bp, Homo sapiens
aggtcgtgcggcgggtccctccctcagccccaccccgggccgccgacctggtccggctccgattcata

SEQ ID NO: 31941 - DNA, 67 bp, Homo sapiens
cgggtccctccctcagccccaccccgggccgccgacctggtccggctccgattcatagtcgtcgtcc

SEQ ID NO: 31942 - DNA, 71 bp, Homo sapiens
cctcagccccaccccgggccgccgacctggtccggctccgattcatagtcgtcgtcctcggcgctcacgga

SEQ ID NO: 31943 - DNA, 73 bp, Homo sapiens
ccaccccgggccgccgacctggtccggctccgattcatagtcgtcgtcctcggcgctcacggacatggccatg

SEQ ID NO: 31944 - DNA, 77 bp, Homo sapiens
gggccgccgacctggtccggctccgattcatagtcgtcgtcctcggcgctcacggacatggccatggctcatggtgg

SEQ ID NO: 31945 - DNA, 79 bp, Homo sapiens
cctggtccggctccgattcatagtcgtcgtcctcggcgctcacggacatggccatggctcatggtgggcccaggctcgc

SEQ ID NO: 31946 - DNA, 85 bp, Homo sapiens
tccgattcatagtcgtcgtcctcggcgctcacggacatggccatggctcatggtgggcccaggctcgcgcgcgctgacatggctg

SEQ ID NO: 31947 - DNA, 85 bp, Homo sapiens
tagtcgtcgtcctcggcgctcacggacatggccatggctcatggtgggcccaggctcgcgcgcgctgacatggctggagcggcgc

SEQ ID NO: 31948 - DNA, 84 bp, Homo sapiens
cctcggcgctcacggacatggccatggctcatggtgggcccaggctcgcgcgcgctgacatggctggagcggcgccgccgccgc

SEQ ID NO: 31949 - DNA, 72 bp, Homo sapiens
cgccgccgccgcccgcccggagcaggctcggctcgccctggctcgggctcgggctcgggctcgggctcccgc

SEQ ID NO: 31950 - DNA, 75 bp, Homo sapiens
tgagccaccgcgctcgaccgattagacatttttatgttgagcatcaaccagttttacacactgagaaaaagttcc

SEQ ID NO: 31951 - DNA, 72 bp, Homo sapiens
cgctcgaccgattagacatttttatgttgagcatcaaccagttttacacactgagaaaaagttcctttcaaa

SEQ ID NO: 31952 - DNA, 71 bp, Homo sapiens
gaccgattagacatttttatgttgagcatcaaccagttttacacactgagaaaaagttcctttcaaaagag

SEQ ID NO: 31953 - DNA, 71 bp, Homo sapiens
atttttatgttgagcatcaaccagttttacacactgagaaaaagttcctttcaaaagaggagaagacagcc

SEQ ID NO: 31954 - DNA, 73 bp, Homo sapiens
agcatcaaccagttttacacactgagaaaaagttcctttcaaaagaggagaagacagcccatgaagcaattaa

SEQ ID NO: 31955 - DNA, 69 bp, Homo sapiens
agttttacacactgagaaaaagttcctttcaaaagaggagaagacagcccatgaagcaattaaaggaaa

SEQ ID NO: 31956 - DNA, 67 bp, Homo sapiens
actgagaaaaagttcctttcaaaagaggagaagacagcccatgaagcaattaaaggaaaagggaaaa

SEQ ID NO: 31957 - DNA, 65 bp, Homo sapiens
aaaaagttcctttcaaaagaggagaagacagcccatgaagcaattaaaggaaaagggaaaaggaa

SEQ ID NO: 31958 - DNA, 67 bp, Homo sapiens
ttcctttcaaaagaggagaagacagcccatgaagcaattaaaggaaaagggaaaaggaagggaagaa

SEQ ID NO: 31959 - DNA, 68 bp, Homo sapiens
tttcaaaagaggagaagacagcccatgaagcaattaaaggaaaagggaaaaggaagggaagaagcaag

SEQ ID NO: 31960 - DNA, 67 bp, Homo sapiens
aaagaggagaagacagcccatgaagcaattaaaggaaaagggaaaaggaagggaagaagcaagggag

SEQ ID NO: 31961 - DNA, 68 bp, Homo sapiens
agaagacagcccatgaagcaattaaaggaaaagggaaaaggaagggaagaagcaagggagtgagggaa

SEQ ID NO: 31962 - DNA, 68 bp, Homo sapiens
agacagcccatgaagcaattaaaggaaaagggaaaaggaagggaagaagcaagggagtgagggaagga

SEQ ID NO: 31963 - DNA, 68 bp, Homo sapiens
atgaagcaattaaaggaaaagggaaaaggaagggaagaagcaagggagtgagggaaggagagacagaa

SEQ ID NO: 31964 - DNA, 66 bp, Homo sapiens
aagcaattaaaggaaaagggaaaaggaagggaagaagcaagggagtgagggaaggagagacagaaa

SEQ ID NO: 31965 - DNA, 66 bp, Homo sapiens
taaaggaaaagggaaaaggaagggaagaagcaagggagtgagggaaggagagacagaaaatccacc

SEQ ID NO: 31966 - DNA, 66 bp, Homo sapiens
aaaagggaaaaggaagggaagaagcaagggagtgagggaaggagagacagaaaatccacctaacca

SEQ ID NO: 31967 - DNA, 67 bp, Homo sapiens
aaaaggaagggaagaagcaagggagtgagggaaggagagacagaaaatccacctaaccacagggaaa

SEQ ID NO: 31968 - DNA, 72 bp, Homo sapiens
aagaagcaagggagtgagggaaggagagacagaaaatccacctaaccacagggaaaggcgaggtgtcagcac

SEQ ID NO: 31969 - DNA, 70 bp, Homo sapiens
aggagagacagaaaatccacctaaccacagggaaaggcgaggtgtcagcaccccccagttttccaagtga

SEQ ID NO: 31970 - DNA, 69 bp, Homo sapiens
acagaaaatccacctaaccacagggaaaggcgaggtgtcagcaccccccagttttccaagtgaccacca

SEQ ID NO: 31971 - DNA, 69 bp, Homo sapiens
acctaaccacagggaaaggcgaggtgtcagcaccccccagttttccaagtgaccaccaggcggcactgt

SEQ ID NO: 31972 - DNA, 74 bp, Homo sapiens
gaaaggcgaggtgtcagcaccccccagttttccaagtgaccaccaggcggcactgttcgcagttcccacagcta

SEQ ID NO: 31973 - DNA, 72 bp, Homo sapiens
aggtgtcagcaccccccagttttccaagtgaccaccaggcggcactgttcgcagttcccacagctaggtaaa

SEQ ID NO: 31974 - DNA, 69 bp, Homo sapiens
accccccagttttccaagtgaccaccaggcggcactgttcgcagttcccacagctaggtaaagcaaccc

SEQ ID NO: 31975 - DNA, 68 bp, Homo sapiens
gtgaccaccaggcggcactgttcgcagttcccacagctaggtaaagcaacccccttttaaaaacaaaa

SEQ ID NO: 31976 - DNA, 68 bp, Homo sapiens
cactgttcgcagttcccacagctaggtaaagcaacccccttttaaaaacaaaaacatggaacaaatca

SEQ ID NO: 31977 - DNA, 65 bp, Homo sapiens
cagttcccacagctaggtaaagcaacccccttttaaaaacaaaaacatggaacaaatcaccaaaa

SEQ ID NO: 31978 - DNA, 67 bp, Homo sapiens
cacagctaggtaaagcaacccccttttaaaaacaaaaacatggaacaaatcaccaaaatccttcatc

SEQ ID NO: 31979 - DNA, 68 bp, Homo sapiens
ccccttttaaaaacaaaaacatggaacaaatcaccaaaatccttcatcttaactgcggtgccttcatc

SEQ ID NO: 31980 - DNA, 71 bp, Homo sapiens
ttttaaaaacaaaaacatggaacaaatcaccaaaatccttcatcttaactgcggtgccttcatctcaggag

SEQ ID NO: 31981 - DNA, 71 bp, Homo sapiens
aaaaacaaaaacatggaacaaatcaccaaaatccttcatcttaactgcggtgccttcatctcaggaggccc

SEQ ID NO: 31982 - DNA, 73 bp, Homo sapiens
aaacaaaaacatggaacaaatcaccaaaatccttcatcttaactgcggtgccttcatctcaggaggccccata

SEQ ID NO: 31983 - DNA, 74 bp, Homo sapiens
atggaacaaatcaccaaaatccttcatcttaactgcggtgccttcatctcaggaggccccatagctacccaaaa

SEQ ID NO: 31984 - DNA, 73 bp, Homo sapiens
acaaatcaccaaaatccttcatcttaactgcggtgccttcatctcaggaggccccatagctacccaaaaagtc

SEQ ID NO: 31985 - DNA, 74 bp, Homo sapiens
aaaatccttcatcttaactgcggtgccttcatctcaggaggccccatagctacccaaaaagtcgcggctgttca

SEQ ID NO: 31986 - DNA, 74 bp, Homo sapiens
ccttcatcttaactgcggtgccttcatctcaggaggccccatagctacccaaaaagtcgcggctgttcacccta

SEQ ID NO: 31987 - DNA, 75 bp, Homo sapiens
ttcatcttaactgcggtgccttcatctcaggaggccccatagctacccaaaaagtcgcggctgttcaccctacag

SEQ ID NO: 31988 - DNA, 74 bp, Homo sapiens
atcttaactgcggtgccttcatctcaggaggccccatagctacccaaaaagtcgcggctgttcaccctacagga

SEQ ID NO: 31989 - DNA, 73 bp, Homo sapiens
aactgcggtgccttcatctcaggaggccccatagctacccaaaaagtcgcggctgttcaccctacaggaggtg

SEQ ID NO: 31990 - DNA, 71 bp, Homo sapiens
ccttcatctcaggaggccccatagctacccaaaaagtcgcggctgttcaccctacaggaggtgggaaggag

SEQ ID NO: 31991 - DNA, 68 bp, Homo sapiens
aggaggccccatagctacccaaaaagtcgcggctgttcaccctacaggaggtgggaaggaggtgggaa

SEQ ID NO: 31992 - DNA, 71 bp, Homo sapiens
aaaaagtcgcggctgttcaccctacaggaggtgggaaggaggtgggaagcggccgcccgctgcaggcaggc

SEQ ID NO: 31993 - DNA, 73 bp, Homo sapiens
ttcaccctacaggaggtgggaaggaggtgggaagcggccgcccgctgcaggcaggctgcgtcttacctttgga

SEQ ID NO: 31994 - DNA, 71 bp, Homo sapiens
aggaggtgggaaggaggtgggaagcggccgcccgctgcaggcaggctgcgtcttacctttggagtcttctt

SEQ ID NO: 31995 - DNA, 73 bp, Homo sapiens
aaggaggtgggaagcggccgcccgctgcaggcaggctgcgtcttacctttggagtcttctttggccaagtcac

SEQ ID NO: 31996 - DNA, 75 bp, Homo sapiens
gtgggaagcggccgcccgctgcaggcaggctgcgtcttacctttggagtcttctttggccaagtcaccacaggga

SEQ ID NO: 31997 - DNA, 76 bp, Homo sapiens
cccgctgcaggcaggctgcgtcttacctttggagtcttctttggccaagtcaccacagggaccccagtgatggcca

SEQ ID NO: 31998 - DNA, 74 bp, Homo sapiens
aggcaggctgcgtcttacctttggagtcttctttggccaagtcaccacagggaccccagtgatggccagactag

SEQ ID NO: 31999 - DNA, 76 bp, Homo sapiens
tgcgtcttacctttggagtcttctttggccaagtcaccacagggaccccagtgatggccagactagggtcatcatc

SEQ ID NO: 32000 - DNA, 79 bp, Homo sapiens
tttggagtcttctttggccaagtcaccacagggaccccagtgatggccagactagggtcatcatctgcgtgctccttca

SEQ ID NO: 32001 - DNA, 79 bp, Homo sapiens
tcaccacagggaccccagtgatggccagactagggtcatcatctgcgtgctccttcaggacgttctgtggccaaacaaa

SEQ ID NO: 32002 - DNA, 80 bp, Homo sapiens
accccagtgatggccagactagggtcatcatctgcgtgctccttcaggacgttctgtggccaaacaaagcatccatatta

SEQ ID NO: 32003 - DNA, 81 bp, Homo sapiens
agtgatggccagactagggtcatcatctgcgtgctccttcaggacgttctgtggccaaacaaagcatccatattagcccag

SEQ ID NO: 32004 - DNA, 72 bp, Homo sapiens
acctgcccggccctcctcggccgcccagccccagacgccactcctgcccaccttcacaccctccaggagtgc

SEQ ID NO: 32005 - DNA, 73 bp, Homo sapiens
tcctcggccgcccagccccagacgccactcctgcccaccttcacaccctccaggagtgcctgggggtcctcga

SEQ ID NO: 32006 - DNA, 72 bp, Homo sapiens
ccagccccagacgccactcctgcccaccttcacaccctccaggagtgcctgggggtcctcgatgccctcggg

SEQ ID NO: 32007 - DNA, 72 bp, Homo sapiens
acgccactcctgcccaccttcacaccctccaggagtgcctgggggtcctcgatgccctcggggacacacttc

SEQ ID NO: 32008 - DNA, 73 bp, Homo sapiens
tcctgcccaccttcacaccctccaggagtgcctgggggtcctcgatgccctcggggacacacttcttgttctc

SEQ ID NO: 32009 - DNA, 69 bp, Homo sapiens
acaccctccaggagtgcctgggggtcctcgatgccctcggggacacacttcttgttctccgggagggat

SEQ ID NO: 32010 - DNA, 69 bp, Homo sapiens
aggagtgcctgggggtcctcgatgccctcggggacacacttcttgttctccgggagggattccagtttc

SEQ ID NO: 32011 - DNA, 70 bp, Homo sapiens
ggggtcctcgatgccctcggggacacacttcttgttctccgggagggattccagtttctccaccagagct

SEQ ID NO: 32012 - DNA, 70 bp, Homo sapiens
atgccctcggggacacacttcttgttctccgggagggattccagtttctccaccagagctttcaggccct

SEQ ID NO: 32013 - DNA, 71 bp, Homo sapiens
gggacacacttcttgttctccgggagggattccagtttctccaccagagctttcaggcccttcagttcaaa

SEQ ID NO: 32014 - DNA, 72 bp, Homo sapiens
acttcttgttctccgggagggattccagtttctccaccagagctttcaggcccttcagttcaaactcagtga

SEQ ID NO: 32015 - DNA, 73 bp, Homo sapiens
tccgggagggattccagtttctccaccagagctttcaggcccttcagttcaaactcagtgagatgggtccatt

SEQ ID NO: 32016 - DNA, 76 bp, Homo sapiens
tccagtttctccaccagagctttcaggcccttcagttcaaactcagtgagatgggtccatttggcagagacctccg

SEQ ID NO: 32017 - DNA, 76 bp, Homo sapiens
ttctccaccagagctttcaggcccttcagttcaaactcagtgagatgggtccatttggcagagacctccgtggcgg

SEQ ID NO: 32018 - DNA, 74 bp, Homo sapiens
tttcaggcccttcagttcaaactcagtgagatgggtccatttggcagagacctccgtggcgggagagccggtgg

SEQ ID NO: 32019 - DNA, 73 bp, Homo sapiens
ttcagttcaaactcagtgagatgggtccatttggcagagacctccgtggcgggagagccggtgggggtcttgg

SEQ ID NO: 32020 - DNA, 72 bp, Homo sapiens
actcagtgagatgggtccatttggcagagacctccgtggcgggagagccggtgggggtcttggggtagtcta

SEQ ID NO: 32021 - DNA, 69 bp, Homo sapiens
atgggtccatttggcagagacctccgtggcgggagagccggtgggggtcttggggtagtctacggccaa

SEQ ID NO: 32022 - DNA, 70 bp, Homo sapiens
atttggcagagacctccgtggcgggagagccggtgggggtcttggggtagtctacggccaatgtggtgga

SEQ ID NO: 32023 - DNA, 68 bp, Homo sapiens
acctccgtggcgggagagccggtgggggtcttggggtagtctacggccaatgtggtggacttcacact

SEQ ID NO: 32024 - DNA, 70 bp, Homo sapiens
ggagagccggtgggggtcttggggtagtctacggccaatgtggtggacttcacactttcctccgactcat

SEQ ID NO: 32025 - DNA, 71 bp, Homo sapiens
tgggggtcttggggtagtctacggccaatgtggtggacttcacactttcctccgactcattagacaaagtc

SEQ ID NO: 32026 - DNA, 70 bp, Homo sapiens
gtcttggggtagtctacggccaatgtggtggacttcacactttcctccgactcattagacaaagtccttt

SEQ ID NO: 32027 - DNA, 73 bp, Homo sapiens
agtctacggccaatgtggtggacttcacactttcctccgactcattagacaaagtccttttgaggaatcgcag

SEQ ID NO: 32028 - DNA, 73 bp, Homo sapiens
aatgtggtggacttcacactttcctccgactcattagacaaagtccttttgaggaatcgcagggcaggtgctt

SEQ ID NO: 32029 - DNA, 72 bp, Homo sapiens
acttcacactttcctccgactcattagacaaagtccttttgaggaatcgcagggcaggtgctttgggcttct

SEQ ID NO: 32030 - DNA, 71 bp, Homo sapiens
tttcctccgactcattagacaaagtccttttgaggaatcgcagggcaggtgctttgggcttcttcccgagg

SEQ ID NO: 32031 - DNA, 70 bp, Homo sapiens
attagacaaagtccttttgaggaatcgcagggcaggtgctttgggcttcttcccgagggcctcctggtcc

SEQ ID NO: 32032 - DNA, 70 bp, Homo sapiens
aaagtccttttgaggaatcgcagggcaggtgctttgggcttcttcccgagggcctcctggtcctcagagg

SEQ ID NO: 32033 - DNA, 73 bp, Homo sapiens
aatcgcagggcaggtgctttgggcttcttcccgagggcctcctggtcctcagagggcgtgctggtgggtgaag

SEQ ID NO: 32034 - DNA, 74 bp, Homo sapiens
caggtgctttgggcttcttcccgagggcctcctggtcctcagagggcgtgctggtgggtgaagtggagccatcg

SEQ ID NO: 32035 - DNA, 72 bp, Homo sapiens
ctttgggcttcttcccgagggcctcctggtcctcagagggcgtgctggtgggtgaagtggagccatcggtgg

SEQ ID NO: 32036 - DNA, 72 bp, Homo sapiens
tcttcccgagggcctcctggtcctcagagggcgtgctggtgggtgaagtggagccatcggtgggcggtttgg

SEQ ID NO: 32037 - DNA, 72 bp, Homo sapiens
cctcctggtcctcagagggcgtgctggtgggtgaagtggagccatcggtgggcggtttgggtgccctgtccc

SEQ ID NO: 32038 - DNA, 74 bp, Homo sapiens
tcctcagagggcgtgctggtgggtgaagtggagccatcggtgggcggtttgggtgccctgtccctgccctcgcc

SEQ ID NO: 32039 - DNA, 70 bp, Homo sapiens
ctggtgggtgaagtggagccatcggtgggcggtttgggtgccctgtccctgccctcgccctcctcgtcct

SEQ ID NO: 32040 - DNA, 72 bp, Homo sapiens
tgaagtggagccatcggtgggcggtttgggtgccctgtccctgccctcgccctcctcgtccttctcctcctc

SEQ ID NO: 32041 - DNA, 83 bp, Homo sapiens
tctcctcctcctcctgaggctgctgatcacaggcctcctcctccatctccagccaggaatccgaagagaagccgtctatgctg

SEQ ID NO: 32042 - DNA, 79 bp, Homo sapiens
aggctgctgatcacaggcctcctcctccatctccagccaggaatccgaagagaagccgtctatgctgggcttcctcggg

SEQ ID NO: 32043 - DNA, 79 bp, Homo sapiens
atcacaggcctcctcctccatctccagccaggaatccgaagagaagccgtctatgctgggcttcctcggggcatctgtg

SEQ ID NO: 32044 - DNA, 78 bp, Homo sapiens
ctccatctccagccaggaatccgaagagaagccgtctatgctgggcttcctcggggcatctgtgggggcagggtcaca

SEQ ID NO: 32045 - DNA, 75 bp, Homo sapiens
agccaggaatccgaagagaagccgtctatgctgggcttcctcggggcatctgtgggggcagggtcacaagaaaga

SEQ ID NO: 32046 - DNA, 74 bp, Homo sapiens
aatccgaagagaagccgtctatgctgggcttcctcggggcatctgtgggggcagggtcacaagaaagaccgaga

SEQ ID NO: 32047 - DNA, 75 bp, Homo sapiens
ccccagctgtgcagccgaggccgtgggctccctccggttcactcaccaataagcatcgactccctctggtattcc

SEQ ID NO: 32048 - DNA, 77 bp, Homo sapiens
ctgtgcagccgaggccgtgggctccctccggttcactcaccaataagcatcgactccctctggtattcctgagtgag

SEQ ID NO: 32049 - DNA, 74 bp, Homo sapiens
cgaggccgtgggctccctccggttcactcaccaataagcatcgactccctctggtattcctgagtgaggtggga

SEQ ID NO: 32050 - DNA, 77 bp, Homo sapiens
cctccggttcactcaccaataagcatcgactccctctggtattcctgagtgaggtgggagcgctgggtcacacagta

SEQ ID NO: 32051 - DNA, 80 bp, Homo sapiens
ttcactcaccaataagcatcgactccctctggtattcctgagtgaggtgggagcgctgggtcacacagtacacgtatctc

SEQ ID NO: 32052 - DNA, 79 bp, Homo sapiens
aataagcatcgactccctctggtattcctgagtgaggtgggagcgctgggtcacacagtacacgtatctctccaggaca

SEQ ID NO: 32053 - DNA, 83 bp, Homo sapiens
tccctctggtattcctgagtgaggtgggagcgctgggtcacacagtacacgtatctctccaggacataccagcacatctcata

SEQ ID NO: 32054 - DNA, 83 bp, Homo sapiens
tggtattcctgagtgaggtgggagcgctgggtcacacagtacacgtatctctccaggacataccagcacatctcatagtagaa

SEQ ID NO: 32055 - DNA, 79 bp, Homo sapiens
agtgaggtgggagcgctgggtcacacagtacacgtatctctccaggacataccagcacatctcatagtagaaggggtaa

SEQ ID NO: 32056 - DNA, 77 bp, Homo sapiens
agcgctgggtcacacagtacacgtatctctccaggacataccagcacatctcatagtagaaggggtaacggaatttg

SEQ ID NO: 32057 - DNA, 78 bp, Homo sapiens
acacagtacacgtatctctccaggacataccagcacatctcatagtagaaggggtaacggaatttgggctgcacctga

SEQ ID NO: 32058 - DNA, 76 bp, Homo sapiens
acgtatctctccaggacataccagcacatctcatagtagaaggggtaacggaatttgggctgcacctgaaagcaaa

SEQ ID NO: 32059 - DNA, 78 bp, Homo sapiens
aggacataccagcacatctcatagtagaaggggtaacggaatttgggctgcacctgaaagcaaagacgcaggcaggca

SEQ ID NO: 32060 - DNA, 77 bp, Homo sapiens
ataccagcacatctcatagtagaaggggtaacggaatttgggctgcacctgaaagcaaagacgcaggcaggcagagg

SEQ ID NO: 32061 - DNA, 75 bp, Homo sapiens
atctcatagtagaaggggtaacggaatttgggctgcacctgaaagcaaagacgcaggcaggcagaggtcagtttc

SEQ ID NO: 32062 - DNA, 74 bp, Homo sapiens
ctcaggggccaggcgcgcacgcgaggacagaagggaacctccttacccgcgtcctgtcctcgatctcgtagatc

SEQ ID NO: 32063 - DNA, 77 bp, Homo sapiens
aggcgcgcacgcgaggacagaagggaacctccttacccgcgtcctgtcctcgatctcgtagatccgcagctgcatgg

SEQ ID NO: 32064 - DNA, 76 bp, Homo sapiens
gcgaggacagaagggaacctccttacccgcgtcctgtcctcgatctcgtagatccgcagctgcatgggcacgttaa

SEQ ID NO: 32065 - DNA, 76 bp, Homo sapiens
aagggaacctccttacccgcgtcctgtcctcgatctcgtagatccgcagctgcatgggcacgttaaagctgtgcag

SEQ ID NO: 32066 - DNA, 77 bp, Homo sapiens
aacctccttacccgcgtcctgtcctcgatctcgtagatccgcagctgcatgggcacgttaaagctgtgcaggatgtt

SEQ ID NO: 32067 - DNA, 80 bp, Homo sapiens
gtcctgtcctcgatctcgtagatccgcagctgcatgggcacgttaaagctgtgcaggatgtttccgccgaacaccaaaga

SEQ ID NO: 32068 - DNA, 81 bp, Homo sapiens
tcctcgatctcgtagatccgcagctgcatgggcacgttaaagctgtgcaggatgtttccgccgaacaccaaagagtctaca

SEQ ID NO: 32069 - DNA, 79 bp, Homo sapiens
tagatccgcagctgcatgggcacgttaaagctgtgcaggatgtttccgccgaacaccaaagagtctacaggggtgtaga

SEQ ID NO: 32070 - DNA, 78 bp, Homo sapiens
tgcatgggcacgttaaagctgtgcaggatgtttccgccgaacaccaaagagtctacaggggtgtagacggcatggatc

SEQ ID NO: 32071 - DNA, 73 bp, Homo sapiens
acgttaaagctgtgcaggatgtttccgccgaacaccaaagagtctacaggggtgtagacggcatggatccaac

SEQ ID NO: 32072 - DNA, 73 bp, Homo sapiens
aagctgtgcaggatgtttccgccgaacaccaaagagtctacaggggtgtagacggcatggatccaacctgggg

SEQ ID NO: 32073 - DNA, 70 bp, Homo sapiens
ggatgtttccgccgaacaccaaagagtctacaggggtgtagacggcatggatccaacctggggtgggaag

SEQ ID NO: 32074 - DNA, 72 bp, Homo sapiens
aacaccaaagagtctacaggggtgtagacggcatggatccaacctggggtgggaagggcaaggagaggatga

SEQ ID NO: 32075 - DNA, 73 bp, Homo sapiens
aaagagtctacaggggtgtagacggcatggatccaacctggggtgggaagggcaaggagaggatgagccgctg

SEQ ID NO: 32076 - DNA, 73 bp, Homo sapiens
ctcaggccgcaggagactcgaggagcccagagagtgcccctggaaacctaccggaagggatgaaaaatgtgta

SEQ ID NO: 32077 - DNA, 71 bp, Homo sapiens
aggagactcgaggagcccagagagtgcccctggaaacctaccggaagggatgaaaaatgtgtagccctgct

SEQ ID NO: 32078 - DNA, 72 bp, Homo sapiens
cccagagagtgcccctggaaacctaccggaagggatgaaaaatgtgtagccctgcttcagctcaattctttg

SEQ ID NO: 32079 - DNA, 72 bp, Homo sapiens
agtgcccctggaaacctaccggaagggatgaaaaatgtgtagccctgcttcagctcaattctttggcatcgt

SEQ ID NO: 32080 - DNA, 72 bp, Homo sapiens
aaacctaccggaagggatgaaaaatgtgtagccctgcttcagctcaattctttggcatcgttccacacggtc

SEQ ID NO: 32081 - DNA, 77 bp, Homo sapiens
aagggatgaaaaatgtgtagccctgcttcagctcaattctttggcatcgttccacacggtctcccagaaagatgtca

SEQ ID NO: 32082 - DNA, 76 bp, Homo sapiens
aaaaatgtgtagccctgcttcagctcaattctttggcatcgttccacacggtctcccagaaagatgtcactctgtt

SEQ ID NO: 32083 - DNA, 80 bp, Homo sapiens
cctgcttcagctcaattctttggcatcgttccacacggtctcccagaaagatgtcactctgtttgcctgacagcacccac

SEQ ID NO: 32084 - DNA, 78 bp, Homo sapiens
ctcaattctttggcatcgttccacacggtctcccagaaagatgtcactctgtttgcctgacagcacccactcctcgta

SEQ ID NO: 32085 - DNA, 79 bp, Homo sapiens
tggcatcgttccacacggtctcccagaaagatgtcactctgtttgcctgacagcacccactcctcgtacagcgccaaat

SEQ ID NO: 32086 - DNA, 80 bp, Homo sapiens
tcgttccacacggtctcccagaaagatgtcactctgtttgcctgacagcacccactcctcgtacagcgccaaattgtgca

SEQ ID NO: 32087 - DNA, 82 bp, Homo sapiens
tctcccagaaagatgtcactctgtttgcctgacagcacccactcctcgtacagcgccaaattgtgcagcgttggaggaatca

SEQ ID NO: 32088 - DNA, 80 bp, Homo sapiens
agatgtcactctgtttgcctgacagcacccactcctcgtacagcgccaaattgtgcagcgttggaggaatcagccaaaaa

SEQ ID NO: 32089 - DNA, 77 bp, Homo sapiens
actctgtttgcctgacagcacccactcctcgtacagcgccaaattgtgcagcgttggaggaatcagccaaaaaatct

SEQ ID NO: 32090 - DNA, 75 bp, Homo sapiens
acagcacccactcctcgtacagcgccaaattgtgcagcgttggaggaatcagccaaaaaatcttgggagaaaaca

SEQ ID NO: 32091 - DNA, 76 bp, Homo sapiens
actcctcgtacagcgccaaattgtgcagcgttggaggaatcagccaaaaaatcttgggagaaaacacaggcagtca

SEQ ID NO: 32092 - DNA, 78 bp, Homo sapiens
gtacagcgccaaattgtgcagcgttggaggaatcagccaaaaaatcttgggagaaaacacaggcagtcagctggagac

SEQ ID NO: 32093 - DNA, 71 bp, Homo sapiens
acacaaacagctagagatgcatagaaagttaaaggcaactgaaactcaccttcccaccccggaaaacatgg

SEQ ID NO: 32094 - DNA, 70 bp, Homo sapiens
agctagagatgcatagaaagttaaaggcaactgaaactcaccttcccaccccggaaaacatggtaccaaa

SEQ ID NO: 32095 - DNA, 64 bp, Homo sapiens
atagaaagttaaaggcaactgaaactcaccttcccaccccggaaaacatggtaccaaacggaag

SEQ ID NO: 32096 - DNA, 66 bp, Homo sapiens
ttaaaggcaactgaaactcaccttcccaccccggaaaacatggtaccaaacggaagtgcctccaaa

SEQ ID NO: 32097 - DNA, 67 bp, Homo sapiens
aactgaaactcaccttcccaccccggaaaacatggtaccaaacggaagtgcctccaaagtcgatgtg

SEQ ID NO: 32098 - DNA, 68 bp, Homo sapiens
ttcccaccccggaaaacatggtaccaaacggaagtgcctccaaagtcgatgtggaagtcggtgaaaca

SEQ ID NO: 32099 - DNA, 68 bp, Homo sapiens
ccggaaaacatggtaccaaacggaagtgcctccaaagtcgatgtggaagtcggtgaaacaacctttca

SEQ ID NO: 32100 - DNA, 74 bp, Homo sapiens
acatggtaccaaacggaagtgcctccaaagtcgatgtggaagtcggtgaaacaacctttcacgctcatcagaca

SEQ ID NO: 32101 - DNA, 74 bp, Homo sapiens
aaacggaagtgcctccaaagtcgatgtggaagtcggtgaaacaacctttcacgctcatcagacagtacctgcaa

SEQ ID NO: 32102 - DNA, 77 bp, Homo sapiens
cctccaaagtcgatgtggaagtcggtgaaacaacctttcacgctcatcagacagtacctgcaacacagaggcaggga

SEQ ID NO: 32103 - DNA, 78 bp, Homo sapiens
atgtggaagtcggtgaaacaacctttcacgctcatcagacagtacctgcaacacagaggcagggagacagaacacaag

SEQ ID NO: 32104 - DNA, 76 bp, Homo sapiens
tgggggtcaaccctgccagctctggccaccagccaggcagtcttactttttcactttcgggtacttcatctctgca

SEQ ID NO: 32105 - DNA, 75 bp, Homo sapiens
aaccctgccagctctggccaccagccaggcagtcttactttttcactttcgggtacttcatctctgcaatggcgt

SEQ ID NO: 32106 - DNA, 77 bp, Homo sapiens
tctggccaccagccaggcagtcttactttttcactttcgggtacttcatctctgcaatggcgttcgtggcttctgtc

SEQ ID NO: 32107 - DNA, 76 bp, Homo sapiens
accagccaggcagtcttactttttcactttcgggtacttcatctctgcaatggcgttcgtggcttctgtctgcttc

SEQ ID NO: 32108 - DNA, 77 bp, Homo sapiens
agtcttactttttcactttcgggtacttcatctctgcaatggcgttcgtggcttctgtctgcttctccttcagatgc

SEQ ID NO: 32109 - DNA, 79 bp, Homo sapiens
tttttcactttcgggtacttcatctctgcaatggcgttcgtggcttctgtctgcttctccttcagatgctggggccaca

SEQ ID NO: 32110 - DNA, 81 bp, Homo sapiens
ttcgggtacttcatctctgcaatggcgttcgtggcttctgtctgcttctccttcagatgctggggccacatgttgtccacc

SEQ ID NO: 32111 - DNA, 82 bp, Homo sapiens
tctgcaatggcgttcgtggcttctgtctgcttctccttcagatgctggggccacatgttgtccacccagtccaccaggtcta

SEQ ID NO: 32112 - DNA, 78 bp, Homo sapiens
aatggcgttcgtggcttctgtctgcttctccttcagatgctggggccacatgttgtccacccagtccaccaggtctac

SEQ ID NO: 32113 - DNA, 79 bp, Homo sapiens
ttctgtctgcttctccttcagatgctggggccacatgttgtccacccagtccaccaggtctacctgaaagccagaccag

SEQ ID NO: 32114 - DNA, 82 bp, Homo sapiens
ttctccttcagatgctggggccacatgttgtccacccagtccaccaggtctacctgaaagccagaccagtgtgagcactgca

SEQ ID NO: 32115 - DNA, 81 bp, Homo sapiens
agatgctggggccacatgttgtccacccagtccaccaggtctacctgaaagccagaccagtgtgagcactgcatttctcca

SEQ ID NO: 32116 - DNA, 69 bp, Homo sapiens
aaggagatgaggtggaaggtatctggggagggtacctgggccccggacctaccacagtcggacgcttga

SEQ ID NO: 32117 - DNA, 70 bp, Homo sapiens
gtggaaggtatctggggagggtacctgggccccggacctaccacagtcggacgcttgaccaagtgctcca

SEQ ID NO: 32118 - DNA, 70 bp, Homo sapiens
ggtatctggggagggtacctgggccccggacctaccacagtcggacgcttgaccaagtgctccagcttgg

SEQ ID NO: 32119 - DNA, 76 bp, Homo sapiens
tacctgggccccggacctaccacagtcggacgcttgaccaagtgctccagcttggtgtggctgaactctaggctga

SEQ ID NO: 32120 - DNA, 78 bp, Homo sapiens
ccggacctaccacagtcggacgcttgaccaagtgctccagcttggtgtggctgaactctaggctgatgacgttgtaca

SEQ ID NO: 32121 - DNA, 80 bp, Homo sapiens
cctaccacagtcggacgcttgaccaagtgctccagcttggtgtggctgaactctaggctgatgacgttgtacagcttgtc

SEQ ID NO: 32122 - DNA, 79 bp, Homo sapiens
acgcttgaccaagtgctccagcttggtgtggctgaactctaggctgatgacgttgtacagcttgtcccgctgggcctcg

SEQ ID NO: 32123 - DNA, 79 bp, Homo sapiens
agtgctccagcttggtgtggctgaactctaggctgatgacgttgtacagcttgtcccgctgggcctcgggcgtctcgta

SEQ ID NO: 32124 - DNA, 77 bp, Homo sapiens
cttggtgtggctgaactctaggctgatgacgttgtacagcttgtcccgctgggcctcgggcgtctcgtagtaacgca

SEQ ID NO: 32125 - DNA, 75 bp, Homo sapiens
ctgaactctaggctgatgacgttgtacagcttgtcccgctgggcctcgggcgtctcgtagtaacgcacaaactgg

SEQ ID NO: 32126 - DNA, 79 bp, Homo sapiens
tctaggctgatgacgttgtacagcttgtcccgctgggcctcgggcgtctcgtagtaacgcacaaactgggacatgctca

SEQ ID NO: 32127 - DNA, 76 bp, Homo sapiens
atgacgttgtacagcttgtcccgctgggcctcgggcgtctcgtagtaacgcacaaactgggacatgctcatctccg

SEQ ID NO: 32128 - DNA, 76 bp, Homo sapiens
acagcttgtcccgctgggcctcgggcgtctcgtagtaacgcacaaactgggacatgctcatctccgtgcccttctg

SEQ ID NO: 32129 - DNA, 79 bp, Homo sapiens
tgggcctcgggcgtctcgtagtaacgcacaaactgggacatgctcatctccgtgcccttctgggtgttcacatccatca

SEQ ID NO: 32130 - DNA, 79 bp, Homo sapiens
ggcgtctcgtagtaacgcacaaactgggacatgctcatctccgtgcccttctgggtgttcacatccatcacgtccacaa

SEQ ID NO: 32131 - DNA, 78 bp, Homo sapiens
cgtagtaacgcacaaactgggacatgctcatctccgtgcccttctgggtgttcacatccatcacgtccacaagccgcc

SEQ ID NO: 32132 - DNA, 78 bp, Homo sapiens
acaaactgggacatgctcatctccgtgcccttctgggtgttcacatccatcacgtccacaagccgccggctccctgga

SEQ ID NO: 32133 - DNA, 81 bp, Homo sapiens
acatgctcatctccgtgcccttctgggtgttcacatccatcacgtccacaagccgccggctccctggaggcagaagccaca

SEQ ID NO: 32134 - DNA, 77 bp, Homo sapiens
gtgcccttctgggtgttcacatccatcacgtccacaagccgccggctccctggaggcagaagccacacactggttgt

SEQ ID NO: 32135 - DNA, 78 bp, Homo sapiens
cttctgggtgttcacatccatcacgtccacaagccgccggctccctggaggcagaagccacacactggttgttcctgc

SEQ ID NO: 32136 - DNA, 76 bp, Homo sapiens
aatgggcaggtggtgaccgcctctttccccttccctacttcagcatgtctgagccacacacacggcaagcgactta

SEQ ID NO: 32137 - DNA, 75 bp, Homo sapiens
tgaccgcctctttccccttccctacttcagcatgtctgagccacacacacggcaagcgacttacccactaggagt

SEQ ID NO: 32138 - DNA, 75 bp, Homo sapiens
tttccccttccctacttcagcatgtctgagccacacacacggcaagcgacttacccactaggagtttgacgtctc

SEQ ID NO: 32139 - DNA, 79 bp, Homo sapiens
cctacttcagcatgtctgagccacacacacggcaagcgacttacccactaggagtttgacgtctcggactgtgaaatca

SEQ ID NO: 32140 - DNA, 78 bp, Homo sapiens
atgtctgagccacacacacggcaagcgacttacccactaggagtttgacgtctcggactgtgaaatcagggtcaggca

SEQ ID NO: 32141 - DNA, 76 bp, Homo sapiens
agccacacacacggcaagcgacttacccactaggagtttgacgtctcggactgtgaaatcagggtcaggcatcctg

SEQ ID NO: 32142 - DNA, 72 bp, Homo sapiens
acggcaagcgacttacccactaggagtttgacgtctcggactgtgaaatcagggtcaggcatcctggggaaa

SEQ ID NO: 32143 - DNA, 74 bp, Homo sapiens
acttacccactaggagtttgacgtctcggactgtgaaatcagggtcaggcatcctggggaaagaggagcacaga

SEQ ID NO: 32144 - DNA, 76 bp, Homo sapiens
taggagtttgacgtctcggactgtgaaatcagggtcaggcatcctggggaaagaggagcacagacctttggtgaga

SEQ ID NO: 32145 - DNA, 77 bp, Homo sapiens
tctcggactgtgaaatcagggtcaggcatcctggggaaagaggagcacagacctttggtgagaggccagaaacaaca

SEQ ID NO: 32146 - DNA, 77 bp, Homo sapiens
actgtgaaatcagggtcaggcatcctggggaaagaggagcacagacctttggtgagaggccagaaacaacagagcta

SEQ ID NO: 32147 - DNA, 74 bp, Homo sapiens
agggtcaggcatcctggggaaagaggagcacagacctttggtgagaggccagaaacaacagagctagactaccc

SEQ ID NO: 32148 - DNA, 68 bp, Homo sapiens
aagctataaagtatgttagggaggaagacgggggaaggagtgattagtttcagcaacttacttaattc

SEQ ID NO: 32149 - DNA, 69 bp, Homo sapiens
agtatgttagggaggaagacgggggaaggagtgattagtttcagcaacttacttaattcccagtccatc

SEQ ID NO: 32150 - DNA, 68 bp, Homo sapiens
aagacgggggaaggagtgattagtttcagcaacttacttaattcccagtccatccttttctcgaaata

SEQ ID NO: 32151 - DNA, 69 bp, Homo sapiens
aaggagtgattagtttcagcaacttacttaattcccagtccatccttttctcgaaatatcaggggaacc

SEQ ID NO: 32152 - DNA, 70 bp, Homo sapiens
attagtttcagcaacttacttaattcccagtccatccttttctcgaaatatcaggggaaccctgagagct

SEQ ID NO: 32153 - DNA, 70 bp, Homo sapiens
aacttacttaattcccagtccatccttttctcgaaatatcaggggaaccctgagagcttctctctgtacg

SEQ ID NO: 32154 - DNA, 73 bp, Homo sapiens
ttaattcccagtccatccttttctcgaaatatcaggggaaccctgagagcttctctctgtacgtactcatagt

SEQ ID NO: 32155 - DNA, 75 bp, Homo sapiens
tccatccttttctcgaaatatcaggggaaccctgagagcttctctctgtacgtactcatagttgaaatctgtttg

SEQ ID NO: 32156 - DNA, 74 bp, Homo sapiens
ttttctcgaaatatcaggggaaccctgagagcttctctctgtacgtactcatagttgaaatctgtttggatatt

SEQ ID NO: 32157 - DNA, 74 bp, Homo sapiens
atatcaggggaaccctgagagcttctctctgtacgtactcatagttgaaatctgtttggatatttgaattaaaa

SEQ ID NO: 32158 - DNA, 75 bp, Homo sapiens
tgagagcttctctctgtacgtactcatagttgaaatctgtttggatatttgaattaaaacaagttggttaagtca

SEQ ID NO: 32159 - DNA, 73 bp, Homo sapiens
gcttctctctgtacgtactcatagttgaaatctgtttggatatttgaattaaaacaagttggttaagtcacga

SEQ ID NO: 32160 - DNA, 74 bp, Homo sapiens
gctcggcccgcagcgcagagggcggcccggggtgggggcgcctcacctttgccctccatggcgtgcacgaagtc

SEQ ID NO: 32161 - DNA, 71 bp, Homo sapiens
cccgcagcgcagagggcggcccggggtgggggcgcctcacctttgccctccatggcgtgcacgaagtcccc

SEQ ID NO: 32162 - DNA, 69 bp, Homo sapiens
agagggcggcccggggtgggggcgcctcacctttgccctccatggcgtgcacgaagtccccctggtaca

SEQ ID NO: 32163 - DNA, 75 bp, Homo sapiens
ggtgggggcgcctcacctttgccctccatggcgtgcacgaagtccccctggtacagctggctgcgaagcttctcc

SEQ ID NO: 32164 - DNA, 78 bp, Homo sapiens
cgcctcacctttgccctccatggcgtgcacgaagtccccctggtacagctggctgcgaagcttctcctccaggctgaa

SEQ ID NO: 32165 - DNA, 78 bp, Homo sapiens
tttgccctccatggcgtgcacgaagtccccctggtacagctggctgcgaagcttctcctccaggctgaagccgcggac

SEQ ID NO: 32166 - DNA, 80 bp, Homo sapiens
atggcgtgcacgaagtccccctggtacagctggctgcgaagcttctcctccaggctgaagccgcggacgctgacgatctc

SEQ ID NO: 32167 - DNA, 77 bp, Homo sapiens
acgaagtccccctggtacagctggctgcgaagcttctcctccaggctgaagccgcggacgctgacgatctcctccac

SEQ ID NO: 32168 - DNA, 80 bp, Homo sapiens
tggtacagctggctgcgaagcttctcctccaggctgaagccgcggacgctgacgatctcctccacgtccgacaagtcctc

SEQ ID NO: 32169 - DNA, 77 bp, Homo sapiens
ctgcgaagcttctcctccaggctgaagccgcggacgctgacgatctcctccacgtccgacaagtcctcgttctcgtc

SEQ ID NO: 32170 - DNA, 77 bp, Homo sapiens
ttctcctccaggctgaagccgcggacgctgacgatctcctccacgtccgacaagtcctcgttctcgtcgtatcgctg

SEQ ID NO: 32171 - DNA, 76 bp, Homo sapiens
aggctgaagccgcggacgctgacgatctcctccacgtccgacaagtcctcgttctcgtcgtatcgctggcggtcaa

SEQ ID NO: 32172 - DNA, 77 bp, Homo sapiens
cggacgctgacgatctcctccacgtccgacaagtcctcgttctcgtcgtatcgctggcggtcaatcgggcgctgcga

SEQ ID NO: 32173 - DNA, 75 bp, Homo sapiens
acgatctcctccacgtccgacaagtcctcgttctcgtcgtatcgctggcggtcaatcgggcgctgcgaggaccca

SEQ ID NO: 32174 - DNA, 74 bp, Homo sapiens
tcctccacgtccgacaagtcctcgttctcgtcgtatcgctggcggtcaatcgggcgctgcgaggacccaaacca

SEQ ID NO: 32175 - DNA, 73 bp, Homo sapiens
aagtcctcgttctcgtcgtatcgctggcggtcaatcgggcgctgcgaggacccaaaccagagagcccgggaca

SEQ ID NO: 32176 - DNA, 70 bp, Homo sapiens
aaaaaaagctacacaccaatcttcttccagagtctttctctgcctccatttttttaggagagttcaccaa

SEQ ID NO: 32177 - DNA, 74 bp, Homo sapiens
tacacaccaatcttcttccagagtctttctctgcctccatttttttaggagagttcaccaattaattgtcaaca

SEQ ID NO: 32178 - DNA, 73 bp, Homo sapiens
aatcttcttccagagtctttctctgcctccatttttttaggagagttcaccaattaattgtcaacactcctgc

SEQ ID NO: 32179 - DNA, 71 bp, Homo sapiens
agtctttctctgcctccatttttttaggagagttcaccaattaattgtcaacactcctgccccctgcattt

SEQ ID NO: 32180 - DNA, 71 bp, Homo sapiens
tgcctccatttttttaggagagttcaccaattaattgtcaacactcctgccccctgcattttggccgaggg

SEQ ID NO: 32181 - DNA, 69 bp, Homo sapiens
tttttaggagagttcaccaattaattgtcaacactcctgccccctgcattttggccgaggggggaagga

SEQ ID NO: 32182 - DNA, 69 bp, Homo sapiens
aggagagttcaccaattaattgtcaacactcctgccccctgcattttggccgaggggggaaggagggaa

SEQ ID NO: 32183 - DNA, 67 bp, Homo sapiens
aattaattgtcaacactcctgccccctgcattttggccgaggggggaaggagggaagaccaaagaaa

SEQ ID NO: 32184 - DNA, 65 bp, Homo sapiens
aacactcctgccccctgcattttggccgaggggggaaggagggaagaccaaagaaaacaaaccaa

SEQ ID NO: 32185 - DNA, 74 bp, Homo sapiens
aataaataaagcaagccagagccgagatctacaaagttttgcaccaacacttaggcagatccgtttgcaaagtc

SEQ ID NO: 32186 - DNA, 75 bp, Homo sapiens
taaagcaagccagagccgagatctacaaagttttgcaccaacacttaggcagatccgtttgcaaagtcctaggaa

SEQ ID NO: 32187 - DNA, 71 bp, Homo sapiens
agagccgagatctacaaagttttgcaccaacacttaggcagatccgtttgcaaagtcctaggaaaccattt

SEQ ID NO: 32188 - DNA, 72 bp, Homo sapiens
atctacaaagttttgcaccaacacttaggcagatccgtttgcaaagtcctaggaaaccattttcagcagttg

SEQ ID NO: 32189 - DNA, 70 bp, Homo sapiens
gttttgcaccaacacttaggcagatccgtttgcaaagtcctaggaaaccattttcagcagttgtgggggg

SEQ ID NO: 32190 - DNA, 68 bp, Homo sapiens
aacacttaggcagatccgtttgcaaagtcctaggaaaccattttcagcagttgtggggggggggaggc

SEQ ID NO: 32191 - DNA, 68 bp, Homo sapiens
atccgtttgcaaagtcctaggaaaccattttcagcagttgtggggggggggaggcgtcgacgtcataa

SEQ ID NO: 32192 - DNA, 66 bp, Homo sapiens
aagtcctaggaaaccattttcagcagttgtggggggggggaggcgtcgacgtcataatccccggaa

SEQ ID NO: 32193 - DNA, 65 bp, Homo sapiens
aaaccattttcagcagttgtggggggggggaggcgtcgacgtcataatccccggaacgtaaacat

SEQ ID NO: 32194 - DNA, 68 bp, Homo sapiens
ttttcagcagttgtggggggggggaggcgtcgacgtcataatccccggaacgtaaacattgttgccga

SEQ ID NO: 32195 - DNA, 68 bp, Homo sapiens
gggggggggaggcgtcgacgtcataatccccggaacgtaaacattgttgccgatcgcgctcggagccc

SEQ ID NO: 32196 - DNA, 71 bp, Homo sapiens
aggcgtcgacgtcataatccccggaacgtaaacattgttgccgatcgcgctcggagcccgcggccgggcta

SEQ ID NO: 32197 - DNA, 69 bp, Homo sapiens
acgtcataatccccggaacgtaaacattgttgccgatcgcgctcggagcccgcggccgggctatttggg

SEQ ID NO: 32198 - DNA, 68 bp, Homo sapiens
cccggaacgtaaacattgttgccgatcgcgctcggagcccgcggccgggctatttgggggggctctcg

SEQ ID NO: 32199 - DNA, 70 bp, Homo sapiens
taaacattgttgccgatcgcgctcggagcccgcggccgggctatttgggggggctctcggcccgggcttg

SEQ ID NO: 32200 - DNA, 67 bp, Homo sapiens
gttgccgatcgcgctcggagcccgcggccgggctatttgggggggctctcggcccgggcttgggggg

SEQ ID NO: 32201 - DNA, 64 bp, Homo sapiens
cgctcggagcccgcggccgggctatttgggggggctctcggcccgggcttgggggggtgggggc

SEQ ID NO: 32202 - DNA, 63 bp, Homo sapiens
ggccgggctatttgggggggctctcggcccgggcttgggggggtgggggcggcggcccgagga

SEQ ID NO: 32203 - DNA, 63 bp, Homo sapiens
tatttgggggggctctcggcccgggcttgggggggtgggggcggcggcccgaggaggtatggg

SEQ ID NO: 32204 - DNA, 64 bp, Homo sapiens
ggctctcggcccgggcttgggggggtgggggcggcggcccgaggaggtatggggcggggaggga

SEQ ID NO: 32205 - DNA, 62 bp, Homo sapiens
ccgggcttgggggggtgggggcggcggcccgaggaggtatggggcggggagggagcccggga

SEQ ID NO: 32206 - DNA, 64 bp, Homo sapiens
gggtgggggcggcggcccgaggaggtatggggcggggagggagcccgggaggcaccgggcgccg

SEQ ID NO: 32207 - DNA, 68 bp, Homo sapiens
ggcggcccgaggaggtatggggcggggagggagcccgggaggcaccgggcgccgttagcgccgtggca

SEQ ID NO: 32208 - DNA, 68 bp, Homo sapiens
aggaggtatggggcggggagggagcccgggaggcaccgggcgccgttagcgccgtggcatcgctgttt

SEQ ID NO: 32209 - DNA, 70 bp, Homo sapiens
ggcggggagggagcccgggaggcaccgggcgccgttagcgccgtggcatcgctgttttgttgttgggtca

SEQ ID NO: 32210 - DNA, 76 bp, Homo sapiens
gagcccgggaggcaccgggcgccgttagcgccgtggcatcgctgttttgttgttgggtcacgagtgcgcctctgca

SEQ ID NO: 32211 - DNA, 76 bp, Homo sapiens
cgggaggcaccgggcgccgttagcgccgtggcatcgctgttttgttgttgggtcacgagtgcgcctctgcacgcag

SEQ ID NO: 32212 - DNA, 77 bp, Homo sapiens
cgggcgccgttagcgccgtggcatcgctgttttgttgttgggtcacgagtgcgcctctgcacgcaggcgccgccgcc

SEQ ID NO: 32213 - DNA, 70 bp, Homo sapiens
gctacccctcttcctcttctttcatccacccctcccccaacattacctgtgtggccgactcaaattcaaa

SEQ ID NO: 32214 - DNA, 72 bp, Homo sapiens
ttcctcttctttcatccacccctcccccaacattacctgtgtggccgactcaaattcaaagcattttgtata

SEQ ID NO: 32215 - DNA, 72 bp, Homo sapiens
cttctttcatccacccctcccccaacattacctgtgtggccgactcaaattcaaagcattttgtatatataa

SEQ ID NO: 32216 - DNA, 69 bp, Homo sapiens
cctcccccaacattacctgtgtggccgactcaaattcaaagcattttgtatatataactgttttctttt

SEQ ID NO: 32217 - DNA, 70 bp, Homo sapiens
cccaacattacctgtgtggccgactcaaattcaaagcattttgtatatataactgttttctttttttgct

SEQ ID NO: 32218 - DNA, 75 bp, Homo sapiens
ctgtgtggccgactcaaattcaaagcattttgtatatataactgttttctttttttgcttttctgctgcatgtct

SEQ ID NO: 32219 - DNA, 73 bp, Homo sapiens
gactcaaattcaaagcattttgtatatataactgttttctttttttgcttttctgctgcatgtctttttcgtg

SEQ ID NO: 32220 - DNA, 71 bp, Homo sapiens
aagcattttgtatatataactgttttctttttttgcttttctgctgcatgtctttttcgtggggggtgatc

SEQ ID NO: 32221 - DNA, 75 bp, Homo sapiens
ttgtatatataactgttttctttttttgcttttctgctgcatgtctttttcgtggggggtgatcctctgcagatc

SEQ ID NO: 32222 - DNA, 72 bp, Homo sapiens
ttttctttttttgcttttctgctgcatgtctttttcgtggggggtgatcctctgcagatccccccatttgcg

SEQ ID NO: 32223 - DNA, 77 bp, Homo sapiens
ttgcttttctgctgcatgtctttttcgtggggggtgatcctctgcagatccccccatttgcggacccgccatgtgga

SEQ ID NO: 32224 - DNA, 76 bp, Homo sapiens
tttctgctgcatgtctttttcgtggggggtgatcctctgcagatccccccatttgcggacccgccatgtggaggag

SEQ ID NO: 32225 - DNA, 73 bp, Homo sapiens
atgtctttttcgtggggggtgatcctctgcagatccccccatttgcggacccgccatgtggaggaggcatttg

SEQ ID NO: 32226 - DNA, 74 bp, Homo sapiens
ggggtgatcctctgcagatccccccatttgcggacccgccatgtggaggaggcatttggggggctcagaaggaa

SEQ ID NO: 32227 - DNA, 74 bp, Homo sapiens
atcctctgcagatccccccatttgcggacccgccatgtggaggaggcatttggggggctcagaaggaaattagc

SEQ ID NO: 32228 - DNA, 72 bp, Homo sapiens
cccccatttgcggacccgccatgtggaggaggcatttggggggctcagaaggaaattagctcggcttccata

SEQ ID NO: 32229 - DNA, 73 bp, Homo sapiens
atttgcggacccgccatgtggaggaggcatttggggggctcagaaggaaattagctcggcttccatacctata

SEQ ID NO: 32230 - DNA, 72 bp, Homo sapiens
atgtggaggaggcatttggggggctcagaaggaaattagctcggcttccatacctataaggactgcctaact

SEQ ID NO: 32231 - DNA, 69 bp, Homo sapiens
aggcatttggggggctcagaaggaaattagctcggcttccatacctataaggactgcctaacttttaaa

SEQ ID NO: 32232 - DNA, 71 bp, Homo sapiens
gggctcagaaggaaattagctcggcttccatacctataaggactgcctaacttttaaactcccggcactca

SEQ ID NO: 32233 - DNA, 69 bp, Homo sapiens
aaggaaattagctcggcttccatacctataaggactgcctaacttttaaactcccggcactcaaagatg

SEQ ID NO: 32234 - DNA, 74 bp, Homo sapiens
ttagctcggcttccatacctataaggactgcctaacttttaaactcccggcactcaaagatgtggacacacaca

SEQ ID NO: 32235 - DNA, 72 bp, Homo sapiens
tacctataaggactgcctaacttttaaactcccggcactcaaagatgtggacacacacacgtacaggaaata

SEQ ID NO: 32236 - DNA, 73 bp, Homo sapiens
ataaggactgcctaacttttaaactcccggcactcaaagatgtggacacacacacgtacaggaaatacagcca

SEQ ID NO: 32237 - DNA, 73 bp, Homo sapiens
taacttttaaactcccggcactcaaagatgtggacacacacacgtacaggaaatacagccagaccagagcctt

SEQ ID NO: 32238 - DNA, 67 bp, Homo sapiens
tttctttctttcatttaactgggaatggcacaacgtgtttctgttttccttctaggaaaaagaatgg

SEQ ID NO: 32239 - DNA, 68 bp, Homo sapiens
ttctttcatttaactgggaatggcacaacgtgtttctgttttccttctaggaaaaagaatgggaggag

SEQ ID NO: 32240 - DNA, 71 bp, Homo sapiens
taactgggaatggcacaacgtgtttctgttttccttctaggaaaaagaatgggaggagtcagcaaagacca

SEQ ID NO: 32241 - DNA, 68 bp, Homo sapiens
acaacgtgtttctgttttccttctaggaaaaagaatgggaggagtcagcaaagaccaaggtaagttca

SEQ ID NO: 32242 - DNA, 69 bp, Homo sapiens
tttctgttttccttctaggaaaaagaatgggaggagtcagcaaagaccaaggtaagttcacttatttga

SEQ ID NO: 32243 - DNA, 71 bp, Homo sapiens
ttctaggaaaaagaatgggaggagtcagcaaagaccaaggtaagttcacttatttgagggcattggctaag

SEQ ID NO: 32244 - DNA, 69 bp, Homo sapiens
aaaagaatgggaggagtcagcaaagaccaaggtaagttcacttatttgagggcattggctaagggaaaa

SEQ ID NO: 32245 - DNA, 69 bp, Homo sapiens
ggaggagtcagcaaagaccaaggtaagttcacttatttgagggcattggctaagggaaaacattttaaa

SEQ ID NO: 32246 - DNA, 66 bp, Homo sapiens
agcaaagaccaaggtaagttcacttatttgagggcattggctaagggaaaacattttaaaacttgg

SEQ ID NO: 32247 - DNA, 64 bp, Homo sapiens
ggtaagttcacttatttgagggcattggctaagggaaaacattttaaaacttggtttcccttta

SEQ ID NO: 32248 - DNA, 72 bp, Homo sapiens
ccaggcactttcaactaatgcaaacatatacagtacagaaaagagaagatgtaacttttctctgaaaaaaag

SEQ ID NO: 32249 - DNA, 74 bp, Homo sapiens
ctaatgcaaacatatacagtacagaaaagagaagatgtaacttttctctgaaaaaaaggtttattgcatatgga

SEQ ID NO: 32250 - DNA, 73 bp, Homo sapiens
caaacatatacagtacagaaaagagaagatgtaacttttctctgaaaaaaaggtttattgcatatggaaatca

SEQ ID NO: 32251 - DNA, 73 bp, Homo sapiens
cagtacagaaaagagaagatgtaacttttctctgaaaaaaaggtttattgcatatggaaatcaatagatatct

SEQ ID NO: 32252 - DNA, 71 bp, Homo sapiens
aagagaagatgtaacttttctctgaaaaaaaggtttattgcatatggaaatcaatagatatcttttacaaa

SEQ ID NO: 32253 - DNA, 68 bp, Homo sapiens
cttttctctgaaaaaaaggtttattgcatatggaaatcaatagatatcttttacaaaaaaaggttaga

SEQ ID NO: 32254 - DNA, 69 bp, Homo sapiens
aaaaaaggtttattgcatatggaaatcaatagatatcttttacaaaaaaaggttagaataaagatctca

SEQ ID NO: 32255 - DNA, 75 bp, Homo sapiens
tattgcatatggaaatcaatagatatcttttacaaaaaaaggttagaataaagatctcacatttgtaaaggcaca

SEQ ID NO: 32256 - DNA, 75 bp, Homo sapiens
catatggaaatcaatagatatcttttacaaaaaaaggttagaataaagatctcacatttgtaaaggcacatatga

SEQ ID NO: 32257 - DNA, 72 bp, Homo sapiens
tcaatagatatcttttacaaaaaaaggttagaataaagatctcacatttgtaaaggcacatatgaaacattt

SEQ ID NO: 32258 - DNA, 73 bp, Homo sapiens
tacaaaaaaaggttagaataaagatctcacatttgtaaaggcacatatgaaacattttatagcaagcacaagg

SEQ ID NO: 32259 - DNA, 76 bp, Homo sapiens
aaaaggttagaataaagatctcacatttgtaaaggcacatatgaaacattttatagcaagcacaagggcagtgaga

SEQ ID NO: 32260 - DNA, 78 bp, Homo sapiens
aataaagatctcacatttgtaaaggcacatatgaaacattttatagcaagcacaagggcagtgagaacatcaacaagg

SEQ ID NO: 32261 - DNA, 77 bp, Homo sapiens
atttgtaaaggcacatatgaaacattttatagcaagcacaagggcagtgagaacatcaacaaggtccaatatctaaa

SEQ ID NO: 32262 - DNA, 79 bp, Homo sapiens
gcacatatgaaacattttatagcaagcacaagggcagtgagaacatcaacaaggtccaatatctaaataagactttata

SEQ ID NO: 32263 - DNA, 74 bp, Homo sapiens
gaaacattttatagcaagcacaagggcagtgagaacatcaacaaggtccaatatctaaataagactttataaaa

SEQ ID NO: 32264 - DNA, 76 bp, Homo sapiens
ttatagcaagcacaagggcagtgagaacatcaacaaggtccaatatctaaataagactttataaaaacagatagga

SEQ ID NO: 32265 - DNA, 74 bp, Homo sapiens
acaagggcagtgagaacatcaacaaggtccaatatctaaataagactttataaaaacagataggaaacagtgca

SEQ ID NO: 32266 - DNA, 71 bp, Homo sapiens
agtgagaacatcaacaaggtccaatatctaaataagactttataaaaacagataggaaacagtgcaaaaaa

SEQ ID NO: 32267 - DNA, 71 bp, Homo sapiens
caaggtccaatatctaaataagactttataaaaacagataggaaacagtgcaaaaaatactgtcaaagtca

SEQ ID NO: 32268 - DNA, 72 bp, Homo sapiens
tatctaaataagactttataaaaacagataggaaacagtgcaaaaaatactgtcaaagtcagttctatacac

SEQ ID NO: 32269 - DNA, 73 bp, Homo sapiens
gactttataaaaacagataggaaacagtgcaaaaaatactgtcaaagtcagttctatacacctcataactgtg

SEQ ID NO: 32270 - DNA, 74 bp, Homo sapiens
aaaacagataggaaacagtgcaaaaaatactgtcaaagtcagttctatacacctcataactgtgtatacaactg

SEQ ID NO: 32271 - DNA, 77 bp, Homo sapiens
ataggaaacagtgcaaaaaatactgtcaaagtcagttctatacacctcataactgtgtatacaactggcaagcataa

SEQ ID NO: 32272 - DNA, 77 bp, Homo sapiens
caaaaaatactgtcaaagtcagttctatacacctcataactgtgtatacaactggcaagcataagcttatttactga

SEQ ID NO: 32273 - DNA, 83 bp, Homo sapiens
tcagttctatacacctcataactgtgtatacaactggcaagcataagcttatttactgatataaaatagcacatagaatagca

SEQ ID NO: 32274 - DNA, 83 bp, Homo sapiens
atacacctcataactgtgtatacaactggcaagcataagcttatttactgatataaaatagcacatagaatagcatgcatagt

SEQ ID NO: 32275 - DNA, 80 bp, Homo sapiens
gtgtatacaactggcaagcataagcttatttactgatataaaatagcacatagaatagcatgcatagttttattttaggc

SEQ ID NO: 32276 - DNA, 77 bp, Homo sapiens
acaactggcaagcataagcttatttactgatataaaatagcacatagaatagcatgcatagttttattttaggcttt

SEQ ID NO: 32277 - DNA, 77 bp, Homo sapiens
aagcataagcttatttactgatataaaatagcacatagaatagcatgcatagttttattttaggcttttcatattat

SEQ ID NO: 32278 - DNA, 77 bp, Homo sapiens
tactgatataaaatagcacatagaatagcatgcatagttttattttaggcttttcatattattaaattgatagggag

SEQ ID NO: 32279 - DNA, 76 bp, Homo sapiens
aaatagcacatagaatagcatgcatagttttattttaggcttttcatattattaaattgatagggagtctatacca

SEQ ID NO: 32280 - DNA, 76 bp, Homo sapiens
gcacatagaatagcatgcatagttttattttaggcttttcatattattaaattgatagggagtctataccaaagta

SEQ ID NO: 32281 - DNA, 76 bp, Homo sapiens
gcatgcatagttttattttaggcttttcatattattaaattgatagggagtctataccaaagtacagttgacatga

SEQ ID NO: 32282 - DNA, 74 bp, Homo sapiens
tattttaggcttttcatattattaaattgatagggagtctataccaaagtacagttgacatgaatagtgataaa

SEQ ID NO: 32283 - DNA, 75 bp, Homo sapiens
gcttttcatattattaaattgatagggagtctataccaaagtacagttgacatgaatagtgataaaaatcactcc

SEQ ID NO: 32284 - DNA, 75 bp, Homo sapiens
attgatagggagtctataccaaagtacagttgacatgaatagtgataaaaatcactccccagcttagggaatgtc

SEQ ID NO: 32285 - DNA, 74 bp, Homo sapiens
agtctataccaaagtacagttgacatgaatagtgataaaaatcactccccagcttagggaatgtcctataaaca

SEQ ID NO: 32286 - DNA, 73 bp, Homo sapiens
aaagtacagttgacatgaatagtgataaaaatcactccccagcttagggaatgtcctataaacatctcacccc

SEQ ID NO: 32287 - DNA, 74 bp, Homo sapiens
atgaatagtgataaaaatcactccccagcttagggaatgtcctataaacatctcacccctccctctgcttacaa

SEQ ID NO: 32288 - DNA, 71 bp, Homo sapiens
taaaaatcactccccagcttagggaatgtcctataaacatctcacccctccctctgcttacaactacagtt

SEQ ID NO: 32289 - DNA, 71 bp, Homo sapiens
tccccagcttagggaatgtcctataaacatctcacccctccctctgcttacaactacagtttggtagtaag

SEQ ID NO: 32290 - DNA, 71 bp, Homo sapiens
agcttagggaatgtcctataaacatctcacccctccctctgcttacaactacagtttggtagtaaggagac

SEQ ID NO: 32291 - DNA, 74 bp, Homo sapiens
ctataaacatctcacccctccctctgcttacaactacagtttggtagtaaggagactgggcttccatcttgcaa

SEQ ID NO: 32292 - DNA, 76 bp, Homo sapiens
tccctctgcttacaactacagtttggtagtaaggagactgggcttccatcttgcaaggtggcaagcggccaccaca

SEQ ID NO: 32293 - DNA, 76 bp, Homo sapiens
agtttggtagtaaggagactgggcttccatcttgcaaggtggcaagcggccaccacagggggcgaatgtgctctca

SEQ ID NO: 32294 - DNA, 77 bp, Homo sapiens
atcttgcaaggtggcaagcggccaccacagggggcgaatgtgctctcaggatcccaagtcccaacctggaatgcatt

SEQ ID NO: 32295 - DNA, 75 bp, Homo sapiens
aagcggccaccacagggggcgaatgtgctctcaggatcccaagtcccaacctggaatgcatttcttacggcaaca

SEQ ID NO: 32296 - DNA, 75 bp, Homo sapiens
accacagggggcgaatgtgctctcaggatcccaagtcccaacctggaatgcatttcttacggcaacaacataaga

SEQ ID NO: 32297 - DNA, 76 bp, Homo sapiens
tctcaggatcccaagtcccaacctggaatgcatttcttacggcaacaacataagagatggtgattaaatgtctggg

SEQ ID NO: 32298 - DNA, 75 bp, Homo sapiens
aagtcccaacctggaatgcatttcttacggcaacaacataagagatggtgattaaatgtctgggtcagcccacaa

SEQ ID NO: 32299 - DNA, 75 bp, Homo sapiens
aacctggaatgcatttcttacggcaacaacataagagatggtgattaaatgtctgggtcagcccacaaaagccaa

SEQ ID NO: 32300 - DNA, 76 bp, Homo sapiens
atttcttacggcaacaacataagagatggtgattaaatgtctgggtcagcccacaaaagccaaccagatctggcta

SEQ ID NO: 32301 - DNA, 79 bp, Homo sapiens
caacaacataagagatggtgattaaatgtctgggtcagcccacaaaagccaaccagatctggctatcacagccctccat

SEQ ID NO: 32302 - DNA, 78 bp, Homo sapiens
acataagagatggtgattaaatgtctgggtcagcccacaaaagccaaccagatctggctatcacagccctccatttgg

SEQ ID NO: 32303 - DNA, 79 bp, Homo sapiens
tggtgattaaatgtctgggtcagcccacaaaagccaaccagatctggctatcacagccctccatttgggctgtggtgga

SEQ ID NO: 32304 - DNA, 73 bp, Homo sapiens
acagccctccatttgggctgtggtggaggtcagtgggcttctatgggctgacgcaagaaccttaagaacaaac

SEQ ID NO: 32305 - DNA, 70 bp, Homo sapiens
tgtggtggaggtcagtgggcttctatgggctgacgcaagaaccttaagaacaaaccggtttctaagttgg

SEQ ID NO: 32306 - DNA, 70 bp, Homo sapiens
tgggcttctatgggctgacgcaagaaccttaagaacaaaccggtttctaagttggggacttgtctgtaca

SEQ ID NO: 32307 - DNA, 69 bp, Homo sapiens
ttctatgggctgacgcaagaaccttaagaacaaaccggtttctaagttggggacttgtctgtacatcgt

SEQ ID NO: 32308 - DNA, 66 bp, Homo sapiens
caagaaccttaagaacaaaccggtttctaagttggggacttgtctgtacatcgtttcaaaatgaaa

SEQ ID NO: 32309 - DNA, 67 bp, Homo sapiens
caaaccggtttctaagttggggacttgtctgtacatcgtttcaaaatgaaacctaataaatgtcatt

SEQ ID NO: 32310 - DNA, 73 bp, Homo sapiens
ggacttgtctgtacatcgtttcaaaatgaaacctaataaatgtcatttgttttgaatgataccaaaattcaca

SEQ ID NO: 32311 - DNA, 71 bp, Homo sapiens
gtacatcgtttcaaaatgaaacctaataaatgtcatttgttttgaatgataccaaaattcacaacattttg

SEQ ID NO: 32312 - DNA, 72 bp, Homo sapiens
atgaaacctaataaatgtcatttgttttgaatgataccaaaattcacaacattttgtgaaacaaagatcaag

SEQ ID NO: 32313 - DNA, 73 bp, Homo sapiens
cctaataaatgtcatttgttttgaatgataccaaaattcacaacattttgtgaaacaaagatcaaggaaagca

SEQ ID NO: 32314 - DNA, 75 bp, Homo sapiens
gtcatttgttttgaatgataccaaaattcacaacattttgtgaaacaaagatcaaggaaagcatcaaaatactga

SEQ ID NO: 32315 - DNA, 76 bp, Homo sapiens
gaatgataccaaaattcacaacattttgtgaaacaaagatcaaggaaagcatcaaaatactgaagtagggagcaca

SEQ ID NO: 32316 - DNA, 73 bp, Homo sapiens
aaaattcacaacattttgtgaaacaaagatcaaggaaagcatcaaaatactgaagtagggagcacaagcctag

SEQ ID NO: 32317 - DNA, 74 bp, Homo sapiens
attttgtgaaacaaagatcaaggaaagcatcaaaatactgaagtagggagcacaagcctagtccagtgaaacaa

SEQ ID NO: 32318 - DNA, 74 bp, Homo sapiens
aacaaagatcaaggaaagcatcaaaatactgaagtagggagcacaagcctagtccagtgaaacaaactagatta

SEQ ID NO: 32319 - DNA, 73 bp, Homo sapiens
aggaaagcatcaaaatactgaagtagggagcacaagcctagtccagtgaaacaaactagattagcttgttact

SEQ ID NO: 32320 - DNA, 74 bp, Homo sapiens
aagtagggagcacaagcctagtccagtgaaacaaactagattagcttgttacttgatgtaacacaagttacata

SEQ ID NO: 32321 - DNA, 74 bp, Homo sapiens
agcacaagcctagtccagtgaaacaaactagattagcttgttacttgatgtaacacaagttacataaggttaca

SEQ ID NO: 32322 - DNA, 71 bp, Homo sapiens
gtgaaacaaactagattagcttgttacttgatgtaacacaagttacataaggttacacatttattagtaat

SEQ ID NO: 32323 - DNA, 69 bp, Homo sapiens
tgtaacacaagttacataaggttacacatttattagtaatttgcatatttaaacctttttttccactga

SEQ ID NO: 32324 - DNA, 72 bp, Homo sapiens
cacatttattagtaatttgcatatttaaacctttttttccactgaagtatcctcaagcacattaattagcta

SEQ ID NO: 32325 - DNA, 71 bp, Homo sapiens
agtaatttgcatatttaaacctttttttccactgaagtatcctcaagcacattaattagctattgaaggaa

SEQ ID NO: 32326 - DNA, 73 bp, Homo sapiens
tgcatatttaaacctttttttccactgaagtatcctcaagcacattaattagctattgaaggaacaaaggaca

SEQ ID NO: 32327 - DNA, 74 bp, Homo sapiens
ctttttttccactgaagtatcctcaagcacattaattagctattgaaggaacaaaggacatacataggaactca

SEQ ID NO: 32328 - DNA, 80 bp, Homo sapiens
tttccactgaagtatcctcaagcacattaattagctattgaaggaacaaaggacatacataggaactcatctctgatgaa

SEQ ID NO: 32329 - DNA, 81 bp, Homo sapiens
tatcctcaagcacattaattagctattgaaggaacaaaggacatacataggaactcatctctgatgaagagtagctttatg

SEQ ID NO: 32330 - DNA, 78 bp, Homo sapiens
attaattagctattgaaggaacaaaggacatacataggaactcatctctgatgaagagtagctttatgtcagaaagga

SEQ ID NO: 32331 - DNA, 80 bp, Homo sapiens
tattgaaggaacaaaggacatacataggaactcatctctgatgaagagtagctttatgtcagaaaggagaaggctaatga

SEQ ID NO: 32332 - DNA, 77 bp, Homo sapiens
acaaaggacatacataggaactcatctctgatgaagagtagctttatgtcagaaaggagaaggctaatgaattttta

SEQ ID NO: 32333 - DNA, 77 bp, Homo sapiens
atacataggaactcatctctgatgaagagtagctttatgtcagaaaggagaaggctaatgaatttttaagattccaa

SEQ ID NO: 32334 - DNA, 74 bp, Homo sapiens
tgatgaagagtagctttatgtcagaaaggagaaggctaatgaatttttaagattccaaacagtggcaagaaagt

SEQ ID NO: 32335 - DNA, 71 bp, Homo sapiens
cagaaaggagaaggctaatgaatttttaagattccaaacagtggcaagaaagttcaaaggaaattgcagta

SEQ ID NO: 32336 - DNA, 69 bp, Homo sapiens
ggagaaggctaatgaatttttaagattccaaacagtggcaagaaagttcaaaggaaattgcagtaaaat

SEQ ID NO: 32337 - DNA, 69 bp, Homo sapiens
atttttaagattccaaacagtggcaagaaagttcaaaggaaattgcagtaaaattgtacaatgttcaag

SEQ ID NO: 32338 - DNA, 71 bp, Homo sapiens
taagattccaaacagtggcaagaaagttcaaaggaaattgcagtaaaattgtacaatgttcaagttgaaaa

SEQ ID NO: 32339 - DNA, 69 bp, Homo sapiens
cagtggcaagaaagttcaaaggaaattgcagtaaaattgtacaatgttcaagttgaaaaaaaaaatggc

SEQ ID NO: 32340 - DNA, 71 bp, Homo sapiens
gttcaaaggaaattgcagtaaaattgtacaatgttcaagttgaaaaaaaaaatggctctgaattacagcat

SEQ ID NO: 32341 - DNA, 76 bp, Homo sapiens
aattgcagtaaaattgtacaatgttcaagttgaaaaaaaaaatggctctgaattacagcattcagttctatgctca

SEQ ID NO: 32342 - DNA, 74 bp, Homo sapiens
cagtaaaattgtacaatgttcaagttgaaaaaaaaaatggctctgaattacagcattcagttctatgctcaagg

SEQ ID NO: 32343 - DNA, 76 bp, Homo sapiens
atgttcaagttgaaaaaaaaaatggctctgaattacagcattcagttctatgctcaaggtatgtattagctaacac

SEQ ID NO: 32344 - DNA, 80 bp, Homo sapiens
tgaaaaaaaaaatggctctgaattacagcattcagttctatgctcaaggtatgtattagctaacactgcagttgtcagag

SEQ ID NO: 32345 - DNA, 80 bp, Homo sapiens
aaaaatggctctgaattacagcattcagttctatgctcaaggtatgtattagctaacactgcagttgtcagaggtgggag

SEQ ID NO: 32346 - DNA, 79 bp, Homo sapiens
aattacagcattcagttctatgctcaaggtatgtattagctaacactgcagttgtcagaggtgggaggcccctgagaaa

SEQ ID NO: 32347 - DNA, 82 bp, Homo sapiens
agcattcagttctatgctcaaggtatgtattagctaacactgcagttgtcagaggtgggaggcccctgagaaatgctgagaa

SEQ ID NO: 32348 - DNA, 83 bp, Homo sapiens
ttctatgctcaaggtatgtattagctaacactgcagttgtcagaggtgggaggcccctgagaaatgctgagaatgccaggcac

SEQ ID NO: 32349 - DNA, 82 bp, Homo sapiens
tatgtattagctaacactgcagttgtcagaggtgggaggcccctgagaaatgctgagaatgccaggcaccccagttctgaga

SEQ ID NO: 32350 - DNA, 81 bp, Homo sapiens
ttagctaacactgcagttgtcagaggtgggaggcccctgagaaatgctgagaatgccaggcaccccagttctgagagccac

SEQ ID NO: 32351 - DNA, 77 bp, Homo sapiens
agttgtcagaggtgggaggcccctgagaaatgctgagaatgccaggcaccccagttctgagagccaccctagctaaa

SEQ ID NO: 32352 - DNA, 76 bp, Homo sapiens
agaggtgggaggcccctgagaaatgctgagaatgccaggcaccccagttctgagagccaccctagctaaactcaaa

SEQ ID NO: 32353 - DNA, 80 bp, Homo sapiens
cctgagaaatgctgagaatgccaggcaccccagttctgagagccaccctagctaaactcaaagcagcattcttgagattt

SEQ ID NO: 32354 - DNA, 80 bp, Homo sapiens
aaatgctgagaatgccaggcaccccagttctgagagccaccctagctaaactcaaagcagcattcttgagattttagcaa

SEQ ID NO: 32355 - DNA, 77 bp, Homo sapiens
aatgccaggcaccccagttctgagagccaccctagctaaactcaaagcagcattcttgagattttagcaaaaggctc

SEQ ID NO: 32356 - DNA, 77 bp, Homo sapiens
cagttctgagagccaccctagctaaactcaaagcagcattcttgagattttagcaaaaggctccgccccaagccaca

SEQ ID NO: 32357 - DNA, 73 bp, Homo sapiens
agagccaccctagctaaactcaaagcagcattcttgagattttagcaaaaggctccgccccaagccacaaaaa

SEQ ID NO: 32358 - DNA, 73 bp, Homo sapiens
aaagcagcattcttgagattttagcaaaaggctccgccccaagccacaaaaagatcccaatccaatcttttca

SEQ ID NO: 32359 - DNA, 71 bp, Homo sapiens
attcttgagattttagcaaaaggctccgccccaagccacaaaaagatcccaatccaatcttttcagcttta

SEQ ID NO: 32360 - DNA, 70 bp, Homo sapiens
ttttagcaaaaggctccgccccaagccacaaaaagatcccaatccaatcttttcagctttatcctctaaa

SEQ ID NO: 32361 - DNA, 73 bp, Homo sapiens
aagccacaaaaagatcccaatccaatcttttcagctttatcctctaaaaccttttgtcagatgagatagcatt

SEQ ID NO: 32362 - DNA, 73 bp, Homo sapiens
caaaaagatcccaatccaatcttttcagctttatcctctaaaaccttttgtcagatgagatagcatttgtgtt

SEQ ID NO: 32363 - DNA, 74 bp, Homo sapiens
atccaatcttttcagctttatcctctaaaaccttttgtcagatgagatagcatttgtgtttcccaggaggagaa

SEQ ID NO: 32364 - DNA, 72 bp, Homo sapiens
ttttcagctttatcctctaaaaccttttgtcagatgagatagcatttgtgtttcccaggaggagaaggttgg

SEQ ID NO: 32365 - DNA, 71 bp, Homo sapiens
ttatcctctaaaaccttttgtcagatgagatagcatttgtgtttcccaggaggagaaggttggggaagaaa

SEQ ID NO: 32366 - DNA, 76 bp, Homo sapiens
ttttgtcagatgagatagcatttgtgtttcccaggaggagaaggttggggaagaaaatgaagatagcttacataca

SEQ ID NO: 32367 - DNA, 74 bp, Homo sapiens
agatgagatagcatttgtgtttcccaggaggagaaggttggggaagaaaatgaagatagcttacatacagattt

SEQ ID NO: 32368 - DNA, 71 bp, Homo sapiens
atttgtgtttcccaggaggagaaggttggggaagaaaatgaagatagcttacatacagattttggatgacc

SEQ ID NO: 32369 - DNA, 72 bp, Homo sapiens
ccaggaggagaaggttggggaagaaaatgaagatagcttacatacagattttggatgacccgctaatctttc

SEQ ID NO: 32370 - DNA, 70 bp, Homo sapiens
agaaggttggggaagaaaatgaagatagcttacatacagattttggatgacccgctaatctttccccttc

SEQ ID NO: 32371 - DNA, 71 bp, Homo sapiens
aagaaaatgaagatagcttacatacagattttggatgacccgctaatctttccccttcctaggtaagtgaa

SEQ ID NO: 32372 - DNA, 69 bp, Homo sapiens
ttacatacagattttggatgacccgctaatctttccccttcctaggtaagtgaaaacagataaaatgtt

SEQ ID NO: 32373 - DNA, 69 bp, Homo sapiens
agattttggatgacccgctaatctttccccttcctaggtaagtgaaaacagataaaatgtttctgggca

SEQ ID NO: 32374 - DNA, 67 bp, Homo sapiens
cgctaatctttccccttcctaggtaagtgaaaacagataaaatgtttctgggcagcccaaaggttta

SEQ ID NO: 32375 - DNA, 69 bp, Homo sapiens
tcctaggtaagtgaaaacagataaaatgtttctgggcagcccaaaggtttaccacctgtttcactagaa

SEQ ID NO: 32376 - DNA, 71 bp, Homo sapiens
aaacagataaaatgtttctgggcagcccaaaggtttaccacctgtttcactagaatggccagtctgtgtaa

SEQ ID NO: 32377 - DNA, 76 bp, Homo sapiens
taccacctgtttcactagaatggccagtctgtgtaaagaggctataatgacgaaagcattttccctgcagggagaa

SEQ ID NO: 32378 - DNA, 75 bp, Homo sapiens
actagaatggccagtctgtgtaaagaggctataatgacgaaagcattttccctgcagggagaagctagaaacaaa

SEQ ID NO: 32379 - DNA, 73 bp, Homo sapiens
agtctgtgtaaagaggctataatgacgaaagcattttccctgcagggagaagctagaaacaaatgggtcttcc

SEQ ID NO: 32380 - DNA, 76 bp, Homo sapiens
tgtaaagaggctataatgacgaaagcattttccctgcagggagaagctagaaacaaatgggtcttcctatacatca

SEQ ID NO: 32381 - DNA, 76 bp, Homo sapiens
ctataatgacgaaagcattttccctgcagggagaagctagaaacaaatgggtcttcctatacatcagtctgccaaa

SEQ ID NO: 32382 - DNA, 81 bp, Homo sapiens
gcattttccctgcagggagaagctagaaacaaatgggtcttcctatacatcagtctgccaaatgcagcctctctcaatcta

SEQ ID NO: 32383 - DNA, 82 bp, Homo sapiens
tgcagggagaagctagaaacaaatgggtcttcctatacatcagtctgccaaatgcagcctctctcaatctatataagttcac

SEQ ID NO: 32384 - DNA, 79 bp, Homo sapiens
agctagaaacaaatgggtcttcctatacatcagtctgccaaatgcagcctctctcaatctatataagttcacctcgaaa

SEQ ID NO: 32385 - DNA, 79 bp, Homo sapiens
aaatgggtcttcctatacatcagtctgccaaatgcagcctctctcaatctatataagttcacctcgaaatacatattaa

SEQ ID NO: 32386 - DNA, 85 bp, Homo sapiens
tcctatacatcagtctgccaaatgcagcctctctcaatctatataagttcacctcgaaatacatattaagtactgctgtcatcat

SEQ ID NO: 32387 - DNA, 82 bp, Homo sapiens
atcagtctgccaaatgcagcctctctcaatctatataagttcacctcgaaatacatattaagtactgctgtcatcattgttt

SEQ ID NO: 32388 - DNA, 79 bp, Homo sapiens
aaatgcagcctctctcaatctatataagttcacctcgaaatacatattaagtactgctgtcatcattgttttaaacaga

SEQ ID NO: 32389 - DNA, 75 bp, Homo sapiens
atctatataagttcacctcgaaatacatattaagtactgctgtcatcattgttttaaacagagcgtctttcattt

SEQ ID NO: 32390 - DNA, 73 bp, Homo sapiens
agttcacctcgaaatacatattaagtactgctgtcatcattgttttaaacagagcgtctttcattttttctaa

SEQ ID NO: 32391 - DNA, 76 bp, Homo sapiens
acatattaagtactgctgtcatcattgttttaaacagagcgtctttcattttttctaatagtgactgattctatcg

SEQ ID NO: 32392 - DNA, 76 bp, Homo sapiens
ttaagtactgctgtcatcattgttttaaacagagcgtctttcattttttctaatagtgactgattctatcggcaag

SEQ ID NO: 32393 - DNA, 72 bp, Homo sapiens
catcattgttttaaacagagcgtctttcattttttctaatagtgactgattctatcggcaagggaacaaaag

SEQ ID NO: 32394 - DNA, 71 bp, Homo sapiens
tgttttaaacagagcgtctttcattttttctaatagtgactgattctatcggcaagggaacaaaagggtga

SEQ ID NO: 32395 - DNA, 70 bp, Homo sapiens
agcgtctttcattttttctaatagtgactgattctatcggcaagggaacaaaagggtgagaaagggagct

SEQ ID NO: 32396 - DNA, 73 bp, Homo sapiens
ttttctaatagtgactgattctatcggcaagggaacaaaagggtgagaaagggagcttcctgcttgctgagtt

SEQ ID NO: 32397 - DNA, 75 bp, Homo sapiens
taatagtgactgattctatcggcaagggaacaaaagggtgagaaagggagcttcctgcttgctgagttttctagc

SEQ ID NO: 32398 - DNA, 72 bp, Homo sapiens
attctatcggcaagggaacaaaagggtgagaaagggagcttcctgcttgctgagttttctagctattttcat

SEQ ID NO: 32399 - DNA, 70 bp, Homo sapiens
aagggaacaaaagggtgagaaagggagcttcctgcttgctgagttttctagctattttcattctggttat

SEQ ID NO: 32400 - DNA, 72 bp, Homo sapiens
aaaagggtgagaaagggagcttcctgcttgctgagttttctagctattttcattctggttattttcatccgc

SEQ ID NO: 32401 - DNA, 72 bp, Homo sapiens
aaagggagcttcctgcttgctgagttttctagctattttcattctggttattttcatccgccagatcttttt

SEQ ID NO: 32402 - DNA, 70 bp, Homo sapiens
aaaaattaaaataagatttcctaattacatatttctgagaggtttaaggcaatgattctctgacgaggat

SEQ ID NO: 32403 - DNA, 75 bp, Homo sapiens
ataagatttcctaattacatatttctgagaggtttaaggcaatgattctctgacgaggattaactcttacatctg

SEQ ID NO: 32404 - DNA, 73 bp, Homo sapiens
atttcctaattacatatttctgagaggtttaaggcaatgattctctgacgaggattaactcttacatctgggt

SEQ ID NO: 32405 - DNA, 76 bp, Homo sapiens
atatttctgagaggtttaaggcaatgattctctgacgaggattaactcttacatctgggttgcactcatagggtag

SEQ ID NO: 32406 - DNA, 73 bp, Homo sapiens
aggtttaaggcaatgattctctgacgaggattaactcttacatctgggttgcactcatagggtaggtaaagaa

SEQ ID NO: 32407 - DNA, 73 bp, Homo sapiens
aaggcaatgattctctgacgaggattaactcttacatctgggttgcactcatagggtaggtaaagaaaagaaa

SEQ ID NO: 32408 - DNA, 74 bp, Homo sapiens
aaaagaaaaagtgtactgttgagagttgatccataaagcagatggggaaatatgaaaaggcagcagaggctggg

SEQ ID NO: 32409 - DNA, 76 bp, Homo sapiens
aaaaagtgtactgttgagagttgatccataaagcagatggggaaatatgaaaaggcagcagaggctgggtgtaatc

SEQ ID NO: 32410 - DNA, 75 bp, Homo sapiens
aaaaaaggcagcagaccctaagtgaacaaggtgctcatggaatgaagagggtgacagcacacaacagtcccaccc

SEQ ID NO: 32411 - DNA, 76 bp, Homo sapiens
aggcagcagaccctaagtgaacaaggtgctcatggaatgaagagggtgacagcacacaacagtcccacccgttccc

SEQ ID NO: 32412 - DNA, 76 bp, Homo sapiens
taagtgaacaaggtgctcatggaatgaagagggtgacagcacacaacagtcccacccgttcccctgaacaagacaa

SEQ ID NO: 32413 - DNA, 75 bp, Homo sapiens
acaaggtgctcatggaatgaagagggtgacagcacacaacagtcccacccgttcccctgaacaagacaaggaaca

SEQ ID NO: 32414 - DNA, 73 bp, Homo sapiens
atggaatgaagagggtgacagcacacaacagtcccacccgttcccctgaacaagacaaggaacaccaaagtca

SEQ ID NO: 32415 - DNA, 75 bp, Homo sapiens
agggtgacagcacacaacagtcccacccgttcccctgaacaagacaaggaacaccaaagtcactgcatgtacatc

SEQ ID NO: 32416 - DNA, 71 bp, Homo sapiens
acacaacagtcccacccgttcccctgaacaagacaaggaacaccaaagtcactgcatgtacatcccagttt

SEQ ID NO: 32417 - DNA, 74 bp, Homo sapiens
cacccgttcccctgaacaagacaaggaacaccaaagtcactgcatgtacatcccagttttgtggcctgaataga

SEQ ID NO: 32418 - DNA, 78 bp, Homo sapiens
cctgaacaagacaaggaacaccaaagtcactgcatgtacatcccagttttgtggcctgaatagaaacatgacttgctc

SEQ ID NO: 32419 - DNA, 77 bp, Homo sapiens
acaagacaaggaacaccaaagtcactgcatgtacatcccagttttgtggcctgaatagaaacatgacttgctctaaa

SEQ ID NO: 32420 - DNA, 76 bp, Homo sapiens
aacaccaaagtcactgcatgtacatcccagttttgtggcctgaatagaaacatgacttgctctaaaggggaatgtc

SEQ ID NO: 32421 - DNA, 81 bp, Homo sapiens
actgcatgtacatcccagttttgtggcctgaatagaaacatgacttgctctaaaggggaatgtcctctgcagcacctctga

SEQ ID NO: 32422 - DNA, 81 bp, Homo sapiens
gtacatcccagttttgtggcctgaatagaaacatgacttgctctaaaggggaatgtcctctgcagcacctctgagatcaca

SEQ ID NO: 32423 - DNA, 80 bp, Homo sapiens
ttttgtggcctgaatagaaacatgacttgctctaaaggggaatgtcctctgcagcacctctgagatcacaggggagaaga

SEQ ID NO: 32424 - DNA, 79 bp, Homo sapiens
aatagaaacatgacttgctctaaaggggaatgtcctctgcagcacctctgagatcacaggggagaagaatcaagaaatc

SEQ ID NO: 32425 - DNA, 80 bp, Homo sapiens
acatgacttgctctaaaggggaatgtcctctgcagcacctctgagatcacaggggagaagaatcaagaaatccaagagcc

SEQ ID NO: 32426 - DNA, 78 bp, Homo sapiens
taaaggggaatgtcctctgcagcacctctgagatcacaggggagaagaatcaagaaatccaagagccggggctgctaa

SEQ ID NO: 32427 - DNA, 80 bp, Homo sapiens
aatgtcctctgcagcacctctgagatcacaggggagaagaatcaagaaatccaagagccggggctgctaactctgggagc

SEQ ID NO: 32428 - DNA, 78 bp, Homo sapiens
atcacaggggagaagaatcaagaaatccaagagccggggctgctaactctgggagccacatgggtaagcagaatgctc

SEQ ID NO: 32429 - DNA, 80 bp, Homo sapiens
agaagaatcaagaaatccaagagccggggctgctaactctgggagccacatgggtaagcagaatgctctgctaacaagca

SEQ ID NO: 32430 - DNA, 79 bp, Homo sapiens
tccaagagccggggctgctaactctgggagccacatgggtaagcagaatgctctgctaacaagcaaggcaaggaaaggc

SEQ ID NO: 32431 - DNA, 82 bp, Homo sapiens
actctgggagccacatgggtaagcagaatgctctgctaacaagcaaggcaaggaaaggctgccagcagcaggcgagggaaga

SEQ ID NO: 32432 - DNA, 84 bp, Homo sapiens
aagcagaatgctctgctaacaagcaaggcaaggaaaggctgccagcagcaggcgagggaagatggtgcttttgatcagcaaatc

SEQ ID NO: 32433 - DNA, 82 bp, Homo sapiens
ctaacaagcaaggcaaggaaaggctgccagcagcaggcgagggaagatggtgcttttgatcagcaaatccaggcaaatatga

SEQ ID NO: 32434 - DNA, 80 bp, Homo sapiens
aaggcaaggaaaggctgccagcagcaggcgagggaagatggtgcttttgatcagcaaatccaggcaaatatgataaacca

SEQ ID NO: 32435 - DNA, 83 bp, Homo sapiens
aaaggctgccagcagcaggcgagggaagatggtgcttttgatcagcaaatccaggcaaatatgataaaccacacatcataatc

SEQ ID NO: 32436 - DNA, 86 bp, Homo sapiens
cagcaggcgagggaagatggtgcttttgatcagcaaatccaggcaaatatgataaaccacacatcataatccatgacattcatcaa

SEQ ID NO: 32437 - DNA, 84 bp, Homo sapiens
agggaagatggtgcttttgatcagcaaatccaggcaaatatgataaaccacacatcataatccatgacattcatcaagctctac

SEQ ID NO: 32438 - DNA, 87 bp, Homo sapiens
tgcttttgatcagcaaatccaggcaaatatgataaaccacacatcataatccatgacattcatcaagctctacctcaacagtgaaga

SEQ ID NO: 32439 - DNA, 85 bp, Homo sapiens
tcagcaaatccaggcaaatatgataaaccacacatcataatccatgacattcatcaagctctacctcaacagtgaagacagttta

SEQ ID NO: 32440 - DNA, 80 bp, Homo sapiens
aggcaaatatgataaaccacacatcataatccatgacattcatcaagctctacctcaacagtgaagacagtttaaaacta

SEQ ID NO: 32441 - DNA, 82 bp, Homo sapiens
aatatgataaaccacacatcataatccatgacattcatcaagctctacctcaacagtgaagacagtttaaaactatgagcta

SEQ ID NO: 32442 - DNA, 81 bp, Homo sapiens
acacatcataatccatgacattcatcaagctctacctcaacagtgaagacagtttaaaactatgagctagggtgaaataga

SEQ ID NO: 32443 - DNA, 79 bp, Homo sapiens
taatccatgacattcatcaagctctacctcaacagtgaagacagtttaaaactatgagctagggtgaaatagactccaa

SEQ ID NO: 32444 - DNA, 80 bp, Homo sapiens
acattcatcaagctctacctcaacagtgaagacagtttaaaactatgagctagggtgaaatagactccaacactgctgca

SEQ ID NO: 32445 - DNA, 77 bp, Homo sapiens
agtgaagacagtttaaaactatgagctagggtgaaatagactccaacactgctgcaggctttccctagcatgccact

SEQ ID NO: 32446 - DNA, 76 bp, Homo sapiens
tttaaaactatgagctagggtgaaatagactccaacactgctgcaggctttccctagcatgccacttggtggtttc

SEQ ID NO: 32447 - DNA, 80 bp, Homo sapiens
tgaaatagactccaacactgctgcaggctttccctagcatgccacttggtggtttccatcactctgacattacagaaagg

SEQ ID NO: 32448 - DNA, 81 bp, Homo sapiens
tagactccaacactgctgcaggctttccctagcatgccacttggtggtttccatcactctgacattacagaaagggaggca

SEQ ID NO: 32449 - DNA, 78 bp, Homo sapiens
actgctgcaggctttccctagcatgccacttggtggtttccatcactctgacattacagaaagggaggcagggagtag

SEQ ID NO: 32450 - DNA, 77 bp, Homo sapiens
tttccctagcatgccacttggtggtttccatcactctgacattacagaaagggaggcagggagtaggagaggcattc

SEQ ID NO: 32451 - DNA, 78 bp, Homo sapiens
atgccacttggtggtttccatcactctgacattacagaaagggaggcagggagtaggagaggcattccagagttcaga

SEQ ID NO: 32452 - DNA, 76 bp, Homo sapiens
atcactctgacattacagaaagggaggcagggagtaggagaggcattccagagttcagaaaattatttgtgaaaca

SEQ ID NO: 32453 - DNA, 72 bp, Homo sapiens
attacagaaagggaggcagggagtaggagaggcattccagagttcagaaaattatttgtgaaacagagaact

SEQ ID NO: 32454 - DNA, 74 bp, Homo sapiens
gaggcagggagtaggagaggcattccagagttcagaaaattatttgtgaaacagagaacttttggatagcaact

SEQ ID NO: 32455 - DNA, 75 bp, Homo sapiens
agtaggagaggcattccagagttcagaaaattatttgtgaaacagagaacttttggatagcaacttcaggactga

SEQ ID NO: 32456 - DNA, 75 bp, Homo sapiens
aggcattccagagttcagaaaattatttgtgaaacagagaacttttggatagcaacttcaggactgatgcaaaaa

SEQ ID NO: 32457 - DNA, 71 bp, Homo sapiens
tgcaaaaatccttcctctccctcttcccatttatagaaacttttgagcaagtttatggcacttctgggaaa

SEQ ID NO: 32458 - DNA, 74 bp, Homo sapiens
tcttcccatttatagaaacttttgagcaagtttatggcacttctgggaaagaatgatcctgatggcccaaagtg

SEQ ID NO: 32459 - DNA, 75 bp, Homo sapiens
atttatagaaacttttgagcaagtttatggcacttctgggaaagaatgatcctgatggcccaaagtgtggcagaa

SEQ ID NO: 32460 - DNA, 77 bp, Homo sapiens
aaacttttgagcaagtttatggcacttctgggaaagaatgatcctgatggcccaaagtgtggcagaaggagcaatga

SEQ ID NO: 32461 - DNA, 77 bp, Homo sapiens
aagtttatggcacttctgggaaagaatgatcctgatggcccaaagtgtggcagaaggagcaatgactttccacacaa

SEQ ID NO: 32462 - DNA, 79 bp, Homo sapiens
acttctgggaaagaatgatcctgatggcccaaagtgtggcagaaggagcaatgactttccacacaaatgcttgtcatat

SEQ ID NO: 32463 - DNA, 82 bp, Homo sapiens
aaagaatgatcctgatggcccaaagtgtggcagaaggagcaatgactttccacacaaatgcttgtcatattcaggctgccca

SEQ ID NO: 32464 - DNA, 83 bp, Homo sapiens
atcctgatggcccaaagtgtggcagaaggagcaatgactttccacacaaatgcttgtcatattcaggctgcccagtagctcca

SEQ ID NO: 32465 - DNA, 80 bp, Homo sapiens
cccaaagtgtggcagaaggagcaatgactttccacacaaatgcttgtcatattcaggctgcccagtagctccagccctcc

SEQ ID NO: 32466 - DNA, 80 bp, Homo sapiens
aaggagcaatgactttccacacaaatgcttgtcatattcaggctgcccagtagctccagccctcctgccttgtaactcaa

SEQ ID NO: 32467 - DNA, 79 bp, Homo sapiens
aatgactttccacacaaatgcttgtcatattcaggctgcccagtagctccagccctcctgccttgtaactcaatgtcct

SEQ ID NO: 32468 - DNA, 77 bp, Homo sapiens
acaaatgcttgtcatattcaggctgcccagtagctccagccctcctgccttgtaactcaatgtccttgaatttattt

SEQ ID NO: 32469 - DNA, 75 bp, Homo sapiens
cttgtcatattcaggctgcccagtagctccagccctcctgccttgtaactcaatgtccttgaatttatttttaaa

SEQ ID NO: 32470 - DNA, 75 bp, Homo sapiens
gtcatattcaggctgcccagtagctccagccctcctgccttgtaactcaatgtccttgaatttatttttaaaatg

SEQ ID NO: 32471 - DNA, 69 bp, Homo sapiens
tttatttttaaaatgggaaggctaaaaacaaagctgcaaacggtaggaactgatgcacatcctcttctt

SEQ ID NO: 32472 - DNA, 71 bp, Homo sapiens
ttttaaaatgggaaggctaaaaacaaagctgcaaacggtaggaactgatgcacatcctcttctttactgta

SEQ ID NO: 32473 - DNA, 73 bp, Homo sapiens
gctaaaaacaaagctgcaaacggtaggaactgatgcacatcctcttctttactgtaccaaacaacaatcattt

SEQ ID NO: 32474 - DNA, 73 bp, Homo sapiens
aaacaaagctgcaaacggtaggaactgatgcacatcctcttctttactgtaccaaacaacaatcattttccag

SEQ ID NO: 32475 - DNA, 74 bp, Homo sapiens
aaacggtaggaactgatgcacatcctcttctttactgtaccaaacaacaatcattttccagtctatgaaattga

SEQ ID NO: 32476 - DNA, 81 bp, Homo sapiens
aactgatgcacatcctcttctttactgtaccaaacaacaatcattttccagtctatgaaattgatggatgccagacactca

SEQ ID NO: 32477 - DNA, 79 bp, Homo sapiens
acatcctcttctttactgtaccaaacaacaatcattttccagtctatgaaattgatggatgccagacactcaatgctag

SEQ ID NO: 32478 - DNA, 82 bp, Homo sapiens
aacaacaatcattttccagtctatgaaattgatggatgccagacactcaatgctaggctcatggacattttaatagagaata

SEQ ID NO: 32479 - DNA, 80 bp, Homo sapiens
attttccagtctatgaaattgatggatgccagacactcaatgctaggctcatggacattttaatagagaatatcttagtt

SEQ ID NO: 32480 - DNA, 82 bp, Homo sapiens
tatgaaattgatggatgccagacactcaatgctaggctcatggacattttaatagagaatatcttagtttggctttgagaaa

SEQ ID NO: 32481 - DNA, 80 bp, Homo sapiens
aattgatggatgccagacactcaatgctaggctcatggacattttaatagagaatatcttagtttggctttgagaaagaa

SEQ ID NO: 32482 - DNA, 81 bp, Homo sapiens
gacactcaatgctaggctcatggacattttaatagagaatatcttagtttggctttgagaaagaagatgcagctatattaa

SEQ ID NO: 32483 - DNA, 80 bp, Homo sapiens
aatgctaggctcatggacattttaatagagaatatcttagtttggctttgagaaagaagatgcagctatattaagctgaa

SEQ ID NO: 32484 - DNA, 79 bp, Homo sapiens
gctcatggacattttaatagagaatatcttagtttggctttgagaaagaagatgcagctatattaagctgaaaagataa

SEQ ID NO: 32485 - DNA, 76 bp, Homo sapiens
ggacattttaatagagaatatcttagtttggctttgagaaagaagatgcagctatattaagctgaaaagataagaa

SEQ ID NO: 32486 - DNA, 75 bp, Homo sapiens
aatagagaatatcttagtttggctttgagaaagaagatgcagctatattaagctgaaaagataagaaaggtagtc

SEQ ID NO: 32487 - DNA, 76 bp, Homo sapiens
gaatatcttagtttggctttgagaaagaagatgcagctatattaagctgaaaagataagaaaggtagtctactgaa

SEQ ID NO: 32488 - DNA, 74 bp, Homo sapiens
ggctttgagaaagaagatgcagctatattaagctgaaaagataagaaaggtagtctactgaataaaaatactta

SEQ ID NO: 32489 - DNA, 75 bp, Homo sapiens
gatgcagctatattaagctgaaaagataagaaaggtagtctactgaataaaaatacttacctatctgagtttcta

SEQ ID NO: 32490 - DNA, 71 bp, Homo sapiens
agctgaaaagataagaaaggtagtctactgaataaaaatacttacctatctgagtttctaacagaaacaca

SEQ ID NO: 32491 - DNA, 72 bp, Homo sapiens
agaaaggtagtctactgaataaaaatacttacctatctgagtttctaacagaaacacaaaagctgagagcag

SEQ ID NO: 32492 - DNA, 75 bp, Homo sapiens
tagtctactgaataaaaatacttacctatctgagtttctaacagaaacacaaaagctgagagcaggctggataaa

SEQ ID NO: 32493 - DNA, 74 bp, Homo sapiens
ataaaaatacttacctatctgagtttctaacagaaacacaaaagctgagagcaggctggataaaggctgagtgt

SEQ ID NO: 32494 - DNA, 80 bp, Homo sapiens
ttacctatctgagtttctaacagaaacacaaaagctgagagcaggctggataaaggctgagtgttgatggcgcaagctgg

SEQ ID NO: 32495 - DNA, 80 bp, Homo sapiens
tttctaacagaaacacaaaagctgagagcaggctggataaaggctgagtgttgatggcgcaagctggtggtcaagtttca

SEQ ID NO: 32496 - DNA, 78 bp, Homo sapiens
aaacacaaaagctgagagcaggctggataaaggctgagtgttgatggcgcaagctggtggtcaagtttcacagggccc

SEQ ID NO: 32497 - DNA, 79 bp, Homo sapiens
aagctgagagcaggctggataaaggctgagtgttgatggcgcaagctggtggtcaagtttcacagggccccctgaataa

SEQ ID NO: 32498 - DNA, 76 bp, Homo sapiens
aggctggataaaggctgagtgttgatggcgcaagctggtggtcaagtttcacagggccccctgaataacactgact

SEQ ID NO: 32499 - DNA, 77 bp, Homo sapiens
taaaggctgagtgttgatggcgcaagctggtggtcaagtttcacagggccccctgaataacactgacttctggacaa

SEQ ID NO: 32500 - DNA, 77 bp, Homo sapiens
agtgttgatggcgcaagctggtggtcaagtttcacagggccccctgaataacactgacttctggacaacacatttga

SEQ ID NO: 32501 - DNA, 74 bp, Homo sapiens
aagctggtggtcaagtttcacagggccccctgaataacactgacttctggacaacacatttgaggtggcagaat

SEQ ID NO: 32502 - DNA, 74 bp, Homo sapiens
agggccccctgaataacactgacttctggacaacacatttgaggtggcagaatttgatgagatttcccccacat

SEQ ID NO: 32503 - DNA, 75 bp, Homo sapiens
ccctgaataacactgacttctggacaacacatttgaggtggcagaatttgatgagatttcccccacatttctccc

SEQ ID NO: 32504 - DNA, 78 bp, Homo sapiens
tgacttctggacaacacatttgaggtggcagaatttgatgagatttcccccacatttctccctggcacgttgctgtta

SEQ ID NO: 32505 - DNA, 75 bp, Homo sapiens
acaacacatttgaggtggcagaatttgatgagatttcccccacatttctccctggcacgttgctgttactttcaa

SEQ ID NO: 32506 - DNA, 75 bp, Homo sapiens
atttgaggtggcagaatttgatgagatttcccccacatttctccctggcacgttgctgttactttcaacagacgc

SEQ ID NO: 32507 - DNA, 74 bp, Homo sapiens
aatttgatgagatttcccccacatttctccctggcacgttgctgttactttcaacagacgccatctgtaaggtc

SEQ ID NO: 32508 - DNA, 74 bp, Homo sapiens
atgagatttcccccacatttctccctggcacgttgctgttactttcaacagacgccatctgtaaggtcctttgc

SEQ ID NO: 32509 - DNA, 73 bp, Homo sapiens
ctggcacgttgctgttactttcaacagacgccatctgtaaggtcctttgccccaaaatgtcttagaagcttaa

SEQ ID NO: 32510 - DNA, 71 bp, Homo sapiens
tactttcaacagacgccatctgtaaggtcctttgccccaaaatgtcttagaagcttaagtaaagacaagaa

SEQ ID NO: 32511 - DNA, 69 bp, Homo sapiens
acgccatctgtaaggtcctttgccccaaaatgtcttagaagcttaagtaaagacaagaactattttgct

SEQ ID NO: 32512 - DNA, 76 bp, Homo sapiens
aatgtcttagaagcttaagtaaagacaagaactattttgcttccttgctcagcgttcaagagaagtatcaaatgca

SEQ ID NO: 32513 - DNA, 76 bp, Homo sapiens
taagtaaagacaagaactattttgcttccttgctcagcgttcaagagaagtatcaaatgcagtttaacatcttaca

SEQ ID NO: 32514 - DNA, 75 bp, Homo sapiens
acaagaactattttgcttccttgctcagcgttcaagagaagtatcaaatgcagtttaacatcttacagctttatt

SEQ ID NO: 32515 - DNA, 76 bp, Homo sapiens
ttttgcttccttgctcagcgttcaagagaagtatcaaatgcagtttaacatcttacagctttatttccaccctata

SEQ ID NO: 32516 - DNA, 76 bp, Homo sapiens
ttgctcagcgttcaagagaagtatcaaatgcagtttaacatcttacagctttatttccaccctatagggccaacta

SEQ ID NO: 32517 - DNA, 75 bp, Homo sapiens
ttcaagagaagtatcaaatgcagtttaacatcttacagctttatttccaccctatagggccaactagtgtgccaa

SEQ ID NO: 32518 - DNA, 73 bp, Homo sapiens
aagtatcaaatgcagtttaacatcttacagctttatttccaccctatagggccaactagtgtgccaaccataa

SEQ ID NO: 32519 - DNA, 73 bp, Homo sapiens
aatgcagtttaacatcttacagctttatttccaccctatagggccaactagtgtgccaaccataaggctgtag

SEQ ID NO: 32520 - DNA, 73 bp, Homo sapiens
tcttacagctttatttccaccctatagggccaactagtgtgccaaccataaggctgtaggccattggagaatt

SEQ ID NO: 32521 - DNA, 72 bp, Homo sapiens
tttatttccaccctatagggccaactagtgtgccaaccataaggctgtaggccattggagaatttgtgtggt

SEQ ID NO: 32522 - DNA, 73 bp, Homo sapiens
accctatagggccaactagtgtgccaaccataaggctgtaggccattggagaatttgtgtggtttctacagaa

SEQ ID NO: 32523 - DNA, 72 bp, Homo sapiens
aactagtgtgccaaccataaggctgtaggccattggagaatttgtgtggtttctacagaagacccaaatttc

SEQ ID NO: 32524 - DNA, 73 bp, Homo sapiens
gtgtgccaaccataaggctgtaggccattggagaatttgtgtggtttctacagaagacccaaatttctccatt

SEQ ID NO: 32525 - DNA, 71 bp, Homo sapiens
ataaggctgtaggccattggagaatttgtgtggtttctacagaagacccaaatttctccatttggaaacca

SEQ ID NO: 32526 - DNA, 77 bp, Homo sapiens
cattggagaatttgtgtggtttctacagaagacccaaatttctccatttggaaaccatgctggatgagctgttgctc

SEQ ID NO: 32527 - DNA, 79 bp, Homo sapiens
tttgtgtggtttctacagaagacccaaatttctccatttggaaaccatgctggatgagctgttgctctgctcatgaaaa

SEQ ID NO: 32528 - DNA, 80 bp, Homo sapiens
tttctacagaagacccaaatttctccatttggaaaccatgctggatgagctgttgctctgctcatgaaaagaaatcacta

SEQ ID NO: 32529 - DNA, 78 bp, Homo sapiens
agaagacccaaatttctccatttggaaaccatgctggatgagctgttgctctgctcatgaaaagaaatcactaaataa

SEQ ID NO: 32530 - DNA, 86 bp, Homo sapiens
tctccatttggaaaccatgctggatgagctgttgctctgctcatgaaaagaaatcactaaataagagcatgatgagtgtctcaaaa

SEQ ID NO: 32531 - DNA, 85 bp, Homo sapiens
tggatgagctgttgctctgctcatgaaaagaaatcactaaataagagcatgatgagtgtctcaaaaccattggcaatataataaa

SEQ ID NO: 32532 - DNA, 82 bp, Homo sapiens
agctgttgctctgctcatgaaaagaaatcactaaataagagcatgatgagtgtctcaaaaccattggcaatataataaaaca

SEQ ID NO: 32533 - DNA, 82 bp, Homo sapiens
ctcatgaaaagaaatcactaaataagagcatgatgagtgtctcaaaaccattggcaatataataaaacacagcagcagaata

SEQ ID NO: 32534 - DNA, 79 bp, Homo sapiens
aaatcactaaataagagcatgatgagtgtctcaaaaccattggcaatataataaaacacagcagcagaataattgttgg

SEQ ID NO: 32535 - DNA, 80 bp, Homo sapiens
tgatgagtgtctcaaaaccattggcaatataataaaacacagcagcagaataattgttggtaaaacatgggaatgctcaa

SEQ ID NO: 32536 - DNA, 76 bp, Homo sapiens
tcaaaaccattggcaatataataaaacacagcagcagaataattgttggtaaaacatgggaatgctcaattcccta

SEQ ID NO: 32537 - DNA, 74 bp, Homo sapiens
ccattggcaatataataaaacacagcagcagaataattgttggtaaaacatgggaatgctcaattccctaaaag

SEQ ID NO: 32538 - DNA, 71 bp, Homo sapiens
ataaaacacagcagcagaataattgttggtaaaacatgggaatgctcaattccctaaaagggctaccctaa

SEQ ID NO: 32539 - DNA, 72 bp, Homo sapiens
agcagcagaataattgttggtaaaacatgggaatgctcaattccctaaaagggctaccctaagagcccaaca

SEQ ID NO: 32540 - DNA, 69 bp, Homo sapiens
taattgttggtaaaacatgggaatgctcaattccctaaaagggctaccctaagagcccaacagtaatta

SEQ ID NO: 32541 - DNA, 71 bp, Homo sapiens
taaaacatgggaatgctcaattccctaaaagggctaccctaagagcccaacagtaattatgtggtgcttcc

SEQ ID NO: 32542 - DNA, 70 bp, Homo sapiens
aatgctcaattccctaaaagggctaccctaagagcccaacagtaattatgtggtgcttccggaaatgtct

SEQ ID NO: 32543 - DNA, 68 bp, Homo sapiens
aattccctaaaagggctaccctaagagcccaacagtaattatgtggtgcttccggaaatgtcttactc

SEQ ID NO: 32544 - DNA, 71 bp, Homo sapiens
aaaagggctaccctaagagcccaacagtaattatgtggtgcttccggaaatgtcttactctaggagctcca

SEQ ID NO: 32545 - DNA, 73 bp, Homo sapiens
ccctaagagcccaacagtaattatgtggtgcttccggaaatgtcttactctaggagctccacagagttatttc

SEQ ID NO: 32546 - DNA, 79 bp, Homo sapiens
tgtcttactctaggagctccacagagttatttctgacactgagtaagaacacaggtctgactcaatcccatcccttgaa

SEQ ID NO: 32547 - DNA, 80 bp, Homo sapiens
taggagctccacagagttatttctgacactgagtaagaacacaggtctgactcaatcccatcccttgaatctgtgctccc

SEQ ID NO: 32548 - DNA, 80 bp, Homo sapiens
agttatttctgacactgagtaagaacacaggtctgactcaatcccatcccttgaatctgtgctccctggcacacatccta

SEQ ID NO: 32549 - DNA, 81 bp, Homo sapiens
acactgagtaagaacacaggtctgactcaatcccatcccttgaatctgtgctccctggcacacatcctagaatgccctgta

SEQ ID NO: 32550 - DNA, 78 bp, Homo sapiens
acaggtctgactcaatcccatcccttgaatctgtgctccctggcacacatcctagaatgccctgtaccctccatcccc

SEQ ID NO: 32551 - DNA, 75 bp, Homo sapiens
ctcaatcccatcccttgaatctgtgctccctggcacacatcctagaatgccctgtaccctccatccccccaaccc

SEQ ID NO: 32552 - DNA, 74 bp, Homo sapiens
ttgaatctgtgctccctggcacacatcctagaatgccctgtaccctccatccccccaacccccgcacctcaagg

SEQ ID NO: 32553 - DNA, 73 bp, Homo sapiens
ctccctggcacacatcctagaatgccctgtaccctccatccccccaacccccgcacctcaagggattgacaga

SEQ ID NO: 32554 - DNA, 71 bp, Homo sapiens
acacatcctagaatgccctgtaccctccatccccccaacccccgcacctcaagggattgacagatcttccc

SEQ ID NO: 32555 - DNA, 68 bp, Homo sapiens
aatgccctgtaccctccatccccccaacccccgcacctcaagggattgacagatcttccccaaacgaa

SEQ ID NO: 32556 - DNA, 68 bp, Homo sapiens
taccctccatccccccaacccccgcacctcaagggattgacagatcttccccaaacgaaaatcagtaa

SEQ ID NO: 32557 - DNA, 66 bp, Homo sapiens
cccccaacccccgcacctcaagggattgacagatcttccccaaacgaaaatcagtaacgaaatagt

SEQ ID NO: 32558 - DNA, 67 bp, Homo sapiens
cctcaagggattgacagatcttccccaaacgaaaatcagtaacgaaatagttgtcctttaccaaagg

SEQ ID NO: 32559 - DNA, 66 bp, Homo sapiens
agatcttccccaaacgaaaatcagtaacgaaatagttgtcctttaccaaagggggcaatcaaggac

SEQ ID NO: 32560 - DNA, 68 bp, Homo sapiens
caaacgaaaatcagtaacgaaatagttgtcctttaccaaagggggcaatcaaggaccctctgagaata

SEQ ID NO: 32561 - DNA, 74 bp, Homo sapiens
aaagggggcaatcaaggaccctctgagaataccagaatccatggatgttcaagtcttttatataaaatagcaca

SEQ ID NO: 32562 - DNA, 78 bp, Homo sapiens
aatcaaggaccctctgagaataccagaatccatggatgttcaagtcttttatataaaatagcacagtatttgcatata

SEQ ID NO: 32563 - DNA, 82 bp, Homo sapiens
tagattatttacaatacctaactcaatgcctacacatcacttcatttgtgtgaattcaatgtagtattcagcatgtggcaaa

SEQ ID NO: 32564 - DNA, 81 bp, Homo sapiens
atttacaatacctaactcaatgcctacacatcacttcatttgtgtgaattcaatgtagtattcagcatgtggcaaattcaa

SEQ ID NO: 32565 - DNA, 80 bp, Homo sapiens
taactcaatgcctacacatcacttcatttgtgtgaattcaatgtagtattcagcatgtggcaaattcaacttttgctttt

SEQ ID NO: 32566 - DNA, 77 bp, Homo sapiens
cctacacatcacttcatttgtgtgaattcaatgtagtattcagcatgtggcaaattcaacttttgctttttggaact

SEQ ID NO: 32567 - DNA, 76 bp, Homo sapiens
atcacttcatttgtgtgaattcaatgtagtattcagcatgtggcaaattcaacttttgctttttggaactttgtgg

SEQ ID NO: 32568 - DNA, 73 bp, Homo sapiens
ttgtgtgaattcaatgtagtattcagcatgtggcaaattcaacttttgctttttggaactttgtgggtttccc

SEQ ID NO: 32569 - DNA, 69 bp, Homo sapiens
aatgtagtattcagcatgtggcaaattcaacttttgctttttggaactttgtgggtttcccctcttccc

SEQ ID NO: 32570 - DNA, 66 bp, Homo sapiens
ttgctttttggaactttgtgggtttcccctcttccccaaatatttttcaatctgtacttggttgaa

SEQ ID NO: 32571 - DNA, 66 bp, Homo sapiens
tttggaactttgtgggtttcccctcttccccaaatatttttcaatctgtacttggttgaatatagg

SEQ ID NO: 32572 - DNA, 68 bp, Homo sapiens
ttgtgggtttcccctcttccccaaatatttttcaatctgtacttggttgaatatagggatgtggaacc

SEQ ID NO: 32573 - DNA, 72 bp, Homo sapiens
tcttccccaaatatttttcaatctgtacttggttgaatatagggatgtggaacccacagataggggtggtca

SEQ ID NO: 32574 - DNA, 71 bp, Homo sapiens
aaatatttttcaatctgtacttggttgaatatagggatgtggaacccacagataggggtggtcaactgtac

SEQ ID NO: 32575 - DNA, 77 bp, Homo sapiens
tggttgaatatagggatgtggaacccacagataggggtggtcaactgtactcatcttcaccatcgaatacaccatta

SEQ ID NO: 32576 - DNA, 76 bp, Homo sapiens
atatagggatgtggaacccacagataggggtggtcaactgtactcatcttcaccatcgaatacaccattagatggg

SEQ ID NO: 32577 - DNA, 73 bp, Homo sapiens
aacccacagataggggtggtcaactgtactcatcttcaccatcgaatacaccattagatggggaaagggagac

SEQ ID NO: 32578 - DNA, 75 bp, Homo sapiens
agataggggtggtcaactgtactcatcttcaccatcgaatacaccattagatggggaaagggagactagaaggca

SEQ ID NO: 32579 - DNA, 76 bp, Homo sapiens
aactgtactcatcttcaccatcgaatacaccattagatggggaaagggagactagaaggcacattctgctttttga

SEQ ID NO: 32580 - DNA, 76 bp, Homo sapiens
tactcatcttcaccatcgaatacaccattagatggggaaagggagactagaaggcacattctgctttttgacaaag

SEQ ID NO: 32581 - DNA, 72 bp, Homo sapiens
atcgaatacaccattagatggggaaagggagactagaaggcacattctgctttttgacaaaggacacttttg

SEQ ID NO: 32582 - DNA, 71 bp, Homo sapiens
tacaccattagatggggaaagggagactagaaggcacattctgctttttgacaaaggacacttttgggacc

SEQ ID NO: 32583 - DNA, 70 bp, Homo sapiens
ggaaagggagactagaaggcacattctgctttttgacaaaggacacttttgggacccatacgtcacgtaa

SEQ ID NO: 32584 - DNA, 72 bp, Homo sapiens
actagaaggcacattctgctttttgacaaaggacacttttgggacccatacgtcacgtaacaagtaggctga

SEQ ID NO: 32585 - DNA, 73 bp, Homo sapiens
ggacacttttgggacccatacgtcacgtaacaagtaggctgaggtcagctaatacagactgttcatcgggaaa

SEQ ID NO: 32586 - DNA, 73 bp, Homo sapiens
cttttgggacccatacgtcacgtaacaagtaggctgaggtcagctaatacagactgttcatcgggaaaggaca

SEQ ID NO: 32587 - DNA, 81 bp, Homo sapiens
tgaggtcagctaatacagactgttcatcgggaaaggacagcagctaaaaactccagagtgatatgcctgatggccaatccg

SEQ ID NO: 32588 - DNA, 79 bp, Homo sapiens
taatacagactgttcatcgggaaaggacagcagctaaaaactccagagtgatatgcctgatggccaatccggcttaaga

SEQ ID NO: 32589 - DNA, 81 bp, Homo sapiens
aaaggacagcagctaaaaactccagagtgatatgcctgatggccaatccggcttaagagaagctgcagtgcactatctacc

SEQ ID NO: 32590 - DNA, 82 bp, Homo sapiens
agctaaaaactccagagtgatatgcctgatggccaatccggcttaagagaagctgcagtgcactatctacctctgcaacttc

SEQ ID NO: 32591 - DNA, 83 bp, Homo sapiens
aaaactccagagtgatatgcctgatggccaatccggcttaagagaagctgcagtgcactatctacctctgcaacttccatgtc

SEQ ID NO: 32592 - DNA, 85 bp, Homo sapiens
agtgatatgcctgatggccaatccggcttaagagaagctgcagtgcactatctacctctgcaacttccatgtcccaggagatggc

SEQ ID NO: 32593 - DNA, 82 bp, Homo sapiens
atggccaatccggcttaagagaagctgcagtgcactatctacctctgcaacttccatgtcccaggagatggcccattcacca

SEQ ID NO: 32594 - DNA, 86 bp, Homo sapiens
gcttaagagaagctgcagtgcactatctacctctgcaacttccatgtcccaggagatggcccattcaccaagtgatgcaaggatca

SEQ ID NO: 32595 - DNA, 87 bp, Homo sapiens
agagaagctgcagtgcactatctacctctgcaacttccatgtcccaggagatggcccattcaccaagtgatgcaaggatcactatga

SEQ ID NO: 32596 - DNA, 87 bp, Homo sapiens
agtgcactatctacctctgcaacttccatgtcccaggagatggcccattcaccaagtgatgcaaggatcactatgagcagggcagca

SEQ ID NO: 32597 - DNA, 84 bp, Homo sapiens
ctctgcaacttccatgtcccaggagatggcccattcaccaagtgatgcaaggatcactatgagcagggcagcacgttcgtgaaa

SEQ ID NO: 32598 - DNA, 81 bp, Homo sapiens
aggagatggcccattcaccaagtgatgcaaggatcactatgagcagggcagcacgttcgtgaaaagagctgggccacccag

SEQ ID NO: 32599 - DNA, 79 bp, Homo sapiens
ccattcaccaagtgatgcaaggatcactatgagcagggcagcacgttcgtgaaaagagctgggccacccagggtatacc

SEQ ID NO: 32600 - DNA, 75 bp, Homo sapiens
aaggatcactatgagcagggcagcacgttcgtgaaaagagctgggccacccagggtataccttttgtgttcatta

SEQ ID NO: 32601 - DNA, 77 bp, Homo sapiens
actatgagcagggcagcacgttcgtgaaaagagctgggccacccagggtataccttttgtgttcattagcactgctc

SEQ ID NO: 32602 - DNA, 76 bp, Homo sapiens
agcacgttcgtgaaaagagctgggccacccagggtataccttttgtgttcattagcactgctctggagaaatgaca

SEQ ID NO: 32603 - DNA, 77 bp, Homo sapiens
ttcgtgaaaagagctgggccacccagggtataccttttgtgttcattagcactgctctggagaaatgacatctggtg

SEQ ID NO: 32604 - DNA, 76 bp, Homo sapiens
tgggccacccagggtataccttttgtgttcattagcactgctctggagaaatgacatctggtgttgggacccacag

SEQ ID NO: 32605 - DNA, 78 bp, Homo sapiens
ttttgtgttcattagcactgctctggagaaatgacatctggtgttgggacccacagtgtatcagggggaagatatagg

SEQ ID NO: 32606 - DNA, 83 bp, Homo sapiens
ttcattagcactgctctggagaaatgacatctggtgttgggacccacagtgtatcagggggaagatataggtgatccatgcga

SEQ ID NO: 32607 - DNA, 80 bp, Homo sapiens
tctggagaaatgacatctggtgttgggacccacagtgtatcagggggaagatataggtgatccatgcgagtactgtctat

SEQ ID NO: 32608 - DNA, 80 bp, Homo sapiens
aaatgacatctggtgttgggacccacagtgtatcagggggaagatataggtgatccatgcgagtactgtctatttgcaga

SEQ ID NO: 32609 - DNA, 79 bp, Homo sapiens
tctggtgttgggacccacagtgtatcagggggaagatataggtgatccatgcgagtactgtctatttgcagaaaatatg

SEQ ID NO: 32610 - DNA, 79 bp, Homo sapiens
cacagtgtatcagggggaagatataggtgatccatgcgagtactgtctatttgcagaaaatatggtccattattggaaa

SEQ ID NO: 32611 - DNA, 79 bp, Homo sapiens
tatcagggggaagatataggtgatccatgcgagtactgtctatttgcagaaaatatggtccattattggaaatttcata

SEQ ID NO: 32612 - DNA, 80 bp, Homo sapiens
atataggtgatccatgcgagtactgtctatttgcagaaaatatggtccattattggaaatttcatatgggtcaatctata

SEQ ID NO: 32613 - DNA, 79 bp, Homo sapiens
ggtgatccatgcgagtactgtctatttgcagaaaatatggtccattattggaaatttcatatgggtcaatctatattaa

SEQ ID NO: 32614 - DNA, 77 bp, Homo sapiens
tatggtccattattggaaatttcatatgggtcaatctatattaagctggaaaaataatcagctggatgaaaaggcca

SEQ ID NO: 32615 - DNA, 78 bp, Homo sapiens
ttattggaaatttcatatgggtcaatctatattaagctggaaaaataatcagctggatgaaaaggccagcctgctgta

SEQ ID NO: 32616 - DNA, 76 bp, Homo sapiens
aaatttcatatgggtcaatctatattaagctggaaaaataatcagctggatgaaaaggccagcctgctgtacccac

SEQ ID NO: 32617 - DNA, 78 bp, Homo sapiens
tcaatctatattaagctggaaaaataatcagctggatgaaaaggccagcctgctgtacccactggagtttataactga

SEQ ID NO: 32618 - DNA, 75 bp, Homo sapiens
tatattaagctggaaaaataatcagctggatgaaaaggccagcctgctgtacccactggagtttataactgaaaa

SEQ ID NO: 32619 - DNA, 75 bp, Homo sapiens
aaaaataatcagctggatgaaaaggccagcctgctgtacccactggagtttataactgaaaagcacaagctgaaa

SEQ ID NO: 32620 - DNA, 77 bp, Homo sapiens
aatcagctggatgaaaaggccagcctgctgtacccactggagtttataactgaaaagcacaagctgaaagaaagcag

SEQ ID NO: 32621 - DNA, 73 bp, Homo sapiens
tgctgtacccactggagtttataactgaaaagcacaagctgaaagaaagcaggataaaggttaagtaggtgta

SEQ ID NO: 32622 - DNA, 73 bp, Homo sapiens
ttataactgaaaagcacaagctgaaagaaagcaggataaaggttaagtaggtgtaagccatggtcaagtccta

SEQ ID NO: 32623 - DNA, 71 bp, Homo sapiens
aaaagcacaagctgaaagaaagcaggataaaggttaagtaggtgtaagccatggtcaagtcctacaaggcc

SEQ ID NO: 32624 - DNA, 71 bp, Homo sapiens
aagctgaaagaaagcaggataaaggttaagtaggtgtaagccatggtcaagtcctacaaggcccaccctca

SEQ ID NO: 32625 - DNA, 72 bp, Homo sapiens
aagcaggataaaggttaagtaggtgtaagccatggtcaagtcctacaaggcccaccctcagcagtctacaaa

SEQ ID NO: 32626 - DNA, 77 bp, Homo sapiens
taggtgtaagccatggtcaagtcctacaaggcccaccctcagcagtctacaaagaccctctcttcaggctgatgaaa

SEQ ID NO: 32627 - DNA, 75 bp, Homo sapiens
atggtcaagtcctacaaggcccaccctcagcagtctacaaagaccctctcttcaggctgatgaaagagggggcca

SEQ ID NO: 32628 - DNA, 77 bp, Homo sapiens
accctcagcagtctacaaagaccctctcttcaggctgatgaaagagggggccagagatggccaagtgactcttagga

SEQ ID NO: 32629 - DNA, 74 bp, Homo sapiens
agtctacaaagaccctctcttcaggctgatgaaagagggggccagagatggccaagtgactcttaggaaaacaa

SEQ ID NO: 32630 - DNA, 74 bp, Homo sapiens
aggctgatgaaagagggggccagagatggccaagtgactcttaggaaaacaatgacagtttagctataatttta

SEQ ID NO: 32631 - DNA, 71 bp, Homo sapiens
atgaaagagggggccagagatggccaagtgactcttaggaaaacaatgacagtttagctataattttaaaa

SEQ ID NO: 32632 - DNA, 71 bp, Homo sapiens
cagagatggccaagtgactcttaggaaaacaatgacagtttagctataattttaaaaagcggttcctcttc

SEQ ID NO: 32633 - DNA, 70 bp, Homo sapiens
atggccaagtgactcttaggaaaacaatgacagtttagctataattttaaaaagcggttcctcttctcaa

SEQ ID NO: 32634 - DNA, 69 bp, Homo sapiens
gactcttaggaaaacaatgacagtttagctataattttaaaaagcggttcctcttctcaatctacaaaa

SEQ ID NO: 32635 - DNA, 66 bp, Homo sapiens
cagtttagctataattttaaaaagcggttcctcttctcaatctacaaaattaaaagtaaaattctc

SEQ ID NO: 32636 - DNA, 68 bp, Homo sapiens
tttaaaaagcggttcctcttctcaatctacaaaattaaaagtaaaattctctcaatttaagctcctca

SEQ ID NO: 32637 - DNA, 69 bp, Homo sapiens
gcggttcctcttctcaatctacaaaattaaaagtaaaattctctcaatttaagctcctcaaaagcttac

SEQ ID NO: 32638 - DNA, 70 bp, Homo sapiens
ctcttctcaatctacaaaattaaaagtaaaattctctcaatttaagctcctcaaaagcttacgattcaaa

SEQ ID NO: 32639 - DNA, 69 bp, Homo sapiens
caaaattaaaagtaaaattctctcaatttaagctcctcaaaagcttacgattcaaaatattccacatag

SEQ ID NO: 32640 - DNA, 69 bp, Homo sapiens
gtaaaattctctcaatttaagctcctcaaaagcttacgattcaaaatattccacataggtatttttacc

SEQ ID NO: 32641 - DNA, 71 bp, Homo sapiens
ctctcaatttaagctcctcaaaagcttacgattcaaaatattccacataggtatttttaccttccctgatc

SEQ ID NO: 32642 - DNA, 71 bp, Homo sapiens
gctcctcaaaagcttacgattcaaaatattccacataggtatttttaccttccctgatcttattgtttagc

SEQ ID NO: 32643 - DNA, 75 bp, Homo sapiens
ttcaaaatattccacataggtatttttaccttccctgatcttattgtttagctccgactgaatattgcagctcat

SEQ ID NO: 32644 - DNA, 76 bp, Homo sapiens
atattccacataggtatttttaccttccctgatcttattgtttagctccgactgaatattgcagctcattcatctt

SEQ ID NO: 32645 - DNA, 78 bp, Homo sapiens
tatttttaccttccctgatcttattgtttagctccgactgaatattgcagctcattcatctttactcctatgtaatca

SEQ ID NO: 32646 - DNA, 80 bp, Homo sapiens
ttccctgatcttattgtttagctccgactgaatattgcagctcattcatctttactcctatgtaatcaatgtttaacatc

SEQ ID NO: 32647 - DNA, 78 bp, Homo sapiens
gatcttattgtttagctccgactgaatattgcagctcattcatctttactcctatgtaatcaatgtttaacatccttt

SEQ ID NO: 32648 - DNA, 78 bp, Homo sapiens
ctgaatattgcagctcattcatctttactcctatgtaatcaatgtttaacatccttttttcatgcaactaaatcctcc

SEQ ID NO: 32649 - DNA, 75 bp, Homo sapiens
gcagctcattcatctttactcctatgtaatcaatgtttaacatccttttttcatgcaactaaatcctcctttact

SEQ ID NO: 32650 - DNA, 71 bp, Homo sapiens
ttactcctatgtaatcaatgtttaacatccttttttcatgcaactaaatcctcctttacttcctatctggg

SEQ ID NO: 32651 - DNA, 70 bp, Homo sapiens
cctatgtaatcaatgtttaacatccttttttcatgcaactaaatcctcctttacttcctatctggggaaa

SEQ ID NO: 32652 - DNA, 70 bp, Homo sapiens
aatgtttaacatccttttttcatgcaactaaatcctcctttacttcctatctggggaaagaagtgcatac

SEQ ID NO: 32653 - DNA, 76 bp, Homo sapiens
ttttttcatgcaactaaatcctcctttacttcctatctggggaaagaagtgcataccaatgtctatgctatctgta

SEQ ID NO: 32654 - DNA, 77 bp, Homo sapiens
atgcaactaaatcctcctttacttcctatctggggaaagaagtgcataccaatgtctatgctatctgtaaatgctac

SEQ ID NO: 32655 - DNA, 76 bp, Homo sapiens
aaatcctcctttacttcctatctggggaaagaagtgcataccaatgtctatgctatctgtaaatgctaccagatac

SEQ ID NO: 32656 - DNA, 79 bp, Homo sapiens
ttacttcctatctggggaaagaagtgcataccaatgtctatgctatctgtaaatgctaccagatactcttgctaaaaga

SEQ ID NO: 32657 - DNA, 82 bp, Homo sapiens
ggaaagaagtgcataccaatgtctatgctatctgtaaatgctaccagatactcttgctaaaagatggtatatccagtatatc

SEQ ID NO: 32658 - DNA, 82 bp, Homo sapiens
aagtgcataccaatgtctatgctatctgtaaatgctaccagatactcttgctaaaagatggtatatccagtatatccttaga

SEQ ID NO: 32659 - DNA, 78 bp, Homo sapiens
aatgtctatgctatctgtaaatgctaccagatactcttgctaaaagatggtatatccagtatatccttagaacccaag

SEQ ID NO: 32660 - DNA, 74 bp, Homo sapiens
atctgtaaatgctaccagatactcttgctaaaagatggtatatccagtatatccttagaacccaaggaaaccta

SEQ ID NO: 32661 - DNA, 72 bp, Homo sapiens
aaatgctaccagatactcttgctaaaagatggtatatccagtatatccttagaacccaaggaaacctaagaa

SEQ ID NO: 32662 - DNA, 72 bp, Homo sapiens
agatactcttgctaaaagatggtatatccagtatatccttagaacccaaggaaacctaagaaacctcagcag

SEQ ID NO: 32663 - DNA, 72 bp, Homo sapiens
ctaaaagatggtatatccagtatatccttagaacccaaggaaacctaagaaacctcagcaggacattcctca

SEQ ID NO: 32664 - DNA, 75 bp, Homo sapiens
ggtatatccagtatatccttagaacccaaggaaacctaagaaacctcagcaggacattcctcagctaagccagca

SEQ ID NO: 32665 - DNA, 77 bp, Homo sapiens
gtatatccttagaacccaaggaaacctaagaaacctcagcaggacattcctcagctaagccagcaggctcatctcaa

SEQ ID NO: 32666 - DNA, 79 bp, Homo sapiens
ccaaggaaacctaagaaacctcagcaggacattcctcagctaagccagcaggctcatctcaaggatgaagacatcaaat

SEQ ID NO: 32667 - DNA, 80 bp, Homo sapiens
aaacctaagaaacctcagcaggacattcctcagctaagccagcaggctcatctcaaggatgaagacatcaaattcagccc

SEQ ID NO: 32668 - DNA, 83 bp, Homo sapiens
aaacctcagcaggacattcctcagctaagccagcaggctcatctcaaggatgaagacatcaaattcagcccccatgattcagg

SEQ ID NO: 32669 - DNA, 82 bp, Homo sapiens
acattcctcagctaagccagcaggctcatctcaaggatgaagacatcaaattcagcccccatgattcagggaccacagtaaa

SEQ ID NO: 32670 - DNA, 82 bp, Homo sapiens
taagccagcaggctcatctcaaggatgaagacatcaaattcagcccccatgattcagggaccacagtaaacaaggatgaata

SEQ ID NO: 32671 - DNA, 78 bp, Homo sapiens
aggctcatctcaaggatgaagacatcaaattcagcccccatgattcagggaccacagtaaacaaggatgaatacctcg

SEQ ID NO: 32672 - DNA, 75 bp, Homo sapiens
aaggatgaagacatcaaattcagcccccatgattcagggaccacagtaaacaaggatgaatacctcgggtcaatg

SEQ ID NO: 32673 - DNA, 74 bp, Homo sapiens
aaattcagcccccatgattcagggaccacagtaaacaaggatgaatacctcgggtcaatgtatccaaatgagtg

SEQ ID NO: 32674 - DNA, 75 bp, Homo sapiens
atgattcagggaccacagtaaacaaggatgaatacctcgggtcaatgtatccaaatgagtgtggatgaaagaaac

SEQ ID NO: 32675 - DNA, 72 bp, Homo sapiens
agggaccacagtaaacaaggatgaatacctcgggtcaatgtatccaaatgagtgtggatgaaagaaaccaaa

SEQ ID NO: 32676 - DNA, 72 bp, Homo sapiens
atgaatacctcgggtcaatgtatccaaatgagtgtggatgaaagaaaccaaacagttcaactggaaaacctc

SEQ ID NO: 32677 - DNA, 71 bp, Homo sapiens
cgggtcaatgtatccaaatgagtgtggatgaaagaaaccaaacagttcaactggaaaacctcgaaaacagc

SEQ ID NO: 32678 - DNA, 69 bp, Homo sapiens
aaatgagtgtggatgaaagaaaccaaacagttcaactggaaaacctcgaaaacagcggctggaaaatgt

SEQ ID NO: 32679 - DNA, 70 bp, Homo sapiens
tggatgaaagaaaccaaacagttcaactggaaaacctcgaaaacagcggctggaaaatgtttgatggctt

SEQ ID NO: 32680 - DNA, 67 bp, Homo sapiens
aaagaaaccaaacagttcaactggaaaacctcgaaaacagcggctggaaaatgtttgatggctttgt

SEQ ID NO: 32681 - DNA, 70 bp, Homo sapiens
ttcaactggaaaacctcgaaaacagcggctggaaaatgtttgatggctttgttgtgagatggtaactttt

SEQ ID NO: 32682 - DNA, 68 bp, Homo sapiens
ctggaaaacctcgaaaacagcggctggaaaatgtttgatggctttgttgtgagatggtaacttttttt

SEQ ID NO: 32683 - DNA, 69 bp, Homo sapiens
aaaacagcggctggaaaatgtttgatggctttgttgtgagatggtaacttttttttcctccattttaca

SEQ ID NO: 32684 - DNA, 69 bp, Homo sapiens
cggctggaaaatgtttgatggctttgttgtgagatggtaacttttttttcctccattttacattttctc

SEQ ID NO: 32685 - DNA, 71 bp, Homo sapiens
atggtaacttttttttcctccattttacattttctcccttcaaatccaaactgcagcaatagacactgaca

SEQ ID NO: 32686 - DNA, 82 bp, Homo sapiens
ttttacattttctcccttcaaatccaaactgcagcaatagacactgacagctccagcttcagacttgatacatcatcaggaa

SEQ ID NO: 32687 - DNA, 83 bp, Homo sapiens
attttctcccttcaaatccaaactgcagcaatagacactgacagctccagcttcagacttgatacatcatcaggaaatcattc

SEQ ID NO: 32688 - DNA, 85 bp, Homo sapiens
tgcagcaatagacactgacagctccagcttcagacttgatacatcatcaggaaatcattccaaaagctctaactagataactaat

SEQ ID NO: 32689 - DNA, 80 bp, Homo sapiens
acactgacagctccagcttcagacttgatacatcatcaggaaatcattccaaaagctctaactagataactaatttaata

SEQ ID NO: 32690 - DNA, 76 bp, Homo sapiens
cagacttgatacatcatcaggaaatcattccaaaagctctaactagataactaatttaatacactttgcttcaagg

SEQ ID NO: 32691 - DNA, 73 bp, Homo sapiens
catcatcaggaaatcattccaaaagctctaactagataactaatttaatacactttgcttcaaggtttattcc

SEQ ID NO: 32692 - DNA, 70 bp, Homo sapiens
ggaaatcattccaaaagctctaactagataactaatttaatacactttgcttcaaggtttattccttggc

SEQ ID NO: 32693 - DNA, 70 bp, Homo sapiens
ccaaaagctctaactagataactaatttaatacactttgcttcaaggtttattccttggcttgcttccca

SEQ ID NO: 32694 - DNA, 73 bp, Homo sapiens
actagataactaatttaatacactttgcttcaaggtttattccttggcttgcttcccagatataaagcatctc

SEQ ID NO: 32695 - DNA, 74 bp, Homo sapiens
taatttaatacactttgcttcaaggtttattccttggcttgcttcccagatataaagcatctctgggcaattat

SEQ ID NO: 32696 - DNA, 77 bp, Homo sapiens
ttattccttggcttgcttcccagatataaagcatctctgggcaattattatgcagatgccaccgaaaggactttaaa

SEQ ID NO: 32697 - DNA, 81 bp, Homo sapiens
tgcttcccagatataaagcatctctgggcaattattatgcagatgccaccgaaaggactttaaatggctgctgctaattta

SEQ ID NO: 32698 - DNA, 80 bp, Homo sapiens
tataaagcatctctgggcaattattatgcagatgccaccgaaaggactttaaatggctgctgctaatttaacaggagata

SEQ ID NO: 32699 - DNA, 80 bp, Homo sapiens
tctctgggcaattattatgcagatgccaccgaaaggactttaaatggctgctgctaatttaacaggagatatgttggcat

SEQ ID NO: 32700 - DNA, 77 bp, Homo sapiens
aattattatgcagatgccaccgaaaggactttaaatggctgctgctaatttaacaggagatatgttggcatttactg

SEQ ID NO: 32701 - DNA, 76 bp, Homo sapiens
aaaggactttaaatggctgctgctaatttaacaggagatatgttggcatttactggagatgtgaaaaggaatgcaa

SEQ ID NO: 32702 - DNA, 75 bp, Homo sapiens
tttaacaggagatatgttggcatttactggagatgtgaaaaggaatgcaaaatgtgctaaagaaccaaaggcatt

SEQ ID NO: 32703 - DNA, 74 bp, Homo sapiens
agatatgttggcatttactggagatgtgaaaaggaatgcaaaatgtgctaaagaaccaaaggcatttgttttta

SEQ ID NO: 32704 - DNA, 72 bp, Homo sapiens
gcatttactggagatgtgaaaaggaatgcaaaatgtgctaaagaaccaaaggcatttgtttttaaaagtgaa

SEQ ID NO: 32705 - DNA, 72 bp, Homo sapiens
gatgtgaaaaggaatgcaaaatgtgctaaagaaccaaaggcatttgtttttaaaagtgaaatatgtggaaca

SEQ ID NO: 32706 - DNA, 70 bp, Homo sapiens
ggaatgcaaaatgtgctaaagaaccaaaggcatttgtttttaaaagtgaaatatgtggaacaactcttaa

SEQ ID NO: 32707 - DNA, 68 bp, Homo sapiens
atgtgctaaagaaccaaaggcatttgtttttaaaagtgaaatatgtggaacaactcttaaatgttttc

SEQ ID NO: 32708 - DNA, 65 bp, Homo sapiens
gaaccaaaggcatttgtttttaaaagtgaaatatgtggaacaactcttaaatgttttcttttggg

SEQ ID NO: 32709 - DNA, 67 bp, Homo sapiens
ggcatttgtttttaaaagtgaaatatgtggaacaactcttaaatgttttcttttgggtttcaatata

SEQ ID NO: 32710 - DNA, 67 bp, Homo sapiens
aagtgaaatatgtggaacaactcttaaatgttttcttttgggtttcaatataaactttggctagaaa

SEQ ID NO: 32711 - DNA, 67 bp, Homo sapiens
aatatgtggaacaactcttaaatgttttcttttgggtttcaatataaactttggctagaaagttgaa

SEQ ID NO: 32712 - DNA, 65 bp, Homo sapiens
ctcttaaatgttttcttttgggtttcaatataaactttggctagaaagttgaatattaaacctac

SEQ ID NO: 32713 - DNA, 67 bp, Homo sapiens
ttttcttttgggtttcaatataaactttggctagaaagttgaatattaaacctacttcctccctgca

SEQ ID NO: 32714 - DNA, 69 bp, Homo sapiens
tgggtttcaatataaactttggctagaaagttgaatattaaacctacttcctccctgcattttgtacac

SEQ ID NO: 32715 - DNA, 70 bp, Homo sapiens
taaactttggctagaaagttgaatattaaacctacttcctccctgcattttgtacactaatgaatattcc

SEQ ID NO: 32716 - DNA, 73 bp, Homo sapiens
ttggctagaaagttgaatattaaacctacttcctccctgcattttgtacactaatgaatattcccgtagcata

SEQ ID NO: 32717 - DNA, 71 bp, Homo sapiens
aagttgaatattaaacctacttcctccctgcattttgtacactaatgaatattcccgtagcatacggcagg

SEQ ID NO: 32718 - DNA, 76 bp, Homo sapiens
ttcctccctgcattttgtacactaatgaatattcccgtagcatacggcagggacagtggatgaatttcagggaagc

SEQ ID NO: 32719 - DNA, 78 bp, Homo sapiens
attttgtacactaatgaatattcccgtagcatacggcagggacagtggatgaatttcagggaagcccatgagctctga

SEQ ID NO: 32720 - DNA, 81 bp, Homo sapiens
cgtagcatacggcagggacagtggatgaatttcagggaagcccatgagctctgacgacctcaaagacgcaccagatctata

SEQ ID NO: 32721 - DNA, 82 bp, Homo sapiens
atacggcagggacagtggatgaatttcagggaagcccatgagctctgacgacctcaaagacgcaccagatctatatgctgtc

SEQ ID NO: 32722 - DNA, 86 bp, Homo sapiens
gtggatgaatttcagggaagcccatgagctctgacgacctcaaagacgcaccagatctatatgctgtccacatgagacatattcta

SEQ ID NO: 32723 - DNA, 83 bp, Homo sapiens
aatttcagggaagcccatgagctctgacgacctcaaagacgcaccagatctatatgctgtccacatgagacatattctaacag

SEQ ID NO: 32724 - DNA, 82 bp, Homo sapiens
agctctgacgacctcaaagacgcaccagatctatatgctgtccacatgagacatattctaacagtgcccaccttggggctta

SEQ ID NO: 32725 - DNA, 82 bp, Homo sapiens
tcaaagacgcaccagatctatatgctgtccacatgagacatattctaacagtgcccaccttggggcttagagataaaagata

SEQ ID NO: 32726 - DNA, 80 bp, Homo sapiens
acgcaccagatctatatgctgtccacatgagacatattctaacagtgcccaccttggggcttagagataaaagataaata

SEQ ID NO: 32727 - DNA, 81 bp, Homo sapiens
tatatgctgtccacatgagacatattctaacagtgcccaccttggggcttagagataaaagataaatactgatgttgttca

SEQ ID NO: 32728 - DNA, 79 bp, Homo sapiens
catgagacatattctaacagtgcccaccttggggcttagagataaaagataaatactgatgttgttcatcacgcaataa

SEQ ID NO: 32729 - DNA, 75 bp, Homo sapiens
atattctaacagtgcccaccttggggcttagagataaaagataaatactgatgttgttcatcacgcaataaacca

SEQ ID NO: 32730 - DNA, 73 bp, Homo sapiens
aacagtgcccaccttggggcttagagataaaagataaatactgatgttgttcatcacgcaataaaccagtaac

SEQ ID NO: 32731 - DNA, 75 bp, Homo sapiens
gataaaagataaatactgatgttgttcatcacgcaataaaccagtaactgagaccacttgctaaaacatccctaa

SEQ ID NO: 32732 - DNA, 77 bp, Homo sapiens
ataaatactgatgttgttcatcacgcaataaaccagtaactgagaccacttgctaaaacatccctaacagcagaata

SEQ ID NO: 32733 - DNA, 76 bp, Homo sapiens
atgttgttcatcacgcaataaaccagtaactgagaccacttgctaaaacatccctaacagcagaatatcccaagga

SEQ ID NO: 32734 - DNA, 72 bp, Homo sapiens
acgcaataaaccagtaactgagaccacttgctaaaacatccctaacagcagaatatcccaaggatggaaaaa

SEQ ID NO: 32735 - DNA, 71 bp, Homo sapiens
ataaaccagtaactgagaccacttgctaaaacatccctaacagcagaatatcccaaggatggaaaaacctc

SEQ ID NO: 32736 - DNA, 68 bp, Homo sapiens
ctaaaacatccctaacagcagaatatcccaaggatggaaaaacctccaaggaaaggaaacaagtatct

SEQ ID NO: 32737 - DNA, 68 bp, Homo sapiens
cctaacagcagaatatcccaaggatggaaaaacctccaaggaaaggaaacaagtatctttttgcttat

SEQ ID NO: 32738 - DNA, 70 bp, Homo sapiens
gaatatcccaaggatggaaaaacctccaaggaaaggaaacaagtatctttttgcttattgatgagcttct

SEQ ID NO: 32739 - DNA, 70 bp, Homo sapiens
tcccaaggatggaaaaacctccaaggaaaggaaacaagtatctttttgcttattgatgagcttcttataa

SEQ ID NO: 32740 - DNA, 69 bp, Homo sapiens
aacctccaaggaaaggaaacaagtatctttttgcttattgatgagcttcttataataagggttataagc

SEQ ID NO: 32741 - DNA, 73 bp, Homo sapiens
ggaaaggaaacaagtatctttttgcttattgatgagcttcttataataagggttataagctctgttcactgaa

SEQ ID NO: 32742 - DNA, 75 bp, Homo sapiens
gaaacaagtatctttttgcttattgatgagcttcttataataagggttataagctctgttcactgaaaatacatg

SEQ ID NO: 32743 - DNA, 75 bp, Homo sapiens
ttgcttattgatgagcttcttataataagggttataagctctgttcactgaaaatacatgtaatactaatgggtt

SEQ ID NO: 32744 - DNA, 74 bp, Homo sapiens
gatgagcttcttataataagggttataagctctgttcactgaaaatacatgtaatactaatgggtttctttcca

SEQ ID NO: 32745 - DNA, 71 bp, Homo sapiens
cttcttataataagggttataagctctgttcactgaaaatacatgtaatactaatgggtttctttccagga

SEQ ID NO: 32746 - DNA, 71 bp, Homo sapiens
gggttataagctctgttcactgaaaatacatgtaatactaatgggtttctttccaggacatacaacaaaac

SEQ ID NO: 32747 - DNA, 74 bp, Homo sapiens
ctctgttcactgaaaatacatgtaatactaatgggtttctttccaggacatacaacaaaactccagaatctaca

SEQ ID NO: 32748 - DNA, 77 bp, Homo sapiens
aatctacaaagatcagcagattatactccttcactgagccttcagaccttgaagtagaagacacaggggaagccctc

SEQ ID NO: 32749 - DNA, 75 bp, Homo sapiens
agattatactccttcactgagccttcagaccttgaagtagaagacacaggggaagccctccatccccagatattc

SEQ ID NO: 32750 - DNA, 75 bp, Homo sapiens
ttcactgagccttcagaccttgaagtagaagacacaggggaagccctccatccccagatattccgagtctaacta

SEQ ID NO: 32751 - DNA, 73 bp, Homo sapiens
ccttcagaccttgaagtagaagacacaggggaagccctccatccccagatattccgagtctaactagagtaca

SEQ ID NO: 32752 - DNA, 75 bp, Homo sapiens
ttgaagtagaagacacaggggaagccctccatccccagatattccgagtctaactagagtacagccaccacaaca

SEQ ID NO: 32753 - DNA, 74 bp, Homo sapiens
aagacacaggggaagccctccatccccagatattccgagtctaactagagtacagccaccacaacacctggcca

SEQ ID NO: 32754 - DNA, 74 bp, Homo sapiens
aagccctccatccccagatattccgagtctaactagagtacagccaccacaacacctggccaggttgaaacaga

SEQ ID NO: 32755 - DNA, 75 bp, Homo sapiens
tccatccccagatattccgagtctaactagagtacagccaccacaacacctggccaggttgaaacagaggattcc

SEQ ID NO: 32756 - DNA, 74 bp, Homo sapiens
cccagatattccgagtctaactagagtacagccaccacaacacctggccaggttgaaacagaggattcctattc

SEQ ID NO: 32757 - DNA, 73 bp, Homo sapiens
atattccgagtctaactagagtacagccaccacaacacctggccaggttgaaacagaggattcctattccgaa

SEQ ID NO: 32758 - DNA, 73 bp, Homo sapiens
tctaactagagtacagccaccacaacacctggccaggttgaaacagaggattcctattccgaagaacttaatg

SEQ ID NO: 32759 - DNA, 72 bp, Homo sapiens
gtacagccaccacaacacctggccaggttgaaacagaggattcctattccgaagaacttaatggggaatata

SEQ ID NO: 32760 - DNA, 73 bp, Homo sapiens
tacagccaccacaacacctggccaggttgaaacagaggattcctattccgaagaacttaatggggaatatata

SEQ ID NO: 32761 - DNA, 71 bp, Homo sapiens
cacaacacctggccaggttgaaacagaggattcctattccgaagaacttaatggggaatatatacctgttg

SEQ ID NO: 32762 - DNA, 70 bp, Homo sapiens
acaacacctggccaggttgaaacagaggattcctattccgaagaacttaatggggaatatatacctgttg

SEQ ID NO: 32763 - DNA, 72 bp, Homo sapiens
acctggccaggttgaaacagaggattcctattccgaagaacttaatggggaatatatacctgttggcatgtg

SEQ ID NO: 32764 - DNA, 74 bp, Homo sapiens
ggttgaaacagaggattcctattccgaagaacttaatggggaatatatacctgttggcatgtggtgatgggatg

SEQ ID NO: 32765 - DNA, 75 bp, Homo sapiens
attcctattccgaagaacttaatggggaatatatacctgttggcatgtggtgatgggatgtcacaaaggcatact

SEQ ID NO: 32766 - DNA, 79 bp, Homo sapiens
tatacctgttggcatgtggtgatgggatgtcacaaaggcatactttttctggttgatttgatgtcactccatcttttta

SEQ ID NO: 32767 - DNA, 76 bp, Homo sapiens
tgatgggatgtcacaaaggcatactttttctggttgatttgatgtcactccatctttttagctcacgggggacaaa

SEQ ID NO: 32768 - DNA, 76 bp, Homo sapiens
atgtcacaaaggcatactttttctggttgatttgatgtcactccatctttttagctcacgggggacaaaagcagca

SEQ ID NO: 32769 - DNA, 77 bp, Homo sapiens
tttctggttgatttgatgtcactccatctttttagctcacgggggacaaaagcagcaatgaagaaaggcatatggaa

SEQ ID NO: 32770 - DNA, 79 bp, Homo sapiens
atttgatgtcactccatctttttagctcacgggggacaaaagcagcaatgaagaaaggcatatggaactctcacagcag

SEQ ID NO: 32771 - DNA, 77 bp, Homo sapiens
atctttttagctcacgggggacaaaagcagcaatgaagaaaggcatatggaactctcacagcagtcaattctaagaa

SEQ ID NO: 32772 - DNA, 76 bp, Homo sapiens
tttagctcacgggggacaaaagcagcaatgaagaaaggcatatggaactctcacagcagtcaattctaagaaaaaa

SEQ ID NO: 32773 - DNA, 76 bp, Homo sapiens
gacaaaagcagcaatgaagaaaggcatatggaactctcacagcagtcaattctaagaaaaaaaactgcaattaaat

SEQ ID NO: 32774 - DNA, 75 bp, Homo sapiens
gcagcaatgaagaaaggcatatggaactctcacagcagtcaattctaagaaaaaaaactgcaattaaattttcct

SEQ ID NO: 32775 - DNA, 71 bp, Homo sapiens
agaaaggcatatggaactctcacagcagtcaattctaagaaaaaaaactgcaattaaattttcctttctcc

SEQ ID NO: 32776 - DNA, 72 bp, Homo sapiens
tatggaactctcacagcagtcaattctaagaaaaaaaactgcaattaaattttcctttctcctaacatctag

SEQ ID NO: 32777 - DNA, 69 bp, Homo sapiens
tcacagcagtcaattctaagaaaaaaaactgcaattaaattttcctttctcctaacatctagtttttct

SEQ ID NO: 32778 - DNA, 64 bp, Homo sapiens
ctaagaaaaaaaactgcaattaaattttcctttctcctaacatctagtttttcttgacaacctt

SEQ ID NO: 32779 - DNA, 63 bp, Homo sapiens
aaaactgcaattaaattttcctttctcctaacatctagtttttcttgacaaccttttttcctt

SEQ ID NO: 32780 - DNA, 75 bp, Homo sapiens
caccgtgcctggctgactacagttttttaattgcacgtttgttctttgaactgaccactgtgggcattccatgcc

SEQ ID NO: 32781 - DNA, 76 bp, Homo sapiens
tgcctggctgactacagttttttaattgcacgtttgttctttgaactgaccactgtgggcattccatgccttcctc

SEQ ID NO: 32782 - DNA, 74 bp, Homo sapiens
cctggctgactacagttttttaattgcacgtttgttctttgaactgaccactgtgggcattccatgccttcctc

SEQ ID NO: 32783 - DNA, 73 bp, Homo sapiens
actacagttttttaattgcacgtttgttctttgaactgaccactgtgggcattccatgccttcctccactgcc

SEQ ID NO: 32784 - DNA, 72 bp, Homo sapiens
tttttaattgcacgtttgttctttgaactgaccactgtgggcattccatgccttcctccactgccgcctttt

SEQ ID NO: 32785 - DNA, 73 bp, Homo sapiens
tttaattgcacgtttgttctttgaactgaccactgtgggcattccatgccttcctccactgccgcctttttcc

SEQ ID NO: 32786 - DNA, 73 bp, Homo sapiens
acgtttgttctttgaactgaccactgtgggcattccatgccttcctccactgccgcctttttcccaagctgaa

SEQ ID NO: 32787 - DNA, 74 bp, Homo sapiens
tttgttctttgaactgaccactgtgggcattccatgccttcctccactgccgcctttttcccaagctgaaaaga

SEQ ID NO: 32788 - DNA, 74 bp, Homo sapiens
gttctttgaactgaccactgtgggcattccatgccttcctccactgccgcctttttcccaagctgaaaagacaa

SEQ ID NO: 32789 - DNA, 77 bp, Homo sapiens
cactgtgggcattccatgccttcctccactgccgcctttttcccaagctgaaaagacaaggaagatgtggcatcaaa

SEQ ID NO: 32790 - DNA, 74 bp, Homo sapiens
attccatgccttcctccactgccgcctttttcccaagctgaaaagacaaggaagatgtggcatcaaattaacta

SEQ ID NO: 32791 - DNA, 73 bp, Homo sapiens
atgccttcctccactgccgcctttttcccaagctgaaaagacaaggaagatgtggcatcaaattaactagaaa

SEQ ID NO: 32792 - DNA, 75 bp, Homo sapiens
tgccgcctttttcccaagctgaaaagacaaggaagatgtggcatcaaattaactagaaagagcacgcctgtgact

SEQ ID NO: 32793 - DNA, 76 bp, Homo sapiens
tttttcccaagctgaaaagacaaggaagatgtggcatcaaattaactagaaagagcacgcctgtgacttcccatca

SEQ ID NO: 32794 - DNA, 75 bp, Homo sapiens
aaaagacaaggaagatgtggcatcaaattaactagaaagagcacgcctgtgacttcccatcaccacgtaacaaca

SEQ ID NO: 32795 - DNA, 79 bp, Homo sapiens
ggaagatgtggcatcaaattaactagaaagagcacgcctgtgacttcccatcaccacgtaacaacaggtgcatatcaaa

SEQ ID NO: 32796 - DNA, 77 bp, Homo sapiens
ttaactagaaagagcacgcctgtgacttcccatcaccacgtaacaacaggtgcatatcaaagctgtactcaagaaaa

SEQ ID NO: 32797 - DNA, 77 bp, Homo sapiens
aaagagcacgcctgtgacttcccatcaccacgtaacaacaggtgcatatcaaagctgtactcaagaaaaggtagaca

SEQ ID NO: 32798 - DNA, 75 bp, Homo sapiens
atcaccacgtaacaacaggtgcatatcaaagctgtactcaagaaaaggtagacatagaatgataaatcccccaaa

SEQ ID NO: 32799 - DNA, 76 bp, Homo sapiens
gtaacaacaggtgcatatcaaagctgtactcaagaaaaggtagacatagaatgataaatcccccaaaatgcagtaa

SEQ ID NO: 32800 - DNA, 75 bp, Homo sapiens
gtgcatatcaaagctgtactcaagaaaaggtagacatagaatgataaatcccccaaaatgcagtaagaggaaaaa

SEQ ID NO: 32801 - DNA, 71 bp, Homo sapiens
aagctgtactcaagaaaaggtagacatagaatgataaatcccccaaaatgcagtaagaggaaaaaagtaca

SEQ ID NO: 32802 - DNA, 70 bp, Homo sapiens
caagaaaaggtagacatagaatgataaatcccccaaaatgcagtaagaggaaaaaagtacaaaacatgat

SEQ ID NO: 32803 - DNA, 73 bp, Homo sapiens
gacatagaatgataaatcccccaaaatgcagtaagaggaaaaaagtacaaaacatgatttattgtgtaccatc

SEQ ID NO: 32804 - DNA, 70 bp, Homo sapiens
gataaatcccccaaaatgcagtaagaggaaaaaagtacaaaacatgatttattgtgtaccatccttggaa

SEQ ID NO: 32805 - DNA, 70 bp, Homo sapiens
cccaaaatgcagtaagaggaaaaaagtacaaaacatgatttattgtgtaccatccttggaaattcagaag

SEQ ID NO: 32806 - DNA, 72 bp, Homo sapiens
aagaggaaaaaagtacaaaacatgatttattgtgtaccatccttggaaattcagaaggacactgaccaatga

SEQ ID NO: 32807 - DNA, 74 bp, Homo sapiens
aaagtacaaaacatgatttattgtgtaccatccttggaaattcagaaggacactgaccaatgaagccataggaa

SEQ ID NO: 32808 - DNA, 74 bp, Homo sapiens
aaacatgatttattgtgtaccatccttggaaattcagaaggacactgaccaatgaagccataggaagaaactaa

SEQ ID NO: 32809 - DNA, 73 bp, Homo sapiens
tttattgtgtaccatccttggaaattcagaaggacactgaccaatgaagccataggaagaaactaagaactgg

SEQ ID NO: 32810 - DNA, 73 bp, Homo sapiens
atccttggaaattcagaaggacactgaccaatgaagccataggaagaaactaagaactgggcttcaaagtgaa

SEQ ID NO: 32811 - DNA, 74 bp, Homo sapiens
actgaccaatgaagccataggaagaaactaagaactgggcttcaaagtgaagataactgaccagcgagtggatt

SEQ ID NO: 32812 - DNA, 74 bp, Homo sapiens
aatgaagccataggaagaaactaagaactgggcttcaaagtgaagataactgaccagcgagtggattttatgaa

SEQ ID NO: 32813 - DNA, 71 bp, Homo sapiens
ataggaagaaactaagaactgggcttcaaagtgaagataactgaccagcgagtggattttatgaagaaaag

SEQ ID NO: 32814 - DNA, 72 bp, Homo sapiens
aactaagaactgggcttcaaagtgaagataactgaccagcgagtggattttatgaagaaaaggaaagaagca

SEQ ID NO: 32815 - DNA, 77 bp, Homo sapiens
ttcaaagtgaagataactgaccagcgagtggattttatgaagaaaaggaaagaagcacagggctctgccaatgacaa

SEQ ID NO: 32816 - DNA, 77 bp, Homo sapiens
agtgaagataactgaccagcgagtggattttatgaagaaaaggaaagaagcacagggctctgccaatgacaattcta

SEQ ID NO: 32817 - DNA, 76 bp, Homo sapiens
agtggattttatgaagaaaaggaaagaagcacagggctctgccaatgacaattctaccatcgttcatcaagtggcc

SEQ ID NO: 32818 - DNA, 74 bp, Homo sapiens
agaaaaggaaagaagcacagggctctgccaatgacaattctaccatcgttcatcaagtggccccaagtttggac

SEQ ID NO: 32819 - DNA, 75 bp, Homo sapiens
aggaaagaagcacagggctctgccaatgacaattctaccatcgttcatcaagtggccccaagtttggactatggg

SEQ ID NO: 32820 - DNA, 71 bp, Homo sapiens
aatgacaattctaccatcgttcatcaagtggccccaagtttggactatggggtcccgagtgggattaattc

SEQ ID NO: 32821 - DNA, 71 bp, Homo sapiens
aattctaccatcgttcatcaagtggccccaagtttggactatggggtcccgagtgggattaattctgatct

SEQ ID NO: 32822 - DNA, 75 bp, Homo sapiens
ttcatcaagtggccccaagtttggactatggggtcccgagtgggattaattctgatcttgcagaccaaagcctga

SEQ ID NO: 32823 - DNA, 77 bp, Homo sapiens
tggccccaagtttggactatggggtcccgagtgggattaattctgatcttgcagaccaaagcctgaagatgatatca

SEQ ID NO: 32824 - DNA, 78 bp, Homo sapiens
agtttggactatggggtcccgagtgggattaattctgatcttgcagaccaaagcctgaagatgatatcagcacagcgg

SEQ ID NO: 32825 - DNA, 81 bp, Homo sapiens
gtcccgagtgggattaattctgatcttgcagaccaaagcctgaagatgatatcagcacagcgggggtcacatttgatgtgt

SEQ ID NO: 32826 - DNA, 81 bp, Homo sapiens
aattctgatcttgcagaccaaagcctgaagatgatatcagcacagcgggggtcacatttgatgtgtttcctggccaggacc

SEQ ID NO: 32827 - DNA, 78 bp, Homo sapiens
agaccaaagcctgaagatgatatcagcacagcgggggtcacatttgatgtgtttcctggccaggacccctgttatgta

SEQ ID NO: 32828 - DNA, 79 bp, Homo sapiens
atgatatcagcacagcgggggtcacatttgatgtgtttcctggccaggacccctgttatgtagctaaatgccttacagc

SEQ ID NO: 32829 - DNA, 73 bp, Homo sapiens
cgggggtcacatttgatgtgtttcctggccaggacccctgttatgtagctaaatgccttacagctcccataaa

SEQ ID NO: 32830 - DNA, 75 bp, Homo sapiens
tgtgtttcctggccaggacccctgttatgtagctaaatgccttacagctcccataaatcagcttccccatctgtt

SEQ ID NO: 32831 - DNA, 74 bp, Homo sapiens
aggacccctgttatgtagctaaatgccttacagctcccataaatcagcttccccatctgtttccttgatggcct

SEQ ID NO: 32832 - DNA, 77 bp, Homo sapiens
taaatgccttacagctcccataaatcagcttccccatctgtttccttgatggcctttccaatgacttagtgacctca

SEQ ID NO: 32833 - DNA, 73 bp, Homo sapiens
ataaatcagcttccccatctgtttccttgatggcctttccaatgacttagtgacctcaacttttaggtctctg

SEQ ID NO: 32834 - DNA, 76 bp, Homo sapiens
ttccccatctgtttccttgatggcctttccaatgacttagtgacctcaacttttaggtctctgtccagcacacaca

SEQ ID NO: 32835 - DNA, 75 bp, Homo sapiens
tttccttgatggcctttccaatgacttagtgacctcaacttttaggtctctgtccagcacacacatcttatttaa

SEQ ID NO: 32836 - DNA, 76 bp, Homo sapiens
tccaatgacttagtgacctcaacttttaggtctctgtccagcacacacatcttatttaaataaaaaacaatgatca

SEQ ID NO: 32837 - DNA, 75 bp, Homo sapiens
tagtgacctcaacttttaggtctctgtccagcacacacatcttatttaaataaaaaacaatgatcatcaaggccc

SEQ ID NO: 32838 - DNA, 75 bp, Homo sapiens
ttttaggtctctgtccagcacacacatcttatttaaataaaaaacaatgatcatcaaggccctgcctgaaaaaca

SEQ ID NO: 32839 - DNA, 77 bp, Homo sapiens
tctgtccagcacacacatcttatttaaataaaaaacaatgatcatcaaggccctgcctgaaaaacacaatcctcaaa

SEQ ID NO: 32840 - DNA, 71 bp, Homo sapiens
atttaaataaaaaacaatgatcatcaaggccctgcctgaaaaacacaatcctcaaaggccctgcccaactc

SEQ ID NO: 32841 - DNA, 71 bp, Homo sapiens
aaaaacaatgatcatcaaggccctgcctgaaaaacacaatcctcaaaggccctgcccaactcctttctctt

SEQ ID NO: 32842 - DNA, 76 bp, Homo sapiens
tgcctgaaaaacacaatcctcaaaggccctgcccaactcctttctctttctaggtctgctatcctctctcaatcag

SEQ ID NO: 32843 - DNA, 73 bp, Homo sapiens
aaaacacaatcctcaaaggccctgcccaactcctttctctttctaggtctgctatcctctctcaatcagggta

SEQ ID NO: 32844 - DNA, 79 bp, Homo sapiens
tgcccaactcctttctctttctaggtctgctatcctctctcaatcagggtagagccttaactgcacagatggtctggtc

SEQ ID NO: 32845 - DNA, 83 bp, Homo sapiens
tttctaggtctgctatcctctctcaatcagggtagagccttaactgcacagatggtctggtccagagcctcaatgccaccaga

SEQ ID NO: 32846 - DNA, 81 bp, Homo sapiens
ctatcctctctcaatcagggtagagccttaactgcacagatggtctggtccagagcctcaatgccaccagacagggtccta

SEQ ID NO: 32847 - DNA, 81 bp, Homo sapiens
tagagccttaactgcacagatggtctggtccagagcctcaatgccaccagacagggtcctactgagcaaacaggagaggta

SEQ ID NO: 32848 - DNA, 81 bp, Homo sapiens
actgcacagatggtctggtccagagcctcaatgccaccagacagggtcctactgagcaaacaggagaggtagcaacaaata

SEQ ID NO: 32849 - DNA, 77 bp, Homo sapiens
atggtctggtccagagcctcaatgccaccagacagggtcctactgagcaaacaggagaggtagcaacaaatacccaa

SEQ ID NO: 32850 - DNA, 77 bp, Homo sapiens
tccagagcctcaatgccaccagacagggtcctactgagcaaacaggagaggtagcaacaaatacccaaggtacagtc

SEQ ID NO: 32851 - DNA, 75 bp, Homo sapiens
aatgccaccagacagggtcctactgagcaaacaggagaggtagcaacaaatacccaaggtacagtcgccagcagg

SEQ ID NO: 32852 - DNA, 73 bp, Homo sapiens
acagggtcctactgagcaaacaggagaggtagcaacaaatacccaaggtacagtcgccagcagggaaacacaa

SEQ ID NO: 32853 - DNA, 77 bp, Homo sapiens
tactgagcaaacaggagaggtagcaacaaatacccaaggtacagtcgccagcagggaaacacaagctccagagccca

SEQ ID NO: 32854 - DNA, 74 bp, Homo sapiens
aacaggagaggtagcaacaaatacccaaggtacagtcgccagcagggaaacacaagctccagagcccaggataa

SEQ ID NO: 32855 - DNA, 74 bp, Homo sapiens
tagcaacaaatacccaaggtacagtcgccagcagggaaacacaagctccagagcccaggataaggggtggtcaa

SEQ ID NO: 32856 - DNA, 71 bp, Homo sapiens
aatacccaaggtacagtcgccagcagggaaacacaagctccagagcccaggataaggggtggtcaagaaaa

SEQ ID NO: 32857 - DNA, 77 bp, Homo sapiens
tacagtcgccagcagggaaacacaagctccagagcccaggataaggggtggtcaagaaaagcacaacacagagcttg

SEQ ID NO: 32858 - DNA, 73 bp, Homo sapiens
aagctccagagcccaggataaggggtggtcaagaaaagcacaacacagagcttgtctttcggccccaaagatg

SEQ ID NO: 32859 - DNA, 73 bp, Homo sapiens
agagcccaggataaggggtggtcaagaaaagcacaacacagagcttgtctttcggccccaaagatggcaatta

SEQ ID NO: 32860 - DNA, 76 bp, Homo sapiens
agcttgtctttcggccccaaagatggcaattactgcattgtaaaggcagcactgtctttagctattctgtctttaa

SEQ ID NO: 32861 - DNA, 76 bp, Homo sapiens
tttcggccccaaagatggcaattactgcattgtaaaggcagcactgtctttagctattctgtctttaactcaagct

SEQ ID NO: 32862 - DNA, 75 bp, Homo sapiens
aagatggcaattactgcattgtaaaggcagcactgtctttagctattctgtctttaactcaagcttgggggggaa

SEQ ID NO: 32863 - DNA, 72 bp, Homo sapiens
attactgcattgtaaaggcagcactgtctttagctattctgtctttaactcaagcttgggggggaagttggg

SEQ ID NO: 32864 - DNA, 70 bp, Homo sapiens
taaaggcagcactgtctttagctattctgtctttaactcaagcttgggggggaagttggggtggggcgtg

SEQ ID NO: 32865 - DNA, 67 bp, Homo sapiens
actgtctttagctattctgtctttaactcaagcttgggggggaagttggggtggggcgtgggggaga

SEQ ID NO: 32866 - DNA, 68 bp, Homo sapiens
tattctgtctttaactcaagcttgggggggaagttggggtggggcgtgggggagaggagactactgag

SEQ ID NO: 32867 - DNA, 68 bp, Homo sapiens
gtctttaactcaagcttgggggggaagttggggtggggcgtgggggagaggagactactgaggatgag

SEQ ID NO: 32868 - DNA, 68 bp, Homo sapiens
ttgggggggaagttggggtggggcgtgggggagaggagactactgaggatgaggggtggaaatgaaga

SEQ ID NO: 32869 - DNA, 69 bp, Homo sapiens
aagttggggtggggcgtgggggagaggagactactgaggatgaggggtggaaatgaagacgagaggaaa

SEQ ID NO: 32870 - DNA, 77 bp, Homo sapiens
gagaggagactactgaggatgaggggtggaaatgaagacgagaggaaactgtctatcaaggctcatgagccccaaaa

SEQ ID NO: 32871 - DNA, 76 bp, Homo sapiens
agactactgaggatgaggggtggaaatgaagacgagaggaaactgtctatcaaggctcatgagccccaaaatataa

SEQ ID NO: 32872 - DNA, 75 bp, Homo sapiens
tgaggggtggaaatgaagacgagaggaaactgtctatcaaggctcatgagccccaaaatataagagaatcgtgtt

SEQ ID NO: 32873 - DNA, 75 bp, Homo sapiens
aaatgaagacgagaggaaactgtctatcaaggctcatgagccccaaaatataagagaatcgtgtttgttccttca

SEQ ID NO: 32874 - DNA, 72 bp, Homo sapiens
agaggaaactgtctatcaaggctcatgagccccaaaatataagagaatcgtgtttgttccttcagacccttt

SEQ ID NO: 32875 - DNA, 73 bp, Homo sapiens
gctcatgagccccaaaatataagagaatcgtgtttgttccttcagacccttttctttatatttcaggatgaat

SEQ ID NO: 32876 - DNA, 70 bp, Homo sapiens
tgtttgttccttcagacccttttctttatatttcaggatgaattcattttcttaccgtctttgctttgga

SEQ ID NO: 32877 - DNA, 74 bp, Homo sapiens
cccttttctttatatttcaggatgaattcattttcttaccgtctttgctttggatataagcaatgaatgatgaa

SEQ ID NO: 32878 - DNA, 81 bp, Homo sapiens
tttcaggatgaattcattttcttaccgtctttgctttggatataagcaatgaatgatgaatgaatcaagctgataaatgaa

SEQ ID NO: 32879 - DNA, 81 bp, Homo sapiens
gaattcattttcttaccgtctttgctttggatataagcaatgaatgatgaatgaatcaagctgataaatgaattaagctga

SEQ ID NO: 32880 - DNA, 82 bp, Homo sapiens
tcttaccgtctttgctttggatataagcaatgaatgatgaatgaatcaagctgataaatgaattaagctgatgaatttcagg

SEQ ID NO: 32881 - DNA, 81 bp, Homo sapiens
gtctttgctttggatataagcaatgaatgatgaatgaatcaagctgataaatgaattaagctgatgaatttcagggttggt

SEQ ID NO: 32882 - DNA, 84 bp, Homo sapiens
tataagcaatgaatgatgaatgaatcaagctgataaatgaattaagctgatgaatttcagggttggttacaaatctggctgcaa

SEQ ID NO: 32883 - DNA, 82 bp, Homo sapiens
gaatgatgaatgaatcaagctgataaatgaattaagctgatgaatttcagggttggttacaaatctggctgcaacttcacaa

SEQ ID NO: 32884 - DNA, 79 bp, Homo sapiens
aagctgataaatgaattaagctgatgaatttcagggttggttacaaatctggctgcaacttcacaagagatgtgctccc

SEQ ID NO: 32885 - DNA, 81 bp, Homo sapiens
aatgaattaagctgatgaatttcagggttggttacaaatctggctgcaacttcacaagagatgtgctccctcatgcctctg

SEQ ID NO: 32886 - DNA, 82 bp, Homo sapiens
agggttggttacaaatctggctgcaacttcacaagagatgtgctccctcatgcctctgtcctcaaaatgatccagcaggcaa

SEQ ID NO: 32887 - DNA, 82 bp, Homo sapiens
gttacaaatctggctgcaacttcacaagagatgtgctccctcatgcctctgtcctcaaaatgatccagcaggcaaccttacc

SEQ ID NO: 32888 - DNA, 86 bp, Homo sapiens
tgcaacttcacaagagatgtgctccctcatgcctctgtcctcaaaatgatccagcaggcaaccttacctgctgacatatattacaa

SEQ ID NO: 32889 - DNA, 86 bp, Homo sapiens
ttcacaagagatgtgctccctcatgcctctgtcctcaaaatgatccagcaggcaaccttacctgctgacatatattacaatacaga

SEQ ID NO: 32890 - DNA, 86 bp, Homo sapiens
atgtgctccctcatgcctctgtcctcaaaatgatccagcaggcaaccttacctgctgacatatattacaatacagatcagtcaaga

SEQ ID NO: 32891 - DNA, 82 bp, Homo sapiens
cctctgtcctcaaaatgatccagcaggcaaccttacctgctgacatatattacaatacagatcagtcaagatgtggttcaaa

SEQ ID NO: 32892 - DNA, 82 bp, Homo sapiens
tcaaaatgatccagcaggcaaccttacctgctgacatatattacaatacagatcagtcaagatgtggttcaaatgaaaagta

SEQ ID NO: 32893 - DNA, 80 bp, Homo sapiens
atccagcaggcaaccttacctgctgacatatattacaatacagatcagtcaagatgtggttcaaatgaaaagtactatat

SEQ ID NO: 32894 - DNA, 77 bp, Homo sapiens
accttacctgctgacatatattacaatacagatcagtcaagatgtggttcaaatgaaaagtactatattactaggga

SEQ ID NO: 32895 - DNA, 79 bp, Homo sapiens
cctgctgacatatattacaatacagatcagtcaagatgtggttcaaatgaaaagtactatattactagggaaactgcat

SEQ ID NO: 32896 - DNA, 78 bp, Homo sapiens
tacaatacagatcagtcaagatgtggttcaaatgaaaagtactatattactagggaaactgcattataataattcaca

SEQ ID NO: 32897 - DNA, 75 bp, Homo sapiens
cagatcagtcaagatgtggttcaaatgaaaagtactatattactagggaaactgcattataataattcacaaaag

SEQ ID NO: 32898 - DNA, 72 bp, Homo sapiens
caagatgtggttcaaatgaaaagtactatattactagggaaactgcattataataattcacaaaagttattc

SEQ ID NO: 32899 - DNA, 69 bp, Homo sapiens
ttcaaatgaaaagtactatattactagggaaactgcattataataattcacaaaagttattccaaaggg

SEQ ID NO: 32900 - DNA, 66 bp, Homo sapiens
aaagtactatattactagggaaactgcattataataattcacaaaagttattccaaaggggaaaaa

SEQ ID NO: 32901 - DNA, 67 bp, Homo sapiens
actagggaaactgcattataataattcacaaaagttattccaaaggggaaaaaaataaattatctca

SEQ ID NO: 32902 - DNA, 68 bp, Homo sapiens
aactgcattataataattcacaaaagttattccaaaggggaaaaaaataaattatctcatataaaata

SEQ ID NO: 32903 - DNA, 69 bp, Homo sapiens
taattcacaaaagttattccaaaggggaaaaaaataaattatctcatataaaataatacatggtatgtg

SEQ ID NO: 32904 - DNA, 70 bp, Homo sapiens
agttattccaaaggggaaaaaaataaattatctcatataaaataatacatggtatgtgtgaataatcttg

SEQ ID NO: 32905 - DNA, 73 bp, Homo sapiens
aaggggaaaaaaataaattatctcatataaaataatacatggtatgtgtgaataatcttggctactgtcttca

SEQ ID NO: 32906 - DNA, 80 bp, Homo sapiens
aaataaattatctcatataaaataatacatggtatgtgtgaataatcttggctactgtcttcagagagcctgtttgctgc

SEQ ID NO: 32907 - DNA, 80 bp, Homo sapiens
ataaaataatacatggtatgtgtgaataatcttggctactgtcttcagagagcctgtttgctgccagccacctgcacccc

SEQ ID NO: 32908 - DNA, 81 bp, Homo sapiens
tacatggtatgtgtgaataatcttggctactgtcttcagagagcctgtttgctgccagccacctgcacccctgtgggggga

SEQ ID NO: 32909 - DNA, 80 bp, Homo sapiens
aataatcttggctactgtcttcagagagcctgtttgctgccagccacctgcacccctgtggggggagcagatgttgtctg

SEQ ID NO: 32910 - DNA, 82 bp, Homo sapiens
tcttggctactgtcttcagagagcctgtttgctgccagccacctgcacccctgtggggggagcagatgttgtctggaggtga

SEQ ID NO: 32911 - DNA, 82 bp, Homo sapiens
tgtcttcagagagcctgtttgctgccagccacctgcacccctgtggggggagcagatgttgtctggaggtgactctcctcca

SEQ ID NO: 32912 - DNA, 81 bp, Homo sapiens
agcctgtttgctgccagccacctgcacccctgtggggggagcagatgttgtctggaggtgactctcctccagcgcgatgga

SEQ ID NO: 32913 - DNA, 77 bp, Homo sapiens
acctgcacccctgtggggggagcagatgttgtctggaggtgactctcctccagcgcgatggagctgggtccctcctc

SEQ ID NO: 32914 - DNA, 78 bp, Homo sapiens
gggggagcagatgttgtctggaggtgactctcctccagcgcgatggagctgggtccctcctccaggagctggattggg

SEQ ID NO: 32915 - DNA, 79 bp, Homo sapiens
tctggaggtgactctcctccagcgcgatggagctgggtccctcctccaggagctggattggggtgattaaatgagtctg

SEQ ID NO: 32916 - DNA, 75 bp, Homo sapiens
actctcctccagcgcgatggagctgggtccctcctccaggagctggattggggtgattaaatgagtctggagttt

SEQ ID NO: 32917 - DNA, 74 bp, Homo sapiens
cgatggagctgggtccctcctccaggagctggattggggtgattaaatgagtctggagttttggaggaactgga

SEQ ID NO: 32918 - DNA, 73 bp, Homo sapiens
tgggtccctcctccaggagctggattggggtgattaaatgagtctggagttttggaggaactggatgaggact

SEQ ID NO: 32919 - DNA, 74 bp, Homo sapiens
tccaggagctggattggggtgattaaatgagtctggagttttggaggaactggatgaggacttggtagacaaac

SEQ ID NO: 32920 - DNA, 74 bp, Homo sapiens
tggattggggtgattaaatgagtctggagttttggaggaactggatgaggacttggtagacaaacttgtactga

SEQ ID NO: 32921 - DNA, 77 bp, Homo sapiens
tgattaaatgagtctggagttttggaggaactggatgaggacttggtagacaaacttgtactgagcgatagtctgga

SEQ ID NO: 32922 - DNA, 78 bp, Homo sapiens
agtctggagttttggaggaactggatgaggacttggtagacaaacttgtactgagcgatagtctggatcatgaacatc

SEQ ID NO: 32923 - DNA, 79 bp, Homo sapiens
agttttggaggaactggatgaggacttggtagacaaacttgtactgagcgatagtctggatcatgaacatcctctgctc

SEQ ID NO: 32924 - DNA, 82 bp, Homo sapiens
aactggatgaggacttggtagacaaacttgtactgagcgatagtctggatcatgaacatcctctgctccctgaggagcctca

SEQ ID NO: 32925 - DNA, 85 bp, Homo sapiens
tagacaaacttgtactgagcgatagtctggatcatgaacatcctctgctccctgaggagcctcagcatcatgggcacttccacct

SEQ ID NO: 32926 - DNA, 77 bp, Homo sapiens
acttgtccccaaggtggagtatccggagagaagcccagaatgactcacttcgttatgttccaagcagtagatcatca

SEQ ID NO: 32927 - DNA, 79 bp, Homo sapiens
aaggtggagtatccggagagaagcccagaatgactcacttcgttatgttccaagcagtagatcatcagctcagaaagaa

SEQ ID NO: 32928 - DNA, 82 bp, Homo sapiens
agtatccggagagaagcccagaatgactcacttcgttatgttccaagcagtagatcatcagctcagaaagaatgagcacgcc

SEQ ID NO: 32929 - DNA, 80 bp, Homo sapiens
aagcccagaatgactcacttcgttatgttccaagcagtagatcatcagctcagaaagaatgagcacgccggtccttccca

SEQ ID NO: 32930 - DNA, 80 bp, Homo sapiens
aatgactcacttcgttatgttccaagcagtagatcatcagctcagaaagaatgagcacgccggtccttcccaccccagca

SEQ ID NO: 32931 - DNA, 80 bp, Homo sapiens
ttcgttatgttccaagcagtagatcatcagctcagaaagaatgagcacgccggtccttcccaccccagcactacagtgga

SEQ ID NO: 32932 - DNA, 80 bp, Homo sapiens
ttccaagcagtagatcatcagctcagaaagaatgagcacgccggtccttcccaccccagcactacagtggaccacgatgg

SEQ ID NO: 32933 - DNA, 79 bp, Homo sapiens
tagatcatcagctcagaaagaatgagcacgccggtccttcccaccccagcactacagtggaccacgatgggcgggtgcc

SEQ ID NO: 32934 - DNA, 71 bp, Homo sapiens
agaaagaatgagcacgccggtccttcccaccccagcactacagtggaccacgatgggcgggtgccggttct

SEQ ID NO: 32935 - DNA, 72 bp, Homo sapiens
aatgagcacgccggtccttcccaccccagcactacagtggaccacgatgggcgggtgccggttcttggtgcc

SEQ ID NO: 32936 - DNA, 75 bp, Homo sapiens
gtccttcccaccccagcactacagtggaccacgatgggcgggtgccggttcttggtgccttccagcatgctgttg

SEQ ID NO: 32937 - DNA, 77 bp, Homo sapiens
ccagcactacagtggaccacgatgggcgggtgccggttcttggtgccttccagcatgctgttggtatggcgacggac

SEQ ID NO: 32938 - DNA, 75 bp, Homo sapiens
actacagtggaccacgatgggcgggtgccggttcttggtgccttccagcatgctgttggtatggcgacggaccga

SEQ ID NO: 32939 - DNA, 76 bp, Homo sapiens
acgatgggcgggtgccggttcttggtgccttccagcatgctgttggtatggcgacggaccgactggatctcctcca

SEQ ID NO: 32940 - DNA, 80 bp, Homo sapiens
tgccggttcttggtgccttccagcatgctgttggtatggcgacggaccgactggatctcctccaagtaggctgcaggaca

SEQ ID NO: 32941 - DNA, 80 bp, Homo sapiens
ttggtgccttccagcatgctgttggtatggcgacggaccgactggatctcctccaagtaggctgcaggacaaaatgcaaa

SEQ ID NO: 32942 - DNA, 81 bp, Homo sapiens
cagcatgctgttggtatggcgacggaccgactggatctcctccaagtaggctgcaggacaaaatgcaaattctgtcaccaa

SEQ ID NO: 32943 - DNA, 77 bp, Homo sapiens
tgttggtatggcgacggaccgactggatctcctccaagtaggctgcaggacaaaatgcaaattctgtcaccaaagtc

SEQ ID NO: 32944 - DNA, 74 bp, Homo sapiens
atcataaaagtcagtcaggtagcagactgggaagaaaaacacttacataaaaatccttggacatcttctggaca

SEQ ID NO: 32945 - DNA, 72 bp, Homo sapiens
aaaagtcagtcaggtagcagactgggaagaaaaacacttacataaaaatccttggacatcttctggacagcc

SEQ ID NO: 32946 - DNA, 77 bp, Homo sapiens
tagcagactgggaagaaaaacacttacataaaaatccttggacatcttctggacagccgtgatctggccagtcagta

SEQ ID NO: 32947 - DNA, 75 bp, Homo sapiens
gaagaaaaacacttacataaaaatccttggacatcttctggacagccgtgatctggccagtcagtatattgtaaa

SEQ ID NO: 32948 - DNA, 77 bp, Homo sapiens
aaaacacttacataaaaatccttggacatcttctggacagccgtgatctggccagtcagtatattgtaaatgccaca

SEQ ID NO: 32949 - DNA, 76 bp, Homo sapiens
taaaaatccttggacatcttctggacagccgtgatctggccagtcagtatattgtaaatgccacaccgtcctttct

SEQ ID NO: 32950 - DNA, 77 bp, Homo sapiens
acatcttctggacagccgtgatctggccagtcagtatattgtaaatgccacaccgtcctttcttgcccagacaaaag

SEQ ID NO: 32951 - DNA, 77 bp, Homo sapiens
ttctggacagccgtgatctggccagtcagtatattgtaaatgccacaccgtcctttcttgcccagacaaaaggtgct

SEQ ID NO: 32952 - DNA, 76 bp, Homo sapiens
cgtgatctggccagtcagtatattgtaaatgccacaccgtcctttcttgcccagacaaaaggtgcttgaccttcaa

SEQ ID NO: 32953 - DNA, 75 bp, Homo sapiens
tcagtatattgtaaatgccacaccgtcctttcttgcccagacaaaaggtgcttgaccttcaagcccgtggttgca

SEQ ID NO: 32954 - DNA, 75 bp, Homo sapiens
tattgtaaatgccacaccgtcctttcttgcccagacaaaaggtgcttgaccttcaagcccgtggttgcatagcaa

SEQ ID NO: 32955 - DNA, 72 bp, Homo sapiens
acaccgtcctttcttgcccagacaaaaggtgcttgaccttcaagcccgtggttgcatagcaaacagaatccg

SEQ ID NO: 32956 - DNA, 72 bp, Homo sapiens
tttcttgcccagacaaaaggtgcttgaccttcaagcccgtggttgcatagcaaacagaatccgttcgaaact

SEQ ID NO: 32957 - DNA, 72 bp, Homo sapiens
agacaaaaggtgcttgaccttcaagcccgtggttgcatagcaaacagaatccgttcgaaacttcgtggtgac

SEQ ID NO: 32958 - DNA, 72 bp, Homo sapiens
aggtgcttgaccttcaagcccgtggttgcatagcaaacagaatccgttcgaaacttcgtggtgaccttgaac

SEQ ID NO: 32959 - DNA, 73 bp, Homo sapiens
cttcaagcccgtggttgcatagcaaacagaatccgttcgaaacttcgtggtgaccttgaacttgccataggtg

SEQ ID NO: 32960 - DNA, 78 bp, Homo sapiens
gttgcatagcaaacagaatccgttcgaaacttcgtggtgaccttgaacttgccataggtggctgagctgtgctttgaa

SEQ ID NO: 32961 - DNA, 73 bp, Homo sapiens
aaacagaatccgttcgaaacttcgtggtgaccttgaacttgccataggtggctgagctgtgctttgaacctag

SEQ ID NO: 32962 - DNA, 72 bp, Homo sapiens
aatccgttcgaaacttcgtggtgaccttgaacttgccataggtggctgagctgtgctttgaacctagtttgg

SEQ ID NO: 32963 - DNA, 73 bp, Homo sapiens
aaacttcgtggtgaccttgaacttgccataggtggctgagctgtgctttgaacctagtttgggccagtatcgg

SEQ ID NO: 32964 - DNA, 73 bp, Homo sapiens
accttgaacttgccataggtggctgagctgtgctttgaacctagtttgggccagtatcggtggcttttggttc

SEQ ID NO: 32965 - DNA, 73 bp, Homo sapiens
acttgccataggtggctgagctgtgctttgaacctagtttgggccagtatcggtggcttttggttcgtccacc

SEQ ID NO: 32966 - DNA, 73 bp, Homo sapiens
ctgagctgtgctttgaacctagtttgggccagtatcggtggcttttggttcgtccaccctcctaaatcacata

SEQ ID NO: 32967 - DNA, 71 bp, Homo sapiens
tgtgctttgaacctagtttgggccagtatcggtggcttttggttcgtccaccctcctaaatcacatataaa

SEQ ID NO: 32968 - DNA, 68 bp, Homo sapiens
aacctagtttgggccagtatcggtggcttttggttcgtccaccctcctaaatcacatataaaagcaaa

SEQ ID NO: 32969 - DNA, 72 bp, Homo sapiens
cctttcccctggggaaaaaggatgtggagtaggccattccccttacctcctctgcagtgaccatggcaatca

SEQ ID NO: 32970 - DNA, 75 bp, Homo sapiens
ctggggaaaaaggatgtggagtaggccattccccttacctcctctgcagtgaccatggcaatcacattcactccc

SEQ ID NO: 32971 - DNA, 78 bp, Homo sapiens
aaaaggatgtggagtaggccattccccttacctcctctgcagtgaccatggcaatcacattcactccctgctcccaca

SEQ ID NO: 32972 - DNA, 80 bp, Homo sapiens
agtaggccattccccttacctcctctgcagtgaccatggcaatcacattcactccctgctcccacaccatctgccagaag

SEQ ID NO: 32973 - DNA, 83 bp, Homo sapiens
ccttacctcctctgcagtgaccatggcaatcacattcactccctgctcccacaccatctgccagaagtcgtggcacgtgtgtg

SEQ ID NO: 32974 - DNA, 84 bp, Homo sapiens
cctcctctgcagtgaccatggcaatcacattcactccctgctcccacaccatctgccagaagtcgtggcacgtgtgtggcaggg

SEQ ID NO: 32975 - DNA, 81 bp, Homo sapiens
agtgaccatggcaatcacattcactccctgctcccacaccatctgccagaagtcgtggcacgtgtgtggcaggggcccctg

SEQ ID NO: 32976 - DNA, 80 bp, Homo sapiens
atcacattcactccctgctcccacaccatctgccagaagtcgtggcacgtgtgtggcaggggcccctgggtggctatgta

SEQ ID NO: 32977 - DNA, 81 bp, Homo sapiens
tccctgctcccacaccatctgccagaagtcgtggcacgtgtgtggcaggggcccctgggtggctatgtagtgccattctgc

SEQ ID NO: 32978 - DNA, 78 bp, Homo sapiens
acaccatctgccagaagtcgtggcacgtgtgtggcaggggcccctgggtggctatgtagtgccattctgccccgccaa

SEQ ID NO: 32979 - DNA, 77 bp, Homo sapiens
atctgccagaagtcgtggcacgtgtgtggcaggggcccctgggtggctatgtagtgccattctgccccgccaaccac

SEQ ID NO: 32980 - DNA, 73 bp, Homo sapiens
tggcacgtgtgtggcaggggcccctgggtggctatgtagtgccattctgccccgccaaccaccacctaaaaac

SEQ ID NO: 32981 - DNA, 71 bp, Homo sapiens
tgtggcaggggcccctgggtggctatgtagtgccattctgccccgccaaccaccacctaaaaaccaagaaa

SEQ ID NO: 32982 - DNA, 68 bp, Homo sapiens
cccctgggtggctatgtagtgccattctgccccgccaaccaccacctaaaaaccaagaaaagtatcgg

SEQ ID NO: 32983 - DNA, 69 bp, Homo sapiens
tggctatgtagtgccattctgccccgccaaccaccacctaaaaaccaagaaaagtatcggtaaataaac

SEQ ID NO: 32984 - DNA, 72 bp, Homo sapiens
ttaacccagccatctttaccaaaccttctaacaggcttgccttcttaccttgatgtgggaggcattaatgta

SEQ ID NO: 32985 - DNA, 72 bp, Homo sapiens
tctttaccaaaccttctaacaggcttgccttcttaccttgatgtgggaggcattaatgtatcctgtgttatt

SEQ ID NO: 32986 - DNA, 71 bp, Homo sapiens
accaaaccttctaacaggcttgccttcttaccttgatgtgggaggcattaatgtatcctgtgttattttct

SEQ ID NO: 32987 - DNA, 74 bp, Homo sapiens
ctaacaggcttgccttcttaccttgatgtgggaggcattaatgtatcctgtgttattttctttggttggtatca

SEQ ID NO: 32988 - DNA, 76 bp, Homo sapiens
ttcttaccttgatgtgggaggcattaatgtatcctgtgttattttctttggttggtatcagctctactcgattctc

SEQ ID NO: 32989 - DNA, 77 bp, Homo sapiens
ttgatgtgggaggcattaatgtatcctgtgttattttctttggttggtatcagctctactcgattctcctcataggg

SEQ ID NO: 32990 - DNA, 75 bp, Homo sapiens
cattaatgtatcctgtgttattttctttggttggtatcagctctactcgattctcctcataggggacaacttcac

SEQ ID NO: 32991 - DNA, 74 bp, Homo sapiens
atgtatcctgtgttattttctttggttggtatcagctctactcgattctcctcataggggacaacttcacggat

SEQ ID NO: 32992 - DNA, 75 bp, Homo sapiens
attttctttggttggtatcagctctactcgattctcctcataggggacaacttcacggattcggctgcgctcggc

SEQ ID NO: 32993 - DNA, 75 bp, Homo sapiens
tttggttggtatcagctctactcgattctcctcataggggacaacttcacggattcggctgcgctcggcgttttc

SEQ ID NO: 32994 - DNA, 82 bp, Homo sapiens
atcagctctactcgattctcctcataggggacaacttcacggattcggctgcgctcggcgttttctggcagagctgctgtgc

SEQ ID NO: 32995 - DNA, 80 bp, Homo sapiens
attctcctcataggggacaacttcacggattcggctgcgctcggcgttttctggcagagctgctgtgctgaaaatgccat

SEQ ID NO: 32996 - DNA, 78 bp, Homo sapiens
taggggacaacttcacggattcggctgcgctcggcgttttctggcagagctgctgtgctgaaaatgccattcgccttt

SEQ ID NO: 32997 - DNA, 77 bp, Homo sapiens
acaacttcacggattcggctgcgctcggcgttttctggcagagctgctgtgctgaaaatgccattcgcctttttctt

SEQ ID NO: 32998 - DNA, 80 bp, Homo sapiens
attcggctgcgctcggcgttttctggcagagctgctgtgctgaaaatgccattcgcctttttctttggaatttgctcata

SEQ ID NO: 32999 - DNA, 80 bp, Homo sapiens
ctcggcgttttctggcagagctgctgtgctgaaaatgccattcgcctttttctttggaatttgctcatattctgtgaaca

SEQ ID NO: 33000 - DNA, 80 bp, Homo sapiens
ttttctggcagagctgctgtgctgaaaatgccattcgcctttttctttggaatttgctcatattctgtgaacaccattcc

SEQ ID NO: 33001 - DNA, 77 bp, Homo sapiens
tgctgtgctgaaaatgccattcgcctttttctttggaatttgctcatattctgtgaacaccattccctcttctagtt

SEQ ID NO: 33002 - DNA, 72 bp, Homo sapiens
aaaatgccattcgcctttttctttggaatttgctcatattctgtgaacaccattccctcttctagtttcttc

SEQ ID NO: 33003 - DNA, 71 bp, Homo sapiens
attcgcctttttctttggaatttgctcatattctgtgaacaccattccctcttctagtttcttcttcaggg

SEQ ID NO: 33004 - DNA, 75 bp, Homo sapiens
tttctttggaatttgctcatattctgtgaacaccattccctcttctagtttcttcttcagggttctgaactgcaa

SEQ ID NO: 33005 - DNA, 76 bp, Homo sapiens
aatttgctcatattctgtgaacaccattccctcttctagtttcttcttcagggttctgaactgcaacagaaattga

SEQ ID NO: 33006 - DNA, 77 bp, Homo sapiens
tgtgaacaccattccctcttctagtttcttcttcagggttctgaactgcaacagaaattgatcttcagctctctaaa

SEQ ID NO: 33007 - DNA, 76 bp, Homo sapiens
atcctaagactacagagaatgagtcacattgacaagcctgccacttaccctctcgtccatgggaacccgggtggca

SEQ ID NO: 33008 - DNA, 78 bp, Homo sapiens
tacagagaatgagtcacattgacaagcctgccacttaccctctcgtccatgggaacccgggtggcatcaactcgattc

SEQ ID NO: 33009 - DNA, 76 bp, Homo sapiens
aatgagtcacattgacaagcctgccacttaccctctcgtccatgggaacccgggtggcatcaactcgattctcttc

SEQ ID NO: 33010 - DNA, 72 bp, Homo sapiens
attgacaagcctgccacttaccctctcgtccatgggaacccgggtggcatcaactcgattctcttcccgccc

SEQ ID NO: 33011 - DNA, 72 bp, Homo sapiens
acttaccctctcgtccatgggaacccgggtggcatcaactcgattctcttcccgccctgagactcgagccac

SEQ ID NO: 33012 - DNA, 76 bp, Homo sapiens
tcgtccatgggaacccgggtggcatcaactcgattctcttcccgccctgagactcgagccaccgagagcccattca

SEQ ID NO: 33013 - DNA, 77 bp, Homo sapiens
atgggaacccgggtggcatcaactcgattctcttcccgccctgagactcgagccaccgagagcccattcaatgctgc

SEQ ID NO: 33014 - DNA, 83 bp, Homo sapiens
tggcatcaactcgattctcttcccgccctgagactcgagccaccgagagcccattcaatgctgccaacatcagcggcctcttc

SEQ ID NO: 33015 - DNA, 81 bp, Homo sapiens
aactcgattctcttcccgccctgagactcgagccaccgagagcccattcaatgctgccaacatcagcggcctcttctgtgc

SEQ ID NO: 33016 - DNA, 81 bp, Homo sapiens
ctcttcccgccctgagactcgagccaccgagagcccattcaatgctgccaacatcagcggcctcttctgtgcctccaggcc

SEQ ID NO: 33017 - DNA, 87 bp, Homo sapiens
tgagactcgagccaccgagagcccattcaatgctgccaacatcagcggcctcttctgtgcctccaggcctgccatcttctgcttctc

SEQ ID NO: 33018 - DNA, 85 bp, Homo sapiens
accgagagcccattcaatgctgccaacatcagcggcctcttctgtgcctccaggcctgccatcttctgcttctctagattcttgc

SEQ ID NO: 33019 - DNA, 85 bp, Homo sapiens
cattcaatgctgccaacatcagcggcctcttctgtgcctccaggcctgccatcttctgcttctctagattcttgcggcaagaaaa

SEQ ID NO: 33020 - DNA, 84 bp, Homo sapiens
aatgctgccaacatcagcggcctcttctgtgcctccaggcctgccatcttctgcttctctagattcttgcggcaagaaaaggca

SEQ ID NO: 33021 - DNA, 84 bp, Homo sapiens
atcagcggcctcttctgtgcctccaggcctgccatcttctgcttctctagattcttgcggcaagaaaaggcatgtgctcattgt

SEQ ID NO: 33022 - DNA, 84 bp, Homo sapiens
atgtgctttcacactggaaaatgccctgggagaggaggacactcaccctgatcatcatctctctctctataatgctgtcttcca

SEQ ID NO: 33023 - DNA, 80 bp, Homo sapiens
acactggaaaatgccctgggagaggaggacactcaccctgatcatcatctctctctctataatgctgtcttccagggaaa

SEQ ID NO: 33024 - DNA, 78 bp, Homo sapiens
aaaatgccctgggagaggaggacactcaccctgatcatcatctctctctctataatgctgtcttccagggaaaacatt

SEQ ID NO: 33025 - DNA, 82 bp, Homo sapiens
agaggaggacactcaccctgatcatcatctctctctctataatgctgtcttccagggaaaacatttcagacacaggtctctc

SEQ ID NO: 33026 - DNA, 82 bp, Homo sapiens
aggacactcaccctgatcatcatctctctctctataatgctgtcttccagggaaaacatttcagacacaggtctctccttca

SEQ ID NO: 33027 - DNA, 79 bp, Homo sapiens
atcatcatctctctctctataatgctgtcttccagggaaaacatttcagacacaggtctctccttcacaggctcttttt

SEQ ID NO: 33028 - DNA, 77 bp, Homo sapiens
atctctctctctataatgctgtcttccagggaaaacatttcagacacaggtctctccttcacaggctcttttttgac

SEQ ID NO: 33029 - DNA, 74 bp, Homo sapiens
tataatgctgtcttccagggaaaacatttcagacacaggtctctccttcacaggctcttttttgacccgctcct

SEQ ID NO: 33030 - DNA, 74 bp, Homo sapiens
ttccagggaaaacatttcagacacaggtctctccttcacaggctcttttttgacccgctccttcacactagtca

SEQ ID NO: 33031 - DNA, 72 bp, Homo sapiens
aaaacatttcagacacaggtctctccttcacaggctcttttttgacccgctccttcacactagtcaggtcgg

SEQ ID NO: 33032 - DNA, 73 bp, Homo sapiens
acacaggtctctccttcacaggctcttttttgacccgctccttcacactagtcaggtcgggttccgagatgga

SEQ ID NO: 33033 - DNA, 74 bp, Homo sapiens
tccttcacaggctcttttttgacccgctccttcacactagtcaggtcgggttccgagatggatgggccgagaga

SEQ ID NO: 33034 - DNA, 71 bp, Homo sapiens
aggctcttttttgacccgctccttcacactagtcaggtcgggttccgagatggatgggccgagagaggccc

SEQ ID NO: 33035 - DNA, 72 bp, Homo sapiens
tttttgacccgctccttcacactagtcaggtcgggttccgagatggatgggccgagagaggccccgttgaca

SEQ ID NO: 33036 - DNA, 73 bp, Homo sapiens
ttcacactagtcaggtcgggttccgagatggatgggccgagagaggccccgttgacagccggcgggtcagtcc

SEQ ID NO: 33037 - DNA, 72 bp, Homo sapiens
actagtcaggtcgggttccgagatggatgggccgagagaggccccgttgacagccggcgggtcagtccgaga

SEQ ID NO: 33038 - DNA, 76 bp, Homo sapiens
tcgggttccgagatggatgggccgagagaggccccgttgacagccggcgggtcagtccgagacatgctgatggcct

SEQ ID NO: 33039 - DNA, 80 bp, Homo sapiens
agatggatgggccgagagaggccccgttgacagccggcgggtcagtccgagacatgctgatggccttggctggcccatgc

SEQ ID NO: 33040 - DNA, 79 bp, Homo sapiens
ccgagagaggccccgttgacagccggcgggtcagtccgagacatgctgatggccttggctggcccatgcctcagcaccc

SEQ ID NO: 33041 - DNA, 82 bp, Homo sapiens
cccgttgacagccggcgggtcagtccgagacatgctgatggccttggctggcccatgcctcagcaccctggctctggccatg

SEQ ID NO: 33042 - DNA, 81 bp, Homo sapiens
ccggcgggtcagtccgagacatgctgatggccttggctggcccatgcctcagcaccctggctctggccatggcgggaggaa

SEQ ID NO: 33043 - DNA, 84 bp, Homo sapiens
gtcagtccgagacatgctgatggccttggctggcccatgcctcagcaccctggctctggccatggcgggaggaaggctggcttg

SEQ ID NO: 33044 - DNA, 84 bp, Homo sapiens
acatgctgatggccttggctggcccatgcctcagcaccctggctctggccatggcgggaggaaggctggcttggtcctgcctca

SEQ ID NO: 33045 - DNA, 81 bp, Homo sapiens
tggccttggctggcccatgcctcagcaccctggctctggccatggcgggaggaaggctggcttggtcctgcctcagagccc

SEQ ID NO: 33046 - DNA, 83 bp, Homo sapiens
catgcctcagcaccctggctctggccatggcgggaggaaggctggcttggtcctgcctcagagccccattgctcacactcttc

SEQ ID NO: 33047 - DNA, 79 bp, Homo sapiens
caccctggctctggccatggcgggaggaaggctggcttggtcctgcctcagagccccattgctcacactcttccttgga

SEQ ID NO: 33048 - DNA, 76 bp, Homo sapiens
ctctggccatggcgggaggaaggctggcttggtcctgcctcagagccccattgctcacactcttccttggaccggg

SEQ ID NO: 33049 - DNA, 75 bp, Homo sapiens
atggcgggaggaaggctggcttggtcctgcctcagagccccattgctcacactcttccttggaccggggtactca

SEQ ID NO: 33050 - DNA, 73 bp, Homo sapiens
ggaaggctggcttggtcctgcctcagagccccattgctcacactcttccttggaccggggtactcaggcgggg

SEQ ID NO: 33051 - DNA, 72 bp, Homo sapiens
ttggtcctgcctcagagccccattgctcacactcttccttggaccggggtactcaggcgggggcttgttggg

SEQ ID NO: 33052 - DNA, 70 bp, Homo sapiens
attgctcacactcttccttggaccggggtactcaggcgggggcttgttggggatgcgggccagggccgcc

SEQ ID NO: 33053 - DNA, 70 bp, Homo sapiens
actcttccttggaccggggtactcaggcgggggcttgttggggatgcgggccagggccgcctgcagctgg

SEQ ID NO: 33054 - DNA, 73 bp, Homo sapiens
accggggtactcaggcgggggcttgttggggatgcgggccagggccgcctgcagctgggcactgtactccatc

SEQ ID NO: 33055 - DNA, 77 bp, Homo sapiens
cttgttggggatgcgggccagggccgcctgcagctgggcactgtactccatcttctcccggagcatggggatctggg

SEQ ID NO: 33056 - DNA, 79 bp, Homo sapiens
atgcgggccagggccgcctgcagctgggcactgtactccatcttctcccggagcatggggatctggggcaccgattctg

SEQ ID NO: 33057 - DNA, 78 bp, Homo sapiens
agggccgcctgcagctgggcactgtactccatcttctcccggagcatggggatctggggcaccgattctggagcctcc

SEQ ID NO: 33058 - DNA, 79 bp, Homo sapiens
cctgcagctgggcactgtactccatcttctcccggagcatggggatctggggcaccgattctggagcctcctcctcctc

SEQ ID NO: 33059 - DNA, 81 bp, Homo sapiens
actctcgctgctgtggattagcatagtggcatcagagaaggtcttcttgtggtgatactgagggagctgggggacctcgtg

SEQ ID NO: 33060 - DNA, 81 bp, Homo sapiens
ctgtggattagcatagtggcatcagagaaggtcttcttgtggtgatactgagggagctgggggacctcgtggctgcctgac

SEQ ID NO: 33061 - DNA, 78 bp, Homo sapiens
attagcatagtggcatcagagaaggtcttcttgtggtgatactgagggagctgggggacctcgtggctgcctgacccc

SEQ ID NO: 33062 - DNA, 74 bp, Homo sapiens
atcagagaaggtcttcttgtggtgatactgagggagctgggggacctcgtggctgcctgacccctcctcgggcg

SEQ ID NO: 33063 - DNA, 72 bp, Homo sapiens
agaaggtcttcttgtggtgatactgagggagctgggggacctcgtggctgcctgacccctcctcgggcggtc

SEQ ID NO: 33064 - DNA, 73 bp, Homo sapiens
ttgtggtgatactgagggagctgggggacctcgtggctgcctgacccctcctcgggcggtccctgctcccgga

SEQ ID NO: 33065 - DNA, 73 bp, Homo sapiens
tactgagggagctgggggacctcgtggctgcctgacccctcctcgggcggtccctgctcccggagcgtgttgc

SEQ ID NO: 33066 - DNA, 73 bp, Homo sapiens
gggacctcgtggctgcctgacccctcctcgggcggtccctgctcccggagcgtgttgcggcgagccatgggga

SEQ ID NO: 33067 - DNA, 74 bp, Homo sapiens
ctcgtggctgcctgacccctcctcgggcggtccctgctcccggagcgtgttgcggcgagccatggggaggtgga

SEQ ID NO: 33068 - DNA, 74 bp, Homo sapiens
cccctcctcgggcggtccctgctcccggagcgtgttgcggcgagccatggggaggtggagcgacttgagcgtca

SEQ ID NO: 33069 - DNA, 77 bp, Homo sapiens
ctcgggcggtccctgctcccggagcgtgttgcggcgagccatggggaggtggagcgacttgagcgtcatggcctcca

SEQ ID NO: 33070 - DNA, 82 bp, Homo sapiens
tgctcccggagcgtgttgcggcgagccatggggaggtggagcgacttgagcgtcatggcctccatgccccgcaccatgctgt

SEQ ID NO: 33071 - DNA, 83 bp, Homo sapiens
agcgtgttgcggcgagccatggggaggtggagcgacttgagcgtcatggcctccatgccccgcaccatgctgttcatcacctc

SEQ ID NO: 33072 - DNA, 83 bp, Homo sapiens
cggcgagccatggggaggtggagcgacttgagcgtcatggcctccatgccccgcaccatgctgttcatcacctccaggctgtg

SEQ ID NO: 33073 - DNA, 84 bp, Homo sapiens
ggaggtggagcgacttgagcgtcatggcctccatgccccgcaccatgctgttcatcacctccaggctgtggcgcttgttcacag

SEQ ID NO: 33074 - DNA, 84 bp, Homo sapiens
agcgacttgagcgtcatggcctccatgccccgcaccatgctgttcatcacctccaggctgtggcgcttgttcacagtgccgtgg

SEQ ID NO: 33075 - DNA, 84 bp, Homo sapiens
agcgtcatggcctccatgccccgcaccatgctgttcatcacctccaggctgtggcgcttgttcacagtgccgtggtgcttggtg

SEQ ID NO: 33076 - DNA, 82 bp, Homo sapiens
ctccatgccccgcaccatgctgttcatcacctccaggctgtggcgcttgttcacagtgccgtggtgcttggtggccgtgagg

SEQ ID NO: 33077 - DNA, 82 bp, Homo sapiens
caccatgctgttcatcacctccaggctgtggcgcttgttcacagtgccgtggtgcttggtggccgtgaggggctcgctcacc

SEQ ID NO: 33078 - DNA, 81 bp, Homo sapiens
tgttcatcacctccaggctgtggcgcttgttcacagtgccgtggtgcttggtggccgtgaggggctcgctcacctcctgga

SEQ ID NO: 33079 - DNA, 82 bp, Homo sapiens
tccaggctgtggcgcttgttcacagtgccgtggtgcttggtggccgtgaggggctcgctcacctcctggagagactgatgaa

SEQ ID NO: 33080 - DNA, 80 bp, Homo sapiens
ctgtggcgcttgttcacagtgccgtggtgcttggtggccgtgaggggctcgctcacctcctggagagactgatgaaccac

SEQ ID NO: 33081 - DNA, 80 bp, Homo sapiens
ttcacagtgccgtggtgcttggtggccgtgaggggctcgctcacctcctggagagactgatgaaccaccggagagctgtc

SEQ ID NO: 33082 - DNA, 78 bp, Homo sapiens
gtggtgcttggtggccgtgaggggctcgctcacctcctggagagactgatgaaccaccggagagctgtcctcttggaa

SEQ ID NO: 33083 - DNA, 76 bp, Homo sapiens
ttggtggccgtgaggggctcgctcacctcctggagagactgatgaaccaccggagagctgtcctcttggaaggtct

SEQ ID NO: 33084 - DNA, 79 bp, Homo sapiens
ggctcgctcacctcctggagagactgatgaaccaccggagagctgtcctcttggaaggtcttcaccgagagctgcacct

SEQ ID NO: 33085 - DNA, 75 bp, Homo sapiens
agagactgatgaaccaccggagagctgtcctcttggaaggtcttcaccgagagctgcaccttccgggtcaccagg

SEQ ID NO: 33086 - DNA, 72 bp, Homo sapiens
atgaaccaccggagagctgtcctcttggaaggtcttcaccgagagctgcaccttccgggtcaccaggtccgg

SEQ ID NO: 33087 - DNA, 76 bp, Homo sapiens
agctgtcctcttggaaggtcttcaccgagagctgcaccttccgggtcaccaggtccgggctgctgccgctgacgta

SEQ ID NO: 33088 - DNA, 75 bp, Homo sapiens
aggtcttcaccgagagctgcaccttccgggtcaccaggtccgggctgctgccgctgacgtacttgtggcggtggc

SEQ ID NO: 33089 - DNA, 73 bp, Homo sapiens
accttccgggtcaccaggtccgggctgctgccgctgacgtacttgtggcggtggctggccaggtctggggtgc

SEQ ID NO: 33090 - DNA, 78 bp, Homo sapiens
tcaccaggtccgggctgctgccgctgacgtacttgtggcggtggctggccaggtctggggtgctggtggcaggtcgtg

SEQ ID NO: 33091 - DNA, 76 bp, Homo sapiens
ctgctgccgctgacgtacttgtggcggtggctggccaggtctggggtgctggtggcaggtcgtggccgtgggtagg

SEQ ID NO: 33092 - DNA, 72 bp, Homo sapiens
ccgctgacgtacttgtggcggtggctggccaggtctggggtgctggtggcaggtcgtggccgtgggtagggg

SEQ ID NO: 33093 - DNA, 73 bp, Homo sapiens
tggcggtggctggccaggtctggggtgctggtggcaggtcgtggccgtgggtaggggggcggtggcctgaaga

SEQ ID NO: 33094 - DNA, 72 bp, Homo sapiens
tggccaggtctggggtgctggtggcaggtcgtggccgtgggtaggggggcggtggcctgaagagatagttct

SEQ ID NO: 33095 - DNA, 73 bp, Homo sapiens
tggggtgctggtggcaggtcgtggccgtgggtaggggggcggtggcctgaagagatagttcttaagcatgtgg

SEQ ID NO: 33096 - DNA, 74 bp, Homo sapiens
gtggcaggtcgtggccgtgggtaggggggcggtggcctgaagagatagttcttaagcatgtgggccgtgctgta

SEQ ID NO: 33097 - DNA, 73 bp, Homo sapiens
gtcgtggccgtgggtaggggggcggtggcctgaagagatagttcttaagcatgtgggccgtgctgtagttatg

SEQ ID NO: 33098 - DNA, 76 bp, Homo sapiens
cgtgggtaggggggcggtggcctgaagagatagttcttaagcatgtgggccgtgctgtagttatggctgccctgca

SEQ ID NO: 33099 - DNA, 84 bp, Homo sapiens
cggtggcctgaagagatagttcttaagcatgtgggccgtgctgtagttatggctgccctgcagctgcatgttggccagctctgg

SEQ ID NO: 33100 - DNA, 86 bp, Homo sapiens
tagttcttaagcatgtgggccgtgctgtagttatggctgccctgcagctgcatgttggccagctctggggtgctcaccgtgtgcga

SEQ ID NO: 33101 - DNA, 87 bp, Homo sapiens
atgtgggccgtgctgtagttatggctgccctgcagctgcatgttggccagctctggggtgctcaccgtgtgcgagatggcgcttgcc

SEQ ID NO: 33102 - DNA, 75 bp, Homo sapiens
tctggggtgctcaccgtgtgcgagatggcgcttgcccccggcttgcttggtaccacattattctttgggttcctc

SEQ ID NO: 33103 - DNA, 75 bp, Homo sapiens
accgtgtgcgagatggcgcttgcccccggcttgcttggtaccacattattctttgggttcctctggtcagatgga

SEQ ID NO: 33104 - DNA, 74 bp, Homo sapiens
agatggcgcttgcccccggcttgcttggtaccacattattctttgggttcctctggtcagatggactgacaagt

SEQ ID NO: 33105 - DNA, 75 bp, Homo sapiens
tgcccccggcttgcttggtaccacattattctttgggttcctctggtcagatggactgacaagtttgttgctgta

SEQ ID NO: 33106 - DNA, 74 bp, Homo sapiens
ccggcttgcttggtaccacattattctttgggttcctctggtcagatggactgacaagtttgttgctgtagacc

SEQ ID NO: 33107 - DNA, 74 bp, Homo sapiens
ccacattattctttgggttcctctggtcagatggactgacaagtttgttgctgtagaccccctgtggcccataa

SEQ ID NO: 33108 - DNA, 73 bp, Homo sapiens
ttattctttgggttcctctggtcagatggactgacaagtttgttgctgtagaccccctgtggcccataaggga

SEQ ID NO: 33109 - DNA, 73 bp, Homo sapiens
ggttcctctggtcagatggactgacaagtttgttgctgtagaccccctgtggcccataagggacagtgtaggg

SEQ ID NO: 33110 - DNA, 74 bp, Homo sapiens
atggactgacaagtttgttgctgtagaccccctgtggcccataagggacagtgtaggggtgcctctcccgcatc

SEQ ID NO: 33111 - DNA, 70 bp, Homo sapiens
aagtttgttgctgtagaccccctgtggcccataagggacagtgtaggggtgcctctcccgcatctccggt

SEQ ID NO: 33112 - DNA, 75 bp, Homo sapiens
tgttgctgtagaccccctgtggcccataagggacagtgtaggggtgcctctcccgcatctccggttggctgtaca

SEQ ID NO: 33113 - DNA, 75 bp, Homo sapiens
ccctgtggcccataagggacagtgtaggggtgcctctcccgcatctccggttggctgtacaccagatcctctggc

SEQ ID NO: 33114 - DNA, 76 bp, Homo sapiens
ataagggacagtgtaggggtgcctctcccgcatctccggttggctgtacaccagatcctctggctggttgtaggca

SEQ ID NO: 33115 - DNA, 78 bp, Homo sapiens
gtgtaggggtgcctctcccgcatctccggttggctgtacaccagatcctctggctggttgtaggcatgggtgttgata

SEQ ID NO: 33116 - DNA, 79 bp, Homo sapiens
tgcctctcccgcatctccggttggctgtacaccagatcctctggctggttgtaggcatgggtgttgataatgttgaggt

SEQ ID NO: 33117 - DNA, 79 bp, Homo sapiens
tcccgcatctccggttggctgtacaccagatcctctggctggttgtaggcatgggtgttgataatgttgaggtttctca

SEQ ID NO: 33118 - DNA, 80 bp, Homo sapiens
ggttggctgtacaccagatcctctggctggttgtaggcatgggtgttgataatgttgaggtttctcagagactggctctg

SEQ ID NO: 33119 - DNA, 85 bp, Homo sapiens
tacaccagatcctctggctggttgtaggcatgggtgttgataatgttgaggtttctcagagactggctctggctgtctgtatgca

SEQ ID NO: 33120 - DNA, 83 bp, Homo sapiens
ttgtaggcatgggtgttgataatgttgaggtttctcagagactggctctggctgtctgtatgcaggatccccctcttcatctg

SEQ ID NO: 33121 - DNA, 88 bp, Homo sapiens
tgttgataatgttgaggtttctcagagactggctctggctgtctgtatgcaggatccccctcttcatctggcgcatgactgtctcata

SEQ ID NO: 33122 - DNA, 83 bp, Homo sapiens
gtttctcagagactggctctggctgtctgtatgcaggatccccctcttcatctggcgcatgactgtctcataatcgggggttg

SEQ ID NO: 33123 - DNA, 82 bp, Homo sapiens
actggctctggctgtctgtatgcaggatccccctcttcatctggcgcatgactgtctcataatcgggggttggcctgtacga

SEQ ID NO: 33124 - DNA, 83 bp, Homo sapiens
tgtctgtatgcaggatccccctcttcatctggcgcatgactgtctcataatcgggggttggcctgtacgagggcacgatgatc

SEQ ID NO: 33125 - DNA, 81 bp, Homo sapiens
aggatccccctcttcatctggcgcatgactgtctcataatcgggggttggcctgtacgagggcacgatgatcgcgctgtgc

SEQ ID NO: 33126 - DNA, 82 bp, Homo sapiens
ctcttcatctggcgcatgactgtctcataatcgggggttggcctgtacgagggcacgatgatcgcgctgtgccggtggctcg

SEQ ID NO: 33127 - DNA, 82 bp, Homo sapiens
tctggcgcatgactgtctcataatcgggggttggcctgtacgagggcacgatgatcgcgctgtgccggtggctcgggatgta

SEQ ID NO: 33128 - DNA, 77 bp, Homo sapiens
actgtctcataatcgggggttggcctgtacgagggcacgatgatcgcgctgtgccggtggctcgggatgtagtcggc

SEQ ID NO: 33129 - DNA, 77 bp, Homo sapiens
ataatcgggggttggcctgtacgagggcacgatgatcgcgctgtgccggtggctcgggatgtagtcggcccgcatga

SEQ ID NO: 33130 - DNA, 81 bp, Homo sapiens
ttggcctgtacgagggcacgatgatcgcgctgtgccggtggctcgggatgtagtcggcccgcatgatgtcactcccaggga

SEQ ID NO: 33131 - DNA, 80 bp, Homo sapiens
agggcacgatgatcgcgctgtgccggtggctcgggatgtagtcggcccgcatgatgtcactcccagggatactgaggttg

SEQ ID NO: 33132 - DNA, 81 bp, Homo sapiens
atgatcgcgctgtgccggtggctcgggatgtagtcggcccgcatgatgtcactcccagggatactgaggttggaggataca

SEQ ID NO: 33133 - DNA, 77 bp, Homo sapiens
ctgtgccggtggctcgggatgtagtcggcccgcatgatgtcactcccagggatactgaggttggaggatacagggga

SEQ ID NO: 33134 - DNA, 77 bp, Homo sapiens
tcgggatgtagtcggcccgcatgatgtcactcccagggatactgaggttggaggatacaggggaggcctggatgaaa

SEQ ID NO: 33135 - DNA, 77 bp, Homo sapiens
tagtcggcccgcatgatgtcactcccagggatactgaggttggaggatacaggggaggcctggatgaaactttgcga

SEQ ID NO: 33136 - DNA, 77 bp, Homo sapiens
atgatgtcactcccagggatactgaggttggaggatacaggggaggcctggatgaaactttgcgagcagttgaggga

SEQ ID NO: 33137 - DNA, 74 bp, Homo sapiens
actcccagggatactgaggttggaggatacaggggaggcctggatgaaactttgcgagcagttgagggagttga

SEQ ID NO: 33138 - DNA, 78 bp, Homo sapiens
tgaggttggaggatacaggggaggcctggatgaaactttgcgagcagttgagggagttgacgctgtgaacgctacaca

SEQ ID NO: 33139 - DNA, 78 bp, Homo sapiens
aggatacaggggaggcctggatgaaactttgcgagcagttgagggagttgacgctgtgaacgctacacacgctgccat

SEQ ID NO: 33140 - DNA, 82 bp, Homo sapiens
gaggcctggatgaaactttgcgagcagttgagggagttgacgctgtgaacgctacacacgctgccattggtgacagtgccat

SEQ ID NO: 33141 - DNA, 80 bp, Homo sapiens
atgaaactttgcgagcagttgagggagttgacgctgtgaacgctacacacgctgccattggtgacagtgccatttaaata

SEQ ID NO: 33142 - DNA, 79 bp, Homo sapiens
ctttgcgagcagttgagggagttgacgctgtgaacgctacacacgctgccattggtgacagtgccatttaaataattta

SEQ ID NO: 33143 - DNA, 76 bp, Homo sapiens
agttgagggagttgacgctgtgaacgctacacacgctgccattggtgacagtgccatttaaataatttaagtccag

SEQ ID NO: 33144 - DNA, 79 bp, Homo sapiens
ttgacgctgtgaacgctacacacgctgccattggtgacagtgccatttaaataatttaagtccaggctgttgtgagagt

SEQ ID NO: 33145 - DNA, 78 bp, Homo sapiens
aacgctacacacgctgccattggtgacagtgccatttaaataatttaagtccaggctgttgtgagagttgcaatacaa

SEQ ID NO: 33146 - DNA, 78 bp, Homo sapiens
ctgccattggtgacagtgccatttaaataatttaagtccaggctgttgtgagagttgcaatacaaggcttcttcattc

SEQ ID NO: 33147 - DNA, 75 bp, Homo sapiens
atttaaataatttaagtccaggctgttgtgagagttgcaatacaaggcttcttcattcccatgaaaaatgctgtc

SEQ ID NO: 33148 - DNA, 77 bp, Homo sapiens
aataatttaagtccaggctgttgtgagagttgcaatacaaggcttcttcattcccatgaaaaatgctgtctacaaga

SEQ ID NO: 33149 - DNA, 78 bp, Homo sapiens
aggctgttgtgagagttgcaatacaaggcttcttcattcccatgaaaaatgctgtctacaagaagtcaaacaaaggca

SEQ ID NO: 33150 - DNA, 78 bp, Homo sapiens
ttgtgagagttgcaatacaaggcttcttcattcccatgaaaaatgctgtctacaagaagtcaaacaaaggcacgtgaa

SEQ ID NO: 33151 - DNA, 70 bp, Homo sapiens
tttactgcttactggtattcaactttttgtcttaagaagggagaacggcaagccagagttaccttgcgag

SEQ ID NO: 33152 - DNA, 70 bp, Homo sapiens
tattcaactttttgtcttaagaagggagaacggcaagccagagttaccttgcgaggtgtgcgtttccgag

SEQ ID NO: 33153 - DNA, 73 bp, Homo sapiens
ttttgtcttaagaagggagaacggcaagccagagttaccttgcgaggtgtgcgtttccgagtagtgctcacca

SEQ ID NO: 33154 - DNA, 74 bp, Homo sapiens
ttaagaagggagaacggcaagccagagttaccttgcgaggtgtgcgtttccgagtagtgctcaccacactggac

SEQ ID NO: 33155 - DNA, 74 bp, Homo sapiens
agaacggcaagccagagttaccttgcgaggtgtgcgtttccgagtagtgctcaccacactggacgtgaacggga

SEQ ID NO: 33156 - DNA, 74 bp, Homo sapiens
agagttaccttgcgaggtgtgcgtttccgagtagtgctcaccacactggacgtgaacgggaggcaggatgtacg

SEQ ID NO: 33157 - DNA, 77 bp, Homo sapiens
accttgcgaggtgtgcgtttccgagtagtgctcaccacactggacgtgaacgggaggcaggatgtacggctgctgcc

SEQ ID NO: 33158 - DNA, 79 bp, Homo sapiens
gtgtgcgtttccgagtagtgctcaccacactggacgtgaacgggaggcaggatgtacggctgctgcctgggctgaaaca

SEQ ID NO: 33159 - DNA, 80 bp, Homo sapiens
ccgagtagtgctcaccacactggacgtgaacgggaggcaggatgtacggctgctgcctgggctgaaacagagaacacaga

SEQ ID NO: 33160 - DNA, 78 bp, Homo sapiens
ctcaccacactggacgtgaacgggaggcaggatgtacggctgctgcctgggctgaaacagagaacacagaggaggtgg

SEQ ID NO: 33161 - DNA, 77 bp, Homo sapiens
tggacgtgaacgggaggcaggatgtacggctgctgcctgggctgaaacagagaacacagaggaggtggggaggcctg

SEQ ID NO: 33162 - DNA, 83 bp, Homo sapiens
acctcaaattaataacaaagaatgctcaacagtcagatcacttgatcactgcagcttctatacataccagagaggatcggctc

SEQ ID NO: 33163 - DNA, 82 bp, Homo sapiens
aaattaataacaaagaatgctcaacagtcagatcacttgatcactgcagcttctatacataccagagaggatcggctccagg

SEQ ID NO: 33164 - DNA, 86 bp, Homo sapiens
aaagaatgctcaacagtcagatcacttgatcactgcagcttctatacataccagagaggatcggctccaggtgggctggcgtctga

SEQ ID NO: 33165 - DNA, 83 bp, Homo sapiens
agtcagatcacttgatcactgcagcttctatacataccagagaggatcggctccaggtgggctggcgtctgatggggggtgga

SEQ ID NO: 33166 - DNA, 79 bp, Homo sapiens
acttgatcactgcagcttctatacataccagagaggatcggctccaggtgggctggcgtctgatggggggtggagaatt

SEQ ID NO: 33167 - DNA, 81 bp, Homo sapiens
tgcagcttctatacataccagagaggatcggctccaggtgggctggcgtctgatggggggtggagaatttgactgtctaca

SEQ ID NO: 33168 - DNA, 79 bp, Homo sapiens
ttctatacataccagagaggatcggctccaggtgggctggcgtctgatggggggtggagaatttgactgtctacatgaa

SEQ ID NO: 33169 - DNA, 75 bp, Homo sapiens
agaggatcggctccaggtgggctggcgtctgatggggggtggagaatttgactgtctacatgaagaggtgaaaaa

SEQ ID NO: 33170 - DNA, 76 bp, Homo sapiens
atcggctccaggtgggctggcgtctgatggggggtggagaatttgactgtctacatgaagaggtgaaaaaatgaga

SEQ ID NO: 33171 - DNA, 75 bp, Homo sapiens
tgggctggcgtctgatggggggtggagaatttgactgtctacatgaagaggtgaaaaaatgagaatggttattat

SEQ ID NO: 33172 - DNA, 76 bp, Homo sapiens
tctgatggggggtggagaatttgactgtctacatgaagaggtgaaaaaatgagaatggttattattattgatataa

SEQ ID NO: 33173 - DNA, 73 bp, Homo sapiens
gggtggagaatttgactgtctacatgaagaggtgaaaaaatgagaatggttattattattgatataaaaagac

SEQ ID NO: 33174 - DNA, 71 bp, Homo sapiens
cattaatttaatctgacaaagccatcaagtcgggggggattaaatgtttacttactcagtgcagattttgt

SEQ ID NO: 33175 - DNA, 70 bp, Homo sapiens
atttaatctgacaaagccatcaagtcgggggggattaaatgtttacttactcagtgcagattttgttttg

SEQ ID NO: 33176 - DNA, 71 bp, Homo sapiens
ttttgttttgtttgtaaaacttgtgtcgtgtggcaaacaaccgagaaatatacttggcattttcgatatca

SEQ ID NO: 33177 - DNA, 72 bp, Homo sapiens
tttgtaaaacttgtgtcgtgtggcaaacaaccgagaaatatacttggcattttcgatatcatccttggaaaa

SEQ ID NO: 33178 - DNA, 72 bp, Homo sapiens
aaaacttgtgtcgtgtggcaaacaaccgagaaatatacttggcattttcgatatcatccttggaaaagaaga

SEQ ID NO: 33179 - DNA, 74 bp, Homo sapiens
tcgtgtggcaaacaaccgagaaatatacttggcattttcgatatcatccttggaaaagaagagacagagaaaaa

SEQ ID NO: 33180 - DNA, 70 bp, Homo sapiens
aacaaccgagaaatatacttggcattttcgatatcatccttggaaaagaagagacagagaaaaaaataaa

SEQ ID NO: 33181 - DNA, 73 bp, Homo sapiens
aaaagtccaaaagccagtgtcttgtcagaccctgactgtttgtctgttgtgcttaccgtgtgaaagagggcag

SEQ ID NO: 33182 - DNA, 75 bp, Homo sapiens
aaagccagtgtcttgtcagaccctgactgtttgtctgttgtgcttaccgtgtgaaagagggcagtctcttctttg

SEQ ID NO: 33183 - DNA, 79 bp, Homo sapiens
tcagaccctgactgtttgtctgttgtgcttaccgtgtgaaagagggcagtctcttctttgttgatgagctccactagaa

SEQ ID NO: 33184 - DNA, 77 bp, Homo sapiens
actgtttgtctgttgtgcttaccgtgtgaaagagggcagtctcttctttgttgatgagctccactagaatggtcgac

SEQ ID NO: 33185 - DNA, 80 bp, Homo sapiens
tgttgtgcttaccgtgtgaaagagggcagtctcttctttgttgatgagctccactagaatggtcgacttgttatgagtga

SEQ ID NO: 33186 - DNA, 78 bp, Homo sapiens
cttaccgtgtgaaagagggcagtctcttctttgttgatgagctccactagaatggtcgacttgttatgagtgatattc

SEQ ID NO: 33187 - DNA, 79 bp, Homo sapiens
aaagagggcagtctcttctttgttgatgagctccactagaatggtcgacttgttatgagtgatattccccatgtcattc

SEQ ID NO: 33188 - DNA, 79 bp, Homo sapiens
ctcttctttgttgatgagctccactagaatggtcgacttgttatgagtgatattccccatgtcattccacctggttaga

SEQ ID NO: 33189 - DNA, 78 bp, Homo sapiens
tttgttgatgagctccactagaatggtcgacttgttatgagtgatattccccatgtcattccacctggttagaagaaa

SEQ ID NO: 33190 - DNA, 77 bp, Homo sapiens
tccactagaatggtcgacttgttatgagtgatattccccatgtcattccacctggttagaagaaatgtcactgtgtt

SEQ ID NO: 33191 - DNA, 76 bp, Homo sapiens
aatggtcgacttgttatgagtgatattccccatgtcattccacctggttagaagaaatgtcactgtgtttactcaa

SEQ ID NO: 33192 - DNA, 76 bp, Homo sapiens
acttgttatgagtgatattccccatgtcattccacctggttagaagaaatgtcactgtgtttactcaacaatgttc

SEQ ID NO: 33193 - DNA, 69 bp, Homo sapiens
gaaaaacaaacaaataagactacctgtatattaccgcttgtcttccaattctgttcctcacgaaaatcc

SEQ ID NO: 33194 - DNA, 69 bp, Homo sapiens
aaataagactacctgtatattaccgcttgtcttccaattctgttcctcacgaaaatccccataaagaaa

SEQ ID NO: 33195 - DNA, 71 bp, Homo sapiens
agactacctgtatattaccgcttgtcttccaattctgttcctcacgaaaatccccataaagaaaatgccaa

SEQ ID NO: 33196 - DNA, 72 bp, Homo sapiens
tatattaccgcttgtcttccaattctgttcctcacgaaaatccccataaagaaaatgccaaggtgtacacag

SEQ ID NO: 33197 - DNA, 73 bp, Homo sapiens
ttgtcttccaattctgttcctcacgaaaatccccataaagaaaatgccaaggtgtacacagtttccatgattg

SEQ ID NO: 33198 - DNA, 72 bp, Homo sapiens
attctgttcctcacgaaaatccccataaagaaaatgccaaggtgtacacagtttccatgattgtcctgggta

SEQ ID NO: 33199 - DNA, 70 bp, Homo sapiens
gaaaatccccataaagaaaatgccaaggtgtacacagtttccatgattgtcctgggtaagaccaacaaaa

SEQ ID NO: 33200 - DNA, 74 bp, Homo sapiens
ataaagaaaatgccaaggtgtacacagtttccatgattgtcctgggtaagaccaacaaaagatacttgtgatga

SEQ ID NO: 33201 - DNA, 74 bp, Homo sapiens
aaatgccaaggtgtacacagtttccatgattgtcctgggtaagaccaacaaaagatacttgtgatgacccatgt

SEQ ID NO: 33202 - DNA, 73 bp, Homo sapiens
aaatgccagtaccggtctgagaaggttaaagccagcacagggcacagcatattacctttacagggaagatttc

SEQ ID NO: 33203 - DNA, 73 bp, Homo sapiens
taccggtctgagaaggttaaagccagcacagggcacagcatattacctttacagggaagatttcctgtccaaa

SEQ ID NO: 33204 - DNA, 73 bp, Homo sapiens
agaaggttaaagccagcacagggcacagcatattacctttacagggaagatttcctgtccaaatccatccaaa

SEQ ID NO: 33205 - DNA, 75 bp, Homo sapiens
agcacagggcacagcatattacctttacagggaagatttcctgtccaaatccatccaaacgttcaacttcattga

SEQ ID NO: 33206 - DNA, 75 bp, Homo sapiens
acagcatattacctttacagggaagatttcctgtccaaatccatccaaacgttcaacttcattgatgtacatcag

SEQ ID NO: 33207 - DNA, 74 bp, Homo sapiens
atattacctttacagggaagatttcctgtccaaatccatccaaacgttcaacttcattgatgtacatcagttca

SEQ ID NO: 33208 - DNA, 78 bp, Homo sapiens
agggaagatttcctgtccaaatccatccaaacgttcaacttcattgatgtacatcagttcagcttctgctggcaggat

SEQ ID NO: 33209 - DNA, 79 bp, Homo sapiens
ttcctgtccaaatccatccaaacgttcaacttcattgatgtacatcagttcagcttctgctggcaggattccactaaaa

SEQ ID NO: 33210 - DNA, 78 bp, Homo sapiens
aaatccatccaaacgttcaacttcattgatgtacatcagttcagcttctgctggcaggattccactaaaatcaaaata

SEQ ID NO: 33211 - DNA, 79 bp, Homo sapiens
aaacgttcaacttcattgatgtacatcagttcagcttctgctggcaggattccactaaaatcaaaatagcatcaaagga

SEQ ID NO: 33212 - DNA, 80 bp, Homo sapiens
ttcattgatgtacatcagttcagcttctgctggcaggattccactaaaatcaaaatagcatcaaaggaagaaatggttaa

SEQ ID NO: 33213 - DNA, 79 bp, Homo sapiens
tgtacatcagttcagcttctgctggcaggattccactaaaatcaaaatagcatcaaaggaagaaatggttaagggcagc

SEQ ID NO: 33214 - DNA, 76 bp, Homo sapiens
ctgccccatgggctgtaaacatctgttgtgcaggcagccccttaccctctgcctgccttacctgtgggctttgtgt

SEQ ID NO: 33215 - DNA, 75 bp, Homo sapiens
atgggctgtaaacatctgttgtgcaggcagccccttaccctctgcctgccttacctgtgggctttgtgttcttgg

SEQ ID NO: 33216 - DNA, 74 bp, Homo sapiens
taaacatctgttgtgcaggcagccccttaccctctgcctgccttacctgtgggctttgtgttcttgggctacct

SEQ ID NO: 33217 - DNA, 75 bp, Homo sapiens
ttgtgcaggcagccccttaccctctgcctgccttacctgtgggctttgtgttcttgggctaccttctgggtcagc

SEQ ID NO: 33218 - DNA, 73 bp, Homo sapiens
ccttaccctctgcctgccttacctgtgggctttgtgttcttgggctaccttctgggtcagctcctccagaaca

SEQ ID NO: 33219 - DNA, 76 bp, Homo sapiens
ctctgcctgccttacctgtgggctttgtgttcttgggctaccttctgggtcagctcctccagaacagcctcttcca

SEQ ID NO: 33220 - DNA, 73 bp, Homo sapiens
ttacctgtgggctttgtgttcttgggctaccttctgggtcagctcctccagaacagcctcttccagggccaaa

SEQ ID NO: 33221 - DNA, 74 bp, Homo sapiens
tttgtgttcttgggctaccttctgggtcagctcctccagaacagcctcttccagggccaaatcctataagaata

SEQ ID NO: 33222 - DNA, 73 bp, Homo sapiens
ttcttgggctaccttctgggtcagctcctccagaacagcctcttccagggccaaatcctataagaatagaaag

SEQ ID NO: 33223 - DNA, 77 bp, Homo sapiens
ttctgggtcagctcctccagaacagcctcttccagggccaaatcctataagaatagaaagtgcttaaggtcacatga

SEQ ID NO: 33224 - DNA, 75 bp, Homo sapiens
agctcctccagaacagcctcttccagggccaaatcctataagaatagaaagtgcttaaggtcacatgagggtgtg

SEQ ID NO: 33225 - DNA, 66 bp, Homo sapiens
ggaaagaactaaatgtccaaagaaggtagaaaattaattaagaaaaatgaaattacacttaccata

SEQ ID NO: 33226 - DNA, 69 bp, Homo sapiens
taaatgtccaaagaaggtagaaaattaattaagaaaaatgaaattacacttaccataggaaatagcaca

SEQ ID NO: 33227 - DNA, 71 bp, Homo sapiens
agaaggtagaaaattaattaagaaaaatgaaattacacttaccataggaaatagcacatactctctgagga

SEQ ID NO: 33228 - DNA, 73 bp, Homo sapiens
gaaaattaattaagaaaaatgaaattacacttaccataggaaatagcacatactctctgaggaaatcttgaga

SEQ ID NO: 33229 - DNA, 76 bp, Homo sapiens
agaaaaatgaaattacacttaccataggaaatagcacatactctctgaggaaatcttgagaatcaaactgattata

SEQ ID NO: 33230 - DNA, 77 bp, Homo sapiens
gaaattacacttaccataggaaatagcacatactctctgaggaaatcttgagaatcaaactgattatagtctccaaa

SEQ ID NO: 33231 - DNA, 80 bp, Homo sapiens
acttaccataggaaatagcacatactctctgaggaaatcttgagaatcaaactgattatagtctccaaaatcagctgaga

SEQ ID NO: 33232 - DNA, 79 bp, Homo sapiens
aggaaatagcacatactctctgaggaaatcttgagaatcaaactgattatagtctccaaaatcagctgagaagaaaaga

SEQ ID NO: 33233 - DNA, 78 bp, Homo sapiens
acatactctctgaggaaatcttgagaatcaaactgattatagtctccaaaatcagctgagaagaaaagaagatggaag

SEQ ID NO: 33234 - DNA, 76 bp, Homo sapiens
gaaatcttgagaatcaaactgattatagtctccaaaatcagctgagaagaaaagaagatggaagggcagtatttat

SEQ ID NO: 33235 - DNA, 78 bp, Homo sapiens
ttgagaatcaaactgattatagtctccaaaatcagctgagaagaaaagaagatggaagggcagtatttattatatgaa

SEQ ID NO: 33236 - DNA, 76 bp, Homo sapiens
ctgattatagtctccaaaatcagctgagaagaaaagaagatggaagggcagtatttattatatgaaattaaagatg

SEQ ID NO: 33237 - DNA, 82 bp, Homo sapiens
atgatcaaacagaaaatggaatttcacatgctgctcataactatgtcttaccttgcacagctaggccggctagccgaatcac

SEQ ID NO: 33238 - DNA, 81 bp, Homo sapiens
aatggaatttcacatgctgctcataactatgtcttaccttgcacagctaggccggctagccgaatcacctggtccaatgta

SEQ ID NO: 33239 - DNA, 82 bp, Homo sapiens
tttcacatgctgctcataactatgtcttaccttgcacagctaggccggctagccgaatcacctggtccaatgtacatcgtaa

SEQ ID NO: 33240 - DNA, 79 bp, Homo sapiens
tcataactatgtcttaccttgcacagctaggccggctagccgaatcacctggtccaatgtacatcgtaatcgcccttca

SEQ ID NO: 33241 - DNA, 78 bp, Homo sapiens
actatgtcttaccttgcacagctaggccggctagccgaatcacctggtccaatgtacatcgtaatcgcccttcaagca

SEQ ID NO: 33242 - DNA, 76 bp, Homo sapiens
accttgcacagctaggccggctagccgaatcacctggtccaatgtacatcgtaatcgcccttcaagcacatctttt

SEQ ID NO: 33243 - DNA, 76 bp, Homo sapiens
gccggctagccgaatcacctggtccaatgtacatcgtaatcgcccttcaagcacatcttttttgacttgcaggtaa

SEQ ID NO: 33244 - DNA, 78 bp, Homo sapiens
tagccgaatcacctggtccaatgtacatcgtaatcgcccttcaagcacatcttttttgacttgcaggtaatactgata

SEQ ID NO: 33245 - DNA, 79 bp, Homo sapiens
tggtccaatgtacatcgtaatcgcccttcaagcacatcttttttgacttgcaggtaatactgatatctgttcatgggaa

SEQ ID NO: 33246 - DNA, 78 bp, Homo sapiens
aatgtacatcgtaatcgcccttcaagcacatcttttttgacttgcaggtaatactgatatctgttcatgggaatagag

SEQ ID NO: 33247 - DNA, 77 bp, Homo sapiens
taatcgcccttcaagcacatcttttttgacttgcaggtaatactgatatctgttcatgggaatagaggaacaaacaa

SEQ ID NO: 33248 - DNA, 75 bp, Homo sapiens
ttcaagcacatcttttttgacttgcaggtaatactgatatctgttcatgggaatagaggaacaaacaaccttaaa

SEQ ID NO: 33249 - DNA, 77 bp, Homo sapiens
acagttagtcaacacccttatatggcacacagggggaaaatgcacctaccttgtggcctcttgctgaagccatgaca

SEQ ID NO: 33250 - DNA, 79 bp, Homo sapiens
acacccttatatggcacacagggggaaaatgcacctaccttgtggcctcttgctgaagccatgacacatttggcacata

SEQ ID NO: 33251 - DNA, 83 bp, Homo sapiens
tatatggcacacagggggaaaatgcacctaccttgtggcctcttgctgaagccatgacacatttggcacatagaacatgactc

SEQ ID NO: 33252 - DNA, 80 bp, Homo sapiens
gggaaaatgcacctaccttgtggcctcttgctgaagccatgacacatttggcacatagaacatgactccaaagaaaagca

SEQ ID NO: 33253 - DNA, 79 bp, Homo sapiens
acctaccttgtggcctcttgctgaagccatgacacatttggcacatagaacatgactccaaagaaaagcaaaggctcat

SEQ ID NO: 33254 - DNA, 81 bp, Homo sapiens
ttgtggcctcttgctgaagccatgacacatttggcacatagaacatgactccaaagaaaagcaaaggctcattagcgaatt

SEQ ID NO: 33255 - DNA, 80 bp, Homo sapiens
ctgaagccatgacacatttggcacatagaacatgactccaaagaaaagcaaaggctcattagcgaatttgtccagatgtt

SEQ ID NO: 33256 - DNA, 80 bp, Homo sapiens
atgacacatttggcacatagaacatgactccaaagaaaagcaaaggctcattagcgaatttgtccagatgtttcttcaga

SEQ ID NO: 33257 - DNA, 76 bp, Homo sapiens
tttggcacatagaacatgactccaaagaaaagcaaaggctcattagcgaatttgtccagatgtttcttcagaggtt

SEQ ID NO: 33258 - DNA, 77 bp, Homo sapiens
tagaacatgactccaaagaaaagcaaaggctcattagcgaatttgtccagatgtttcttcagaggtttctccagctc

SEQ ID NO: 33259 - DNA, 75 bp, Homo sapiens
aagaaaagcaaaggctcattagcgaatttgtccagatgtttcttcagaggtttctccagctccacccatcgtgct

SEQ ID NO: 33260 - DNA, 79 bp, Homo sapiens
aagcaaaggctcattagcgaatttgtccagatgtttcttcagaggtttctccagctccacccatcgtgcttgctggctc

SEQ ID NO: 33261 - DNA, 79 bp, Homo sapiens
attagcgaatttgtccagatgtttcttcagaggtttctccagctccacccatcgtgcttgctggctcttgctgagaaac

SEQ ID NO: 33262 - DNA, 78 bp, Homo sapiens
atttgtccagatgtttcttcagaggtttctccagctccacccatcgtgcttgctggctcttgctgagaaaccaaaggc

SEQ ID NO: 33263 - DNA, 76 bp, Homo sapiens
atgtttcttcagaggtttctccagctccacccatcgtgcttgctggctcttgctgagaaaccaaaggccaaagtag

SEQ ID NO: 33264 - DNA, 77 bp, Homo sapiens
tttctccagctccacccatcgtgcttgctggctcttgctgagaaaccaaaggccaaagtagtgcgtctagataaaag

SEQ ID NO: 33265 - DNA, 74 bp, Homo sapiens
tccacccatcgtgcttgctggctcttgctgagaaaccaaaggccaaagtagtgcgtctagataaaagggtaaaa

SEQ ID NO: 33266 - DNA, 76 bp, Homo sapiens
atcgtgcttgctggctcttgctgagaaaccaaaggccaaagtagtgcgtctagataaaagggtaaaatagcatcag

SEQ ID NO: 33267 - DNA, 86 bp, Homo sapiens
tacccaacacgcatgcacgcgcacatgcgcacacagacacacccctcttacctctcgcagctccagcctctgggccacagcctcca

SEQ ID NO: 33268 - DNA, 86 bp, Homo sapiens
atgcacgcgcacatgcgcacacagacacacccctcttacctctcgcagctccagcctctgggccacagcctccaggcattcttgcc

SEQ ID NO: 33269 - DNA, 82 bp, Homo sapiens
atgcgcacacagacacacccctcttacctctcgcagctccagcctctgggccacagcctccaggcattcttgccctgtgctt

SEQ ID NO: 33270 - DNA, 79 bp, Homo sapiens
acagacacacccctcttacctctcgcagctccagcctctgggccacagcctccaggcattcttgccctgtgctttccac

SEQ ID NO: 33271 - DNA, 83 bp, Homo sapiens
tcttacctctcgcagctccagcctctgggccacagcctccaggcattcttgccctgtgctttccaccgacagcgtgcactcga

SEQ ID NO: 33272 - DNA, 85 bp, Homo sapiens
tcgcagctccagcctctgggccacagcctccaggcattcttgccctgtgctttccaccgacagcgtgcactcgataacattgctg

SEQ ID NO: 33273 - DNA, 83 bp, Homo sapiens
agcctctgggccacagcctccaggcattcttgccctgtgctttccaccgacagcgtgcactcgataacattgctgtccagcag

SEQ ID NO: 33274 - DNA, 83 bp, Homo sapiens
cacagcctccaggcattcttgccctgtgctttccaccgacagcgtgcactcgataacattgctgtccagcaggcgaatccgtg

SEQ ID NO: 33275 - DNA, 83 bp, Homo sapiens
aggcattcttgccctgtgctttccaccgacagcgtgcactcgataacattgctgtccagcaggcgaatccgtgtgacaaagca

SEQ ID NO: 33276 - DNA, 82 bp, Homo sapiens
tcttgccctgtgctttccaccgacagcgtgcactcgataacattgctgtccagcaggcgaatccgtgtgacaaagcagttct

SEQ ID NO: 33277 - DNA, 81 bp, Homo sapiens
tttccaccgacagcgtgcactcgataacattgctgtccagcaggcgaatccgtgtgacaaagcagttcttgctcaggacgt

SEQ ID NO: 33278 - DNA, 82 bp, Homo sapiens
acagcgtgcactcgataacattgctgtccagcaggcgaatccgtgtgacaaagcagttcttgctcaggacgttgtagcgccg

SEQ ID NO: 33279 - DNA, 79 bp, Homo sapiens
actcgataacattgctgtccagcaggcgaatccgtgtgacaaagcagttcttgctcaggacgttgtagcgccgtgtccg

SEQ ID NO: 33280 - DNA, 80 bp, Homo sapiens
attgctgtccagcaggcgaatccgtgtgacaaagcagttcttgctcaggacgttgtagcgccgtgtccggcggagcttca

SEQ ID NO: 33281 - DNA, 75 bp, Homo sapiens
aggcgaatccgtgtgacaaagcagttcttgctcaggacgttgtagcgccgtgtccggcggagcttcagaccaaaa

SEQ ID NO: 33282 - DNA, 76 bp, Homo sapiens
aatccgtgtgacaaagcagttcttgctcaggacgttgtagcgccgtgtccggcggagcttcagaccaaaaggcatg

SEQ ID NO: 33283 - DNA, 77 bp, Homo sapiens
acaaagcagttcttgctcaggacgttgtagcgccgtgtccggcggagcttcagaccaaaaggcatggctatgtggtc

SEQ ID NO: 33284 - DNA, 77 bp, Homo sapiens
tcttgctcaggacgttgtagcgccgtgtccggcggagcttcagaccaaaaggcatggctatgtggtcctcggacgcc

SEQ ID NO: 33285 - DNA, 75 bp, Homo sapiens
gttgtagcgccgtgtccggcggagcttcagaccaaaaggcatggctatgtggtcctcggacgccgcccgcctatc

SEQ ID NO: 33286 - DNA, 78 bp, Homo sapiens
agcttcagaccaaaaggcatggctatgtggtcctcggacgccgcccgcctatcctggcgcacacgcccctgagatggc

SEQ ID NO: 33287 - DNA, 76 bp, Homo sapiens
agaccaaaaggcatggctatgtggtcctcggacgccgcccgcctatcctggcgcacacgcccctgagatggcctta

SEQ ID NO: 33288 - DNA, 77 bp, Homo sapiens
atggctatgtggtcctcggacgccgcccgcctatcctggcgcacacgcccctgagatggccttagcagtttcgtgac

SEQ ID NO: 33289 - DNA, 75 bp, Homo sapiens
tcctcggacgccgcccgcctatcctggcgcacacgcccctgagatggccttagcagtttcgtgactggaaaatta

SEQ ID NO: 33290 - DNA, 76 bp, Homo sapiens
acgccgcccgcctatcctggcgcacacgcccctgagatggccttagcagtttcgtgactggaaaattacactatca

SEQ ID NO: 33291 - DNA, 79 bp, Homo sapiens
ctatcctggcgcacacgcccctgagatggccttagcagtttcgtgactggaaaattacactatcacctgtgctcctcca

SEQ ID NO: 33292 - DNA, 76 bp, Homo sapiens
acacgcccctgagatggccttagcagtttcgtgactggaaaattacactatcacctgtgctcctccaggcagggaa

SEQ ID NO: 33293 - DNA, 74 bp, Homo sapiens
ccctgagatggccttagcagtttcgtgactggaaaattacactatcacctgtgctcctccaggcagggaaaagg

SEQ ID NO: 33294 - DNA, 75 bp, Homo sapiens
cttagcagtttcgtgactggaaaattacactatcacctgtgctcctccaggcagggaaaagggtgtccatgccca

SEQ ID NO: 33295 - DNA, 75 bp, Homo sapiens
aaaattacactatcacctgtgctcctccaggcagggaaaagggtgtccatgcccagtgtggccctctggaagata

SEQ ID NO: 33296 - DNA, 79 bp, Homo sapiens
tatcacctgtgctcctccaggcagggaaaagggtgtccatgcccagtgtggccctctggaagatagctgtaaatgcaaa

SEQ ID NO: 33297 - DNA, 77 bp, Homo sapiens
tgtgctcctccaggcagggaaaagggtgtccatgcccagtgtggccctctggaagatagctgtaaatgcaaaagaaa

SEQ ID NO: 33298 - DNA, 78 bp, Homo sapiens
agggaaaagggtgtccatgcccagtgtggccctctggaagatagctgtaaatgcaaaagaaatgccatggtcatgctc

SEQ ID NO: 33299 - DNA, 66 bp, Homo sapiens
gggaattcaacccaaaggaataactggaaagaaaaaaagacactatatgtacaaagacgttaatgg

SEQ ID NO: 33300 - DNA, 65 bp, Homo sapiens
cccaaaggaataactggaaagaaaaaaagacactatatgtacaaagacgttaatggtattttatt

SEQ ID NO: 33301 - DNA, 68 bp, Homo sapiens
ctggaaagaaaaaaagacactatatgtacaaagacgttaatggtattttatttatagtagccaaacaa

SEQ ID NO: 33302 - DNA, 68 bp, Homo sapiens
aaaagacactatatgtacaaagacgttaatggtattttatttatagtagccaaacaaacacctggaaa

SEQ ID NO: 33303 - DNA, 69 bp, Homo sapiens
cactatatgtacaaagacgttaatggtattttatttatagtagccaaacaaacacctggaaataaccca

SEQ ID NO: 33304 - DNA, 67 bp, Homo sapiens
acaaagacgttaatggtattttatttatagtagccaaacaaacacctggaaataacccaaatagtca

SEQ ID NO: 33305 - DNA, 67 bp, Homo sapiens
ggtattttatttatagtagccaaacaaacacctggaaataacccaaatagtcaacaaatggaaattg

SEQ ID NO: 33306 - DNA, 69 bp, Homo sapiens
ttatagtagccaaacaaacacctggaaataacccaaatagtcaacaaatggaaattgttaattataaca

SEQ ID NO: 33307 - DNA, 74 bp, Homo sapiens
cctggaaataacccaaatagtcaacaaatggaaattgttaattataacatactactcaatgagctatacatcca

SEQ ID NO: 33308 - DNA, 75 bp, Homo sapiens
cccaaatagtcaacaaatggaaattgttaattataacatactactcaatgagctatacatccattaacattctaa

SEQ ID NO: 33309 - DNA, 76 bp, Homo sapiens
atagtcaacaaatggaaattgttaattataacatactactcaatgagctatacatccattaacattctaagtatat

SEQ ID NO: 33310 - DNA, 78 bp, Homo sapiens
ggaaattgttaattataacatactactcaatgagctatacatccattaacattctaagtatattaagaatatgtggca

SEQ ID NO: 33311 - DNA, 79 bp, Homo sapiens
ttataacatactactcaatgagctatacatccattaacattctaagtatattaagaatatgtggcaacagagaaaagtg

SEQ ID NO: 33312 - DNA, 80 bp, Homo sapiens
acatactactcaatgagctatacatccattaacattctaagtatattaagaatatgtggcaacagagaaaagtgtgacta

SEQ ID NO: 33313 - DNA, 74 bp, Homo sapiens
acatccattaacattctaagtatattaagaatatgtggcaacagagaaaagtgtgactaaaaagataaatggga

SEQ ID NO: 33314 - DNA, 74 bp, Homo sapiens
cattctaagtatattaagaatatgtggcaacagagaaaagtgtgactaaaaagataaatgggaagaaaagcaga

SEQ ID NO: 33315 - DNA, 71 bp, Homo sapiens
gtatattaagaatatgtggcaacagagaaaagtgtgactaaaaagataaatgggaagaaaagcagaaaaag

SEQ ID NO: 33316 - DNA, 72 bp, Homo sapiens
aatatgtggcaacagagaaaagtgtgactaaaaagataaatgggaagaaaagcagaaaaagtattctcacaa

SEQ ID NO: 33317 - DNA, 75 bp, Homo sapiens
gagaaaagtgtgactaaaaagataaatgggaagaaaagcagaaaaagtattctcacaatatattgctctatgtga

SEQ ID NO: 33318 - DNA, 76 bp, Homo sapiens
tgtgactaaaaagataaatgggaagaaaagcagaaaaagtattctcacaatatattgctctatgtgactattattc

SEQ ID NO: 33319 - DNA, 74 bp, Homo sapiens
aaaagataaatgggaagaaaagcagaaaaagtattctcacaatatattgctctatgtgactattattctaaata

SEQ ID NO: 33320 - DNA, 78 bp, Homo sapiens
ggaagaaaagcagaaaaagtattctcacaatatattgctctatgtgactattattctaaatatataacatgattacag

SEQ ID NO: 33321 - DNA, 80 bp, Homo sapiens
gcagaaaaagtattctcacaatatattgctctatgtgactattattctaaatatataacatgattacagttatataatta

SEQ ID NO: 33322 - DNA, 79 bp, Homo sapiens
gtattctcacaatatattgctctatgtgactattattctaaatatataacatgattacagttatataattaatagaaag

SEQ ID NO: 33323 - DNA, 76 bp, Homo sapiens
aatatattgctctatgtgactattattctaaatatataacatgattacagttatataattaatagaaagtttagaa

SEQ ID NO: 33324 - DNA, 76 bp, Homo sapiens
tctatgtgactattattctaaatatataacatgattacagttatataattaatagaaagtttagaaataatatata

SEQ ID NO: 33325 - DNA, 72 bp, Homo sapiens
ttctaaatatataacatgattacagttatataattaatagaaagtttagaaataatatataaaaacacagtg

SEQ ID NO: 33326 - DNA, 74 bp, Homo sapiens
tataacatgattacagttatataattaatagaaagtttagaaataatatataaaaacacagtggatatacttga

SEQ ID NO: 33327 - DNA, 71 bp, Homo sapiens
tacagttatataattaatagaaagtttagaaataatatataaaaacacagtggatatacttgagtggtagg

SEQ ID NO: 33328 - DNA, 68 bp, Homo sapiens
gaaagtttagaaataatatataaaaacacagtggatatacttgagtggtagggtaattggttttaata

SEQ ID NO: 33329 - DNA, 70 bp, Homo sapiens
aataatatataaaaacacagtggatatacttgagtggtagggtaattggttttaatattcttgagatact

SEQ ID NO: 33330 - DNA, 68 bp, Homo sapiens
aaaaacacagtggatatacttgagtggtagggtaattggttttaatattcttgagatactttaagaac

SEQ ID NO: 33331 - DNA, 70 bp, Homo sapiens
gtggatatacttgagtggtagggtaattggttttaatattcttgagatactttaagaactgaggtatggg

SEQ ID NO: 33332 - DNA, 69 bp, Homo sapiens
atacttgagtggtagggtaattggttttaatattcttgagatactttaagaactgaggtatgggggctg

SEQ ID NO: 33333 - DNA, 69 bp, Homo sapiens
aaaaagaattgaggtatggttgttttaaaaaatgggctttagcttgatgatacccacagcctatgtaag

SEQ ID NO: 33334 - DNA, 72 bp, Homo sapiens
aattgaggtatggttgttttaaaaaatgggctttagcttgatgatacccacagcctatgtaagtcaagaaga

SEQ ID NO: 33335 - DNA, 72 bp, Homo sapiens
tgttttaaaaaatgggctttagcttgatgatacccacagcctatgtaagtcaagaagatggggccgggtatg

SEQ ID NO: 33336 - DNA, 77 bp, Homo sapiens
tgagacactgtctctctgccaaaaaaagtcaagaagatgggtcctaatctctatggtcatagatacctgaccaaaag

SEQ ID NO: 33337 - DNA, 75 bp, Homo sapiens
tctctctgccaaaaaaagtcaagaagatgggtcctaatctctatggtcatagatacctgaccaaaagtatgtgtt

SEQ ID NO: 33338 - DNA, 73 bp, Homo sapiens
aaaaaaagtcaagaagatgggtcctaatctctatggtcatagatacctgaccaaaagtatgtgtttcagagac

SEQ ID NO: 33339 - DNA, 75 bp, Homo sapiens
aagaagatgggtcctaatctctatggtcatagatacctgaccaaaagtatgtgtttcagagaccaaggtcttcaa

SEQ ID NO: 33340 - DNA, 78 bp, Homo sapiens
atgggtcctaatctctatggtcatagatacctgaccaaaagtatgtgtttcagagaccaaggtcttcaaagcagcaga

SEQ ID NO: 33341 - DNA, 79 bp, Homo sapiens
aatctctatggtcatagatacctgaccaaaagtatgtgtttcagagaccaaggtcttcaaagcagcagagtgaaggaga

SEQ ID NO: 33342 - DNA, 75 bp, Homo sapiens
atagatacctgaccaaaagtatgtgtttcagagaccaaggtcttcaaagcagcagagtgaaggagaaaagacgat

SEQ ID NO: 33343 - DNA, 76 bp, Homo sapiens
ccaaaagtatgtgtttcagagaccaaggtcttcaaagcagcagagtgaaggagaaaagacgattggtcacacacaa

SEQ ID NO: 33344 - DNA, 79 bp, Homo sapiens
tgtgtttcagagaccaaggtcttcaaagcagcagagtgaaggagaaaagacgattggtcacacacaagttggctatcta

SEQ ID NO: 33345 - DNA, 77 bp, Homo sapiens
agaccaaggtcttcaaagcagcagagtgaaggagaaaagacgattggtcacacacaagttggctatctatttgacaa

SEQ ID NO: 33346 - DNA, 80 bp, Homo sapiens
tcttcaaagcagcagagtgaaggagaaaagacgattggtcacacacaagttggctatctatttgacaactgagtacacta

SEQ ID NO: 33347 - DNA, 78 bp, Homo sapiens
cagagtgaaggagaaaagacgattggtcacacacaagttggctatctatttgacaactgagtacactagcaaaataga

SEQ ID NO: 33348 - DNA, 77 bp, Homo sapiens
aaggagaaaagacgattggtcacacacaagttggctatctatttgacaactgagtacactagcaaaatagagcgtgc

SEQ ID NO: 33349 - DNA, 80 bp, Homo sapiens
agaaaagacgattggtcacacacaagttggctatctatttgacaactgagtacactagcaaaatagagcgtgctgcacag

SEQ ID NO: 33350 - DNA, 79 bp, Homo sapiens
aagacgattggtcacacacaagttggctatctatttgacaactgagtacactagcaaaatagagcgtgctgcacaggtt

SEQ ID NO: 33351 - DNA, 78 bp, Homo sapiens
attggtcacacacaagttggctatctatttgacaactgagtacactagcaaaatagagcgtgctgcacaggttttcct

SEQ ID NO: 33352 - DNA, 79 bp, Homo sapiens
acacacaagttggctatctatttgacaactgagtacactagcaaaatagagcgtgctgcacaggttttccttctacaga

SEQ ID NO: 33353 - DNA, 79 bp, Homo sapiens
acacaagttggctatctatttgacaactgagtacactagcaaaatagagcgtgctgcacaggttttccttctacagaga

SEQ ID NO: 33354 - DNA, 79 bp, Homo sapiens
agttggctatctatttgacaactgagtacactagcaaaatagagcgtgctgcacaggttttccttctacagagacatgg

SEQ ID NO: 33355 - DNA, 79 bp, Homo sapiens
tatctatttgacaactgagtacactagcaaaatagagcgtgctgcacaggttttccttctacagagacatgggagaaat

SEQ ID NO: 33356 - DNA, 78 bp, Homo sapiens
tatttgacaactgagtacactagcaaaatagagcgtgctgcacaggttttccttctacagagacatgggagaaattaa

SEQ ID NO: 33357 - DNA, 75 bp, Homo sapiens
aactgagtacactagcaaaatagagcgtgctgcacaggttttccttctacagagacatgggagaaattaacagtt

SEQ ID NO: 33358 - DNA, 75 bp, Homo sapiens
actgagtacactagcaaaatagagcgtgctgcacaggttttccttctacagagacatgggagaaattaacagttt

SEQ ID NO: 33359 - DNA, 76 bp, Homo sapiens
tacactagcaaaatagagcgtgctgcacaggttttccttctacagagacatgggagaaattaacagttttggctac

SEQ ID NO: 33360 - DNA, 74 bp, Homo sapiens
aaaatagagcgtgctgcacaggttttccttctacagagacatgggagaaattaacagttttggctaccatcctc

SEQ ID NO: 33361 - DNA, 70 bp, Homo sapiens
ttttccttctacagagacatgggagaaattaacagttttggctaccatcctccttataaacaacctctaa

SEQ ID NO: 33362 - DNA, 71 bp, Homo sapiens
agagacatgggagaaattaacagttttggctaccatcctccttataaacaacctctaacaacttgtggaca

SEQ ID NO: 33363 - DNA, 70 bp, Homo sapiens
agaaattaacagttttggctaccatcctccttataaacaacctctaacaacttgtggacatcaacaaaca

SEQ ID NO: 33364 - DNA, 73 bp, Homo sapiens
ttaacagttttggctaccatcctccttataaacaacctctaacaacttgtggacatcaacaaacatgtgctgg

SEQ ID NO: 33365 - DNA, 76 bp, Homo sapiens
tggctaccatcctccttataaacaacctctaacaacttgtggacatcaacaaacatgtgctggggacggtggctca

SEQ ID NO: 33366 - DNA, 73 bp, Homo sapiens
atatatatattaaccactatatgacaatggattctaaagaaccacaaatttgccatatgttttaaaaagctat

SEQ ID NO: 33367 - DNA, 75 bp, Homo sapiens
taaccactatatgacaatggattctaaagaaccacaaatttgccatatgttttaaaaagctattccttgcattga

SEQ ID NO: 33368 - DNA, 74 bp, Homo sapiens
gacaatggattctaaagaaccacaaatttgccatatgttttaaaaagctattccttgcattgaacattcactgt

SEQ ID NO: 33369 - DNA, 73 bp, Homo sapiens
ggattctaaagaaccacaaatttgccatatgttttaaaaagctattccttgcattgaacattcactgttggta

SEQ ID NO: 33370 - DNA, 73 bp, Homo sapiens
gccatatgttttaaaaagctattccttgcattgaacattcactgttggtaatggataaacctctacttaagaa

SEQ ID NO: 33371 - DNA, 74 bp, Homo sapiens
taaaaagctattccttgcattgaacattcactgttggtaatggataaacctctacttaagaaaaacagagctga

SEQ ID NO: 33372 - DNA, 76 bp, Homo sapiens
tattccttgcattgaacattcactgttggtaatggataaacctctacttaagaaaaacagagctgactacagatac

SEQ ID NO: 33373 - DNA, 78 bp, Homo sapiens
attgaacattcactgttggtaatggataaacctctacttaagaaaaacagagctgactacagatacctcatagatgca

SEQ ID NO: 33374 - DNA, 76 bp, Homo sapiens
actgttggtaatggataaacctctacttaagaaaaacagagctgactacagatacctcatagatgcaggtatgtta

SEQ ID NO: 33375 - DNA, 76 bp, Homo sapiens
gtaatggataaacctctacttaagaaaaacagagctgactacagatacctcatagatgcaggtatgttaaaacaga

SEQ ID NO: 33376 - DNA, 74 bp, Homo sapiens
aaacctctacttaagaaaaacagagctgactacagatacctcatagatgcaggtatgttaaaacagactaatag

SEQ ID NO: 33377 - DNA, 78 bp, Homo sapiens
taagaaaaacagagctgactacagatacctcatagatgcaggtatgttaaaacagactaatagtctcaggccttctta

SEQ ID NO: 33378 - DNA, 78 bp, Homo sapiens
ctgactacagatacctcatagatgcaggtatgttaaaacagactaatagtctcaggccttcttaggtcaacaactaca

SEQ ID NO: 33379 - DNA, 76 bp, Homo sapiens
agatacctcatagatgcaggtatgttaaaacagactaatagtctcaggccttcttaggtcaacaactacaacatat

SEQ ID NO: 33380 - DNA, 76 bp, Homo sapiens
atagatgcaggtatgttaaaacagactaatagtctcaggccttcttaggtcaacaactacaacatattgtctgtta

SEQ ID NO: 33381 - DNA, 74 bp, Homo sapiens
tgttaaaacagactaatagtctcaggccttcttaggtcaacaactacaacatattgtctgttaattacccatca

SEQ ID NO: 33382 - DNA, 73 bp, Homo sapiens
aacagactaatagtctcaggccttcttaggtcaacaactacaacatattgtctgttaattacccatcaggtta

SEQ ID NO: 33383 - DNA, 75 bp, Homo sapiens
tctcaggccttcttaggtcaacaactacaacatattgtctgttaattacccatcaggttaggccataagcagatt

SEQ ID NO: 33384 - DNA, 75 bp, Homo sapiens
ttcttaggtcaacaactacaacatattgtctgttaattacccatcaggttaggccataagcagatttcactagta

SEQ ID NO: 33385 - DNA, 74 bp, Homo sapiens
aacaactacaacatattgtctgttaattacccatcaggttaggccataagcagatttcactagtaggccaacat

SEQ ID NO: 33386 - DNA, 76 bp, Homo sapiens
aacatattgtctgttaattacccatcaggttaggccataagcagatttcactagtaggccaacattcaggctagga

SEQ ID NO: 33387 - DNA, 73 bp, Homo sapiens
tacccatcaggttaggccataagcagatttcactagtaggccaacattcaggctaggagggaagaaaaaagga

SEQ ID NO: 33388 - DNA, 71 bp, Homo sapiens
aagcagatttcactagtaggccaacattcaggctaggagggaagaaaaaaggaatggaaggaaaatgcaag

SEQ ID NO: 33389 - DNA, 70 bp, Homo sapiens
tagtaggccaacattcaggctaggagggaagaaaaaaggaatggaaggaaaatgcaaggagaaagtatta

SEQ ID NO: 33390 - DNA, 69 bp, Homo sapiens
taggagggaagaaaaaaggaatggaaggaaaatgcaaggagaaagtattagggagtgaacatggtaaca

SEQ ID NO: 33391 - DNA, 71 bp, Homo sapiens
aaaatgcaaggagaaagtattagggagtgaacatggtaacagtaactctttgagggcaacacagtgtgggg

SEQ ID NO: 33392 - DNA, 73 bp, Homo sapiens
aagtattagggagtgaacatggtaacagtaactctttgagggcaacacagtgtggggtcccataagtgatcaa

SEQ ID NO: 33393 - DNA, 73 bp, Homo sapiens
gagtgaacatggtaacagtaactctttgagggcaacacagtgtggggtcccataagtgatcaacccctaacca

SEQ ID NO: 33394 - DNA, 69 bp, Homo sapiens
atggtaacagtaactctttgagggcaacacagtgtggggtcccataagtgatcaacccctaaccaaaaa

SEQ ID NO: 33395 - DNA, 69 bp, Homo sapiens
agtaactctttgagggcaacacagtgtggggtcccataagtgatcaacccctaaccaaaaagctctaaa

SEQ ID NO: 33396 - DNA, 69 bp, Homo sapiens
ggcaacacagtgtggggtcccataagtgatcaacccctaaccaaaaagctctaaaaatctataatactt

SEQ ID NO: 33397 - DNA, 67 bp, Homo sapiens
acagtgtggggtcccataagtgatcaacccctaaccaaaaagctctaaaaatctataatactttctt

SEQ ID NO: 33398 - DNA, 65 bp, Homo sapiens
ggtcccataagtgatcaacccctaaccaaaaagctctaaaaatctataatactttcttttttctt

SEQ ID NO: 33399 - DNA, 80 bp, Homo sapiens
cctaagtgctggaatcacaggcgtgcaccatgatgcctggctctataatatattttacacccttagcctcaactcttcca

SEQ ID NO: 33400 - DNA, 78 bp, Homo sapiens
tggaatcacaggcgtgcaccatgatgcctggctctataatatattttacacccttagcctcaactcttccaaaataaa

SEQ ID NO: 33401 - DNA, 76 bp, Homo sapiens
aggcgtgcaccatgatgcctggctctataatatattttacacccttagcctcaactcttccaaaataaataattca

SEQ ID NO: 33402 - DNA, 75 bp, Homo sapiens
atgatgcctggctctataatatattttacacccttagcctcaactcttccaaaataaataattcagtgaaggaga

SEQ ID NO: 33403 - DNA, 72 bp, Homo sapiens
cctggctctataatatattttacacccttagcctcaactcttccaaaataaataattcagtgaaggagaata

SEQ ID NO: 33404 - DNA, 71 bp, Homo sapiens
atatattttacacccttagcctcaactcttccaaaataaataattcagtgaaggagaatatattccaaaga

SEQ ID NO: 33405 - DNA, 71 bp, Homo sapiens
acccttagcctcaactcttccaaaataaataattcagtgaaggagaatatattccaaagataagcactcct

SEQ ID NO: 33406 - DNA, 74 bp, Homo sapiens
gcctcaactcttccaaaataaataattcagtgaaggagaatatattccaaagataagcactccttttgttgtca

SEQ ID NO: 33407 - DNA, 72 bp, Homo sapiens
ttcagtgaaggagaatatattccaaagataagcactccttttgttgtcaaaactattagcagtttacgaaaa

SEQ ID NO: 33408 - DNA, 71 bp, Homo sapiens
gagaatatattccaaagataagcactccttttgttgtcaaaactattagcagtttacgaaaatatttacga

SEQ ID NO: 33409 - DNA, 70 bp, Homo sapiens
tccaaagataagcactccttttgttgtcaaaactattagcagtttacgaaaatatttacgacgagtacga

SEQ ID NO: 33410 - DNA, 69 bp, Homo sapiens
gataagcactccttttgttgtcaaaactattagcagtttacgaaaatatttacgacgagtacgataacc

SEQ ID NO: 33411 - DNA, 68 bp, Homo sapiens
ttgttgtcaaaactattagcagtttacgaaaatatttacgacgagtacgataaccttttaagagttca

SEQ ID NO: 33412 - DNA, 66 bp, Homo sapiens
ttagcagtttacgaaaatatttacgacgagtacgataaccttttaagagttcagtagtaaccttct

SEQ ID NO: 33413 - DNA, 64 bp, Homo sapiens
acgaaaatatttacgacgagtacgataaccttttaagagttcagtagtaaccttctttttataa

SEQ ID NO: 33414 - DNA, 69 bp, Homo sapiens
tacgacgagtacgataaccttttaagagttcagtagtaaccttctttttataaattcagccaagatatc

SEQ ID NO: 33415 - DNA, 69 bp, Homo sapiens
acgataaccttttaagagttcagtagtaaccttctttttataaattcagccaagatatctaacaattca

SEQ ID NO: 33416 - DNA, 71 bp, Homo sapiens
agagttcagtagtaaccttctttttataaattcagccaagatatctaacaattcaatataaacaagcaccc

SEQ ID NO: 33417 - DNA, 71 bp, Homo sapiens
tcagtagtaaccttctttttataaattcagccaagatatctaacaattcaatataaacaagcaccctattt

SEQ ID NO: 33418 - DNA, 71 bp, Homo sapiens
ctttttataaattcagccaagatatctaacaattcaatataaacaagcaccctattttactgcactaattt

SEQ ID NO: 33419 - DNA, 72 bp, Homo sapiens
taaattcagccaagatatctaacaattcaatataaacaagcaccctattttactgcactaatttttaaaagc

SEQ ID NO: 33420 - DNA, 70 bp, Homo sapiens
ccaagatatctaacaattcaatataaacaagcaccctattttactgcactaatttttaaaagcttttctc

SEQ ID NO: 33421 - DNA, 69 bp, Homo sapiens
caattcaatataaacaagcaccctattttactgcactaatttttaaaagcttttctctgtaattactta

SEQ ID NO: 33422 - DNA, 67 bp, Homo sapiens
atataaacaagcaccctattttactgcactaatttttaaaagcttttctctgtaattacttaacttc

SEQ ID NO: 33423 - DNA, 73 bp, Homo sapiens
ttctctgtaattacttaacttctatattaatataaaacatcctcattcccatttactctgaacctcagtacca

SEQ ID NO: 33424 - DNA, 71 bp, Homo sapiens
ttacttaacttctatattaatataaaacatcctcattcccatttactctgaacctcagtaccaactttgcc

SEQ ID NO: 33425 - DNA, 72 bp, Homo sapiens
aacttctatattaatataaaacatcctcattcccatttactctgaacctcagtaccaactttgcctcaaata

SEQ ID NO: 33426 - DNA, 71 bp, Homo sapiens
atataaaacatcctcattcccatttactctgaacctcagtaccaactttgcctcaaatatttacctcctaa

SEQ ID NO: 33427 - DNA, 67 bp, Homo sapiens
ttcccatttactctgaacctcagtaccaactttgcctcaaatatttacctcctaaaaaatcaaaact

SEQ ID NO: 33428 - DNA, 66 bp, Homo sapiens
gaacctcagtaccaactttgcctcaaatatttacctcctaaaaaatcaaaacttcataaacaaacg

SEQ ID NO: 33429 - DNA, 64 bp, Homo sapiens
gcctcaaatatttacctcctaaaaaatcaaaacttcataaacaaacgggtccttacctttcaaa

SEQ ID NO: 33430 - DNA, 64 bp, Homo sapiens
ttacctcctaaaaaatcaaaacttcataaacaaacgggtccttacctttcaaaagaaatttgca

SEQ ID NO: 33431 - DNA, 65 bp, Homo sapiens
aaaatcaaaacttcataaacaaacgggtccttacctttcaaaagaaatttgcaatgaattccagg

SEQ ID NO: 33432 - DNA, 69 bp, Homo sapiens
cttcataaacaaacgggtccttacctttcaaaagaaatttgcaatgaattccagggagactcatataaa

SEQ ID NO: 33433 - DNA, 68 bp, Homo sapiens
aacaaacgggtccttacctttcaaaagaaatttgcaatgaattccagggagactcatataaagtgaac

SEQ ID NO: 33434 - DNA, 71 bp, Homo sapiens
ggtccttacctttcaaaagaaatttgcaatgaattccagggagactcatataaagtgaactgaaattgaaa

SEQ ID NO: 33435 - DNA, 73 bp, Homo sapiens
aaagaaatttgcaatgaattccagggagactcatataaagtgaactgaaattgaaataaaatccattacagga

SEQ ID NO: 33436 - DNA, 72 bp, Homo sapiens
aatttgcaatgaattccagggagactcatataaagtgaactgaaattgaaataaaatccattacaggaaaaa

SEQ ID NO: 33437 - DNA, 69 bp, Homo sapiens
ccagggagactcatataaagtgaactgaaattgaaataaaatccattacaggaaaaaaaatccgaagac

SEQ ID NO: 33438 - DNA, 72 bp, Homo sapiens
gactcatataaagtgaactgaaattgaaataaaatccattacaggaaaaaaaatccgaagactttcatagca

SEQ ID NO: 33439 - DNA, 71 bp, Homo sapiens
tgaactgaaattgaaataaaatccattacaggaaaaaaaatccgaagactttcatagcaaatctattcaag

SEQ ID NO: 33440 - DNA, 71 bp, Homo sapiens
ttgaaataaaatccattacaggaaaaaaaatccgaagactttcatagcaaatctattcaagttcacatttc

SEQ ID NO: 33441 - DNA, 71 bp, Homo sapiens
aaatccattacaggaaaaaaaatccgaagactttcatagcaaatctattcaagttcacatttcttcaacac

SEQ ID NO: 33442 - DNA, 77 bp, Homo sapiens
aatccgaagactttcatagcaaatctattcaagttcacatttcttcaacactaatccaagtcttaatagtcacatca

SEQ ID NO: 33443 - DNA, 78 bp, Homo sapiens
gcaaatctattcaagttcacatttcttcaacactaatccaagtcttaatagtcacatcattaatactcttaatactca

SEQ ID NO: 33444 - DNA, 75 bp, Homo sapiens
gttcacatttcttcaacactaatccaagtcttaatagtcacatcattaatactcttaatactcacatttttaaca

SEQ ID NO: 33445 - DNA, 77 bp, Homo sapiens
tcttcaacactaatccaagtcttaatagtcacatcattaatactcttaatactcacatttttaacattctgccacca

SEQ ID NO: 33446 - DNA, 77 bp, Homo sapiens
gtcttaatagtcacatcattaatactcttaatactcacatttttaacattctgccaccagcaactactactgttcaa

SEQ ID NO: 33447 - DNA, 76 bp, Homo sapiens
gtcacatcattaatactcttaatactcacatttttaacattctgccaccagcaactactactgttcaaataaactc

SEQ ID NO: 33448 - DNA, 75 bp, Homo sapiens
atactcttaatactcacatttttaacattctgccaccagcaactactactgttcaaataaactctggttcacaca

SEQ ID NO: 33449 - DNA, 79 bp, Homo sapiens
taatactcacatttttaacattctgccaccagcaactactactgttcaaataaactctggttcacacactgatgtctgc

SEQ ID NO: 33450 - DNA, 80 bp, Homo sapiens
tttttaacattctgccaccagcaactactactgttcaaataaactctggttcacacactgatgtctgcttcacacatcaa

SEQ ID NO: 33451 - DNA, 82 bp, Homo sapiens
ttctgccaccagcaactactactgttcaaataaactctggttcacacactgatgtctgcttcacacatcaacttgcttctcc

SEQ ID NO: 33452 - DNA, 80 bp, Homo sapiens
aactactactgttcaaataaactctggttcacacactgatgtctgcttcacacatcaacttgcttctcccacacttgcac

SEQ ID NO: 33453 - DNA, 83 bp, Homo sapiens
ttcaaataaactctggttcacacactgatgtctgcttcacacatcaacttgcttctcccacacttgcacttgcttcccacaga

SEQ ID NO: 33454 - DNA, 86 bp, Homo sapiens
tctggttcacacactgatgtctgcttcacacatcaacttgcttctcccacacttgcacttgcttcccacagagctgtcataatttc

SEQ ID NO: 33455 - DNA, 84 bp, Homo sapiens
acacactgatgtctgcttcacacatcaacttgcttctcccacacttgcacttgcttcccacagagctgtcataatttcttacaa

SEQ ID NO: 33456 - DNA, 80 bp, Homo sapiens
atgtctgcttcacacatcaacttgcttctcccacacttgcacttgcttcccacagagctgtcataatttcttacaagttt

SEQ ID NO: 33457 - DNA, 77 bp, Homo sapiens
acatcaacttgcttctcccacacttgcacttgcttcccacagagctgtcataatttcttacaagttttaccaggctg

SEQ ID NO: 33458 - DNA, 75 bp, Homo sapiens
cttctcccacacttgcacttgcttcccacagagctgtcataatttcttacaagttttaccaggctgtgtcccaaa

SEQ ID NO: 33459 - DNA, 74 bp, Homo sapiens
acacttgcacttgcttcccacagagctgtcataatttcttacaagttttaccaggctgtgtcccaaaataaaga

SEQ ID NO: 33460 - DNA, 74 bp, Homo sapiens
ttgcttcccacagagctgtcataatttcttacaagttttaccaggctgtgtcccaaaataaagagaatggattc

SEQ ID NO: 33461 - DNA, 69 bp, Homo sapiens
taatttcttacaagttttaccaggctgtgtcccaaaataaagagaatggattcttccgttctgaggatt

SEQ ID NO: 33462 - DNA, 71 bp, Homo sapiens
aggctgtgtcccaaaataaagagaatggattcttccgttctgaggatttttgacgtttctccgccaaatga

SEQ ID NO: 33463 - DNA, 69 bp, Homo sapiens
ccaaaataaagagaatggattcttccgttctgaggatttttgacgtttctccgccaaatgagggaggag

SEQ ID NO: 33464 - DNA, 72 bp, Homo sapiens
attcttccgttctgaggatttttgacgtttctccgccaaatgagggaggaggcatttgcactccaatagtag

SEQ ID NO: 33465 - DNA, 71 bp, Homo sapiens
atttttgacgtttctccgccaaatgagggaggaggcatttgcactccaatagtagtttcaagacccaacta

SEQ ID NO: 33466 - DNA, 73 bp, Homo sapiens
tttctccgccaaatgagggaggaggcatttgcactccaatagtagtttcaagacccaactatcatttccaaaa

SEQ ID NO: 33467 - DNA, 73 bp, Homo sapiens
aaatgagggaggaggcatttgcactccaatagtagtttcaagacccaactatcatttccaaaacccatctcta

SEQ ID NO: 33468 - DNA, 82 bp, Homo sapiens
cacacacattctctgcctattctgccaatggactctgaattaagtggcctgaagatttctcgtatctgccctgcaagtcttc

SEQ ID NO: 33469 - DNA, 81 bp, Homo sapiens
acattctctgcctattctgccaatggactctgaattaagtggcctgaagatttctcgtatctgccctgcaagtcttcttgc

SEQ ID NO: 33470 - DNA, 81 bp, Homo sapiens
tattctgccaatggactctgaattaagtggcctgaagatttctcgtatctgccctgcaagtcttcttgcccctgctgtgaa

SEQ ID NO: 33471 - DNA, 80 bp, Homo sapiens
aatggactctgaattaagtggcctgaagatttctcgtatctgccctgcaagtcttcttgcccctgctgtgaagtctcaga

SEQ ID NO: 33472 - DNA, 77 bp, Homo sapiens
aattaagtggcctgaagatttctcgtatctgccctgcaagtcttcttgcccctgctgtgaagtctcagagccttaaa

SEQ ID NO: 33473 - DNA, 79 bp, Homo sapiens
ctgaagatttctcgtatctgccctgcaagtcttcttgcccctgctgtgaagtctcagagccttaaatgaggaactataa

SEQ ID NO: 33474 - DNA, 78 bp, Homo sapiens
tcgtatctgccctgcaagtcttcttgcccctgctgtgaagtctcagagccttaaatgaggaactataacccaggatat

SEQ ID NO: 33475 - DNA, 76 bp, Homo sapiens
ctgcaagtcttcttgcccctgctgtgaagtctcagagccttaaatgaggaactataacccaggatatttatgggtc

SEQ ID NO: 33476 - DNA, 77 bp, Homo sapiens
ttcttgcccctgctgtgaagtctcagagccttaaatgaggaactataacccaggatatttatgggtctgtctagaca

SEQ ID NO: 33477 - DNA, 77 bp, Homo sapiens
tgctgtgaagtctcagagccttaaatgaggaactataacccaggatatttatgggtctgtctagacaccattatttc

SEQ ID NO: 33478 - DNA, 75 bp, Homo sapiens
ctgtgaagtctcagagccttaaatgaggaactataacccaggatatttatgggtctgtctagacaccattatttc

SEQ ID NO: 33479 - DNA, 76 bp, Homo sapiens
aagtctcagagccttaaatgaggaactataacccaggatatttatgggtctgtctagacaccattatttctgagca

SEQ ID NO: 33480 - DNA, 75 bp, Homo sapiens
agccttaaatgaggaactataacccaggatatttatgggtctgtctagacaccattatttctgagcagacgccaa

SEQ ID NO: 33481 - DNA, 76 bp, Homo sapiens
taaatgaggaactataacccaggatatttatgggtctgtctagacaccattatttctgagcagacgccaaagacaa

SEQ ID NO: 33482 - DNA, 77 bp, Homo sapiens
actataacccaggatatttatgggtctgtctagacaccattatttctgagcagacgccaaagacaagtgtaacagca

SEQ ID NO: 33483 - DNA, 77 bp, Homo sapiens
aacccaggatatttatgggtctgtctagacaccattatttctgagcagacgccaaagacaagtgtaacagcaggcaa

SEQ ID NO: 33484 - DNA, 81 bp, Homo sapiens
tatttatgggtctgtctagacaccattatttctgagcagacgccaaagacaagtgtaacagcaggcaacatgacacttgta

SEQ ID NO: 33485 - DNA, 80 bp, Homo sapiens
tttatgggtctgtctagacaccattatttctgagcagacgccaaagacaagtgtaacagcaggcaacatgacacttgtaa

SEQ ID NO: 33486 - DNA, 79 bp, Homo sapiens
gtctgtctagacaccattatttctgagcagacgccaaagacaagtgtaacagcaggcaacatgacacttgtaagttaaa

SEQ ID NO: 33487 - DNA, 77 bp, Homo sapiens
accattatttctgagcagacgccaaagacaagtgtaacagcaggcaacatgacacttgtaagttaaaccaaatgaga

SEQ ID NO: 33488 - DNA, 76 bp, Homo sapiens
gccaaagacaagtgtaacagcaggcaacatgacacttgtaagttaaaccaaatgagaggatacagtcagtaataaa

SEQ ID NO: 33489 - DNA, 74 bp, Homo sapiens
agacaagtgtaacagcaggcaacatgacacttgtaagttaaaccaaatgagaggatacagtcagtaataaaaag

SEQ ID NO: 33490 - DNA, 72 bp, Homo sapiens
aacagcaggcaacatgacacttgtaagttaaaccaaatgagaggatacagtcagtaataaaaagttttcatt

SEQ ID NO: 33491 - DNA, 71 bp, Homo sapiens
catgacacttgtaagttaaaccaaatgagaggatacagtcagtaataaaaagttttcatttacagtttgtg

SEQ ID NO: 33492 - DNA, 67 bp, Homo sapiens
aatgagaggatacagtcagtaataaaaagttttcatttacagtttgtggggggaaagccgtaggaaa

SEQ ID NO: 33493 - DNA, 62 bp, Homo sapiens
aataaaaagttttcatttacagtttgtggggggaaagccgtaggaaagacccgttcttatgt

SEQ ID NO: 33494 - DNA, 65 bp, Homo sapiens
tttcatttacagtttgtggggggaaagccgtaggaaagacccgttcttatgtttcaggtggtatt

SEQ ID NO: 33495 - DNA, 69 bp, Homo sapiens
gggaaagccgtaggaaagacccgttcttatgtttcaggtggtattttgtatgtaaaccatatggcaata

SEQ ID NO: 33496 - DNA, 72 bp, Homo sapiens
taggaaagacccgttcttatgtttcaggtggtattttgtatgtaaaccatatggcaataggcaattctgaaa

SEQ ID NO: 33497 - DNA, 71 bp, Homo sapiens
aagacccgttcttatgtttcaggtggtattttgtatgtaaaccatatggcaataggcaattctgaaaacca

SEQ ID NO: 33498 - DNA, 75 bp, Homo sapiens
tatgtttcaggtggtattttgtatgtaaaccatatggcaataggcaattctgaaaaccatggaattaaagccatc

SEQ ID NO: 33499 - DNA, 75 bp, Homo sapiens
ggtattttgtatgtaaaccatatggcaataggcaattctgaaaaccatggaattaaagccatccaatattaggca

SEQ ID NO: 33500 - DNA, 75 bp, Homo sapiens
catatggcaataggcaattctgaaaaccatggaattaaagccatccaatattaggcaacagggcaataaataaat

SEQ ID NO: 33501 - DNA, 71 bp, Homo sapiens
aataggcaattctgaaaaccatggaattaaagccatccaatattaggcaacagggcaataaataaattccc

SEQ ID NO: 33502 - DNA, 69 bp, Homo sapiens
atggaattaaagccatccaatattaggcaacagggcaataaataaattccctcctaagactttaaaata

SEQ ID NO: 33503 - DNA, 73 bp, Homo sapiens
taggcaacagggcaataaataaattccctcctaagactttaaaatatgaaacaaaactcagcaatctgagcag

SEQ ID NO: 33504 - DNA, 72 bp, Homo sapiens
gcaataaataaattccctcctaagactttaaaatatgaaacaaaactcagcaatctgagcaggtttgaccac

SEQ ID NO: 33505 - DNA, 71 bp, Homo sapiens
aattccctcctaagactttaaaatatgaaacaaaactcagcaatctgagcaggtttgaccacttgttcaat

SEQ ID NO: 33506 - DNA, 76 bp, Homo sapiens
tcctaagactttaaaatatgaaacaaaactcagcaatctgagcaggtttgaccacttgttcaattctgtagtgata

SEQ ID NO: 33507 - DNA, 78 bp, Homo sapiens
aatatgaaacaaaactcagcaatctgagcaggtttgaccacttgttcaattctgtagtgataattactatgatttgat

SEQ ID NO: 33508 - DNA, 79 bp, Homo sapiens
acaaaactcagcaatctgagcaggtttgaccacttgttcaattctgtagtgataattactatgatttgattgagataaa

SEQ ID NO: 33509 - DNA, 79 bp, Homo sapiens
cagcaatctgagcaggtttgaccacttgttcaattctgtagtgataattactatgatttgattgagataaaagttataa

SEQ ID NO: 33510 - DNA, 74 bp, Homo sapiens
gagcaggtttgaccacttgttcaattctgtagtgataattactatgatttgattgagataaaagttataaaacc

SEQ ID NO: 33511 - DNA, 74 bp, Homo sapiens
gaccacttgttcaattctgtagtgataattactatgatttgattgagataaaagttataaaaccttgtatcaag

SEQ ID NO: 33512 - DNA, 74 bp, Homo sapiens
tcaattctgtagtgataattactatgatttgattgagataaaagttataaaaccttgtatcaagtatgttttgt

SEQ ID NO: 33513 - DNA, 70 bp, Homo sapiens
agtgataattactatgatttgattgagataaaagttataaaaccttgtatcaagtatgttttgtttttac

SEQ ID NO: 33514 - DNA, 70 bp, Homo sapiens
tatgatttgattgagataaaagttataaaaccttgtatcaagtatgttttgtttttactttttcactgtc

SEQ ID NO: 33515 - DNA, 67 bp, Homo sapiens
gattgagataaaagttataaaaccttgtatcaagtatgttttgtttttactttttcactgtcttatt

SEQ ID NO: 33516 - DNA, 68 bp, Homo sapiens
gttataaaaccttgtatcaagtatgttttgtttttactttttcactgtcttattttaatgtcagaata

SEQ ID NO: 33517 - DNA, 71 bp, Homo sapiens
ccttgtatcaagtatgttttgtttttactttttcactgtcttattttaatgtcagaataaatatgtattga

SEQ ID NO: 33518 - DNA, 70 bp, Homo sapiens
gtatgttttgtttttactttttcactgtcttattttaatgtcagaataaatatgtattgaagtagtagta

SEQ ID NO: 33519 - DNA, 72 bp, Homo sapiens
tttactttttcactgtcttattttaatgtcagaataaatatgtattgaagtagtagtatactgaggtcgttg

SEQ ID NO: 33520 - DNA, 75 bp, Homo sapiens
ttcactgtcttattttaatgtcagaataaatatgtattgaagtagtagtatactgaggtcgttggcaaagcctgg

SEQ ID NO: 33521 - DNA, 74 bp, Homo sapiens
ttattttaatgtcagaataaatatgtattgaagtagtagtatactgaggtcgttggcaaagcctgggtcctgtc

SEQ ID NO: 33522 - DNA, 75 bp, Homo sapiens
atgtcagaataaatatgtattgaagtagtagtatactgaggtcgttggcaaagcctgggtcctgtcctctcgttc

SEQ ID NO: 33523 - DNA, 72 bp, Homo sapiens
aaatatgtattgaagtagtagtatactgaggtcgttggcaaagcctgggtcctgtcctctcgttctcctccc

SEQ ID NO: 33524 - DNA, 77 bp, Homo sapiens
ttggcaaagcctgggtcctgtcctctcgttctcctccccagacagcatgagtttcaccacttgctccaacttctcca

SEQ ID NO: 33525 - DNA, 76 bp, Homo sapiens
tgggtcctgtcctctcgttctcctccccagacagcatgagtttcaccacttgctccaacttctccaccaattactg

SEQ ID NO: 33526 - DNA, 76 bp, Homo sapiens
tgtcctctcgttctcctccccagacagcatgagtttcaccacttgctccaacttctccaccaattactggtccctg

SEQ ID NO: 33527 - DNA, 77 bp, Homo sapiens
cccagacagcatgagtttcaccacttgctccaacttctccaccaattactggtccctgggctctgtccagccgccca

SEQ ID NO: 33528 - DNA, 76 bp, Homo sapiens
atgagtttcaccacttgctccaacttctccaccaattactggtccctgggctctgtccagccgcccagctggtcaa

SEQ ID NO: 33529 - DNA, 77 bp, Homo sapiens
acttgctccaacttctccaccaattactggtccctgggctctgtccagccgcccagctggtcaacagcgtggccaga

SEQ ID NO: 33530 - DNA, 81 bp, Homo sapiens
ttctccaccaattactggtccctgggctctgtccagccgcccagctggtcaacagcgtggccagagcctatgcacgtgcca

SEQ ID NO: 33531 - DNA, 78 bp, Homo sapiens
accaattactggtccctgggctctgtccagccgcccagctggtcaacagcgtggccagagcctatgcacgtgccaggg

SEQ ID NO: 33532 - DNA, 82 bp, Homo sapiens
tctgtccagccgcccagctggtcaacagcgtggccagagcctatgcacgtgccaggggctctggtttccagatctccgtgtc

SEQ ID NO: 33533 - DNA, 82 bp, Homo sapiens
cagctggtcaacagcgtggccagagcctatgcacgtgccaggggctctggtttccagatctccgtgtcctgctacaccagct

SEQ ID NO: 33534 - DNA, 81 bp, Homo sapiens
ggtcaacagcgtggccagagcctatgcacgtgccaggggctctggtttccagatctccgtgtcctgctacaccagcttctg

SEQ ID NO: 33535 - DNA, 79 bp, Homo sapiens
ccagagcctatgcacgtgccaggggctctggtttccagatctccgtgtcctgctacaccagcttctgggatggcttggg

SEQ ID NO: 33536 - DNA, 77 bp, Homo sapiens
cctatgcacgtgccaggggctctggtttccagatctccgtgtcctgctacaccagcttctgggatggcttggggtcc

SEQ ID NO: 33537 - DNA, 72 bp, Homo sapiens
aggggctctggtttccagatctccgtgtcctgctacaccagcttctgggatggcttggggtcccggggcctg

SEQ ID NO: 33538 - DNA, 74 bp, Homo sapiens
gtttccagatctccgtgtcctgctacaccagcttctgggatggcttggggtcccggggcctggccgcagggatg

SEQ ID NO: 33539 - DNA, 74 bp, Homo sapiens
agatctccgtgtcctgctacaccagcttctgggatggcttggggtcccggggcctggccgcagggatggctggg

SEQ ID NO: 33540 - DNA, 74 bp, Homo sapiens
ctgctacaccagcttctgggatggcttggggtcccggggcctggccgcagggatggctgggggcctggcaggaa

SEQ ID NO: 33541 - DNA, 72 bp, Homo sapiens
accagcttctgggatggcttggggtcccggggcctggccgcagggatggctgggggcctggcaggaatagga

SEQ ID NO: 33542 - DNA, 73 bp, Homo sapiens
atggcttggggtcccggggcctggccgcagggatggctgggggcctggcaggaataggaggcatccagaacga

SEQ ID NO: 33543 - DNA, 73 bp, Homo sapiens
gggtcccggggcctggccgcagggatggctgggggcctggcaggaataggaggcatccagaacgagaaggaga

SEQ ID NO: 33544 - DNA, 78 bp, Homo sapiens
acctggcctcctacctggacagactgaggagcctggagatcgagaactggaggctggagagcaaaatctgggagcacc

SEQ ID NO: 33545 - DNA, 80 bp, Homo sapiens
tcctacctggacagactgaggagcctggagatcgagaactggaggctggagagcaaaatctgggagcacctggagaagaa

SEQ ID NO: 33546 - DNA, 90 bp, Homo sapiens
tgctgctgatgactttagagtcaagtatgagacagactctcaggcgccagtctgtggagagcagcattacgggctctgcaaggtcactga

SEQ ID NO: 33547 - DNA, 87 bp, Homo sapiens
atgactttagagtcaagtatgagacagactctcaggcgccagtctgtggagagcagcattacgggctctgcaaggtcactgatgaca

SEQ ID NO: 33548 - DNA, 88 bp, Homo sapiens
agagtcaagtatgagacagactctcaggcgccagtctgtggagagcagcattacgggctctgcaaggtcactgatgacaccaatgtca

SEQ ID NO: 33549 - DNA, 87 bp, Homo sapiens
agacagactctcaggcgccagtctgtggagagcagcattacgggctctgcaaggtcactgatgacaccaatgtcacttggccacagc

SEQ ID NO: 33550 - DNA, 81 bp, Homo sapiens
aatatgacaagctggctcggaagaaccgagaggagctggacaagtgctggtctgagcggactgaggagagcaccacagtgg

SEQ ID NO: 33551 - DNA, 80 bp, Homo sapiens
aagctggctcggaagaaccgagaggagctggacaagtgctggtctgagcggactgaggagagcaccacagtggtcaccac

SEQ ID NO: 33552 - DNA, 79 bp, Homo sapiens
ctcggaagaaccgagaggagctggacaagtgctggtctgagcggactgaggagagcaccacagtggtcaccacccagtc

SEQ ID NO: 33553 - DNA, 79 bp, Homo sapiens
agaggagctggacaagtgctggtctgagcggactgaggagagcaccacagtggtcaccacccagtccgcccaggttgga

SEQ ID NO: 33554 - DNA, 84 bp, Homo sapiens
tggacaagtgctggtctgagcggactgaggagagcaccacagtggtcaccacccagtccgcccaggttggagctgctgagatga

SEQ ID NO: 33555 - DNA, 83 bp, Homo sapiens
tggtctgagcggactgaggagagcaccacagtggtcaccacccagtccgcccaggttggagctgctgagatgacactcacgga

SEQ ID NO: 33556 - DNA, 81 bp, Homo sapiens
ctgaggagagcaccacagtggtcaccacccagtccgcccaggttggagctgctgagatgacactcacggagctgggacgta

SEQ ID NO: 33557 - DNA, 78 bp, Homo sapiens
caccacagtggtcaccacccagtccgcccaggttggagctgctgagatgacactcacggagctgggacgtacggtcca

SEQ ID NO: 33558 - DNA, 77 bp, Homo sapiens
gtcaccacccagtccgcccaggttggagctgctgagatgacactcacggagctgggacgtacggtccagtccttgga

SEQ ID NO: 33559 - DNA, 77 bp, Homo sapiens
acccagtccgcccaggttggagctgctgagatgacactcacggagctgggacgtacggtccagtccttggagatcga

SEQ ID NO: 33560 - DNA, 79 bp, Homo sapiens
ggttggagctgctgagatgacactcacggagctgggacgtacggtccagtccttggagatcgacctggactccatgaaa

SEQ ID NO: 33561 - DNA, 79 bp, Homo sapiens
ctgctgagatgacactcacggagctgggacgtacggtccagtccttggagatcgacctggactccatgaaaaatctgaa

SEQ ID NO: 33562 - DNA, 84 bp, Homo sapiens
gcagatggagcagctcaacgagatcctgctgcacctggcgtcagggctggcccagacccaggaagaggcgcaacaccaagccca

SEQ ID NO: 33563 - DNA, 82 bp, Homo sapiens
tggagcagctcaacgagatcctgctgcacctggcgtcagggctggcccagacccaggaagaggcgcaacaccaagcccagga

SEQ ID NO: 33564 - DNA, 78 bp, Homo sapiens
aacgagatcctgctgcacctggcgtcagggctggcccagacccaggaagaggcgcaacaccaagcccaggagtgcgag

SEQ ID NO: 33565 - DNA, 81 bp, Homo sapiens
tgcacctggcgtcagggctggcccagacccaggaagaggcgcaacaccaagcccaggagtgcgaggccctgctgaacatca

SEQ ID NO: 33566 - DNA, 78 bp, Homo sapiens
gtcagggctggcccagacccaggaagaggcgcaacaccaagcccaggagtgcgaggccctgctgaacatcaaggccaa

SEQ ID NO: 33567 - DNA, 78 bp, Homo sapiens
ctggcccagacccaggaagaggcgcaacaccaagcccaggagtgcgaggccctgctgaacatcaaggccaagctggag

SEQ ID NO: 33568 - DNA, 77 bp, Homo sapiens
acttcaatcttcaatcttggtgatggacagcagcaactccacgcaaaccattcaaaagaccaccacctgccgcaaag

SEQ ID NO: 33569 - DNA, 79 bp, Homo sapiens
ttcaatcttggtgatggacagcagcaactccacgcaaaccattcaaaagaccaccacctgccgcaaagtgagtggcaaa

SEQ ID NO: 33570 - DNA, 67 bp, Homo sapiens
ccaaggcggcctccaacctcgggcccaactcccggcttggacggggcttacctgcttacatggcccc

SEQ ID NO: 33571 - DNA, 67 bp, Homo sapiens
ctccaacctcgggcccaactcccggcttggacggggcttacctgcttacatggcccccgtggcgccc

SEQ ID NO: 33572 - DNA, 66 bp, Homo sapiens
gggcccaactcccggcttggacggggcttacctgcttacatggcccccgtggcgccccggagtccc

SEQ ID NO: 33573 - DNA, 68 bp, Homo sapiens
cttggacggggcttacctgcttacatggcccccgtggcgccccggagtcccgcgcggaaaggctgtcc

SEQ ID NO: 33574 - DNA, 69 bp, Homo sapiens
gggcttacctgcttacatggcccccgtggcgccccggagtcccgcgcggaaaggctgtccttcgcggcg

SEQ ID NO: 33575 - DNA, 70 bp, Homo sapiens
ttacatggcccccgtggcgccccggagtcccgcgcggaaaggctgtccttcgcggcggcggagccgattc

SEQ ID NO: 33576 - DNA, 68 bp, Homo sapiens
cccgtggcgccccggagtcccgcgcggaaaggctgtccttcgcggcggcggagccgattccccacgga

SEQ ID NO: 33577 - DNA, 69 bp, Homo sapiens
cccggagtcccgcgcggaaaggctgtccttcgcggcggcggagccgattccccacggaattgattccag

SEQ ID NO: 33578 - DNA, 72 bp, Homo sapiens
agtcccgcgcggaaaggctgtccttcgcggcggcggagccgattccccacggaattgattccagtgactggc

SEQ ID NO: 33579 - DNA, 71 bp, Homo sapiens
tccttcgcggcggcggagccgattccccacggaattgattccagtgactggcggaggaggggcgaagggaa

SEQ ID NO: 33580 - DNA, 70 bp, Homo sapiens
attccccacggaattgattccagtgactggcggaggaggggcgaagggaaggagccgcaggaggcgaaag

SEQ ID NO: 33581 - DNA, 70 bp, Homo sapiens
ggaattgattccagtgactggcggaggaggggcgaagggaaggagccgcaggaggcgaaaggggagggag

SEQ ID NO: 33582 - DNA, 67 bp, Homo sapiens
agtgactggcggaggaggggcgaagggaaggagccgcaggaggcgaaaggggagggaggtttccgcc

SEQ ID NO: 33583 - DNA, 66 bp, Homo sapiens
aggaggggcgaagggaaggagccgcaggaggcgaaaggggagggaggtttccgccgcgatcccggc

SEQ ID NO: 33584 - DNA, 68 bp, Homo sapiens
aagggaaggagccgcaggaggcgaaaggggagggaggtttccgccgcgatcccggcgcgagagtccga

SEQ ID NO: 33585 - DNA, 73 bp, Homo sapiens
aggagccgcaggaggcgaaaggggagggaggtttccgccgcgatcccggcgcgagagtccgagcagaggcgca

SEQ ID NO: 33586 - DNA, 69 bp, Homo sapiens
ggaggcgaaaggggagggaggtttccgccgcgatcccggcgcgagagtccgagcagaggcgcaccgggg

SEQ ID NO: 33587 - DNA, 70 bp, Homo sapiens
gggagggaggtttccgccgcgatcccggcgcgagagtccgagcagaggcgcaccgggggagaaaaggaga

SEQ ID NO: 33588 - DNA, 69 bp, Homo sapiens
tttccgccgcgatcccggcgcgagagtccgagcagaggcgcaccgggggagaaaaggagaaaaacctaa

SEQ ID NO: 33589 - DNA, 69 bp, Homo sapiens
atcccggcgcgagagtccgagcagaggcgcaccgggggagaaaaggagaaaaacctaagcacggggctg

SEQ ID NO: 33590 - DNA, 68 bp, Homo sapiens
agagtccgagcagaggcgcaccgggggagaaaaggagaaaaacctaagcacggggctgtcccgcccga

SEQ ID NO: 33591 - DNA, 67 bp, Homo sapiens
agcagaggcgcaccgggggagaaaaggagaaaaacctaagcacggggctgtcccgcccgaggaggcc

SEQ ID NO: 33592 - DNA, 62 bp, Homo sapiens
accgggggagaaaaggagaaaaacctaagcacggggctgtcccgcccgaggaggccggggag

SEQ ID NO: 33593 - DNA, 68 bp, Homo sapiens
aaaaggagaaaaacctaagcacggggctgtcccgcccgaggaggccggggaggatggctcagctggga

SEQ ID NO: 33594 - DNA, 74 bp, Homo sapiens
gggctgtcccgcccgaggaggccggggaggatggctcagctgggaggggaaggagcgccagtggccacttgatg

SEQ ID NO: 33595 - DNA, 76 bp, Homo sapiens
tcccgcccgaggaggccggggaggatggctcagctgggaggggaaggagcgccagtggccacttgatgtctgtcta

SEQ ID NO: 33596 - DNA, 75 bp, Homo sapiens
aggaggccggggaggatggctcagctgggaggggaaggagcgccagtggccacttgatgtctgtctagggctccc

SEQ ID NO: 33597 - DNA, 78 bp, Homo sapiens
aggatggctcagctgggaggggaaggagcgccagtggccacttgatgtctgtctagggctccccgaggacctgagcca

SEQ ID NO: 33598 - DNA, 77 bp, Homo sapiens
agctgggaggggaaggagcgccagtggccacttgatgtctgtctagggctccccgaggacctgagccaggagagcag

SEQ ID NO: 33599 - DNA, 78 bp, Homo sapiens
aaggagcgccagtggccacttgatgtctgtctagggctccccgaggacctgagccaggagagcaggcggctgagcccg

SEQ ID NO: 33600 - DNA, 81 bp, Homo sapiens
agtggccacttgatgtctgtctagggctccccgaggacctgagccaggagagcaggcggctgagcccggagaagcacagca

SEQ ID NO: 33601 - DNA, 80 bp, Homo sapiens
acttgatgtctgtctagggctccccgaggacctgagccaggagagcaggcggctgagcccggagaagcacagcaacctgc

SEQ ID NO: 33602 - DNA, 77 bp, Homo sapiens
ctgtctagggctccccgaggacctgagccaggagagcaggcggctgagcccggagaagcacagcaacctgcccccga

SEQ ID NO: 33603 - DNA, 82 bp, Homo sapiens
cgaggacctgagccaggagagcaggcggctgagcccggagaagcacagcaacctgcccccgagtctgcgcccgctgcgctca

SEQ ID NO: 33604 - DNA, 81 bp, Homo sapiens
agccaggagagcaggcggctgagcccggagaagcacagcaacctgcccccgagtctgcgcccgctgcgctcactccgccga

SEQ ID NO: 33605 - DNA, 78 bp, Homo sapiens
agcaggcggctgagcccggagaagcacagcaacctgcccccgagtctgcgcccgctgcgctcactccgccgagaaaaa

SEQ ID NO: 33606 - DNA, 76 bp, Homo sapiens
ctgagcccggagaagcacagcaacctgcccccgagtctgcgcccgctgcgctcactccgccgagaaaaagttggaa

SEQ ID NO: 33607 - DNA, 73 bp, Homo sapiens
agaagcacagcaacctgcccccgagtctgcgcccgctgcgctcactccgccgagaaaaagttggaaagaactt

SEQ ID NO: 33608 - DNA, 71 bp, Homo sapiens
agcaacctgcccccgagtctgcgcccgctgcgctcactccgccgagaaaaagttggaaagaactttgaggg

SEQ ID NO: 33609 - DNA, 73 bp, Homo sapiens
cgagtctgcgcccgctgcgctcactccgccgagaaaaagttggaaagaactttgaggggccgggagagccaga

SEQ ID NO: 33610 - DNA, 72 bp, Homo sapiens
ccgctgcgctcactccgccgagaaaaagttggaaagaactttgaggggccgggagagccagagcggcaggaa

SEQ ID NO: 33611 - DNA, 72 bp, Homo sapiens
cgctcactccgccgagaaaaagttggaaagaactttgaggggccgggagagccagagcggcaggaaatgcga

SEQ ID NO: 33612 - DNA, 70 bp, Homo sapiens
agaaaaagttggaaagaactttgaggggccgggagagccagagcggcaggaaatgcgagcggccgggaga

SEQ ID NO: 33613 - DNA, 70 bp, Homo sapiens
aactttgaggggccgggagagccagagcggcaggaaatgcgagcggccgggagaggagggaggaaggggc

SEQ ID NO: 33614 - DNA, 72 bp, Homo sapiens
agagcggcaggaaatgcgagcggccgggagaggagggaggaaggggccgtgcgagtgggaggggacggagca

SEQ ID NO: 33615 - DNA, 70 bp, Homo sapiens
aggaaatgcgagcggccgggagaggagggaggaaggggccgtgcgagtgggaggggacggagcaggcgcc

SEQ ID NO: 33616 - DNA, 73 bp, Homo sapiens
ccatttcggggcaaacagttcaaatttcatgaataaatacacactcatagtcactgtaactatttttattaca

SEQ ID NO: 33617 - DNA, 74 bp, Homo sapiens
gggcaaacagttcaaatttcatgaataaatacacactcatagtcactgtaactatttttattacattacaataa

SEQ ID NO: 33618 - DNA, 74 bp, Homo sapiens
atttcatgaataaatacacactcatagtcactgtaactatttttattacattacaataattaggagtagtacag

SEQ ID NO: 33619 - DNA, 76 bp, Homo sapiens
gaataaatacacactcatagtcactgtaactatttttattacattacaataattaggagtagtacagttcatgaca

SEQ ID NO: 33620 - DNA, 74 bp, Homo sapiens
acacactcatagtcactgtaactatttttattacattacaataattaggagtagtacagttcatgacaaaaata

SEQ ID NO: 33621 - DNA, 71 bp, Homo sapiens
agtcactgtaactatttttattacattacaataattaggagtagtacagttcatgacaaaaatattacaaa

SEQ ID NO: 33622 - DNA, 73 bp, Homo sapiens
ttttattacattacaataattaggagtagtacagttcatgacaaaaatattacaaattttagatcacttcaca

SEQ ID NO: 33623 - DNA, 76 bp, Homo sapiens
cattacaataattaggagtagtacagttcatgacaaaaatattacaaattttagatcacttcacagcacatactcc

SEQ ID NO: 33624 - DNA, 76 bp, Homo sapiens
taattaggagtagtacagttcatgacaaaaatattacaaattttagatcacttcacagcacatactcctataaaca

SEQ ID NO: 33625 - DNA, 74 bp, Homo sapiens
gtagtacagttcatgacaaaaatattacaaattttagatcacttcacagcacatactcctataaacatttaaaa

SEQ ID NO: 33626 - DNA, 73 bp, Homo sapiens
catgacaaaaatattacaaattttagatcacttcacagcacatactcctataaacatttaaaagttaatttca

SEQ ID NO: 33627 - DNA, 71 bp, Homo sapiens
tacaaattttagatcacttcacagcacatactcctataaacatttaaaagttaatttcaattaaaagagtg

SEQ ID NO: 33628 - DNA, 71 bp, Homo sapiens
ttttagatcacttcacagcacatactcctataaacatttaaaagttaatttcaattaaaagagtggtcatt

SEQ ID NO: 33629 - DNA, 69 bp, Homo sapiens
acttcacagcacatactcctataaacatttaaaagttaatttcaattaaaagagtggtcatttttaatg

SEQ ID NO: 33630 - DNA, 69 bp, Homo sapiens
tactcctataaacatttaaaagttaatttcaattaaaagagtggtcatttttaatgtttgatatgacca

SEQ ID NO: 33631 - DNA, 68 bp, Homo sapiens
catttaaaagttaatttcaattaaaagagtggtcatttttaatgtttgatatgaccaacattcctagg

SEQ ID NO: 33632 - DNA, 72 bp, Homo sapiens
gttaatttcaattaaaagagtggtcatttttaatgtttgatatgaccaacattcctaggtcagcgcaaccaa

SEQ ID NO: 33633 - DNA, 75 bp, Homo sapiens
ttcaattaaaagagtggtcatttttaatgtttgatatgaccaacattcctaggtcagcgcaaccaaatgatggaa

SEQ ID NO: 33634 - DNA, 76 bp, Homo sapiens
agtggtcatttttaatgtttgatatgaccaacattcctaggtcagcgcaaccaaatgatggaaaacaactggatca

SEQ ID NO: 33635 - DNA, 79 bp, Homo sapiens
tttttaatgtttgatatgaccaacattcctaggtcagcgcaaccaaatgatggaaaacaactggatcacactgcatatg

SEQ ID NO: 33636 - DNA, 79 bp, Homo sapiens
atatgaccaacattcctaggtcagcgcaaccaaatgatggaaaacaactggatcacactgcatatgtcccacaaaagaa

SEQ ID NO: 33637 - DNA, 78 bp, Homo sapiens
aacattcctaggtcagcgcaaccaaatgatggaaaacaactggatcacactgcatatgtcccacaaaagaaagcacaa

SEQ ID NO: 33638 - DNA, 78 bp, Homo sapiens
aggtcagcgcaaccaaatgatggaaaacaactggatcacactgcatatgtcccacaaaagaaagcacaatgtacaaaa

SEQ ID NO: 33639 - DNA, 79 bp, Homo sapiens
aatgatggaaaacaactggatcacactgcatatgtcccacaaaagaaagcacaatgtacaaaatgtgcatgtttcagtt

SEQ ID NO: 33640 - DNA, 79 bp, Homo sapiens
aaacaactggatcacactgcatatgtcccacaaaagaaagcacaatgtacaaaatgtgcatgtttcagtttacactata

SEQ ID NO: 33641 - DNA, 73 bp, Homo sapiens
caaaagaaagcacaatgtacaaaatgtgcatgtttcagtttacactatacaaaaatagttaaaatacattcca

SEQ ID NO: 33642 - DNA, 74 bp, Homo sapiens
gcacaatgtacaaaatgtgcatgtttcagtttacactatacaaaaatagttaaaatacattccaggtaaacatg

SEQ ID NO: 33643 - DNA, 72 bp, Homo sapiens
gtacaaaatgtgcatgtttcagtttacactatacaaaaatagttaaaatacattccaggtaaacatgttaca

SEQ ID NO: 33644 - DNA, 72 bp, Homo sapiens
tgcatgtttcagtttacactatacaaaaatagttaaaatacattccaggtaaacatgttacattaagaaata

SEQ ID NO: 33645 - DNA, 70 bp, Homo sapiens
tacactatacaaaaatagttaaaatacattccaggtaaacatgttacattaagaaatagtactagtaaga

SEQ ID NO: 33646 - DNA, 68 bp, Homo sapiens
aaaatagttaaaatacattccaggtaaacatgttacattaagaaatagtactagtaagaaattggcac

SEQ ID NO: 33647 - DNA, 69 bp, Homo sapiens
aaatacattccaggtaaacatgttacattaagaaatagtactagtaagaaattggcactcaaaggaaaa

SEQ ID NO: 33648 - DNA, 71 bp, Homo sapiens
catgttacattaagaaatagtactagtaagaaattggcactcaaaggaaaaatgcaaaagtattttcaaca

SEQ ID NO: 33649 - DNA, 71 bp, Homo sapiens
taagaaatagtactagtaagaaattggcactcaaaggaaaaatgcaaaagtattttcaacatgaaaacaca

SEQ ID NO: 33650 - DNA, 72 bp, Homo sapiens
gtactagtaagaaattggcactcaaaggaaaaatgcaaaagtattttcaacatgaaaacacaagacagtgga

SEQ ID NO: 33651 - DNA, 70 bp, Homo sapiens
attggcactcaaaggaaaaatgcaaaagtattttcaacatgaaaacacaagacagtggaattggaaactt

SEQ ID NO: 33652 - DNA, 70 bp, Homo sapiens
cactcaaaggaaaaatgcaaaagtattttcaacatgaaaacacaagacagtggaattggaaactttcgga

SEQ ID NO: 33653 - DNA, 70 bp, Homo sapiens
tgcaaaagtattttcaacatgaaaacacaagacagtggaattggaaactttcggataaaacactgtaacc

SEQ ID NO: 33654 - DNA, 68 bp, Homo sapiens
agtattttcaacatgaaaacacaagacagtggaattggaaactttcggataaaacactgtaacccagt

SEQ ID NO: 33655 - DNA, 68 bp, Homo sapiens
acaagacagtggaattggaaactttcggataaaacactgtaacccagttagctctgtgggggtgtggg

SEQ ID NO: 33656 - DNA, 67 bp, Homo sapiens
aattggaaactttcggataaaacactgtaacccagttagctctgtgggggtgtggggggagagatgg

SEQ ID NO: 33657 - DNA, 71 bp, Homo sapiens
tttcggataaaacactgtaacccagttagctctgtgggggtgtggggggagagatgggccctcaacatatc

SEQ ID NO: 33658 - DNA, 71 bp, Homo sapiens
taacccagttagctctgtgggggtgtggggggagagatgggccctcaacatatctgcagataacttttttt

SEQ ID NO: 33659 - DNA, 71 bp, Homo sapiens
tctgtgggggtgtggggggagagatgggccctcaacatatctgcagataacttttttttcccctaaattca

SEQ ID NO: 33660 - DNA, 70 bp, Homo sapiens
ggtgtggggggagagatgggccctcaacatatctgcagataacttttttttcccctaaattcatctaaat

SEQ ID NO: 33661 - DNA, 74 bp, Homo sapiens
gagagatgggccctcaacatatctgcagataacttttttttcccctaaattcatctaaattacctatcattatc

SEQ ID NO: 33662 - DNA, 73 bp, Homo sapiens
ctcaacatatctgcagataacttttttttcccctaaattcatctaaattacctatcattatcccaaacaggca

SEQ ID NO: 33663 - DNA, 69 bp, Homo sapiens
gcagataacttttttttcccctaaattcatctaaattacctatcattatcccaaacaggcacttcaaac

SEQ ID NO: 33664 - DNA, 67 bp, Homo sapiens
tttttttcccctaaattcatctaaattacctatcattatcccaaacaggcacttcaaactattaaac

SEQ ID NO: 33665 - DNA, 70 bp, Homo sapiens
ccctaaattcatctaaattacctatcattatcccaaacaggcacttcaaactattaaactaaaacacaga

SEQ ID NO: 33666 - DNA, 71 bp, Homo sapiens
cccaaacaggcacttcaaactattaaactaaaacacagatcttaatctagttatgactattcttcaagaac

SEQ ID NO: 33667 - DNA, 76 bp, Homo sapiens
caggcacttcaaactattaaactaaaacacagatcttaatctagttatgactattcttcaagaactcatgtgagta

SEQ ID NO: 33668 - DNA, 74 bp, Homo sapiens
ctaaaacacagatcttaatctagttatgactattcttcaagaactcatgtgagtatctttctttagaaagaaag

SEQ ID NO: 33669 - DNA, 73 bp, Homo sapiens
agatcttaatctagttatgactattcttcaagaactcatgtgagtatctttctttagaaagaaagtttcattt

SEQ ID NO: 33670 - DNA, 76 bp, Homo sapiens
gttatgactattcttcaagaactcatgtgagtatctttctttagaaagaaagtttcattttatgacagctattcag

SEQ ID NO: 33671 - DNA, 79 bp, Homo sapiens
tcttcaagaactcatgtgagtatctttctttagaaagaaagtttcattttatgacagctattcagtttctcaatgcaga

SEQ ID NO: 33672 - DNA, 81 bp, Homo sapiens
ctcatgtgagtatctttctttagaaagaaagtttcattttatgacagctattcagtttctcaatgcagaattcatgctatc

SEQ ID NO: 33673 - DNA, 78 bp, Homo sapiens
agaaagaaagtttcattttatgacagctattcagtttctcaatgcagaattcatgctatccagtattaacacagaagt

SEQ ID NO: 33674 - DNA, 81 bp, Homo sapiens
tttatgacagctattcagtttctcaatgcagaattcatgctatccagtattaacacagaagttactaaatataaattcagc

SEQ ID NO: 33675 - DNA, 78 bp, Homo sapiens
gctattcagtttctcaatgcagaattcatgctatccagtattaacacagaagttactaaatataaattcagctttaag

SEQ ID NO: 33676 - DNA, 73 bp, Homo sapiens
agaattcatgctatccagtattaacacagaagttactaaatataaattcagctttaaggtaactgctgggttc

SEQ ID NO: 33677 - DNA, 69 bp, Homo sapiens
acacagaagttactaaatataaattcagctttaaggtaactgctgggttctaaaaaacattactacaca

SEQ ID NO: 33678 - DNA, 69 bp, Homo sapiens
ctaaatataaattcagctttaaggtaactgctgggttctaaaaaacattactacacaattatcaagaaa

SEQ ID NO: 33679 - DNA, 69 bp, Homo sapiens
aaattcagctttaaggtaactgctgggttctaaaaaacattactacacaattatcaagaaatcattact

SEQ ID NO: 33680 - DNA, 70 bp, Homo sapiens
gctttaaggtaactgctgggttctaaaaaacattactacacaattatcaagaaatcattactttttgaca

SEQ ID NO: 33681 - DNA, 72 bp, Homo sapiens
ctgctgggttctaaaaaacattactacacaattatcaagaaatcattactttttgacaaatggaaatcttca

SEQ ID NO: 33682 - DNA, 71 bp, Homo sapiens
aaaaacattactacacaattatcaagaaatcattactttttgacaaatggaaatcttcagatagtttttgc

SEQ ID NO: 33683 - DNA, 74 bp, Homo sapiens
cattactacacaattatcaagaaatcattactttttgacaaatggaaatcttcagatagtttttgctgtctaaa

SEQ ID NO: 33684 - DNA, 62 bp, Homo sapiens
gtctaaaaaaaaatcccctaaaaaaagttatatactgtttgaagaaaaaatgtttagaagaa

SEQ ID NO: 33685 - DNA, 72 bp, Homo sapiens
aaaaaaatcaatggaatacaaatgagatgaacttgtgcaaactgtaacttaacatgccccacaaagtttcta

SEQ ID NO: 33686 - DNA, 74 bp, Homo sapiens
aatgagatgaacttgtgcaaactgtaacttaacatgccccacaaagtttctatgtatatattaggacaaaattg

SEQ ID NO: 33687 - DNA, 76 bp, Homo sapiens
gatgaacttgtgcaaactgtaacttaacatgccccacaaagtttctatgtatatattaggacaaaattgtgcaatg

SEQ ID NO: 33688 - DNA, 74 bp, Homo sapiens
caaactgtaacttaacatgccccacaaagtttctatgtatatattaggacaaaattgtgcaatggtgacaacag

SEQ ID NO: 33689 - DNA, 75 bp, Homo sapiens
taacatgccccacaaagtttctatgtatatattaggacaaaattgtgcaatggtgacaacagttttgataaccta

SEQ ID NO: 33690 - DNA, 72 bp, Homo sapiens
ccacaaagtttctatgtatatattaggacaaaattgtgcaatggtgacaacagttttgataacctataaaag

SEQ ID NO: 33691 - DNA, 72 bp, Homo sapiens
ctatgtatatattaggacaaaattgtgcaatggtgacaacagttttgataacctataaaagttaggttctaa

SEQ ID NO: 33692 - DNA, 72 bp, Homo sapiens
ttaggacaaaattgtgcaatggtgacaacagttttgataacctataaaagttaggttctaaattcctatgca

SEQ ID NO: 33693 - DNA, 72 bp, Homo sapiens
ggacaaaattgtgcaatggtgacaacagttttgataacctataaaagttaggttctaaattcctatgcagtg

SEQ ID NO: 33694 - DNA, 74 bp, Homo sapiens
aattgtgcaatggtgacaacagttttgataacctataaaagttaggttctaaattcctatgcagtgtgactcag

SEQ ID NO: 33695 - DNA, 75 bp, Homo sapiens
ttgtgcaatggtgacaacagttttgataacctataaaagttaggttctaaattcctatgcagtgtgactcagtta

SEQ ID NO: 33696 - DNA, 73 bp, Homo sapiens
gcaatggtgacaacagttttgataacctataaaagttaggttctaaattcctatgcagtgtgactcagttaaa

SEQ ID NO: 33697 - DNA, 72 bp, Homo sapiens
gacaacagttttgataacctataaaagttaggttctaaattcctatgcagtgtgactcagttaaatagagcc

SEQ ID NO: 33698 - DNA, 73 bp, Homo sapiens
gttttgataacctataaaagttaggttctaaattcctatgcagtgtgactcagttaaatagagcctagaatgc

SEQ ID NO: 33699 - DNA, 74 bp, Homo sapiens
tgataacctataaaagttaggttctaaattcctatgcagtgtgactcagttaaatagagcctagaatgcctact

SEQ ID NO: 33700 - DNA, 72 bp, Homo sapiens
ataacctataaaagttaggttctaaattcctatgcagtgtgactcagttaaatagagcctagaatgcctact

SEQ ID NO: 33701 - DNA, 79 bp, Homo sapiens
aattcctatgcagtgtgactcagttaaatagagcctagaatgcctacttgggaacattcactcaaatgatacaatatac

SEQ ID NO: 33702 - DNA, 80 bp, Homo sapiens
tgactcagttaaatagagcctagaatgcctacttgggaacattcactcaaatgatacaatatacgtctgctatattcttc

SEQ ID NO: 33703 - DNA, 78 bp, Homo sapiens
ttaaatagagcctagaatgcctacttgggaacattcactcaaatgatacaatatacgtctgctatattcttccacaaa

SEQ ID NO: 33704 - DNA, 80 bp, Homo sapiens
tagaatgcctacttgggaacattcactcaaatgatacaatatacgtctgctatattcttccacaaacatgttaatgccta

SEQ ID NO: 33705 - DNA, 79 bp, Homo sapiens
tacttgggaacattcactcaaatgatacaatatacgtctgctatattcttccacaaacatgttaatgcctaagtctatg

SEQ ID NO: 33706 - DNA, 78 bp, Homo sapiens
ggaacattcactcaaatgatacaatatacgtctgctatattcttccacaaacatgttaatgcctaagtctatgtaatt

SEQ ID NO: 33707 - DNA, 76 bp, Homo sapiens
ctcaaatgatacaatatacgtctgctatattcttccacaaacatgttaatgcctaagtctatgtaatttagctttt

SEQ ID NO: 33708 - DNA, 63 bp, Homo sapiens
ttttaaaaaaacttcaacaaggatttttgtctttaaggctgtaataattaggtaacatttatt

SEQ ID NO: 33709 - DNA, 67 bp, Homo sapiens
acttcaacaaggatttttgtctttaaggctgtaataattaggtaacatttatttctagaattctccc

SEQ ID NO: 33710 - DNA, 65 bp, Homo sapiens
acaaggatttttgtctttaaggctgtaataattaggtaacatttatttctagaattctccccctt

SEQ ID NO: 33711 - DNA, 67 bp, Homo sapiens
gtctttaaggctgtaataattaggtaacatttatttctagaattctccccctttaaaatctctacaa

SEQ ID NO: 33712 - DNA, 66 bp, Homo sapiens
aggctgtaataattaggtaacatttatttctagaattctccccctttaaaatctctacaaaaacaa

SEQ ID NO: 33713 - DNA, 65 bp, Homo sapiens
ttaggtaacatttatttctagaattctccccctttaaaatctctacaaaaacaaatcttttgtta

SEQ ID NO: 33714 - DNA, 64 bp, Homo sapiens
atttctagaattctccccctttaaaatctctacaaaaacaaatcttttgttaaaccattcaaag

SEQ ID NO: 33715 - DNA, 67 bp, Homo sapiens
tagaattctccccctttaaaatctctacaaaaacaaatcttttgttaaaccattcaaagttcacata

SEQ ID NO: 33716 - DNA, 64 bp, Homo sapiens
ccctttaaaatctctacaaaaacaaatcttttgttaaaccattcaaagttcacataaaggtaat

SEQ ID NO: 33717 - DNA, 65 bp, Homo sapiens
ctacaaaaacaaatcttttgttaaaccattcaaagttcacataaaggtaattaaccactacctta

SEQ ID NO: 33718 - DNA, 63 bp, Homo sapiens
aaacaaatcttttgttaaaccattcaaagttcacataaaggtaattaaccactaccttaaaaa

SEQ ID NO: 33719 - DNA, 69 bp, Homo sapiens
tgttaaaccattcaaagttcacataaaggtaattaaccactaccttaaaaaaatgcccatctacatcaa

SEQ ID NO: 33720 - DNA, 69 bp, Homo sapiens
tcaaagttcacataaaggtaattaaccactaccttaaaaaaatgcccatctacatcaaaaattcaagag

SEQ ID NO: 33721 - DNA, 69 bp, Homo sapiens
tcacataaaggtaattaaccactaccttaaaaaaatgcccatctacatcaaaaattcaagaggcctaaa

SEQ ID NO: 33722 - DNA, 71 bp, Homo sapiens
ttaaccactaccttaaaaaaatgcccatctacatcaaaaattcaagaggcctaaatatcccctcataagca

SEQ ID NO: 33723 - DNA, 72 bp, Homo sapiens
actaccttaaaaaaatgcccatctacatcaaaaattcaagaggcctaaatatcccctcataagcactgcagt

SEQ ID NO: 33724 - DNA, 76 bp, Homo sapiens
aaaaatgcccatctacatcaaaaattcaagaggcctaaatatcccctcataagcactgcagttcctgaagtatggc

SEQ ID NO: 33725 - DNA, 76 bp, Homo sapiens
atctacatcaaaaattcaagaggcctaaatatcccctcataagcactgcagttcctgaagtatggccatttctttc

SEQ ID NO: 33726 - DNA, 76 bp, Homo sapiens
aaaattcaagaggcctaaatatcccctcataagcactgcagttcctgaagtatggccatttctttctctgtgtaga

SEQ ID NO: 33727 - DNA, 77 bp, Homo sapiens
taaatatcccctcataagcactgcagttcctgaagtatggccatttctttctctgtgtagaaacgaggtactgtgta

SEQ ID NO: 33728 - DNA, 77 bp, Homo sapiens
ctcataagcactgcagttcctgaagtatggccatttctttctctgtgtagaaacgaggtactgtgtaagtcttaaca

SEQ ID NO: 33729 - DNA, 73 bp, Homo sapiens
actgcagttcctgaagtatggccatttctttctctgtgtagaaacgaggtactgtgtaagtcttaacacccta

SEQ ID NO: 33730 - DNA, 71 bp, Homo sapiens
ctgaagtatggccatttctttctctgtgtagaaacgaggtactgtgtaagtcttaacaccctacctaaaca

SEQ ID NO: 33731 - DNA, 69 bp, Homo sapiens
ccatttctttctctgtgtagaaacgaggtactgtgtaagtcttaacaccctacctaaacagtgttccaa

SEQ ID NO: 33732 - DNA, 71 bp, Homo sapiens
tttctctgtgtagaaacgaggtactgtgtaagtcttaacaccctacctaaacagtgttccaaagatctgta

SEQ ID NO: 33733 - DNA, 71 bp, Homo sapiens
tagaaacgaggtactgtgtaagtcttaacaccctacctaaacagtgttccaaagatctgtagtttcacata

SEQ ID NO: 33734 - DNA, 73 bp, Homo sapiens
gtactgtgtaagtcttaacaccctacctaaacagtgttccaaagatctgtagtttcacatagcaattcagaaa

SEQ ID NO: 33735 - DNA, 75 bp, Homo sapiens
taagtcttaacaccctacctaaacagtgttccaaagatctgtagtttcacatagcaattcagaaatcatagtgat

SEQ ID NO: 33736 - DNA, 76 bp, Homo sapiens
caccctacctaaacagtgttccaaagatctgtagtttcacatagcaattcagaaatcatagtgatttttacataga

SEQ ID NO: 33737 - DNA, 77 bp, Homo sapiens
cagtgttccaaagatctgtagtttcacatagcaattcagaaatcatagtgatttttacatagaagtttccttgtctg

SEQ ID NO: 33738 - DNA, 77 bp, Homo sapiens
ttcacatagcaattcagaaatcatagtgatttttacatagaagtttccttgtctgtgaactagttcaggcacctgtt

SEQ ID NO: 33739 - DNA, 75 bp, Homo sapiens
gcaattcagaaatcatagtgatttttacatagaagtttccttgtctgtgaactagttcaggcacctgtttatttg

SEQ ID NO: 33740 - DNA, 74 bp, Homo sapiens
tcatagtgatttttacatagaagtttccttgtctgtgaactagttcaggcacctgtttatttgtacccagataa

SEQ ID NO: 33741 - DNA, 70 bp, Homo sapiens
gatttttacatagaagtttccttgtctgtgaactagttcaggcacctgtttatttgtacccagataaaac

SEQ ID NO: 33742 - DNA, 70 bp, Homo sapiens
catagaagtttccttgtctgtgaactagttcaggcacctgtttatttgtacccagataaaactattaatt

SEQ ID NO: 33743 - DNA, 69 bp, Homo sapiens
ccttgtctgtgaactagttcaggcacctgtttatttgtacccagataaaactattaatttttaagtata

SEQ ID NO: 33744 - DNA, 66 bp, Homo sapiens
ctagttcaggcacctgtttatttgtacccagataaaactattaatttttaagtatattttaattac

SEQ ID NO: 33745 - DNA, 69 bp, Homo sapiens
ggcacctgtttatttgtacccagataaaactattaatttttaagtatattttaattacttatgcagaga

SEQ ID NO: 33746 - DNA, 68 bp, Homo sapiens
ttatttgtacccagataaaactattaatttttaagtatattttaattacttatgcagagaaaactgga

SEQ ID NO: 33747 - DNA, 72 bp, Homo sapiens
taatttttaagtatattttaattacttatgcagagaaaactggaatattacacatttgggtcaatatgaata

SEQ ID NO: 33748 - DNA, 76 bp, Homo sapiens
gtatattttaattacttatgcagagaaaactggaatattacacatttgggtcaatatgaatatctgacatacacct

SEQ ID NO: 33749 - DNA, 78 bp, Homo sapiens
attacttatgcagagaaaactggaatattacacatttgggtcaatatgaatatctgacatacaccttaatgtgtacag

SEQ ID NO: 33750 - DNA, 77 bp, Homo sapiens
cagagaaaactggaatattacacatttgggtcaatatgaatatctgacatacaccttaatgtgtacagtaattgtcc

SEQ ID NO: 33751 - DNA, 78 bp, Homo sapiens
acacatttgggtcaatatgaatatctgacatacaccttaatgtgtacagtaattgtcctaaaagaatcacagttatgc

SEQ ID NO: 33752 - DNA, 74 bp, Homo sapiens
gaatatctgacatacaccttaatgtgtacagtaattgtcctaaaagaatcacagttatgccaaataaaaaaaca

SEQ ID NO: 33753 - DNA, 72 bp, Homo sapiens
gacatacaccttaatgtgtacagtaattgtcctaaaagaatcacagttatgccaaataaaaaaacaatataa

SEQ ID NO: 33754 - DNA, 71 bp, Homo sapiens
ttaatgtgtacagtaattgtcctaaaagaatcacagttatgccaaataaaaaaacaatataatcaagttta

SEQ ID NO: 33755 - DNA, 68 bp, Homo sapiens
cctaaaagaatcacagttatgccaaataaaaaaacaatataatcaagtttattcctttaaaacaatga

SEQ ID NO: 33756 - DNA, 71 bp, Homo sapiens
tcacagttatgccaaataaaaaaacaatataatcaagtttattcctttaaaacaatgaagtgatttacata

SEQ ID NO: 33757 - DNA, 69 bp, Homo sapiens
ataaaaaaacaatataatcaagtttattcctttaaaacaatgaagtgatttacataaagtagcttgatc

SEQ ID NO: 33758 - DNA, 72 bp, Homo sapiens
caatataatcaagtttattcctttaaaacaatgaagtgatttacataaagtagcttgatcgaagagtttcag

SEQ ID NO: 33759 - DNA, 71 bp, Homo sapiens
caagtttattcctttaaaacaatgaagtgatttacataaagtagcttgatcgaagagtttcagtggaatcg

SEQ ID NO: 33760 - DNA, 72 bp, Homo sapiens
cctttaaaacaatgaagtgatttacataaagtagcttgatcgaagagtttcagtggaatcgtagcaaaacaa

SEQ ID NO: 33761 - DNA, 76 bp, Homo sapiens
aacaatgaagtgatttacataaagtagcttgatcgaagagtttcagtggaatcgtagcaaaacaattatagagctg

SEQ ID NO: 33762 - DNA, 77 bp, Homo sapiens
tttacataaagtagcttgatcgaagagtttcagtggaatcgtagcaaaacaattatagagctggcacagagaccaaa

SEQ ID NO: 33763 - DNA, 74 bp, Homo sapiens
aaagtagcttgatcgaagagtttcagtggaatcgtagcaaaacaattatagagctggcacagagaccaaacccc

SEQ ID NO: 33764 - DNA, 72 bp, Homo sapiens
aagagtttcagtggaatcgtagcaaaacaattatagagctggcacagagaccaaaccccttctttgcaaaac

SEQ ID NO: 33765 - DNA, 72 bp, Homo sapiens
tttcagtggaatcgtagcaaaacaattatagagctggcacagagaccaaaccccttctttgcaaaactaaaa

SEQ ID NO: 33766 - DNA, 74 bp, Homo sapiens
tagcaaaacaattatagagctggcacagagaccaaaccccttctttgcaaaactaaaatacgcatcgtgttatc

SEQ ID NO: 33767 - DNA, 73 bp, Homo sapiens
aacaattatagagctggcacagagaccaaaccccttctttgcaaaactaaaatacgcatcgtgttatctctgg

SEQ ID NO: 33768 - DNA, 72 bp, Homo sapiens
tggcacagagaccaaaccccttctttgcaaaactaaaatacgcatcgtgttatctctgggtcgtataccaaa

SEQ ID NO: 33769 - DNA, 68 bp, Homo sapiens
ccaaaccccttctttgcaaaactaaaatacgcatcgtgttatctctgggtcgtataccaaaggcctta

SEQ ID NO: 33770 - DNA, 72 bp, Homo sapiens
ttctttgcaaaactaaaatacgcatcgtgttatctctgggtcgtataccaaaggccttagtaagatattaca

SEQ ID NO: 33771 - DNA, 71 bp, Homo sapiens
aaaactaaaatacgcatcgtgttatctctgggtcgtataccaaaggccttagtaagatattacagaccaca

SEQ ID NO: 33772 - DNA, 75 bp, Homo sapiens
atacgcatcgtgttatctctgggtcgtataccaaaggccttagtaagatattacagaccacactagcactaccta

SEQ ID NO: 33773 - DNA, 72 bp, Homo sapiens
tgttatctctgggtcgtataccaaaggccttagtaagatattacagaccacactagcactacctaaggaccg

SEQ ID NO: 33774 - DNA, 72 bp, Homo sapiens
tcgtataccaaaggccttagtaagatattacagaccacactagcactacctaaggaccgggattatgtctct

SEQ ID NO: 33775 - DNA, 74 bp, Homo sapiens
tagtaagatattacagaccacactagcactacctaaggaccgggattatgtctcttgtttggggataccatata

SEQ ID NO: 33776 - DNA, 73 bp, Homo sapiens
attacagaccacactagcactacctaaggaccgggattatgtctcttgtttggggataccatatacccagtgc

SEQ ID NO: 33777 - DNA, 73 bp, Homo sapiens
actagcactacctaaggaccgggattatgtctcttgtttggggataccatatacccagtgccttgtgtggtga

SEQ ID NO: 33778 - DNA, 75 bp, Homo sapiens
tacctaaggaccgggattatgtctcttgtttggggataccatatacccagtgccttgtgtggtgactggcatctg

SEQ ID NO: 33779 - DNA, 77 bp, Homo sapiens
ccgggattatgtctcttgtttggggataccatatacccagtgccttgtgtggtgactggcatctggtaggcactcaa

SEQ ID NO: 33780 - DNA, 70 bp, Homo sapiens
aaaaaaagtaagcttcatgaattaaagtatttttcattgcatgaagatttctggttactaaaacaatgga

SEQ ID NO: 33781 - DNA, 74 bp, Homo sapiens
gtaagcttcatgaattaaagtatttttcattgcatgaagatttctggttactaaaacaatggaatgtattactg

SEQ ID NO: 33782 - DNA, 71 bp, Homo sapiens
attaaagtatttttcattgcatgaagatttctggttactaaaacaatggaatgtattactgttaccaggag

SEQ ID NO: 33783 - DNA, 73 bp, Homo sapiens
ttttcattgcatgaagatttctggttactaaaacaatggaatgtattactgttaccaggagtagtcctagtta

SEQ ID NO: 33784 - DNA, 73 bp, Homo sapiens
gcatgaagatttctggttactaaaacaatggaatgtattactgttaccaggagtagtcctagttatagattac

SEQ ID NO: 33785 - DNA, 69 bp, Homo sapiens
ctggttactaaaacaatggaatgtattactgttaccaggagtagtcctagttatagattacctaaggaa

SEQ ID NO: 33786 - DNA, 71 bp, Homo sapiens
aaacaatggaatgtattactgttaccaggagtagtcctagttatagattacctaaggaattctttcagcac

SEQ ID NO: 33787 - DNA, 72 bp, Homo sapiens
ggaatgtattactgttaccaggagtagtcctagttatagattacctaaggaattctttcagcactatcttta

SEQ ID NO: 33788 - DNA, 71 bp, Homo sapiens
ctgttaccaggagtagtcctagttatagattacctaaggaattctttcagcactatctttattaaattctc

SEQ ID NO: 33789 - DNA, 71 bp, Homo sapiens
caggagtagtcctagttatagattacctaaggaattctttcagcactatctttattaaattctccttccac

SEQ ID NO: 33790 - DNA, 70 bp, Homo sapiens
cctagttatagattacctaaggaattctttcagcactatctttattaaattctccttccactggataggg

SEQ ID NO: 33791 - DNA, 72 bp, Homo sapiens
attacctaaggaattctttcagcactatctttattaaattctccttccactggatagggttctgtctattca

SEQ ID NO: 33792 - DNA, 73 bp, Homo sapiens
tctttcagcactatctttattaaattctccttccactggatagggttctgtctattcataccaggtttgaaaa

SEQ ID NO: 33793 - DNA, 70 bp, Homo sapiens
ctatctttattaaattctccttccactggatagggttctgtctattcataccaggtttgaaaaatcctac

SEQ ID NO: 33794 - DNA, 75 bp, Homo sapiens
ttccactggatagggttctgtctattcataccaggtttgaaaaatcctactgtcgctaatggattgggcagcaaa

SEQ ID NO: 33795 - DNA, 80 bp, Homo sapiens
ttctgtctattcataccaggtttgaaaaatcctactgtcgctaatggattgggcagcaaagagatgttcaaagcatcagc

SEQ ID NO: 33796 - DNA, 77 bp, Homo sapiens
tttgaaaaatcctactgtcgctaatggattgggcagcaaagagatgttcaaagcatcagccaccacctgaaaattag

SEQ ID NO: 33797 - DNA, 80 bp, Homo sapiens
tactgtcgctaatggattgggcagcaaagagatgttcaaagcatcagccaccacctgaaaattagtgattaggtcaaatc

SEQ ID NO: 33798 - DNA, 78 bp, Homo sapiens
agcaaagagatgttcaaagcatcagccaccacctgaaaattagtgattaggtcaaatccctttatggtatctgtcaga

SEQ ID NO: 33799 - DNA, 77 bp, Homo sapiens
tcagccaccacctgaaaattagtgattaggtcaaatccctttatggtatctgtcagattctcttgagccctgaggaa

SEQ ID NO: 33800 - DNA, 74 bp, Homo sapiens
aaattagtgattaggtcaaatccctttatggtatctgtcagattctcttgagccctgaggaaataagatgtagg

SEQ ID NO: 33801 - DNA, 79 bp, Homo sapiens
ttaggtcaaatccctttatggtatctgtcagattctcttgagccctgaggaaataagatgtagggcatttctgatgtga

SEQ ID NO: 33802 - DNA, 79 bp, Homo sapiens
ctttatggtatctgtcagattctcttgagccctgaggaaataagatgtagggcatttctgatgtgactcagtgggaaaa

SEQ ID NO: 33803 - DNA, 80 bp, Homo sapiens
attctcttgagccctgaggaaataagatgtagggcatttctgatgtgactcagtgggaaaacttcatggagatatccaca

SEQ ID NO: 33804 - DNA, 82 bp, Homo sapiens
tgaggaaataagatgtagggcatttctgatgtgactcagtgggaaaacttcatggagatatccacagcagcagtaaatctta

SEQ ID NO: 33805 - DNA, 81 bp, Homo sapiens
ataagatgtagggcatttctgatgtgactcagtgggaaaacttcatggagatatccacagcagcagtaaatcttatggtta

SEQ ID NO: 33806 - DNA, 77 bp, Homo sapiens
tgtgactcagtgggaaaacttcatggagatatccacagcagcagtaaatcttatggttaggggaattacaagtatta

SEQ ID NO: 33807 - DNA, 72 bp, Homo sapiens
agtgggaaaacttcatggagatatccacagcagcagtaaatcttatggttaggggaattacaagtattaaaa

SEQ ID NO: 33808 - DNA, 77 bp, Homo sapiens
aacttcatggagatatccacagcagcagtaaatcttatggttaggggaattacaagtattaaaactgcatcaagtca

SEQ ID NO: 33809 - DNA, 77 bp, Homo sapiens
tccacagcagcagtaaatcttatggttaggggaattacaagtattaaaactgcatcaagtcatggggcatgtggaag

SEQ ID NO: 33810 - DNA, 73 bp, Homo sapiens
aatcttatggttaggggaattacaagtattaaaactgcatcaagtcatggggcatgtggaaggtagggaggca

SEQ ID NO: 33811 - DNA, 77 bp, Homo sapiens
ggaattacaagtattaaaactgcatcaagtcatggggcatgtggaaggtagggaggcaagatgacactaatatggaa

SEQ ID NO: 33812 - DNA, 75 bp, Homo sapiens
atgtggaaggtagggaggcaagatgacactaatatggaagaagagtcctaaaacgagaatggatattcaaatata

SEQ ID NO: 33813 - DNA, 72 bp, Homo sapiens
aggtagggaggcaagatgacactaatatggaagaagagtcctaaaacgagaatggatattcaaatataaact

SEQ ID NO: 33814 - DNA, 76 bp, Homo sapiens
caagatgacactaatatggaagaagagtcctaaaacgagaatggatattcaaatataaacttcacctcttgcacaa

SEQ ID NO: 33815 - DNA, 74 bp, Homo sapiens
tatggaagaagagtcctaaaacgagaatggatattcaaatataaacttcacctcttgcacaattttgcccaaga

SEQ ID NO: 33816 - DNA, 72 bp, Homo sapiens
aagaagagtcctaaaacgagaatggatattcaaatataaacttcacctcttgcacaattttgcccaagactg

SEQ ID NO: 33817 - DNA, 76 bp, Homo sapiens
taaaacgagaatggatattcaaatataaacttcacctcttgcacaattttgcccaagactggcactgaagatggtg

SEQ ID NO: 33818 - DNA, 75 bp, Homo sapiens
atattcaaatataaacttcacctcttgcacaattttgcccaagactggcactgaagatggtgtaacataggttaa

SEQ ID NO: 33819 - DNA, 72 bp, Homo sapiens
aaatataaacttcacctcttgcacaattttgcccaagactggcactgaagatggtgtaacataggttaaaaa

SEQ ID NO: 33820 - DNA, 74 bp, Homo sapiens
cttcacctcttgcacaattttgcccaagactggcactgaagatggtgtaacataggttaaaaatttacagattg

SEQ ID NO: 33821 - DNA, 75 bp, Homo sapiens
aattttgcccaagactggcactgaagatggtgtaacataggttaaaaatttacagattgtgctgagcttgacaaa

SEQ ID NO: 33822 - DNA, 76 bp, Homo sapiens
aagactggcactgaagatggtgtaacataggttaaaaatttacagattgtgctgagcttgacaaataagtgtatcc

SEQ ID NO: 33823 - DNA, 77 bp, Homo sapiens
gcactgaagatggtgtaacataggttaaaaatttacagattgtgctgagcttgacaaataagtgtatccttatgtaa

SEQ ID NO: 33824 - DNA, 75 bp, Homo sapiens
gatggtgtaacataggttaaaaatttacagattgtgctgagcttgacaaataagtgtatccttatgtaaatggaa

SEQ ID NO: 33825 - DNA, 73 bp, Homo sapiens
aggttaaaaatttacagattgtgctgagcttgacaaataagtgtatccttatgtaaatggaatataaattaca

SEQ ID NO: 33826 - DNA, 75 bp, Homo sapiens
aaatttacagattgtgctgagcttgacaaataagtgtatccttatgtaaatggaatataaattacatagttgtaa

SEQ ID NO: 33827 - DNA, 70 bp, Homo sapiens
aaaaaaaaaactaagagtttgagatgacttcttttaacatgaagaaatggatagtaagtgatgtcctcaa

SEQ ID NO: 33828 - DNA, 74 bp, Homo sapiens
aaactaagagtttgagatgacttcttttaacatgaagaaatggatagtaagtgatgtcctcaaaatcagagtcc

SEQ ID NO: 33829 - DNA, 76 bp, Homo sapiens
ttgagatgacttcttttaacatgaagaaatggatagtaagtgatgtcctcaaaatcagagtcctaaaagacaccta

SEQ ID NO: 33830 - DNA, 74 bp, Homo sapiens
tcttttaacatgaagaaatggatagtaagtgatgtcctcaaaatcagagtcctaaaagacacctatctagaacc

SEQ ID NO: 33831 - DNA, 73 bp, Homo sapiens
gaagaaatggatagtaagtgatgtcctcaaaatcagagtcctaaaagacacctatctagaacctaagtcacct

SEQ ID NO: 33832 - DNA, 73 bp, Homo sapiens
aatggatagtaagtgatgtcctcaaaatcagagtcctaaaagacacctatctagaacctaagtcaccttcttc

SEQ ID NO: 33833 - DNA, 73 bp, Homo sapiens
atgtcctcaaaatcagagtcctaaaagacacctatctagaacctaagtcaccttcttcctagtccagtgatac

SEQ ID NO: 33834 - DNA, 71 bp, Homo sapiens
aaaatcagagtcctaaaagacacctatctagaacctaagtcaccttcttcctagtccagtgatactttcac

SEQ ID NO: 33835 - DNA, 73 bp, Homo sapiens
agtcctaaaagacacctatctagaacctaagtcaccttcttcctagtccagtgatactttcacctcaccatgc

SEQ ID NO: 33836 - DNA, 76 bp, Homo sapiens
acctatctagaacctaagtcaccttcttcctagtccagtgatactttcacctcaccatgccatctcacttcattta

SEQ ID NO: 33837 - DNA, 75 bp, Homo sapiens
tagaacctaagtcaccttcttcctagtccagtgatactttcacctcaccatgccatctcacttcatttattttaa

SEQ ID NO: 33838 - DNA, 73 bp, Homo sapiens
accttcttcctagtccagtgatactttcacctcaccatgccatctcacttcatttattttaaaataagtaaca

SEQ ID NO: 33839 - DNA, 70 bp, Homo sapiens
ttatttttattttaaagcattattaaatatggatcagacttgaaaagtgtttatgcaatgttaatttaac

SEQ ID NO: 33840 - DNA, 73 bp, Homo sapiens
taaagcattattaaatatggatcagacttgaaaagtgtttatgcaatgttaatttaaccagtgttaagagaac

SEQ ID NO: 33841 - DNA, 72 bp, Homo sapiens
ttaaatatggatcagacttgaaaagtgtttatgcaatgttaatttaaccagtgttaagagaactagccaaac

SEQ ID NO: 33842 - DNA, 72 bp, Homo sapiens
ggatcagacttgaaaagtgtttatgcaatgttaatttaaccagtgttaagagaactagccaaacctagagat

SEQ ID NO: 33843 - DNA, 69 bp, Homo sapiens
gaaaagtgtttatgcaatgttaatttaaccagtgttaagagaactagccaaacctagagattgtaaaac

SEQ ID NO: 33844 - DNA, 70 bp, Homo sapiens
atgcaatgttaatttaaccagtgttaagagaactagccaaacctagagattgtaaaactttttcacttca

SEQ ID NO: 33845 - DNA, 67 bp, Homo sapiens
ttaatttaaccagtgttaagagaactagccaaacctagagattgtaaaactttttcacttcattgtt

SEQ ID NO: 33846 - DNA, 66 bp, Homo sapiens
aaaaaattaatgtcttggcacaccaccaccccaaaatctcaacttttgagttaatatttaaaagta

SEQ ID NO: 33847 - DNA, 66 bp, Homo sapiens
attaatgtcttggcacaccaccaccccaaaatctcaacttttgagttaatatttaaaagtaatttt

SEQ ID NO: 33848 - DNA, 68 bp, Homo sapiens
aatttttaaaaaagagtttgttttcttaagaaacaaaagcaatgctcttgatttgtcagcaggaccac

SEQ ID NO: 33849 - DNA, 73 bp, Homo sapiens
aaaaagagtttgttttcttaagaaacaaaagcaatgctcttgatttgtcagcaggaccaccacagagtgagat

SEQ ID NO: 33850 - DNA, 78 bp, Homo sapiens
tttgttttcttaagaaacaaaagcaatgctcttgatttgtcagcaggaccaccacagagtgagattgtatcttgttga

SEQ ID NO: 33851 - DNA, 80 bp, Homo sapiens
ttaagaaacaaaagcaatgctcttgatttgtcagcaggaccaccacagagtgagattgtatcttgttgagctatccaaac

SEQ ID NO: 33852 - DNA, 81 bp, Homo sapiens
aacaaaagcaatgctcttgatttgtcagcaggaccaccacagagtgagattgtatcttgttgagctatccaaactgcccta

SEQ ID NO: 33853 - DNA, 80 bp, Homo sapiens
aatgctcttgatttgtcagcaggaccaccacagagtgagattgtatcttgttgagctatccaaactgccctagtccctcc

SEQ ID NO: 33854 - DNA, 74 bp, Homo sapiens
accaccacagagtgagattgtatcttgttgagctatccaaactgccctagtccctccccattttgactaaccaa

SEQ ID NO: 33855 - DNA, 78 bp, Homo sapiens
acagagtgagattgtatcttgttgagctatccaaactgccctagtccctccccattttgactaaccaatgcatgacaa

SEQ ID NO: 33856 - DNA, 77 bp, Homo sapiens
agtgagattgtatcttgttgagctatccaaactgccctagtccctccccattttgactaaccaatgcatgacaacac

SEQ ID NO: 33857 - DNA, 78 bp, Homo sapiens
ttgtatcttgttgagctatccaaactgccctagtccctccccattttgactaaccaatgcatgacaacactggatgac

SEQ ID NO: 33858 - DNA, 76 bp, Homo sapiens
ttgagctatccaaactgccctagtccctccccattttgactaaccaatgcatgacaacactggatgaccgtgggga

SEQ ID NO: 33859 - DNA, 74 bp, Homo sapiens
aaactgccctagtccctccccattttgactaaccaatgcatgacaacactggatgaccgtggggacacagtcca

SEQ ID NO: 33860 - DNA, 80 bp, Homo sapiens
cctccccattttgactaaccaatgcatgacaacactggatgaccgtggggacacagtccatgctgtgaaactctctatga

SEQ ID NO: 33861 - DNA, 81 bp, Homo sapiens
attttgactaaccaatgcatgacaacactggatgaccgtggggacacagtccatgctgtgaaactctctatgaaagctcaa

SEQ ID NO: 33862 - DNA, 82 bp, Homo sapiens
taaccaatgcatgacaacactggatgaccgtggggacacagtccatgctgtgaaactctctatgaaagctcaaaggttcaca

SEQ ID NO: 33863 - DNA, 79 bp, Homo sapiens
atgacaacactggatgaccgtggggacacagtccatgctgtgaaactctctatgaaagctcaaaggttcacacagggcc

SEQ ID NO: 33864 - DNA, 77 bp, Homo sapiens
tgctgtgaaactctctatgaaagctcaaaggttcacacagggcctggccttgcaaccttggtctcttcaacacctaa

SEQ ID NO: 33865 - DNA, 75 bp, Homo sapiens
tatgaaagctcaaaggttcacacagggcctggccttgcaaccttggtctcttcaacacctaataagctataactg

SEQ ID NO: 33866 - DNA, 73 bp, Homo sapiens
gttcacacagggcctggccttgcaaccttggtctcttcaacacctaataagctataactggcccaaataatct

SEQ ID NO: 33867 - DNA, 74 bp, Homo sapiens
ttgcaaccttggtctcttcaacacctaataagctataactggcccaaataatcttttaatgtcacaagcagaat

SEQ ID NO: 33868 - DNA, 72 bp, Homo sapiens
ccttggtctcttcaacacctaataagctataactggcccaaataatcttttaatgtcacaagcagaattaaa

SEQ ID NO: 33869 - DNA, 72 bp, Homo sapiens
cacctaataagctataactggcccaaataatcttttaatgtcacaagcagaattaaaactatcttcaaagac

SEQ ID NO: 33870 - DNA, 74 bp, Homo sapiens
gctataactggcccaaataatcttttaatgtcacaagcagaattaaaactatcttcaaagactcaagttgaaga

SEQ ID NO: 33871 - DNA, 72 bp, Homo sapiens
ctggcccaaataatcttttaatgtcacaagcagaattaaaactatcttcaaagactcaagttgaagaaaaga

SEQ ID NO: 33872 - DNA, 74 bp, Homo sapiens
tcacaagcagaattaaaactatcttcaaagactcaagttgaagaaaagatttaaagttatactatgaaagagca

SEQ ID NO: 33873 - DNA, 74 bp, Homo sapiens
gcagaattaaaactatcttcaaagactcaagttgaagaaaagatttaaagttatactatgaaagagcagtctga

SEQ ID NO: 33874 - DNA, 76 bp, Homo sapiens
tatcttcaaagactcaagttgaagaaaagatttaaagttatactatgaaagagcagtctgacacagggagactaca

SEQ ID NO: 33875 - DNA, 75 bp, Homo sapiens
gttgaagaaaagatttaaagttatactatgaaagagcagtctgacacagggagactacatttaattcctatgaga

SEQ ID NO: 33876 - DNA, 72 bp, Homo sapiens
aagatttaaagttatactatgaaagagcagtctgacacagggagactacatttaattcctatgagaattttt

SEQ ID NO: 33877 - DNA, 71 bp, Homo sapiens
gaaagagcagtctgacacagggagactacatttaattcctatgagaattttttatacttgttaaaatcttt

SEQ ID NO: 33878 - DNA, 70 bp, Homo sapiens
ctgacacagggagactacatttaattcctatgagaattttttatacttgttaaaatcttttcaattatta

SEQ ID NO: 33879 - DNA, 67 bp, Homo sapiens
ggagactacatttaattcctatgagaattttttatacttgttaaaatcttttcaattattataaaaa

SEQ ID NO: 33880 - DNA, 68 bp, Homo sapiens
gagaattttttatacttgttaaaatcttttcaattattataaaaatttagtagcatgtaaatatagcc

SEQ ID NO: 33881 - DNA, 69 bp, Homo sapiens
tacttgttaaaatcttttcaattattataaaaatttagtagcatgtaaatatagccccaaaatggttgc

SEQ ID NO: 33882 - DNA, 70 bp, Homo sapiens
atcttttcaattattataaaaatttagtagcatgtaaatatagccccaaaatggttgctataataatccc

SEQ ID NO: 33883 - DNA, 72 bp, Homo sapiens
ttattataaaaatttagtagcatgtaaatatagccccaaaatggttgctataataatccccatttcatactg

SEQ ID NO: 33884 - DNA, 72 bp, Homo sapiens
catgtaaatatagccccaaaatggttgctataataatccccatttcatactgggtctgccttaacaggaaaa

SEQ ID NO: 33885 - DNA, 72 bp, Homo sapiens
atatagccccaaaatggttgctataataatccccatttcatactgggtctgccttaacaggaaaagctatta

SEQ ID NO: 33886 - DNA, 72 bp, Homo sapiens
aatggttgctataataatccccatttcatactgggtctgccttaacaggaaaagctattaggagtctttata

SEQ ID NO: 33887 - DNA, 71 bp, Homo sapiens
gctataataatccccatttcatactgggtctgccttaacaggaaaagctattaggagtctttatagtaatt

SEQ ID NO: 33888 - DNA, 72 bp, Homo sapiens
cccatttcatactgggtctgccttaacaggaaaagctattaggagtctttatagtaatttatctaatgtgaa

SEQ ID NO: 33889 - DNA, 71 bp, Homo sapiens
catactgggtctgccttaacaggaaaagctattaggagtctttatagtaatttatctaatgtgaaaaggaa

SEQ ID NO: 33890 - DNA, 70 bp, Homo sapiens
ctgccttaacaggaaaagctattaggagtctttatagtaatttatctaatgtgaaaaggaaatggcctta

SEQ ID NO: 33891 - DNA, 71 bp, Homo sapiens
aagctattaggagtctttatagtaatttatctaatgtgaaaaggaaatggccttataatagtttccattgc

SEQ ID NO: 33892 - DNA, 70 bp, Homo sapiens
attaggagtctttatagtaatttatctaatgtgaaaaggaaatggccttataatagtttccattgccttg

SEQ ID NO: 33893 - DNA, 68 bp, Homo sapiens
tttatagtaatttatctaatgtgaaaaggaaatggccttataatagtttccattgccttgtaattttt

SEQ ID NO: 33894 - DNA, 67 bp, Homo sapiens
tttatctaatgtgaaaaggaaatggccttataatagtttccattgccttgtaatttttttccatttt

SEQ ID NO: 33895 - DNA, 70 bp, Homo sapiens
tttttctttttatagaaaaaatataatattttggggagagtgaccatgactaatagcagtggaaaggaga

SEQ ID NO: 33896 - DNA, 71 bp, Homo sapiens
tatagaaaaaatataatattttggggagagtgaccatgactaatagcagtggaaaggagacaaaacctttg

SEQ ID NO: 33897 - DNA, 73 bp, Homo sapiens
atataatattttggggagagtgaccatgactaatagcagtggaaaggagacaaaacctttgtgaacagtgtaa

SEQ ID NO: 33898 - DNA, 72 bp, Homo sapiens
tattttggggagagtgaccatgactaatagcagtggaaaggagacaaaacctttgtgaacagtgtaacttta

SEQ ID NO: 33899 - DNA, 77 bp, Homo sapiens
tgaccatgactaatagcagtggaaaggagacaaaacctttgtgaacagtgtaactttacattcatcagggatgacaa

SEQ ID NO: 33900 - DNA, 74 bp, Homo sapiens
taatagcagtggaaaggagacaaaacctttgtgaacagtgtaactttacattcatcagggatgacaaactatag

SEQ ID NO: 33901 - DNA, 74 bp, Homo sapiens
agtggaaaggagacaaaacctttgtgaacagtgtaactttacattcatcagggatgacaaactataggacatga

SEQ ID NO: 33902 - DNA, 81 bp, Homo sapiens
cctttgtgaacagtgtaactttacattcatcagggatgacaaactataggacatgatgcctagaagaatcatcatcaggaa

SEQ ID NO: 33903 - DNA, 81 bp, Homo sapiens
taactttacattcatcagggatgacaaactataggacatgatgcctagaagaatcatcatcaggaagcccataaatttgtg

SEQ ID NO: 33904 - DNA, 81 bp, Homo sapiens
ttacattcatcagggatgacaaactataggacatgatgcctagaagaatcatcatcaggaagcccataaatttgtgttccc

SEQ ID NO: 33905 - DNA, 80 bp, Homo sapiens
atgacaaactataggacatgatgcctagaagaatcatcatcaggaagcccataaatttgtgttccctcaatgtttcagta

SEQ ID NO: 33906 - DNA, 77 bp, Homo sapiens
aaactataggacatgatgcctagaagaatcatcatcaggaagcccataaatttgtgttccctcaatgtttcagtaaa

SEQ ID NO: 33907 - DNA, 73 bp, Homo sapiens
agaatcatcatcaggaagcccataaatttgtgttccctcaatgtttcagtaaaaaccaattagaaggtctcaa

SEQ ID NO: 33908 - DNA, 70 bp, Homo sapiens
atcaggaagcccataaatttgtgttccctcaatgtttcagtaaaaaccaattagaaggtctcaactgaaa

SEQ ID NO: 33909 - DNA, 69 bp, Homo sapiens
agcccataaatttgtgttccctcaatgtttcagtaaaaaccaattagaaggtctcaactgaaattagta

SEQ ID NO: 33910 - DNA, 69 bp, Homo sapiens
ttgtgttccctcaatgtttcagtaaaaaccaattagaaggtctcaactgaaattagtaattaatccatt

SEQ ID NO: 33911 - DNA, 72 bp, Homo sapiens
ctcaatgtttcagtaaaaaccaattagaaggtctcaactgaaattagtaattaatccatttatgtgactaga

SEQ ID NO: 33912 - DNA, 71 bp, Homo sapiens
cagtaaaaaccaattagaaggtctcaactgaaattagtaattaatccatttatgtgactagataaaacaca

SEQ ID NO: 33913 - DNA, 74 bp, Homo sapiens
caattagaaggtctcaactgaaattagtaattaatccatttatgtgactagataaaacacagaatagggatgat

SEQ ID NO: 33914 - DNA, 74 bp, Homo sapiens
agtaattaatccatttatgtgactagataaaacacagaatagggatgattcaaaagcttcattaatttgtttca

SEQ ID NO: 33915 - DNA, 75 bp, Homo sapiens
gtgactagataaaacacagaatagggatgattcaaaagcttcattaatttgtttcacaccaacattcacaattgg

SEQ ID NO: 33916 - DNA, 74 bp, Homo sapiens
gataaaacacagaatagggatgattcaaaagcttcattaatttgtttcacaccaacattcacaattggtaagaa

SEQ ID NO: 33917 - DNA, 72 bp, Homo sapiens
agaatagggatgattcaaaagcttcattaatttgtttcacaccaacattcacaattggtaagaaaaataaga

SEQ ID NO: 33918 - DNA, 74 bp, Homo sapiens
cattaatttgtttcacaccaacattcacaattggtaagaaaaataagaagtaatcaactgcatgcaccaaaagc

SEQ ID NO: 33919 - DNA, 74 bp, Homo sapiens
caacattcacaattggtaagaaaaataagaagtaatcaactgcatgcaccaaaagccccaagacagaaatctta

SEQ ID NO: 33920 - DNA, 72 bp, Homo sapiens
tggtaagaaaaataagaagtaatcaactgcatgcaccaaaagccccaagacagaaatcttaggtattcagtt

SEQ ID NO: 33921 - DNA, 71 bp, Homo sapiens
gaaaaataagaagtaatcaactgcatgcaccaaaagccccaagacagaaatcttaggtattcagtttcttt

SEQ ID NO: 33922 - DNA, 76 bp, Homo sapiens
taatcaactgcatgcaccaaaagccccaagacagaaatcttaggtattcagtttctttttcacaggcattgctagt

SEQ ID NO: 33923 - DNA, 72 bp, Homo sapiens
atgcaccaaaagccccaagacagaaatcttaggtattcagtttctttttcacaggcattgctagttcaaaaa

SEQ ID NO: 33924 - DNA, 69 bp, Homo sapiens
aaaagccccaagacagaaatcttaggtattcagtttctttttcacaggcattgctagttcaaaaaccaa

SEQ ID NO: 33925 - DNA, 70 bp, Homo sapiens
agacagaaatcttaggtattcagtttctttttcacaggcattgctagttcaaaaaccaaaactctgggaa

SEQ ID NO: 33926 - DNA, 69 bp, Homo sapiens
gtttctttttcacaggcattgctagttcaaaaaccaaaactctgggaatactggcacttagaggaaaaa

SEQ ID NO: 33927 - DNA, 68 bp, Homo sapiens
ttttcacaggcattgctagttcaaaaaccaaaactctgggaatactggcacttagaggaaaaaaaaac

SEQ ID NO: 33928 - DNA, 66 bp, Homo sapiens
tcaaaaaccaaaactctgggaatactggcacttagaggaaaaaaaaacttccactgtcattttaaa

SEQ ID NO: 33929 - DNA, 67 bp, Homo sapiens
ctctgggaatactggcacttagaggaaaaaaaaacttccactgtcattttaaaataagcatttaagg

SEQ ID NO: 33930 - DNA, 66 bp, Homo sapiens
atactggcacttagaggaaaaaaaaacttccactgtcattttaaaataagcatttaaggtaaaagc

SEQ ID NO: 33931 - DNA, 69 bp, Homo sapiens
gaggaaaaaaaaacttccactgtcattttaaaataagcatttaaggtaaaagctaacagtctgcatgga

SEQ ID NO: 33932 - DNA, 70 bp, Homo sapiens
aaaaacttccactgtcattttaaaataagcatttaaggtaaaagctaacagtctgcatggagcaggaaaa

SEQ ID NO: 33933 - DNA, 70 bp, Homo sapiens
ccactgtcattttaaaataagcatttaaggtaaaagctaacagtctgcatggagcaggaaaaaaattagg

SEQ ID NO: 33934 - DNA, 70 bp, Homo sapiens
aataagcatttaaggtaaaagctaacagtctgcatggagcaggaaaaaaattaggtaatgctaaaacaaa

SEQ ID NO: 33935 - DNA, 73 bp, Homo sapiens
gcatttaaggtaaaagctaacagtctgcatggagcaggaaaaaaattaggtaatgctaaaacaaatgctaata

SEQ ID NO: 33936 - DNA, 75 bp, Homo sapiens
gctaacagtctgcatggagcaggaaaaaaattaggtaatgctaaaacaaatgctaataatttagtgtaatgtaca

SEQ ID NO: 33937 - DNA, 73 bp, Homo sapiens
cagtctgcatggagcaggaaaaaaattaggtaatgctaaaacaaatgctaataatttagtgtaatgtacaaaa

SEQ ID NO: 33938 - DNA, 68 bp, Homo sapiens
gcaggaaaaaaattaggtaatgctaaaacaaatgctaataatttagtgtaatgtacaaaaattaccac

SEQ ID NO: 33939 - DNA, 71 bp, Homo sapiens
ttaggtaatgctaaaacaaatgctaataatttagtgtaatgtacaaaaattaccacttgtactagtatgcc

SEQ ID NO: 33940 - DNA, 70 bp, Homo sapiens
gctaaaacaaatgctaataatttagtgtaatgtacaaaaattaccacttgtactagtatgccttaagaaa

SEQ ID NO: 33941 - DNA, 69 bp, Homo sapiens
aatgctaataatttagtgtaatgtacaaaaattaccacttgtactagtatgccttaagaaaaaagtaca

SEQ ID NO: 33942 - DNA, 67 bp, Homo sapiens
ataatttagtgtaatgtacaaaaattaccacttgtactagtatgccttaagaaaaaagtacaaattg

SEQ ID NO: 33943 - DNA, 68 bp, Homo sapiens
gtacaaaaattaccacttgtactagtatgccttaagaaaaaagtacaaattgtatttacataattaca

SEQ ID NO: 33944 - DNA, 69 bp, Homo sapiens
attaccacttgtactagtatgccttaagaaaaaagtacaaattgtatttacataattacacactttgtc

SEQ ID NO: 33945 - DNA, 69 bp, Homo sapiens
cttgtactagtatgccttaagaaaaaagtacaaattgtatttacataattacacactttgtctttgact

SEQ ID NO: 33946 - DNA, 67 bp, Homo sapiens
gccttaagaaaaaagtacaaattgtatttacataattacacactttgtctttgacttctttttcttc

SEQ ID NO: 33947 - DNA, 69 bp, Homo sapiens
ctttttcttctttttaccatctttgctcatcttttctttatgttttcgaatttctcgaactaatgtata

SEQ ID NO: 33948 - DNA, 75 bp, Homo sapiens
tttttaccatctttgctcatcttttctttatgttttcgaatttctcgaactaatgtatagaaggcatcatcaaca

SEQ ID NO: 33949 - DNA, 76 bp, Homo sapiens
catctttgctcatcttttctttatgttttcgaatttctcgaactaatgtatagaaggcatcatcaacaccctgaaa

SEQ ID NO: 33950 - DNA, 72 bp, Homo sapiens
ctttatgttttcgaatttctcgaactaatgtatagaaggcatcatcaacaccctgaaatacataaaaagtat

SEQ ID NO: 33951 - DNA, 74 bp, Homo sapiens
cgaatttctcgaactaatgtatagaaggcatcatcaacaccctgaaatacataaaaagtattaaaatgtgaata

SEQ ID NO: 33952 - DNA, 74 bp, Homo sapiens
ttaaaagacatctgctttctgccaaaattaatgtgctgaacttaaacttaccagattacattataatgcatttt

SEQ ID NO: 33953 - DNA, 74 bp, Homo sapiens
tctgctttctgccaaaattaatgtgctgaacttaaacttaccagattacattataatgcattttttaattttca

SEQ ID NO: 33954 - DNA, 73 bp, Homo sapiens
gccaaaattaatgtgctgaacttaaacttaccagattacattataatgcattttttaattttcacacagccag

SEQ ID NO: 33955 - DNA, 72 bp, Homo sapiens
gtgctgaacttaaacttaccagattacattataatgcattttttaattttcacacagccaggagtcttttct

SEQ ID NO: 33956 - DNA, 71 bp, Homo sapiens
cttaaacttaccagattacattataatgcattttttaattttcacacagccaggagtcttttcttctttgc

SEQ ID NO: 33957 - DNA, 73 bp, Homo sapiens
ccagattacattataatgcattttttaattttcacacagccaggagtcttttcttctttgctgatttttttca

SEQ ID NO: 33958 - DNA, 73 bp, Homo sapiens
atgcattttttaattttcacacagccaggagtcttttcttctttgctgatttttttcaatctgtattgtcgga

SEQ ID NO: 33959 - DNA, 72 bp, Homo sapiens
tttttaattttcacacagccaggagtcttttcttctttgctgatttttttcaatctgtattgtcggatctcc

SEQ ID NO: 33960 - DNA, 74 bp, Homo sapiens
acagccaggagtcttttcttctttgctgatttttttcaatctgtattgtcggatctccctcaccaatgtataaa

SEQ ID NO: 33961 - DNA, 73 bp, Homo sapiens
aggagtcttttcttctttgctgatttttttcaatctgtattgtcggatctccctcaccaatgtataaaaagca

SEQ ID NO: 33962 - DNA, 76 bp, Homo sapiens
ttcttctttgctgatttttttcaatctgtattgtcggatctccctcaccaatgtataaaaagcatcctccactctc

SEQ ID NO: 33963 - DNA, 77 bp, Homo sapiens
ttttttcaatctgtattgtcggatctccctcaccaatgtataaaaagcatcctccactctctgcattgtaaaacaca

SEQ ID NO: 33964 - DNA, 76 bp, Homo sapiens
aatctgtattgtcggatctccctcaccaatgtataaaaagcatcctccactctctgcattgtaaaacacaacttct

SEQ ID NO: 33965 - DNA, 74 bp, Homo sapiens
ttgtcggatctccctcaccaatgtataaaaagcatcctccactctctgcattgtaaaacacaacttctttaaag

SEQ ID NO: 33966 - DNA, 77 bp, Homo sapiens
cagttatgattttgcagaaaacagatctgtatttatttcagtgttacttacctgtcttgtctttgctgatgtttcaa

SEQ ID NO: 33967 - DNA, 74 bp, Homo sapiens
gcagaaaacagatctgtatttatttcagtgttacttacctgtcttgtctttgctgatgtttcaataaaaggaat

SEQ ID NO: 33968 - DNA, 74 bp, Homo sapiens
cagatctgtatttatttcagtgttacttacctgtcttgtctttgctgatgtttcaataaaaggaattccataac

SEQ ID NO: 33969 - DNA, 73 bp, Homo sapiens
tttcagtgttacttacctgtcttgtctttgctgatgtttcaataaaaggaattccataacttcttgctaagtc

SEQ ID NO: 33970 - DNA, 74 bp, Homo sapiens
tgttacttacctgtcttgtctttgctgatgtttcaataaaaggaattccataacttcttgctaagtcctgagcc

SEQ ID NO: 33971 - DNA, 74 bp, Homo sapiens
ctttgctgatgtttcaataaaaggaattccataacttcttgctaagtcctgagcctgttttgtgtctactgttc

SEQ ID NO: 33972 - DNA, 73 bp, Homo sapiens
aataaaaggaattccataacttcttgctaagtcctgagcctgttttgtgtctactgttctagaaggcaaatca

SEQ ID NO: 33973 - DNA, 74 bp, Homo sapiens
aaggaattccataacttcttgctaagtcctgagcctgttttgtgtctactgttctagaaggcaaatcacattta

SEQ ID NO: 33974 - DNA, 74 bp, Homo sapiens
ataacttcttgctaagtcctgagcctgttttgtgtctactgttctagaaggcaaatcacatttatttcctacta

SEQ ID NO: 33975 - DNA, 74 bp, Homo sapiens
taagtcctgagcctgttttgtgtctactgttctagaaggcaaatcacatttatttcctactaggaccataggta

SEQ ID NO: 33976 - DNA, 75 bp, Homo sapiens
ctgttttgtgtctactgttctagaaggcaaatcacatttatttcctactaggaccataggtacatcttcagagtc

SEQ ID NO: 33977 - DNA, 74 bp, Homo sapiens
tctactgttctagaaggcaaatcacatttatttcctactaggaccataggtacatcttcagagtccttaactct

SEQ ID NO: 33978 - DNA, 71 bp, Homo sapiens
ctagaaggcaaatcacatttatttcctactaggaccataggtacatcttcagagtccttaactcttttaat

SEQ ID NO: 33979 - DNA, 71 bp, Homo sapiens
atcacatttatttcctactaggaccataggtacatcttcagagtccttaactcttttaatttgttctctgg

SEQ ID NO: 33980 - DNA, 70 bp, Homo sapiens
ttatttcctactaggaccataggtacatcttcagagtccttaactcttttaatttgttctctgggaaaga

SEQ ID NO: 33981 - DNA, 66 bp, Homo sapiens
aggaccataggtacatcttcagagtccttaactcttttaatttgttctctgggaaagaaaaaaaag

SEQ ID NO: 33982 - DNA, 70 bp, Homo sapiens
gtacatcttcagagtccttaactcttttaatttgttctctgggaaagaaaaaaaagttatagcacagtca

SEQ ID NO: 33983 - DNA, 74 bp, Homo sapiens
ctataattactccttaatgtcagcttattatattcaatttaaacccacctataatggtgaatatcttcaaatga

SEQ ID NO: 33984 - DNA, 74 bp, Homo sapiens
tactccttaatgtcagcttattatattcaatttaaacccacctataatggtgaatatcttcaaatgatttagta

SEQ ID NO: 33985 - DNA, 76 bp, Homo sapiens
tgtcagcttattatattcaatttaaacccacctataatggtgaatatcttcaaatgatttagtattatttatggca

SEQ ID NO: 33986 - DNA, 73 bp, Homo sapiens
ttcaatttaaacccacctataatggtgaatatcttcaaatgatttagtattatttatggcaaatacacaaaga

SEQ ID NO: 33987 - DNA, 72 bp, Homo sapiens
acccacctataatggtgaatatcttcaaatgatttagtattatttatggcaaatacacaaagaaagccctcc

SEQ ID NO: 33988 - DNA, 75 bp, Homo sapiens
taatggtgaatatcttcaaatgatttagtattatttatggcaaatacacaaagaaagccctccccagtcctcatg

SEQ ID NO: 33989 - DNA, 73 bp, Homo sapiens
aatatcttcaaatgatttagtattatttatggcaaatacacaaagaaagccctccccagtcctcatgtactgg

SEQ ID NO: 33990 - DNA, 72 bp, Homo sapiens
aaatgatttagtattatttatggcaaatacacaaagaaagccctccccagtcctcatgtactggtccctcat

SEQ ID NO: 33991 - DNA, 75 bp, Homo sapiens
agtattatttatggcaaatacacaaagaaagccctccccagtcctcatgtactggtccctcattgcactgtactc

SEQ ID NO: 33992 - DNA, 76 bp, Homo sapiens
aaatacacaaagaaagccctccccagtcctcatgtactggtccctcattgcactgtactcctcttgacctgctgtg

SEQ ID NO: 33993 - DNA, 77 bp, Homo sapiens
aaagaaagccctccccagtcctcatgtactggtccctcattgcactgtactcctcttgacctgctgtgtcgagaata

SEQ ID NO: 33994 - DNA, 80 bp, Homo sapiens
tccccagtcctcatgtactggtccctcattgcactgtactcctcttgacctgctgtgtcgagaatatccaagagacaggt

SEQ ID NO: 33995 - DNA, 82 bp, Homo sapiens
tcatgtactggtccctcattgcactgtactcctcttgacctgctgtgtcgagaatatccaagagacaggtttctccatcaat

SEQ ID NO: 33996 - DNA, 80 bp, Homo sapiens
ctggtccctcattgcactgtactcctcttgacctgctgtgtcgagaatatccaagagacaggtttctccatcaattacta

SEQ ID NO: 33997 - DNA, 79 bp, Homo sapiens
attgcactgtactcctcttgacctgctgtgtcgagaatatccaagagacaggtttctccatcaattactacttgcttcc

SEQ ID NO: 33998 - DNA, 78 bp, Homo sapiens
tactcctcttgacctgctgtgtcgagaatatccaagagacaggtttctccatcaattactacttgcttcctgtaggaa

SEQ ID NO: 33999 - DNA, 77 bp, Homo sapiens
acctgctgtgtcgagaatatccaagagacaggtttctccatcaattactacttgcttcctgtaggaatcctgagaag

SEQ ID NO: 34000 - DNA, 75 bp, Homo sapiens
agaatatccaagagacaggtttctccatcaattactacttgcttcctgtaggaatcctgagaagggagaaacaca

SEQ ID NO: 34001 - DNA, 75 bp, Homo sapiens
gagacaggtttctccatcaattactacttgcttcctgtaggaatcctgagaagggagaaacacagtctggattat

SEQ ID NO: 34002 - DNA, 76 bp, Homo sapiens
aattagtactgcctcttaaataagtgaatgaatccatttgatgtaaatatatgcagatactaaaaaatgaatggaa

SEQ ID NO: 34003 - DNA, 75 bp, Homo sapiens
gcctcttaaataagtgaatgaatccatttgatgtaaatatatgcagatactaaaaaatgaatggaaattttatta

SEQ ID NO: 34004 - DNA, 76 bp, Homo sapiens
gtgaatgaatccatttgatgtaaatatatgcagatactaaaaaatgaatggaaattttattagaattaagcagtta

SEQ ID NO: 34005 - DNA, 74 bp, Homo sapiens
aatccatttgatgtaaatatatgcagatactaaaaaatgaatggaaattttattagaattaagcagttaacata

SEQ ID NO: 34006 - DNA, 72 bp, Homo sapiens
tgtaaatatatgcagatactaaaaaatgaatggaaattttattagaattaagcagttaacataaatacaatt

SEQ ID NO: 34007 - DNA, 69 bp, Homo sapiens
aaatgaatggaaattttattagaattaagcagttaacataaatacaatttaacagatttttcaattata

SEQ ID NO: 34008 - DNA, 72 bp, Homo sapiens
tattagaattaagcagttaacataaatacaatttaacagatttttcaattatataatacaaatccttctcaa

SEQ ID NO: 34009 - DNA, 73 bp, Homo sapiens
agcagttaacataaatacaatttaacagatttttcaattatataatacaaatccttctcaaatattctgaaga

SEQ ID NO: 34010 - DNA, 74 bp, Homo sapiens
aatacaatttaacagatttttcaattatataatacaaatccttctcaaatattctgaagatactacatatttga

SEQ ID NO: 34011 - DNA, 76 bp, Homo sapiens
acagatttttcaattatataatacaaatccttctcaaatattctgaagatactacatatttgaaatgaatgttcac

SEQ ID NO: 34012 - DNA, 78 bp, Homo sapiens
tcaattatataatacaaatccttctcaaatattctgaagatactacatatttgaaatgaatgttcacgacaaatgccc

SEQ ID NO: 34013 - DNA, 76 bp, Homo sapiens
atacaaatccttctcaaatattctgaagatactacatatttgaaatgaatgttcacgacaaatgccccactttcaa

SEQ ID NO: 34014 - DNA, 80 bp, Homo sapiens
ttctcaaatattctgaagatactacatatttgaaatgaatgttcacgacaaatgccccactttcaatgtaacagtgtgca

SEQ ID NO: 34015 - DNA, 77 bp, Homo sapiens
aatattctgaagatactacatatttgaaatgaatgttcacgacaaatgccccactttcaatgtaacagtgtgcaaag

SEQ ID NO: 34016 - DNA, 75 bp, Homo sapiens
atactacatatttgaaatgaatgttcacgacaaatgccccactttcaatgtaacagtgtgcaaaggcagattttt

SEQ ID NO: 34017 - DNA, 73 bp, Homo sapiens
atttgaaatgaatgttcacgacaaatgccccactttcaatgtaacagtgtgcaaaggcagattttttaatctt

SEQ ID NO: 34018 - DNA, 74 bp, Homo sapiens
tgaatgttcacgacaaatgccccactttcaatgtaacagtgtgcaaaggcagattttttaatctttcaacaatt

SEQ ID NO: 34019 - DNA, 71 bp, Homo sapiens
cgacaaatgccccactttcaatgtaacagtgtgcaaaggcagattttttaatctttcaacaatttgtttta

SEQ ID NO: 34020 - DNA, 70 bp, Homo sapiens
cccactttcaatgtaacagtgtgcaaaggcagattttttaatctttcaacaatttgttttaaaatctatg

SEQ ID NO: 34021 - DNA, 72 bp, Homo sapiens
tgtaacagtgtgcaaaggcagattttttaatctttcaacaatttgttttaaaatctatgtttcaatgttctc

SEQ ID NO: 34022 - DNA, 69 bp, Homo sapiens
ttttaatctttcaacaatttgttttaaaatctatgtttcaatgttctcttagaaaaacaagcacatgtt

SEQ ID NO: 34023 - DNA, 72 bp, Homo sapiens
tcaacaatttgttttaaaatctatgtttcaatgttctcttagaaaaacaagcacatgtttaagataccataa

SEQ ID NO: 34024 - DNA, 76 bp, Homo sapiens
tctatgtttcaatgttctcttagaaaaacaagcacatgtttaagataccataaattttatcaagacaatgaagctg

SEQ ID NO: 34025 - DNA, 74 bp, Homo sapiens
ttcaatgttctcttagaaaaacaagcacatgtttaagataccataaattttatcaagacaatgaagctgttaat

SEQ ID NO: 34026 - DNA, 72 bp, Homo sapiens
aacaagcacatgtttaagataccataaattttatcaagacaatgaagctgttaatttttaaattacaatata

SEQ ID NO: 34027 - DNA, 71 bp, Homo sapiens
tgtttaagataccataaattttatcaagacaatgaagctgttaatttttaaattacaatatatattaagaa

SEQ ID NO: 34028 - DNA, 70 bp, Homo sapiens
ccataaattttatcaagacaatgaagctgttaatttttaaattacaatatatattaagaataatttaata

SEQ ID NO: 34029 - DNA, 64 bp, Homo sapiens
atttttaaattacaatatatattaagaataatttaataaattttaccttcaattaaattttata

SEQ ID NO: 34030 - DNA, 67 bp, Homo sapiens
aattacaatatatattaagaataatttaataaattttaccttcaattaaattttatataatatgtaa

SEQ ID NO: 34031 - DNA, 66 bp, Homo sapiens
tattaagaataatttaataaattttaccttcaattaaattttatataatatgtaaagttttatgta

SEQ ID NO: 34032 - DNA, 65 bp, Homo sapiens
ttaataaattttaccttcaattaaattttatataatatgtaaagttttatgtaaaaatacaacca

SEQ ID NO: 34033 - DNA, 67 bp, Homo sapiens
ttaccttcaattaaattttatataatatgtaaagttttatgtaaaaatacaaccaaaacaatacaca

SEQ ID NO: 34034 - DNA, 69 bp, Homo sapiens
tcaattaaattttatataatatgtaaagttttatgtaaaaatacaaccaaaacaatacacacagagatt

SEQ ID NO: 34035 - DNA, 70 bp, Homo sapiens
tataatatgtaaagttttatgtaaaaatacaaccaaaacaatacacacagagattttaacacatttatgg

SEQ ID NO: 34036 - DNA, 68 bp, Homo sapiens
gtaaagttttatgtaaaaatacaaccaaaacaatacacacagagattttaacacatttatgggaggga

SEQ ID NO: 34037 - DNA, 69 bp, Homo sapiens
tgtaaaaatacaaccaaaacaatacacacagagattttaacacatttatgggagggaagaaaataagac

SEQ ID NO: 34038 - DNA, 68 bp, Homo sapiens
caaccaaaacaatacacacagagattttaacacatttatgggagggaagaaaataagactagggaaaa

SEQ ID NO: 34039 - DNA, 71 bp, Homo sapiens
aacaatacacacagagattttaacacatttatgggagggaagaaaataagactagggaaaagaatgcagga

SEQ ID NO: 34040 - DNA, 71 bp, Homo sapiens
gagattttaacacatttatgggagggaagaaaataagactagggaaaagaatgcaggagtcttcaacaata

SEQ ID NO: 34041 - DNA, 69 bp, Homo sapiens
aacacatttatgggagggaagaaaataagactagggaaaagaatgcaggagtcttcaacaatattaact

SEQ ID NO: 34042 - DNA, 70 bp, Homo sapiens
ggagggaagaaaataagactagggaaaagaatgcaggagtcttcaacaatattaacttttctatcttgga

SEQ ID NO: 34043 - DNA, 72 bp, Homo sapiens
aagaatgcaggagtcttcaacaatattaacttttctatcttggaaaaaagaaagagctaaatcaaatgttgc

SEQ ID NO: 34044 - DNA, 73 bp, Homo sapiens
tgcaggagtcttcaacaatattaacttttctatcttggaaaaaagaaagagctaaatcaaatgttgctaaatg

SEQ ID NO: 34045 - DNA, 71 bp, Homo sapiens
caatattaacttttctatcttggaaaaaagaaagagctaaatcaaatgttgctaaatgttaagatatgaaa

SEQ ID NO: 34046 - DNA, 78 bp, Homo sapiens
gctaaatgttaagatatgaaagagctggttggtacacacatgaggttcattatactactattctataaagcactaaga

SEQ ID NO: 34047 - DNA, 79 bp, Homo sapiens
atgttaagatatgaaagagctggttggtacacacatgaggttcattatactactattctataaagcactaagagtgcac

SEQ ID NO: 34048 - DNA, 78 bp, Homo sapiens
agagctggttggtacacacatgaggttcattatactactattctataaagcactaagagtgcacccattttatcatta

SEQ ID NO: 34049 - DNA, 76 bp, Homo sapiens
ggttggtacacacatgaggttcattatactactattctataaagcactaagagtgcacccattttatcattactta

SEQ ID NO: 34050 - DNA, 75 bp, Homo sapiens
ggtacacacatgaggttcattatactactattctataaagcactaagagtgcacccattttatcattacttaaaa

SEQ ID NO: 34051 - DNA, 76 bp, Homo sapiens
tgaggttcattatactactattctataaagcactaagagtgcacccattttatcattacttaaaatggatttcata

SEQ ID NO: 34052 - DNA, 74 bp, Homo sapiens
ttcattatactactattctataaagcactaagagtgcacccattttatcattacttaaaatggatttcatattt

SEQ ID NO: 34053 - DNA, 73 bp, Homo sapiens
tatactactattctataaagcactaagagtgcacccattttatcattacttaaaatggatttcatatttttaa

SEQ ID NO: 34054 - DNA, 71 bp, Homo sapiens
tactattctataaagcactaagagtgcacccattttatcattacttaaaatggatttcatatttttaaatt

SEQ ID NO: 34055 - DNA, 69 bp, Homo sapiens
taaatttttgttggtttgataagctacacatttttattgttttcataccaatttctttgaggagtaata

SEQ ID NO: 34056 - DNA, 72 bp, Homo sapiens
tgttggtttgataagctacacatttttattgttttcataccaatttctttgaggagtaataatgttatatag

SEQ ID NO: 34057 - DNA, 70 bp, Homo sapiens
ttgataagctacacatttttattgttttcataccaatttctttgaggagtaataatgttatataggtttt

SEQ ID NO: 34058 - DNA, 69 bp, Homo sapiens
tttttattgttttcataccaatttctttgaggagtaataatgttatataggttttttttcttatctgca

SEQ ID NO: 34059 - DNA, 72 bp, Homo sapiens
tttcataccaatttctttgaggagtaataatgttatataggttttttttcttatctgcatatttatcgccaa

SEQ ID NO: 34060 - DNA, 71 bp, Homo sapiens
aatgttatataggttttttttcttatctgcatatttatcgccaacgtgtgtcctttgcccatgtggaattt

SEQ ID NO: 34061 - DNA, 70 bp, Homo sapiens
ggttttttttcttatctgcatatttatcgccaacgtgtgtcctttgcccatgtggaattttaatcttctt

SEQ ID NO: 34062 - DNA, 77 bp, Homo sapiens
ttatctgcatatttatcgccaacgtgtgtcctttgcccatgtggaattttaatcttcttttacactgacttgcataa

SEQ ID NO: 34063 - DNA, 72 bp, Homo sapiens
atatttatcgccaacgtgtgtcctttgcccatgtggaattttaatcttcttttacactgacttgcataattt

SEQ ID NO: 34064 - DNA, 70 bp, Homo sapiens
cgccaacgtgtgtcctttgcccatgtggaattttaatcttcttttacactgacttgcataatttttttaa

SEQ ID NO: 34065 - DNA, 71 bp, Homo sapiens
cgtgtgtcctttgcccatgtggaattttaatcttcttttacactgacttgcataatttttttaatgaagtg

SEQ ID NO: 34066 - DNA, 69 bp, Homo sapiens
cctttgcccatgtggaattttaatcttcttttacactgacttgcataatttttttaatgaagtgtttcc

SEQ ID NO: 34067 - DNA, 68 bp, Homo sapiens
cccatgtggaattttaatcttcttttacactgacttgcataatttttttaatgaagtgtttcctggtt

SEQ ID NO: 34068 - DNA, 68 bp, Homo sapiens
tttaatcttcttttacactgacttgcataatttttttaatgaagtgtttcctggtttattaaatgcct

SEQ ID NO: 34069 - DNA, 68 bp, Homo sapiens
aatcttcttttacactgacttgcataatttttttaatgaagtgtttcctggtttattaaatgccttta

SEQ ID NO: 34070 - DNA, 69 bp, Homo sapiens
tttacactgacttgcataatttttttaatgaagtgtttcctggtttattaaatgcctttattttgagga

SEQ ID NO: 34071 - DNA, 69 bp, Homo sapiens
tacactgacttgcataatttttttaatgaagtgtttcctggtttattaaatgcctttattttgaggaat

SEQ ID NO: 34072 - DNA, 68 bp, Homo sapiens
tgacttgcataatttttttaatgaagtgtttcctggtttattaaatgcctttattttgaggaatttaa

SEQ ID NO: 34073 - DNA, 66 bp, Homo sapiens
gcataatttttttaatgaagtgtttcctggtttattaaatgcctttattttgaggaatttaaaagc

SEQ ID NO: 34074 - DNA, 70 bp, Homo sapiens
taatgaagtgtttcctggtttattaaatgcctttattttgaggaatttaaaagctaactcattcaagata

SEQ ID NO: 34075 - DNA, 71 bp, Homo sapiens
ttaaatgcctttattttgaggaatttaaaagctaactcattcaagataagataacctcattaaccagaaca

SEQ ID NO: 34076 - DNA, 71 bp, Homo sapiens
gcctttattttgaggaatttaaaagctaactcattcaagataagataacctcattaaccagaacatcaagt

SEQ ID NO: 34077 - DNA, 72 bp, Homo sapiens
gaggaatttaaaagctaactcattcaagataagataacctcattaaccagaacatcaagtttgtcatttttc

SEQ ID NO: 34078 - DNA, 72 bp, Homo sapiens
aaaagctaactcattcaagataagataacctcattaaccagaacatcaagtttgtcatttttccattataat

SEQ ID NO: 34079 - DNA, 72 bp, Homo sapiens
gataacctcattaaccagaacatcaagtttgtcatttttccattataattaataactaaattattcagtgtg

SEQ ID NO: 34080 - DNA, 72 bp, Homo sapiens
ctcattaaccagaacatcaagtttgtcatttttccattataattaataactaaattattcagtgtgttcacc

SEQ ID NO: 34081 - DNA, 71 bp, Homo sapiens
catcaagtttgtcatttttccattataattaataactaaattattcagtgtgttcaccttttaacatactc

SEQ ID NO: 34082 - DNA, 69 bp, Homo sapiens
cattataattaataactaaattattcagtgtgttcaccttttaacatactcgagtatgggttttccaac

SEQ ID NO: 34083 - DNA, 72 bp, Homo sapiens
ttaataactaaattattcagtgtgttcaccttttaacatactcgagtatgggttttccaactcaggcagtga

SEQ ID NO: 34084 - DNA, 75 bp, Homo sapiens
aaattattcagtgtgttcaccttttaacatactcgagtatgggttttccaactcaggcagtgactctgacacaga

SEQ ID NO: 34085 - DNA, 80 bp, Homo sapiens
tgttcaccttttaacatactcgagtatgggttttccaactcaggcagtgactctgacacagagacatattccatgtatca

SEQ ID NO: 34086 - DNA, 78 bp, Homo sapiens
ttttaacatactcgagtatgggttttccaactcaggcagtgactctgacacagagacatattccatgtatcaaaacaa

SEQ ID NO: 34087 - DNA, 79 bp, Homo sapiens
gagtatgggttttccaactcaggcagtgactctgacacagagacatattccatgtatcaaaacaaaacaatatatacat

SEQ ID NO: 34088 - DNA, 80 bp, Homo sapiens
ttttccaactcaggcagtgactctgacacagagacatattccatgtatcaaaacaaaacaatatatacattccaagtata

SEQ ID NO: 34089 - DNA, 80 bp, Homo sapiens
actcaggcagtgactctgacacagagacatattccatgtatcaaaacaaaacaatatatacattccaagtatagattttg

SEQ ID NO: 34090 - DNA, 78 bp, Homo sapiens
gtgactctgacacagagacatattccatgtatcaaaacaaaacaatatatacattccaagtatagattttgtttacta

SEQ ID NO: 34091 - DNA, 76 bp, Homo sapiens
cacagagacatattccatgtatcaaaacaaaacaatatatacattccaagtatagattttgtttactatattgtag

SEQ ID NO: 34092 - DNA, 73 bp, Homo sapiens
tattccatgtatcaaaacaaaacaatatatacattccaagtatagattttgtttactatattgtagtaaacaa

SEQ ID NO: 34093 - DNA, 67 bp, Homo sapiens
aaacaaaacaatatatacattccaagtatagattttgtttactatattgtagtaaacaaaaaaccta

SEQ ID NO: 34094 - DNA, 68 bp, Homo sapiens
caatatatacattccaagtatagattttgtttactatattgtagtaaacaaaaaacctaaagaaacta

SEQ ID NO: 34095 - DNA, 65 bp, Homo sapiens
acattccaagtatagattttgtttactatattgtagtaaacaaaaaacctaaagaaactaataac

SEQ ID NO: 34096 - DNA, 64 bp, Homo sapiens
ctatattgtagtaaacaaaaaacctaaagaaactaataacttttactaaaggtaatcatattac

SEQ ID NO: 34097 - DNA, 64 bp, Homo sapiens
ttgtagtaaacaaaaaacctaaagaaactaataacttttactaaaggtaatcatattactatta

SEQ ID NO: 34098 - DNA, 68 bp, Homo sapiens
aacctaaagaaactaataacttttactaaaggtaatcatattactattaatagtaattacagcagtca

SEQ ID NO: 34099 - DNA, 71 bp, Homo sapiens
aactaataacttttactaaaggtaatcatattactattaatagtaattacagcagtcaacatttactgagc

SEQ ID NO: 34100 - DNA, 71 bp, Homo sapiens
taacttttactaaaggtaatcatattactattaatagtaattacagcagtcaacatttactgagcccttac

SEQ ID NO: 34101 - DNA, 79 bp, Homo sapiens
ggtaatcatattactattaatagtaattacagcagtcaacatttactgagcccttacttatatgccagatactgtcata

SEQ ID NO: 34102 - DNA, 80 bp, Homo sapiens
ttactattaatagtaattacagcagtcaacatttactgagcccttacttatatgccagatactgtcataagcatattaca

SEQ ID NO: 34103 - DNA, 82 bp, Homo sapiens
taatagtaattacagcagtcaacatttactgagcccttacttatatgccagatactgtcataagcatattacaaacatcatc

SEQ ID NO: 34104 - DNA, 82 bp, Homo sapiens
attacagcagtcaacatttactgagcccttacttatatgccagatactgtcataagcatattacaaacatcatctcatttaa

SEQ ID NO: 34105 - DNA, 82 bp, Homo sapiens
atttactgagcccttacttatatgccagatactgtcataagcatattacaaacatcatctcatttaatctccatcttcattc

SEQ ID NO: 34106 - DNA, 83 bp, Homo sapiens
agcccttacttatatgccagatactgtcataagcatattacaaacatcatctcatttaatctccatcttcattctgccaattc

SEQ ID NO: 34107 - DNA, 89 bp, Homo sapiens
ttatatgccagatactgtcataagcatattacaaacatcatctcatttaatctccatcttcattctgccaattccatgagatgctcttc

SEQ ID NO: 34108 - DNA, 87 bp, Homo sapiens
atactgtcataagcatattacaaacatcatctcatttaatctccatcttcattctgccaattccatgagatgctcttctcaatataa

SEQ ID NO: 34109 - DNA, 85 bp, Homo sapiens
ataagcatattacaaacatcatctcatttaatctccatcttcattctgccaattccatgagatgctcttctcaatataactagaa

SEQ ID NO: 34110 - DNA, 85 bp, Homo sapiens
tacaaacatcatctcatttaatctccatcttcattctgccaattccatgagatgctcttctcaatataactagaactgctgaaaa

SEQ ID NO: 34111 - DNA, 84 bp, Homo sapiens
catttaatctccatcttcattctgccaattccatgagatgctcttctcaatataactagaactgctgaaaatgtcaataatgta

SEQ ID NO: 34112 - DNA, 83 bp, Homo sapiens
aatctccatcttcattctgccaattccatgagatgctcttctcaatataactagaactgctgaaaatgtcaataatgtattac

SEQ ID NO: 34113 - DNA, 79 bp, Homo sapiens
attctgccaattccatgagatgctcttctcaatataactagaactgctgaaaatgtcaataatgtattactcggggatt

SEQ ID NO: 34114 - DNA, 77 bp, Homo sapiens
aattccatgagatgctcttctcaatataactagaactgctgaaaatgtcaataatgtattactcggggatttcctct

SEQ ID NO: 34115 - DNA, 76 bp, Homo sapiens
agatgctcttctcaatataactagaactgctgaaaatgtcaataatgtattactcggggatttcctcttgaaattg

SEQ ID NO: 34116 - DNA, 73 bp, Homo sapiens
ctcaatataactagaactgctgaaaatgtcaataatgtattactcggggatttcctcttgaaattgtatgttt

SEQ ID NO: 34117 - DNA, 73 bp, Homo sapiens
ctagaactgctgaaaatgtcaataatgtattactcggggatttcctcttgaaattgtatgttttcttaatgta

SEQ ID NO: 34118 - DNA, 70 bp, Homo sapiens
aaatgtcaataatgtattactcggggatttcctcttgaaattgtatgttttcttaatgtattaagtattg

SEQ ID NO: 34119 - DNA, 69 bp, Homo sapiens
ataatgtattactcggggatttcctcttgaaattgtatgttttcttaatgtattaagtattgtaaggac

SEQ ID NO: 34120 - DNA, 70 bp, Homo sapiens
tcttgaaattgtatgttttcttaatgtattaagtattgtaaggactttttacatactgcttaataacacc

SEQ ID NO: 34121 - DNA, 71 bp, Homo sapiens
tttcttaatgtattaagtattgtaaggactttttacatactgcttaataacacctgtaggaaaagatgaga

SEQ ID NO: 34122 - DNA, 76 bp, Homo sapiens
aagaatggtcctgcaccagtaatatgcatattaaaacaagatttacctctattgttggatcatattcgtccacaaa

SEQ ID NO: 34123 - DNA, 78 bp, Homo sapiens
tggtcctgcaccagtaatatgcatattaaaacaagatttacctctattgttggatcatattcgtccacaaaatgattc

SEQ ID NO: 34124 - DNA, 77 bp, Homo sapiens
ccagtaatatgcatattaaaacaagatttacctctattgttggatcatattcgtccacaaaatgattctgaattagc

SEQ ID NO: 34125 - DNA, 77 bp, Homo sapiens
ttaaaacaagatttacctctattgttggatcatattcgtccacaaaatgattctgaattagctgtatcgtcaaggca

SEQ ID NO: 34126 - DNA, 79 bp, Homo sapiens
agatttacctctattgttggatcatattcgtccacaaaatgattctgaattagctgtatcgtcaaggcactcttgccta

SEQ ID NO: 34127 - DNA, 80 bp, Homo sapiens
cctctattgttggatcatattcgtccacaaaatgattctgaattagctgtatcgtcaaggcactcttgcctacgccacca

SEQ ID NO: 34128 - DNA, 80 bp, Homo sapiens
atcatattcgtccacaaaatgattctgaattagctgtatcgtcaaggcactcttgcctacgccaccagctccaactacca

SEQ ID NO: 34129 - DNA, 78 bp, Homo sapiens
cacaaaatgattctgaattagctgtatcgtcaaggcactcttgcctacgccaccagctccaactaccacaagtttata

SEQ ID NO: 34130 - DNA, 78 bp, Homo sapiens
aatgattctgaattagctgtatcgtcaaggcactcttgcctacgccaccagctccaactaccacaagtttatattcag

SEQ ID NO: 34131 - DNA, 77 bp, Homo sapiens
aattagctgtatcgtcaaggcactcttgcctacgccaccagctccaactaccacaagtttatattcagtcattttca

SEQ ID NO: 34132 - DNA, 78 bp, Homo sapiens
tcaaggcactcttgcctacgccaccagctccaactaccacaagtttatattcagtcattttcagcaggccttataata

SEQ ID NO: 34133 - DNA, 75 bp, Homo sapiens
tcttgcctacgccaccagctccaactaccacaagtttatattcagtcattttcagcaggccttataataaaaata

SEQ ID NO: 34134 - DNA, 74 bp, Homo sapiens
tacgccaccagctccaactaccacaagtttatattcagtcattttcagcaggccttataataaaaataatgaaa

SEQ ID NO: 34135 - DNA, 74 bp, Homo sapiens
ctccaactaccacaagtttatattcagtcattttcagcaggccttataataaaaataatgaaaatgtgactata

SEQ ID NO: 34136 - DNA, 65 bp, Homo sapiens
aagagggtcgggacccgggcaggggcccaggaggggtggtccgctccgtacctctctcccgcacc

SEQ ID NO: 34137 - DNA, 71 bp, Homo sapiens
ccgggcaggggcccaggaggggtggtccgctccgtacctctctcccgcacctgggagccgctgagcctctg

SEQ ID NO: 34138 - DNA, 71 bp, Homo sapiens
cccaggaggggtggtccgctccgtacctctctcccgcacctgggagccgctgagcctctggccccgccgcc

SEQ ID NO: 34139 - DNA, 74 bp, Homo sapiens
gggtggtccgctccgtacctctctcccgcacctgggagccgctgagcctctggccccgccgccgccttcagtgc

SEQ ID NO: 34140 - DNA, 77 bp, Homo sapiens
ctccgtacctctctcccgcacctgggagccgctgagcctctggccccgccgccgccttcagtgcctgcgccgcgctc

SEQ ID NO: 34141 - DNA, 79 bp, Homo sapiens
tctcccgcacctgggagccgctgagcctctggccccgccgccgccttcagtgcctgcgccgcgctcgctcccagtccga

SEQ ID NO: 34142 - DNA, 77 bp, Homo sapiens
acctgggagccgctgagcctctggccccgccgccgccttcagtgcctgcgccgcgctcgctcccagtccgaaatggc

SEQ ID NO: 34143 - DNA, 75 bp, Homo sapiens
tgagcctctggccccgccgccgccttcagtgcctgcgccgcgctcgctcccagtccgaaatggcgggggccggga

SEQ ID NO: 34144 - DNA, 73 bp, Homo sapiens
gccccgccgccgccttcagtgcctgcgccgcgctcgctcccagtccgaaatggcgggggccgggagtactggc

SEQ ID NO: 34145 - DNA, 73 bp, Homo sapiens
ccgccttcagtgcctgcgccgcgctcgctcccagtccgaaatggcgggggccgggagtactggccgagccgcc

SEQ ID NO: 34146 - DNA, 74 bp, Homo sapiens
tcagtgcctgcgccgcgctcgctcccagtccgaaatggcgggggccgggagtactggccgagccgccgccacct

SEQ ID NO: 34147 - DNA, 71 bp, Homo sapiens
cgctcgctcccagtccgaaatggcgggggccgggagtactggccgagccgccgccaccttcgccgccgcca

SEQ ID NO: 34148 - DNA, 70 bp, Homo sapiens
ctcccagtccgaaatggcgggggccgggagtactggccgagccgccgccaccttcgccgccgccactgcc

SEQ ID NO: 34149 - DNA, 72 bp, Homo sapiens
cgaaatggcgggggccgggagtactggccgagccgccgccaccttcgccgccgccactgccgccgccgctgc

SEQ ID NO: 34150 - DNA, 74 bp, Homo sapiens
gggccgggagtactggccgagccgccgccaccttcgccgccgccactgccgccgccgctgctgcctccgccgcc

SEQ ID NO: 34151 - DNA, 76 bp, Homo sapiens
gtactggccgagccgccgccaccttcgccgccgccactgccgccgccgctgctgcctccgccgccgcggccgccgc

SEQ ID NO: 34152 - DNA, 74 bp, Homo sapiens
ccgccaccttcgccgccgccactgccgccgccgctgctgcctccgccgccgcggccgccgcctaggaaaatcga

SEQ ID NO: 34153 - DNA, 78 bp, Homo sapiens
ttcgccgccgccactgccgccgccgctgctgcctccgccgccgcggccgccgcctaggaaaatcgagctccgagcaca

SEQ ID NO: 34154 - DNA, 77 bp, Homo sapiens
actgccgccgccgctgctgcctccgccgccgcggccgccgcctaggaaaatcgagctccgagcacaccgatgagttc

SEQ ID NO: 34155 - DNA, 75 bp, Homo sapiens
cgccgccgctgctgcctccgccgccgcggccgccgcctaggaaaatcgagctccgagcacaccgatgagttcggg

SEQ ID NO: 34156 - DNA, 75 bp, Homo sapiens
ctggtaggcagcctgctggtcctgggccctcggagggaggtgagacccggcagcccctgcctcccagcctgtgcc

SEQ ID NO: 34157 - DNA, 73 bp, Homo sapiens
agcctgctggtcctgggccctcggagggaggtgagacccggcagcccctgcctcccagcctgtgcccccagcc

SEQ ID NO: 34158 - DNA, 76 bp, Homo sapiens
tcctgggccctcggagggaggtgagacccggcagcccctgcctcccagcctgtgcccccagcctgcgtgctgccca

SEQ ID NO: 34159 - DNA, 77 bp, Homo sapiens
agggaggtgagacccggcagcccctgcctcccagcctgtgcccccagcctgcgtgctgcccagagcccccatagaga

SEQ ID NO: 34160 - DNA, 80 bp, Homo sapiens
tgagacccggcagcccctgcctcccagcctgtgcccccagcctgcgtgctgcccagagcccccatagagagaggtgagga

SEQ ID NO: 34161 - DNA, 80 bp, Homo sapiens
ccctgcctcccagcctgtgcccccagcctgcgtgctgcccagagcccccatagagagaggtgaggagacagagccgggca

SEQ ID NO: 34162 - DNA, 79 bp, Homo sapiens
ctcccagcctgtgcccccagcctgcgtgctgcccagagcccccatagagagaggtgaggagacagagccgggcagggtg

SEQ ID NO: 34163 - DNA, 77 bp, Homo sapiens
ccccagcctgcgtgctgcccagagcccccatagagagaggtgaggagacagagccgggcagggtgggggctgttctg

SEQ ID NO: 34164 - DNA, 79 bp, Homo sapiens
ctgcgtgctgcccagagcccccatagagagaggtgaggagacagagccgggcagggtgggggctgttctgtgccctgga

SEQ ID NO: 34165 - DNA, 75 bp, Homo sapiens
agagcccccatagagagaggtgaggagacagagccgggcagggtgggggctgttctgtgccctggagggtggctc

SEQ ID NO: 34166 - DNA, 74 bp, Homo sapiens
atagagagaggtgaggagacagagccgggcagggtgggggctgttctgtgccctggagggtggctccactaaag

SEQ ID NO: 34167 - DNA, 73 bp, Homo sapiens
cgggcctcattccaatccccactaaggccatccccacctacttgcaggtccccgccgccaccctcatggatca

SEQ ID NO: 34168 - DNA, 73 bp, Homo sapiens
attccaatccccactaaggccatccccacctacttgcaggtccccgccgccaccctcatggatcagccacagt

SEQ ID NO: 34169 - DNA, 73 bp, Homo sapiens
ccccactaaggccatccccacctacttgcaggtccccgccgccaccctcatggatcagccacagttcagcggg

SEQ ID NO: 34170 - DNA, 75 bp, Homo sapiens
tccccacctacttgcaggtccccgccgccaccctcatggatcagccacagttcagcggggcgccccgctttctca

SEQ ID NO: 34171 - DNA, 73 bp, Homo sapiens
cctacttgcaggtccccgccgccaccctcatggatcagccacagttcagcggggcgccccgctttctcacccg

SEQ ID NO: 34172 - DNA, 72 bp, Homo sapiens
ccgccgccaccctcatggatcagccacagttcagcggggcgccccgctttctcacccggcccaaggccttcg

SEQ ID NO: 34173 - DNA, 72 bp, Homo sapiens
accctcatggatcagccacagttcagcggggcgccccgctttctcacccggcccaaggccttcgtggtgtcg

SEQ ID NO: 34174 - DNA, 69 bp, Homo sapiens
acagttcagcggggcgccccgctttctcacccggcccaaggccttcgtggtgtcggtgggcaaggacgc

SEQ ID NO: 34175 - DNA, 71 bp, Homo sapiens
gggcgccccgctttctcacccggcccaaggccttcgtggtgtcggtgggcaaggacgccaccctcagctgc

SEQ ID NO: 34176 - DNA, 73 bp, Homo sapiens
ttctcacccggcccaaggccttcgtggtgtcggtgggcaaggacgccaccctcagctgccagatcgtgggtaa

SEQ ID NO: 34177 - DNA, 74 bp, Homo sapiens
ccaaggccttcgtggtgtcggtgggcaaggacgccaccctcagctgccagatcgtgggtaatcccacgccacag

SEQ ID NO: 34178 - DNA, 76 bp, Homo sapiens
ccttcgtggtgtcggtgggcaaggacgccaccctcagctgccagatcgtgggtaatcccacgccacaggtgagctg

SEQ ID NO: 34179 - DNA, 77 bp, Homo sapiens
tgtcggtgggcaaggacgccaccctcagctgccagatcgtgggtaatcccacgccacaggtgagctgggagaaggac

SEQ ID NO: 34180 - DNA, 76 bp, Homo sapiens
aaggacgccaccctcagctgccagatcgtgggtaatcccacgccacaggtgagctgggagaaggaccagcagccgg

SEQ ID NO: 34181 - DNA, 76 bp, Homo sapiens
accctcagctgccagatcgtgggtaatcccacgccacaggtgagctgggagaaggaccagcagccggtggcggccg

SEQ ID NO: 34182 - DNA, 75 bp, Homo sapiens
agatcgtgggtaatcccacgccacaggtgagctgggagaaggaccagcagccggtggcggccggcgcgcgcttcc

SEQ ID NO: 34183 - DNA, 76 bp, Homo sapiens
gtaatcccacgccacaggtgagctgggagaaggaccagcagccggtggcggccggcgcgcgcttccgtctggccca

SEQ ID NO: 34184 - DNA, 74 bp, Homo sapiens
acaggtgagctgggagaaggaccagcagccggtggcggccggcgcgcgcttccgtctggcccaggacggcgacc

SEQ ID NO: 34185 - DNA, 73 bp, Homo sapiens
aaggaccagcagccggtggcggccggcgcgcgcttccgtctggcccaggacggcgacctctaccgcctcacta

SEQ ID NO: 34186 - DNA, 72 bp, Homo sapiens
agccggtggcggccggcgcgcgcttccgtctggcccaggacggcgacctctaccgcctcactatcctggacc

SEQ ID NO: 34187 - DNA, 76 bp, Homo sapiens
ggcgcgcgcttccgtctggcccaggacggcgacctctaccgcctcactatcctggacctggcgctgggcgacagtg

SEQ ID NO: 34188 - DNA, 76 bp, Homo sapiens
ctggcccaggacggcgacctctaccgcctcactatcctggacctggcgctgggcgacagtgggcaatacgtgtgcc

SEQ ID NO: 34189 - DNA, 81 bp, Homo sapiens
ctaccgcctcactatcctggacctggcgctgggcgacagtgggcaatacgtgtgccgcgcgcgcaatgccataggcgaggc

SEQ ID NO: 34190 - DNA, 82 bp, Homo sapiens
actatcctggacctggcgctgggcgacagtgggcaatacgtgtgccgcgcgcgcaatgccataggcgaggccttcgctgctg

SEQ ID NO: 34191 - DNA, 83 bp, Homo sapiens
acctggcgctgggcgacagtgggcaatacgtgtgccgcgcgcgcaatgccataggcgaggccttcgctgctgtgggcctgcag

SEQ ID NO: 34192 - DNA, 82 bp, Homo sapiens
cgacagtgggcaatacgtgtgccgcgcgcgcaatgccataggcgaggccttcgctgctgtgggcctgcaggtggacgcggag

SEQ ID NO: 34193 - DNA, 81 bp, Homo sapiens
aatgccataggcgaggccttcgctgctgtgggcctgcaggtggacgcggaggccgcgtgcgccgagcaggcgccgcacttc

SEQ ID NO: 34194 - DNA, 82 bp, Homo sapiens
ataggcgaggccttcgctgctgtgggcctgcaggtggacgcggaggccgcgtgcgccgagcaggcgccgcacttcctgctgc

SEQ ID NO: 34195 - DNA, 82 bp, Homo sapiens
ttcgctgctgtgggcctgcaggtggacgcggaggccgcgtgcgccgagcaggcgccgcacttcctgctgcggcccacgtcca

SEQ ID NO: 34196 - DNA, 82 bp, Homo sapiens
gcctgcaggtggacgcggaggccgcgtgcgccgagcaggcgccgcacttcctgctgcggcccacgtccatccgcgtgcgcga

SEQ ID NO: 34197 - DNA, 82 bp, Homo sapiens
tggacgcggaggccgcgtgcgccgagcaggcgccgcacttcctgctgcggcccacgtccatccgcgtgcgcgagggctcaga

SEQ ID NO: 34198 - DNA, 82 bp, Homo sapiens
gtgcgccgagcaggcgccgcacttcctgctgcggcccacgtccatccgcgtgcgcgagggctcagaggccaccttccgctgc

SEQ ID NO: 34199 - DNA, 78 bp, Homo sapiens
cgccgcacttcctgctgcggcccacgtccatccgcgtgcgcgagggctcagaggccaccttccgctgccgcgtgggtg

SEQ ID NO: 34200 - DNA, 77 bp, Homo sapiens
acttcctgctgcggcccacgtccatccgcgtgcgcgagggctcagaggccaccttccgctgccgcgtgggtggctcc

SEQ ID NO: 34201 - DNA, 75 bp, Homo sapiens
cccacgtccatccgcgtgcgcgagggctcagaggccaccttccgctgccgcgtgggtggctccccgaggccggca

SEQ ID NO: 34202 - DNA, 77 bp, Homo sapiens
atccgcgtgcgcgagggctcagaggccaccttccgctgccgcgtgggtggctccccgaggccggcagtgagctggtc

SEQ ID NO: 34203 - DNA, 74 bp, Homo sapiens
gagggctcagaggccaccttccgctgccgcgtgggtggctccccgaggccggcagtgagctggtccaaggacgg

SEQ ID NO: 34204 - DNA, 71 bp, Homo sapiens
cgtgggtggctccccgaggccggcagtgagctggtccaaggacgggcggcgcctgggtgagcccgacggcc

SEQ ID NO: 34205 - DNA, 71 bp, Homo sapiens
ctccccgaggccggcagtgagctggtccaaggacgggcggcgcctgggtgagcccgacggcccccgcgtgc

SEQ ID NO: 34206 - DNA, 73 bp, Homo sapiens
tggtccaaggacgggcggcgcctgggtgagcccgacggcccccgcgtgcgcgtggaggagctcggcgaggcaa

SEQ ID NO: 34207 - DNA, 76 bp, Homo sapiens
acgggcggcgcctgggtgagcccgacggcccccgcgtgcgcgtggaggagctcggcgaggcaagtgcgctgcgcat

SEQ ID NO: 34208 - DNA, 78 bp, Homo sapiens
gtgagcccgacggcccccgcgtgcgcgtggaggagctcggcgaggcaagtgcgctgcgcattcgggcggcgcggccgc

SEQ ID NO: 34209 - DNA, 79 bp, Homo sapiens
cccgcgtgcgcgtggaggagctcggcgaggcaagtgcgctgcgcattcgggcggcgcggccgcgcgacggcggcactta

SEQ ID NO: 34210 - DNA, 77 bp, Homo sapiens
ctcggcgaggcaagtgcgctgcgcattcgggcggcgcggccgcgcgacggcggcacttacgaggtccgcgccgagaa

SEQ ID NO: 34211 - DNA, 75 bp, Homo sapiens
cgaggcaagtgcgctgcgcattcgggcggcgcggccgcgcgacggcggcacttacgaggtccgcgccgagaaccc

SEQ ID NO: 34212 - DNA, 76 bp, Homo sapiens
ctgcgcattcgggcggcgcggccgcgcgacggcggcacttacgaggtccgcgccgagaacccgctgggcgctgcca

SEQ ID NO: 34213 - DNA, 74 bp, Homo sapiens
ttcgggcggcgcggccgcgcgacggcggcacttacgaggtccgcgccgagaacccgctgggcgctgccagcgcc

SEQ ID NO: 34214 - DNA, 75 bp, Homo sapiens
cggcacttacgaggtccgcgccgagaacccgctgggcgctgccagcgccgccgcggcgctagtggtggactcgga

SEQ ID NO: 34215 - DNA, 74 bp, Homo sapiens
cttacgaggtccgcgccgagaacccgctgggcgctgccagcgccgccgcggcgctagtggtggactcggacgcc

SEQ ID NO: 34216 - DNA, 75 bp, Homo sapiens
ccgagaacccgctgggcgctgccagcgccgccgcggcgctagtggtggactcggacgccgcggacacggccagcc

SEQ ID NO: 34217 - DNA, 74 bp, Homo sapiens
aacccgctgggcgctgccagcgccgccgcggcgctagtggtggactcggacgccgcggacacggccagccggcc

SEQ ID NO: 34218 - DNA, 73 bp, Homo sapiens
tgccagcgccgccgcggcgctagtggtggactcggacgccgcggacacggccagccggcccgggacctccacg

SEQ ID NO: 34219 - DNA, 72 bp, Homo sapiens
ctagtggtggactcggacgccgcggacacggccagccggcccgggacctccacggccgcgctcctggcgcac

SEQ ID NO: 34220 - DNA, 75 bp, Homo sapiens
tggactcggacgccgcggacacggccagccggcccgggacctccacggccgcgctcctggcgcacctgcagcggc

SEQ ID NO: 34221 - DNA, 77 bp, Homo sapiens
cggacacggccagccggcccgggacctccacggccgcgctcctggcgcacctgcagcggcggcgcgaggctatgcgc

SEQ ID NO: 34222 - DNA, 77 bp, Homo sapiens
acggccagccggcccgggacctccacggccgcgctcctggcgcacctgcagcggcggcgcgaggctatgcgcgccga

SEQ ID NO: 34223 - DNA, 76 bp, Homo sapiens
ggcccgggacctccacggccgcgctcctggcgcacctgcagcggcggcgcgaggctatgcgcgccgagggcgcccc

SEQ ID NO: 34224 - DNA, 81 bp, Homo sapiens
tcctggcgcacctgcagcggcggcgcgaggctatgcgcgccgagggcgcccccgcctcaccgcccagcaccggcacgcgca

SEQ ID NO: 34225 - DNA, 79 bp, Homo sapiens
acctgcagcggcggcgcgaggctatgcgcgccgagggcgcccccgcctcaccgcccagcaccggcacgcgcacctgcac

SEQ ID NO: 34226 - DNA, 78 bp, Homo sapiens
cggcgcgaggctatgcgcgccgagggcgcccccgcctcaccgcccagcaccggcacgcgcacctgcacggtgactgaa

SEQ ID NO: 34227 - DNA, 79 bp, Homo sapiens
aggctatgcgcgccgagggcgcccccgcctcaccgcccagcaccggcacgcgcacctgcacggtgactgaaggcaagca

SEQ ID NO: 34228 - DNA, 81 bp, Homo sapiens
gagggcgcccccgcctcaccgcccagcaccggcacgcgcacctgcacggtgactgaaggcaagcacgcgcgcctcagctgc

SEQ ID NO: 34229 - DNA, 81 bp, Homo sapiens
ccgcctcaccgcccagcaccggcacgcgcacctgcacggtgactgaaggcaagcacgcgcgcctcagctgctacgtgaccg

SEQ ID NO: 34230 - DNA, 82 bp, Homo sapiens
cgcccagcaccggcacgcgcacctgcacggtgactgaaggcaagcacgcgcgcctcagctgctacgtgaccggcgagcccaa

SEQ ID NO: 34231 - DNA, 80 bp, Homo sapiens
accggcacgcgcacctgcacggtgactgaaggcaagcacgcgcgcctcagctgctacgtgaccggcgagcccaagcccga

SEQ ID NO: 34232 - DNA, 79 bp, Homo sapiens
cctgcacggtgactgaaggcaagcacgcgcgcctcagctgctacgtgaccggcgagcccaagcccgagacggtgtggaa

SEQ ID NO: 34233 - DNA, 77 bp, Homo sapiens
acggtgactgaaggcaagcacgcgcgcctcagctgctacgtgaccggcgagcccaagcccgagacggtgtggaagaa

SEQ ID NO: 34234 - DNA, 76 bp, Homo sapiens
aaggcaagcacgcgcgcctcagctgctacgtgaccggcgagcccaagcccgagacggtgtggaagaaggacggcca

SEQ ID NO: 34235 - DNA, 75 bp, Homo sapiens
cgcctcagctgctacgtgaccggcgagcccaagcccgagacggtgtggaagaaggacggccagctggtgaccgag

SEQ ID NO: 34236 - DNA, 73 bp, Homo sapiens
agctgctacgtgaccggcgagcccaagcccgagacggtgtggaagaaggacggccagctggtgaccgagggcc

SEQ ID NO: 34237 - DNA, 72 bp, Homo sapiens
tgaccggcgagcccaagcccgagacggtgtggaagaaggacggccagctggtgaccgagggccggcgccacg

SEQ ID NO: 34238 - DNA, 71 bp, Homo sapiens
aagcccgagacggtgtggaagaaggacggccagctggtgaccgagggccggcgccacgtggtgtacgagga

SEQ ID NO: 34239 - DNA, 73 bp, Homo sapiens
agacggtgtggaagaaggacggccagctggtgaccgagggccggcgccacgtggtgtacgaggacgcgcagga

SEQ ID NO: 34240 - DNA, 74 bp, Homo sapiens
aaggacggccagctggtgaccgagggccggcgccacgtggtgtacgaggacgcgcaggagaacttcgtgctcaa

SEQ ID NO: 34241 - DNA, 76 bp, Homo sapiens
ccagctggtgaccgagggccggcgccacgtggtgtacgaggacgcgcaggagaacttcgtgctcaagatcctcttc

SEQ ID NO: 34242 - DNA, 79 bp, Homo sapiens
tgaccgagggccggcgccacgtggtgtacgaggacgcgcaggagaacttcgtgctcaagatcctcttctgcaagcagtc

SEQ ID NO: 34243 - DNA, 78 bp, Homo sapiens
cgccacgtggtgtacgaggacgcgcaggagaacttcgtgctcaagatcctcttctgcaagcagtcggaccgcggcctc

SEQ ID NO: 34244 - DNA, 81 bp, Homo sapiens
tggtgtacgaggacgcgcaggagaacttcgtgctcaagatcctcttctgcaagcagtcggaccgcggcctctacacctgca

SEQ ID NO: 34245 - DNA, 79 bp, Homo sapiens
acgcgcaggagaacttcgtgctcaagatcctcttctgcaagcagtcggaccgcggcctctacacctgcacggcgtccaa

SEQ ID NO: 34246 - DNA, 77 bp, Homo sapiens
agaacttcgtgctcaagatcctcttctgcaagcagtcggaccgcggcctctacacctgcacggcgtccaacctcgtg

SEQ ID NO: 34247 - DNA, 78 bp, Homo sapiens
tcaagatcctcttctgcaagcagtcggaccgcggcctctacacctgcacggcgtccaacctcgtgggccagacctaca

SEQ ID NO: 34248 - DNA, 77 bp, Homo sapiens
atcctcttctgcaagcagtcggaccgcggcctctacacctgcacggcgtccaacctcgtgggccagacctacagctc

SEQ ID NO: 34249 - DNA, 77 bp, Homo sapiens
agcagtcggaccgcggcctctacacctgcacggcgtccaacctcgtgggccagacctacagctctgtgctggtcgta

SEQ ID NO: 34250 - DNA, 78 bp, Homo sapiens
ccgcggcctctacacctgcacggcgtccaacctcgtgggccagacctacagctctgtgctggtcgtagtgcgcggtga

SEQ ID NO: 34251 - DNA, 79 bp, Homo sapiens
ctctacacctgcacggcgtccaacctcgtgggccagacctacagctctgtgctggtcgtagtgcgcggtgagctcctgg

SEQ ID NO: 34252 - DNA, 76 bp, Homo sapiens
acggcgtccaacctcgtgggccagacctacagctctgtgctggtcgtagtgcgcggtgagctcctgggtgcggggc

SEQ ID NO: 34253 - DNA, 76 bp, Homo sapiens
aacctcgtgggccagacctacagctctgtgctggtcgtagtgcgcggtgagctcctgggtgcggggcgcgcgggcc

SEQ ID NO: 34254 - DNA, 71 bp, Homo sapiens
tcctgcaccctccggccccgcccctctcaccagtcttctctcctggcagagcccgcggttcccttcaaaaa

SEQ ID NO: 34255 - DNA, 74 bp, Homo sapiens
ggccccgcccctctcaccagtcttctctcctggcagagcccgcggttcccttcaaaaagcggctgcaagatctg

SEQ ID NO: 34256 - DNA, 77 bp, Homo sapiens
ctctcaccagtcttctctcctggcagagcccgcggttcccttcaaaaagcggctgcaagatctggaggtgcgggaga

SEQ ID NO: 34257 - DNA, 74 bp, Homo sapiens
agtcttctctcctggcagagcccgcggttcccttcaaaaagcggctgcaagatctggaggtgcgggagaaggag

SEQ ID NO: 34258 - DNA, 74 bp, Homo sapiens
tggcagagcccgcggttcccttcaaaaagcggctgcaagatctggaggtgcgggagaaggagtcggccacgttc

SEQ ID NO: 34259 - DNA, 73 bp, Homo sapiens
ccgcggttcccttcaaaaagcggctgcaagatctggaggtgcgggagaaggagtcggccacgttcctatgtga

SEQ ID NO: 34260 - DNA, 74 bp, Homo sapiens
ttcccttcaaaaagcggctgcaagatctggaggtgcgggagaaggagtcggccacgttcctatgtgaggtgccc

SEQ ID NO: 34261 - DNA, 75 bp, Homo sapiens
aaagcggctgcaagatctggaggtgcgggagaaggagtcggccacgttcctatgtgaggtgccccagccgtccac

SEQ ID NO: 34262 - DNA, 74 bp, Homo sapiens
aagatctggaggtgcgggagaaggagtcggccacgttcctatgtgaggtgccccagccgtccactgaggccgcg

SEQ ID NO: 34263 - DNA, 72 bp, Homo sapiens
cgggagaaggagtcggccacgttcctatgtgaggtgccccagccgtccactgaggccgcgtggttcaaggag

SEQ ID NO: 34264 - DNA, 73 bp, Homo sapiens
aaggagtcggccacgttcctatgtgaggtgccccagccgtccactgaggccgcgtggttcaaggaggagacgc

SEQ ID NO: 34265 - DNA, 73 bp, Homo sapiens
acgttcctatgtgaggtgccccagccgtccactgaggccgcgtggttcaaggaggagacgcggttgtgggcga

SEQ ID NO: 34266 - DNA, 76 bp, Homo sapiens
tatgtgaggtgccccagccgtccactgaggccgcgtggttcaaggaggagacgcggttgtgggcgagcgccaagta

SEQ ID NO: 34267 - DNA, 74 bp, Homo sapiens
agccgtccactgaggccgcgtggttcaaggaggagacgcggttgtgggcgagcgccaagtacggcatcgaggag

SEQ ID NO: 34268 - DNA, 74 bp, Homo sapiens
actgaggccgcgtggttcaaggaggagacgcggttgtgggcgagcgccaagtacggcatcgaggaggagggcac

SEQ ID NO: 34269 - DNA, 76 bp, Homo sapiens
tggttcaaggaggagacgcggttgtgggcgagcgccaagtacggcatcgaggaggagggcaccgagcgccgcctga

SEQ ID NO: 34270 - DNA, 73 bp, Homo sapiens
aaggaggagacgcggttgtgggcgagcgccaagtacggcatcgaggaggagggcaccgagcgccgcctgaccg

SEQ ID NO: 34271 - DNA, 77 bp, Homo sapiens
acgcggttgtgggcgagcgccaagtacggcatcgaggaggagggcaccgagcgccgcctgaccgtgcgcaatgtctc

SEQ ID NO: 34272 - DNA, 77 bp, Homo sapiens
agcgccaagtacggcatcgaggaggagggcaccgagcgccgcctgaccgtgcgcaatgtctcggccgacgacgacgc

SEQ ID NO: 34273 - DNA, 78 bp, Homo sapiens
tacggcatcgaggaggagggcaccgagcgccgcctgaccgtgcgcaatgtctcggccgacgacgacgcggtgtacatc

SEQ ID NO: 34274 - DNA, 79 bp, Homo sapiens
ggaggagggcaccgagcgccgcctgaccgtgcgcaatgtctcggccgacgacgacgcggtgtacatctgcgagacgcca

SEQ ID NO: 34275 - DNA, 78 bp, Homo sapiens
agggcaccgagcgccgcctgaccgtgcgcaatgtctcggccgacgacgacgcggtgtacatctgcgagacgccagagg

SEQ ID NO: 34276 - DNA, 79 bp, Homo sapiens
ccgcctgaccgtgcgcaatgtctcggccgacgacgacgcggtgtacatctgcgagacgccagagggcagccgcacggtg

SEQ ID NO: 34277 - DNA, 79 bp, Homo sapiens
accgtgcgcaatgtctcggccgacgacgacgcggtgtacatctgcgagacgccagagggcagccgcacggtggcggagc

SEQ ID NO: 34278 - DNA, 80 bp, Homo sapiens
atgtctcggccgacgacgacgcggtgtacatctgcgagacgccagagggcagccgcacggtggcggagctcgcagtccaa

SEQ ID NO: 34279 - DNA, 78 bp, Homo sapiens
acgacgacgcggtgtacatctgcgagacgccagagggcagccgcacggtggcggagctcgcagtccaaggcaggcggg

SEQ ID NO: 34280 - DNA, 78 bp, Homo sapiens
cggtgtacatctgcgagacgccagagggcagccgcacggtggcggagctcgcagtccaaggcaggcggggcggggcac

SEQ ID NO: 34281 - DNA, 76 bp, Homo sapiens
tctgcgagacgccagagggcagccgcacggtggcggagctcgcagtccaaggcaggcggggcggggcacggggcgg

SEQ ID NO: 34282 - DNA, 73 bp, Homo sapiens
ccagagggcagccgcacggtggcggagctcgcagtccaaggcaggcggggcggggcacggggcggggcacagg

SEQ ID NO: 34283 - DNA, 70 bp, Homo sapiens
gggcgtgcaggggctggtctgactggcccggctccctccaccccaggaaacctcctccgaaagctccctc

SEQ ID NO: 34284 - DNA, 68 bp, Homo sapiens
gggctggtctgactggcccggctccctccaccccaggaaacctcctccgaaagctccctcggaagacg

SEQ ID NO: 34285 - DNA, 69 bp, Homo sapiens
gtctgactggcccggctccctccaccccaggaaacctcctccgaaagctccctcggaagacggcggtgc

SEQ ID NO: 34286 - DNA, 69 bp, Homo sapiens
gctccctccaccccaggaaacctcctccgaaagctccctcggaagacggcggtgcgcgtgggcgacacg

SEQ ID NO: 34287 - DNA, 68 bp, Homo sapiens
ccccaggaaacctcctccgaaagctccctcggaagacggcggtgcgcgtgggcgacacggctatgttt

SEQ ID NO: 34288 - DNA, 73 bp, Homo sapiens
tccgaaagctccctcggaagacggcggtgcgcgtgggcgacacggctatgttttgcgtggagctggcggtccc

SEQ ID NO: 34289 - DNA, 71 bp, Homo sapiens
ccctcggaagacggcggtgcgcgtgggcgacacggctatgttttgcgtggagctggcggtcccggtgggcc

SEQ ID NO: 34290 - DNA, 71 bp, Homo sapiens
acggcggtgcgcgtgggcgacacggctatgttttgcgtggagctggcggtcccggtgggccccgtccactg

SEQ ID NO: 34291 - DNA, 73 bp, Homo sapiens
tgggcgacacggctatgttttgcgtggagctggcggtcccggtgggccccgtccactggctgcggaaccagga

SEQ ID NO: 34292 - DNA, 70 bp, Homo sapiens
acggctatgttttgcgtggagctggcggtcccggtgggccccgtccactggctgcggaaccaggaggaag

SEQ ID NO: 34293 - DNA, 70 bp, Homo sapiens
ttttgcgtggagctggcggtcccggtgggccccgtccactggctgcggaaccaggaggaagtggtggcgg

SEQ ID NO: 34294 - DNA, 68 bp, Homo sapiens
agctggcggtcccggtgggccccgtccactggctgcggaaccaggaggaagtggtggcggggggccgc

SEQ ID NO: 34295 - DNA, 71 bp, Homo sapiens
gtgggccccgtccactggctgcggaaccaggaggaagtggtggcggggggccgcgtggccatctccgcgga

SEQ ID NO: 34296 - DNA, 75 bp, Homo sapiens
tccactggctgcggaaccaggaggaagtggtggcggggggccgcgtggccatctccgcggagggcacgcgccaca

SEQ ID NO: 34297 - DNA, 73 bp, Homo sapiens
tgcggaaccaggaggaagtggtggcggggggccgcgtggccatctccgcggagggcacgcgccacacactaac

SEQ ID NO: 34298 - DNA, 74 bp, Homo sapiens
aggaagtggtggcggggggccgcgtggccatctccgcggagggcacgcgccacacactaaccatctcccagtgc

SEQ ID NO: 34299 - DNA, 77 bp, Homo sapiens
tggtggcggggggccgcgtggccatctccgcggagggcacgcgccacacactaaccatctcccagtgctgcctggag

SEQ ID NO: 34300 - DNA, 79 bp, Homo sapiens
ccgcgtggccatctccgcggagggcacgcgccacacactaaccatctcccagtgctgcctggaggatgtgggccaggtg

SEQ ID NO: 34301 - DNA, 78 bp, Homo sapiens
atctccgcggagggcacgcgccacacactaaccatctcccagtgctgcctggaggatgtgggccaggtggcctttatg

SEQ ID NO: 34302 - DNA, 80 bp, Homo sapiens
agggcacgcgccacacactaaccatctcccagtgctgcctggaggatgtgggccaggtggcctttatggctggcgactgc

SEQ ID NO: 34303 - DNA, 80 bp, Homo sapiens
cacacactaaccatctcccagtgctgcctggaggatgtgggccaggtggcctttatggctggcgactgccagacgtccac

SEQ ID NO: 34304 - DNA, 78 bp, Homo sapiens
taaccatctcccagtgctgcctggaggatgtgggccaggtggcctttatggctggcgactgccagacgtccacccagt

SEQ ID NO: 34305 - DNA, 78 bp, Homo sapiens
agtgctgcctggaggatgtgggccaggtggcctttatggctggcgactgccagacgtccacccagttctgcgtgtcgg

SEQ ID NO: 34306 - DNA, 76 bp, Homo sapiens
ctggaggatgtgggccaggtggcctttatggctggcgactgccagacgtccacccagttctgcgtgtcgggtgagg

SEQ ID NO: 34307 - DNA, 75 bp, Homo sapiens
tgggccaggtggcctttatggctggcgactgccagacgtccacccagttctgcgtgtcgggtgagggcctgaggg

SEQ ID NO: 34308 - DNA, 76 bp, Homo sapiens
cctttatggctggcgactgccagacgtccacccagttctgcgtgtcgggtgagggcctgagggtgctcccaggatg

SEQ ID NO: 34309 - DNA, 73 bp, Homo sapiens
ctcaggaagaggctcccagtagttgacctctgcccaccctctacacagcccccaggaagcctcccctgcaacc

SEQ ID NO: 34310 - DNA, 73 bp, Homo sapiens
tctacacagcccccaggaagcctcccctgcaaccccctgtggatcctgtggtaaaggccaggatggagagttc

SEQ ID NO: 34311 - DNA, 75 bp, Homo sapiens
caggaagcctcccctgcaaccccctgtggatcctgtggtaaaggccaggatggagagttccgtgattctcagctg

SEQ ID NO: 34312 - DNA, 74 bp, Homo sapiens
agcctcccctgcaaccccctgtggatcctgtggtaaaggccaggatggagagttccgtgattctcagctggtcc

SEQ ID NO: 34313 - DNA, 71 bp, Homo sapiens
aaccccctgtggatcctgtggtaaaggccaggatggagagttccgtgattctcagctggtccccaccaccc

SEQ ID NO: 34314 - DNA, 73 bp, Homo sapiens
gtggatcctgtggtaaaggccaggatggagagttccgtgattctcagctggtccccaccaccccatggggaac

SEQ ID NO: 34315 - DNA, 74 bp, Homo sapiens
taaaggccaggatggagagttccgtgattctcagctggtccccaccaccccatggggaacgccctgtcactatc

SEQ ID NO: 34316 - DNA, 74 bp, Homo sapiens
aggatggagagttccgtgattctcagctggtccccaccaccccatggggaacgccctgtcactatcgacggcta

SEQ ID NO: 34317 - DNA, 72 bp, Homo sapiens
agttccgtgattctcagctggtccccaccaccccatggggaacgccctgtcactatcgacggctacctggta

SEQ ID NO: 34318 - DNA, 73 bp, Homo sapiens
ttctcagctggtccccaccaccccatggggaacgccctgtcactatcgacggctacctggtagagaagaagaa

SEQ ID NO: 34319 - DNA, 73 bp, Homo sapiens
caccaccccatggggaacgccctgtcactatcgacggctacctggtagagaagaagaagcttggcacctacac

SEQ ID NO: 34320 - DNA, 74 bp, Homo sapiens
atggggaacgccctgtcactatcgacggctacctggtagagaagaagaagcttggcacctacacctggatcagg

SEQ ID NO: 34321 - DNA, 76 bp, Homo sapiens
aacgccctgtcactatcgacggctacctggtagagaagaagaagcttggcacctacacctggatcaggtgccacga

SEQ ID NO: 34322 - DNA, 76 bp, Homo sapiens
actatcgacggctacctggtagagaagaagaagcttggcacctacacctggatcaggtgccacgaggctgaatggg

SEQ ID NO: 34323 - DNA, 78 bp, Homo sapiens
ctacctggtagagaagaagaagcttggcacctacacctggatcaggtgccacgaggctgaatgggtggctacacctga

SEQ ID NO: 34324 - DNA, 80 bp, Homo sapiens
aagaagaagcttggcacctacacctggatcaggtgccacgaggctgaatgggtggctacacctgagctgaccgtggctga

SEQ ID NO: 34325 - DNA, 81 bp, Homo sapiens
aagcttggcacctacacctggatcaggtgccacgaggctgaatgggtggctacacctgagctgaccgtggctgatgtggcg

SEQ ID NO: 34326 - DNA, 79 bp, Homo sapiens
acctacacctggatcaggtgccacgaggctgaatgggtggctacacctgagctgaccgtggctgatgtggcggaggagg

SEQ ID NO: 34327 - DNA, 78 bp, Homo sapiens
atcaggtgccacgaggctgaatgggtggctacacctgagctgaccgtggctgatgtggcggaggaggggaacttccag

SEQ ID NO: 34328 - DNA, 76 bp, Homo sapiens
aggctgaatgggtggctacacctgagctgaccgtggctgatgtggcggaggaggggaacttccagttccgagtgtc

SEQ ID NO: 34329 - DNA, 77 bp, Homo sapiens
ggtggctacacctgagctgaccgtggctgatgtggcggaggaggggaacttccagttccgagtgtccgctctcaaca

SEQ ID NO: 34330 - DNA, 76 bp, Homo sapiens
ctacacctgagctgaccgtggctgatgtggcggaggaggggaacttccagttccgagtgtccgctctcaacagctt

SEQ ID NO: 34331 - DNA, 73 bp, Homo sapiens
atgtggcggaggaggggaacttccagttccgagtgtccgctctcaacagctttggtcagagtccctacctcga

SEQ ID NO: 34332 - DNA, 70 bp, Homo sapiens
aggaggggaacttccagttccgagtgtccgctctcaacagctttggtcagagtccctacctcgagttccc

SEQ ID NO: 34333 - DNA, 70 bp, Homo sapiens
aacttccagttccgagtgtccgctctcaacagctttggtcagagtccctacctcgagttcccggggactg

SEQ ID NO: 34334 - DNA, 70 bp, Homo sapiens
agtgtccgctctcaacagctttggtcagagtccctacctcgagttcccggggactgtccacctgggtaag

SEQ ID NO: 34335 - DNA, 70 bp, Homo sapiens
tctcaacagctttggtcagagtccctacctcgagttcccggggactgtccacctgggtaagtgggacctc

SEQ ID NO: 34336 - DNA, 67 bp, Homo sapiens
tttggtcagagtccctacctcgagttcccggggactgtccacctgggtaagtgggacctccctgtta

SEQ ID NO: 34337 - DNA, 65 bp, Homo sapiens
agtccctacctcgagttcccggggactgtccacctgggtaagtgggacctccctgttacaaccta

SEQ ID NO: 34338 - DNA, 71 bp, Homo sapiens
actccccactcctcctcggcccctttctgacgctgcccgccccacagcccccaagctggccgtgaggacac

SEQ ID NO: 34339 - DNA, 72 bp, Homo sapiens
actcctcctcggcccctttctgacgctgcccgccccacagcccccaagctggccgtgaggacaccgctgaag

SEQ ID NO: 34340 - DNA, 75 bp, Homo sapiens
cctttctgacgctgcccgccccacagcccccaagctggccgtgaggacaccgctgaaggcggtgcaggcggtaga

SEQ ID NO: 34341 - DNA, 75 bp, Homo sapiens
ctgacgctgcccgccccacagcccccaagctggccgtgaggacaccgctgaaggcggtgcaggcggtagagggtg

SEQ ID NO: 34342 - DNA, 74 bp, Homo sapiens
ccacagcccccaagctggccgtgaggacaccgctgaaggcggtgcaggcggtagagggtggcgaggtcactttc

SEQ ID NO: 34343 - DNA, 74 bp, Homo sapiens
cccaagctggccgtgaggacaccgctgaaggcggtgcaggcggtagagggtggcgaggtcactttctccgtgga

SEQ ID NO: 34344 - DNA, 73 bp, Homo sapiens
cgtgaggacaccgctgaaggcggtgcaggcggtagagggtggcgaggtcactttctccgtggacctcacggtg

SEQ ID NO: 34345 - DNA, 74 bp, Homo sapiens
acaccgctgaaggcggtgcaggcggtagagggtggcgaggtcactttctccgtggacctcacggtggcctcagc

SEQ ID NO: 34346 - DNA, 73 bp, Homo sapiens
ggtgcaggcggtagagggtggcgaggtcactttctccgtggacctcacggtggcctcagcgggtgagtggttc

SEQ ID NO: 34347 - DNA, 75 bp, Homo sapiens
tggcgaggtcactttctccgtggacctcacggtggcctcagcgggtgagtggttcctggatgggcaggccctgaa

SEQ ID NO: 34348 - DNA, 76 bp, Homo sapiens
gtcactttctccgtggacctcacggtggcctcagcgggtgagtggttcctggatgggcaggccctgaaggccagca

SEQ ID NO: 34349 - DNA, 80 bp, Homo sapiens
tggacctcacggtggcctcagcgggtgagtggttcctggatgggcaggccctgaaggccagcagtgtgtatgagatccac

SEQ ID NO: 34350 - DNA, 82 bp, Homo sapiens
acggtggcctcagcgggtgagtggttcctggatgggcaggccctgaaggccagcagtgtgtatgagatccactgtgatcgca

SEQ ID NO: 34351 - DNA, 81 bp, Homo sapiens
agcgggtgagtggttcctggatgggcaggccctgaaggccagcagtgtgtatgagatccactgtgatcgcacccggcacac

SEQ ID NO: 34352 - DNA, 83 bp, Homo sapiens
agtggttcctggatgggcaggccctgaaggccagcagtgtgtatgagatccactgtgatcgcacccggcacacgctcaccatc

SEQ ID NO: 34353 - DNA, 82 bp, Homo sapiens
atgggcaggccctgaaggccagcagtgtgtatgagatccactgtgatcgcacccggcacacgctcaccatccgggaggtgcc

SEQ ID NO: 34354 - DNA, 84 bp, Homo sapiens
tgaaggccagcagtgtgtatgagatccactgtgatcgcacccggcacacgctcaccatccgggaggtgcccgccagcctgcacg

SEQ ID NO: 34355 - DNA, 83 bp, Homo sapiens
agcagtgtgtatgagatccactgtgatcgcacccggcacacgctcaccatccgggaggtgcccgccagcctgcacggggcgca

SEQ ID NO: 34356 - DNA, 82 bp, Homo sapiens
tatgagatccactgtgatcgcacccggcacacgctcaccatccgggaggtgcccgccagcctgcacggggcgcagctgaagt

SEQ ID NO: 34357 - DNA, 80 bp, Homo sapiens
tgtgatcgcacccggcacacgctcaccatccgggaggtgcccgccagcctgcacggggcgcagctgaagttcgtggccaa

SEQ ID NO: 34358 - DNA, 79 bp, Homo sapiens
cggcacacgctcaccatccgggaggtgcccgccagcctgcacggggcgcagctgaagttcgtggccaacggcattgaga

SEQ ID NO: 34359 - DNA, 81 bp, Homo sapiens
acgctcaccatccgggaggtgcccgccagcctgcacggggcgcagctgaagttcgtggccaacggcattgagagcagcatc

SEQ ID NO: 34360 - DNA, 80 bp, Homo sapiens
atccgggaggtgcccgccagcctgcacggggcgcagctgaagttcgtggccaacggcattgagagcagcatccggatgga

SEQ ID NO: 34361 - DNA, 78 bp, Homo sapiens
cgccagcctgcacggggcgcagctgaagttcgtggccaacggcattgagagcagcatccggatggaggtccggggtag

SEQ ID NO: 34362 - DNA, 74 bp, Homo sapiens
acggggcgcagctgaagttcgtggccaacggcattgagagcagcatccggatggaggtccggggtaggtggagg

SEQ ID NO: 34363 - DNA, 74 bp, Homo sapiens
agctgaagttcgtggccaacggcattgagagcagcatccggatggaggtccggggtaggtggagggccccagct

SEQ ID NO: 34364 - DNA, 73 bp, Homo sapiens
agttcgtggccaacggcattgagagcagcatccggatggaggtccggggtaggtggagggccccagcttggga

SEQ ID NO: 34365 - DNA, 74 bp, Homo sapiens
aacggcattgagagcagcatccggatggaggtccggggtaggtggagggccccagcttgggaccctgagcctca

SEQ ID NO: 34366 - DNA, 75 bp, Homo sapiens
ttctgtgcccctccgtccattcccctctggccacgcatacctggcccccagcggccccagggctgactgccaaca

SEQ ID NO: 34367 - DNA, 75 bp, Homo sapiens
tccgtccattcccctctggccacgcatacctggcccccagcggccccagggctgactgccaacaagccgccagcc

SEQ ID NO: 34368 - DNA, 77 bp, Homo sapiens
cctctggccacgcatacctggcccccagcggccccagggctgactgccaacaagccgccagccgcagctgcccggga

SEQ ID NO: 34369 - DNA, 77 bp, Homo sapiens
ccacgcatacctggcccccagcggccccagggctgactgccaacaagccgccagccgcagctgcccgggaggtgctg

SEQ ID NO: 34370 - DNA, 79 bp, Homo sapiens
ccccagcggccccagggctgactgccaacaagccgccagccgcagctgcccgggaggtgctggctcggctgcacgagga

SEQ ID NO: 34371 - DNA, 84 bp, Homo sapiens
cccagggctgactgccaacaagccgccagccgcagctgcccgggaggtgctggctcggctgcacgaggaggcgcagctgctggc

SEQ ID NO: 34372 - DNA, 91 bp, Homo sapiens
tgactgccaacaagccgccagccgcagctgcccgggaggtgctggctcggctgcacgaggaggcgcagctgctggctgagctgtcagatca

SEQ ID NO: 34373 - DNA, 92 bp, Homo sapiens
cgcagctgcccgggaggtgctggctcggctgcacgaggaggcgcagctgctggctgagctgtcagatcaggctgcggctgtgacgtggctga

SEQ ID NO: 34374 - DNA, 89 bp, Homo sapiens
ccgggaggtgctggctcggctgcacgaggaggcgcagctgctggctgagctgtcagatcaggctgcggctgtgacgtggctgaaggatg

SEQ ID NO: 34375 - DNA, 92 bp, Homo sapiens
tggctcggctgcacgaggaggcgcagctgctggctgagctgtcagatcaggctgcggctgtgacgtggctgaaggatggtcgcacactgtcc

SEQ ID NO: 34376 - DNA, 90 bp, Homo sapiens
cggctgcacgaggaggcgcagctgctggctgagctgtcagatcaggctgcggctgtgacgtggctgaaggatggtcgcacactgtcccca

SEQ ID NO: 34377 - DNA, 89 bp, Homo sapiens
gcgcagctgctggctgagctgtcagatcaggctgcggctgtgacgtggctgaaggatggtcgcacactgtccccaggccccaagtatga

SEQ ID NO: 34378 - DNA, 86 bp, Homo sapiens
tggctgagctgtcagatcaggctgcggctgtgacgtggctgaaggatggtcgcacactgtccccaggccccaagtatgaggtgcag

SEQ ID NO: 34379 - DNA, 85 bp, Homo sapiens
agctgtcagatcaggctgcggctgtgacgtggctgaaggatggtcgcacactgtccccaggccccaagtatgaggtgcaggcatc

SEQ ID NO: 34380 - DNA, 81 bp, Homo sapiens
atcaggctgcggctgtgacgtggctgaaggatggtcgcacactgtccccaggccccaagtatgaggtgcaggcatcggccg

SEQ ID NO: 34381 - DNA, 77 bp, Homo sapiens
ctgtgacgtggctgaaggatggtcgcacactgtccccaggccccaagtatgaggtgcaggcatcggccgggcggcgg

SEQ ID NO: 34382 - DNA, 78 bp, Homo sapiens
tgaaggatggtcgcacactgtccccaggccccaagtatgaggtgcaggcatcggccgggcggcgggtgctccttgtgc

SEQ ID NO: 34383 - DNA, 78 bp, Homo sapiens
atggtcgcacactgtccccaggccccaagtatgaggtgcaggcatcggccgggcggcgggtgctccttgtgcgagatg

SEQ ID NO: 34384 - DNA, 75 bp, Homo sapiens
tccccaggccccaagtatgaggtgcaggcatcggccgggcggcgggtgctccttgtgcgagatgtggcccgggac

SEQ ID NO: 34385 - DNA, 79 bp, Homo sapiens
ccaagtatgaggtgcaggcatcggccgggcggcgggtgctccttgtgcgagatgtggcccgggacgatgcaggcctcta

SEQ ID NO: 34386 - DNA, 80 bp, Homo sapiens
atgaggtgcaggcatcggccgggcggcgggtgctccttgtgcgagatgtggcccgggacgatgcaggcctctacgagtgc

SEQ ID NO: 34387 - DNA, 77 bp, Homo sapiens
atcggccgggcggcgggtgctccttgtgcgagatgtggcccgggacgatgcaggcctctacgagtgcgtcagccgcg

SEQ ID NO: 34388 - DNA, 78 bp, Homo sapiens
cggcgggtgctccttgtgcgagatgtggcccgggacgatgcaggcctctacgagtgcgtcagccgcgggggccgcatc

SEQ ID NO: 34389 - DNA, 80 bp, Homo sapiens
tccttgtgcgagatgtggcccgggacgatgcaggcctctacgagtgcgtcagccgcgggggccgcatcgcctaccagctc

SEQ ID NO: 34390 - DNA, 79 bp, Homo sapiens
agatgtggcccgggacgatgcaggcctctacgagtgcgtcagccgcgggggccgcatcgcctaccagctctccgtgcaa

SEQ ID NO: 34391 - DNA, 77 bp, Homo sapiens
ccgggacgatgcaggcctctacgagtgcgtcagccgcgggggccgcatcgcctaccagctctccgtgcaaggtggga

SEQ ID NO: 34392 - DNA, 82 bp, Homo sapiens
atgcaggcctctacgagtgcgtcagccgcgggggccgcatcgcctaccagctctccgtgcaaggtgggagcagctggcagcc

SEQ ID NO: 34393 - DNA, 80 bp, Homo sapiens
ctacgagtgcgtcagccgcgggggccgcatcgcctaccagctctccgtgcaaggtgggagcagctggcagcctctgcggg

SEQ ID NO: 34394 - DNA, 83 bp, Homo sapiens
aagtttgtgctcagggcctctgcagtgcctgacccagcctgtgtcctgcaggcctcgcgcgctttctgcacaaggacatggcg

SEQ ID NO: 34395 - DNA, 85 bp, Homo sapiens
agggcctctgcagtgcctgacccagcctgtgtcctgcaggcctcgcgcgctttctgcacaaggacatggcgggcagctgtgtgga

SEQ ID NO: 34396 - DNA, 85 bp, Homo sapiens
agtgcctgacccagcctgtgtcctgcaggcctcgcgcgctttctgcacaaggacatggcgggcagctgtgtggatgccgtggctg

SEQ ID NO: 34397 - DNA, 81 bp, Homo sapiens
agcctgtgtcctgcaggcctcgcgcgctttctgcacaaggacatggcgggcagctgtgtggatgccgtggctgggggcccg

SEQ ID NO: 34398 - DNA, 82 bp, Homo sapiens
ctgcaggcctcgcgcgctttctgcacaaggacatggcgggcagctgtgtggatgccgtggctgggggcccggcgcagtttga

SEQ ID NO: 34399 - DNA, 82 bp, Homo sapiens
ctcgcgcgctttctgcacaaggacatggcgggcagctgtgtggatgccgtggctgggggcccggcgcagtttgagtgtgaga

SEQ ID NO: 34400 - DNA, 80 bp, Homo sapiens
ttctgcacaaggacatggcgggcagctgtgtggatgccgtggctgggggcccggcgcagtttgagtgtgagacctccgaa

SEQ ID NO: 34401 - DNA, 77 bp, Homo sapiens
aaggacatggcgggcagctgtgtggatgccgtggctgggggcccggcgcagtttgagtgtgagacctccgaagccca

SEQ ID NO: 34402 - DNA, 78 bp, Homo sapiens
cagctgtgtggatgccgtggctgggggcccggcgcagtttgagtgtgagacctccgaagcccacgtccacgtgcactg

SEQ ID NO: 34403 - DNA, 76 bp, Homo sapiens
tggatgccgtggctgggggcccggcgcagtttgagtgtgagacctccgaagcccacgtccacgtgcactggtacaa

SEQ ID NO: 34404 - DNA, 76 bp, Homo sapiens
ctgggggcccggcgcagtttgagtgtgagacctccgaagcccacgtccacgtgcactggtacaaggatggcatgga

SEQ ID NO: 34405 - DNA, 79 bp, Homo sapiens
cggcgcagtttgagtgtgagacctccgaagcccacgtccacgtgcactggtacaaggatggcatggagctgggccactc

SEQ ID NO: 34406 - DNA, 78 bp, Homo sapiens
gtttgagtgtgagacctccgaagcccacgtccacgtgcactggtacaaggatggcatggagctgggccactccggtga

SEQ ID NO: 34407 - DNA, 79 bp, Homo sapiens
agacctccgaagcccacgtccacgtgcactggtacaaggatggcatggagctgggccactccggtgagcgcttcttgca

SEQ ID NO: 34408 - DNA, 80 bp, Homo sapiens
aagcccacgtccacgtgcactggtacaaggatggcatggagctgggccactccggtgagcgcttcttgcaggaggatgtg

SEQ ID NO: 34409 - DNA, 80 bp, Homo sapiens
acgtgcactggtacaaggatggcatggagctgggccactccggtgagcgcttcttgcaggaggatgtggggacgcggcac

SEQ ID NO: 34410 - DNA, 81 bp, Homo sapiens
tacaaggatggcatggagctgggccactccggtgagcgcttcttgcaggaggatgtggggacgcggcaccggctggtggca

SEQ ID NO: 34411 - DNA, 81 bp, Homo sapiens
catggagctgggccactccggtgagcgcttcttgcaggaggatgtggggacgcggcaccggctggtggcagccacagtcac

SEQ ID NO: 34412 - DNA, 79 bp, Homo sapiens
agctgggccactccggtgagcgcttcttgcaggaggatgtggggacgcggcaccggctggtggcagccacagtcaccag

SEQ ID NO: 34413 - DNA, 82 bp, Homo sapiens
gtgagcgcttcttgcaggaggatgtggggacgcggcaccggctggtggcagccacagtcaccaggcaggatgaaggcaccta

SEQ ID NO: 34414 - DNA, 81 bp, Homo sapiens
ttcttgcaggaggatgtggggacgcggcaccggctggtggcagccacagtcaccaggcaggatgaaggcacctactcctgc

SEQ ID NO: 34415 - DNA, 78 bp, Homo sapiens
aggatgtggggacgcggcaccggctggtggcagccacagtcaccaggcaggatgaaggcacctactcctgccgcgtgg

SEQ ID NO: 34416 - DNA, 79 bp, Homo sapiens
acgcggcaccggctggtggcagccacagtcaccaggcaggatgaaggcacctactcctgccgcgtgggcgaggactctg

SEQ ID NO: 34417 - DNA, 78 bp, Homo sapiens
accggctggtggcagccacagtcaccaggcaggatgaaggcacctactcctgccgcgtgggcgaggactctgtggact

SEQ ID NO: 34418 - DNA, 77 bp, Homo sapiens
agccacagtcaccaggcaggatgaaggcacctactcctgccgcgtgggcgaggactctgtggacttccggctccgcg

SEQ ID NO: 34419 - DNA, 77 bp, Homo sapiens
accaggcaggatgaaggcacctactcctgccgcgtgggcgaggactctgtggacttccggctccgcgtctctggtga

SEQ ID NO: 34420 - DNA, 79 bp, Homo sapiens
atgaaggcacctactcctgccgcgtgggcgaggactctgtggacttccggctccgcgtctctggtgagcacgctgtgtg

SEQ ID NO: 34421 - DNA, 81 bp, Homo sapiens
acctactcctgccgcgtgggcgaggactctgtggacttccggctccgcgtctctggtgagcacgctgtgtgtgcatgcgtc

SEQ ID NO: 34422 - DNA, 84 bp, Homo sapiens
tgccgcgtgggcgaggactctgtggacttccggctccgcgtctctggtgagcacgctgtgtgtgcatgcgtccaggcccatgtg

SEQ ID NO: 34423 - DNA, 81 bp, Homo sapiens
tttctgtgctctggagtctctgactgtgcatccttccctgtccatccccagagcccaaggtggtgtttgctaaggagcagc

SEQ ID NO: 34424 - DNA, 80 bp, Homo sapiens
agtctctgactgtgcatccttccctgtccatccccagagcccaaggtggtgtttgctaaggagcagctggcacgcaggaa

SEQ ID NO: 34425 - DNA, 82 bp, Homo sapiens
actgtgcatccttccctgtccatccccagagcccaaggtggtgtttgctaaggagcagctggcacgcaggaagctgcaggca

SEQ ID NO: 34426 - DNA, 81 bp, Homo sapiens
tccttccctgtccatccccagagcccaaggtggtgtttgctaaggagcagctggcacgcaggaagctgcaggcagaggcag

SEQ ID NO: 34427 - DNA, 85 bp, Homo sapiens
tccccagagcccaaggtggtgtttgctaaggagcagctggcacgcaggaagctgcaggcagaggcaggagccagtgccacactga

SEQ ID NO: 34428 - DNA, 86 bp, Homo sapiens
ccaaggtggtgtttgctaaggagcagctggcacgcaggaagctgcaggcagaggcaggagccagtgccacactgagctgcgaggtg

SEQ ID NO: 34429 - DNA, 88 bp, Homo sapiens
tggtgtttgctaaggagcagctggcacgcaggaagctgcaggcagaggcaggagccagtgccacactgagctgcgaggtggcccaggc

SEQ ID NO: 34430 - DNA, 87 bp, Homo sapiens
taaggagcagctggcacgcaggaagctgcaggcagaggcaggagccagtgccacactgagctgcgaggtggcccaggcccagacgga

SEQ ID NO: 34431 - DNA, 85 bp, Homo sapiens
tggcacgcaggaagctgcaggcagaggcaggagccagtgccacactgagctgcgaggtggcccaggcccagacggaggtgacgtg

SEQ ID NO: 34432 - DNA, 87 bp, Homo sapiens
tggtacaaggatgggaagaagctgagctccagctcgaaagtgtgcatggaggccacaggctgcacgcgcaggctggttgtgcagcag

SEQ ID NO: 34433 - DNA, 87 bp, Homo sapiens
aaggatgggaagaagctgagctccagctcgaaagtgtgcatggaggccacaggctgcacgcgcaggctggttgtgcagcaggcaggc

SEQ ID NO: 34434 - DNA, 89 bp, Homo sapiens
agaagctgagctccagctcgaaagtgtgcatggaggccacaggctgcacgcgcaggctggttgtgcagcaggcaggccaggcggatgcc

SEQ ID NO: 34435 - DNA, 85 bp, Homo sapiens
agctcgaaagtgtgcatggaggccacaggctgcacgcgcaggctggttgtgcagcaggcaggccaggcggatgccggggagtata

SEQ ID NO: 34436 - DNA, 86 bp, Homo sapiens
aaagtgtgcatggaggccacaggctgcacgcgcaggctggttgtgcagcaggcaggccaggcggatgccggggagtatagctgcga

SEQ ID NO: 34437 - DNA, 83 bp, Homo sapiens
aggctgcacgcgcaggctggttgtgcagcaggcaggccaggcggatgccggggagtatagctgcgaggctgggggccagcggc

SEQ ID NO: 34438 - DNA, 80 bp, Homo sapiens
aggctggttgtgcagcaggcaggccaggcggatgccggggagtatagctgcgaggctgggggccagcggctctccttcca

SEQ ID NO: 34439 - DNA, 81 bp, Homo sapiens
cagcaggcaggccaggcggatgccggggagtatagctgcgaggctgggggccagcggctctccttccatctggatgtcaaa

SEQ ID NO: 34440 - DNA, 78 bp, Homo sapiens
aggccaggcggatgccggggagtatagctgcgaggctgggggccagcggctctccttccatctggatgtcaaaggtca

SEQ ID NO: 34441 - DNA, 81 bp, Homo sapiens
atgccggggagtatagctgcgaggctgggggccagcggctctccttccatctggatgtcaaaggtcagttgatagagcaga

SEQ ID NO: 34442 - DNA, 84 bp, Homo sapiens
agtatagctgcgaggctgggggccagcggctctccttccatctggatgtcaaaggtcagttgatagagcagacatttgagcatc

SEQ ID NO: 34443 - DNA, 75 bp, Homo sapiens
ttctagtaattggaatatgtctgaccctgtgtgtcccactctgtccccagagcccaaggtggtgtttgccaagga

SEQ ID NO: 34444 - DNA, 76 bp, Homo sapiens
aatatgtctgaccctgtgtgtcccactctgtccccagagcccaaggtggtgtttgccaaggaccaggtggcacaca

SEQ ID NO: 34445 - DNA, 76 bp, Homo sapiens
accctgtgtgtcccactctgtccccagagcccaaggtggtgtttgccaaggaccaggtggcacacagtgaggtgca

SEQ ID NO: 34446 - DNA, 80 bp, Homo sapiens
tgtgtcccactctgtccccagagcccaaggtggtgtttgccaaggaccaggtggcacacagtgaggtgcaggctgaggca

SEQ ID NO: 34447 - DNA, 80 bp, Homo sapiens
ggctgaggcaggggccagtgccacgctgagctgcgaggtggcccaggcccagacggaggtgatgtggtacaaagatggga

SEQ ID NO: 34448 - DNA, 78 bp, Homo sapiens
aggcaggggccagtgccacgctgagctgcgaggtggcccaggcccagacggaggtgatgtggtacaaagatgggaaga

SEQ ID NO: 34449 - DNA, 81 bp, Homo sapiens
ccacgctgagctgcgaggtggcccaggcccagacggaggtgatgtggtacaaagatgggaagaagctgagctccagcttga

SEQ ID NO: 34450 - DNA, 80 bp, Homo sapiens
agctgcgaggtggcccaggcccagacggaggtgatgtggtacaaagatgggaagaagctgagctccagcttgaaagtgca

SEQ ID NO: 34451 - DNA, 80 bp, Homo sapiens
gcccaggcccagacggaggtgatgtggtacaaagatgggaagaagctgagctccagcttgaaagtgcatgtagaggccaa

SEQ ID NO: 34452 - DNA, 81 bp, Homo sapiens
agacggaggtgatgtggtacaaagatgggaagaagctgagctccagcttgaaagtgcatgtagaggccaagggctgcagac

SEQ ID NO: 34453 - DNA, 83 bp, Homo sapiens
tgatgtggtacaaagatgggaagaagctgagctccagcttgaaagtgcatgtagaggccaagggctgcagacggaggctggtg

SEQ ID NO: 34454 - DNA, 82 bp, Homo sapiens
ggtacaaagatgggaagaagctgagctccagcttgaaagtgcatgtagaggccaagggctgcagacggaggctggtggtgca

SEQ ID NO: 34455 - DNA, 86 bp, Homo sapiens
aagaagctgagctccagcttgaaagtgcatgtagaggccaagggctgcagacggaggctggtggtgcagcaggcaggcaagacaga

SEQ ID NO: 34456 - DNA, 84 bp, Homo sapiens
agctccagcttgaaagtgcatgtagaggccaagggctgcagacggaggctggtggtgcagcaggcaggcaagacagatgccggg

SEQ ID NO: 34457 - DNA, 83 bp, Homo sapiens
cttgaaagtgcatgtagaggccaagggctgcagacggaggctggtggtgcagcaggcaggcaagacagatgccggggactaca

SEQ ID NO: 34458 - DNA, 84 bp, Homo sapiens
atgtagaggccaagggctgcagacggaggctggtggtgcagcaggcaggcaagacagatgccggggactacagctgcgaggcca

SEQ ID NO: 34459 - DNA, 82 bp, Homo sapiens
aagggctgcagacggaggctggtggtgcagcaggcaggcaagacagatgccggggactacagctgcgaggccaggggccaga

SEQ ID NO: 34460 - DNA, 80 bp, Homo sapiens
agacggaggctggtggtgcagcaggcaggcaagacagatgccggggactacagctgcgaggccaggggccagagggtctc

SEQ ID NO: 34461 - DNA, 84 bp, Homo sapiens
tggtgcagcaggcaggcaagacagatgccggggactacagctgcgaggccaggggccagagggtctccttccgcctgcacatca

SEQ ID NO: 34462 - DNA, 79 bp, Homo sapiens
aggcaggcaagacagatgccggggactacagctgcgaggccaggggccagagggtctccttccgcctgcacatcacagg

SEQ ID NO: 34463 - DNA, 76 bp, Homo sapiens
aagacagatgccggggactacagctgcgaggccaggggccagagggtctccttccgcctgcacatcacaggtgggt

SEQ ID NO: 34464 - DNA, 76 bp, Homo sapiens
gggactacagctgcgaggccaggggccagagggtctccttccgcctgcacatcacaggtgggtttcttgagatctt

SEQ ID NO: 34465 - DNA, 78 bp, Homo sapiens
tacagctgcgaggccaggggccagagggtctccttccgcctgcacatcacaggtgggtttcttgagatctttcttatg

SEQ ID NO: 34466 - DNA, 73 bp, Homo sapiens
aggggccagagggtctccttccgcctgcacatcacaggtgggtttcttgagatctttcttatgttccttagga

SEQ ID NO: 34467 - DNA, 85 bp, Homo sapiens
ccagatttgtgtctctgactgtgcgtctctccttgtccaccctcagagcccaagatgatgtttgcaaaggagcagtcagtgcata

SEQ ID NO: 34468 - DNA, 85 bp, Homo sapiens
tttgtgtctctgactgtgcgtctctccttgtccaccctcagagcccaagatgatgtttgcaaaggagcagtcagtgcataatgag

SEQ ID NO: 34469 - DNA, 85 bp, Homo sapiens
actgtgcgtctctccttgtccaccctcagagcccaagatgatgtttgcaaaggagcagtcagtgcataatgaggtgcaggctgag

SEQ ID NO: 34470 - DNA, 83 bp, Homo sapiens
tctctccttgtccaccctcagagcccaagatgatgtttgcaaaggagcagtcagtgcataatgaggtgcaggctgaggcgggg

SEQ ID NO: 34471 - DNA, 86 bp, Homo sapiens
accctcagagcccaagatgatgtttgcaaaggagcagtcagtgcataatgaggtgcaggctgaggcgggggccagtgccatgctga

SEQ ID NO: 34472 - DNA, 87 bp, Homo sapiens
agcccaagatgatgtttgcaaaggagcagtcagtgcataatgaggtgcaggctgaggcgggggccagtgccatgctgagctgtgagg

SEQ ID NO: 34473 - DNA, 86 bp, Homo sapiens
atgtttgcaaaggagcagtcagtgcataatgaggtgcaggctgaggcgggggccagtgccatgctgagctgtgaggtggcccaggc

SEQ ID NO: 34474 - DNA, 84 bp, Homo sapiens
aaaggagcagtcagtgcataatgaggtgcaggctgaggcgggggccagtgccatgctgagctgtgaggtggcccaggcccagac

SEQ ID NO: 34475 - DNA, 84 bp, Homo sapiens
tcagtgcataatgaggtgcaggctgaggcgggggccagtgccatgctgagctgtgaggtggcccaggcccagacggaggtgacg

SEQ ID NO: 34476 - DNA, 81 bp, Homo sapiens
atgaggtgcaggctgaggcgggggccagtgccatgctgagctgtgaggtggcccaggcccagacggaggtgacgtggtaca

SEQ ID NO: 34477 - DNA, 76 bp, Homo sapiens
acggaggtgacgtggtacaaggatgggaagaagctgagctccagctcaaaagtgggcatggaggtcaaagggtgca

SEQ ID NO: 34478 - DNA, 77 bp, Homo sapiens
cgtggtacaaggatgggaagaagctgagctccagctcaaaagtgggcatggaggtcaaagggtgcacacggaggctg

SEQ ID NO: 34479 - DNA, 80 bp, Homo sapiens
aaggatgggaagaagctgagctccagctcaaaagtgggcatggaggtcaaagggtgcacacggaggctggtgctgccaca

SEQ ID NO: 34480 - DNA, 81 bp, Homo sapiens
aagctgagctccagctcaaaagtgggcatggaggtcaaagggtgcacacggaggctggtgctgccacaggcgggcaaagca

SEQ ID NO: 34481 - DNA, 81 bp, Homo sapiens
ctccagctcaaaagtgggcatggaggtcaaagggtgcacacggaggctggtgctgccacaggcgggcaaagcagatgctgg

SEQ ID NO: 34482 - DNA, 79 bp, Homo sapiens
aaagtgggcatggaggtcaaagggtgcacacggaggctggtgctgccacaggcgggcaaagcagatgctggggagtaca

SEQ ID NO: 34483 - DNA, 82 bp, Homo sapiens
tggaggtcaaagggtgcacacggaggctggtgctgccacaggcgggcaaagcagatgctggggagtacagctgtgaggctgg

SEQ ID NO: 34484 - DNA, 82 bp, Homo sapiens
agggtgcacacggaggctggtgctgccacaggcgggcaaagcagatgctggggagtacagctgtgaggctgggggccagaga

SEQ ID NO: 34485 - DNA, 81 bp, Homo sapiens
aggctggtgctgccacaggcgggcaaagcagatgctggggagtacagctgtgaggctgggggccagagagtctccttccac

SEQ ID NO: 34486 - DNA, 84 bp, Homo sapiens
ctgccacaggcgggcaaagcagatgctggggagtacagctgtgaggctgggggccagagagtctccttccacctgcacatcaca

SEQ ID NO: 34487 - DNA, 81 bp, Homo sapiens
gcaaagcagatgctggggagtacagctgtgaggctgggggccagagagtctccttccacctgcacatcacaggtgagtttt

SEQ ID NO: 34488 - DNA, 79 bp, Homo sapiens
agatgctggggagtacagctgtgaggctgggggccagagagtctccttccacctgcacatcacaggtgagttttttgag

SEQ ID NO: 34489 - DNA, 76 bp, Homo sapiens
agtacagctgtgaggctgggggccagagagtctccttccacctgcacatcacaggtgagttttttgaggcctttct

SEQ ID NO: 34490 - DNA, 74 bp, Homo sapiens
aggctgggggccagagagtctccttccacctgcacatcacaggtgagttttttgaggcctttcttgtgctttta

SEQ ID NO: 34491 - DNA, 80 bp, Homo sapiens
tcccagatctgtgtctctgactgtgcatccttccttgtccaccctcagagcccaagggggtgtttgcgaaggagcagtca

SEQ ID NO: 34492 - DNA, 82 bp, Homo sapiens
tgtgtctctgactgtgcatccttccttgtccaccctcagagcccaagggggtgtttgcgaaggagcagtcagtgcataatga

SEQ ID NO: 34493 - DNA, 79 bp, Homo sapiens
actgtgcatccttccttgtccaccctcagagcccaagggggtgtttgcgaaggagcagtcagtgcataatgaggtgcag

SEQ ID NO: 34494 - DNA, 79 bp, Homo sapiens
tccttccttgtccaccctcagagcccaagggggtgtttgcgaaggagcagtcagtgcataatgaggtgcaggctgaggc

SEQ ID NO: 34495 - DNA, 78 bp, Homo sapiens
accctcagagcccaagggggtgtttgcgaaggagcagtcagtgcataatgaggtgcaggctgaggcggggaccactgc

SEQ ID NO: 34496 - DNA, 82 bp, Homo sapiens
agcccaagggggtgtttgcgaaggagcagtcagtgcataatgaggtgcaggctgaggcggggaccactgccatgctgagctg

SEQ ID NO: 34497 - DNA, 85 bp, Homo sapiens
gggtgtttgcgaaggagcagtcagtgcataatgaggtgcaggctgaggcggggaccactgccatgctgagctgtgaggtggccca

SEQ ID NO: 34498 - DNA, 86 bp, Homo sapiens
aaggagcagtcagtgcataatgaggtgcaggctgaggcggggaccactgccatgctgagctgtgaggtggcccagccccagacaga

SEQ ID NO: 34499 - DNA, 85 bp, Homo sapiens
tgcataatgaggtgcaggctgaggcggggaccactgccatgctgagctgtgaggtggcccagccccagacagaggtgacgtggta

SEQ ID NO: 34500 - DNA, 82 bp, Homo sapiens
atgaggtgcaggctgaggcggggaccactgccatgctgagctgtgaggtggcccagccccagacagaggtgacgtggtacaa

SEQ ID NO: 34501 - DNA, 78 bp, Homo sapiens
tggtacaaggacgggaagaagctgagctccagctcaaaagtacgcatggaggtcaagggctgcacacgaaggctggta

SEQ ID NO: 34502 - DNA, 80 bp, Homo sapiens
aaggacgggaagaagctgagctccagctcaaaagtacgcatggaggtcaagggctgcacacgaaggctggtagtgcagca

SEQ ID NO: 34503 - DNA, 83 bp, Homo sapiens
aagctgagctccagctcaaaagtacgcatggaggtcaagggctgcacacgaaggctggtagtgcagcaggtgggcaaagcaga

SEQ ID NO: 34504 - DNA, 82 bp, Homo sapiens
ctccagctcaaaagtacgcatggaggtcaagggctgcacacgaaggctggtagtgcagcaggtgggcaaagcagatgctggg

SEQ ID NO: 34505 - DNA, 81 bp, Homo sapiens
aaagtacgcatggaggtcaagggctgcacacgaaggctggtagtgcagcaggtgggcaaagcagatgctggggagtacagc

SEQ ID NO: 34506 - DNA, 83 bp, Homo sapiens
tggaggtcaagggctgcacacgaaggctggtagtgcagcaggtgggcaaagcagatgctggggagtacagctgcgaggctggg

SEQ ID NO: 34507 - DNA, 84 bp, Homo sapiens
ctgcacacgaaggctggtagtgcagcaggtgggcaaagcagatgctggggagtacagctgcgaggctgggggccagagagtctc

SEQ ID NO: 34508 - DNA, 81 bp, Homo sapiens
aaggctggtagtgcagcaggtgggcaaagcagatgctggggagtacagctgcgaggctgggggccagagagtctcctttca

SEQ ID NO: 34509 - DNA, 86 bp, Homo sapiens
tagtgcagcaggtgggcaaagcagatgctggggagtacagctgcgaggctgggggccagagagtctcctttcaactgcacatcaca

SEQ ID NO: 34510 - DNA, 81 bp, Homo sapiens
gcaaagcagatgctggggagtacagctgcgaggctgggggccagagagtctcctttcaactgcacatcacaggtgagtttt

SEQ ID NO: 34511 - DNA, 79 bp, Homo sapiens
agatgctggggagtacagctgcgaggctgggggccagagagtctcctttcaactgcacatcacaggtgagttttttgag

SEQ ID NO: 34512 - DNA, 77 bp, Homo sapiens
gtacagctgcgaggctgggggccagagagtctcctttcaactgcacatcacaggtgagttttttgaggcctttctta

SEQ ID NO: 34513 - DNA, 75 bp, Homo sapiens
aggctgggggccagagagtctcctttcaactgcacatcacaggtgagttttttgaggcctttcttatgctattag

SEQ ID NO: 34514 - DNA, 80 bp, Homo sapiens
gtcccagatttgtgtctctgactgcgcatccctcctgtccaccctcagagcccaaggcagtgtttgccaaggagcagttg

SEQ ID NO: 34515 - DNA, 83 bp, Homo sapiens
tttgtgtctctgactgcgcatccctcctgtccaccctcagagcccaaggcagtgtttgccaaggagcagttggtgcataatga

SEQ ID NO: 34516 - DNA, 80 bp, Homo sapiens
actgcgcatccctcctgtccaccctcagagcccaaggcagtgtttgccaaggagcagttggtgcataatgaggtgcggac

SEQ ID NO: 34517 - DNA, 80 bp, Homo sapiens
atccctcctgtccaccctcagagcccaaggcagtgtttgccaaggagcagttggtgcataatgaggtgcggactgaggca

SEQ ID NO: 34518 - DNA, 80 bp, Homo sapiens
accctcagagcccaaggcagtgtttgccaaggagcagttggtgcataatgaggtgcggactgaggcaggggccagtgcca

SEQ ID NO: 34519 - DNA, 83 bp, Homo sapiens
cccaaggcagtgtttgccaaggagcagttggtgcataatgaggtgcggactgaggcaggggccagtgccacactgagctgtga

SEQ ID NO: 34520 - DNA, 82 bp, Homo sapiens
agtgtttgccaaggagcagttggtgcataatgaggtgcggactgaggcaggggccagtgccacactgagctgtgaggtggcc

SEQ ID NO: 34521 - DNA, 82 bp, Homo sapiens
aaggagcagttggtgcataatgaggtgcggactgaggcaggggccagtgccacactgagctgtgaggtggcccaggcccaga

SEQ ID NO: 34522 - DNA, 83 bp, Homo sapiens
ttggtgcataatgaggtgcggactgaggcaggggccagtgccacactgagctgtgaggtggcccaggcccagacagaggtgac

SEQ ID NO: 34523 - DNA, 81 bp, Homo sapiens
atgaggtgcggactgaggcaggggccagtgccacactgagctgtgaggtggcccaggcccagacagaggtgacgtggtaca

SEQ ID NO: 34524 - DNA, 84 bp, Homo sapiens
tgacgtggtacaaggatgggaagaagctgagctccagttcgaaagtgcgcatagaggctgcgggctgcatgcggcagctggtgg

SEQ ID NO: 34525 - DNA, 86 bp, Homo sapiens
ggtacaaggatgggaagaagctgagctccagttcgaaagtgcgcatagaggctgcgggctgcatgcggcagctggtggtgcagcag

SEQ ID NO: 34526 - DNA, 91 bp, Homo sapiens
aagaagctgagctccagttcgaaagtgcgcatagaggctgcgggctgcatgcggcagctggtggtgcagcaggcaggccaggcagatgctg

SEQ ID NO: 34527 - DNA, 91 bp, Homo sapiens
tgagctccagttcgaaagtgcgcatagaggctgcgggctgcatgcggcagctggtggtgcagcaggcaggccaggcagatgctggggagta

SEQ ID NO: 34528 - DNA, 90 bp, Homo sapiens
ttcgaaagtgcgcatagaggctgcgggctgcatgcggcagctggtggtgcagcaggcaggccaggcagatgctggggagtacacctgtga

SEQ ID NO: 34529 - DNA, 88 bp, Homo sapiens
cgcatagaggctgcgggctgcatgcggcagctggtggtgcagcaggcaggccaggcagatgctggggagtacacctgtgaggctgggg

SEQ ID NO: 34530 - DNA, 87 bp, Homo sapiens
gggctgcatgcggcagctggtggtgcagcaggcaggccaggcagatgctggggagtacacctgtgaggctgggggccagcggctctc

SEQ ID NO: 34531 - DNA, 84 bp, Homo sapiens
atgcggcagctggtggtgcagcaggcaggccaggcagatgctggggagtacacctgtgaggctgggggccagcggctctccttc

SEQ ID NO: 34532 - DNA, 82 bp, Homo sapiens
tggtgcagcaggcaggccaggcagatgctggggagtacacctgtgaggctgggggccagcggctctccttccacctggatgt

SEQ ID NO: 34533 - DNA, 80 bp, Homo sapiens
agcaggcaggccaggcagatgctggggagtacacctgtgaggctgggggccagcggctctccttccacctggatgtttca

SEQ ID NO: 34534 - DNA, 79 bp, Homo sapiens
gcagatgctggggagtacacctgtgaggctgggggccagcggctctccttccacctggatgtttcaggtcagtgctttg

SEQ ID NO: 34535 - DNA, 74 bp, Homo sapiens
ctggggagtacacctgtgaggctgggggccagcggctctccttccacctggatgtttcaggtcagtgctttggg

SEQ ID NO: 34536 - DNA, 72 bp, Homo sapiens
ctgtgaggctgggggccagcggctctccttccacctggatgtttcaggtcagtgctttgggggtactaactt

SEQ ID NO: 34537 - DNA, 71 bp, Homo sapiens
tgggggccagcggctctccttccacctggatgtttcaggtcagtgctttgggggtactaactttgtagagg

SEQ ID NO: 34538 - DNA, 73 bp, Homo sapiens
ttcctgacctagatggtggtggtaaccctgtgcatccctgccttccccagagcccaaggcggtgtttgcaaag

SEQ ID NO: 34539 - DNA, 78 bp, Homo sapiens
tagatggtggtggtaaccctgtgcatccctgccttccccagagcccaaggcggtgtttgcaaaggagcagctggcaca

SEQ ID NO: 34540 - DNA, 76 bp, Homo sapiens
tggtaaccctgtgcatccctgccttccccagagcccaaggcggtgtttgcaaaggagcagctggcacacaggaagg

SEQ ID NO: 34541 - DNA, 76 bp, Homo sapiens
atccctgccttccccagagcccaaggcggtgtttgcaaaggagcagctggcacacaggaaggtgcaggccgaggcg

SEQ ID NO: 34542 - DNA, 75 bp, Homo sapiens
ttccccagagcccaaggcggtgtttgcaaaggagcagctggcacacaggaaggtgcaggccgaggcgggggccat

SEQ ID NO: 34543 - DNA, 78 bp, Homo sapiens
agcccaaggcggtgtttgcaaaggagcagctggcacacaggaaggtgcaggccgaggcgggggccattgccacgctga

SEQ ID NO: 34544 - DNA, 80 bp, Homo sapiens
cggtgtttgcaaaggagcagctggcacacaggaaggtgcaggccgaggcgggggccattgccacgctgagctgcgaggtg

SEQ ID NO: 34545 - DNA, 79 bp, Homo sapiens
aaaggagcagctggcacacaggaaggtgcaggccgaggcgggggccattgccacgctgagctgcgaggtggcccaggcc

SEQ ID NO: 34546 - DNA, 78 bp, Homo sapiens
acacaggaaggtgcaggccgaggcgggggccattgccacgctgagctgcgaggtggcccaggcccagacagaggtgac

SEQ ID NO: 34547 - DNA, 77 bp, Homo sapiens
aaggtgcaggccgaggcgggggccattgccacgctgagctgcgaggtggcccaggcccagacagaggtgacgtggta

SEQ ID NO: 34548 - DNA, 78 bp, Homo sapiens
tggtacaaggacgggaagaagctgagctccagctcgaaagttcgaatggaggctgtgggctgcacacggaggctggtg

SEQ ID NO: 34549 - DNA, 80 bp, Homo sapiens
aaggacgggaagaagctgagctccagctcgaaagttcgaatggaggctgtgggctgcacacggaggctggtggtgcagca

SEQ ID NO: 34550 - DNA, 85 bp, Homo sapiens
aagctgagctccagctcgaaagttcgaatggaggctgtgggctgcacacggaggctggtggtgcagcaggcatgccaggcggaca

SEQ ID NO: 34551 - DNA, 81 bp, Homo sapiens
tccagctcgaaagttcgaatggaggctgtgggctgcacacggaggctggtggtgcagcaggcatgccaggcggacaccggg

SEQ ID NO: 34552 - DNA, 79 bp, Homo sapiens
aaagttcgaatggaggctgtgggctgcacacggaggctggtggtgcagcaggcatgccaggcggacaccggggagtata

SEQ ID NO: 34553 - DNA, 80 bp, Homo sapiens
aggctgtgggctgcacacggaggctggtggtgcagcaggcatgccaggcggacaccggggagtatagctgcgaggccggg

SEQ ID NO: 34554 - DNA, 81 bp, Homo sapiens
tgcacacggaggctggtggtgcagcaggcatgccaggcggacaccggggagtatagctgcgaggccgggggccagcggctc

SEQ ID NO: 34555 - DNA, 79 bp, Homo sapiens
aggctggtggtgcagcaggcatgccaggcggacaccggggagtatagctgcgaggccgggggccagcggctctccttca

SEQ ID NO: 34556 - DNA, 78 bp, Homo sapiens
cagcaggcatgccaggcggacaccggggagtatagctgcgaggccgggggccagcggctctccttcagcctggacgtg

SEQ ID NO: 34557 - DNA, 77 bp, Homo sapiens
tgccaggcggacaccggggagtatagctgcgaggccgggggccagcggctctccttcagcctggacgtggcaggtca

SEQ ID NO: 34558 - DNA, 75 bp, Homo sapiens
acaccggggagtatagctgcgaggccgggggccagcggctctccttcagcctggacgtggcaggtcagtgctttg

SEQ ID NO: 34559 - DNA, 77 bp, Homo sapiens
agtatagctgcgaggccgggggccagcggctctccttcagcctggacgtggcaggtcagtgctttgtgggcaccgag

SEQ ID NO: 34560 - DNA, 75 bp, Homo sapiens
aggccgggggccagcggctctccttcagcctggacgtggcaggtcagtgctttgtgggcaccgaggagcctcttc

SEQ ID NO: 34561 - DNA, 75 bp, Homo sapiens
cttcctgacctagatgttggtggtcaccgtgtgcatcttgccttccccagagcccaaggtggtgtttgccaagga

SEQ ID NO: 34562 - DNA, 80 bp, Homo sapiens
ctagatgttggtggtcaccgtgtgcatcttgccttccccagagcccaaggtggtgtttgccaaggagcagccagtgcaca

SEQ ID NO: 34563 - DNA, 80 bp, Homo sapiens
gtggtcaccgtgtgcatcttgccttccccagagcccaaggtggtgtttgccaaggagcagccagtgcacagggaggtgca

SEQ ID NO: 34564 - DNA, 76 bp, Homo sapiens
atcttgccttccccagagcccaaggtggtgtttgccaaggagcagccagtgcacagggaggtgcaggcccaggcgg

SEQ ID NO: 34565 - DNA, 77 bp, Homo sapiens
ttccccagagcccaaggtggtgtttgccaaggagcagccagtgcacagggaggtgcaggcccaggcgggggccagca

SEQ ID NO: 34566 - DNA, 78 bp, Homo sapiens
agcccaaggtggtgtttgccaaggagcagccagtgcacagggaggtgcaggcccaggcgggggccagcaccacactca

SEQ ID NO: 34567 - DNA, 83 bp, Homo sapiens
tgtttgccaaggagcagccagtgcacagggaggtgcaggcccaggcgggggccagcaccacactcagctgcgaggtggctcag

SEQ ID NO: 34568 - DNA, 82 bp, Homo sapiens
agcagccagtgcacagggaggtgcaggcccaggcgggggccagcaccacactcagctgcgaggtggctcaggcccagacgga

SEQ ID NO: 34569 - DNA, 82 bp, Homo sapiens
tgcacagggaggtgcaggcccaggcgggggccagcaccacactcagctgcgaggtggctcaggcccagacggaggtgatgtg

SEQ ID NO: 34570 - DNA, 79 bp, Homo sapiens
aggtgcaggcccaggcgggggccagcaccacactcagctgcgaggtggctcaggcccagacggaggtgatgtggtacaa

SEQ ID NO: 34571 - DNA, 76 bp, Homo sapiens
aggcgggggccagcaccacactcagctgcgaggtggctcaggcccagacggaggtgatgtggtacaaggacgggaa

SEQ ID NO: 34572 - DNA, 81 bp, Homo sapiens
ccagcaccacactcagctgcgaggtggctcaggcccagacggaggtgatgtggtacaaggacgggaagaagctgagcttca

SEQ ID NO: 34573 - DNA, 79 bp, Homo sapiens
actcagctgcgaggtggctcaggcccagacggaggtgatgtggtacaaggacgggaagaagctgagcttcagctcgaaa

SEQ ID NO: 34574 - DNA, 80 bp, Homo sapiens
acggaggtgatgtggtacaaggacgggaagaagctgagcttcagctcgaaagtgcgcatggaggctgtgggctgcacacg

SEQ ID NO: 34575 - DNA, 83 bp, Homo sapiens
tggtacaaggacgggaagaagctgagcttcagctcgaaagtgcgcatggaggctgtgggctgcacacggaggctggtggtgca

SEQ ID NO: 34576 - DNA, 83 bp, Homo sapiens
aaggacgggaagaagctgagcttcagctcgaaagtgcgcatggaggctgtgggctgcacacggaggctggtggtgcagcaggc

SEQ ID NO: 34577 - DNA, 84 bp, Homo sapiens
aagctgagcttcagctcgaaagtgcgcatggaggctgtgggctgcacacggaggctggtggtgcagcaggcgggccaggcggtc

SEQ ID NO: 34578 - DNA, 81 bp, Homo sapiens
cttcagctcgaaagtgcgcatggaggctgtgggctgcacacggaggctggtggtgcagcaggcgggccaggcggtcgccgg

SEQ ID NO: 34579 - DNA, 79 bp, Homo sapiens
aaagtgcgcatggaggctgtgggctgcacacggaggctggtggtgcagcaggcgggccaggcggtcgccggggagtaca

SEQ ID NO: 34580 - DNA, 78 bp, Homo sapiens
aggctgtgggctgcacacggaggctggtggtgcagcaggcgggccaggcggtcgccggggagtacagctgcgaggcgg

SEQ ID NO: 34581 - DNA, 78 bp, Homo sapiens
ctgcacacggaggctggtggtgcagcaggcgggccaggcggtcgccggggagtacagctgcgaggcggggagccagcg

SEQ ID NO: 34582 - DNA, 77 bp, Homo sapiens
cggaggctggtggtgcagcaggcgggccaggcggtcgccggggagtacagctgcgaggcggggagccagcggctctc

SEQ ID NO: 34583 - DNA, 79 bp, Homo sapiens
tggtgcagcaggcgggccaggcggtcgccggggagtacagctgcgaggcggggagccagcggctctccttccacctgca

SEQ ID NO: 34584 - DNA, 77 bp, Homo sapiens
ggccaggcggtcgccggggagtacagctgcgaggcggggagccagcggctctccttccacctgcacgtggcaggtca

SEQ ID NO: 34585 - DNA, 77 bp, Homo sapiens
ggtcgccggggagtacagctgcgaggcggggagccagcggctctccttccacctgcacgtggcaggtcagtgctttg

SEQ ID NO: 34586 - DNA, 77 bp, Homo sapiens
agtacagctgcgaggcggggagccagcggctctccttccacctgcacgtggcaggtcagtgctttgggggttggaga

SEQ ID NO: 34587 - DNA, 74 bp, Homo sapiens
aggcggggagccagcggctctccttccacctgcacgtggcaggtcagtgctttgggggttggagagtgactttg

SEQ ID NO: 34588 - DNA, 75 bp, Homo sapiens
ttcctgaccttgatggtggtggtcaccctatgcatccctgccttccccagagcccaaggcggtgtttgccaagga

SEQ ID NO: 34589 - DNA, 80 bp, Homo sapiens
ttgatggtggtggtcaccctatgcatccctgccttccccagagcccaaggcggtgtttgccaaggagcagccagcgagca

SEQ ID NO: 34590 - DNA, 80 bp, Homo sapiens
agagcccaaggcggtgtttgccaaggagcagccagcgagcagggaggtgcaggctgaggcggggaccagtgccacgctga

SEQ ID NO: 34591 - DNA, 82 bp, Homo sapiens
cggtgtttgccaaggagcagccagcgagcagggaggtgcaggctgaggcggggaccagtgccacgctgagctgcgaggtggc

SEQ ID NO: 34592 - DNA, 83 bp, Homo sapiens
ttgccaaggagcagccagcgagcagggaggtgcaggctgaggcggggaccagtgccacgctgagctgcgaggtggcccaggcc

SEQ ID NO: 34593 - DNA, 83 bp, Homo sapiens
agcagccagcgagcagggaggtgcaggctgaggcggggaccagtgccacgctgagctgcgaggtggcccaggcccagacagag

SEQ ID NO: 34594 - DNA, 80 bp, Homo sapiens
agcagggaggtgcaggctgaggcggggaccagtgccacgctgagctgcgaggtggcccaggcccagacagaggtgacgtg

SEQ ID NO: 34595 - DNA, 76 bp, Homo sapiens
acagaggtgacgtggtacaaggacgggaagaaactgagctccagctcgaaagtgcgaatggaggccgtgggctgca

SEQ ID NO: 34596 - DNA, 75 bp, Homo sapiens
ggtacaaggacgggaagaaactgagctccagctcgaaagtgcgaatggaggccgtgggctgcacacggaggctgg

SEQ ID NO: 34597 - DNA, 77 bp, Homo sapiens
aaggacgggaagaaactgagctccagctcgaaagtgcgaatggaggccgtgggctgcacacggaggctggtggtgca

SEQ ID NO: 34598 - DNA, 80 bp, Homo sapiens
agaaactgagctccagctcgaaagtgcgaatggaggccgtgggctgcacacggaggctggtggtgcaggaggcaggccag

SEQ ID NO: 34599 - DNA, 79 bp, Homo sapiens
tccagctcgaaagtgcgaatggaggccgtgggctgcacacggaggctggtggtgcaggaggcaggccaggcggacgccg

SEQ ID NO: 34600 - DNA, 76 bp, Homo sapiens
aagtgcgaatggaggccgtgggctgcacacggaggctggtggtgcaggaggcaggccaggcggacgccggggagta

SEQ ID NO: 34601 - DNA, 77 bp, Homo sapiens
aggccgtgggctgcacacggaggctggtggtgcaggaggcaggccaggcggacgccggggagtacagctgcaaggcc

SEQ ID NO: 34602 - DNA, 78 bp, Homo sapiens
ctgcacacggaggctggtggtgcaggaggcaggccaggcggacgccggggagtacagctgcaaggccggggatcagcg

SEQ ID NO: 34603 - DNA, 78 bp, Homo sapiens
gctggtggtgcaggaggcaggccaggcggacgccggggagtacagctgcaaggccggggatcagcggctgtccttcca

SEQ ID NO: 34604 - DNA, 76 bp, Homo sapiens
caggaggcaggccaggcggacgccggggagtacagctgcaaggccggggatcagcggctgtccttccacctgcacg

SEQ ID NO: 34605 - DNA, 75 bp, Homo sapiens
aggccaggcggacgccggggagtacagctgcaaggccggggatcagcggctgtccttccacctgcacgtggcagg

SEQ ID NO: 34606 - DNA, 76 bp, Homo sapiens
cggacgccggggagtacagctgcaaggccggggatcagcggctgtccttccacctgcacgtggcaggtcagtgctt

SEQ ID NO: 34607 - DNA, 79 bp, Homo sapiens
agtacagctgcaaggccggggatcagcggctgtccttccacctgcacgtggcaggtcagtgctttggaggtcctgagga

SEQ ID NO: 34608 - DNA, 77 bp, Homo sapiens
aaggccggggatcagcggctgtccttccacctgcacgtggcaggtcagtgctttggaggtcctgaggagcctcttca

SEQ ID NO: 34609 - DNA, 79 bp, Homo sapiens
accccagaagagctgacgtaatggccagaagtggtggaaagggctccaccttgcatgtcaccaggcaatgcatgacaaa

SEQ ID NO: 34610 - DNA, 80 bp, Homo sapiens
agaagagctgacgtaatggccagaagtggtggaaagggctccaccttgcatgtcaccaggcaatgcatgacaaagcccag

SEQ ID NO: 34611 - DNA, 77 bp, Homo sapiens
acgtaatggccagaagtggtggaaagggctccaccttgcatgtcaccaggcaatgcatgacaaagcccaggccttcc

SEQ ID NO: 34612 - DNA, 77 bp, Homo sapiens
aagtggtggaaagggctccaccttgcatgtcaccaggcaatgcatgacaaagcccaggccttccccgcagaggccaa

SEQ ID NO: 34613 - DNA, 81 bp, Homo sapiens
accttgcatgtcaccaggcaatgcatgacaaagcccaggccttccccgcagaggccaacgctgaccctcctgacagtggca

SEQ ID NO: 34614 - DNA, 78 bp, Homo sapiens
accaggcaatgcatgacaaagcccaggccttccccgcagaggccaacgctgaccctcctgacagtggcaggactggaa

SEQ ID NO: 34615 - DNA, 79 bp, Homo sapiens
atgcatgacaaagcccaggccttccccgcagaggccaacgctgaccctcctgacagtggcaggactggaagcctcagta

SEQ ID NO: 34616 - DNA, 75 bp, Homo sapiens
aaagcccaggccttccccgcagaggccaacgctgaccctcctgacagtggcaggactggaagcctcagtactctg

SEQ ID NO: 34617 - DNA, 78 bp, Homo sapiens
cttccccgcagaggccaacgctgaccctcctgacagtggcaggactggaagcctcagtactctggggccctgcagtga

SEQ ID NO: 34618 - DNA, 78 bp, Homo sapiens
agaggccaacgctgaccctcctgacagtggcaggactggaagcctcagtactctggggccctgcagtgaggacacgcc

SEQ ID NO: 34619 - DNA, 77 bp, Homo sapiens
accctcctgacagtggcaggactggaagcctcagtactctggggccctgcagtgaggacacgccctgcccagtccca

SEQ ID NO: 34620 - DNA, 77 bp, Homo sapiens
acagtggcaggactggaagcctcagtactctggggccctgcagtgaggacacgccctgcccagtcccatggggagac

SEQ ID NO: 34621 - DNA, 77 bp, Homo sapiens
agcctcagtactctggggccctgcagtgaggacacgccctgcccagtcccatggggagaccctagcatatccttgaa

SEQ ID NO: 34622 - DNA, 77 bp, Homo sapiens
tggggccctgcagtgaggacacgccctgcccagtcccatggggagaccctagcatatccttgaagggagctgtgtaa

SEQ ID NO: 34623 - DNA, 76 bp, Homo sapiens
agtgaggacacgccctgcccagtcccatggggagaccctagcatatccttgaagggagctgtgtaagcattaggaa

SEQ ID NO: 34624 - DNA, 74 bp, Homo sapiens
acgccctgcccagtcccatggggagaccctagcatatccttgaagggagctgtgtaagcattaggaacccagtc

SEQ ID NO: 34625 - DNA, 75 bp, Homo sapiens
agtcccatggggagaccctagcatatccttgaagggagctgtgtaagcattaggaacccagtccctgcactggag

SEQ ID NO: 34626 - DNA, 78 bp, Homo sapiens
ggagaccctagcatatccttgaagggagctgtgtaagcattaggaacccagtccctgcactggaggagctcgtgcacg

SEQ ID NO: 34627 - DNA, 77 bp, Homo sapiens
tagcatatccttgaagggagctgtgtaagcattaggaacccagtccctgcactggaggagctcgtgcacggagggtt

SEQ ID NO: 34628 - DNA, 76 bp, Homo sapiens
ttgaagggagctgtgtaagcattaggaacccagtccctgcactggaggagctcgtgcacggagggtttgtcacaac

SEQ ID NO: 34629 - DNA, 76 bp, Homo sapiens
tgtgtaagcattaggaacccagtccctgcactggaggagctcgtgcacggagggtttgtcacaactgccccgcctg

SEQ ID NO: 34630 - DNA, 75 bp, Homo sapiens
agcattaggaacccagtccctgcactggaggagctcgtgcacggagggtttgtcacaactgccccgcctggaata

SEQ ID NO: 34631 - DNA, 80 bp, Homo sapiens
tggaggagctcgtgcacggagggtttgtcacaactgccccgcctggaatagcccatggcactgcacagtggatggagaaa

SEQ ID NO: 34632 - DNA, 80 bp, Homo sapiens
tcgtgcacggagggtttgtcacaactgccccgcctggaatagcccatggcactgcacagtggatggagaaactgtgattc

SEQ ID NO: 34633 - DNA, 77 bp, Homo sapiens
acggagggtttgtcacaactgccccgcctggaatagcccatggcactgcacagtggatggagaaactgtgattcttg

SEQ ID NO: 34634 - DNA, 80 bp, Homo sapiens
cgcctggaatagcccatggcactgcacagtggatggagaaactgtgattcttgtgctgggaggtggtggggcttctccca

SEQ ID NO: 34635 - DNA, 81 bp, Homo sapiens
actgcacagtggatggagaaactgtgattcttgtgctgggaggtggtggggcttctcccagctacatggccagtgccaagc

SEQ ID NO: 34636 - DNA, 79 bp, Homo sapiens
tggatggagaaactgtgattcttgtgctgggaggtggtggggcttctcccagctacatggccagtgccaagcttgggaa

SEQ ID NO: 34637 - DNA, 75 bp, Homo sapiens
aaactgtgattcttgtgctgggaggtggtggggcttctcccagctacatggccagtgccaagcttgggaaggttc

SEQ ID NO: 34638 - DNA, 75 bp, Homo sapiens
attcttgtgctgggaggtggtggggcttctcccagctacatggccagtgccaagcttgggaaggttctgtttctc

SEQ ID NO: 34639 - DNA, 72 bp, Homo sapiens
aggtggtggggcttctcccagctacatggccagtgccaagcttgggaaggttctgtttctcctactttcttg

SEQ ID NO: 34640 - DNA, 73 bp, Homo sapiens
cttctcccagctacatggccagtgccaagcttgggaaggttctgtttctcctactttcttgtctaggccctcc

SEQ ID NO: 34641 - DNA, 72 bp, Homo sapiens
agctacatggccagtgccaagcttgggaaggttctgtttctcctactttcttgtctaggccctcctacccta

SEQ ID NO: 34642 - DNA, 68 bp, Homo sapiens
agtgccaagcttgggaaggttctgtttctcctactttcttgtctaggccctcctaccctagggtggtc

SEQ ID NO: 34643 - DNA, 66 bp, Homo sapiens
aagcttgggaaggttctgtttctcctactttcttgtctaggccctcctaccctagggtggtcttcc

SEQ ID NO: 34644 - DNA, 70 bp, Homo sapiens
tctgtttctcctactttcttgtctaggccctcctaccctagggtggtcttcctgacctgggcagtatctt

SEQ ID NO: 34645 - DNA, 70 bp, Homo sapiens
ttctcctactttcttgtctaggccctcctaccctagggtggtcttcctgacctgggcagtatctttgacc

SEQ ID NO: 34646 - DNA, 71 bp, Homo sapiens
ttcttgtctaggccctcctaccctagggtggtcttcctgacctgggcagtatctttgacctcgtgtgtccc

SEQ ID NO: 34647 - DNA, 71 bp, Homo sapiens
ccctcctaccctagggtggtcttcctgacctgggcagtatctttgacctcgtgtgtccctccttgtccatc

SEQ ID NO: 34648 - DNA, 73 bp, Homo sapiens
ctagggtggtcttcctgacctgggcagtatctttgacctcgtgtgtccctccttgtccatccccagagcccaa

SEQ ID NO: 34649 - DNA, 73 bp, Homo sapiens
cctgggcagtatctttgacctcgtgtgtccctccttgtccatccccagagcccaaggtggtgtttgccaagga

SEQ ID NO: 34650 - DNA, 77 bp, Homo sapiens
atctttgacctcgtgtgtccctccttgtccatccccagagcccaaggtggtgtttgccaaggagcagccagcacaca

SEQ ID NO: 34651 - DNA, 78 bp, Homo sapiens
tcgtgtgtccctccttgtccatccccagagcccaaggtggtgtttgccaaggagcagccagcacacagggaggtgcag

SEQ ID NO: 34652 - DNA, 78 bp, Homo sapiens
ctccttgtccatccccagagcccaaggtggtgtttgccaaggagcagccagcacacagggaggtgcaggctgaggcgg

SEQ ID NO: 34653 - DNA, 78 bp, Homo sapiens
cccagagcccaaggtggtgtttgccaaggagcagccagcacacagggaggtgcaggctgaggcgggggccagtgccac

SEQ ID NO: 34654 - DNA, 81 bp, Homo sapiens
aaggtggtgtttgccaaggagcagccagcacacagggaggtgcaggctgaggcgggggccagtgccacgctgagctgcgag

SEQ ID NO: 34655 - DNA, 84 bp, Homo sapiens
ggagcagccagcacacagggaggtgcaggctgaggcgggggccagtgccacgctgagctgcgaggtggcccaggcccagacaga

SEQ ID NO: 34656 - DNA, 78 bp, Homo sapiens
tggtacaaggatgggaagaagctgagttccagctcgaaagtgcgcgtggaggccgtgggctgcacacggaggctggtg

SEQ ID NO: 34657 - DNA, 80 bp, Homo sapiens
atgggaagaagctgagttccagctcgaaagtgcgcgtggaggccgtgggctgcacacggaggctggtggtgcagcaggcg

SEQ ID NO: 34658 - DNA, 82 bp, Homo sapiens
agctgagttccagctcgaaagtgcgcgtggaggccgtgggctgcacacggaggctggtggtgcagcaggcgggccaggcaga

SEQ ID NO: 34659 - DNA, 78 bp, Homo sapiens
agctcgaaagtgcgcgtggaggccgtgggctgcacacggaggctggtggtgcagcaggcgggccaggcagaggccggg

SEQ ID NO: 34660 - DNA, 79 bp, Homo sapiens
cgtggaggccgtgggctgcacacggaggctggtggtgcagcaggcgggccaggcagaggccggggagtacagctgcgag

SEQ ID NO: 34661 - DNA, 79 bp, Homo sapiens
aggccgtgggctgcacacggaggctggtggtgcagcaggcgggccaggcagaggccggggagtacagctgcgaggcagg

SEQ ID NO: 34662 - DNA, 80 bp, Homo sapiens
acacggaggctggtggtgcagcaggcgggccaggcagaggccggggagtacagctgcgaggcagggggtcagcagctctc

SEQ ID NO: 34663 - DNA, 79 bp, Homo sapiens
caggcgggccaggcagaggccggggagtacagctgcgaggcagggggtcagcagctctccttccgcctgcaggtggcag

SEQ ID NO: 34664 - DNA, 79 bp, Homo sapiens
aggcagaggccggggagtacagctgcgaggcagggggtcagcagctctccttccgcctgcaggtggcaggtcagtgctt

SEQ ID NO: 34665 - DNA, 77 bp, Homo sapiens
aggccggggagtacagctgcgaggcagggggtcagcagctctccttccgcctgcaggtggcaggtcagtgctttggg

SEQ ID NO: 34666 - DNA, 83 bp, Homo sapiens
agtacagctgcgaggcagggggtcagcagctctccttccgcctgcaggtggcaggtcagtgctttggggatgctgagtgagcc

SEQ ID NO: 34667 - DNA, 80 bp, Homo sapiens
aggcagggggtcagcagctctccttccgcctgcaggtggcaggtcagtgctttggggatgctgagtgagccctgtttgta

SEQ ID NO: 34668 - DNA, 84 bp, Homo sapiens
ttccgcctgcaggtggcaggtcagtgctttggggatgctgagtgagccctgtttgtagctgctgctgtgactggagtagaacca

SEQ ID NO: 34669 - DNA, 83 bp, Homo sapiens
tcagtgctttggggatgctgagtgagccctgtttgtagctgctgctgtgactggagtagaaccactgctgacccagtgggctt

SEQ ID NO: 34670 - DNA, 82 bp, Homo sapiens
ttggggatgctgagtgagccctgtttgtagctgctgctgtgactggagtagaaccactgctgacccagtgggctttccatta

SEQ ID NO: 34671 - DNA, 80 bp, Homo sapiens
agtgagccctgtttgtagctgctgctgtgactggagtagaaccactgctgacccagtgggctttccattagactccatcc

SEQ ID NO: 34672 - DNA, 80 bp, Homo sapiens
tgtttgtagctgctgctgtgactggagtagaaccactgctgacccagtgggctttccattagactccatccctcaacttc

SEQ ID NO: 34673 - DNA, 80 bp, Homo sapiens
tgctgctgtgactggagtagaaccactgctgacccagtgggctttccattagactccatccctcaacttctcccatcctc

SEQ ID NO: 34674 - DNA, 78 bp, Homo sapiens
tgtgactggagtagaaccactgctgacccagtgggctttccattagactccatccctcaacttctcccatcctctcac

SEQ ID NO: 34675 - DNA, 73 bp, Homo sapiens
aaccactgctgacccagtgggctttccattagactccatccctcaacttctcccatcctctcacctcctattt

SEQ ID NO: 34676 - DNA, 73 bp, Homo sapiens
acccagtgggctttccattagactccatccctcaacttctcccatcctctcacctcctatttttatgcctgtg

SEQ ID NO: 34677 - DNA, 76 bp, Homo sapiens
tgggctttccattagactccatccctcaacttctcccatcctctcacctcctatttttatgcctgtggtggagctg

SEQ ID NO: 34678 - DNA, 74 bp, Homo sapiens
tcccatcctctcacctcctatttttatgcctgtggtggagctgggctgcttagtggggaagggagtgaacggaa

SEQ ID NO: 34679 - DNA, 73 bp, Homo sapiens
tctcacctcctatttttatgcctgtggtggagctgggctgcttagtggggaagggagtgaacggaagggtcag

SEQ ID NO: 34680 - DNA, 69 bp, Homo sapiens
tgggctgcttagtggggaagggagtgaacggaagggtcagggccctccttgtccatgttgggtggtgtt

SEQ ID NO: 34681 - DNA, 71 bp, Homo sapiens
ttagtggggaagggagtgaacggaagggtcagggccctccttgtccatgttgggtggtgtttctgtgcaga

SEQ ID NO: 34682 - DNA, 75 bp, Homo sapiens
ggagtgaacggaagggtcagggccctccttgtccatgttgggtggtgtttctgtgcagacatgctgggtcacatt

SEQ ID NO: 34683 - DNA, 73 bp, Homo sapiens
aacggaagggtcagggccctccttgtccatgttgggtggtgtttctgtgcagacatgctgggtcacattttcc

SEQ ID NO: 34684 - DNA, 75 bp, Homo sapiens
ggccctccttgtccatgttgggtggtgtttctgtgcagacatgctgggtcacattttcccagtaccttctccaaa

SEQ ID NO: 34685 - DNA, 76 bp, Homo sapiens
ttgtccatgttgggtggtgtttctgtgcagacatgctgggtcacattttcccagtaccttctccaaactaccgatg

SEQ ID NO: 34686 - DNA, 75 bp, Homo sapiens
tgttgggtggtgtttctgtgcagacatgctgggtcacattttcccagtaccttctccaaactaccgatgtcccga

SEQ ID NO: 34687 - DNA, 76 bp, Homo sapiens
tgtttctgtgcagacatgctgggtcacattttcccagtaccttctccaaactaccgatgtcccgaggtgtccagga

SEQ ID NO: 34688 - DNA, 72 bp, Homo sapiens
atgctgggtcacattttcccagtaccttctccaaactaccgatgtcccgaggtgtccaggactctggtccta

SEQ ID NO: 34689 - DNA, 74 bp, Homo sapiens
acattttcccagtaccttctccaaactaccgatgtcccgaggtgtccaggactctggtcctatctaatgcatga

SEQ ID NO: 34690 - DNA, 75 bp, Homo sapiens
agtaccttctccaaactaccgatgtcccgaggtgtccaggactctggtcctatctaatgcatgagatggcggtaa

SEQ ID NO: 34691 - DNA, 77 bp, Homo sapiens
ttctccaaactaccgatgtcccgaggtgtccaggactctggtcctatctaatgcatgagatggcggtaagccagacg

SEQ ID NO: 34692 - DNA, 77 bp, Homo sapiens
taccgatgtcccgaggtgtccaggactctggtcctatctaatgcatgagatggcggtaagccagacgtccctccctc

SEQ ID NO: 34693 - DNA, 75 bp, Homo sapiens
aggtgtccaggactctggtcctatctaatgcatgagatggcggtaagccagacgtccctccctcggggatactcc

SEQ ID NO: 34694 - DNA, 76 bp, Homo sapiens
aggactctggtcctatctaatgcatgagatggcggtaagccagacgtccctccctcggggatactcctgcagtccc

SEQ ID NO: 34695 - DNA, 80 bp, Homo sapiens
tcctatctaatgcatgagatggcggtaagccagacgtccctccctcggggatactcctgcagtccctgcacggcctcatc

SEQ ID NO: 34696 - DNA, 78 bp, Homo sapiens
aatgcatgagatggcggtaagccagacgtccctccctcggggatactcctgcagtccctgcacggcctcatctggccc

SEQ ID NO: 34697 - DNA, 76 bp, Homo sapiens
atggcggtaagccagacgtccctccctcggggatactcctgcagtccctgcacggcctcatctggccccatgtgag

SEQ ID NO: 34698 - DNA, 77 bp, Homo sapiens
ctcggggatactcctgcagtccctgcacggcctcatctggccccatgtgagggctctccctgtggaaagagatttta

SEQ ID NO: 34699 - DNA, 76 bp, Homo sapiens
atactcctgcagtccctgcacggcctcatctggccccatgtgagggctctccctgtggaaagagattttaattcgt

SEQ ID NO: 34700 - DNA, 75 bp, Homo sapiens
agtccctgcacggcctcatctggccccatgtgagggctctccctgtggaaagagattttaattcgttgagtcagg

SEQ ID NO: 34701 - DNA, 73 bp, Homo sapiens
tctggccccatgtgagggctctccctgtggaaagagattttaattcgttgagtcagggtgtagggaaattcca

SEQ ID NO: 34702 - DNA, 72 bp, Homo sapiens
gggctctccctgtggaaagagattttaattcgttgagtcagggtgtagggaaattccagccacacagtctta

SEQ ID NO: 34703 - DNA, 72 bp, Homo sapiens
tgtggaaagagattttaattcgttgagtcagggtgtagggaaattccagccacacagtcttatttggaatta

SEQ ID NO: 34704 - DNA, 72 bp, Homo sapiens
aagagattttaattcgttgagtcagggtgtagggaaattccagccacacagtcttatttggaattatatcaa

SEQ ID NO: 34705 - DNA, 75 bp, Homo sapiens
taattcgttgagtcagggtgtagggaaattccagccacacagtcttatttggaattatatcaacactgaacactg

SEQ ID NO: 34706 - DNA, 71 bp, Homo sapiens
agggtgtagggaaattccagccacacagtcttatttggaattatatcaacactgaacactgggttcccaaa

SEQ ID NO: 34707 - DNA, 71 bp, Homo sapiens
aaattccagccacacagtcttatttggaattatatcaacactgaacactgggttcccaaagttttcagtgt

SEQ ID NO: 34708 - DNA, 73 bp, Homo sapiens
cacacagtcttatttggaattatatcaacactgaacactgggttcccaaagttttcagtgttctgggacacac

SEQ ID NO: 34709 - DNA, 71 bp, Homo sapiens
agtcttatttggaattatatcaacactgaacactgggttcccaaagttttcagtgttctgggacacacttc

SEQ ID NO: 34710 - DNA, 72 bp, Homo sapiens
acactgaacactgggttcccaaagttttcagtgttctgggacacacttctgtccttccctgtggatgtagaa

SEQ ID NO: 34711 - DNA, 72 bp, Homo sapiens
actgggttcccaaagttttcagtgttctgggacacacttctgtccttccctgtggatgtagaagccctgtca

SEQ ID NO: 34712 - DNA, 74 bp, Homo sapiens
agttttcagtgttctgggacacacttctgtccttccctgtggatgtagaagccctgtcagagccctgactaaaa

SEQ ID NO: 34713 - DNA, 75 bp, Homo sapiens
agtgttctgggacacacttctgtccttccctgtggatgtagaagccctgtcagagccctgactaaaacccagatc

SEQ ID NO: 34714 - DNA, 75 bp, Homo sapiens
acacttctgtccttccctgtggatgtagaagccctgtcagagccctgactaaaacccagatccacagcgttagtg

SEQ ID NO: 34715 - DNA, 76 bp, Homo sapiens
cttccctgtggatgtagaagccctgtcagagccctgactaaaacccagatccacagcgttagtgtgtgcaaaacga

SEQ ID NO: 34716 - DNA, 80 bp, Homo sapiens
agagccctgactaaaacccagatccacagcgttagtgtgtgcaaaacgagtaaagagcagcacattggcaggtgcgcaca

SEQ ID NO: 34717 - DNA, 77 bp, Homo sapiens
cgttagtgtgtgcaaaacgagtaaagagcagcacattggcaggtgcgcacacgtgacgttggaattccatttcggaa

SEQ ID NO: 34718 - DNA, 76 bp, Homo sapiens
aaaacgagtaaagagcagcacattggcaggtgcgcacacgtgacgttggaattccatttcggaagccaatctcact

SEQ ID NO: 34719 - DNA, 76 bp, Homo sapiens
acattggcaggtgcgcacacgtgacgttggaattccatttcggaagccaatctcactttccttttgcattctgtta

SEQ ID NO: 34720 - DNA, 74 bp, Homo sapiens
aggtgcgcacacgtgacgttggaattccatttcggaagccaatctcactttccttttgcattctgttagaatgt

SEQ ID NO: 34721 - DNA, 75 bp, Homo sapiens
gtgacgttggaattccatttcggaagccaatctcactttccttttgcattctgttagaatgttctgtgtctgaat

SEQ ID NO: 34722 - DNA, 73 bp, Homo sapiens
aattccatttcggaagccaatctcactttccttttgcattctgttagaatgttctgtgtctgaattccccttg

SEQ ID NO: 34723 - DNA, 75 bp, Homo sapiens
gaagccaatctcactttccttttgcattctgttagaatgttctgtgtctgaattccccttggaatttggatagat

SEQ ID NO: 34724 - DNA, 72 bp, Homo sapiens
tcactttccttttgcattctgttagaatgttctgtgtctgaattccccttggaatttggatagatttaaaag

SEQ ID NO: 34725 - DNA, 74 bp, Homo sapiens
tctgttagaatgttctgtgtctgaattccccttggaatttggatagatttaaaagtgataggaataagtagctg

SEQ ID NO: 34726 - DNA, 73 bp, Homo sapiens
tgttctgtgtctgaattccccttggaatttggatagatttaaaagtgataggaataagtagctggtgtttcta

SEQ ID NO: 34727 - DNA, 71 bp, Homo sapiens
gtctgaattccccttggaatttggatagatttaaaagtgataggaataagtagctggtgtttctagcctcc

SEQ ID NO: 34728 - DNA, 71 bp, Homo sapiens
ttggaatttggatagatttaaaagtgataggaataagtagctggtgtttctagcctccgcctccaggcggg

SEQ ID NO: 34729 - DNA, 73 bp, Homo sapiens
taggaataagtagctggtgtttctagcctccgcctccaggcgggtgaggaggtgacacctgagaattcctccc

SEQ ID NO: 34730 - DNA, 75 bp, Homo sapiens
tagctggtgtttctagcctccgcctccaggcgggtgaggaggtgacacctgagaattcctccctctcacccctga

SEQ ID NO: 34731 - DNA, 76 bp, Homo sapiens
tgaggaggtgacacctgagaattcctccctctcacccctgaccctgccggaaagcgaaactgagatgcgggcattg

SEQ ID NO: 34732 - DNA, 73 bp, Homo sapiens
acacctgagaattcctccctctcacccctgaccctgccggaaagcgaaactgagatgcgggcattgggccctg

SEQ ID NO: 34733 - DNA, 71 bp, Homo sapiens
tctcacccctgaccctgccggaaagcgaaactgagatgcgggcattgggccctgggaagcgtggggaaggg

SEQ ID NO: 34734 - DNA, 76 bp, Homo sapiens
ggtccagggatgacagggtccccctctcatgccaactcacctctacccagagctggagccccaaatttcagagaga

SEQ ID NO: 34735 - DNA, 77 bp, Homo sapiens
atgacagggtccccctctcatgccaactcacctctacccagagctggagccccaaatttcagagagaccctgccgca

SEQ ID NO: 34736 - DNA, 80 bp, Homo sapiens
tctcatgccaactcacctctacccagagctggagccccaaatttcagagagaccctgccgcagggagcctctggtggtca

SEQ ID NO: 34737 - DNA, 75 bp, Homo sapiens
aactcacctctacccagagctggagccccaaatttcagagagaccctgccgcagggagcctctggtggtcaagga

SEQ ID NO: 34738 - DNA, 81 bp, Homo sapiens
tacccagagctggagccccaaatttcagagagaccctgccgcagggagcctctggtggtcaaggagcatgaagacatcatc

SEQ ID NO: 34739 - DNA, 80 bp, Homo sapiens
agctggagccccaaatttcagagagaccctgccgcagggagcctctggtggtcaaggagcatgaagacatcatcctgacc

SEQ ID NO: 34740 - DNA, 81 bp, Homo sapiens
aaatttcagagagaccctgccgcagggagcctctggtggtcaaggagcatgaagacatcatcctgaccgccacactggcca

SEQ ID NO: 34741 - DNA, 81 bp, Homo sapiens
agagagaccctgccgcagggagcctctggtggtcaaggagcatgaagacatcatcctgaccgccacactggccacaccctc

SEQ ID NO: 34742 - DNA, 81 bp, Homo sapiens
cagggagcctctggtggtcaaggagcatgaagacatcatcctgaccgccacactggccacaccctctgcggccacggtgac

SEQ ID NO: 34743 - DNA, 82 bp, Homo sapiens
tctggtggtcaaggagcatgaagacatcatcctgaccgccacactggccacaccctctgcggccacggtgacctggctcaag

SEQ ID NO: 34744 - DNA, 81 bp, Homo sapiens
aaggagcatgaagacatcatcctgaccgccacactggccacaccctctgcggccacggtgacctggctcaaggatggtgtg

SEQ ID NO: 34745 - DNA, 81 bp, Homo sapiens
atgaagacatcatcctgaccgccacactggccacaccctctgcggccacggtgacctggctcaaggatggtgtggagattc

SEQ ID NO: 34746 - DNA, 80 bp, Homo sapiens
atcctgaccgccacactggccacaccctctgcggccacggtgacctggctcaaggatggtgtggagattcgccgcagcaa

SEQ ID NO: 34747 - DNA, 83 bp, Homo sapiens
acactggccacaccctctgcggccacggtgacctggctcaaggatggtgtggagattcgccgcagcaagcggcatgagacagc

SEQ ID NO: 34748 - DNA, 83 bp, Homo sapiens
ccacaccctctgcggccacggtgacctggctcaaggatggtgtggagattcgccgcagcaagcggcatgagacagccagccag

SEQ ID NO: 34749 - DNA, 82 bp, Homo sapiens
gccacggtgacctggctcaaggatggtgtggagattcgccgcagcaagcggcatgagacagccagccagggggacacccaca

SEQ ID NO: 34750 - DNA, 80 bp, Homo sapiens
acctggctcaaggatggtgtggagattcgccgcagcaagcggcatgagacagccagccagggggacacccacaccctgac

SEQ ID NO: 34751 - DNA, 82 bp, Homo sapiens
ctcaaggatggtgtggagattcgccgcagcaagcggcatgagacagccagccagggggacacccacaccctgaccgtgcatg

SEQ ID NO: 34752 - DNA, 81 bp, Homo sapiens
tgtggagattcgccgcagcaagcggcatgagacagccagccagggggacacccacaccctgaccgtgcatggcgcccaggt

SEQ ID NO: 34753 - DNA, 83 bp, Homo sapiens
gcagcaagcggcatgagacagccagccagggggacacccacaccctgaccgtgcatggcgcccaggttctggacagcgccatc

SEQ ID NO: 34754 - DNA, 80 bp, Homo sapiens
aagcggcatgagacagccagccagggggacacccacaccctgaccgtgcatggcgcccaggttctggacagcgccatcta

SEQ ID NO: 34755 - DNA, 79 bp, Homo sapiens
agccagccagggggacacccacaccctgaccgtgcatggcgcccaggttctggacagcgccatctacagctgccgtgtg

SEQ ID NO: 34756 - DNA, 79 bp, Homo sapiens
gggacacccacaccctgaccgtgcatggcgcccaggttctggacagcgccatctacagctgccgtgtgggcgcagaggg

SEQ ID NO: 34757 - DNA, 80 bp, Homo sapiens
acaccctgaccgtgcatggcgcccaggttctggacagcgccatctacagctgccgtgtgggcgcagaggggcaggacttc

SEQ ID NO: 34758 - DNA, 79 bp, Homo sapiens
cccaggttctggacagcgccatctacagctgccgtgtgggcgcagaggggcaggacttcccagtgcaggtggaaggtga

SEQ ID NO: 34759 - DNA, 81 bp, Homo sapiens
ttctggacagcgccatctacagctgccgtgtgggcgcagaggggcaggacttcccagtgcaggtggaaggtgagccgggca

SEQ ID NO: 34760 - DNA, 77 bp, Homo sapiens
atctacagctgccgtgtgggcgcagaggggcaggacttcccagtgcaggtggaaggtgagccgggcatggggcgtgg

SEQ ID NO: 34761 - DNA, 75 bp, Homo sapiens
agctgccgtgtgggcgcagaggggcaggacttcccagtgcaggtggaaggtgagccgggcatggggcgtggggcg

SEQ ID NO: 34762 - DNA, 75 bp, Homo sapiens
aagtctggtctgttaagagcccggctgatgtcccctttgtgcccacagaggtggccgccaagttctgccggctgc

SEQ ID NO: 34763 - DNA, 78 bp, Homo sapiens
tctgttaagagcccggctgatgtcccctttgtgcccacagaggtggccgccaagttctgccggctgctggagcctgtg

SEQ ID NO: 34764 - DNA, 79 bp, Homo sapiens
ccctttgtgcccacagaggtggccgccaagttctgccggctgctggagcctgtgtgcggcgagctgggtggcacggtga

SEQ ID NO: 34765 - DNA, 82 bp, Homo sapiens
ccacagaggtggccgccaagttctgccggctgctggagcctgtgtgcggcgagctgggtggcacggtgacactggcctgcga

SEQ ID NO: 34766 - DNA, 81 bp, Homo sapiens
aggtggccgccaagttctgccggctgctggagcctgtgtgcggcgagctgggtggcacggtgacactggcctgcgagctaa

SEQ ID NO: 34767 - DNA, 84 bp, Homo sapiens
aagttctgccggctgctggagcctgtgtgcggcgagctgggtggcacggtgacactggcctgcgagctaagcccagcgtgtgca

SEQ ID NO: 34768 - DNA, 86 bp, Homo sapiens
tgctggagcctgtgtgcggcgagctgggtggcacggtgacactggcctgcgagctaagcccagcgtgtgcagaggtggtgtggcgc

SEQ ID NO: 34769 - DNA, 86 bp, Homo sapiens
tgtgtgcggcgagctgggtggcacggtgacactggcctgcgagctaagcccagcgtgtgcagaggtggtgtggcgctgcggcaaca

SEQ ID NO: 34770 - DNA, 85 bp, Homo sapiens
gagctgggtggcacggtgacactggcctgcgagctaagcccagcgtgtgcagaggtggtgtggcgctgcggcaacacgcagcttc

SEQ ID NO: 34771 - DNA, 82 bp, Homo sapiens
actggcctgcgagctaagcccagcgtgtgcagaggtggtgtggcgctgcggcaacacgcagcttcgggtgggcaagcgcttc

SEQ ID NO: 34772 - DNA, 84 bp, Homo sapiens
tgcgagctaagcccagcgtgtgcagaggtggtgtggcgctgcggcaacacgcagcttcgggtgggcaagcgcttccagatggtg

SEQ ID NO: 34773 - DNA, 81 bp, Homo sapiens
aagcccagcgtgtgcagaggtggtgtggcgctgcggcaacacgcagcttcgggtgggcaagcgcttccagatggtggccga

SEQ ID NO: 34774 - DNA, 77 bp, Homo sapiens
agaggtggtgtggcgctgcggcaacacgcagcttcgggtgggcaagcgcttccagatggtggccgaggggcccgtgc

SEQ ID NO: 34775 - DNA, 81 bp, Homo sapiens
tgtggcgctgcggcaacacgcagcttcgggtgggcaagcgcttccagatggtggccgaggggcccgtgcgctcactcactg

SEQ ID NO: 34776 - DNA, 79 bp, Homo sapiens
ctgcggcaacacgcagcttcgggtgggcaagcgcttccagatggtggccgaggggcccgtgcgctcactcactgtgttg

SEQ ID NO: 34777 - DNA, 79 bp, Homo sapiens
agcttcgggtgggcaagcgcttccagatggtggccgaggggcccgtgcgctcactcactgtgttggggctgcgcgcaga

SEQ ID NO: 34778 - DNA, 80 bp, Homo sapiens
gggtgggcaagcgcttccagatggtggccgaggggcccgtgcgctcactcactgtgttggggctgcgcgcagaggacgca

SEQ ID NO: 34779 - DNA, 78 bp, Homo sapiens
ttccagatggtggccgaggggcccgtgcgctcactcactgtgttggggctgcgcgcagaggacgcaggggagtacgtg

SEQ ID NO: 34780 - DNA, 79 bp, Homo sapiens
atggtggccgaggggcccgtgcgctcactcactgtgttggggctgcgcgcagaggacgcaggggagtacgtgtgtgaga

SEQ ID NO: 34781 - DNA, 82 bp, Homo sapiens
cccgtgcgctcactcactgtgttggggctgcgcgcagaggacgcaggggagtacgtgtgtgagagccgtgatgaccacacca

SEQ ID NO: 34782 - DNA, 85 bp, Homo sapiens
cactcactgtgttggggctgcgcgcagaggacgcaggggagtacgtgtgtgagagccgtgatgaccacaccagtgcgcagctcac

SEQ ID NO: 34783 - DNA, 79 bp, Homo sapiens
agaggacgcaggggagtacgtgtgtgagagccgtgatgaccacaccagtgcgcagctcaccgtcagtggtatgtaaggg

SEQ ID NO: 34784 - DNA, 79 bp, Homo sapiens
agtacgtgtgtgagagccgtgatgaccacaccagtgcgcagctcaccgtcagtggtatgtaaggggtcgagtgtcccta

SEQ ID NO: 34785 - DNA, 82 bp, Homo sapiens
tgtgtgagagccgtgatgaccacaccagtgcgcagctcaccgtcagtggtatgtaaggggtcgagtgtccctatccagggca

SEQ ID NO: 34786 - DNA, 83 bp, Homo sapiens
tgccagtcctgtgcgcccgcctcttaagcagtgctcctgtctgcagtgccccgagtggtgaagtttatgtctgggctgagcac

SEQ ID NO: 34787 - DNA, 81 bp, Homo sapiens
tcctgtgcgcccgcctcttaagcagtgctcctgtctgcagtgccccgagtggtgaagtttatgtctgggctgagcaccgtg

SEQ ID NO: 34788 - DNA, 80 bp, Homo sapiens
aagcagtgctcctgtctgcagtgccccgagtggtgaagtttatgtctgggctgagcaccgtggtcgcagaggagggcggc

SEQ ID NO: 34789 - DNA, 78 bp, Homo sapiens
tctgcagtgccccgagtggtgaagtttatgtctgggctgagcaccgtggtcgcagaggagggcggcgaggccaccttc

SEQ ID NO: 34790 - DNA, 76 bp, Homo sapiens
ccgagtggtgaagtttatgtctgggctgagcaccgtggtcgcagaggagggcggcgaggccaccttccagtgcgtg

SEQ ID NO: 34791 - DNA, 77 bp, Homo sapiens
tggtgaagtttatgtctgggctgagcaccgtggtcgcagaggagggcggcgaggccaccttccagtgcgtggtgtcc

SEQ ID NO: 34792 - DNA, 79 bp, Homo sapiens
tatgtctgggctgagcaccgtggtcgcagaggagggcggcgaggccaccttccagtgcgtggtgtcccccagtgatgtg

SEQ ID NO: 34793 - DNA, 79 bp, Homo sapiens
tgagcaccgtggtcgcagaggagggcggcgaggccaccttccagtgcgtggtgtcccccagtgatgtggcagtcgtgtg

SEQ ID NO: 34794 - DNA, 76 bp, Homo sapiens
tcgcagaggagggcggcgaggccaccttccagtgcgtggtgtcccccagtgatgtggcagtcgtgtggttccggga

SEQ ID NO: 34795 - DNA, 73 bp, Homo sapiens
agggcggcgaggccaccttccagtgcgtggtgtcccccagtgatgtggcagtcgtgtggttccgggacggtgc

SEQ ID NO: 34796 - DNA, 75 bp, Homo sapiens
aggccaccttccagtgcgtggtgtcccccagtgatgtggcagtcgtgtggttccgggacggtgccctgcttcagc

SEQ ID NO: 34797 - DNA, 75 bp, Homo sapiens
agtgcgtggtgtcccccagtgatgtggcagtcgtgtggttccgggacggtgccctgcttcagcccagcgagaagt

SEQ ID NO: 34798 - DNA, 79 bp, Homo sapiens
tgtcccccagtgatgtggcagtcgtgtggttccgggacggtgccctgcttcagcccagcgagaagtttgccatatcaca

SEQ ID NO: 34799 - DNA, 80 bp, Homo sapiens
agtgatgtggcagtcgtgtggttccgggacggtgccctgcttcagcccagcgagaagtttgccatatcacagagtggcgc

SEQ ID NO: 34800 - DNA, 79 bp, Homo sapiens
agtcgtgtggttccgggacggtgccctgcttcagcccagcgagaagtttgccatatcacagagtggcgccagccacagc

SEQ ID NO: 34801 - DNA, 83 bp, Homo sapiens
ttccgggacggtgccctgcttcagcccagcgagaagtttgccatatcacagagtggcgccagccacagcctgaccatctcaga

SEQ ID NO: 34802 - DNA, 85 bp, Homo sapiens
cctgcttcagcccagcgagaagtttgccatatcacagagtggcgccagccacagcctgaccatctcagacctggtgctggaggac

SEQ ID NO: 34803 - DNA, 84 bp, Homo sapiens
ttcagcccagcgagaagtttgccatatcacagagtggcgccagccacagcctgaccatctcagacctggtgctggaggacgcgg

SEQ ID NO: 34804 - DNA, 83 bp, Homo sapiens
agaagtttgccatatcacagagtggcgccagccacagcctgaccatctcagacctggtgctggaggacgcgggccagatcacc

SEQ ID NO: 34805 - DNA, 84 bp, Homo sapiens
atatcacagagtggcgccagccacagcctgaccatctcagacctggtgctggaggacgcgggccagatcaccgtggaggctgag

SEQ ID NO: 34806 - DNA, 83 bp, Homo sapiens
agccacagcctgaccatctcagacctggtgctggaggacgcgggccagatcaccgtggaggctgagggcgcctcatcctctgc

SEQ ID NO: 34807 - DNA, 83 bp, Homo sapiens
ctgaccatctcagacctggtgctggaggacgcgggccagatcaccgtggaggctgagggcgcctcatcctctgctgccctgag

SEQ ID NO: 34808 - DNA, 80 bp, Homo sapiens
ctggtgctggaggacgcgggccagatcaccgtggaggctgagggcgcctcatcctctgctgccctgagggtccgaggtga

SEQ ID NO: 34809 - DNA, 79 bp, Homo sapiens
ctggaggacgcgggccagatcaccgtggaggctgagggcgcctcatcctctgctgccctgagggtccgaggtgagtgtg

SEQ ID NO: 34810 - DNA, 79 bp, Homo sapiens
ccagatcaccgtggaggctgagggcgcctcatcctctgctgccctgagggtccgaggtgagtgtggggggcagcaggat

SEQ ID NO: 34811 - DNA, 79 bp, Homo sapiens
tcaccgtggaggctgagggcgcctcatcctctgctgccctgagggtccgaggtgagtgtggggggcagcaggatttgcc

SEQ ID NO: 34812 - DNA, 73 bp, Homo sapiens
tggaggagggcgagggccgccgtgacctcccctctcctgcgaccccagaggcgcctgtgctgttcaaaaagaa

SEQ ID NO: 34813 - DNA, 75 bp, Homo sapiens
agggccgccgtgacctcccctctcctgcgaccccagaggcgcctgtgctgttcaaaaagaagctggagccgcaga

SEQ ID NO: 34814 - DNA, 76 bp, Homo sapiens
gtgacctcccctctcctgcgaccccagaggcgcctgtgctgttcaaaaagaagctggagccgcagacggtggagga

SEQ ID NO: 34815 - DNA, 79 bp, Homo sapiens
tctcctgcgaccccagaggcgcctgtgctgttcaaaaagaagctggagccgcagacggtggaggagcggagctcggtga

SEQ ID NO: 34816 - DNA, 75 bp, Homo sapiens
accccagaggcgcctgtgctgttcaaaaagaagctggagccgcagacggtggaggagcggagctcggtgaccctg

SEQ ID NO: 34817 - DNA, 76 bp, Homo sapiens
aggcgcctgtgctgttcaaaaagaagctggagccgcagacggtggaggagcggagctcggtgaccctggaggtgga

SEQ ID NO: 34818 - DNA, 76 bp, Homo sapiens
tgttcaaaaagaagctggagccgcagacggtggaggagcggagctcggtgaccctggaggtggagctgacgcggcc

SEQ ID NO: 34819 - DNA, 75 bp, Homo sapiens
aaagaagctggagccgcagacggtggaggagcggagctcggtgaccctggaggtggagctgacgcggccgtggcc

SEQ ID NO: 34820 - DNA, 77 bp, Homo sapiens
cgcagacggtggaggagcggagctcggtgaccctggaggtggagctgacgcggccgtggccggagctgaggtggaca

SEQ ID NO: 34821 - DNA, 75 bp, Homo sapiens
gtggaggagcggagctcggtgaccctggaggtggagctgacgcggccgtggccggagctgaggtggacacggaac

SEQ ID NO: 34822 - DNA, 73 bp, Homo sapiens
agctcggtgaccctggaggtggagctgacgcggccgtggccggagctgaggtggacacggaacgcgacggccc

SEQ ID NO: 34823 - DNA, 73 bp, Homo sapiens
cctggaggtggagctgacgcggccgtggccggagctgaggtggacacggaacgcgacggccctggcgccggga

SEQ ID NO: 34824 - DNA, 72 bp, Homo sapiens
gagctgacgcggccgtggccggagctgaggtggacacggaacgcgacggccctggcgccgggaaagaacgtg

SEQ ID NO: 34825 - DNA, 71 bp, Homo sapiens
cggccgtggccggagctgaggtggacacggaacgcgacggccctggcgccgggaaagaacgtggagatcca

SEQ ID NO: 34826 - DNA, 72 bp, Homo sapiens
tggccggagctgaggtggacacggaacgcgacggccctggcgccgggaaagaacgtggagatccacgccgag

SEQ ID NO: 34827 - DNA, 69 bp, Homo sapiens
aggtggacacggaacgcgacggccctggcgccgggaaagaacgtggagatccacgccgagggcgcccgc

SEQ ID NO: 34828 - DNA, 68 bp, Homo sapiens
aacgcgacggccctggcgccgggaaagaacgtggagatccacgccgagggcgcccgccaccgcctggt

SEQ ID NO: 34829 - DNA, 71 bp, Homo sapiens
cctggcgccgggaaagaacgtggagatccacgccgagggcgcccgccaccgcctggttctgcacaacgtag

SEQ ID NO: 34830 - DNA, 71 bp, Homo sapiens
ggaaagaacgtggagatccacgccgagggcgcccgccaccgcctggttctgcacaacgtaggttttgccga

SEQ ID NO: 34831 - DNA, 72 bp, Homo sapiens
tggagatccacgccgagggcgcccgccaccgcctggttctgcacaacgtaggttttgccgaccgtggcttct

SEQ ID NO: 34832 - DNA, 70 bp, Homo sapiens
atccacgccgagggcgcccgccaccgcctggttctgcacaacgtaggttttgccgaccgtggcttctttg

SEQ ID NO: 34833 - DNA, 74 bp, Homo sapiens
gcccgccaccgcctggttctgcacaacgtaggttttgccgaccgtggcttctttggctgcgagacgccggatga

SEQ ID NO: 34834 - DNA, 74 bp, Homo sapiens
accgcctggttctgcacaacgtaggttttgccgaccgtggcttctttggctgcgagacgccggatgacaagaca

SEQ ID NO: 34835 - DNA, 75 bp, Homo sapiens
gttctgcacaacgtaggttttgccgaccgtggcttctttggctgcgagacgccggatgacaagacacaggccaaa

SEQ ID NO: 34836 - DNA, 75 bp, Homo sapiens
taggttttgccgaccgtggcttctttggctgcgagacgccggatgacaagacacaggccaaactcaccgtggaga

SEQ ID NO: 34837 - DNA, 76 bp, Homo sapiens
ccgaccgtggcttctttggctgcgagacgccggatgacaagacacaggccaaactcaccgtggagagtgagccgcg

SEQ ID NO: 34838 - DNA, 75 bp, Homo sapiens
cttctttggctgcgagacgccggatgacaagacacaggccaaactcaccgtggagagtgagccgcgggcgggaag

SEQ ID NO: 34839 - DNA, 75 bp, Homo sapiens
gagacgccggatgacaagacacaggccaaactcaccgtggagagtgagccgcgggcgggaagggcggggcatcga

SEQ ID NO: 34840 - DNA, 80 bp, Homo sapiens
gtggtctcagagcagcggctgacccgtgacaccgcgtgtgcaccgcagtgcgccaggtacggctcgtacggggcctgcag

SEQ ID NO: 34841 - DNA, 80 bp, Homo sapiens
agagcagcggctgacccgtgacaccgcgtgtgcaccgcagtgcgccaggtacggctcgtacggggcctgcaggcagtgga

SEQ ID NO: 34842 - DNA, 78 bp, Homo sapiens
tgacccgtgacaccgcgtgtgcaccgcagtgcgccaggtacggctcgtacggggcctgcaggcagtggaggcacggga

SEQ ID NO: 34843 - DNA, 78 bp, Homo sapiens
acaccgcgtgtgcaccgcagtgcgccaggtacggctcgtacggggcctgcaggcagtggaggcacgggagcagggcac

SEQ ID NO: 34844 - DNA, 77 bp, Homo sapiens
accgcagtgcgccaggtacggctcgtacggggcctgcaggcagtggaggcacgggagcagggcacggctaccatgga

SEQ ID NO: 34845 - DNA, 78 bp, Homo sapiens
ccaggtacggctcgtacggggcctgcaggcagtggaggcacgggagcagggcacggctaccatggaggtgcagctgtc

SEQ ID NO: 34846 - DNA, 82 bp, Homo sapiens
tacggctcgtacggggcctgcaggcagtggaggcacgggagcagggcacggctaccatggaggtgcagctgtcgcatgcgga

SEQ ID NO: 34847 - DNA, 86 bp, Homo sapiens
gggcctgcaggcagtggaggcacgggagcagggcacggctaccatggaggtgcagctgtcgcatgcggacgtggatggcagctgga

SEQ ID NO: 34848 - DNA, 83 bp, Homo sapiens
agtggaggcacgggagcagggcacggctaccatggaggtgcagctgtcgcatgcggacgtggatggcagctggactcgtgacg

SEQ ID NO: 34849 - DNA, 82 bp, Homo sapiens
cgggagcagggcacggctaccatggaggtgcagctgtcgcatgcggacgtggatggcagctggactcgtgacggtctgcggt

SEQ ID NO: 34850 - DNA, 83 bp, Homo sapiens
agggcacggctaccatggaggtgcagctgtcgcatgcggacgtggatggcagctggactcgtgacggtctgcggttccagcag

SEQ ID NO: 34851 - DNA, 82 bp, Homo sapiens
ctaccatggaggtgcagctgtcgcatgcggacgtggatggcagctggactcgtgacggtctgcggttccagcaggggcccac

SEQ ID NO: 34852 - DNA, 81 bp, Homo sapiens
aggtgcagctgtcgcatgcggacgtggatggcagctggactcgtgacggtctgcggttccagcaggggcccacgtgccacc

SEQ ID NO: 34853 - DNA, 78 bp, Homo sapiens
atgcggacgtggatggcagctggactcgtgacggtctgcggttccagcaggggcccacgtgccacctggctgtgcggg

SEQ ID NO: 34854 - DNA, 76 bp, Homo sapiens
acgtggatggcagctggactcgtgacggtctgcggttccagcaggggcccacgtgccacctggctgtgcggggccc

SEQ ID NO: 34855 - DNA, 76 bp, Homo sapiens
agctggactcgtgacggtctgcggttccagcaggggcccacgtgccacctggctgtgcggggccccatgcacaccc

SEQ ID NO: 34856 - DNA, 78 bp, Homo sapiens
tcgtgacggtctgcggttccagcaggggcccacgtgccacctggctgtgcggggccccatgcacaccctcacactctc

SEQ ID NO: 34857 - DNA, 78 bp, Homo sapiens
gttccagcaggggcccacgtgccacctggctgtgcggggccccatgcacaccctcacactctcggggctgcggccaga

SEQ ID NO: 34858 - DNA, 78 bp, Homo sapiens
gggcccacgtgccacctggctgtgcggggccccatgcacaccctcacactctcggggctgcggccagaggatagtggc

SEQ ID NO: 34859 - DNA, 79 bp, Homo sapiens
tgccacctggctgtgcggggccccatgcacaccctcacactctcggggctgcggccagaggatagtggccttatggtct

SEQ ID NO: 34860 - DNA, 78 bp, Homo sapiens
ctggctgtgcggggccccatgcacaccctcacactctcggggctgcggccagaggatagtggccttatggtcttcaag

SEQ ID NO: 34861 - DNA, 79 bp, Homo sapiens
cccatgcacaccctcacactctcggggctgcggccagaggatagtggccttatggtcttcaaggccgaaggagtgcaca

SEQ ID NO: 34862 - DNA, 75 bp, Homo sapiens
accctcacactctcggggctgcggccagaggatagtggccttatggtcttcaaggccgaaggagtgcacacgtcg

SEQ ID NO: 34863 - DNA, 76 bp, Homo sapiens
actctcggggctgcggccagaggatagtggccttatggtcttcaaggccgaaggagtgcacacgtcggcgcggctc

SEQ ID NO: 34864 - DNA, 76 bp, Homo sapiens
tgcggccagaggatagtggccttatggtcttcaaggccgaaggagtgcacacgtcggcgcggctcgtggtcaccgg

SEQ ID NO: 34865 - DNA, 74 bp, Homo sapiens
aggatagtggccttatggtcttcaaggccgaaggagtgcacacgtcggcgcggctcgtggtcaccggtgcgttg

SEQ ID NO: 34866 - DNA, 73 bp, Homo sapiens
ttatggtcttcaaggccgaaggagtgcacacgtcggcgcggctcgtggtcaccggtgcgttggggggccggca

SEQ ID NO: 34867 - DNA, 74 bp, Homo sapiens
tcttcaaggccgaaggagtgcacacgtcggcgcggctcgtggtcaccggtgcgttggggggccggcagggcaca

SEQ ID NO: 34868 - DNA, 70 bp, Homo sapiens
cttctccaagccctttttctcttcccacctcctccttcctcctccccagagcttcccgtgagcttcagcc

SEQ ID NO: 34869 - DNA, 72 bp, Homo sapiens
tttttctcttcccacctcctccttcctcctccccagagcttcccgtgagcttcagccgcccgctgcaggacg

SEQ ID NO: 34870 - DNA, 75 bp, Homo sapiens
tcttcccacctcctccttcctcctccccagagcttcccgtgagcttcagccgcccgctgcaggacgtggtgacca

SEQ ID NO: 34871 - DNA, 75 bp, Homo sapiens
ccttcctcctccccagagcttcccgtgagcttcagccgcccgctgcaggacgtggtgaccactgagaaggagaag

SEQ ID NO: 34872 - DNA, 75 bp, Homo sapiens
tccccagagcttcccgtgagcttcagccgcccgctgcaggacgtggtgaccactgagaaggagaaggttaccctg

SEQ ID NO: 34873 - DNA, 76 bp, Homo sapiens
agcttcccgtgagcttcagccgcccgctgcaggacgtggtgaccactgagaaggagaaggttaccctggagtgcga

SEQ ID NO: 34874 - DNA, 77 bp, Homo sapiens
ttcagccgcccgctgcaggacgtggtgaccactgagaaggagaaggttaccctggagtgcgagctgtcgcgtcctaa

SEQ ID NO: 34875 - DNA, 77 bp, Homo sapiens
cccgctgcaggacgtggtgaccactgagaaggagaaggttaccctggagtgcgagctgtcgcgtcctaatgtggatg

SEQ ID NO: 34876 - DNA, 79 bp, Homo sapiens
acgtggtgaccactgagaaggagaaggttaccctggagtgcgagctgtcgcgtcctaatgtggatgtgcgctggctgaa

SEQ ID NO: 34877 - DNA, 78 bp, Homo sapiens
actgagaaggagaaggttaccctggagtgcgagctgtcgcgtcctaatgtggatgtgcgctggctgaaggtgcctccc

SEQ ID NO: 34878 - DNA, 78 bp, Homo sapiens
aaggagaaggttaccctggagtgcgagctgtcgcgtcctaatgtggatgtgcgctggctgaaggtgcctccctgccga

SEQ ID NO: 34879 - DNA, 78 bp, Homo sapiens
ttaccctggagtgcgagctgtcgcgtcctaatgtggatgtgcgctggctgaaggtgcctccctgccgaccccactcgg

SEQ ID NO: 34880 - DNA, 79 bp, Homo sapiens
agtgcgagctgtcgcgtcctaatgtggatgtgcgctggctgaaggtgcctccctgccgaccccactcggttgcctcctc

SEQ ID NO: 34881 - DNA, 81 bp, Homo sapiens
agggctggaccacctgagtgcctgactcggcctctgccctgcacaggacggtgtggagctgcgggcaggcaagacgatggc

SEQ ID NO: 34882 - DNA, 85 bp, Homo sapiens
tggaccacctgagtgcctgactcggcctctgccctgcacaggacggtgtggagctgcgggcaggcaagacgatggccatcgcagc

SEQ ID NO: 34883 - DNA, 84 bp, Homo sapiens
cctgactcggcctctgccctgcacaggacggtgtggagctgcgggcaggcaagacgatggccatcgcagcccagggcgcctgca

SEQ ID NO: 34884 - DNA, 84 bp, Homo sapiens
cctctgccctgcacaggacggtgtggagctgcgggcaggcaagacgatggccatcgcagcccagggcgcctgcaggagcctcac

SEQ ID NO: 34885 - DNA, 83 bp, Homo sapiens
cctgcacaggacggtgtggagctgcgggcaggcaagacgatggccatcgcagcccagggcgcctgcaggagcctcaccattta

SEQ ID NO: 34886 - DNA, 81 bp, Homo sapiens
gtgtggagctgcgggcaggcaagacgatggccatcgcagcccagggcgcctgcaggagcctcaccatttaccggtgcgagt

SEQ ID NO: 34887 - DNA, 78 bp, Homo sapiens
aagacgatggccatcgcagcccagggcgcctgcaggagcctcaccatttaccggtgcgagttcgcggatcagggagtg

SEQ ID NO: 34888 - DNA, 80 bp, Homo sapiens
atggccatcgcagcccagggcgcctgcaggagcctcaccatttaccggtgcgagttcgcggatcagggagtgtatgtgtg

SEQ ID NO: 34889 - DNA, 81 bp, Homo sapiens
agcccagggcgcctgcaggagcctcaccatttaccggtgcgagttcgcggatcagggagtgtatgtgtgtgatgcccatga

SEQ ID NO: 34890 - DNA, 86 bp, Homo sapiens
tgcaggagcctcaccatttaccggtgcgagttcgcggatcagggagtgtatgtgtgtgatgcccatgatgcccagagctctgcctc

SEQ ID NO: 34891 - DNA, 83 bp, Homo sapiens
ctcaccatttaccggtgcgagttcgcggatcagggagtgtatgtgtgtgatgcccatgatgcccagagctctgcctccgtgaa

SEQ ID NO: 34892 - DNA, 81 bp, Homo sapiens
atttaccggtgcgagttcgcggatcagggagtgtatgtgtgtgatgcccatgatgcccagagctctgcctccgtgaaggta

SEQ ID NO: 34893 - DNA, 83 bp, Homo sapiens
agttcgcggatcagggagtgtatgtgtgtgatgcccatgatgcccagagctctgcctccgtgaaggtacaaggtgagggctgc

SEQ ID NO: 34894 - DNA, 84 bp, Homo sapiens
atcagggagtgtatgtgtgtgatgcccatgatgcccagagctctgcctccgtgaaggtacaaggtgagggctgcgtggggcatg

SEQ ID NO: 34895 - DNA, 86 bp, Homo sapiens
tatgtgtgtgatgcccatgatgcccagagctctgcctccgtgaaggtacaaggtgagggctgcgtggggcatgtggggcatggcag

SEQ ID NO: 34896 - DNA, 84 bp, Homo sapiens
tgatgcccatgatgcccagagctctgcctccgtgaaggtacaaggtgagggctgcgtggggcatgtggggcatggcaggtatgg

SEQ ID NO: 34897 - DNA, 73 bp, Homo sapiens
aaggacggtgccaccttctcctgtgaggtctcccacgacgaagtgcctggccagtggttctgggagggcagta

SEQ ID NO: 34898 - DNA, 73 bp, Homo sapiens
accttctcctgtgaggtctcccacgacgaagtgcctggccagtggttctgggagggcagtaaactgcggccca

SEQ ID NO: 34899 - DNA, 75 bp, Homo sapiens
tcctgtgaggtctcccacgacgaagtgcctggccagtggttctgggagggcagtaaactgcggcccactgacaac

SEQ ID NO: 34900 - DNA, 76 bp, Homo sapiens
gtctcccacgacgaagtgcctggccagtggttctgggagggcagtaaactgcggcccactgacaacgtgcgcatcc

SEQ ID NO: 34901 - DNA, 74 bp, Homo sapiens
aagtgcctggccagtggttctgggagggcagtaaactgcggcccactgacaacgtgcgcatccgccaggaaggt

SEQ ID NO: 34902 - DNA, 74 bp, Homo sapiens
agtggttctgggagggcagtaaactgcggcccactgacaacgtgcgcatccgccaggaaggttcgaggacaggc

SEQ ID NO: 34903 - DNA, 76 bp, Homo sapiens
ttctgggagggcagtaaactgcggcccactgacaacgtgcgcatccgccaggaaggttcgaggacaggcggctgta

SEQ ID NO: 34904 - DNA, 76 bp, Homo sapiens
agtaaactgcggcccactgacaacgtgcgcatccgccaggaaggttcgaggacaggcggctgtagcaggcacggcc

SEQ ID NO: 34905 - DNA, 74 bp, Homo sapiens
cggcccactgacaacgtgcgcatccgccaggaaggttcgaggacaggcggctgtagcaggcacggcccggcccc

SEQ ID NO: 34906 - DNA, 73 bp, Homo sapiens
acaacgtgcgcatccgccaggaaggttcgaggacaggcggctgtagcaggcacggcccggcccccaggtcttc

SEQ ID NO: 34907 - DNA, 71 bp, Homo sapiens
atccgccaggaaggttcgaggacaggcggctgtagcaggcacggcccggcccccaggtcttcctctgcccc

SEQ ID NO: 34908 - DNA, 72 bp, Homo sapiens
aggttcgaggacaggcggctgtagcaggcacggcccggcccccaggtcttcctctgcccccgcccatactga

SEQ ID NO: 34909 - DNA, 72 bp, Homo sapiens
aggcggctgtagcaggcacggcccggcccccaggtcttcctctgcccccgcccatactgagccgcctttgtc

SEQ ID NO: 34910 - DNA, 71 bp, Homo sapiens
tagcaggcacggcccggcccccaggtcttcctctgcccccgcccatactgagccgcctttgtccccaggaa

SEQ ID NO: 34911 - DNA, 70 bp, Homo sapiens
ggcccggcccccaggtcttcctctgcccccgcccatactgagccgcctttgtccccaggaaggacataca

SEQ ID NO: 34912 - DNA, 73 bp, Homo sapiens
cccccaggtcttcctctgcccccgcccatactgagccgcctttgtccccaggaaggacatacactctcatcta

SEQ ID NO: 34913 - DNA, 73 bp, Homo sapiens
aggtcttcctctgcccccgcccatactgagccgcctttgtccccaggaaggacatacactctcatctaccgga

SEQ ID NO: 34914 - DNA, 75 bp, Homo sapiens
tctgcccccgcccatactgagccgcctttgtccccaggaaggacatacactctcatctaccggagagtcctggcg

SEQ ID NO: 34915 - DNA, 77 bp, Homo sapiens
cccatactgagccgcctttgtccccaggaaggacatacactctcatctaccggagagtcctggcggaagatgcagga

SEQ ID NO: 34916 - DNA, 76 bp, Homo sapiens
ccgcctttgtccccaggaaggacatacactctcatctaccggagagtcctggcggaagatgcaggagagatccaat

SEQ ID NO: 34917 - DNA, 78 bp, Homo sapiens
tttgtccccaggaaggacatacactctcatctaccggagagtcctggcggaagatgcaggagagatccaatttgtagc

SEQ ID NO: 34918 - DNA, 79 bp, Homo sapiens
aaggacatacactctcatctaccggagagtcctggcggaagatgcaggagagatccaatttgtagccgaaaatgcagaa

SEQ ID NO: 34919 - DNA, 80 bp, Homo sapiens
actctcatctaccggagagtcctggcggaagatgcaggagagatccaatttgtagccgaaaatgcagaatcgcgagccca

SEQ ID NO: 34920 - DNA, 80 bp, Homo sapiens
cggagagtcctggcggaagatgcaggagagatccaatttgtagccgaaaatgcagaatcgcgagcccagctccgagtgaa

SEQ ID NO: 34921 - DNA, 80 bp, Homo sapiens
gtcctggcggaagatgcaggagagatccaatttgtagccgaaaatgcagaatcgcgagcccagctccgagtgaagggtga

SEQ ID NO: 34922 - DNA, 77 bp, Homo sapiens
aagatgcaggagagatccaatttgtagccgaaaatgcagaatcgcgagcccagctccgagtgaagggtgaggtgggg

SEQ ID NO: 34923 - DNA, 75 bp, Homo sapiens
agagatccaatttgtagccgaaaatgcagaatcgcgagcccagctccgagtgaagggtgaggtgggggctgaggg

SEQ ID NO: 34924 - DNA, 73 bp, Homo sapiens
tttgtagccgaaaatgcagaatcgcgagcccagctccgagtgaagggtgaggtgggggctgaggggagggcgg

SEQ ID NO: 34925 - DNA, 72 bp, Homo sapiens
aaaatgcagaatcgcgagcccagctccgagtgaagggtgaggtgggggctgaggggagggcggggctggacg

SEQ ID NO: 34926 - DNA, 82 bp, Homo sapiens
tggagcaccatctctgatccaccccatgcccccaccacgttcacagagctgccagtgaccctcgtgcgcccgctgcgggaca

SEQ ID NO: 34927 - DNA, 80 bp, Homo sapiens
atctctgatccaccccatgcccccaccacgttcacagagctgccagtgaccctcgtgcgcccgctgcgggacaagattgc

SEQ ID NO: 34928 - DNA, 78 bp, Homo sapiens
accccatgcccccaccacgttcacagagctgccagtgaccctcgtgcgcccgctgcgggacaagattgccatggagaa

SEQ ID NO: 34929 - DNA, 79 bp, Homo sapiens
cccaccacgttcacagagctgccagtgaccctcgtgcgcccgctgcgggacaagattgccatggagaagcaccgcggtg

SEQ ID NO: 34930 - DNA, 84 bp, Homo sapiens
ttcacagagctgccagtgaccctcgtgcgcccgctgcgggacaagattgccatggagaagcaccgcggtgtgctggagtgtcag

SEQ ID NO: 34931 - DNA, 82 bp, Homo sapiens
agctgccagtgaccctcgtgcgcccgctgcgggacaagattgccatggagaagcaccgcggtgtgctggagtgtcaggtgtc

SEQ ID NO: 34932 - DNA, 79 bp, Homo sapiens
tgaccctcgtgcgcccgctgcgggacaagattgccatggagaagcaccgcggtgtgctggagtgtcaggtgtcccgggc

SEQ ID NO: 34933 - DNA, 77 bp, Homo sapiens
cccgctgcgggacaagattgccatggagaagcaccgcggtgtgctggagtgtcaggtgtcccgggccagcgcccagg

SEQ ID NO: 34934 - DNA, 77 bp, Homo sapiens
cgggacaagattgccatggagaagcaccgcggtgtgctggagtgtcaggtgtcccgggccagcgcccaggtgcggtg

SEQ ID NO: 34935 - DNA, 77 bp, Homo sapiens
atggagaagcaccgcggtgtgctggagtgtcaggtgtcccgggccagcgcccaggtgcggtggttcaagggcagtca

SEQ ID NO: 34936 - DNA, 76 bp, Homo sapiens
aagcaccgcggtgtgctggagtgtcaggtgtcccgggccagcgcccaggtgcggtggttcaagggcagtcaggagc

SEQ ID NO: 34937 - DNA, 77 bp, Homo sapiens
ggtgtgctggagtgtcaggtgtcccgggccagcgcccaggtgcggtggttcaagggcagtcaggagctgcagcccgg

SEQ ID NO: 34938 - DNA, 75 bp, Homo sapiens
tcaggtgtcccgggccagcgcccaggtgcggtggttcaagggcagtcaggagctgcagcccgggcccaagtacga

SEQ ID NO: 34939 - DNA, 78 bp, Homo sapiens
gggccagcgcccaggtgcggtggttcaagggcagtcaggagctgcagcccgggcccaagtacgagctggtcagtgatg

SEQ ID NO: 34940 - DNA, 77 bp, Homo sapiens
ccaggtgcggtggttcaagggcagtcaggagctgcagcccgggcccaagtacgagctggtcagtgatggcctctacc

SEQ ID NO: 34941 - DNA, 83 bp, Homo sapiens
tggttcaagggcagtcaggagctgcagcccgggcccaagtacgagctggtcagtgatggcctctaccgcaagctgatcatcag

SEQ ID NO: 34942 - DNA, 84 bp, Homo sapiens
aagggcagtcaggagctgcagcccgggcccaagtacgagctggtcagtgatggcctctaccgcaagctgatcatcagtgatgtc

SEQ ID NO: 34943 - DNA, 85 bp, Homo sapiens
agctgcagcccgggcccaagtacgagctggtcagtgatggcctctaccgcaagctgatcatcagtgatgtccacgcagaggacga

SEQ ID NO: 34944 - DNA, 83 bp, Homo sapiens
gggcccaagtacgagctggtcagtgatggcctctaccgcaagctgatcatcagtgatgtccacgcagaggacgaggacaccta

SEQ ID NO: 34945 - DNA, 83 bp, Homo sapiens
aagtacgagctggtcagtgatggcctctaccgcaagctgatcatcagtgatgtccacgcagaggacgaggacacctacacctg

SEQ ID NO: 34946 - DNA, 87 bp, Homo sapiens
tcagtgatggcctctaccgcaagctgatcatcagtgatgtccacgcagaggacgaggacacctacacctgtgacgccggtgatgtca

SEQ ID NO: 34947 - DNA, 84 bp, Homo sapiens
atggcctctaccgcaagctgatcatcagtgatgtccacgcagaggacgaggacacctacacctgtgacgccggtgatgtcaaga

SEQ ID NO: 34948 - DNA, 84 bp, Homo sapiens
agctgatcatcagtgatgtccacgcagaggacgaggacacctacacctgtgacgccggtgatgtcaagaccagtgcacagttct

SEQ ID NO: 34949 - DNA, 81 bp, Homo sapiens
atcagtgatgtccacgcagaggacgaggacacctacacctgtgacgccggtgatgtcaagaccagtgcacagttcttcgtg

SEQ ID NO: 34950 - DNA, 78 bp, Homo sapiens
atgtccacgcagaggacgaggacacctacacctgtgacgccggtgatgtcaagaccagtgcacagttcttcgtggaag

SEQ ID NO: 34951 - DNA, 78 bp, Homo sapiens
agaggacgaggacacctacacctgtgacgccggtgatgtcaagaccagtgcacagttcttcgtggaaggtgcaggcag

SEQ ID NO: 34952 - DNA, 79 bp, Homo sapiens
acacctacacctgtgacgccggtgatgtcaagaccagtgcacagttcttcgtggaaggtgcaggcagggagggcagctc

SEQ ID NO: 34953 - DNA, 81 bp, Homo sapiens
tgtgacgccggtgatgtcaagaccagtgcacagttcttcgtggaaggtgcaggcagggagggcagctctgcaggttgcttt

SEQ ID NO: 34954 - DNA, 82 bp, Homo sapiens
agcatgtcctatccgcgggatccgccagcgactgctcctccccaacagagcaatccatcaccattgtgcggggtctgcagga

SEQ ID NO: 34955 - DNA, 81 bp, Homo sapiens
ctatccgcgggatccgccagcgactgctcctccccaacagagcaatccatcaccattgtgcggggtctgcaggacgtgaca

SEQ ID NO: 34956 - DNA, 82 bp, Homo sapiens
atccgccagcgactgctcctccccaacagagcaatccatcaccattgtgcggggtctgcaggacgtgacagtgatggagccc

SEQ ID NO: 34957 - DNA, 82 bp, Homo sapiens
tgctcctccccaacagagcaatccatcaccattgtgcggggtctgcaggacgtgacagtgatggagcccgctcctgcctggt

SEQ ID NO: 34958 - DNA, 82 bp, Homo sapiens
agcaatccatcaccattgtgcggggtctgcaggacgtgacagtgatggagcccgctcctgcctggtttgagtgtgagacctc

SEQ ID NO: 34959 - DNA, 78 bp, Homo sapiens
accattgtgcggggtctgcaggacgtgacagtgatggagcccgctcctgcctggtttgagtgtgagacctccatcccc

SEQ ID NO: 34960 - DNA, 81 bp, Homo sapiens
gtctgcaggacgtgacagtgatggagcccgctcctgcctggtttgagtgtgagacctccatcccctcagtgcggccaccta

SEQ ID NO: 34961 - DNA, 77 bp, Homo sapiens
aggacgtgacagtgatggagcccgctcctgcctggtttgagtgtgagacctccatcccctcagtgcggccacctaag

SEQ ID NO: 34962 - DNA, 77 bp, Homo sapiens
agtgatggagcccgctcctgcctggtttgagtgtgagacctccatcccctcagtgcggccacctaagtggctcctgg

SEQ ID NO: 34963 - DNA, 74 bp, Homo sapiens
ctcctgcctggtttgagtgtgagacctccatcccctcagtgcggccacctaagtggctcctggggaagacggtg

SEQ ID NO: 34964 - DNA, 76 bp, Homo sapiens
tggtttgagtgtgagacctccatcccctcagtgcggccacctaagtggctcctggggaagacggtgttgcaggctg

SEQ ID NO: 34965 - DNA, 73 bp, Homo sapiens
agtgtgagacctccatcccctcagtgcggccacctaagtggctcctggggaagacggtgttgcaggctggggg

SEQ ID NO: 34966 - DNA, 74 bp, Homo sapiens
tcagtgcggccacctaagtggctcctggggaagacggtgttgcaggctggggggaacgtgggcctggagcagga

SEQ ID NO: 34967 - DNA, 70 bp, Homo sapiens
acctaagtggctcctggggaagacggtgttgcaggctggggggaacgtgggcctggagcaggagggcacg

SEQ ID NO: 34968 - DNA, 75 bp, Homo sapiens
tcctggggaagacggtgttgcaggctggggggaacgtgggcctggagcaggagggcacggtgcaccggctgatgc

SEQ ID NO: 34969 - DNA, 76 bp, Homo sapiens
aagacggtgttgcaggctggggggaacgtgggcctggagcaggagggcacggtgcaccggctgatgctgcggcgga

SEQ ID NO: 34970 - DNA, 78 bp, Homo sapiens
aggctggggggaacgtgggcctggagcaggagggcacggtgcaccggctgatgctgcggcggacctgctccaccatga

SEQ ID NO: 34971 - DNA, 76 bp, Homo sapiens
aacgtgggcctggagcaggagggcacggtgcaccggctgatgctgcggcggacctgctccaccatgaccgggcccg

SEQ ID NO: 34972 - DNA, 79 bp, Homo sapiens
tggagcaggagggcacggtgcaccggctgatgctgcggcggacctgctccaccatgaccgggcccgtgcacttcaccgt

SEQ ID NO: 34973 - DNA, 77 bp, Homo sapiens
agggcacggtgcaccggctgatgctgcggcggacctgctccaccatgaccgggcccgtgcacttcaccgttggcaag

SEQ ID NO: 34974 - DNA, 79 bp, Homo sapiens
accggctgatgctgcggcggacctgctccaccatgaccgggcccgtgcacttcaccgttggcaagtcgcgctcctctgc

SEQ ID NO: 34975 - DNA, 79 bp, Homo sapiens
ctgatgctgcggcggacctgctccaccatgaccgggcccgtgcacttcaccgttggcaagtcgcgctcctctgcccgcc

SEQ ID NO: 34976 - DNA, 76 bp, Homo sapiens
acctgctccaccatgaccgggcccgtgcacttcaccgttggcaagtcgcgctcctctgcccgcctggtggtctcag

SEQ ID NO: 34977 - DNA, 78 bp, Homo sapiens
ctccaccatgaccgggcccgtgcacttcaccgttggcaagtcgcgctcctctgcccgcctggtggtctcaggtgagca

SEQ ID NO: 34978 - DNA, 75 bp, Homo sapiens
accgggcccgtgcacttcaccgttggcaagtcgcgctcctctgcccgcctggtggtctcaggtgagcactcccgc

SEQ ID NO: 34979 - DNA, 73 bp, Homo sapiens
acttcaccgttggcaagtcgcgctcctctgcccgcctggtggtctcaggtgagcactcccgccccggtgggtg

SEQ ID NO: 34980 - DNA, 73 bp, Homo sapiens
cgttggcaagtcgcgctcctctgcccgcctggtggtctcaggtgagcactcccgccccggtgggtggacgtgg

SEQ ID NO: 34981 - DNA, 73 bp, Homo sapiens
ttggttcctgtggtgccgtggcccagcctctccccactccctgcagacatccccgtagtcctcacacggccgt

SEQ ID NO: 34982 - DNA, 75 bp, Homo sapiens
tggtgccgtggcccagcctctccccactccctgcagacatccccgtagtcctcacacggccgttggagcccaaga

SEQ ID NO: 34983 - DNA, 75 bp, Homo sapiens
gcccagcctctccccactccctgcagacatccccgtagtcctcacacggccgttggagcccaagacagggcgtga

SEQ ID NO: 34984 - DNA, 78 bp, Homo sapiens
tccccactccctgcagacatccccgtagtcctcacacggccgttggagcccaagacagggcgtgagctgcagtcagtg

SEQ ID NO: 34985 - DNA, 79 bp, Homo sapiens
tccctgcagacatccccgtagtcctcacacggccgttggagcccaagacagggcgtgagctgcagtcagtggtcctgtc

SEQ ID NO: 34986 - DNA, 76 bp, Homo sapiens
atccccgtagtcctcacacggccgttggagcccaagacagggcgtgagctgcagtcagtggtcctgtcctgcgact

SEQ ID NO: 34987 - DNA, 79 bp, Homo sapiens
tagtcctcacacggccgttggagcccaagacagggcgtgagctgcagtcagtggtcctgtcctgcgacttccggccagc

SEQ ID NO: 34988 - DNA, 75 bp, Homo sapiens
acggccgttggagcccaagacagggcgtgagctgcagtcagtggtcctgtcctgcgacttccggccagcccccaa

SEQ ID NO: 34989 - DNA, 79 bp, Homo sapiens
ccaagacagggcgtgagctgcagtcagtggtcctgtcctgcgacttccggccagcccccaaggctgtgcagtggtacaa

SEQ ID NO: 34990 - DNA, 80 bp, Homo sapiens
agggcgtgagctgcagtcagtggtcctgtcctgcgacttccggccagcccccaaggctgtgcagtggtacaaggatgaca

SEQ ID NO: 34991 - DNA, 76 bp, Homo sapiens
agtcagtggtcctgtcctgcgacttccggccagcccccaaggctgtgcagtggtacaaggatgacacgcccctgtc

SEQ ID NO: 34992 - DNA, 76 bp, Homo sapiens
tggtcctgtcctgcgacttccggccagcccccaaggctgtgcagtggtacaaggatgacacgcccctgtctccctc

SEQ ID NO: 34993 - DNA, 74 bp, Homo sapiens
gacttccggccagcccccaaggctgtgcagtggtacaaggatgacacgcccctgtctccctctgagaagtttaa

SEQ ID NO: 34994 - DNA, 77 bp, Homo sapiens
ccagcccccaaggctgtgcagtggtacaaggatgacacgcccctgtctccctctgagaagtttaagatgagcctgga

SEQ ID NO: 34995 - DNA, 78 bp, Homo sapiens
aaggctgtgcagtggtacaaggatgacacgcccctgtctccctctgagaagtttaagatgagcctggagggtcagatg

SEQ ID NO: 34996 - DNA, 81 bp, Homo sapiens
agtggtacaaggatgacacgcccctgtctccctctgagaagtttaagatgagcctggagggtcagatggctgagctgcgca

SEQ ID NO: 34997 - DNA, 80 bp, Homo sapiens
aaggatgacacgcccctgtctccctctgagaagtttaagatgagcctggagggtcagatggctgagctgcgcatcctccg

SEQ ID NO: 34998 - DNA, 87 bp, Homo sapiens
cctgtctccctctgagaagtttaagatgagcctggagggtcagatggctgagctgcgcatcctccggctcatgcctgctgatgctgg

SEQ ID NO: 34999 - DNA, 88 bp, Homo sapiens
tccctctgagaagtttaagatgagcctggagggtcagatggctgagctgcgcatcctccggctcatgcctgctgatgctggtgtctac

SEQ ID NO: 35000 - DNA, 86 bp, Homo sapiens
aagtttaagatgagcctggagggtcagatggctgagctgcgcatcctccggctcatgcctgctgatgctggtgtctaccggtgcca

SEQ ID NO: 35001 - DNA, 89 bp, Homo sapiens
atgagcctggagggtcagatggctgagctgcgcatcctccggctcatgcctgctgatgctggtgtctaccggtgccaggcgggcagtgc

SEQ ID NO: 35002 - DNA, 90 bp, Homo sapiens
agggtcagatggctgagctgcgcatcctccggctcatgcctgctgatgctggtgtctaccggtgccaggcgggcagtgcccacagcagca

SEQ ID NO: 35003 - DNA, 91 bp, Homo sapiens
tgagctgcgcatcctccggctcatgcctgctgatgctggtgtctaccggtgccaggcgggcagtgcccacagcagcactgaggtcactgtg

SEQ ID NO: 35004 - DNA, 85 bp, Homo sapiens
atcctccggctcatgcctgctgatgctggtgtctaccggtgccaggcgggcagtgcccacagcagcactgaggtcactgtggaag

SEQ ID NO: 35005 - DNA, 87 bp, Homo sapiens
ctcatgcctgctgatgctggtgtctaccggtgccaggcgggcagtgcccacagcagcactgaggtcactgtggaaggtggggcatga

SEQ ID NO: 35006 - DNA, 84 bp, Homo sapiens
tgatgctggtgtctaccggtgccaggcgggcagtgcccacagcagcactgaggtcactgtggaaggtggggcatgaggggcatg

SEQ ID NO: 35007 - DNA, 79 bp, Homo sapiens
caggcgggcagtgcccacagcagcactgaggtcactgtggaaggtggggcatgaggggcatggggctactgagagggtt

SEQ ID NO: 35008 - DNA, 80 bp, Homo sapiens
ggttgcctggtgatgtggacactgaggcccggtgtgtctcttgcagcgcgggaggtgacagtgacagggccgctacagga

SEQ ID NO: 35009 - DNA, 82 bp, Homo sapiens
cctggtgatgtggacactgaggcccggtgtgtctcttgcagcgcgggaggtgacagtgacagggccgctacaggatgcagag

SEQ ID NO: 35010 - DNA, 80 bp, Homo sapiens
acactgaggcccggtgtgtctcttgcagcgcgggaggtgacagtgacagggccgctacaggatgcagaggccacggagga

SEQ ID NO: 35011 - DNA, 78 bp, Homo sapiens
cccggtgtgtctcttgcagcgcgggaggtgacagtgacagggccgctacaggatgcagaggccacggaggagggctgg

SEQ ID NO: 35012 - DNA, 81 bp, Homo sapiens
ggaggtgacagtgacagggccgctacaggatgcagaggccacggaggagggctgggccagcttctcctgtgagctgtccca

SEQ ID NO: 35013 - DNA, 81 bp, Homo sapiens
agtgacagggccgctacaggatgcagaggccacggaggagggctgggccagcttctcctgtgagctgtcccacgaggatga

SEQ ID NO: 35014 - DNA, 80 bp, Homo sapiens
ccgctacaggatgcagaggccacggaggagggctgggccagcttctcctgtgagctgtcccacgaggatgaggaggtcga

SEQ ID NO: 35015 - DNA, 81 bp, Homo sapiens
tgcagaggccacggaggagggctgggccagcttctcctgtgagctgtcccacgaggatgaggaggtcgagtggtcgctcaa

SEQ ID NO: 35016 - DNA, 76 bp, Homo sapiens
acggaggagggctgggccagcttctcctgtgagctgtcccacgaggatgaggaggtcgagtggtcgctcaacggga

SEQ ID NO: 35017 - DNA, 79 bp, Homo sapiens
gctgggccagcttctcctgtgagctgtcccacgaggatgaggaggtcgagtggtcgctcaacgggatgcccctgtacaa

SEQ ID NO: 35018 - DNA, 77 bp, Homo sapiens
cttctcctgtgagctgtcccacgaggatgaggaggtcgagtggtcgctcaacgggatgcccctgtacaacgacagct

SEQ ID NO: 35019 - DNA, 82 bp, Homo sapiens
tgagctgtcccacgaggatgaggaggtcgagtggtcgctcaacgggatgcccctgtacaacgacagcttccatgagatctca

SEQ ID NO: 35020 - DNA, 78 bp, Homo sapiens
acgaggatgaggaggtcgagtggtcgctcaacgggatgcccctgtacaacgacagcttccatgagatctcacacaagg

SEQ ID NO: 35021 - DNA, 78 bp, Homo sapiens
atgaggaggtcgagtggtcgctcaacgggatgcccctgtacaacgacagcttccatgagatctcacacaagggccggc

SEQ ID NO: 35022 - DNA, 79 bp, Homo sapiens
gtggtcgctcaacgggatgcccctgtacaacgacagcttccatgagatctcacacaagggccggcgccacacgctggta

SEQ ID NO: 35023 - DNA, 79 bp, Homo sapiens
ctcaacgggatgcccctgtacaacgacagcttccatgagatctcacacaagggccggcgccacacgctggtactgaaga

SEQ ID NO: 35024 - DNA, 82 bp, Homo sapiens
ccctgtacaacgacagcttccatgagatctcacacaagggccggcgccacacgctggtactgaagagcatccagcgggctga

SEQ ID NO: 35025 - DNA, 84 bp, Homo sapiens
aacgacagcttccatgagatctcacacaagggccggcgccacacgctggtactgaagagcatccagcgggctgatgcgggcata

SEQ ID NO: 35026 - DNA, 84 bp, Homo sapiens
ttccatgagatctcacacaagggccggcgccacacgctggtactgaagagcatccagcgggctgatgcgggcatagtacgcgcc

SEQ ID NO: 35027 - DNA, 81 bp, Homo sapiens
atctcacacaagggccggcgccacacgctggtactgaagagcatccagcgggctgatgcgggcatagtacgcgcctcctcc

SEQ ID NO: 35028 - DNA, 78 bp, Homo sapiens
agggccggcgccacacgctggtactgaagagcatccagcgggctgatgcgggcatagtacgcgcctcctccctgaagg

SEQ ID NO: 35029 - DNA, 80 bp, Homo sapiens
gtactgaagagcatccagcgggctgatgcgggcatagtacgcgcctcctccctgaaggtgtcgacctctgcccgcctgga

SEQ ID NO: 35030 - DNA, 76 bp, Homo sapiens
atccagcgggctgatgcgggcatagtacgcgcctcctccctgaaggtgtcgacctctgcccgcctggaggtccgag

SEQ ID NO: 35031 - DNA, 76 bp, Homo sapiens
atgcgggcatagtacgcgcctcctccctgaaggtgtcgacctctgcccgcctggaggtccgaggtgagtcatccca

SEQ ID NO: 35032 - DNA, 73 bp, Homo sapiens
tcctccctgaaggtgtcgacctctgcccgcctggaggtccgaggtgagtcatcccacgagtcttcgggactcc

SEQ ID NO: 35033 - DNA, 73 bp, Homo sapiens
ctgaaggtgtcgacctctgcccgcctggaggtccgaggtgagtcatcccacgagtcttcgggactccccacta

SEQ ID NO: 35034 - DNA, 74 bp, Homo sapiens
ctaggaatgggacaggcgctggcctccctcaccctcctatccctcctgcagtgaagccggtggtgttcctgaag

SEQ ID NO: 35035 - DNA, 76 bp, Homo sapiens
aggcgctggcctccctcaccctcctatccctcctgcagtgaagccggtggtgttcctgaaggcgctggatgacctg

SEQ ID NO: 35036 - DNA, 78 bp, Homo sapiens
tccctcaccctcctatccctcctgcagtgaagccggtggtgttcctgaaggcgctggatgacctgtccgcagaggagc

SEQ ID NO: 35037 - DNA, 79 bp, Homo sapiens
tcctatccctcctgcagtgaagccggtggtgttcctgaaggcgctggatgacctgtccgcagaggagcgcggcaccctg

SEQ ID NO: 35038 - DNA, 77 bp, Homo sapiens
ccctcctgcagtgaagccggtggtgttcctgaaggcgctggatgacctgtccgcagaggagcgcggcaccctggccc

SEQ ID NO: 35039 - DNA, 80 bp, Homo sapiens
tgaagccggtggtgttcctgaaggcgctggatgacctgtccgcagaggagcgcggcaccctggccctgcagtgtgaagtc

SEQ ID NO: 35040 - DNA, 80 bp, Homo sapiens
gtgttcctgaaggcgctggatgacctgtccgcagaggagcgcggcaccctggccctgcagtgtgaagtctctgaccccga

SEQ ID NO: 35041 - DNA, 79 bp, Homo sapiens
aaggcgctggatgacctgtccgcagaggagcgcggcaccctggccctgcagtgtgaagtctctgaccccgaggcccatg

SEQ ID NO: 35042 - DNA, 81 bp, Homo sapiens
tgacctgtccgcagaggagcgcggcaccctggccctgcagtgtgaagtctctgaccccgaggcccatgtggtgtggcgcaa

SEQ ID NO: 35043 - DNA, 81 bp, Homo sapiens
agaggagcgcggcaccctggccctgcagtgtgaagtctctgaccccgaggcccatgtggtgtggcgcaaagatggcgtgca

SEQ ID NO: 35044 - DNA, 80 bp, Homo sapiens
ggcaccctggccctgcagtgtgaagtctctgaccccgaggcccatgtggtgtggcgcaaagatggcgtgcagctgggccc

SEQ ID NO: 35045 - DNA, 81 bp, Homo sapiens
tgtgaagtctctgaccccgaggcccatgtggtgtggcgcaaagatggcgtgcagctgggccccagtgacaagtatgacttc

SEQ ID NO: 35046 - DNA, 81 bp, Homo sapiens
tctgaccccgaggcccatgtggtgtggcgcaaagatggcgtgcagctgggccccagtgacaagtatgacttcctgcacacg

SEQ ID NO: 35047 - DNA, 81 bp, Homo sapiens
aggcccatgtggtgtggcgcaaagatggcgtgcagctgggccccagtgacaagtatgacttcctgcacacggcgggcacgc

SEQ ID NO: 35048 - DNA, 80 bp, Homo sapiens
tggtgtggcgcaaagatggcgtgcagctgggccccagtgacaagtatgacttcctgcacacggcgggcacgcgggggctc

SEQ ID NO: 35049 - DNA, 80 bp, Homo sapiens
aaagatggcgtgcagctgggccccagtgacaagtatgacttcctgcacacggcgggcacgcgggggctcgtggtgcatga

SEQ ID NO: 35050 - DNA, 79 bp, Homo sapiens
gctgggccccagtgacaagtatgacttcctgcacacggcgggcacgcgggggctcgtggtgcatgacgtgagccctgaa

SEQ ID NO: 35051 - DNA, 78 bp, Homo sapiens
agtgacaagtatgacttcctgcacacggcgggcacgcgggggctcgtggtgcatgacgtgagccctgaagacgccggc

SEQ ID NO: 35052 - DNA, 77 bp, Homo sapiens
aagtatgacttcctgcacacggcgggcacgcgggggctcgtggtgcatgacgtgagccctgaagacgccggcctgta

SEQ ID NO: 35053 - DNA, 78 bp, Homo sapiens
ttcctgcacacggcgggcacgcgggggctcgtggtgcatgacgtgagccctgaagacgccggcctgtacacctgccac

SEQ ID NO: 35054 - DNA, 77 bp, Homo sapiens
ggcacgcgggggctcgtggtgcatgacgtgagccctgaagacgccggcctgtacacctgccacgtgggctccgagga

SEQ ID NO: 35055 - DNA, 75 bp, Homo sapiens
gggctcgtggtgcatgacgtgagccctgaagacgccggcctgtacacctgccacgtgggctccgaggagacccgg

SEQ ID NO: 35056 - DNA, 74 bp, Homo sapiens
gtggtgcatgacgtgagccctgaagacgccggcctgtacacctgccacgtgggctccgaggagacccgggcccg

SEQ ID NO: 35057 - DNA, 69 bp, Homo sapiens
acgtgagccctgaagacgccggcctgtacacctgccacgtgggctccgaggagacccgggcccgggtcc

SEQ ID NO: 35058 - DNA, 71 bp, Homo sapiens
tgaagacgccggcctgtacacctgccacgtgggctccgaggagacccgggcccgggtccgcgtgcacggtg

SEQ ID NO: 35059 - DNA, 74 bp, Homo sapiens
ctgtacacctgccacgtgggctccgaggagacccgggcccgggtccgcgtgcacggtgtgtggctgcaggcacg

SEQ ID NO: 35060 - DNA, 77 bp, Homo sapiens
ctgccacgtgggctccgaggagacccgggcccgggtccgcgtgcacggtgtgtggctgcaggcacggcagagctcag

SEQ ID NO: 35061 - DNA, 74 bp, Homo sapiens
gggctccgaggagacccgggcccgggtccgcgtgcacggtgtgtggctgcaggcacggcagagctcagggaagg

SEQ ID NO: 35062 - DNA, 87 bp, Homo sapiens
cagtgctgtcctcttgcctggcctgacagtctctgatggcccgcagatctgcacgtgggcatcaccaagaggctgaagacaatggag

SEQ ID NO: 35063 - DNA, 86 bp, Homo sapiens
ctcttgcctggcctgacagtctctgatggcccgcagatctgcacgtgggcatcaccaagaggctgaagacaatggaggtgctggaa

SEQ ID NO: 35064 - DNA, 83 bp, Homo sapiens
cctggcctgacagtctctgatggcccgcagatctgcacgtgggcatcaccaagaggctgaagacaatggaggtgctggaaggg

SEQ ID NO: 35065 - DNA, 84 bp, Homo sapiens
acagtctctgatggcccgcagatctgcacgtgggcatcaccaagaggctgaagacaatggaggtgctggaaggggaaagctgca

SEQ ID NO: 35066 - DNA, 82 bp, Homo sapiens
atggcccgcagatctgcacgtgggcatcaccaagaggctgaagacaatggaggtgctggaaggggaaagctgcagctttgag

SEQ ID NO: 35067 - DNA, 82 bp, Homo sapiens
atctgcacgtgggcatcaccaagaggctgaagacaatggaggtgctggaaggggaaagctgcagctttgagtgcgtcctgtc

SEQ ID NO: 35068 - DNA, 80 bp, Homo sapiens
atcaccaagaggctgaagacaatggaggtgctggaaggggaaagctgcagctttgagtgcgtcctgtcccacgagagtgc

SEQ ID NO: 35069 - DNA, 80 bp, Homo sapiens
aagaggctgaagacaatggaggtgctggaaggggaaagctgcagctttgagtgcgtcctgtcccacgagagtgccagcga

SEQ ID NO: 35070 - DNA, 78 bp, Homo sapiens
aatggaggtgctggaaggggaaagctgcagctttgagtgcgtcctgtcccacgagagtgccagcgacccggccatgtg

SEQ ID NO: 35071 - DNA, 77 bp, Homo sapiens
ctggaaggggaaagctgcagctttgagtgcgtcctgtcccacgagagtgccagcgacccggccatgtggacagtcgg

SEQ ID NO: 35072 - DNA, 78 bp, Homo sapiens
aaagctgcagctttgagtgcgtcctgtcccacgagagtgccagcgacccggccatgtggacagtcggtgggaagacag

SEQ ID NO: 35073 - DNA, 78 bp, Homo sapiens
agctttgagtgcgtcctgtcccacgagagtgccagcgacccggccatgtggacagtcggtgggaagacagtgggcagc

SEQ ID NO: 35074 - DNA, 78 bp, Homo sapiens
agtgcgtcctgtcccacgagagtgccagcgacccggccatgtggacagtcggtgggaagacagtgggcagctccagcc

SEQ ID NO: 35075 - DNA, 78 bp, Homo sapiens
acgagagtgccagcgacccggccatgtggacagtcggtgggaagacagtgggcagctccagccgcttccaggccacac

SEQ ID NO: 35076 - DNA, 78 bp, Homo sapiens
agtgccagcgacccggccatgtggacagtcggtgggaagacagtgggcagctccagccgcttccaggccacacgtcag

SEQ ID NO: 35077 - DNA, 78 bp, Homo sapiens
gccatgtggacagtcggtgggaagacagtgggcagctccagccgcttccaggccacacgtcagggccgaaaatacatc

SEQ ID NO: 35078 - DNA, 75 bp, Homo sapiens
acagtcggtgggaagacagtgggcagctccagccgcttccaggccacacgtcagggccgaaaatacatcctggtg

SEQ ID NO: 35079 - DNA, 74 bp, Homo sapiens
ggaagacagtgggcagctccagccgcttccaggccacacgtcagggccgaaaatacatcctggtggtccgggag

SEQ ID NO: 35080 - DNA, 77 bp, Homo sapiens
ggcagctccagccgcttccaggccacacgtcagggccgaaaatacatcctggtggtccgggaggctgcaccaagtga

SEQ ID NO: 35081 - DNA, 74 bp, Homo sapiens
agccgcttccaggccacacgtcagggccgaaaatacatcctggtggtccgggaggctgcaccaagtgatgccgg

SEQ ID NO: 35082 - DNA, 72 bp, Homo sapiens
acgtcagggccgaaaatacatcctggtggtccgggaggctgcaccaagtgatgccggggaggtggtcttctc

SEQ ID NO: 35083 - DNA, 74 bp, Homo sapiens
aaaatacatcctggtggtccgggaggctgcaccaagtgatgccggggaggtggtcttctctgtgcggggcctca

SEQ ID NO: 35084 - DNA, 74 bp, Homo sapiens
atcctggtggtccgggaggctgcaccaagtgatgccggggaggtggtcttctctgtgcggggcctcacctccaa

SEQ ID NO: 35085 - DNA, 79 bp, Homo sapiens
gaggctgcaccaagtgatgccggggaggtggtcttctctgtgcggggcctcacctccaaggcctcactcattgtcagag

SEQ ID NO: 35086 - DNA, 75 bp, Homo sapiens
accaagtgatgccggggaggtggtcttctctgtgcggggcctcacctccaaggcctcactcattgtcagaggtag

SEQ ID NO: 35087 - DNA, 75 bp, Homo sapiens
atgccggggaggtggtcttctctgtgcggggcctcacctccaaggcctcactcattgtcagaggtaggcagggcc

SEQ ID NO: 35088 - DNA, 75 bp, Homo sapiens
aggtggtcttctctgtgcggggcctcacctccaaggcctcactcattgtcagaggtaggcagggcctgccggacg

SEQ ID NO: 35089 - DNA, 80 bp, Homo sapiens
gtggccctggctgtgcttcaagggcagctgtccctgctcccttcagagaggccggccgccatcatcaagcccctggaaga

SEQ ID NO: 35090 - DNA, 80 bp, Homo sapiens
tggctgtgcttcaagggcagctgtccctgctcccttcagagaggccggccgccatcatcaagcccctggaagaccagtgg

SEQ ID NO: 35091 - DNA, 77 bp, Homo sapiens
cttcaagggcagctgtccctgctcccttcagagaggccggccgccatcatcaagcccctggaagaccagtgggtggc

SEQ ID NO: 35092 - DNA, 76 bp, Homo sapiens
tgtccctgctcccttcagagaggccggccgccatcatcaagcccctggaagaccagtgggtggcgccaggggagga

SEQ ID NO: 35093 - DNA, 74 bp, Homo sapiens
ctcccttcagagaggccggccgccatcatcaagcccctggaagaccagtgggtggcgccaggggaggacgtgga

SEQ ID NO: 35094 - DNA, 80 bp, Homo sapiens
ggccggccgccatcatcaagcccctggaagaccagtgggtggcgccaggggaggacgtggagctgcgctgtgagctgtca

SEQ ID NO: 35095 - DNA, 78 bp, Homo sapiens
atcatcaagcccctggaagaccagtgggtggcgccaggggaggacgtggagctgcgctgtgagctgtcacgggcggga

SEQ ID NO: 35096 - DNA, 74 bp, Homo sapiens
ccctggaagaccagtgggtggcgccaggggaggacgtggagctgcgctgtgagctgtcacgggcgggaacgccc

SEQ ID NO: 35097 - DNA, 76 bp, Homo sapiens
aagaccagtgggtggcgccaggggaggacgtggagctgcgctgtgagctgtcacgggcgggaacgcccgtgcactg

SEQ ID NO: 35098 - DNA, 79 bp, Homo sapiens
tggcgccaggggaggacgtggagctgcgctgtgagctgtcacgggcgggaacgcccgtgcactggctgaaggacaggaa

SEQ ID NO: 35099 - DNA, 79 bp, Homo sapiens
aggacgtggagctgcgctgtgagctgtcacgggcgggaacgcccgtgcactggctgaaggacaggaaggccatccgcaa

SEQ ID NO: 35100 - DNA, 81 bp, Homo sapiens
gctgcgctgtgagctgtcacgggcgggaacgcccgtgcactggctgaaggacaggaaggccatccgcaagagccagaagta

SEQ ID NO: 35101 - DNA, 81 bp, Homo sapiens
tgtgagctgtcacgggcgggaacgcccgtgcactggctgaaggacaggaaggccatccgcaagagccagaagtatgatgtg

SEQ ID NO: 35102 - DNA, 78 bp, Homo sapiens
acgggcgggaacgcccgtgcactggctgaaggacaggaaggccatccgcaagagccagaagtatgatgtggtctgcga

SEQ ID NO: 35103 - DNA, 81 bp, Homo sapiens
ggaacgcccgtgcactggctgaaggacaggaaggccatccgcaagagccagaagtatgatgtggtctgcgagggcacgatg

SEQ ID NO: 35104 - DNA, 84 bp, Homo sapiens
actggctgaaggacaggaaggccatccgcaagagccagaagtatgatgtggtctgcgagggcacgatggccatgctggtcatcc

SEQ ID NO: 35105 - DNA, 81 bp, Homo sapiens
aaggacaggaaggccatccgcaagagccagaagtatgatgtggtctgcgagggcacgatggccatgctggtcatccgcggg

SEQ ID NO: 35106 - DNA, 81 bp, Homo sapiens
aagagccagaagtatgatgtggtctgcgagggcacgatggccatgctggtcatccgcggggcctcgctcaaggacgcgggc

SEQ ID NO: 35107 - DNA, 83 bp, Homo sapiens
tatgatgtggtctgcgagggcacgatggccatgctggtcatccgcggggcctcgctcaaggacgcgggcgagtacacgtgtga

SEQ ID NO: 35108 - DNA, 80 bp, Homo sapiens
tggtctgcgagggcacgatggccatgctggtcatccgcggggcctcgctcaaggacgcgggcgagtacacgtgtgaggtg

SEQ ID NO: 35109 - DNA, 77 bp, Homo sapiens
agggcacgatggccatgctggtcatccgcggggcctcgctcaaggacgcgggcgagtacacgtgtgaggtggaggct

SEQ ID NO: 35110 - DNA, 79 bp, Homo sapiens
atgctggtcatccgcggggcctcgctcaaggacgcgggcgagtacacgtgtgaggtggaggcttccaagagcacagcca

SEQ ID NO: 35111 - DNA, 78 bp, Homo sapiens
gtcatccgcggggcctcgctcaaggacgcgggcgagtacacgtgtgaggtggaggcttccaagagcacagccagcctc

SEQ ID NO: 35112 - DNA, 78 bp, Homo sapiens
tcgctcaaggacgcgggcgagtacacgtgtgaggtggaggcttccaagagcacagccagcctccatgtggaaggtaaa

SEQ ID NO: 35113 - DNA, 76 bp, Homo sapiens
aaggacgcgggcgagtacacgtgtgaggtggaggcttccaagagcacagccagcctccatgtggaaggtaaatgcc

SEQ ID NO: 35114 - DNA, 78 bp, Homo sapiens
cgagtacacgtgtgaggtggaggcttccaagagcacagccagcctccatgtggaaggtaaatgccgcaggagccccac

SEQ ID NO: 35115 - DNA, 79 bp, Homo sapiens
tgaggtggaggcttccaagagcacagccagcctccatgtggaaggtaaatgccgcaggagccccacgcgtggccctgga

SEQ ID NO: 35116 - DNA, 81 bp, Homo sapiens
tctgtgcaggcctcacgccccacctattctgcctccatctccctgccccagaaaaagcaaactgcttcacagaggagctga

SEQ ID NO: 35117 - DNA, 80 bp, Homo sapiens
ctcacgccccacctattctgcctccatctccctgccccagaaaaagcaaactgcttcacagaggagctgaccaatctgca

SEQ ID NO: 35118 - DNA, 80 bp, Homo sapiens
tattctgcctccatctccctgccccagaaaaagcaaactgcttcacagaggagctgaccaatctgcaggtggaggagaaa

SEQ ID NO: 35119 - DNA, 81 bp, Homo sapiens
catctccctgccccagaaaaagcaaactgcttcacagaggagctgaccaatctgcaggtggaggagaaaggcacagctgtg

SEQ ID NO: 35120 - DNA, 81 bp, Homo sapiens
ccccagaaaaagcaaactgcttcacagaggagctgaccaatctgcaggtggaggagaaaggcacagctgtgttcacgtgca

SEQ ID NO: 35121 - DNA, 80 bp, Homo sapiens
aaaaagcaaactgcttcacagaggagctgaccaatctgcaggtggaggagaaaggcacagctgtgttcacgtgcaagacg

SEQ ID NO: 35122 - DNA, 82 bp, Homo sapiens
actgcttcacagaggagctgaccaatctgcaggtggaggagaaaggcacagctgtgttcacgtgcaagacggagcaccccgc

SEQ ID NO: 35123 - DNA, 81 bp, Homo sapiens
aggagctgaccaatctgcaggtggaggagaaaggcacagctgtgttcacgtgcaagacggagcaccccgcggccacagtga

SEQ ID NO: 35124 - DNA, 80 bp, Homo sapiens
aatctgcaggtggaggagaaaggcacagctgtgttcacgtgcaagacggagcaccccgcggccacagtgacctggcgcaa

SEQ ID NO: 35125 - DNA, 78 bp, Homo sapiens
gaggagaaaggcacagctgtgttcacgtgcaagacggagcaccccgcggccacagtgacctggcgcaagggcctcttg

SEQ ID NO: 35126 - DNA, 78 bp, Homo sapiens
aaaggcacagctgtgttcacgtgcaagacggagcaccccgcggccacagtgacctggcgcaagggcctcttggagcta

SEQ ID NO: 35127 - DNA, 77 bp, Homo sapiens
tgtgttcacgtgcaagacggagcaccccgcggccacagtgacctggcgcaagggcctcttggagctacgggcctcag

SEQ ID NO: 35128 - DNA, 74 bp, Homo sapiens
aagacggagcaccccgcggccacagtgacctggcgcaagggcctcttggagctacgggcctcagggaagcacca

SEQ ID NO: 35129 - DNA, 76 bp, Homo sapiens
agcaccccgcggccacagtgacctggcgcaagggcctcttggagctacgggcctcagggaagcaccagcccagcca

SEQ ID NO: 35130 - DNA, 76 bp, Homo sapiens
cacagtgacctggcgcaagggcctcttggagctacgggcctcagggaagcaccagcccagccaggagggcctgacc

SEQ ID NO: 35131 - DNA, 76 bp, Homo sapiens
tgacctggcgcaagggcctcttggagctacgggcctcagggaagcaccagcccagccaggagggcctgaccctgcg

SEQ ID NO: 35132 - DNA, 76 bp, Homo sapiens
aagggcctcttggagctacgggcctcagggaagcaccagcccagccaggagggcctgaccctgcggctcaccatca

SEQ ID NO: 35133 - DNA, 79 bp, Homo sapiens
ttggagctacgggcctcagggaagcaccagcccagccaggagggcctgaccctgcggctcaccatcagtgccctggaga

SEQ ID NO: 35134 - DNA, 81 bp, Homo sapiens
tcagggaagcaccagcccagccaggagggcctgaccctgcggctcaccatcagtgccctggagaaggcagacagcgacacc

SEQ ID NO: 35135 - DNA, 80 bp, Homo sapiens
aagcaccagcccagccaggagggcctgaccctgcggctcaccatcagtgccctggagaaggcagacagcgacacctatac

SEQ ID NO: 35136 - DNA, 81 bp, Homo sapiens
ccaggagggcctgaccctgcggctcaccatcagtgccctggagaaggcagacagcgacacctatacctgcgacattggcca

SEQ ID NO: 35137 - DNA, 80 bp, Homo sapiens
agggcctgaccctgcggctcaccatcagtgccctggagaaggcagacagcgacacctatacctgcgacattggccaggcc

SEQ ID NO: 35138 - DNA, 78 bp, Homo sapiens
atcagtgccctggagaaggcagacagcgacacctatacctgcgacattggccaggcccagtcccgggcccagctccta

SEQ ID NO: 35139 - DNA, 78 bp, Homo sapiens
gagaaggcagacagcgacacctatacctgcgacattggccaggcccagtcccgggcccagctcctagtgcaaggtgag

SEQ ID NO: 35140 - DNA, 76 bp, Homo sapiens
acagcgacacctatacctgcgacattggccaggcccagtcccgggcccagctcctagtgcaaggtgaggcggccaa

SEQ ID NO: 35141 - DNA, 76 bp, Homo sapiens
acacctatacctgcgacattggccaggcccagtcccgggcccagctcctagtgcaaggtgaggcggccaagtgtgc

SEQ ID NO: 35142 - DNA, 75 bp, Homo sapiens
gacattggccaggcccagtcccgggcccagctcctagtgcaaggtgaggcggccaagtgtgctcgggcctaggct

SEQ ID NO: 35143 - DNA, 75 bp, Homo sapiens
aggcccagtcccgggcccagctcctagtgcaaggtgaggcggccaagtgtgctcgggcctaggctttgaatggca

SEQ ID NO: 35144 - DNA, 75 bp, Homo sapiens
ccgggcccagctcctagtgcaaggtgaggcggccaagtgtgctcgggcctaggctttgaatggcacggagacttg

SEQ ID NO: 35145 - DNA, 77 bp, Homo sapiens
agctcctagtgcaaggtgaggcggccaagtgtgctcgggcctaggctttgaatggcacggagacttggaggtggaca

SEQ ID NO: 35146 - DNA, 76 bp, Homo sapiens
agtgcaaggtgaggcggccaagtgtgctcgggcctaggctttgaatggcacggagacttggaggtggacaggccca

SEQ ID NO: 35147 - DNA, 74 bp, Homo sapiens
aggcggccaagtgtgctcgggcctaggctttgaatggcacggagacttggaggtggacaggcccagcctcagtt

SEQ ID NO: 35148 - DNA, 77 bp, Homo sapiens
agtgtgctcgggcctaggctttgaatggcacggagacttggaggtggacaggcccagcctcagtttcttatcatgag

SEQ ID NO: 35149 - DNA, 74 bp, Homo sapiens
cctaggctttgaatggcacggagacttggaggtggacaggcccagcctcagtttcttatcatgagggtataggg

SEQ ID NO: 35150 - DNA, 75 bp, Homo sapiens
ttgaatggcacggagacttggaggtggacaggcccagcctcagtttcttatcatgagggtatagggggtgcaccc

SEQ ID NO: 35151 - DNA, 74 bp, Homo sapiens
acttggaggtggacaggcccagcctcagtttcttatcatgagggtatagggggtgcaccctgggtggtcactga

SEQ ID NO: 35152 - DNA, 74 bp, Homo sapiens
aggtggacaggcccagcctcagtttcttatcatgagggtatagggggtgcaccctgggtggtcactgaggctcc

SEQ ID NO: 35153 - DNA, 80 bp, Homo sapiens
agtttcttatcatgagggtatagggggtgcaccctgggtggtcactgaggctccccagcatggctgtgaatgagctgctg

SEQ ID NO: 35154 - DNA, 81 bp, Homo sapiens
atgagggtatagggggtgcaccctgggtggtcactgaggctccccagcatggctgtgaatgagctgctggtgctcacttac

SEQ ID NO: 35155 - DNA, 81 bp, Homo sapiens
gggtgcaccctgggtggtcactgaggctccccagcatggctgtgaatgagctgctggtgctcacttactcgtgtgtttatt

SEQ ID NO: 35156 - DNA, 84 bp, Homo sapiens
tgggtggtcactgaggctccccagcatggctgtgaatgagctgctggtgctcacttactcgtgtgtttatttggtcactgtgtg

SEQ ID NO: 35157 - DNA, 82 bp, Homo sapiens
actgaggctccccagcatggctgtgaatgagctgctggtgctcacttactcgtgtgtttatttggtcactgtgtgtttctcc

SEQ ID NO: 35158 - DNA, 83 bp, Homo sapiens
tccccagcatggctgtgaatgagctgctggtgctcacttactcgtgtgtttatttggtcactgtgtgtttctcccacatgccc

SEQ ID NO: 35159 - DNA, 82 bp, Homo sapiens
atggctgtgaatgagctgctggtgctcacttactcgtgtgtttatttggtcactgtgtgtttctcccacatgccccgtgtgc

SEQ ID NO: 35160 - DNA, 77 bp, Homo sapiens
tgctcacttactcgtgtgtttatttggtcactgtgtgtttctcccacatgccccgtgtgcctggcccccatgcgtaa

SEQ ID NO: 35161 - DNA, 78 bp, Homo sapiens
gtgtgtttatttggtcactgtgtgtttctcccacatgccccgtgtgcctggcccccatgcgtaagctcagcgtgtatc

SEQ ID NO: 35162 - DNA, 77 bp, Homo sapiens
tgtgtttctcccacatgccccgtgtgcctggcccccatgcgtaagctcagcgtgtatccgtacataaaacgtgtcac

SEQ ID NO: 35163 - DNA, 76 bp, Homo sapiens
tcccacatgccccgtgtgcctggcccccatgcgtaagctcagcgtgtatccgtacataaaacgtgtcacccttatc

SEQ ID NO: 35164 - DNA, 77 bp, Homo sapiens
tggcccccatgcgtaagctcagcgtgtatccgtacataaaacgtgtcacccttatcccagagggacagcctgactca

SEQ ID NO: 35165 - DNA, 78 bp, Homo sapiens
atgcgtaagctcagcgtgtatccgtacataaaacgtgtcacccttatcccagagggacagcctgactcagccgtgcca

SEQ ID NO: 35166 - DNA, 79 bp, Homo sapiens
ctcagcgtgtatccgtacataaaacgtgtcacccttatcccagagggacagcctgactcagccgtgccaggcagcctca

SEQ ID NO: 35167 - DNA, 77 bp, Homo sapiens
atccgtacataaaacgtgtcacccttatcccagagggacagcctgactcagccgtgccaggcagcctcaggtgctcc

SEQ ID NO: 35168 - DNA, 76 bp, Homo sapiens
aaaacgtgtcacccttatcccagagggacagcctgactcagccgtgccaggcagcctcaggtgctcccagggaaga

SEQ ID NO: 35169 - DNA, 79 bp, Homo sapiens
cttatcccagagggacagcctgactcagccgtgccaggcagcctcaggtgctcccagggaagaactgatggtcattagg

SEQ ID NO: 35170 - DNA, 80 bp, Homo sapiens
agggacagcctgactcagccgtgccaggcagcctcaggtgctcccagggaagaactgatggtcattagggttgtcattga

SEQ ID NO: 35171 - DNA, 79 bp, Homo sapiens
actcagccgtgccaggcagcctcaggtgctcccagggaagaactgatggtcattagggttgtcattgagagttacagtg

SEQ ID NO: 35172 - DNA, 79 bp, Homo sapiens
gtgccaggcagcctcaggtgctcccagggaagaactgatggtcattagggttgtcattgagagttacagtggcatttta

SEQ ID NO: 35173 - DNA, 74 bp, Homo sapiens
ctcaggtgctcccagggaagaactgatggtcattagggttgtcattgagagttacagtggcattttagtctttt

SEQ ID NO: 35174 - DNA, 72 bp, Homo sapiens
ctcccagggaagaactgatggtcattagggttgtcattgagagttacagtggcattttagtctttttcttgt

SEQ ID NO: 35175 - DNA, 72 bp, Homo sapiens
aagaactgatggtcattagggttgtcattgagagttacagtggcattttagtctttttcttgttgtttacaa

SEQ ID NO: 35176 - DNA, 72 bp, Homo sapiens
atggtcattagggttgtcattgagagttacagtggcattttagtctttttcttgttgtttacaacagaatac

SEQ ID NO: 35177 - DNA, 71 bp, Homo sapiens
gggttgtcattgagagttacagtggcattttagtctttttcttgttgtttacaacagaatacctgaaactg

SEQ ID NO: 35178 - DNA, 74 bp, Homo sapiens
tccaaggtcaaggggccacatctggtgagggcccttttgctgacaggaactctctgcagagtccccaagggacg

SEQ ID NO: 35179 - DNA, 75 bp, Homo sapiens
aaggggccacatctggtgagggcccttttgctgacaggaactctctgcagagtccccaagggacggcacagggca

SEQ ID NO: 35180 - DNA, 76 bp, Homo sapiens
acatctggtgagggcccttttgctgacaggaactctctgcagagtccccaagggacggcacagggcatcccatggg

SEQ ID NO: 35181 - DNA, 72 bp, Homo sapiens
agggcccttttgctgacaggaactctctgcagagtccccaagggacggcacagggcatcccatggggagggg

SEQ ID NO: 35182 - DNA, 79 bp, Homo sapiens
ttgctgacaggaactctctgcagagtccccaagggacggcacagggcatcccatggggagggggctgagtgtgctagct

SEQ ID NO: 35183 - DNA, 79 bp, Homo sapiens
tctctgcagagtccccaagggacggcacagggcatcccatggggagggggctgagtgtgctagcttgggcctctcttca

SEQ ID NO: 35184 - DNA, 75 bp, Homo sapiens
tccccaagggacggcacagggcatcccatggggagggggctgagtgtgctagcttgggcctctcttcatcttctt

SEQ ID NO: 35185 - DNA, 74 bp, Homo sapiens
aagggacggcacagggcatcccatggggagggggctgagtgtgctagcttgggcctctcttcatcttcttttaa

SEQ ID NO: 35186 - DNA, 78 bp, Homo sapiens
gcatcccatggggagggggctgagtgtgctagcttgggcctctcttcatcttcttttaaagccaccactcatatggaa

SEQ ID NO: 35187 - DNA, 76 bp, Homo sapiens
gggagggggctgagtgtgctagcttgggcctctcttcatcttcttttaaagccaccactcatatggaagcacttta

SEQ ID NO: 35188 - DNA, 76 bp, Homo sapiens
tgagtgtgctagcttgggcctctcttcatcttcttttaaagccaccactcatatggaagcactttaacccattaac

SEQ ID NO: 35189 - DNA, 73 bp, Homo sapiens
tagcttgggcctctcttcatcttcttttaaagccaccactcatatggaagcactttaacccattaacctgtta

SEQ ID NO: 35190 - DNA, 71 bp, Homo sapiens
ttcttttaaagccaccactcatatggaagcactttaacccattaacctgttaacccgttgatccatgaatg

SEQ ID NO: 35191 - DNA, 70 bp, Homo sapiens
actcatatggaagcactttaacccattaacctgttaacccgttgatccatgaatgggttaatccattccc

SEQ ID NO: 35192 - DNA, 67 bp, Homo sapiens
aacccattaacctgttaacccgttgatccatgaatgggttaatccattcccgccttggacccaatcc

SEQ ID NO: 35193 - DNA, 67 bp, Homo sapiens
cctgttaacccgttgatccatgaatgggttaatccattcccgccttggacccaatcccctcttaaag

SEQ ID NO: 35194 - DNA, 69 bp, Homo sapiens
atccatgaatgggttaatccattcccgccttggacccaatcccctcttaaaggctccacctcttaatat

SEQ ID NO: 35195 - DNA, 69 bp, Homo sapiens
atgggttaatccattcccgccttggacccaatcccctcttaaaggctccacctcttaatattgccacat

SEQ ID NO: 35196 - DNA, 68 bp, Homo sapiens
attcccgccttggacccaatcccctcttaaaggctccacctcttaatattgccacattgggattaagt

SEQ ID NO: 35197 - DNA, 70 bp, Homo sapiens
cgccttggacccaatcccctcttaaaggctccacctcttaatattgccacattgggattaagtttcaaca

SEQ ID NO: 35198 - DNA, 76 bp, Homo sapiens
gattaagtttcaacatgagtttccagggggacattcagatcatagtaggtggctgttcgatcttactgtttggctc

SEQ ID NO: 35199 - DNA, 79 bp, Homo sapiens
tcaacatgagtttccagggggacattcagatcatagtaggtggctgttcgatcttactgtttggctccacatttgagtg

SEQ ID NO: 35200 - DNA, 78 bp, Homo sapiens
agtttccagggggacattcagatcatagtaggtggctgttcgatcttactgtttggctccacatttgagtggcaggca

SEQ ID NO: 35201 - DNA, 85 bp, Homo sapiens
acattcagatcatagtaggtggctgttcgatcttactgtttggctccacatttgagtggcaggcagagtgagagctgtcattctc

SEQ ID NO: 35202 - DNA, 84 bp, Homo sapiens
agatcatagtaggtggctgttcgatcttactgtttggctccacatttgagtggcaggcagagtgagagctgtcattctctcaac

SEQ ID NO: 35203 - DNA, 85 bp, Homo sapiens
tggctgttcgatcttactgtttggctccacatttgagtggcaggcagagtgagagctgtcattctctcaactctgtagataagaa

SEQ ID NO: 35204 - DNA, 82 bp, Homo sapiens
ttcgatcttactgtttggctccacatttgagtggcaggcagagtgagagctgtcattctctcaactctgtagataagaaaac

SEQ ID NO: 35205 - DNA, 82 bp, Homo sapiens
ctgtttggctccacatttgagtggcaggcagagtgagagctgtcattctctcaactctgtagataagaaaactgaagcttta

SEQ ID NO: 35206 - DNA, 79 bp, Homo sapiens
aggcagagtgagagctgtcattctctcaactctgtagataagaaaactgaagctttagtgggtccatggccagggcaag

SEQ ID NO: 35207 - DNA, 80 bp, Homo sapiens
agtgagagctgtcattctctcaactctgtagataagaaaactgaagctttagtgggtccatggccagggcaaggtcatca

SEQ ID NO: 35208 - DNA, 80 bp, Homo sapiens
tgtcattctctcaactctgtagataagaaaactgaagctttagtgggtccatggccagggcaaggtcatcaggcacattg

SEQ ID NO: 35209 - DNA, 79 bp, Homo sapiens
aactctgtagataagaaaactgaagctttagtgggtccatggccagggcaaggtcatcaggcacattgggatcagagca

SEQ ID NO: 35210 - DNA, 78 bp, Homo sapiens
aagaaaactgaagctttagtgggtccatggccagggcaaggtcatcaggcacattgggatcagagcaggcgaggccca

SEQ ID NO: 35211 - DNA, 81 bp, Homo sapiens
actgaagctttagtgggtccatggccagggcaaggtcatcaggcacattgggatcagagcaggcgaggcccagccccatca

SEQ ID NO: 35212 - DNA, 83 bp, Homo sapiens
tagtgggtccatggccagggcaaggtcatcaggcacattgggatcagagcaggcgaggcccagccccatcaccgcagccttca

SEQ ID NO: 35213 - DNA, 83 bp, Homo sapiens
cagggcaaggtcatcaggcacattgggatcagagcaggcgaggcccagccccatcaccgcagccttcacttggctctgaagtc

SEQ ID NO: 35214 - DNA, 80 bp, Homo sapiens
aaggtcatcaggcacattgggatcagagcaggcgaggcccagccccatcaccgcagccttcacttggctctgaagtcccg

SEQ ID NO: 35215 - DNA, 79 bp, Homo sapiens
acattgggatcagagcaggcgaggcccagccccatcaccgcagccttcacttggctctgaagtcccgggctggtgtcca

SEQ ID NO: 35216 - DNA, 80 bp, Homo sapiens
atcagagcaggcgaggcccagccccatcaccgcagccttcacttggctctgaagtcccgggctggtgtccagagctgagt

SEQ ID NO: 35217 - DNA, 77 bp, Homo sapiens
aggcccagccccatcaccgcagccttcacttggctctgaagtcccgggctggtgtccagagctgagtttgcaggagg

SEQ ID NO: 35218 - DNA, 77 bp, Homo sapiens
ccatcaccgcagccttcacttggctctgaagtcccgggctggtgtccagagctgagtttgcaggaggtccctactgg

SEQ ID NO: 35219 - DNA, 75 bp, Homo sapiens
agccttcacttggctctgaagtcccgggctggtgtccagagctgagtttgcaggaggtccctactggggtctgac

SEQ ID NO: 35220 - DNA, 74 bp, Homo sapiens
acttggctctgaagtcccgggctggtgtccagagctgagtttgcaggaggtccctactggggtctgaccacagg

SEQ ID NO: 35221 - DNA, 75 bp, Homo sapiens
tgaagtcccgggctggtgtccagagctgagtttgcaggaggtccctactggggtctgaccacagggcgttcacag

SEQ ID NO: 35222 - DNA, 76 bp, Homo sapiens
tggtgtccagagctgagtttgcaggaggtccctactggggtctgaccacagggcgttcacagggttcagtatttga

SEQ ID NO: 35223 - DNA, 73 bp, Homo sapiens
agagctgagtttgcaggaggtccctactggggtctgaccacagggcgttcacagggttcagtatttgaaaggc

SEQ ID NO: 35224 - DNA, 70 bp, Homo sapiens
tttgcaggaggtccctactggggtctgaccacagggcgttcacagggttcagtatttgaaaggccccagt

SEQ ID NO: 35225 - DNA, 74 bp, Homo sapiens
ctactggggtctgaccacagggcgttcacagggttcagtatttgaaaggccccagttgtgatcatcagaagtaa

SEQ ID NO: 35226 - DNA, 74 bp, Homo sapiens
tctgaccacagggcgttcacagggttcagtatttgaaaggccccagttgtgatcatcagaagtaacgtaaacca

SEQ ID NO: 35227 - DNA, 72 bp, Homo sapiens
agggcgttcacagggttcagtatttgaaaggccccagttgtgatcatcagaagtaacgtaaaccaggaatca

SEQ ID NO: 35228 - DNA, 72 bp, Homo sapiens
agggttcagtatttgaaaggccccagttgtgatcatcagaagtaacgtaaaccaggaatcatcactgatttt

SEQ ID NO: 35229 - DNA, 74 bp, Homo sapiens
agtatttgaaaggccccagttgtgatcatcagaagtaacgtaaaccaggaatcatcactgattttttctctcca

SEQ ID NO: 35230 - DNA, 70 bp, Homo sapiens
aagtaacgtaaaccaggaatcatcactgattttttctctccaatggatttggtgaccctggtgaaagtat

SEQ ID NO: 35231 - DNA, 74 bp, Homo sapiens
aatcatcactgattttttctctccaatggatttggtgaccctggtgaaagtattctgttagcacagtaacgccc

SEQ ID NO: 35232 - DNA, 74 bp, Homo sapiens
ttttctctccaatggatttggtgaccctggtgaaagtattctgttagcacagtaacgccccatgatctaataaa

SEQ ID NO: 35233 - DNA, 72 bp, Homo sapiens
aatggatttggtgaccctggtgaaagtattctgttagcacagtaacgccccatgatctaataaagttggtac

SEQ ID NO: 35234 - DNA, 72 bp, Homo sapiens
tgaccctggtgaaagtattctgttagcacagtaacgccccatgatctaataaagttggtacccagagttaat

SEQ ID NO: 35235 - DNA, 70 bp, Homo sapiens
ctgttagcacagtaacgccccatgatctaataaagttggtacccagagttaatttttaaaaaagtcatca

SEQ ID NO: 35236 - DNA, 72 bp, Homo sapiens
cccatgatctaataaagttggtacccagagttaatttttaaaaaagtcatcaagagtgagagtcataagata

SEQ ID NO: 35237 - DNA, 71 bp, Homo sapiens
taaagttggtacccagagttaatttttaaaaaagtcatcaagagtgagagtcataagataacaaaagatgc

SEQ ID NO: 35238 - DNA, 79 bp, Homo sapiens
aagcctgcccaggacggtggggcccctgagcagtctgtgcctttgcaggccggagagtgcacatcatcgaggacctgga

SEQ ID NO: 35239 - DNA, 80 bp, Homo sapiens
aggacggtggggcccctgagcagtctgtgcctttgcaggccggagagtgcacatcatcgaggacctggaggatgtggatg

SEQ ID NO: 35240 - DNA, 84 bp, Homo sapiens
cccctgagcagtctgtgcctttgcaggccggagagtgcacatcatcgaggacctggaggatgtggatgtgcaggagggctcctc

SEQ ID NO: 35241 - DNA, 82 bp, Homo sapiens
gtctgtgcctttgcaggccggagagtgcacatcatcgaggacctggaggatgtggatgtgcaggagggctcctcggccacct

SEQ ID NO: 35242 - DNA, 81 bp, Homo sapiens
tttgcaggccggagagtgcacatcatcgaggacctggaggatgtggatgtgcaggagggctcctcggccaccttccgttgc

SEQ ID NO: 35243 - DNA, 80 bp, Homo sapiens
gagagtgcacatcatcgaggacctggaggatgtggatgtgcaggagggctcctcggccaccttccgttgccggatctccc

SEQ ID NO: 35244 - DNA, 76 bp, Homo sapiens
acatcatcgaggacctggaggatgtggatgtgcaggagggctcctcggccaccttccgttgccggatctccccggc

SEQ ID NO: 35245 - DNA, 73 bp, Homo sapiens
acctggaggatgtggatgtgcaggagggctcctcggccaccttccgttgccggatctccccggccaactacga

SEQ ID NO: 35246 - DNA, 76 bp, Homo sapiens
atgtggatgtgcaggagggctcctcggccaccttccgttgccggatctccccggccaactacgagcctgtgcactg

SEQ ID NO: 35247 - DNA, 74 bp, Homo sapiens
atgtgcaggagggctcctcggccaccttccgttgccggatctccccggccaactacgagcctgtgcactggttc

SEQ ID NO: 35248 - DNA, 72 bp, Homo sapiens
cctcggccaccttccgttgccggatctccccggccaactacgagcctgtgcactggttcctggacaagacac

SEQ ID NO: 35249 - DNA, 75 bp, Homo sapiens
cttccgttgccggatctccccggccaactacgagcctgtgcactggttcctggacaagacacccctgcatgccaa

SEQ ID NO: 35250 - DNA, 79 bp, Homo sapiens
cggatctccccggccaactacgagcctgtgcactggttcctggacaagacacccctgcatgccaacgagctcaatgaga

SEQ ID NO: 35251 - DNA, 81 bp, Homo sapiens
cccggccaactacgagcctgtgcactggttcctggacaagacacccctgcatgccaacgagctcaatgagatcgatgccca

SEQ ID NO: 35252 - DNA, 80 bp, Homo sapiens
aactacgagcctgtgcactggttcctggacaagacacccctgcatgccaacgagctcaatgagatcgatgcccagcccgg

SEQ ID NO: 35253 - DNA, 79 bp, Homo sapiens
cactggttcctggacaagacacccctgcatgccaacgagctcaatgagatcgatgcccagcccgggggctaccacgtgc

SEQ ID NO: 35254 - DNA, 79 bp, Homo sapiens
ttcctggacaagacacccctgcatgccaacgagctcaatgagatcgatgcccagcccgggggctaccacgtgctgaccc

SEQ ID NO: 35255 - DNA, 81 bp, Homo sapiens
aagacacccctgcatgccaacgagctcaatgagatcgatgcccagcccgggggctaccacgtgctgaccctgcggcagctg

SEQ ID NO: 35256 - DNA, 82 bp, Homo sapiens
atgccaacgagctcaatgagatcgatgcccagcccgggggctaccacgtgctgaccctgcggcagctggcgctcaaggactc

SEQ ID NO: 35257 - DNA, 82 bp, Homo sapiens
tcaatgagatcgatgcccagcccgggggctaccacgtgctgaccctgcggcagctggcgctcaaggactcgggcaccatcta

SEQ ID NO: 35258 - DNA, 77 bp, Homo sapiens
atcgatgcccagcccgggggctaccacgtgctgaccctgcggcagctggcgctcaaggactcgggcaccatctactt

SEQ ID NO: 35259 - DNA, 75 bp, Homo sapiens
agcccgggggctaccacgtgctgaccctgcggcagctggcgctcaaggactcgggcaccatctactttgaggcgg

SEQ ID NO: 35260 - DNA, 78 bp, Homo sapiens
ctaccacgtgctgaccctgcggcagctggcgctcaaggactcgggcaccatctactttgaggcgggtgaccagcgggc

SEQ ID NO: 35261 - DNA, 78 bp, Homo sapiens
gtgctgaccctgcggcagctggcgctcaaggactcgggcaccatctactttgaggcgggtgaccagcgggcctcggcc

SEQ ID NO: 35262 - DNA, 76 bp, Homo sapiens
cagctggcgctcaaggactcgggcaccatctactttgaggcgggtgaccagcgggcctcggccgccctgcgggtca

SEQ ID NO: 35263 - DNA, 73 bp, Homo sapiens
ctcaaggactcgggcaccatctactttgaggcgggtgaccagcgggcctcggccgccctgcgggtcactggtg

SEQ ID NO: 35264 - DNA, 73 bp, Homo sapiens
actcgggcaccatctactttgaggcgggtgaccagcgggcctcggccgccctgcgggtcactggtgggttgca

SEQ ID NO: 35265 - DNA, 77 bp, Homo sapiens
tactttgaggcgggtgaccagcgggcctcggccgccctgcgggtcactggtgggttgcatgcccgcattgcacatgt

SEQ ID NO: 35266 - DNA, 80 bp, Homo sapiens
aggcgggtgaccagcgggcctcggccgccctgcgggtcactggtgggttgcatgcccgcattgcacatgttgctcagagc

SEQ ID NO: 35267 - DNA, 81 bp, Homo sapiens
agcacgacaggatcccacatgctcctgcttctctctctgtcccccagagaagccaagcgtcttctcccgggagctcacaga

SEQ ID NO: 35268 - DNA, 83 bp, Homo sapiens
atcccacatgctcctgcttctctctctgtcccccagagaagccaagcgtcttctcccgggagctcacagatgccaccatcaca

SEQ ID NO: 35269 - DNA, 82 bp, Homo sapiens
acatgctcctgcttctctctctgtcccccagagaagccaagcgtcttctcccgggagctcacagatgccaccatcacagagg

SEQ ID NO: 35270 - DNA, 80 bp, Homo sapiens
tctctctgtcccccagagaagccaagcgtcttctcccgggagctcacagatgccaccatcacagagggtgaggacttgac

SEQ ID NO: 35271 - DNA, 77 bp, Homo sapiens
ccccagagaagccaagcgtcttctcccgggagctcacagatgccaccatcacagagggtgaggacttgaccctggtg

SEQ ID NO: 35272 - DNA, 79 bp, Homo sapiens
agaagccaagcgtcttctcccgggagctcacagatgccaccatcacagagggtgaggacttgaccctggtgtgcgagac

SEQ ID NO: 35273 - DNA, 82 bp, Homo sapiens
ttctcccgggagctcacagatgccaccatcacagagggtgaggacttgaccctggtgtgcgagaccagcacctgcgacattc

SEQ ID NO: 35274 - DNA, 85 bp, Homo sapiens
agctcacagatgccaccatcacagagggtgaggacttgaccctggtgtgcgagaccagcacctgcgacattcctgtgtgctggac

SEQ ID NO: 35275 - DNA, 82 bp, Homo sapiens
atgccaccatcacagagggtgaggacttgaccctggtgtgcgagaccagcacctgcgacattcctgtgtgctggaccaagga

SEQ ID NO: 35276 - DNA, 80 bp, Homo sapiens
atcacagagggtgaggacttgaccctggtgtgcgagaccagcacctgcgacattcctgtgtgctggaccaaggatgggaa

SEQ ID NO: 35277 - DNA, 77 bp, Homo sapiens
gggtgaggacttgaccctggtgtgcgagaccagcacctgcgacattcctgtgtgctggaccaaggatgggaagaccc

SEQ ID NO: 35278 - DNA, 77 bp, Homo sapiens
ttgaccctggtgtgcgagaccagcacctgcgacattcctgtgtgctggaccaaggatgggaagaccctgcgggggtc

SEQ ID NO: 35279 - DNA, 79 bp, Homo sapiens
tgtgcgagaccagcacctgcgacattcctgtgtgctggaccaaggatgggaagaccctgcgggggtctgcccggtgcca

SEQ ID NO: 35280 - DNA, 80 bp, Homo sapiens
agcacctgcgacattcctgtgtgctggaccaaggatgggaagaccctgcgggggtctgcccggtgccagctgagccatga

SEQ ID NO: 35281 - DNA, 77 bp, Homo sapiens
acattcctgtgtgctggaccaaggatgggaagaccctgcgggggtctgcccggtgccagctgagccatgagggccac

SEQ ID NO: 35282 - DNA, 76 bp, Homo sapiens
tgtgctggaccaaggatgggaagaccctgcgggggtctgcccggtgccagctgagccatgagggccaccgggccca

SEQ ID NO: 35283 - DNA, 77 bp, Homo sapiens
aaggatgggaagaccctgcgggggtctgcccggtgccagctgagccatgagggccaccgggcccagctgctcatcac

SEQ ID NO: 35284 - DNA, 77 bp, Homo sapiens
aagaccctgcgggggtctgcccggtgccagctgagccatgagggccaccgggcccagctgctcatcactggggccac

SEQ ID NO: 35285 - DNA, 83 bp, Homo sapiens
tctgcccggtgccagctgagccatgagggccaccgggcccagctgctcatcactggggccaccctgcaggacagtggacgcta

SEQ ID NO: 35286 - DNA, 84 bp, Homo sapiens
tgccagctgagccatgagggccaccgggcccagctgctcatcactggggccaccctgcaggacagtggacgctacaagtgtgag

SEQ ID NO: 35287 - DNA, 82 bp, Homo sapiens
ctgagccatgagggccaccgggcccagctgctcatcactggggccaccctgcaggacagtggacgctacaagtgtgaggctg

SEQ ID NO: 35288 - DNA, 82 bp, Homo sapiens
caccgggcccagctgctcatcactggggccaccctgcaggacagtggacgctacaagtgtgaggctgggggcgcctgcagca

SEQ ID NO: 35289 - DNA, 85 bp, Homo sapiens
agctgctcatcactggggccaccctgcaggacagtggacgctacaagtgtgaggctgggggcgcctgcagcagctccattgtcag

SEQ ID NO: 35290 - DNA, 83 bp, Homo sapiens
atcactggggccaccctgcaggacagtggacgctacaagtgtgaggctgggggcgcctgcagcagctccattgtcagggtgca

SEQ ID NO: 35291 - DNA, 83 bp, Homo sapiens
ccaccctgcaggacagtggacgctacaagtgtgaggctgggggcgcctgcagcagctccattgtcagggtgcatggtgagccc

SEQ ID NO: 35292 - DNA, 83 bp, Homo sapiens
aggacagtggacgctacaagtgtgaggctgggggcgcctgcagcagctccattgtcagggtgcatggtgagccccagcagccc

SEQ ID NO: 35293 - DNA, 82 bp, Homo sapiens
acgctacaagtgtgaggctgggggcgcctgcagcagctccattgtcagggtgcatggtgagccccagcagccccaaagccca

SEQ ID NO: 35294 - DNA, 83 bp, Homo sapiens
agtgtgaggctgggggcgcctgcagcagctccattgtcagggtgcatggtgagccccagcagccccaaagcccagccacaggc

SEQ ID NO: 35295 - DNA, 80 bp, Homo sapiens
tagtggacttcagtcgggggagggcaagctgagcctgtgcctgtctgcagcgcggccagtgcggttccaggaggccctga

SEQ ID NO: 35296 - DNA, 79 bp, Homo sapiens
tcagtcgggggagggcaagctgagcctgtgcctgtctgcagcgcggccagtgcggttccaggaggccctgaaggacctg

SEQ ID NO: 35297 - DNA, 80 bp, Homo sapiens
agggcaagctgagcctgtgcctgtctgcagcgcggccagtgcggttccaggaggccctgaaggacctggaggtgctggag

SEQ ID NO: 35298 - DNA, 81 bp, Homo sapiens
ctgtgcctgtctgcagcgcggccagtgcggttccaggaggccctgaaggacctggaggtgctggagggtggtgctgccaca

SEQ ID NO: 35299 - DNA, 82 bp, Homo sapiens
tctgcagcgcggccagtgcggttccaggaggccctgaaggacctggaggtgctggagggtggtgctgccacactgcgctgtg

SEQ ID NO: 35300 - DNA, 83 bp, Homo sapiens
gccagtgcggttccaggaggccctgaaggacctggaggtgctggagggtggtgctgccacactgcgctgtgtgctgtcatctg

SEQ ID NO: 35301 - DNA, 83 bp, Homo sapiens
cggttccaggaggccctgaaggacctggaggtgctggagggtggtgctgccacactgcgctgtgtgctgtcatctgtggctgc

SEQ ID NO: 35302 - DNA, 83 bp, Homo sapiens
ccctgaaggacctggaggtgctggagggtggtgctgccacactgcgctgtgtgctgtcatctgtggctgcgcccgtgaagtgg

SEQ ID NO: 35303 - DNA, 85 bp, Homo sapiens
acctggaggtgctggagggtggtgctgccacactgcgctgtgtgctgtcatctgtggctgcgcccgtgaagtggtgctatggaaa

SEQ ID NO: 35304 - DNA, 85 bp, Homo sapiens
ctggagggtggtgctgccacactgcgctgtgtgctgtcatctgtggctgcgcccgtgaagtggtgctatggaaacaacgtcctga

SEQ ID NO: 35305 - DNA, 87 bp, Homo sapiens
tggtgctgccacactgcgctgtgtgctgtcatctgtggctgcgcccgtgaagtggtgctatggaaacaacgtcctgaggccaggtga

SEQ ID NO: 35306 - DNA, 83 bp, Homo sapiens
acactgcgctgtgtgctgtcatctgtggctgcgcccgtgaagtggtgctatggaaacaacgtcctgaggccaggtgacaaata

SEQ ID NO: 35307 - DNA, 82 bp, Homo sapiens
ctgtgtgctgtcatctgtggctgcgcccgtgaagtggtgctatggaaacaacgtcctgaggccaggtgacaaatacagccta

SEQ ID NO: 35308 - DNA, 78 bp, Homo sapiens
atctgtggctgcgcccgtgaagtggtgctatggaaacaacgtcctgaggccaggtgacaaatacagcctacgccagga

SEQ ID NO: 35309 - DNA, 75 bp, Homo sapiens
cgcccgtgaagtggtgctatggaaacaacgtcctgaggccaggtgacaaatacagcctacgccaggagggtgcca

SEQ ID NO: 35310 - DNA, 78 bp, Homo sapiens
aagtggtgctatggaaacaacgtcctgaggccaggtgacaaatacagcctacgccaggagggtgccatgctggagctg

SEQ ID NO: 35311 - DNA, 77 bp, Homo sapiens
ctatggaaacaacgtcctgaggccaggtgacaaatacagcctacgccaggagggtgccatgctggagctggtggtcc

SEQ ID NO: 35312 - DNA, 75 bp, Homo sapiens
aacgtcctgaggccaggtgacaaatacagcctacgccaggagggtgccatgctggagctggtggtccggaacctc

SEQ ID NO: 35313 - DNA, 76 bp, Homo sapiens
aggtgacaaatacagcctacgccaggagggtgccatgctggagctggtggtccggaacctccggccgcaggacagc

SEQ ID NO: 35314 - DNA, 74 bp, Homo sapiens
aaatacagcctacgccaggagggtgccatgctggagctggtggtccggaacctccggccgcaggacagcgggcg

SEQ ID NO: 35315 - DNA, 77 bp, Homo sapiens
ctacgccaggagggtgccatgctggagctggtggtccggaacctccggccgcaggacagcgggcggtactcatgctc

SEQ ID NO: 35316 - DNA, 73 bp, Homo sapiens
gtggtccggaacctccggccgcaggacagcgggcggtactcatgctccttcggggaccagactacttctgcca

SEQ ID NO: 35317 - DNA, 75 bp, Homo sapiens
acctccggccgcaggacagcgggcggtactcatgctccttcggggaccagactacttctgccaccctcacagtga

SEQ ID NO: 35318 - DNA, 76 bp, Homo sapiens
acagcgggcggtactcatgctccttcggggaccagactacttctgccaccctcacagtgactggtaagtgtctctg

SEQ ID NO: 35319 - DNA, 75 bp, Homo sapiens
cggtactcatgctccttcggggaccagactacttctgccaccctcacagtgactggtaagtgtctctgtccaccc

SEQ ID NO: 35320 - DNA, 77 bp, Homo sapiens
atgctccttcggggaccagactacttctgccaccctcacagtgactggtaagtgtctctgtccaccctgcccatgtg

SEQ ID NO: 35321 - DNA, 81 bp, Homo sapiens
atgcaggggagcaaagacgatgctctctgtgtctgactttcctgcagccctgcctgcccagttcatcgggaaactgagaaa

SEQ ID NO: 35322 - DNA, 79 bp, Homo sapiens
agcaaagacgatgctctctgtgtctgactttcctgcagccctgcctgcccagttcatcgggaaactgagaaacaaggag

SEQ ID NO: 35323 - DNA, 79 bp, Homo sapiens
atgctctctgtgtctgactttcctgcagccctgcctgcccagttcatcgggaaactgagaaacaaggaggccacagaag

SEQ ID NO: 35324 - DNA, 77 bp, Homo sapiens
tgtgtctgactttcctgcagccctgcctgcccagttcatcgggaaactgagaaacaaggaggccacagaaggggcca

SEQ ID NO: 35325 - DNA, 74 bp, Homo sapiens
tttcctgcagccctgcctgcccagttcatcgggaaactgagaaacaaggaggccacagaaggggccacggccac

SEQ ID NO: 35326 - DNA, 75 bp, Homo sapiens
cctgcctgcccagttcatcgggaaactgagaaacaaggaggccacagaaggggccacggccacgctgcggtgtga

SEQ ID NO: 35327 - DNA, 76 bp, Homo sapiens
cccagttcatcgggaaactgagaaacaaggaggccacagaaggggccacggccacgctgcggtgtgagctgagcaa

SEQ ID NO: 35328 - DNA, 77 bp, Homo sapiens
aaactgagaaacaaggaggccacagaaggggccacggccacgctgcggtgtgagctgagcaaggcagcccctgtgga

SEQ ID NO: 35329 - DNA, 77 bp, Homo sapiens
aaacaaggaggccacagaaggggccacggccacgctgcggtgtgagctgagcaaggcagcccctgtggagtggagaa

SEQ ID NO: 35330 - DNA, 76 bp, Homo sapiens
acagaaggggccacggccacgctgcggtgtgagctgagcaaggcagcccctgtggagtggagaaaggggtccgaga

SEQ ID NO: 35331 - DNA, 79 bp, Homo sapiens
cgctgcggtgtgagctgagcaaggcagcccctgtggagtggagaaaggggtccgagaccctcagagatggggacagata

SEQ ID NO: 35332 - DNA, 80 bp, Homo sapiens
tgtgagctgagcaaggcagcccctgtggagtggagaaaggggtccgagaccctcagagatggggacagatactgtctgag

SEQ ID NO: 35333 - DNA, 77 bp, Homo sapiens
agcaaggcagcccctgtggagtggagaaaggggtccgagaccctcagagatggggacagatactgtctgaggcagga

SEQ ID NO: 35334 - DNA, 78 bp, Homo sapiens
tgtggagtggagaaaggggtccgagaccctcagagatggggacagatactgtctgaggcaggacggggccatgtgtga

SEQ ID NO: 35335 - DNA, 79 bp, Homo sapiens
agtggagaaaggggtccgagaccctcagagatggggacagatactgtctgaggcaggacggggccatgtgtgagctgca

SEQ ID NO: 35336 - DNA, 84 bp, Homo sapiens
tccgagaccctcagagatggggacagatactgtctgaggcaggacggggccatgtgtgagctgcagatccgtggcctggccatg

SEQ ID NO: 35337 - DNA, 83 bp, Homo sapiens
accctcagagatggggacagatactgtctgaggcaggacggggccatgtgtgagctgcagatccgtggcctggccatggtgga

SEQ ID NO: 35338 - DNA, 84 bp, Homo sapiens
gacagatactgtctgaggcaggacggggccatgtgtgagctgcagatccgtggcctggccatggtggatgccgcggagtactcg

SEQ ID NO: 35339 - DNA, 83 bp, Homo sapiens
atactgtctgaggcaggacggggccatgtgtgagctgcagatccgtggcctggccatggtggatgccgcggagtactcgtgtg

SEQ ID NO: 35340 - DNA, 83 bp, Homo sapiens
aggcaggacggggccatgtgtgagctgcagatccgtggcctggccatggtggatgccgcggagtactcgtgtgtgtgtggaga

SEQ ID NO: 35341 - DNA, 84 bp, Homo sapiens
atgtgtgagctgcagatccgtggcctggccatggtggatgccgcggagtactcgtgtgtgtgtggagaggagaggacctcagcc

SEQ ID NO: 35342 - DNA, 84 bp, Homo sapiens
agctgcagatccgtggcctggccatggtggatgccgcggagtactcgtgtgtgtgtggagaggagaggacctcagcctcactca

SEQ ID NO: 35343 - DNA, 82 bp, Homo sapiens
atccgtggcctggccatggtggatgccgcggagtactcgtgtgtgtgtggagaggagaggacctcagcctcactcaccatca

SEQ ID NO: 35344 - DNA, 79 bp, Homo sapiens
atggtggatgccgcggagtactcgtgtgtgtgtggagaggagaggacctcagcctcactcaccatcaggcgtaagaccg

SEQ ID NO: 35345 - DNA, 80 bp, Homo sapiens
atgccgcggagtactcgtgtgtgtgtggagaggagaggacctcagcctcactcaccatcaggcgtaagaccgtgtatcca

SEQ ID NO: 35346 - DNA, 79 bp, Homo sapiens
agtactcgtgtgtgtgtggagaggagaggacctcagcctcactcaccatcaggcgtaagaccgtgtatccagagccgtg

SEQ ID NO: 35347 - DNA, 78 bp, Homo sapiens
tgtggagaggagaggacctcagcctcactcaccatcaggcgtaagaccgtgtatccagagccgtgtccggtgtccaat

SEQ ID NO: 35348 - DNA, 84 bp, Homo sapiens
cttcccagaatctgatctccatgtctgtctgtccatctctccccagccatgcctgcccacttcataggaagactgagacaccaa

SEQ ID NO: 35349 - DNA, 84 bp, Homo sapiens
tctccatgtctgtctgtccatctctccccagccatgcctgcccacttcataggaagactgagacaccaagagagcatagaaggg

SEQ ID NO: 35350 - DNA, 84 bp, Homo sapiens
tgtctgtccatctctccccagccatgcctgcccacttcataggaagactgagacaccaagagagcatagaaggggccacagcca

SEQ ID NO: 35351 - DNA, 82 bp, Homo sapiens
ccccagccatgcctgcccacttcataggaagactgagacaccaagagagcatagaaggggccacagccacgctgcggtgtga

SEQ ID NO: 35352 - DNA, 84 bp, Homo sapiens
atgcctgcccacttcataggaagactgagacaccaagagagcatagaaggggccacagccacgctgcggtgtgagctgagcaag

SEQ ID NO: 35353 - DNA, 81 bp, Homo sapiens
acttcataggaagactgagacaccaagagagcatagaaggggccacagccacgctgcggtgtgagctgagcaaggcggccc

SEQ ID NO: 35354 - DNA, 79 bp, Homo sapiens
aagactgagacaccaagagagcatagaaggggccacagccacgctgcggtgtgagctgagcaaggcggcccccgtggag

SEQ ID NO: 35355 - DNA, 79 bp, Homo sapiens
agacaccaagagagcatagaaggggccacagccacgctgcggtgtgagctgagcaaggcggcccccgtggagtggagga

SEQ ID NO: 35356 - DNA, 76 bp, Homo sapiens
atagaaggggccacagccacgctgcggtgtgagctgagcaaggcggcccccgtggagtggaggaaggggcgtgaga

SEQ ID NO: 35357 - DNA, 79 bp, Homo sapiens
ccacagccacgctgcggtgtgagctgagcaaggcggcccccgtggagtggaggaaggggcgtgagagcctcagagatgg

SEQ ID NO: 35358 - DNA, 80 bp, Homo sapiens
gctgcggtgtgagctgagcaaggcggcccccgtggagtggaggaaggggcgtgagagcctcagagatggggacagacata

SEQ ID NO: 35359 - DNA, 81 bp, Homo sapiens
tgagctgagcaaggcggcccccgtggagtggaggaaggggcgtgagagcctcagagatggggacagacatagcctgaggca

SEQ ID NO: 35360 - DNA, 77 bp, Homo sapiens
agcaaggcggcccccgtggagtggaggaaggggcgtgagagcctcagagatggggacagacatagcctgaggcagga

SEQ ID NO: 35361 - DNA, 79 bp, Homo sapiens
ccgtggagtggaggaaggggcgtgagagcctcagagatggggacagacatagcctgaggcaggacggggctgtgtgcga

SEQ ID NO: 35362 - DNA, 85 bp, Homo sapiens
tggaggaaggggcgtgagagcctcagagatggggacagacatagcctgaggcaggacggggctgtgtgcgagctgcagatctgtg

SEQ ID NO: 35363 - DNA, 89 bp, Homo sapiens
cgtgagagcctcagagatggggacagacatagcctgaggcaggacggggctgtgtgcgagctgcagatctgtggcctggctgtggcaga

SEQ ID NO: 35364 - DNA, 89 bp, Homo sapiens
agcctcagagatggggacagacatagcctgaggcaggacggggctgtgtgcgagctgcagatctgtggcctggctgtggcagatgctgg

SEQ ID NO: 35365 - DNA, 87 bp, Homo sapiens
acatagcctgaggcaggacggggctgtgtgcgagctgcagatctgtggcctggctgtggcagatgctggggagtactcctgtgtgtg

SEQ ID NO: 35366 - DNA, 84 bp, Homo sapiens
aggcaggacggggctgtgtgcgagctgcagatctgtggcctggctgtggcagatgctggggagtactcctgtgtgtgtggggag

SEQ ID NO: 35367 - DNA, 87 bp, Homo sapiens
tgtgtgcgagctgcagatctgtggcctggctgtggcagatgctggggagtactcctgtgtgtgtggggaggagaggacctctgccac

SEQ ID NO: 35368 - DNA, 85 bp, Homo sapiens
agctgcagatctgtggcctggctgtggcagatgctggggagtactcctgtgtgtgtggggaggagaggacctctgccactctcac

SEQ ID NO: 35369 - DNA, 82 bp, Homo sapiens
tctgtggcctggctgtggcagatgctggggagtactcctgtgtgtgtggggaggagaggacctctgccactctcaccgtgaa

SEQ ID NO: 35370 - DNA, 79 bp, Homo sapiens
tgtggcagatgctggggagtactcctgtgtgtgtggggaggagaggacctctgccactctcaccgtgaagggtaatgac

SEQ ID NO: 35371 - DNA, 78 bp, Homo sapiens
agatgctggggagtactcctgtgtgtgtggggaggagaggacctctgccactctcaccgtgaagggtaatgactgctc

SEQ ID NO: 35372 - DNA, 76 bp, Homo sapiens
agtactcctgtgtgtgtggggaggagaggacctctgccactctcaccgtgaagggtaatgactgctcctggccacg

SEQ ID NO: 35373 - DNA, 80 bp, Homo sapiens
tgtggggaggagaggacctctgccactctcaccgtgaagggtaatgactgctcctggccacgtgcatgggtggctatgtc

SEQ ID NO: 35374 - DNA, 83 bp, Homo sapiens
tgggctcagagggtgtgactgtggccatctctttctgatccctcagccctgccagccaagttcacagagggtctgaggaatga

SEQ ID NO: 35375 - DNA, 80 bp, Homo sapiens
agagggtgtgactgtggccatctctttctgatccctcagccctgccagccaagttcacagagggtctgaggaatgaagag

SEQ ID NO: 35376 - DNA, 79 bp, Homo sapiens
actgtggccatctctttctgatccctcagccctgccagccaagttcacagagggtctgaggaatgaagaggccgtggaa

SEQ ID NO: 35377 - DNA, 77 bp, Homo sapiens
atctctttctgatccctcagccctgccagccaagttcacagagggtctgaggaatgaagaggccgtggaaggggcca

SEQ ID NO: 35378 - DNA, 77 bp, Homo sapiens
atccctcagccctgccagccaagttcacagagggtctgaggaatgaagaggccgtggaaggggccacagccatgttg

SEQ ID NO: 35379 - DNA, 79 bp, Homo sapiens
ctgccagccaagttcacagagggtctgaggaatgaagaggccgtggaaggggccacagccatgttgtggtgtgaactga

SEQ ID NO: 35380 - DNA, 76 bp, Homo sapiens
aagttcacagagggtctgaggaatgaagaggccgtggaaggggccacagccatgttgtggtgtgaactgagcaagg

SEQ ID NO: 35381 - DNA, 75 bp, Homo sapiens
agggtctgaggaatgaagaggccgtggaaggggccacagccatgttgtggtgtgaactgagcaaggtggcccctg

SEQ ID NO: 35382 - DNA, 76 bp, Homo sapiens
aggaatgaagaggccgtggaaggggccacagccatgttgtggtgtgaactgagcaaggtggcccctgtggagtgga

SEQ ID NO: 35383 - DNA, 73 bp, Homo sapiens
aggccgtggaaggggccacagccatgttgtggtgtgaactgagcaaggtggcccctgtggagtggaggaaggg

SEQ ID NO: 35384 - DNA, 76 bp, Homo sapiens
ccacagccatgttgtggtgtgaactgagcaaggtggcccctgtggagtggaggaaggggcccgagaacctcagaga

SEQ ID NO: 35385 - DNA, 74 bp, Homo sapiens
ccatgttgtggtgtgaactgagcaaggtggcccctgtggagtggaggaaggggcccgagaacctcagagatggg

SEQ ID NO: 35386 - DNA, 77 bp, Homo sapiens
tgaactgagcaaggtggcccctgtggagtggaggaaggggcccgagaacctcagagatggggacagatacatcctga

SEQ ID NO: 35387 - DNA, 74 bp, Homo sapiens
aaggtggcccctgtggagtggaggaaggggcccgagaacctcagagatggggacagatacatcctgaggcagga

SEQ ID NO: 35388 - DNA, 75 bp, Homo sapiens
tgtggagtggaggaaggggcccgagaacctcagagatggggacagatacatcctgaggcaggaggggaccaggtg

SEQ ID NO: 35389 - DNA, 78 bp, Homo sapiens
aggaaggggcccgagaacctcagagatggggacagatacatcctgaggcaggaggggaccaggtgtgagctgcagatc

SEQ ID NO: 35390 - DNA, 83 bp, Homo sapiens
ccgagaacctcagagatggggacagatacatcctgaggcaggaggggaccaggtgtgagctgcagatctgtggcctggccatg

SEQ ID NO: 35391 - DNA, 83 bp, Homo sapiens
aacctcagagatggggacagatacatcctgaggcaggaggggaccaggtgtgagctgcagatctgtggcctggccatggcgga

SEQ ID NO: 35392 - DNA, 81 bp, Homo sapiens
gacagatacatcctgaggcaggaggggaccaggtgtgagctgcagatctgtggcctggccatggcggacgccggggagtac

SEQ ID NO: 35393 - DNA, 79 bp, Homo sapiens
atacatcctgaggcaggaggggaccaggtgtgagctgcagatctgtggcctggccatggcggacgccggggagtacttg

SEQ ID NO: 35394 - DNA, 79 bp, Homo sapiens
aggaggggaccaggtgtgagctgcagatctgtggcctggccatggcggacgccggggagtacttgtgtgtgtgcgggca

SEQ ID NO: 35395 - DNA, 80 bp, Homo sapiens
accaggtgtgagctgcagatctgtggcctggccatggcggacgccggggagtacttgtgtgtgtgcgggcaggagaggac

SEQ ID NO: 35396 - DNA, 82 bp, Homo sapiens
tgcagatctgtggcctggccatggcggacgccggggagtacttgtgtgtgtgcgggcaggagaggacctcagccacgctcac

SEQ ID NO: 35397 - DNA, 81 bp, Homo sapiens
tctgtggcctggccatggcggacgccggggagtacttgtgtgtgtgcgggcaggagaggacctcagccacgctcaccatca

SEQ ID NO: 35398 - DNA, 75 bp, Homo sapiens
atggcggacgccggggagtacttgtgtgtgtgcgggcaggagaggacctcagccacgctcaccatcaggggtaaa

SEQ ID NO: 35399 - DNA, 77 bp, Homo sapiens
acgccggggagtacttgtgtgtgtgcgggcaggagaggacctcagccacgctcaccatcaggggtaaagatcatgtg

SEQ ID NO: 35400 - DNA, 80 bp, Homo sapiens
tacttgtgtgtgtgcgggcaggagaggacctcagccacgctcaccatcaggggtaaagatcatgtgtggccttgtggacc

SEQ ID NO: 35401 - DNA, 79 bp, Homo sapiens
tgtgcgggcaggagaggacctcagccacgctcaccatcaggggtaaagatcatgtgtggccttgtggacccgtggcttg

SEQ ID NO: 35402 - DNA, 83 bp, Homo sapiens
agtcttccagacagtctgatgatctcagcgactgcttggtccttcccagctctgcctgccaggttcatagaagatgtgaaaaa

SEQ ID NO: 35403 - DNA, 82 bp, Homo sapiens
agtctgatgatctcagcgactgcttggtccttcccagctctgcctgccaggttcatagaagatgtgaaaaaccaggaggcca

SEQ ID NO: 35404 - DNA, 81 bp, Homo sapiens
atgatctcagcgactgcttggtccttcccagctctgcctgccaggttcatagaagatgtgaaaaaccaggaggccagagaa

SEQ ID NO: 35405 - DNA, 76 bp, Homo sapiens
actgcttggtccttcccagctctgcctgccaggttcatagaagatgtgaaaaaccaggaggccagagaaggggcca

SEQ ID NO: 35406 - DNA, 83 bp, Homo sapiens
ttcccagctctgcctgccaggttcatagaagatgtgaaaaaccaggaggccagagaaggggccacagctgtgctgcagtgtga

SEQ ID NO: 35407 - DNA, 85 bp, Homo sapiens
gcctgccaggttcatagaagatgtgaaaaaccaggaggccagagaaggggccacagctgtgctgcagtgtgagctgaacagtgca

SEQ ID NO: 35408 - DNA, 82 bp, Homo sapiens
aggttcatagaagatgtgaaaaaccaggaggccagagaaggggccacagctgtgctgcagtgtgagctgaacagtgcagccc

SEQ ID NO: 35409 - DNA, 82 bp, Homo sapiens
aagatgtgaaaaaccaggaggccagagaaggggccacagctgtgctgcagtgtgagctgaacagtgcagcccctgtggagtg

SEQ ID NO: 35410 - DNA, 80 bp, Homo sapiens
aaaaaccaggaggccagagaaggggccacagctgtgctgcagtgtgagctgaacagtgcagcccctgtggagtggagaaa

SEQ ID NO: 35411 - DNA, 80 bp, Homo sapiens
agagaaggggccacagctgtgctgcagtgtgagctgaacagtgcagcccctgtggagtggagaaaggggtctgagaccct

SEQ ID NO: 35412 - DNA, 82 bp, Homo sapiens
ggccacagctgtgctgcagtgtgagctgaacagtgcagcccctgtggagtggagaaaggggtctgagacccttagagatggg

SEQ ID NO: 35413 - DNA, 78 bp, Homo sapiens
agtgtgagctgaacagtgcagcccctgtggagtggagaaaggggtctgagacccttagagatggggacagatacagcc

SEQ ID NO: 35414 - DNA, 77 bp, Homo sapiens
aacagtgcagcccctgtggagtggagaaaggggtctgagacccttagagatggggacagatacagcctgaggcagga

SEQ ID NO: 35415 - DNA, 75 bp, Homo sapiens
tgtggagtggagaaaggggtctgagacccttagagatggggacagatacagcctgaggcaggacgggactaaatg

SEQ ID NO: 35416 - DNA, 77 bp, Homo sapiens
agaaaggggtctgagacccttagagatggggacagatacagcctgaggcaggacgggactaaatgtgagctgcagat

SEQ ID NO: 35417 - DNA, 80 bp, Homo sapiens
ggtctgagacccttagagatggggacagatacagcctgaggcaggacgggactaaatgtgagctgcagattcgtggcctg

SEQ ID NO: 35418 - DNA, 81 bp, Homo sapiens
acccttagagatggggacagatacagcctgaggcaggacgggactaaatgtgagctgcagattcgtggcctggccatggca

SEQ ID NO: 35419 - DNA, 83 bp, Homo sapiens
gacagatacagcctgaggcaggacgggactaaatgtgagctgcagattcgtggcctggccatggcagacactggggagtactc

SEQ ID NO: 35420 - DNA, 82 bp, Homo sapiens
atacagcctgaggcaggacgggactaaatgtgagctgcagattcgtggcctggccatggcagacactggggagtactcgtgc

SEQ ID NO: 35421 - DNA, 80 bp, Homo sapiens
aggacgggactaaatgtgagctgcagattcgtggcctggccatggcagacactggggagtactcgtgcgtgtgcgggcag

SEQ ID NO: 35422 - DNA, 81 bp, Homo sapiens
actaaatgtgagctgcagattcgtggcctggccatggcagacactggggagtactcgtgcgtgtgcgggcaggagaggacc

SEQ ID NO: 35423 - DNA, 84 bp, Homo sapiens
agctgcagattcgtggcctggccatggcagacactggggagtactcgtgcgtgtgcgggcaggagaggacctcggctatgctca

SEQ ID NO: 35424 - DNA, 81 bp, Homo sapiens
ttcgtggcctggccatggcagacactggggagtactcgtgcgtgtgcgggcaggagaggacctcggctatgctcaccgtca

SEQ ID NO: 35425 - DNA, 76 bp, Homo sapiens
atggcagacactggggagtactcgtgcgtgtgcgggcaggagaggacctcggctatgctcaccgtcaggggtaaaa

SEQ ID NO: 35426 - DNA, 75 bp, Homo sapiens
actggggagtactcgtgcgtgtgcgggcaggagaggacctcggctatgctcaccgtcaggggtaaaagccacatg

SEQ ID NO: 35427 - DNA, 76 bp, Homo sapiens
agtactcgtgcgtgtgcgggcaggagaggacctcggctatgctcaccgtcaggggtaaaagccacatgtggccaag

SEQ ID NO: 35428 - DNA, 82 bp, Homo sapiens
atgttctcagagagcatgattgtgttcatatattctgaccctcccccagctctacccatcaagttcacagagggtctgagga

SEQ ID NO: 35429 - DNA, 79 bp, Homo sapiens
agagcatgattgtgttcatatattctgaccctcccccagctctacccatcaagttcacagagggtctgaggaacgaaga

SEQ ID NO: 35430 - DNA, 76 bp, Homo sapiens
attgtgttcatatattctgaccctcccccagctctacccatcaagttcacagagggtctgaggaacgaagaggcca

SEQ ID NO: 35431 - DNA, 74 bp, Homo sapiens
tatattctgaccctcccccagctctacccatcaagttcacagagggtctgaggaacgaagaggccacagaaggg

SEQ ID NO: 35432 - DNA, 76 bp, Homo sapiens
ccccagctctacccatcaagttcacagagggtctgaggaacgaagaggccacagaaggggcaacagccgtgctgcg

SEQ ID NO: 35433 - DNA, 80 bp, Homo sapiens
tctacccatcaagttcacagagggtctgaggaacgaagaggccacagaaggggcaacagccgtgctgcggtgtgagctga

SEQ ID NO: 35434 - DNA, 80 bp, Homo sapiens
aagttcacagagggtctgaggaacgaagaggccacagaaggggcaacagccgtgctgcggtgtgagctgagcaagatggc

SEQ ID NO: 35435 - DNA, 77 bp, Homo sapiens
agggtctgaggaacgaagaggccacagaaggggcaacagccgtgctgcggtgtgagctgagcaagatggcccccgtg

SEQ ID NO: 35436 - DNA, 77 bp, Homo sapiens
aacgaagaggccacagaaggggcaacagccgtgctgcggtgtgagctgagcaagatggcccccgtggagtggtggaa

SEQ ID NO: 35437 - DNA, 78 bp, Homo sapiens
acagaaggggcaacagccgtgctgcggtgtgagctgagcaagatggcccccgtggagtggtggaaggggcatgagacc

SEQ ID NO: 35438 - DNA, 82 bp, Homo sapiens
caacagccgtgctgcggtgtgagctgagcaagatggcccccgtggagtggtggaaggggcatgagaccctcagagatggaga

SEQ ID NO: 35439 - DNA, 83 bp, Homo sapiens
cgtgctgcggtgtgagctgagcaagatggcccccgtggagtggtggaaggggcatgagaccctcagagatggagacagacaca

SEQ ID NO: 35440 - DNA, 84 bp, Homo sapiens
gtgtgagctgagcaagatggcccccgtggagtggtggaaggggcatgagaccctcagagatggagacagacacagcctgaggca

SEQ ID NO: 35441 - DNA, 79 bp, Homo sapiens
agcaagatggcccccgtggagtggtggaaggggcatgagaccctcagagatggagacagacacagcctgaggcaggacg

SEQ ID NO: 35442 - DNA, 79 bp, Homo sapiens
ccgtggagtggtggaaggggcatgagaccctcagagatggagacagacacagcctgaggcaggacggggccaggtgtga

SEQ ID NO: 35443 - DNA, 83 bp, Homo sapiens
agtggtggaaggggcatgagaccctcagagatggagacagacacagcctgaggcaggacggggccaggtgtgagctgcagatc

SEQ ID NO: 35444 - DNA, 85 bp, Homo sapiens
atgagaccctcagagatggagacagacacagcctgaggcaggacggggccaggtgtgagctgcagatccgcggcctcgtggcaga

SEQ ID NO: 35445 - DNA, 83 bp, Homo sapiens
accctcagagatggagacagacacagcctgaggcaggacggggccaggtgtgagctgcagatccgcggcctcgtggcagagga

SEQ ID NO: 35446 - DNA, 81 bp, Homo sapiens
agacagacacagcctgaggcaggacggggccaggtgtgagctgcagatccgcggcctcgtggcagaggacgctggggagta

SEQ ID NO: 35447 - DNA, 81 bp, Homo sapiens
agcctgaggcaggacggggccaggtgtgagctgcagatccgcggcctcgtggcagaggacgctggggagtacctgtgcatg

SEQ ID NO: 35448 - DNA, 79 bp, Homo sapiens
aggacggggccaggtgtgagctgcagatccgcggcctcgtggcagaggacgctggggagtacctgtgcatgtgcgggaa

SEQ ID NO: 35449 - DNA, 81 bp, Homo sapiens
aggtgtgagctgcagatccgcggcctcgtggcagaggacgctggggagtacctgtgcatgtgcgggaaggagaggacctca

SEQ ID NO: 35450 - DNA, 86 bp, Homo sapiens
tgagctgcagatccgcggcctcgtggcagaggacgctggggagtacctgtgcatgtgcgggaaggagaggacctcagccatgctca

SEQ ID NO: 35451 - DNA, 81 bp, Homo sapiens
tccgcggcctcgtggcagaggacgctggggagtacctgtgcatgtgcgggaaggagaggacctcagccatgctcaccgtca

SEQ ID NO: 35452 - DNA, 78 bp, Homo sapiens
tggcagaggacgctggggagtacctgtgcatgtgcgggaaggagaggacctcagccatgctcaccgtcaggggtaaag

SEQ ID NO: 35453 - DNA, 79 bp, Homo sapiens
acgctggggagtacctgtgcatgtgcgggaaggagaggacctcagccatgctcaccgtcaggggtaaaggccacatgca

SEQ ID NO: 35454 - DNA, 82 bp, Homo sapiens
agtacctgtgcatgtgcgggaaggagaggacctcagccatgctcaccgtcaggggtaaaggccacatgcagccaagcagcac

SEQ ID NO: 35455 - DNA, 85 bp, Homo sapiens
atgtgcgggaaggagaggacctcagccatgctcaccgtcaggggtaaaggccacatgcagccaagcagcaccatgctctcatgtc

SEQ ID NO: 35456 - DNA, 80 bp, Homo sapiens
tccaggtactcagagaatgtgattatatctgtgtcttttgacctccccagccatgccttccaagttcatagagggtctga

SEQ ID NO: 35457 - DNA, 81 bp, Homo sapiens
tcagagaatgtgattatatctgtgtcttttgacctccccagccatgccttccaagttcatagagggtctgaggaatgaaga

SEQ ID NO: 35458 - DNA, 76 bp, Homo sapiens
ccccagccatgccttccaagttcatagagggtctgaggaatgaagaggccacagaaggggacacggccacgctgtg

SEQ ID NO: 35459 - DNA, 78 bp, Homo sapiens
ccatgccttccaagttcatagagggtctgaggaatgaagaggccacagaaggggacacggccacgctgtggtgtgagc

SEQ ID NO: 35460 - DNA, 78 bp, Homo sapiens
aagttcatagagggtctgaggaatgaagaggccacagaaggggacacggccacgctgtggtgtgagctgagcaaggcg

SEQ ID NO: 35461 - DNA, 79 bp, Homo sapiens
gtctgaggaatgaagaggccacagaaggggacacggccacgctgtggtgtgagctgagcaaggcggcaccggtggagtg

SEQ ID NO: 35462 - DNA, 77 bp, Homo sapiens
aatgaagaggccacagaaggggacacggccacgctgtggtgtgagctgagcaaggcggcaccggtggagtggaggaa

SEQ ID NO: 35463 - DNA, 77 bp, Homo sapiens
acagaaggggacacggccacgctgtggtgtgagctgagcaaggcggcaccggtggagtggaggaaggggcatgagac

SEQ ID NO: 35464 - DNA, 79 bp, Homo sapiens
acacggccacgctgtggtgtgagctgagcaaggcggcaccggtggagtggaggaaggggcatgagaccctcagagatgg

SEQ ID NO: 35465 - DNA, 80 bp, Homo sapiens
acgctgtggtgtgagctgagcaaggcggcaccggtggagtggaggaaggggcatgagaccctcagagatggggacagaca

SEQ ID NO: 35466 - DNA, 82 bp, Homo sapiens
tgagctgagcaaggcggcaccggtggagtggaggaaggggcatgagaccctcagagatggggacagacacagcctgaggcag

SEQ ID NO: 35467 - DNA, 78 bp, Homo sapiens
agcaaggcggcaccggtggagtggaggaaggggcatgagaccctcagagatggggacagacacagcctgaggcaggac

SEQ ID NO: 35468 - DNA, 78 bp, Homo sapiens
ggtggagtggaggaaggggcatgagaccctcagagatggggacagacacagcctgaggcaggacgggtccaggtgtga

SEQ ID NO: 35469 - DNA, 80 bp, Homo sapiens
atggggacagacacagcctgaggcaggacgggtccaggtgtgagctgcagatccgtggcctggctgtggtggatgccggg

SEQ ID NO: 35470 - DNA, 79 bp, Homo sapiens
acacagcctgaggcaggacgggtccaggtgtgagctgcagatccgtggcctggctgtggtggatgccggggagtactcg

SEQ ID NO: 35471 - DNA, 81 bp, Homo sapiens
tgaggcaggacgggtccaggtgtgagctgcagatccgtggcctggctgtggtggatgccggggagtactcgtgtgtgtgcg

SEQ ID NO: 35472 - DNA, 81 bp, Homo sapiens
ggtccaggtgtgagctgcagatccgtggcctggctgtggtggatgccggggagtactcgtgtgtgtgcgggcaggagagga

SEQ ID NO: 35473 - DNA, 81 bp, Homo sapiens
aggtgtgagctgcagatccgtggcctggctgtggtggatgccggggagtactcgtgtgtgtgcgggcaggagaggacctca

SEQ ID NO: 35474 - DNA, 79 bp, Homo sapiens
agatccgtggcctggctgtggtggatgccggggagtactcgtgtgtgtgcgggcaggagaggacctcagccacactcac

SEQ ID NO: 35475 - DNA, 80 bp, Homo sapiens
tggcctggctgtggtggatgccggggagtactcgtgtgtgtgcgggcaggagaggacctcagccacactcactgtcaggg

SEQ ID NO: 35476 - DNA, 78 bp, Homo sapiens
tggatgccggggagtactcgtgtgtgtgcgggcaggagaggacctcagccacactcactgtcaggggtaaagatcgtg

SEQ ID NO: 35477 - DNA, 81 bp, Homo sapiens
gagtactcgtgtgtgtgcgggcaggagaggacctcagccacactcactgtcaggggtaaagatcgtgtgtagctatgtgga

SEQ ID NO: 35478 - DNA, 82 bp, Homo sapiens
tgtgtgtgcgggcaggagaggacctcagccacactcactgtcaggggtaaagatcgtgtgtagctatgtggaccatggcttg

SEQ ID NO: 35479 - DNA, 81 bp, Homo sapiens
tcctccagacggtctgataatcacaatgactgcttggttcttcccagccctgcctgccagattcatagaagatgtgaaaaa

SEQ ID NO: 35480 - DNA, 79 bp, Homo sapiens
agacggtctgataatcacaatgactgcttggttcttcccagccctgcctgccagattcatagaagatgtgaaaaaccag

SEQ ID NO: 35481 - DNA, 80 bp, Homo sapiens
ataatcacaatgactgcttggttcttcccagccctgcctgccagattcatagaagatgtgaaaaaccaggaggccagaga

SEQ ID NO: 35482 - DNA, 76 bp, Homo sapiens
actgcttggttcttcccagccctgcctgccagattcatagaagatgtgaaaaaccaggaggccagagaaggggcca

SEQ ID NO: 35483 - DNA, 78 bp, Homo sapiens
ttcccagccctgcctgccagattcatagaagatgtgaaaaaccaggaggccagagaaggggccacggccgtgctgcaa

SEQ ID NO: 35484 - DNA, 83 bp, Homo sapiens
tgcctgccagattcatagaagatgtgaaaaaccaggaggccagagaaggggccacggccgtgctgcaatgtgagctgagcaag

SEQ ID NO: 35485 - DNA, 80 bp, Homo sapiens
agattcatagaagatgtgaaaaaccaggaggccagagaaggggccacggccgtgctgcaatgtgagctgagcaaggcggc

SEQ ID NO: 35486 - DNA, 76 bp, Homo sapiens
atgtgaaaaaccaggaggccagagaaggggccacggccgtgctgcaatgtgagctgagcaaggcggcccccgtgga

SEQ ID NO: 35487 - DNA, 74 bp, Homo sapiens
aaaaaccaggaggccagagaaggggccacggccgtgctgcaatgtgagctgagcaaggcggcccccgtggagtg

SEQ ID NO: 35488 - DNA, 74 bp, Homo sapiens
aggccagagaaggggccacggccgtgctgcaatgtgagctgagcaaggcggcccccgtggagtggaggaagggg

SEQ ID NO: 35489 - DNA, 76 bp, Homo sapiens
ccacggccgtgctgcaatgtgagctgagcaaggcggcccccgtggagtggaggaaggggtctgagaccctcagagg

SEQ ID NO: 35490 - DNA, 79 bp, Homo sapiens
tgctgcaatgtgagctgagcaaggcggcccccgtggagtggaggaaggggtctgagaccctcagaggtggggacagata

SEQ ID NO: 35491 - DNA, 75 bp, Homo sapiens
aatgtgagctgagcaaggcggcccccgtggagtggaggaaggggtctgagaccctcagaggtggggacagataca

SEQ ID NO: 35492 - DNA, 74 bp, Homo sapiens
agcaaggcggcccccgtggagtggaggaaggggtctgagaccctcagaggtggggacagatacagcctgaggca

SEQ ID NO: 35493 - DNA, 75 bp, Homo sapiens
cccgtggagtggaggaaggggtctgagaccctcagaggtggggacagatacagcctgaggcaggatgggaccaga

SEQ ID NO: 35494 - DNA, 82 bp, Homo sapiens
aggaaggggtctgagaccctcagaggtggggacagatacagcctgaggcaggatgggaccagatgtgagctgcagattcatg

SEQ ID NO: 35495 - DNA, 89 bp, Homo sapiens
tctgagaccctcagaggtggggacagatacagcctgaggcaggatgggaccagatgtgagctgcagattcatggcctgtctgtggcaga

SEQ ID NO: 35496 - DNA, 86 bp, Homo sapiens
accctcagaggtggggacagatacagcctgaggcaggatgggaccagatgtgagctgcagattcatggcctgtctgtggcagacac

SEQ ID NO: 35497 - DNA, 88 bp, Homo sapiens
gacagatacagcctgaggcaggatgggaccagatgtgagctgcagattcatggcctgtctgtggcagacactggggagtactcgtgtg

SEQ ID NO: 35498 - DNA, 88 bp, Homo sapiens
atacagcctgaggcaggatgggaccagatgtgagctgcagattcatggcctgtctgtggcagacactggggagtactcgtgtgtgtgc

SEQ ID NO: 35499 - DNA, 85 bp, Homo sapiens
aggatgggaccagatgtgagctgcagattcatggcctgtctgtggcagacactggggagtactcgtgtgtgtgcgggcaggagag

SEQ ID NO: 35500 - DNA, 84 bp, Homo sapiens
accagatgtgagctgcagattcatggcctgtctgtggcagacactggggagtactcgtgtgtgtgcgggcaggagaggacctcg

SEQ ID NO: 35501 - DNA, 83 bp, Homo sapiens
tgcagattcatggcctgtctgtggcagacactggggagtactcgtgtgtgtgcgggcaggagaggacctcggccacactcacc

SEQ ID NO: 35502 - DNA, 79 bp, Homo sapiens
attcatggcctgtctgtggcagacactggggagtactcgtgtgtgtgcgggcaggagaggacctcggccacactcaccg

SEQ ID NO: 35503 - DNA, 76 bp, Homo sapiens
tgtggcagacactggggagtactcgtgtgtgtgcgggcaggagaggacctcggccacactcaccgtcaggggtaaa

SEQ ID NO: 35504 - DNA, 73 bp, Homo sapiens
actggggagtactcgtgtgtgtgcgggcaggagaggacctcggccacactcaccgtcaggggtaaagaccaca

SEQ ID NO: 35505 - DNA, 77 bp, Homo sapiens
tactcgtgtgtgtgcgggcaggagaggacctcggccacactcaccgtcaggggtaaagaccacatgtggccacctga

SEQ ID NO: 35506 - DNA, 77 bp, Homo sapiens
tgtgtgcgggcaggagaggacctcggccacactcaccgtcaggggtaaagaccacatgtggccacctgagtgattcc

SEQ ID NO: 35507 - DNA, 81 bp, Homo sapiens
agatcctccagagggtttgatggcttctgtccatgtgacccttcctagccctgcctgcacgattcactcaagatctgaaga

SEQ ID NO: 35508 - DNA, 79 bp, Homo sapiens
agagggtttgatggcttctgtccatgtgacccttcctagccctgcctgcacgattcactcaagatctgaagaccaagga

SEQ ID NO: 35509 - DNA, 80 bp, Homo sapiens
atggcttctgtccatgtgacccttcctagccctgcctgcacgattcactcaagatctgaagaccaaggaggcctcagaag

SEQ ID NO: 35510 - DNA, 79 bp, Homo sapiens
atgtgacccttcctagccctgcctgcacgattcactcaagatctgaagaccaaggaggcctcagaaggggccacagcta

SEQ ID NO: 35511 - DNA, 83 bp, Homo sapiens
ttcctagccctgcctgcacgattcactcaagatctgaagaccaaggaggcctcagaaggggccacagctacactgcagtgtga

SEQ ID NO: 35512 - DNA, 85 bp, Homo sapiens
ccctgcctgcacgattcactcaagatctgaagaccaaggaggcctcagaaggggccacagctacactgcagtgtgagctgagcaa

SEQ ID NO: 35513 - DNA, 82 bp, Homo sapiens
acgattcactcaagatctgaagaccaaggaggcctcagaaggggccacagctacactgcagtgtgagctgagcaaggtggcc

SEQ ID NO: 35514 - DNA, 81 bp, Homo sapiens
atctgaagaccaaggaggcctcagaaggggccacagctacactgcagtgtgagctgagcaaggtggcccctgtggaatgga

SEQ ID NO: 35515 - DNA, 79 bp, Homo sapiens
aagaccaaggaggcctcagaaggggccacagctacactgcagtgtgagctgagcaaggtggcccctgtggaatggaaga

SEQ ID NO: 35516 - DNA, 79 bp, Homo sapiens
cctcagaaggggccacagctacactgcagtgtgagctgagcaaggtggcccctgtggaatggaagaagggtcctgagac

SEQ ID NO: 35517 - DNA, 80 bp, Homo sapiens
ccacagctacactgcagtgtgagctgagcaaggtggcccctgtggaatggaagaagggtcctgagaccctcagagatggg

SEQ ID NO: 35518 - DNA, 81 bp, Homo sapiens
tacactgcagtgtgagctgagcaaggtggcccctgtggaatggaagaagggtcctgagaccctcagagatgggggcagata

SEQ ID NO: 35519 - DNA, 80 bp, Homo sapiens
tgtgagctgagcaaggtggcccctgtggaatggaagaagggtcctgagaccctcagagatgggggcagatacagcctgaa

SEQ ID NO: 35520 - DNA, 76 bp, Homo sapiens
aaggtggcccctgtggaatggaagaagggtcctgagaccctcagagatgggggcagatacagcctgaagcaggatg

SEQ ID NO: 35521 - DNA, 79 bp, Homo sapiens
ctgtggaatggaagaagggtcctgagaccctcagagatgggggcagatacagcctgaagcaggatgggacgaggtgtga

SEQ ID NO: 35522 - DNA, 81 bp, Homo sapiens
aatggaagaagggtcctgagaccctcagagatgggggcagatacagcctgaagcaggatgggacgaggtgtgagctgcaga

SEQ ID NO: 35523 - DNA, 86 bp, Homo sapiens
gtcctgagaccctcagagatgggggcagatacagcctgaagcaggatgggacgaggtgtgagctgcagatccatgacctgtctgtg

SEQ ID NO: 35524 - DNA, 86 bp, Homo sapiens
accctcagagatgggggcagatacagcctgaagcaggatgggacgaggtgtgagctgcagatccatgacctgtctgtggcggatgc

SEQ ID NO: 35525 - DNA, 90 bp, Homo sapiens
ggcagatacagcctgaagcaggatgggacgaggtgtgagctgcagatccatgacctgtctgtggcggatgctggggaatactcatgcatg

SEQ ID NO: 35526 - DNA, 89 bp, Homo sapiens
atacagcctgaagcaggatgggacgaggtgtgagctgcagatccatgacctgtctgtggcggatgctggggaatactcatgcatgtgtg

SEQ ID NO: 35527 - DNA, 88 bp, Homo sapiens
aagcaggatgggacgaggtgtgagctgcagatccatgacctgtctgtggcggatgctggggaatactcatgcatgtgtggacaagaga

SEQ ID NO: 35528 - DNA, 86 bp, Homo sapiens
aggtgtgagctgcagatccatgacctgtctgtggcggatgctggggaatactcatgcatgtgtggacaagagaggacctcggccac

SEQ ID NO: 35529 - DNA, 88 bp, Homo sapiens
ctgcagatccatgacctgtctgtggcggatgctggggaatactcatgcatgtgtggacaagagaggacctcggccacgctcactgtca

SEQ ID NO: 35530 - DNA, 84 bp, Homo sapiens
atccatgacctgtctgtggcggatgctggggaatactcatgcatgtgtggacaagagaggacctcggccacgctcactgtcagg

SEQ ID NO: 35531 - DNA, 81 bp, Homo sapiens
tgtctgtggcggatgctggggaatactcatgcatgtgtggacaagagaggacctcggccacgctcactgtcaggggtaaag

SEQ ID NO: 35532 - DNA, 81 bp, Homo sapiens
atgctggggaatactcatgcatgtgtggacaagagaggacctcggccacgctcactgtcaggggtaaagtccatctgtcca

SEQ ID NO: 35533 - DNA, 81 bp, Homo sapiens
aatactcatgcatgtgtggacaagagaggacctcggccacgctcactgtcaggggtaaagtccatctgtccagatctgcgt

SEQ ID NO: 35534 - DNA, 79 bp, Homo sapiens
atgtgtggacaagagaggacctcggccacgctcactgtcaggggtaaagtccatctgtccagatctgcgttctggtgtc

SEQ ID NO: 35535 - DNA, 82 bp, Homo sapiens
tttcatgtgctcaatgtaattgtgtccatgtctttctgatccctccaccagccctgcctgccaggttcacagagggtctgag

SEQ ID NO: 35536 - DNA, 79 bp, Homo sapiens
aatgtaattgtgtccatgtctttctgatccctccaccagccctgcctgccaggttcacagagggtctgaggaatgaaga

SEQ ID NO: 35537 - DNA, 81 bp, Homo sapiens
tgtgtccatgtctttctgatccctccaccagccctgcctgccaggttcacagagggtctgaggaatgaagaggccatggaa

SEQ ID NO: 35538 - DNA, 78 bp, Homo sapiens
tttctgatccctccaccagccctgcctgccaggttcacagagggtctgaggaatgaagaggccatggaaggggccaca

SEQ ID NO: 35539 - DNA, 82 bp, Homo sapiens
caccagccctgcctgccaggttcacagagggtctgaggaatgaagaggccatggaaggggccacagccacactgcaatgtga

SEQ ID NO: 35540 - DNA, 85 bp, Homo sapiens
gcctgccaggttcacagagggtctgaggaatgaagaggccatggaaggggccacagccacactgcaatgtgagctgagcaaggca

SEQ ID NO: 35541 - DNA, 82 bp, Homo sapiens
aggttcacagagggtctgaggaatgaagaggccatggaaggggccacagccacactgcaatgtgagctgagcaaggcagccc

SEQ ID NO: 35542 - DNA, 82 bp, Homo sapiens
agggtctgaggaatgaagaggccatggaaggggccacagccacactgcaatgtgagctgagcaaggcagcccctgtggagtg

SEQ ID NO: 35543 - DNA, 81 bp, Homo sapiens
aggaatgaagaggccatggaaggggccacagccacactgcaatgtgagctgagcaaggcagcccctgtggagtggaggaaa

SEQ ID NO: 35544 - DNA, 82 bp, Homo sapiens
atggaaggggccacagccacactgcaatgtgagctgagcaaggcagcccctgtggagtggaggaaaggccttgaggctctca

SEQ ID NO: 35545 - DNA, 83 bp, Homo sapiens
gggccacagccacactgcaatgtgagctgagcaaggcagcccctgtggagtggaggaaaggccttgaggctctcagagatggg

SEQ ID NO: 35546 - DNA, 82 bp, Homo sapiens
acactgcaatgtgagctgagcaaggcagcccctgtggagtggaggaaaggccttgaggctctcagagatggggacaaataca

SEQ ID NO: 35547 - DNA, 81 bp, Homo sapiens
aatgtgagctgagcaaggcagcccctgtggagtggaggaaaggccttgaggctctcagagatggggacaaatacagcctga

SEQ ID NO: 35548 - DNA, 76 bp, Homo sapiens
aaggcagcccctgtggagtggaggaaaggccttgaggctctcagagatggggacaaatacagcctgagacaagacg

SEQ ID NO: 35549 - DNA, 79 bp, Homo sapiens
ctgtggagtggaggaaaggccttgaggctctcagagatggggacaaatacagcctgagacaagacggggctgtgtgtga

SEQ ID NO: 35550 - DNA, 82 bp, Homo sapiens
aggaaaggccttgaggctctcagagatggggacaaatacagcctgagacaagacggggctgtgtgtgagctgcagattcatg

SEQ ID NO: 35551 - DNA, 88 bp, Homo sapiens
ttgaggctctcagagatggggacaaatacagcctgagacaagacggggctgtgtgtgagctgcagattcatggcctggctatggcaga

SEQ ID NO: 35552 - DNA, 85 bp, Homo sapiens
tcagagatggggacaaatacagcctgagacaagacggggctgtgtgtgagctgcagattcatggcctggctatggcagataacgg

SEQ ID NO: 35553 - DNA, 85 bp, Homo sapiens
atacagcctgagacaagacggggctgtgtgtgagctgcagattcatggcctggctatggcagataacggggtgtactcatgtgtg

SEQ ID NO: 35554 - DNA, 84 bp, Homo sapiens
agacaagacggggctgtgtgtgagctgcagattcatggcctggctatggcagataacggggtgtactcatgtgtgtgtgggcag

SEQ ID NO: 35555 - DNA, 88 bp, Homo sapiens
tgtgtgtgagctgcagattcatggcctggctatggcagataacggggtgtactcatgtgtgtgtgggcaggagaggacctcagctaca

SEQ ID NO: 35556 - DNA, 87 bp, Homo sapiens
tgcagattcatggcctggctatggcagataacggggtgtactcatgtgtgtgtgggcaggagaggacctcagctacactcactgtca

SEQ ID NO: 35557 - DNA, 83 bp, Homo sapiens
attcatggcctggctatggcagataacggggtgtactcatgtgtgtgtgggcaggagaggacctcagctacactcactgtcag

SEQ ID NO: 35558 - DNA, 80 bp, Homo sapiens
tatggcagataacggggtgtactcatgtgtgtgtgggcaggagaggacctcagctacactcactgtcaggggtaaagatc

SEQ ID NO: 35559 - DNA, 77 bp, Homo sapiens
agataacggggtgtactcatgtgtgtgtgggcaggagaggacctcagctacactcactgtcaggggtaaagatccta

SEQ ID NO: 35560 - DNA, 82 bp, Homo sapiens
tactcatgtgtgtgtgggcaggagaggacctcagctacactcactgtcaggggtaaagatcctatgtggccatgtgggcttg

SEQ ID NO: 35561 - DNA, 80 bp, Homo sapiens
tgtgggcaggagaggacctcagctacactcactgtcaggggtaaagatcctatgtggccatgtgggcttgtggcttggtg

SEQ ID NO: 35562 - DNA, 84 bp, Homo sapiens
aaaatcctccagacagtctgatgatatcagtgactgtttggtccttctcagccctgcctgccagattcatagaggatatgagaa

SEQ ID NO: 35563 - DNA, 84 bp, Homo sapiens
agacagtctgatgatatcagtgactgtttggtccttctcagccctgcctgccagattcatagaggatatgagaaaccagaaggc

SEQ ID NO: 35564 - DNA, 82 bp, Homo sapiens
atgatatcagtgactgtttggtccttctcagccctgcctgccagattcatagaggatatgagaaaccagaaggccacagaag

SEQ ID NO: 35565 - DNA, 78 bp, Homo sapiens
actgtttggtccttctcagccctgcctgccagattcatagaggatatgagaaaccagaaggccacagaaggggctaca

SEQ ID NO: 35566 - DNA, 83 bp, Homo sapiens
ttctcagccctgcctgccagattcatagaggatatgagaaaccagaaggccacagaaggggctacagtcacattgcaatgtaa

SEQ ID NO: 35567 - DNA, 83 bp, Homo sapiens
tgcctgccagattcatagaggatatgagaaaccagaaggccacagaaggggctacagtcacattgcaatgtaagctgagaaag

SEQ ID NO: 35568 - DNA, 80 bp, Homo sapiens
agattcatagaggatatgagaaaccagaaggccacagaaggggctacagtcacattgcaatgtaagctgagaaaggcggc

SEQ ID NO: 35569 - DNA, 76 bp, Homo sapiens
atatgagaaaccagaaggccacagaaggggctacagtcacattgcaatgtaagctgagaaaggcggcccccgtgga

SEQ ID NO: 35570 - DNA, 74 bp, Homo sapiens
aaaccagaaggccacagaaggggctacagtcacattgcaatgtaagctgagaaaggcggcccccgtggagtgga

SEQ ID NO: 35571 - DNA, 73 bp, Homo sapiens
aggccacagaaggggctacagtcacattgcaatgtaagctgagaaaggcggcccccgtggagtggagaaaggg

SEQ ID NO: 35572 - DNA, 73 bp, Homo sapiens
ctacagtcacattgcaatgtaagctgagaaaggcggcccccgtggagtggagaaaggggcccaacaccctcaa

SEQ ID NO: 35573 - DNA, 71 bp, Homo sapiens
acattgcaatgtaagctgagaaaggcggcccccgtggagtggagaaaggggcccaacaccctcaaagatgg

SEQ ID NO: 35574 - DNA, 69 bp, Homo sapiens
aatgtaagctgagaaaggcggcccccgtggagtggagaaaggggcccaacaccctcaaagatggggaca

SEQ ID NO: 35575 - DNA, 68 bp, Homo sapiens
aaaggcggcccccgtggagtggagaaaggggcccaacaccctcaaagatggggacaggtacagcctga

SEQ ID NO: 35576 - DNA, 72 bp, Homo sapiens
ccgtggagtggagaaaggggcccaacaccctcaaagatggggacaggtacagcctgaagcaggatgggacca

SEQ ID NO: 35577 - DNA, 73 bp, Homo sapiens
agtggagaaaggggcccaacaccctcaaagatggggacaggtacagcctgaagcaggatgggaccagttgtga

SEQ ID NO: 35578 - DNA, 78 bp, Homo sapiens
ggcccaacaccctcaaagatggggacaggtacagcctgaagcaggatgggaccagttgtgagctgcagattcgtggcc

SEQ ID NO: 35579 - DNA, 86 bp, Homo sapiens
tcaaagatggggacaggtacagcctgaagcaggatgggaccagttgtgagctgcagattcgtggcctggtcatagcagatgctgga

SEQ ID NO: 35580 - DNA, 88 bp, Homo sapiens
gacaggtacagcctgaagcaggatgggaccagttgtgagctgcagattcgtggcctggtcatagcagatgctggagaatactcgtgca

SEQ ID NO: 35581 - DNA, 90 bp, Homo sapiens
gtacagcctgaagcaggatgggaccagttgtgagctgcagattcgtggcctggtcatagcagatgctggagaatactcgtgcatatgtga

SEQ ID NO: 35582 - DNA, 88 bp, Homo sapiens
accagttgtgagctgcagattcgtggcctggtcatagcagatgctggagaatactcgtgcatatgtgagcaggagaggacctcggcca

SEQ ID NO: 35583 - DNA, 90 bp, Homo sapiens
agctgcagattcgtggcctggtcatagcagatgctggagaatactcgtgcatatgtgagcaggagaggacctcggccacgctcactgtca

SEQ ID NO: 35584 - DNA, 85 bp, Homo sapiens
attcgtggcctggtcatagcagatgctggagaatactcgtgcatatgtgagcaggagaggacctcggccacgctcactgtcaggg

SEQ ID NO: 35585 - DNA, 84 bp, Homo sapiens
atagcagatgctggagaatactcgtgcatatgtgagcaggagaggacctcggccacgctcactgtcaggggtaaagaccacatg

SEQ ID NO: 35586 - DNA, 83 bp, Homo sapiens
agatgctggagaatactcgtgcatatgtgagcaggagaggacctcggccacgctcactgtcaggggtaaagaccacatgtgac

SEQ ID NO: 35587 - DNA, 80 bp, Homo sapiens
aatactcgtgcatatgtgagcaggagaggacctcggccacgctcactgtcaggggtaaagaccacatgtgaccacctgag

SEQ ID NO: 35588 - DNA, 80 bp, Homo sapiens
tatgtgagcaggagaggacctcggccacgctcactgtcaggggtaaagaccacatgtgaccacctgagtgacttctgtct

SEQ ID NO: 35589 - DNA, 84 bp, Homo sapiens
ttgtccagttagtctgatgatctcagtgtctgcttggtcctttccagccctgccggccagattcatagaagatgtgagaaatca

SEQ ID NO: 35590 - DNA, 82 bp, Homo sapiens
agttagtctgatgatctcagtgtctgcttggtcctttccagccctgccggccagattcatagaagatgtgagaaatcacgag

SEQ ID NO: 35591 - DNA, 82 bp, Homo sapiens
atgatctcagtgtctgcttggtcctttccagccctgccggccagattcatagaagatgtgagaaatcacgaggccacagaag

SEQ ID NO: 35592 - DNA, 80 bp, Homo sapiens
tgtctgcttggtcctttccagccctgccggccagattcatagaagatgtgagaaatcacgaggccacagaaggggccaca

SEQ ID NO: 35593 - DNA, 84 bp, Homo sapiens
ctttccagccctgccggccagattcatagaagatgtgagaaatcacgaggccacagaaggggccacagctgtgctgcagtgtga

SEQ ID NO: 35594 - DNA, 86 bp, Homo sapiens
ccctgccggccagattcatagaagatgtgagaaatcacgaggccacagaaggggccacagctgtgctgcagtgtgagctgagcaag

SEQ ID NO: 35595 - DNA, 85 bp, Homo sapiens
ccagattcatagaagatgtgagaaatcacgaggccacagaaggggccacagctgtgctgcagtgtgagctgagcaaggcggcccc

SEQ ID NO: 35596 - DNA, 82 bp, Homo sapiens
aagatgtgagaaatcacgaggccacagaaggggccacagctgtgctgcagtgtgagctgagcaaggcggcccccgtggagtg

SEQ ID NO: 35597 - DNA, 80 bp, Homo sapiens
agaaatcacgaggccacagaaggggccacagctgtgctgcagtgtgagctgagcaaggcggcccccgtggagtggcggaa

SEQ ID NO: 35598 - DNA, 78 bp, Homo sapiens
acagaaggggccacagctgtgctgcagtgtgagctgagcaaggcggcccccgtggagtggcggaaggggtctgagacc

SEQ ID NO: 35599 - DNA, 80 bp, Homo sapiens
ccacagctgtgctgcagtgtgagctgagcaaggcggcccccgtggagtggcggaaggggtctgagaccctcagagatggg

SEQ ID NO: 35600 - DNA, 81 bp, Homo sapiens
tgctgcagtgtgagctgagcaaggcggcccccgtggagtggcggaaggggtctgagaccctcagagatggggacagatata

SEQ ID NO: 35601 - DNA, 79 bp, Homo sapiens
tgtgagctgagcaaggcggcccccgtggagtggcggaaggggtctgagaccctcagagatggggacagatatagcctga

SEQ ID NO: 35602 - DNA, 75 bp, Homo sapiens
agcaaggcggcccccgtggagtggcggaaggggtctgagaccctcagagatggggacagatatagcctgaggcag

SEQ ID NO: 35603 - DNA, 81 bp, Homo sapiens
accctcagagatggggacagatatagcctgaggcaggacgggacgaggtgtgagctgcagattcgtggcctggctgtggag

SEQ ID NO: 35604 - DNA, 82 bp, Homo sapiens
agatggggacagatatagcctgaggcaggacgggacgaggtgtgagctgcagattcgtggcctggctgtggaggacactgga

SEQ ID NO: 35605 - DNA, 81 bp, Homo sapiens
acagatatagcctgaggcaggacgggacgaggtgtgagctgcagattcgtggcctggctgtggaggacactggagagtatt

SEQ ID NO: 35606 - DNA, 82 bp, Homo sapiens
cctgaggcaggacgggacgaggtgtgagctgcagattcgtggcctggctgtggaggacactggagagtatttgtgtgtgtgc

SEQ ID NO: 35607 - DNA, 82 bp, Homo sapiens
gggacgaggtgtgagctgcagattcgtggcctggctgtggaggacactggagagtatttgtgtgtgtgcgggcaggagagaa

SEQ ID NO: 35608 - DNA, 86 bp, Homo sapiens
tgagctgcagattcgtggcctggctgtggaggacactggagagtatttgtgtgtgtgcgggcaggagagaacctcagctacactca

SEQ ID NO: 35609 - DNA, 82 bp, Homo sapiens
attcgtggcctggctgtggaggacactggagagtatttgtgtgtgtgcgggcaggagagaacctcagctacactcactgtca

SEQ ID NO: 35610 - DNA, 80 bp, Homo sapiens
tggctgtggaggacactggagagtatttgtgtgtgtgcgggcaggagagaacctcagctacactcactgtcaggggtaaa

SEQ ID NO: 35611 - DNA, 78 bp, Homo sapiens
aggacactggagagtatttgtgtgtgtgcgggcaggagagaacctcagctacactcactgtcaggggtaaagatcctg

SEQ ID NO: 35612 - DNA, 80 bp, Homo sapiens
agagtatttgtgtgtgtgcgggcaggagagaacctcagctacactcactgtcaggggtaaagatcctgtgtggtcacatg

SEQ ID NO: 35613 - DNA, 80 bp, Homo sapiens
tttgtgtgtgtgcgggcaggagagaacctcagctacactcactgtcaggggtaaagatcctgtgtggtcacatggacttg

SEQ ID NO: 35614 - DNA, 84 bp, Homo sapiens
agttgtccagacagtctgatgatctcagtgactgcttggtccttcccagccctgccagccagattcatagacaacatgacaaac

SEQ ID NO: 35615 - DNA, 84 bp, Homo sapiens
agtctgatgatctcagtgactgcttggtccttcccagccctgccagccagattcatagacaacatgacaaaccaggaggccaga

SEQ ID NO: 35616 - DNA, 82 bp, Homo sapiens
atgatctcagtgactgcttggtccttcccagccctgccagccagattcatagacaacatgacaaaccaggaggccagagaag

SEQ ID NO: 35617 - DNA, 77 bp, Homo sapiens
actgcttggtccttcccagccctgccagccagattcatagacaacatgacaaaccaggaggccagagaaggggccac

SEQ ID NO: 35618 - DNA, 80 bp, Homo sapiens
ttcccagccctgccagccagattcatagacaacatgacaaaccaggaggccagagaaggggccacggccacactgcactg

SEQ ID NO: 35619 - DNA, 83 bp, Homo sapiens
ctgccagccagattcatagacaacatgacaaaccaggaggccagagaaggggccacggccacactgcactgtgaactgagcaa

SEQ ID NO: 35620 - DNA, 80 bp, Homo sapiens
agattcatagacaacatgacaaaccaggaggccagagaaggggccacggccacactgcactgtgaactgagcaaggtggc

SEQ ID NO: 35621 - DNA, 77 bp, Homo sapiens
acaacatgacaaaccaggaggccagagaaggggccacggccacactgcactgtgaactgagcaaggtggcccctgtg

SEQ ID NO: 35622 - DNA, 76 bp, Homo sapiens
acaaaccaggaggccagagaaggggccacggccacactgcactgtgaactgagcaaggtggcccctgtggagtgga

SEQ ID NO: 35623 - DNA, 75 bp, Homo sapiens
aggccagagaaggggccacggccacactgcactgtgaactgagcaaggtggcccctgtggagtggaggaagggac

SEQ ID NO: 35624 - DNA, 74 bp, Homo sapiens
ccacggccacactgcactgtgaactgagcaaggtggcccctgtggagtggaggaagggacctgaaaccctccga

SEQ ID NO: 35625 - DNA, 74 bp, Homo sapiens
ccacactgcactgtgaactgagcaaggtggcccctgtggagtggaggaagggacctgaaaccctccgagatggg

SEQ ID NO: 35626 - DNA, 73 bp, Homo sapiens
actgtgaactgagcaaggtggcccctgtggagtggaggaagggacctgaaaccctccgagatggggacagaca

SEQ ID NO: 35627 - DNA, 72 bp, Homo sapiens
aaggtggcccctgtggagtggaggaagggacctgaaaccctccgagatggggacagacacagcctgaggcag

SEQ ID NO: 35628 - DNA, 75 bp, Homo sapiens
tgtggagtggaggaagggacctgaaaccctccgagatggggacagacacagcctgaggcaggatgggaccaggtg

SEQ ID NO: 35629 - DNA, 75 bp, Homo sapiens
agtggaggaagggacctgaaaccctccgagatggggacagacacagcctgaggcaggatgggaccaggtgtgagc

SEQ ID NO: 35630 - DNA, 82 bp, Homo sapiens
tgatgcctggtatagatctggagctgaccctgccccctgccccctgcagccccacagccagtgttccgggagccgctgcaga

SEQ ID NO: 35631 - DNA, 81 bp, Homo sapiens
ggtatagatctggagctgaccctgccccctgccccctgcagccccacagccagtgttccgggagccgctgcagagtctgca

SEQ ID NO: 35632 - DNA, 80 bp, Homo sapiens
tggagctgaccctgccccctgccccctgcagccccacagccagtgttccgggagccgctgcagagtctgcaggcggagga

SEQ ID NO: 35633 - DNA, 77 bp, Homo sapiens
cccctgccccctgcagccccacagccagtgttccgggagccgctgcagagtctgcaggcggaggagggctccacggc

SEQ ID NO: 35634 - DNA, 82 bp, Homo sapiens
ctgcagccccacagccagtgttccgggagccgctgcagagtctgcaggcggaggagggctccacggccaccctgcagtgtga

SEQ ID NO: 35635 - DNA, 83 bp, Homo sapiens
ccacagccagtgttccgggagccgctgcagagtctgcaggcggaggagggctccacggccaccctgcagtgtgagctgtctga

SEQ ID NO: 35636 - DNA, 84 bp, Homo sapiens
tgttccgggagccgctgcagagtctgcaggcggaggagggctccacggccaccctgcagtgtgagctgtctgagcccactgcta

SEQ ID NO: 35637 - DNA, 85 bp, Homo sapiens
agccgctgcagagtctgcaggcggaggagggctccacggccaccctgcagtgtgagctgtctgagcccactgctacagtggtctg

SEQ ID NO: 35638 - DNA, 83 bp, Homo sapiens
agagtctgcaggcggaggagggctccacggccaccctgcagtgtgagctgtctgagcccactgctacagtggtctggagcaag

SEQ ID NO: 35639 - DNA, 80 bp, Homo sapiens
aggcggaggagggctccacggccaccctgcagtgtgagctgtctgagcccactgctacagtggtctggagcaagggtggc

SEQ ID NO: 35640 - DNA, 86 bp, Homo sapiens
tccacggccaccctgcagtgtgagctgtctgagcccactgctacagtggtctggagcaagggtggcctgcagctgcaggccaatgg

SEQ ID NO: 35641 - DNA, 85 bp, Homo sapiens
ccctgcagtgtgagctgtctgagcccactgctacagtggtctggagcaagggtggcctgcagctgcaggccaatgggcgccggga

SEQ ID NO: 35642 - DNA, 84 bp, Homo sapiens
agtgtgagctgtctgagcccactgctacagtggtctggagcaagggtggcctgcagctgcaggccaatgggcgccgggagccac

SEQ ID NO: 35643 - DNA, 82 bp, Homo sapiens
tctgagcccactgctacagtggtctggagcaagggtggcctgcagctgcaggccaatgggcgccgggagccacggcttcagg

SEQ ID NO: 35644 - DNA, 81 bp, Homo sapiens
actgctacagtggtctggagcaagggtggcctgcagctgcaggccaatgggcgccgggagccacggcttcagggctgcacc

SEQ ID NO: 35645 - DNA, 81 bp, Homo sapiens
tggagcaagggtggcctgcagctgcaggccaatgggcgccgggagccacggcttcagggctgcaccgcggagctggtgtta

SEQ ID NO: 35646 - DNA, 78 bp, Homo sapiens
aagggtggcctgcagctgcaggccaatgggcgccgggagccacggcttcagggctgcaccgcggagctggtgttacag

SEQ ID NO: 35647 - DNA, 78 bp, Homo sapiens
gctgcaggccaatgggcgccgggagccacggcttcagggctgcaccgcggagctggtgttacaggacctacaacgtga

SEQ ID NO: 35648 - DNA, 74 bp, Homo sapiens
aatgggcgccgggagccacggcttcagggctgcaccgcggagctggtgttacaggacctacaacgtgaagacac

SEQ ID NO: 35649 - DNA, 76 bp, Homo sapiens
gggagccacggcttcagggctgcaccgcggagctggtgttacaggacctacaacgtgaagacactggcgaatacac

SEQ ID NO: 35650 - DNA, 76 bp, Homo sapiens
acggcttcagggctgcaccgcggagctggtgttacaggacctacaacgtgaagacactggcgaatacacttgcacc

SEQ ID NO: 35651 - DNA, 77 bp, Homo sapiens
agggctgcaccgcggagctggtgttacaggacctacaacgtgaagacactggcgaatacacttgcacctgtggctcc

SEQ ID NO: 35652 - DNA, 78 bp, Homo sapiens
agctggtgttacaggacctacaacgtgaagacactggcgaatacacttgcacctgtggctcccaggccaccagtgcca

SEQ ID NO: 35653 - DNA, 78 bp, Homo sapiens
tgttacaggacctacaacgtgaagacactggcgaatacacttgcacctgtggctcccaggccaccagtgccaccctca

SEQ ID NO: 35654 - DNA, 78 bp, Homo sapiens
acctacaacgtgaagacactggcgaatacacttgcacctgtggctcccaggccaccagtgccaccctcactgtcacag

SEQ ID NO: 35655 - DNA, 78 bp, Homo sapiens
aagacactggcgaatacacttgcacctgtggctcccaggccaccagtgccaccctcactgtcacaggtgggctcccag

SEQ ID NO: 35656 - DNA, 78 bp, Homo sapiens
aatacacttgcacctgtggctcccaggccaccagtgccaccctcactgtcacaggtgggctcccaggctagcgtggcc

SEQ ID NO: 35657 - DNA, 80 bp, Homo sapiens
ttgcacctgtggctcccaggccaccagtgccaccctcactgtcacaggtgggctcccaggctagcgtggcccaggatata

SEQ ID NO: 35658 - DNA, 84 bp, Homo sapiens
ttgtagctcctcagggacctgccctcatgccctgctccctcccctgcagctgcgcctgtgcggttcctccgagagctgcagcac

SEQ ID NO: 35659 - DNA, 81 bp, Homo sapiens
agggacctgccctcatgccctgctccctcccctgcagctgcgcctgtgcggttcctccgagagctgcagcaccaggaggtg

SEQ ID NO: 35660 - DNA, 84 bp, Homo sapiens
ctcatgccctgctccctcccctgcagctgcgcctgtgcggttcctccgagagctgcagcaccaggaggtggatgagggaggcac

SEQ ID NO: 35661 - DNA, 83 bp, Homo sapiens
tgctccctcccctgcagctgcgcctgtgcggttcctccgagagctgcagcaccaggaggtggatgagggaggcaccgcacact

SEQ ID NO: 35662 - DNA, 83 bp, Homo sapiens
cgcctgtgcggttcctccgagagctgcagcaccaggaggtggatgagggaggcaccgcacacttatgctgcgagctgagccgg

SEQ ID NO: 35663 - DNA, 83 bp, Homo sapiens
gttcctccgagagctgcagcaccaggaggtggatgagggaggcaccgcacacttatgctgcgagctgagccgggcgggtgcga

SEQ ID NO: 35664 - DNA, 84 bp, Homo sapiens
agagctgcagcaccaggaggtggatgagggaggcaccgcacacttatgctgcgagctgagccgggcgggtgcgagcgtggagtg

SEQ ID NO: 35665 - DNA, 80 bp, Homo sapiens
accaggaggtggatgagggaggcaccgcacacttatgctgcgagctgagccgggcgggtgcgagcgtggagtggcgcaag

SEQ ID NO: 35666 - DNA, 81 bp, Homo sapiens
ggatgagggaggcaccgcacacttatgctgcgagctgagccgggcgggtgcgagcgtggagtggcgcaagggctccctaca

SEQ ID NO: 35667 - DNA, 80 bp, Homo sapiens
gggaggcaccgcacacttatgctgcgagctgagccgggcgggtgcgagcgtggagtggcgcaagggctccctacagctct

SEQ ID NO: 35668 - DNA, 79 bp, Homo sapiens
acttatgctgcgagctgagccgggcgggtgcgagcgtggagtggcgcaagggctccctacagctcttcccttgtgccaa

SEQ ID NO: 35669 - DNA, 78 bp, Homo sapiens
gagctgagccgggcgggtgcgagcgtggagtggcgcaagggctccctacagctcttcccttgtgccaagtaccagatg

SEQ ID NO: 35670 - DNA, 77 bp, Homo sapiens
agccgggcgggtgcgagcgtggagtggcgcaagggctccctacagctcttcccttgtgccaagtaccagatggtgca

SEQ ID NO: 35671 - DNA, 84 bp, Homo sapiens
ggtgcgagcgtggagtggcgcaagggctccctacagctcttcccttgtgccaagtaccagatggtgcaggatggtgcagctgca

SEQ ID NO: 35672 - DNA, 86 bp, Homo sapiens
tggagtggcgcaagggctccctacagctcttcccttgtgccaagtaccagatggtgcaggatggtgcagctgcagagctgctggta

SEQ ID NO: 35673 - DNA, 82 bp, Homo sapiens
aagggctccctacagctcttcccttgtgccaagtaccagatggtgcaggatggtgcagctgcagagctgctggtacgcggag

SEQ ID NO: 35674 - DNA, 86 bp, Homo sapiens
ctacagctcttcccttgtgccaagtaccagatggtgcaggatggtgcagctgcagagctgctggtacgcggagtggagcaggagga

SEQ ID NO: 35675 - DNA, 87 bp, Homo sapiens
ttgtgccaagtaccagatggtgcaggatggtgcagctgcagagctgctggtacgcggagtggagcaggaggatgcgggtgactacac

SEQ ID NO: 35676 - DNA, 86 bp, Homo sapiens
aagtaccagatggtgcaggatggtgcagctgcagagctgctggtacgcggagtggagcaggaggatgcgggtgactacacgtgtga

SEQ ID NO: 35677 - DNA, 86 bp, Homo sapiens
atggtgcaggatggtgcagctgcagagctgctggtacgcggagtggagcaggaggatgcgggtgactacacgtgtgacacgggcca

SEQ ID NO: 35678 - DNA, 87 bp, Homo sapiens
atggtgcagctgcagagctgctggtacgcggagtggagcaggaggatgcgggtgactacacgtgtgacacgggccacacgcagagca

SEQ ID NO: 35679 - DNA, 83 bp, Homo sapiens
agagctgctggtacgcggagtggagcaggaggatgcgggtgactacacgtgtgacacgggccacacgcagagcatggccagcc

SEQ ID NO: 35680 - DNA, 83 bp, Homo sapiens
tggtacgcggagtggagcaggaggatgcgggtgactacacgtgtgacacgggccacacgcagagcatggccagcctctctgtc

SEQ ID NO: 35681 - DNA, 86 bp, Homo sapiens
gagcaggaggatgcgggtgactacacgtgtgacacgggccacacgcagagcatggccagcctctctgtccgtggtgagctgctcac

SEQ ID NO: 35682 - DNA, 84 bp, Homo sapiens
aggatgcgggtgactacacgtgtgacacgggccacacgcagagcatggccagcctctctgtccgtggtgagctgctcaccagcc

SEQ ID NO: 35683 - DNA, 84 bp, Homo sapiens
ggtgactacacgtgtgacacgggccacacgcagagcatggccagcctctctgtccgtggtgagctgctcaccagcccctgcctc

SEQ ID NO: 35684 - DNA, 83 bp, Homo sapiens
cgtgtgacacgggccacacgcagagcatggccagcctctctgtccgtggtgagctgctcaccagcccctgcctcccacagccc

SEQ ID NO: 35685 - DNA, 75 bp, Homo sapiens
tcttggtcagcggcaaggggcactaagcatcccttcctgcatactccgcagtccccaggcccaagttcaagaccc

SEQ ID NO: 35686 - DNA, 73 bp, Homo sapiens
aaggggcactaagcatcccttcctgcatactccgcagtccccaggcccaagttcaagacccggcttcagagtc

SEQ ID NO: 35687 - DNA, 76 bp, Homo sapiens
actaagcatcccttcctgcatactccgcagtccccaggcccaagttcaagacccggcttcagagtctggagcagga

SEQ ID NO: 35688 - DNA, 78 bp, Homo sapiens
cttcctgcatactccgcagtccccaggcccaagttcaagacccggcttcagagtctggagcaggagacaggtgacata

SEQ ID NO: 35689 - DNA, 75 bp, Homo sapiens
atactccgcagtccccaggcccaagttcaagacccggcttcagagtctggagcaggagacaggtgacatagcccg

SEQ ID NO: 35690 - DNA, 85 bp, Homo sapiens
caggcccaagttcaagacccggcttcagagtctggagcaggagacaggtgacatagcccggctgtgctgtcagctgagtgatgca

SEQ ID NO: 35691 - DNA, 84 bp, Homo sapiens
aagttcaagacccggcttcagagtctggagcaggagacaggtgacatagcccggctgtgctgtcagctgagtgatgcagagtcg

SEQ ID NO: 35692 - DNA, 86 bp, Homo sapiens
ggcttcagagtctggagcaggagacaggtgacatagcccggctgtgctgtcagctgagtgatgcagagtcgggggccgtggtgcaa

SEQ ID NO: 35693 - DNA, 86 bp, Homo sapiens
agtctggagcaggagacaggtgacatagcccggctgtgctgtcagctgagtgatgcagagtcgggggccgtggtgcaatggctcaa

SEQ ID NO: 35694 - DNA, 84 bp, Homo sapiens
agcaggagacaggtgacatagcccggctgtgctgtcagctgagtgatgcagagtcgggggccgtggtgcaatggctcaaggagg

SEQ ID NO: 35695 - DNA, 83 bp, Homo sapiens
aggtgacatagcccggctgtgctgtcagctgagtgatgcagagtcgggggccgtggtgcaatggctcaaggagggcgtggagc

SEQ ID NO: 35696 - DNA, 84 bp, Homo sapiens
cccggctgtgctgtcagctgagtgatgcagagtcgggggccgtggtgcaatggctcaaggagggcgtggagctgcatgcgggcc

SEQ ID NO: 35697 - DNA, 83 bp, Homo sapiens
tcagctgagtgatgcagagtcgggggccgtggtgcaatggctcaaggagggcgtggagctgcatgcgggccccaagtacgaga

SEQ ID NO: 35698 - DNA, 80 bp, Homo sapiens
agtgatgcagagtcgggggccgtggtgcaatggctcaaggagggcgtggagctgcatgcgggccccaagtacgagatgcg

SEQ ID NO: 35699 - DNA, 77 bp, Homo sapiens
agtcgggggccgtggtgcaatggctcaaggagggcgtggagctgcatgcgggccccaagtacgagatgcggagccag

SEQ ID NO: 35700 - DNA, 79 bp, Homo sapiens
gtgcaatggctcaaggagggcgtggagctgcatgcgggccccaagtacgagatgcggagccagggggccacgcgggagc

SEQ ID NO: 35701 - DNA, 80 bp, Homo sapiens
atggctcaaggagggcgtggagctgcatgcgggccccaagtacgagatgcggagccagggggccacgcgggagctgctga

SEQ ID NO: 35702 - DNA, 79 bp, Homo sapiens
agctgcatgcgggccccaagtacgagatgcggagccagggggccacgcgggagctgctgatccaccaactggaggccaa

SEQ ID NO: 35703 - DNA, 76 bp, Homo sapiens
ccaagtacgagatgcggagccagggggccacgcgggagctgctgatccaccaactggaggccaaggacacgggcga

SEQ ID NO: 35704 - DNA, 78 bp, Homo sapiens
tacgagatgcggagccagggggccacgcgggagctgctgatccaccaactggaggccaaggacacgggcgagtatgcc

SEQ ID NO: 35705 - DNA, 78 bp, Homo sapiens
agccagggggccacgcgggagctgctgatccaccaactggaggccaaggacacgggcgagtatgcctgtgtgacaggc

SEQ ID NO: 35706 - DNA, 77 bp, Homo sapiens
acgcgggagctgctgatccaccaactggaggccaaggacacgggcgagtatgcctgtgtgacaggcggccagaaaac

SEQ ID NO: 35707 - DNA, 79 bp, Homo sapiens
agctgctgatccaccaactggaggccaaggacacgggcgagtatgcctgtgtgacaggcggccagaaaaccgctgcctc

SEQ ID NO: 35708 - DNA, 74 bp, Homo sapiens
accaactggaggccaaggacacgggcgagtatgcctgtgtgacaggcggccagaaaaccgctgcctccctcagg

SEQ ID NO: 35709 - DNA, 75 bp, Homo sapiens
acacgggcgagtatgcctgtgtgacaggcggccagaaaaccgctgcctccctcagggtcacaggtgagtggtggg

SEQ ID NO: 35710 - DNA, 76 bp, Homo sapiens
agtatgcctgtgtgacaggcggccagaaaaccgctgcctccctcagggtcacaggtgagtggtggggcctcccaga

SEQ ID NO: 35711 - DNA, 74 bp, Homo sapiens
tgtgacaggcggccagaaaaccgctgcctccctcagggtcacaggtgagtggtggggcctcccagaggagaggg

SEQ ID NO: 35712 - DNA, 70 bp, Homo sapiens
ttcttttacttggctggtaaagggaaccatctcgccccacccctcagagcctgaggtgaccattgtacgg

SEQ ID NO: 35713 - DNA, 72 bp, Homo sapiens
ttggctggtaaagggaaccatctcgccccacccctcagagcctgaggtgaccattgtacgggggctggttga

SEQ ID NO: 35714 - DNA, 72 bp, Homo sapiens
taaagggaaccatctcgccccacccctcagagcctgaggtgaccattgtacgggggctggttgatgcggagg

SEQ ID NO: 35715 - DNA, 75 bp, Homo sapiens
atctcgccccacccctcagagcctgaggtgaccattgtacgggggctggttgatgcggaggtgacggccgatgag

SEQ ID NO: 35716 - DNA, 79 bp, Homo sapiens
cctcagagcctgaggtgaccattgtacgggggctggttgatgcggaggtgacggccgatgaggatgttgagttcagctg

SEQ ID NO: 35717 - DNA, 80 bp, Homo sapiens
tgaggtgaccattgtacgggggctggttgatgcggaggtgacggccgatgaggatgttgagttcagctgtgaggtgtcca

SEQ ID NO: 35718 - DNA, 77 bp, Homo sapiens
accattgtacgggggctggttgatgcggaggtgacggccgatgaggatgttgagttcagctgtgaggtgtccagggc

SEQ ID NO: 35719 - DNA, 83 bp, Homo sapiens
gggctggttgatgcggaggtgacggccgatgaggatgttgagttcagctgtgaggtgtccagggctggagccacaggcgtgca

SEQ ID NO: 35720 - DNA, 85 bp, Homo sapiens
tgatgcggaggtgacggccgatgaggatgttgagttcagctgtgaggtgtccagggctggagccacaggcgtgcagtggtgccta

SEQ ID NO: 35721 - DNA, 81 bp, Homo sapiens
aggtgacggccgatgaggatgttgagttcagctgtgaggtgtccagggctggagccacaggcgtgcagtggtgcctacagg

SEQ ID NO: 35722 - DNA, 84 bp, Homo sapiens
atgaggatgttgagttcagctgtgaggtgtccagggctggagccacaggcgtgcagtggtgcctacagggcctgccactgcaaa

SEQ ID NO: 35723 - DNA, 84 bp, Homo sapiens
agttcagctgtgaggtgtccagggctggagccacaggcgtgcagtggtgcctacagggcctgccactgcaaagcaatgaggtga

SEQ ID NO: 35724 - DNA, 84 bp, Homo sapiens
tgtgaggtgtccagggctggagccacaggcgtgcagtggtgcctacagggcctgccactgcaaagcaatgaggtgacagaggtg

SEQ ID NO: 35725 - DNA, 83 bp, Homo sapiens
agggctggagccacaggcgtgcagtggtgcctacagggcctgccactgcaaagcaatgaggtgacagaggtggctgtgcggga

SEQ ID NO: 35726 - DNA, 86 bp, Homo sapiens
cacaggcgtgcagtggtgcctacagggcctgccactgcaaagcaatgaggtgacagaggtggctgtgcgggatggccgcatccaca

SEQ ID NO: 35727 - DNA, 83 bp, Homo sapiens
cagtggtgcctacagggcctgccactgcaaagcaatgaggtgacagaggtggctgtgcgggatggccgcatccacaccctgcg

SEQ ID NO: 35728 - DNA, 82 bp, Homo sapiens
ctacagggcctgccactgcaaagcaatgaggtgacagaggtggctgtgcgggatggccgcatccacaccctgcggctgaagg

SEQ ID NO: 35729 - DNA, 83 bp, Homo sapiens
tgccactgcaaagcaatgaggtgacagaggtggctgtgcgggatggccgcatccacaccctgcggctgaagggcgtgacgccc

SEQ ID NO: 35730 - DNA, 79 bp, Homo sapiens
aaagcaatgaggtgacagaggtggctgtgcgggatggccgcatccacaccctgcggctgaagggcgtgacgcccgagga

SEQ ID NO: 35731 - DNA, 82 bp, Homo sapiens
tgacagaggtggctgtgcgggatggccgcatccacaccctgcggctgaagggcgtgacgcccgaggacgctggcactgtctc

SEQ ID NO: 35732 - DNA, 78 bp, Homo sapiens
aggtggctgtgcgggatggccgcatccacaccctgcggctgaagggcgtgacgcccgaggacgctggcactgtctcct

SEQ ID NO: 35733 - DNA, 77 bp, Homo sapiens
gatggccgcatccacaccctgcggctgaagggcgtgacgcccgaggacgctggcactgtctccttccatttgggaaa

SEQ ID NO: 35734 - DNA, 75 bp, Homo sapiens
atccacaccctgcggctgaagggcgtgacgcccgaggacgctggcactgtctccttccatttgggaaaccatgct

SEQ ID NO: 35735 - DNA, 74 bp, Homo sapiens
accctgcggctgaagggcgtgacgcccgaggacgctggcactgtctccttccatttgggaaaccatgcttcctc

SEQ ID NO: 35736 - DNA, 77 bp, Homo sapiens
tgaagggcgtgacgcccgaggacgctggcactgtctccttccatttgggaaaccatgcttcctctgcccagctcacc

SEQ ID NO: 35737 - DNA, 76 bp, Homo sapiens
acgcccgaggacgctggcactgtctccttccatttgggaaaccatgcttcctctgcccagctcaccgtcagaggta

SEQ ID NO: 35738 - DNA, 77 bp, Homo sapiens
acgctggcactgtctccttccatttgggaaaccatgcttcctctgcccagctcaccgtcagaggtagccacaggcgg

SEQ ID NO: 35739 - DNA, 77 bp, Homo sapiens
atttgggaaaccatgcttcctctgcccagctcaccgtcagaggtagccacaggcgggccccaccagtgactgcatgg

SEQ ID NO: 35740 - DNA, 82 bp, Homo sapiens
gggcacctcagacgctgaggctgacacccatgcctcccctgtgtccagctcctgaggtgaccatcctggagcccctgcagga

SEQ ID NO: 35741 - DNA, 86 bp, Homo sapiens
tcagacgctgaggctgacacccatgcctcccctgtgtccagctcctgaggtgaccatcctggagcccctgcaggacgtgcagctca

SEQ ID NO: 35742 - DNA, 82 bp, Homo sapiens
aggctgacacccatgcctcccctgtgtccagctcctgaggtgaccatcctggagcccctgcaggacgtgcagctcagtgagg

SEQ ID NO: 35743 - DNA, 84 bp, Homo sapiens
ccatgcctcccctgtgtccagctcctgaggtgaccatcctggagcccctgcaggacgtgcagctcagtgagggccaggatgcca

SEQ ID NO: 35744 - DNA, 85 bp, Homo sapiens
tgtgtccagctcctgaggtgaccatcctggagcccctgcaggacgtgcagctcagtgagggccaggatgccagcttccagtgccg

SEQ ID NO: 35745 - DNA, 85 bp, Homo sapiens
tgaggtgaccatcctggagcccctgcaggacgtgcagctcagtgagggccaggatgccagcttccagtgccggctatccagagct

SEQ ID NO: 35746 - DNA, 86 bp, Homo sapiens
tgaccatcctggagcccctgcaggacgtgcagctcagtgagggccaggatgccagcttccagtgccggctatccagagcttcaggc

SEQ ID NO: 35747 - DNA, 82 bp, Homo sapiens
cgtgcagctcagtgagggccaggatgccagcttccagtgccggctatccagagcttcaggccaggaggcccgctgggcttta

SEQ ID NO: 35748 - DNA, 80 bp, Homo sapiens
agctcagtgagggccaggatgccagcttccagtgccggctatccagagcttcaggccaggaggcccgctgggctttagga

SEQ ID NO: 35749 - DNA, 76 bp, Homo sapiens
ccaggatgccagcttccagtgccggctatccagagcttcaggccaggaggcccgctgggctttaggaggggtgccc

SEQ ID NO: 35750 - DNA, 75 bp, Homo sapiens
cttccagtgccggctatccagagcttcaggccaggaggcccgctgggctttaggaggggtgcccctgcaggccaa

SEQ ID NO: 35751 - DNA, 77 bp, Homo sapiens
cggctatccagagcttcaggccaggaggcccgctgggctttaggaggggtgcccctgcaggccaacgagatgaatga

SEQ ID NO: 35752 - DNA, 78 bp, Homo sapiens
atccagagcttcaggccaggaggcccgctgggctttaggaggggtgcccctgcaggccaacgagatgaatgacatcac

SEQ ID NO: 35753 - DNA, 77 bp, Homo sapiens
aggccaggaggcccgctgggctttaggaggggtgcccctgcaggccaacgagatgaatgacatcactgtggagcagg

SEQ ID NO: 35754 - DNA, 79 bp, Homo sapiens
aggcccgctgggctttaggaggggtgcccctgcaggccaacgagatgaatgacatcactgtggagcagggcacactcca

SEQ ID NO: 35755 - DNA, 83 bp, Homo sapiens
tttaggaggggtgcccctgcaggccaacgagatgaatgacatcactgtggagcagggcacactccacctgctcaccctgcaca

SEQ ID NO: 35756 - DNA, 86 bp, Homo sapiens
tgcccctgcaggccaacgagatgaatgacatcactgtggagcagggcacactccacctgctcaccctgcacaaggtgaggcctctg

SEQ ID NO: 35757 - DNA, 82 bp, Homo sapiens
aggccaacgagatgaatgacatcactgtggagcagggcacactccacctgctcaccctgcacaaggtgaggcctctgggacc

SEQ ID NO: 35758 - DNA, 81 bp, Homo sapiens
acatcactgtggagcagggcacactccacctgctcaccctgcacaaggtgaggcctctgggacctgagtgtaccaggatgg

SEQ ID NO: 35759 - DNA, 75 bp, Homo sapiens
ctccttctggtcgggatgggggctcccagggccaagcatgtctctccctgcttcctaggtgacccttgaggatgc

SEQ ID NO: 35760 - DNA, 77 bp, Homo sapiens
gtcgggatgggggctcccagggccaagcatgtctctccctgcttcctaggtgacccttgaggatgctggaactgtca

SEQ ID NO: 35761 - DNA, 77 bp, Homo sapiens
ggctcccagggccaagcatgtctctccctgcttcctaggtgacccttgaggatgctggaactgtcagtttccacgtg

SEQ ID NO: 35762 - DNA, 78 bp, Homo sapiens
ggccaagcatgtctctccctgcttcctaggtgacccttgaggatgctggaactgtcagtttccacgtgggcacgtgta

SEQ ID NO: 35763 - DNA, 78 bp, Homo sapiens
atgtctctccctgcttcctaggtgacccttgaggatgctggaactgtcagtttccacgtgggcacgtgtagctctgag

SEQ ID NO: 35764 - DNA, 77 bp, Homo sapiens
cttcctaggtgacccttgaggatgctggaactgtcagtttccacgtgggcacgtgtagctctgaggcccagctgaaa

SEQ ID NO: 35765 - DNA, 79 bp, Homo sapiens
taggtgacccttgaggatgctggaactgtcagtttccacgtgggcacgtgtagctctgaggcccagctgaaagtcacag

SEQ ID NO: 35766 - DNA, 80 bp, Homo sapiens
ttgaggatgctggaactgtcagtttccacgtgggcacgtgtagctctgaggcccagctgaaagtcacaggtgggcagccc

SEQ ID NO: 35767 - DNA, 76 bp, Homo sapiens
aactgtcagtttccacgtgggcacgtgtagctctgaggcccagctgaaagtcacaggtgggcagcccctttccaca

SEQ ID NO: 35768 - DNA, 75 bp, Homo sapiens
agtttccacgtgggcacgtgtagctctgaggcccagctgaaagtcacaggtgggcagcccctttccacactggtc

SEQ ID NO: 35769 - DNA, 81 bp, Homo sapiens
acgtgtagctctgaggcccagctgaaagtcacaggtgggcagcccctttccacactggtcgctctgcctgcagatgcccag

SEQ ID NO: 35770 - DNA, 81 bp, Homo sapiens
tagctctgaggcccagctgaaagtcacaggtgggcagcccctttccacactggtcgctctgcctgcagatgcccagtttcc

SEQ ID NO: 35771 - DNA, 72 bp, Homo sapiens
cgtggggaccctggaagcgcgggcatggtctgatcctccctctccccacagccaagaacacggtggtgcggg

SEQ ID NO: 35772 - DNA, 77 bp, Homo sapiens
tggaagcgcgggcatggtctgatcctccctctccccacagccaagaacacggtggtgcgggggctggagaatgtgga

SEQ ID NO: 35773 - DNA, 75 bp, Homo sapiens
atggtctgatcctccctctccccacagccaagaacacggtggtgcgggggctggagaatgtggaggcgctggagg

SEQ ID NO: 35774 - DNA, 74 bp, Homo sapiens
ctccctctccccacagccaagaacacggtggtgcgggggctggagaatgtggaggcgctggagggcggcgaggc

SEQ ID NO: 35775 - DNA, 77 bp, Homo sapiens
ccacagccaagaacacggtggtgcgggggctggagaatgtggaggcgctggagggcggcgaggcgctgttcgagtgc

SEQ ID NO: 35776 - DNA, 77 bp, Homo sapiens
aagaacacggtggtgcgggggctggagaatgtggaggcgctggagggcggcgaggcgctgttcgagtgccagctgtc

SEQ ID NO: 35777 - DNA, 78 bp, Homo sapiens
gtgcgggggctggagaatgtggaggcgctggagggcggcgaggcgctgttcgagtgccagctgtcccagcccgaggtg

SEQ ID NO: 35778 - DNA, 79 bp, Homo sapiens
tggagaatgtggaggcgctggagggcggcgaggcgctgttcgagtgccagctgtcccagcccgaggtggccgcccacac

SEQ ID NO: 35779 - DNA, 77 bp, Homo sapiens
aatgtggaggcgctggagggcggcgaggcgctgttcgagtgccagctgtcccagcccgaggtggccgcccacacctg

SEQ ID NO: 35780 - DNA, 78 bp, Homo sapiens
gagggcggcgaggcgctgttcgagtgccagctgtcccagcccgaggtggccgcccacacctggctgctggacgacgaa

SEQ ID NO: 35781 - DNA, 78 bp, Homo sapiens
aggcgctgttcgagtgccagctgtcccagcccgaggtggccgcccacacctggctgctggacgacgaacccgtgcaca

SEQ ID NO: 35782 - DNA, 77 bp, Homo sapiens
ttcgagtgccagctgtcccagcccgaggtggccgcccacacctggctgctggacgacgaacccgtgcacacctcgga

SEQ ID NO: 35783 - DNA, 74 bp, Homo sapiens
ctgtcccagcccgaggtggccgcccacacctggctgctggacgacgaacccgtgcacacctcggagaacgccga

SEQ ID NO: 35784 - DNA, 72 bp, Homo sapiens
ccgaggtggccgcccacacctggctgctggacgacgaacccgtgcacacctcggagaacgccgaggtggtct

SEQ ID NO: 35785 - DNA, 73 bp, Homo sapiens
cgcccacacctggctgctggacgacgaacccgtgcacacctcggagaacgccgaggtggtcttcttcgagaac

SEQ ID NO: 35786 - DNA, 75 bp, Homo sapiens
tggctgctggacgacgaacccgtgcacacctcggagaacgccgaggtggtcttcttcgagaacggcctgcgccac

SEQ ID NO: 35787 - DNA, 73 bp, Homo sapiens
ctggacgacgaacccgtgcacacctcggagaacgccgaggtggtcttcttcgagaacggcctgcgccacctgc

SEQ ID NO: 35788 - DNA, 75 bp, Homo sapiens
aacccgtgcacacctcggagaacgccgaggtggtcttcttcgagaacggcctgcgccacctgctgctgctcaaaa

SEQ ID NO: 35789 - DNA, 77 bp, Homo sapiens
tcggagaacgccgaggtggtcttcttcgagaacggcctgcgccacctgctgctgctcaaaaacttgcggccacaaga

SEQ ID NO: 35790 - DNA, 78 bp, Homo sapiens
aacgccgaggtggtcttcttcgagaacggcctgcgccacctgctgctgctcaaaaacttgcggccacaagacagctgc

SEQ ID NO: 35791 - DNA, 78 bp, Homo sapiens
tggtcttcttcgagaacggcctgcgccacctgctgctgctcaaaaacttgcggccacaagacagctgccgggtgacct

SEQ ID NO: 35792 - DNA, 79 bp, Homo sapiens
tcgagaacggcctgcgccacctgctgctgctcaaaaacttgcggccacaagacagctgccgggtgaccttcctggctgg

SEQ ID NO: 35793 - DNA, 79 bp, Homo sapiens
gccacctgctgctgctcaaaaacttgcggccacaagacagctgccgggtgaccttcctggctggggatatggtgacgtc

SEQ ID NO: 35794 - DNA, 78 bp, Homo sapiens
tgctgctcaaaaacttgcggccacaagacagctgccgggtgaccttcctggctggggatatggtgacgtccgcattcc

SEQ ID NO: 35795 - DNA, 74 bp, Homo sapiens
aaaaacttgcggccacaagacagctgccgggtgaccttcctggctggggatatggtgacgtccgcattcctcac

SEQ ID NO: 35796 - DNA, 77 bp, Homo sapiens
cacaagacagctgccgggtgaccttcctggctggggatatggtgacgtccgcattcctcacggtccgaggtgactgc

SEQ ID NO: 35797 - DNA, 78 bp, Homo sapiens
acagctgccgggtgaccttcctggctggggatatggtgacgtccgcattcctcacggtccgaggtgactgcgctgtgc

SEQ ID NO: 35798 - DNA, 77 bp, Homo sapiens
accttcctggctggggatatggtgacgtccgcattcctcacggtccgaggtgactgcgctgtgctggtgcagggtgg

SEQ ID NO: 35799 - DNA, 78 bp, Homo sapiens
ctggggatatggtgacgtccgcattcctcacggtccgaggtgactgcgctgtgctggtgcagggtggggtcagatcct

SEQ ID NO: 35800 - DNA, 80 bp, Homo sapiens
tgctccggcgcttgccctcacaacccttccttgggcacatctgcaggctggcgcctggagatcctggagcctctgaaaaa

SEQ ID NO: 35801 - DNA, 77 bp, Homo sapiens
cttgccctcacaacccttccttgggcacatctgcaggctggcgcctggagatcctggagcctctgaaaaacgcggcg

SEQ ID NO: 35802 - DNA, 74 bp, Homo sapiens
acaacccttccttgggcacatctgcaggctggcgcctggagatcctggagcctctgaaaaacgcggcggtccgg

SEQ ID NO: 35803 - DNA, 78 bp, Homo sapiens
ttccttgggcacatctgcaggctggcgcctggagatcctggagcctctgaaaaacgcggcggtccgggccggcgcaca

SEQ ID NO: 35804 - DNA, 80 bp, Homo sapiens
acatctgcaggctggcgcctggagatcctggagcctctgaaaaacgcggcggtccgggccggcgcacaggcatgcttcac

SEQ ID NO: 35805 - DNA, 80 bp, Homo sapiens
ctggcgcctggagatcctggagcctctgaaaaacgcggcggtccgggccggcgcacaggcatgcttcacctgcacgctca

SEQ ID NO: 35806 - DNA, 79 bp, Homo sapiens
atcctggagcctctgaaaaacgcggcggtccgggccggcgcacaggcatgcttcacctgcacgctcagcgaggcggtgc

SEQ ID NO: 35807 - DNA, 77 bp, Homo sapiens
agcctctgaaaaacgcggcggtccgggccggcgcacaggcatgcttcacctgcacgctcagcgaggcggtgcccgtg

SEQ ID NO: 35808 - DNA, 75 bp, Homo sapiens
aaaaacgcggcggtccgggccggcgcacaggcatgcttcacctgcacgctcagcgaggcggtgcccgtgggagag

SEQ ID NO: 35809 - DNA, 81 bp, Homo sapiens
tccgggccggcgcacaggcatgcttcacctgcacgctcagcgaggcggtgcccgtgggagaggcgtcctggtacatcaatg

SEQ ID NO: 35810 - DNA, 85 bp, Homo sapiens
cacaggcatgcttcacctgcacgctcagcgaggcggtgcccgtgggagaggcgtcctggtacatcaatggcgcggcagtgcagcc

SEQ ID NO: 35811 - DNA, 84 bp, Homo sapiens
atgcttcacctgcacgctcagcgaggcggtgcccgtgggagaggcgtcctggtacatcaatggcgcggcagtgcagccggatga

SEQ ID NO: 35812 - DNA, 82 bp, Homo sapiens
acgctcagcgaggcggtgcccgtgggagaggcgtcctggtacatcaatggcgcggcagtgcagccggatgacagcgactgga

SEQ ID NO: 35813 - DNA, 80 bp, Homo sapiens
aggcggtgcccgtgggagaggcgtcctggtacatcaatggcgcggcagtgcagccggatgacagcgactggactgtcacc

SEQ ID NO: 35814 - DNA, 81 bp, Homo sapiens
cgtgggagaggcgtcctggtacatcaatggcgcggcagtgcagccggatgacagcgactggactgtcaccgccgacggcag

SEQ ID NO: 35815 - DNA, 82 bp, Homo sapiens
agaggcgtcctggtacatcaatggcgcggcagtgcagccggatgacagcgactggactgtcaccgccgacggcagtcaccac

SEQ ID NO: 35816 - DNA, 83 bp, Homo sapiens
ctggtacatcaatggcgcggcagtgcagccggatgacagcgactggactgtcaccgccgacggcagtcaccacgccctactgc

SEQ ID NO: 35817 - DNA, 84 bp, Homo sapiens
aatggcgcggcagtgcagccggatgacagcgactggactgtcaccgccgacggcagtcaccacgccctactgctgcgcagcgcc

SEQ ID NO: 35818 - DNA, 82 bp, Homo sapiens
agtgcagccggatgacagcgactggactgtcaccgccgacggcagtcaccacgccctactgctgcgcagcgcccagccccac

SEQ ID NO: 35819 - DNA, 79 bp, Homo sapiens
atgacagcgactggactgtcaccgccgacggcagtcaccacgccctactgctgcgcagcgcccagccccaccacgccgg

SEQ ID NO: 35820 - DNA, 77 bp, Homo sapiens
tggactgtcaccgccgacggcagtcaccacgccctactgctgcgcagcgcccagccccaccacgccggggaggtcac

SEQ ID NO: 35821 - DNA, 76 bp, Homo sapiens
tcaccgccgacggcagtcaccacgccctactgctgcgcagcgcccagccccaccacgccggggaggtcaccttcgc

SEQ ID NO: 35822 - DNA, 75 bp, Homo sapiens
agtcaccacgccctactgctgcgcagcgcccagccccaccacgccggggaggtcaccttcgcttgccgcgacgcc

SEQ ID NO: 35823 - DNA, 76 bp, Homo sapiens
ccctactgctgcgcagcgcccagccccaccacgccggggaggtcaccttcgcttgccgcgacgccgtggcctctgc

SEQ ID NO: 35824 - DNA, 79 bp, Homo sapiens
tgctgcgcagcgcccagccccaccacgccggggaggtcaccttcgcttgccgcgacgccgtggcctctgcgcggctcac

SEQ ID NO: 35825 - DNA, 73 bp, Homo sapiens
agccccaccacgccggggaggtcaccttcgcttgccgcgacgccgtggcctctgcgcggctcaccgtgctggg

SEQ ID NO: 35826 - DNA, 74 bp, Homo sapiens
aggtcaccttcgcttgccgcgacgccgtggcctctgcgcggctcaccgtgctgggtgggtggtgggcgagcttt

SEQ ID NO: 35827 - DNA, 68 bp, Homo sapiens
tgttggtgccgacagggagccacccccctgaccagtcccccttttccccaggcctccctgatccccca

SEQ ID NO: 35828 - DNA, 69 bp, Homo sapiens
acagggagccacccccctgaccagtcccccttttccccaggcctccctgatcccccagaggatgctgag

SEQ ID NO: 35829 - DNA, 75 bp, Homo sapiens
ccctgaccagtcccccttttccccaggcctccctgatcccccagaggatgctgaggtggtggctcgcagcagcca

SEQ ID NO: 35830 - DNA, 81 bp, Homo sapiens
ttttccccaggcctccctgatcccccagaggatgctgaggtggtggctcgcagcagccacactgtgacactgtcttgggca

SEQ ID NO: 35831 - DNA, 87 bp, Homo sapiens
tccctgatcccccagaggatgctgaggtggtggctcgcagcagccacactgtgacactgtcttgggcagctcccatgagtgatggag

SEQ ID NO: 35832 - DNA, 87 bp, Homo sapiens
ccagaggatgctgaggtggtggctcgcagcagccacactgtgacactgtcttgggcagctcccatgagtgatggaggcggtggtctc

SEQ ID NO: 35833 - DNA, 88 bp, Homo sapiens
atgctgaggtggtggctcgcagcagccacactgtgacactgtcttgggcagctcccatgagtgatggaggcggtggtctctgtggcta

SEQ ID NO: 35834 - DNA, 86 bp, Homo sapiens
tggctcgcagcagccacactgtgacactgtcttgggcagctcccatgagtgatggaggcggtggtctctgtggctaccgcgtggag

SEQ ID NO: 35835 - DNA, 81 bp, Homo sapiens
agccacactgtgacactgtcttgggcagctcccatgagtgatggaggcggtggtctctgtggctaccgcgtggaggtgaag

SEQ ID NO: 35836 - DNA, 79 bp, Homo sapiens
actgtgacactgtcttgggcagctcccatgagtgatggaggcggtggtctctgtggctaccgcgtggaggtgaaggagg

SEQ ID NO: 35837 - DNA, 78 bp, Homo sapiens
ttgggcagctcccatgagtgatggaggcggtggtctctgtggctaccgcgtggaggtgaaggagggggccacaggcca

SEQ ID NO: 35838 - DNA, 77 bp, Homo sapiens
agctcccatgagtgatggaggcggtggtctctgtggctaccgcgtggaggtgaaggagggggccacaggccagtggc

SEQ ID NO: 35839 - DNA, 77 bp, Homo sapiens
agtgatggaggcggtggtctctgtggctaccgcgtggaggtgaaggagggggccacaggccagtggcggctgtgcca

SEQ ID NO: 35840 - DNA, 79 bp, Homo sapiens
tggtctctgtggctaccgcgtggaggtgaaggagggggccacaggccagtggcggctgtgccacgagctggtgcctgga

SEQ ID NO: 35841 - DNA, 77 bp, Homo sapiens
tctgtggctaccgcgtggaggtgaaggagggggccacaggccagtggcggctgtgccacgagctggtgcctggaccc

SEQ ID NO: 35842 - DNA, 78 bp, Homo sapiens
tggaggtgaaggagggggccacaggccagtggcggctgtgccacgagctggtgcctggacccgagtgtgtggtggatg

SEQ ID NO: 35843 - DNA, 78 bp, Homo sapiens
gtgaaggagggggccacaggccagtggcggctgtgccacgagctggtgcctggacccgagtgtgtggtggatggcctg

SEQ ID NO: 35844 - DNA, 74 bp, Homo sapiens
agtggcggctgtgccacgagctggtgcctggacccgagtgtgtggtggatggcctggcccccggggagacctac

SEQ ID NO: 35845 - DNA, 73 bp, Homo sapiens
tgccacgagctggtgcctggacccgagtgtgtggtggatggcctggcccccggggagacctaccgcttccgtg

SEQ ID NO: 35846 - DNA, 74 bp, Homo sapiens
tggtgcctggacccgagtgtgtggtggatggcctggcccccggggagacctaccgcttccgtgtggcagctgtg

SEQ ID NO: 35847 - DNA, 72 bp, Homo sapiens
tggacccgagtgtgtggtggatggcctggcccccggggagacctaccgcttccgtgtggcagctgtgggccc

SEQ ID NO: 35848 - DNA, 74 bp, Homo sapiens
tgtgtggtggatggcctggcccccggggagacctaccgcttccgtgtggcagctgtgggccctgtgggtgctgg

SEQ ID NO: 35849 - DNA, 68 bp, Homo sapiens
ctggcccccggggagacctaccgcttccgtgtggcagctgtgggccctgtgggtgctggggaaccggt

SEQ ID NO: 35850 - DNA, 72 bp, Homo sapiens
gggagacctaccgcttccgtgtggcagctgtgggccctgtgggtgctggggaaccggttcacctgccccaga

SEQ ID NO: 35851 - DNA, 73 bp, Homo sapiens
acctaccgcttccgtgtggcagctgtgggccctgtgggtgctggggaaccggttcacctgccccagacagtgc

SEQ ID NO: 35852 - DNA, 78 bp, Homo sapiens
tgtggcagctgtgggccctgtgggtgctggggaaccggttcacctgccccagacagtgcggcttggtgagttgcttca

SEQ ID NO: 35853 - DNA, 74 bp, Homo sapiens
tgtgggccctgtgggtgctggggaaccggttcacctgccccagacagtgcggcttggtgagttgcttcattggg

SEQ ID NO: 35854 - DNA, 73 bp, Homo sapiens
ctgtgggtgctggggaaccggttcacctgccccagacagtgcggcttggtgagttgcttcattggggtctggg

SEQ ID NO: 35855 - DNA, 78 bp, Homo sapiens
atctttgctgatggggcctgtcctctgtccgtggacgctgttccccagcagagccaccgaagcctgtgcctccccagc

SEQ ID NO: 35856 - DNA, 78 bp, Homo sapiens
ctgatggggcctgtcctctgtccgtggacgctgttccccagcagagccaccgaagcctgtgcctccccagccctcagc

SEQ ID NO: 35857 - DNA, 78 bp, Homo sapiens
ctgtcctctgtccgtggacgctgttccccagcagagccaccgaagcctgtgcctccccagccctcagcccctgagagc

SEQ ID NO: 35858 - DNA, 77 bp, Homo sapiens
tccgtggacgctgttccccagcagagccaccgaagcctgtgcctccccagccctcagcccctgagagccggcaggtg

SEQ ID NO: 35859 - DNA, 80 bp, Homo sapiens
tgttccccagcagagccaccgaagcctgtgcctccccagccctcagcccctgagagccggcaggtggcagctggtgaaga

SEQ ID NO: 35860 - DNA, 81 bp, Homo sapiens
agagccaccgaagcctgtgcctccccagccctcagcccctgagagccggcaggtggcagctggtgaagatgtctctctgga

SEQ ID NO: 35861 - DNA, 81 bp, Homo sapiens
aagcctgtgcctccccagccctcagcccctgagagccggcaggtggcagctggtgaagatgtctctctggagcttgaggtg

SEQ ID NO: 35862 - DNA, 82 bp, Homo sapiens
cccagccctcagcccctgagagccggcaggtggcagctggtgaagatgtctctctggagcttgaggtggtggctgaggctgg

SEQ ID NO: 35863 - DNA, 84 bp, Homo sapiens
agcccctgagagccggcaggtggcagctggtgaagatgtctctctggagcttgaggtggtggctgaggctggtgaggtcatctg

SEQ ID NO: 35864 - DNA, 84 bp, Homo sapiens
agagccggcaggtggcagctggtgaagatgtctctctggagcttgaggtggtggctgaggctggtgaggtcatctggcacaagg

SEQ ID NO: 35865 - DNA, 88 bp, Homo sapiens
tggcagctggtgaagatgtctctctggagcttgaggtggtggctgaggctggtgaggtcatctggcacaagggaatggagcgcatcca

SEQ ID NO: 35866 - DNA, 85 bp, Homo sapiens
tggtgaagatgtctctctggagcttgaggtggtggctgaggctggtgaggtcatctggcacaagggaatggagcgcatccagccc

SEQ ID NO: 35867 - DNA, 82 bp, Homo sapiens
atgtctctctggagcttgaggtggtggctgaggctggtgaggtcatctggcacaagggaatggagcgcatccagcccggtgg

SEQ ID NO: 35868 - DNA, 79 bp, Homo sapiens
agcttgaggtggtggctgaggctggtgaggtcatctggcacaagggaatggagcgcatccagcccggtgggcggttcga

SEQ ID NO: 35869 - DNA, 78 bp, Homo sapiens
ggctgaggctggtgaggtcatctggcacaagggaatggagcgcatccagcccggtgggcggttcgaggtggtctccca

SEQ ID NO: 35870 - DNA, 75 bp, Homo sapiens
aggctggtgaggtcatctggcacaagggaatggagcgcatccagcccggtgggcggttcgaggtggtctcccagg

SEQ ID NO: 35871 - DNA, 76 bp, Homo sapiens
atctggcacaagggaatggagcgcatccagcccggtgggcggttcgaggtggtctcccagggtcggcaacagatgc

SEQ ID NO: 35872 - DNA, 76 bp, Homo sapiens
aagggaatggagcgcatccagcccggtgggcggttcgaggtggtctcccagggtcggcaacagatgctggtgatca

SEQ ID NO: 35873 - DNA, 78 bp, Homo sapiens
tggagcgcatccagcccggtgggcggttcgaggtggtctcccagggtcggcaacagatgctggtgatcaagggcttca

SEQ ID NO: 35874 - DNA, 74 bp, Homo sapiens
agcccggtgggcggttcgaggtggtctcccagggtcggcaacagatgctggtgatcaagggcttcacggcagaa

SEQ ID NO: 35875 - DNA, 76 bp, Homo sapiens
gttcgaggtggtctcccagggtcggcaacagatgctggtgatcaagggcttcacggcagaagaccagggcgagtac

SEQ ID NO: 35876 - DNA, 76 bp, Homo sapiens
aggtggtctcccagggtcggcaacagatgctggtgatcaagggcttcacggcagaagaccagggcgagtaccactg

SEQ ID NO: 35877 - DNA, 78 bp, Homo sapiens
agggtcggcaacagatgctggtgatcaagggcttcacggcagaagaccagggcgagtaccactgtggcctggctcagg

SEQ ID NO: 35878 - DNA, 81 bp, Homo sapiens
acagatgctggtgatcaagggcttcacggcagaagaccagggcgagtaccactgtggcctggctcagggctccatctgccc

SEQ ID NO: 35879 - DNA, 82 bp, Homo sapiens
tggtgatcaagggcttcacggcagaagaccagggcgagtaccactgtggcctggctcagggctccatctgccctgcggctgc

SEQ ID NO: 35880 - DNA, 79 bp, Homo sapiens
cttcacggcagaagaccagggcgagtaccactgtggcctggctcagggctccatctgccctgcggctgccaccttccag

SEQ ID NO: 35881 - DNA, 77 bp, Homo sapiens
aagaccagggcgagtaccactgtggcctggctcagggctccatctgccctgcggctgccaccttccagggtgcgttg

SEQ ID NO: 35882 - DNA, 78 bp, Homo sapiens
gagtaccactgtggcctggctcagggctccatctgccctgcggctgccaccttccagggtgcgttgtccctgtccttc

SEQ ID NO: 35883 - DNA, 81 bp, Homo sapiens
gggtgatggctctgaactagcccactgactagtcttttgccttcctcagtggcactgagcccagcctctgtggatgaggcc

SEQ ID NO: 35884 - DNA, 81 bp, Homo sapiens
tctgaactagcccactgactagtcttttgccttcctcagtggcactgagcccagcctctgtggatgaggcccctcagccca

SEQ ID NO: 35885 - DNA, 80 bp, Homo sapiens
agcccactgactagtcttttgccttcctcagtggcactgagcccagcctctgtggatgaggcccctcagcccagcttgcc

SEQ ID NO: 35886 - DNA, 79 bp, Homo sapiens
tagtcttttgccttcctcagtggcactgagcccagcctctgtggatgaggcccctcagcccagcttgccccccgaggca

SEQ ID NO: 35887 - DNA, 78 bp, Homo sapiens
ccttcctcagtggcactgagcccagcctctgtggatgaggcccctcagcccagcttgccccccgaggcagcccaggag

SEQ ID NO: 35888 - DNA, 77 bp, Homo sapiens
actgagcccagcctctgtggatgaggcccctcagcccagcttgccccccgaggcagcccaggagggtgacctgcacc

SEQ ID NO: 35889 - DNA, 76 bp, Homo sapiens
agcctctgtggatgaggcccctcagcccagcttgccccccgaggcagcccaggagggtgacctgcacctactgtgg

SEQ ID NO: 35890 - DNA, 76 bp, Homo sapiens
tgtggatgaggcccctcagcccagcttgccccccgaggcagcccaggagggtgacctgcacctactgtgggaggcc

SEQ ID NO: 35891 - DNA, 74 bp, Homo sapiens
tcagcccagcttgccccccgaggcagcccaggagggtgacctgcacctactgtgggaggccctggctcggaaac

SEQ ID NO: 35892 - DNA, 74 bp, Homo sapiens
cttgccccccgaggcagcccaggagggtgacctgcacctactgtgggaggccctggctcggaaacgtcgcatga

SEQ ID NO: 35893 - DNA, 76 bp, Homo sapiens
aggcagcccaggagggtgacctgcacctactgtgggaggccctggctcggaaacgtcgcatgagccgtgagcccac

SEQ ID NO: 35894 - DNA, 76 bp, Homo sapiens
aggagggtgacctgcacctactgtgggaggccctggctcggaaacgtcgcatgagccgtgagcccacgctggactc

SEQ ID NO: 35895 - DNA, 79 bp, Homo sapiens
gtgacctgcacctactgtgggaggccctggctcggaaacgtcgcatgagccgtgagcccacgctggactccattagcga

SEQ ID NO: 35896 - DNA, 80 bp, Homo sapiens
ctactgtgggaggccctggctcggaaacgtcgcatgagccgtgagcccacgctggactccattagcgagctgccagagga

SEQ ID NO: 35897 - DNA, 78 bp, Homo sapiens
aggccctggctcggaaacgtcgcatgagccgtgagcccacgctggactccattagcgagctgccagaggaggacggcc

SEQ ID NO: 35898 - DNA, 83 bp, Homo sapiens
aaacgtcgcatgagccgtgagcccacgctggactccattagcgagctgccagaggaggacggccgctcgcagcgcctgccaca

SEQ ID NO: 35899 - DNA, 87 bp, Homo sapiens
tcgcatgagccgtgagcccacgctggactccattagcgagctgccagaggaggacggccgctcgcagcgcctgccacaggaggcaga

SEQ ID NO: 35900 - DNA, 82 bp, Homo sapiens
cgtgagcccacgctggactccattagcgagctgccagaggaggacggccgctcgcagcgcctgccacaggaggcagaggagg

SEQ ID NO: 35901 - DNA, 86 bp, Homo sapiens
gactccattagcgagctgccagaggaggacggccgctcgcagcgcctgccacaggaggcagaggaggtggcacctgatctctctga

SEQ ID NO: 35902 - DNA, 85 bp, Homo sapiens
ttagcgagctgccagaggaggacggccgctcgcagcgcctgccacaggaggcagaggaggtggcacctgatctctctgaaggcta

SEQ ID NO: 35903 - DNA, 83 bp, Homo sapiens
tgccagaggaggacggccgctcgcagcgcctgccacaggaggcagaggaggtggcacctgatctctctgaaggctactccacg

SEQ ID NO: 35904 - DNA, 82 bp, Homo sapiens
aggacggccgctcgcagcgcctgccacaggaggcagaggaggtggcacctgatctctctgaaggctactccacggccgatga

SEQ ID NO: 35905 - DNA, 83 bp, Homo sapiens
agcgcctgccacaggaggcagaggaggtggcacctgatctctctgaaggctactccacggccgatgagctggcccgcactgga

SEQ ID NO: 35906 - DNA, 83 bp, Homo sapiens
acaggaggcagaggaggtggcacctgatctctctgaaggctactccacggccgatgagctggcccgcactggagatgctgacc

SEQ ID NO: 35907 - DNA, 84 bp, Homo sapiens
agaggaggtggcacctgatctctctgaaggctactccacggccgatgagctggcccgcactggagatgctgacctctcacacac

SEQ ID NO: 35908 - DNA, 89 bp, Homo sapiens
cacctgatctctctgaaggctactccacggccgatgagctggcccgcactggagatgctgacctctcacacaccagctctgatgatgag

SEQ ID NO: 35909 - DNA, 87 bp, Homo sapiens
atctctctgaaggctactccacggccgatgagctggcccgcactggagatgctgacctctcacacaccagctctgatgatgagtccc

SEQ ID NO: 35910 - DNA, 84 bp, Homo sapiens
aaggctactccacggccgatgagctggcccgcactggagatgctgacctctcacacaccagctctgatgatgagtcccgggcag

SEQ ID NO: 35911 - DNA, 81 bp, Homo sapiens
tggagatgctgacctctcacacaccagctctgatgatgagtcccgggcaggcaccccttccctggtcacctacctcaagaa

SEQ ID NO: 35912 - DNA, 76 bp, Homo sapiens
acacaccagctctgatgatgagtcccgggcaggcaccccttccctggtcacctacctcaagaaggctgggaggcca

SEQ ID NO: 35913 - DNA, 76 bp, Homo sapiens
ctctgatgatgagtcccgggcaggcaccccttccctggtcacctacctcaagaaggctgggaggccaggcacctca

SEQ ID NO: 35914 - DNA, 73 bp, Homo sapiens
tgagtcccgggcaggcaccccttccctggtcacctacctcaagaaggctgggaggccaggcacctcaccactg

SEQ ID NO: 35915 - DNA, 74 bp, Homo sapiens
aggcaccccttccctggtcacctacctcaagaaggctgggaggccaggcacctcaccactggccagcaaggtga

SEQ ID NO: 35916 - DNA, 73 bp, Homo sapiens
cttccctggtcacctacctcaagaaggctgggaggccaggcacctcaccactggccagcaaggtgagcccccc

SEQ ID NO: 35917 - DNA, 79 bp, Homo sapiens
cctcagattccctatctcaccatgacgtcaggctctgtgcccacaggttggggccccagcagccccctctgtgaagcca

SEQ ID NO: 35918 - DNA, 81 bp, Homo sapiens
attccctatctcaccatgacgtcaggctctgtgcccacaggttggggccccagcagccccctctgtgaagccacagcagca

SEQ ID NO: 35919 - DNA, 84 bp, Homo sapiens
tcaccatgacgtcaggctctgtgcccacaggttggggccccagcagccccctctgtgaagccacagcagcagcaggagccactg

SEQ ID NO: 35920 - DNA, 85 bp, Homo sapiens
cgtcaggctctgtgcccacaggttggggccccagcagccccctctgtgaagccacagcagcagcaggagccactggctgctgtgc

SEQ ID NO: 35921 - DNA, 84 bp, Homo sapiens
tgcccacaggttggggccccagcagccccctctgtgaagccacagcagcagcaggagccactggctgctgtgcgcccaccactg

SEQ ID NO: 35922 - DNA, 85 bp, Homo sapiens
gggccccagcagccccctctgtgaagccacagcagcagcaggagccactggctgctgtgcgcccaccactgggagacctgagcac

SEQ ID NO: 35923 - DNA, 83 bp, Homo sapiens
agccccctctgtgaagccacagcagcagcaggagccactggctgctgtgcgcccaccactgggagacctgagcaccaaagacc

SEQ ID NO: 35924 - DNA, 86 bp, Homo sapiens
tctgtgaagccacagcagcagcaggagccactggctgctgtgcgcccaccactgggagacctgagcaccaaagacctgggtgatcc

SEQ ID NO: 35925 - DNA, 84 bp, Homo sapiens
agcagcagcaggagccactggctgctgtgcgcccaccactgggagacctgagcaccaaagacctgggtgatccctcaatggaca

SEQ ID NO: 35926 - DNA, 80 bp, Homo sapiens
aggagccactggctgctgtgcgcccaccactgggagacctgagcaccaaagacctgggtgatccctcaatggacaaggca

SEQ ID NO: 35927 - DNA, 81 bp, Homo sapiens
actggctgctgtgcgcccaccactgggagacctgagcaccaaagacctgggtgatccctcaatggacaaggcagctgtgaa

SEQ ID NO: 35928 - DNA, 81 bp, Homo sapiens
tgtgcgcccaccactgggagacctgagcaccaaagacctgggtgatccctcaatggacaaggcagctgtgaagatccaggc

SEQ ID NO: 35929 - DNA, 76 bp, Homo sapiens
agcaccaaagacctgggtgatccctcaatggacaaggcagctgtgaagatccaggctgcctttaagggctacaagg

SEQ ID NO: 35930 - DNA, 74 bp, Homo sapiens
aaagacctgggtgatccctcaatggacaaggcagctgtgaagatccaggctgcctttaagggctacaaggtccg

SEQ ID NO: 35931 - DNA, 77 bp, Homo sapiens
ggtgatccctcaatggacaaggcagctgtgaagatccaggctgcctttaagggctacaaggtccggaaggagatgaa

SEQ ID NO: 35932 - DNA, 77 bp, Homo sapiens
aatggacaaggcagctgtgaagatccaggctgcctttaagggctacaaggtccggaaggagatgaagcagcaggaag

SEQ ID NO: 35933 - DNA, 76 bp, Homo sapiens
agctgtgaagatccaggctgcctttaagggctacaaggtccggaaggagatgaagcagcaggaagggcccatgttc

SEQ ID NO: 35934 - DNA, 74 bp, Homo sapiens
aagatccaggctgcctttaagggctacaaggtccggaaggagatgaagcagcaggaagggcccatgttctccca

SEQ ID NO: 35935 - DNA, 71 bp, Homo sapiens
cctttaagggctacaaggtccggaaggagatgaagcagcaggaagggcccatgttctcccacacatttggg

SEQ ID NO: 35936 - DNA, 75 bp, Homo sapiens
ctacaaggtccggaaggagatgaagcagcaggaagggcccatgttctcccacacatttggggacaccgaggcaca

SEQ ID NO: 35937 - DNA, 74 bp, Homo sapiens
gtccggaaggagatgaagcagcaggaagggcccatgttctcccacacatttggggacaccgaggcacaggtggg

SEQ ID NO: 35938 - DNA, 76 bp, Homo sapiens
agatgaagcagcaggaagggcccatgttctcccacacatttggggacaccgaggcacaggtgggggatgccctgcg

SEQ ID NO: 35939 - DNA, 74 bp, Homo sapiens
aagggcccatgttctcccacacatttggggacaccgaggcacaggtgggggatgccctgcggctggagtgtgtc

SEQ ID NO: 35940 - DNA, 77 bp, Homo sapiens
atgttctcccacacatttggggacaccgaggcacaggtgggggatgccctgcggctggagtgtgtcgtggccagcaa

SEQ ID NO: 35941 - DNA, 80 bp, Homo sapiens
acacatttggggacaccgaggcacaggtgggggatgccctgcggctggagtgtgtcgtggccagcaaggcagatgtgcga

SEQ ID NO: 35942 - DNA, 82 bp, Homo sapiens
acaggtgggggatgccctgcggctggagtgtgtcgtggccagcaaggcagatgtgcgagcccgctggctgaaggatggtgtg

SEQ ID NO: 35943 - DNA, 86 bp, Homo sapiens
gatgccctgcggctggagtgtgtcgtggccagcaaggcagatgtgcgagcccgctggctgaaggatggtgtggagctgaccgatgg

SEQ ID NO: 35944 - DNA, 85 bp, Homo sapiens
ggctggagtgtgtcgtggccagcaaggcagatgtgcgagcccgctggctgaaggatggtgtggagctgaccgatgggcggcacca

SEQ ID NO: 35945 - DNA, 86 bp, Homo sapiens
agtgtgtcgtggccagcaaggcagatgtgcgagcccgctggctgaaggatggtgtggagctgaccgatgggcggcaccatcacatc

SEQ ID NO: 35946 - DNA, 84 bp, Homo sapiens
agcaaggcagatgtgcgagcccgctggctgaaggatggtgtggagctgaccgatgggcggcaccatcacatcgaccagcttggg

SEQ ID NO: 35947 - DNA, 85 bp, Homo sapiens
aaggatggtgtggagctgaccgatgggcggcaccatcacatcgaccagcttggggatggcacctgctctctgctgatcactggcc

SEQ ID NO: 35948 - DNA, 88 bp, Homo sapiens
ctgaccgatgggcggcaccatcacatcgaccagcttggggatggcacctgctctctgctgatcactggcctggaccgtgctgatgctg

SEQ ID NO: 35949 - DNA, 90 bp, Homo sapiens
caccatcacatcgaccagcttggggatggcacctgctctctgctgatcactggcctggaccgtgctgatgctggctgctacacctgtcag

SEQ ID NO: 35950 - DNA, 89 bp, Homo sapiens
atcgaccagcttggggatggcacctgctctctgctgatcactggcctggaccgtgctgatgctggctgctacacctgtcaggtgagcaa

SEQ ID NO: 35951 - DNA, 87 bp, Homo sapiens
ttggggatggcacctgctctctgctgatcactggcctggaccgtgctgatgctggctgctacacctgtcaggtgagcaacaagtttg

SEQ ID NO: 35952 - DNA, 86 bp, Homo sapiens
acctgctctctgctgatcactggcctggaccgtgctgatgctggctgctacacctgtcaggtgagcaacaagtttggccaggtgac

SEQ ID NO: 35953 - DNA, 86 bp, Homo sapiens
ctctctgctgatcactggcctggaccgtgctgatgctggctgctacacctgtcaggtgagcaacaagtttggccaggtgacccaca

SEQ ID NO: 35954 - DNA, 83 bp, Homo sapiens
atcactggcctggaccgtgctgatgctggctgctacacctgtcaggtgagcaacaagtttggccaggtgacccacagtgcctg

SEQ ID NO: 35955 - DNA, 84 bp, Homo sapiens
tggaccgtgctgatgctggctgctacacctgtcaggtgagcaacaagtttggccaggtgacccacagtgcctgtgtggtggtca

SEQ ID NO: 35956 - DNA, 82 bp, Homo sapiens
atgctggctgctacacctgtcaggtgagcaacaagtttggccaggtgacccacagtgcctgtgtggtggtcagtgggtcaga

SEQ ID NO: 35957 - DNA, 79 bp, Homo sapiens
ctacacctgtcaggtgagcaacaagtttggccaggtgacccacagtgcctgtgtggtggtcagtgggtcagagagtgaa

SEQ ID NO: 35958 - DNA, 79 bp, Homo sapiens
aggtgagcaacaagtttggccaggtgacccacagtgcctgtgtggtggtcagtgggtcagagagtgaagccgagagctc

SEQ ID NO: 35959 - DNA, 77 bp, Homo sapiens
aacaagtttggccaggtgacccacagtgcctgtgtggtggtcagtgggtcagagagtgaagccgagagctcctctgg

SEQ ID NO: 35960 - DNA, 79 bp, Homo sapiens
aggtgacccacagtgcctgtgtggtggtcagtgggtcagagagtgaagccgagagctcctctgggggtgagctggacga

SEQ ID NO: 35961 - DNA, 80 bp, Homo sapiens
acagtgcctgtgtggtggtcagtgggtcagagagtgaagccgagagctcctctgggggtgagctggacgatgccttccgc

SEQ ID NO: 35962 - DNA, 80 bp, Homo sapiens
tgtgtggtggtcagtgggtcagagagtgaagccgagagctcctctgggggtgagctggacgatgccttccgccgggctgc

SEQ ID NO: 35963 - DNA, 76 bp, Homo sapiens
agtgaagccgagagctcctctgggggtgagctggacgatgccttccgccgggctgcccgtcggctgcaccggctct

SEQ ID NO: 35964 - DNA, 75 bp, Homo sapiens
cgatgccttccgccgggctgcccgtcggctgcaccggctcttccgcaccaaaagtccggctgaagtttcagatga

SEQ ID NO: 35965 - DNA, 74 bp, Homo sapiens
ccgggctgcccgtcggctgcaccggctcttccgcaccaaaagtccggctgaagtttcagatgaggagctcttcc

SEQ ID NO: 35966 - DNA, 78 bp, Homo sapiens
ccgtcggctgcaccggctcttccgcaccaaaagtccggctgaagtttcagatgaggagctcttcctgagtgcagacga

SEQ ID NO: 35967 - DNA, 77 bp, Homo sapiens
accggctcttccgcaccaaaagtccggctgaagtttcagatgaggagctcttcctgagtgcagacgagggccctgca

SEQ ID NO: 35968 - DNA, 80 bp, Homo sapiens
ttccgcaccaaaagtccggctgaagtttcagatgaggagctcttcctgagtgcagacgagggccctgcagagccagagga

SEQ ID NO: 35969 - DNA, 79 bp, Homo sapiens
aaagtccggctgaagtttcagatgaggagctcttcctgagtgcagacgagggccctgcagagccagaggagcccgcgga

SEQ ID NO: 35970 - DNA, 81 bp, Homo sapiens
aagtttcagatgaggagctcttcctgagtgcagacgagggccctgcagagccagaggagcccgcggactggcagacatacc

SEQ ID NO: 35971 - DNA, 83 bp, Homo sapiens
ggagctcttcctgagtgcagacgagggccctgcagagccagaggagcccgcggactggcagacataccgcgaagatgagcatt

SEQ ID NO: 35972 - DNA, 87 bp, Homo sapiens
tcttcctgagtgcagacgagggccctgcagagccagaggagcccgcggactggcagacataccgcgaagatgagcatttcatctgca

SEQ ID NO: 35973 - DNA, 82 bp, Homo sapiens
acgagggccctgcagagccagaggagcccgcggactggcagacataccgcgaagatgagcatttcatctgcatccgttttga

SEQ ID NO: 35974 - DNA, 87 bp, Homo sapiens
tgcagagccagaggagcccgcggactggcagacataccgcgaagatgagcatttcatctgcatccgttttgaggcgctcactgaggc

SEQ ID NO: 35975 - DNA, 83 bp, Homo sapiens
agccagaggagcccgcggactggcagacataccgcgaagatgagcatttcatctgcatccgttttgaggcgctcactgaggcc

SEQ ID NO: 35976 - DNA, 81 bp, Homo sapiens
cggactggcagacataccgcgaagatgagcatttcatctgcatccgttttgaggcgctcactgaggcccgccaggcggtaa

SEQ ID NO: 35977 - DNA, 80 bp, Homo sapiens
agacataccgcgaagatgagcatttcatctgcatccgttttgaggcgctcactgaggcccgccaggcggtaactcgcttc

SEQ ID NO: 35978 - DNA, 80 bp, Homo sapiens
gaagatgagcatttcatctgcatccgttttgaggcgctcactgaggcccgccaggcggtaactcgcttccaggagatgtt

SEQ ID NO: 35979 - DNA, 78 bp, Homo sapiens
atttcatctgcatccgttttgaggcgctcactgaggcccgccaggcggtaactcgcttccaggagatgtttgccacac

SEQ ID NO: 35980 - DNA, 79 bp, Homo sapiens
atctgcatccgttttgaggcgctcactgaggcccgccaggcggtaactcgcttccaggagatgtttgccacactgggca

SEQ ID NO: 35981 - DNA, 75 bp, Homo sapiens
gttttgaggcgctcactgaggcccgccaggcggtaactcgcttccaggagatgtttgccacactgggcattgggg

SEQ ID NO: 35982 - DNA, 78 bp, Homo sapiens
ctcactgaggcccgccaggcggtaactcgcttccaggagatgtttgccacactgggcattggggtggagatcaagctg

SEQ ID NO: 35983 - DNA, 76 bp, Homo sapiens
cccgccaggcggtaactcgcttccaggagatgtttgccacactgggcattggggtggagatcaagctggtggaaca

SEQ ID NO: 35984 - DNA, 76 bp, Homo sapiens
gtaactcgcttccaggagatgtttgccacactgggcattggggtggagatcaagctggtggaacaggggcctcgga

SEQ ID NO: 35985 - DNA, 78 bp, Homo sapiens
aggagatgtttgccacactgggcattggggtggagatcaagctggtggaacaggggcctcggagggtagagatgtgca

SEQ ID NO: 35986 - DNA, 80 bp, Homo sapiens
tgtttgccacactgggcattggggtggagatcaagctggtggaacaggggcctcggagggtagagatgtgcatcagcaaa

SEQ ID NO: 35987 - DNA, 78 bp, Homo sapiens
gggtggagatcaagctggtggaacaggggcctcggagggtagagatgtgcatcagcaaagagactcctgcccctgtgg

SEQ ID NO: 35988 - DNA, 80 bp, Homo sapiens
ggaacaggggcctcggagggtagagatgtgcatcagcaaagagactcctgcccctgtggtgcctccagagccattgccca

SEQ ID NO: 35989 - DNA, 84 bp, Homo sapiens
tcggagggtagagatgtgcatcagcaaagagactcctgcccctgtggtgcctccagagccattgcccagcctactgacttctga

SEQ ID NO: 35990 - DNA, 86 bp, Homo sapiens
tagagatgtgcatcagcaaagagactcctgcccctgtggtgcctccagagccattgcccagcctactgacttctgacgctggtgag

SEQ ID NO: 35991 - DNA, 85 bp, Homo sapiens
atcagcaaagagactcctgcccctgtggtgcctccagagccattgcccagcctactgacttctgacgctggtgagtctgcacaca

SEQ ID NO: 35992 - DNA, 83 bp, Homo sapiens
agagactcctgcccctgtggtgcctccagagccattgcccagcctactgacttctgacgctggtgagtctgcacacagccttg

SEQ ID NO: 35993 - DNA, 83 bp, Homo sapiens
ctgtggtgcctccagagccattgcccagcctactgacttctgacgctggtgagtctgcacacagccttggtctggggtcacga

SEQ ID NO: 35994 - DNA, 77 bp, Homo sapiens
ggacgtgatcattgttccctggggctaactcacccatctatcccagccccagtgttcctgactgagttgcagaacca

SEQ ID NO: 35995 - DNA, 75 bp, Homo sapiens
atcattgttccctggggctaactcacccatctatcccagccccagtgttcctgactgagttgcagaaccaagaag

SEQ ID NO: 35996 - DNA, 78 bp, Homo sapiens
tggggctaactcacccatctatcccagccccagtgttcctgactgagttgcagaaccaagaagtgcaggatgggtatc

SEQ ID NO: 35997 - DNA, 81 bp, Homo sapiens
tcacccatctatcccagccccagtgttcctgactgagttgcagaaccaagaagtgcaggatgggtatcctgtgagctttga

SEQ ID NO: 35998 - DNA, 80 bp, Homo sapiens
atctatcccagccccagtgttcctgactgagttgcagaaccaagaagtgcaggatgggtatcctgtgagctttgactgcg

SEQ ID NO: 35999 - DNA, 81 bp, Homo sapiens
agtgttcctgactgagttgcagaaccaagaagtgcaggatgggtatcctgtgagctttgactgcgtggtgacaggtcagcc

SEQ ID NO: 36000 - DNA, 84 bp, Homo sapiens
tcctgactgagttgcagaaccaagaagtgcaggatgggtatcctgtgagctttgactgcgtggtgacaggtcagcccatgccca

SEQ ID NO: 36001 - DNA, 81 bp, Homo sapiens
agaaccaagaagtgcaggatgggtatcctgtgagctttgactgcgtggtgacaggtcagcccatgcccagtgtgcgctggt

SEQ ID NO: 36002 - DNA, 82 bp, Homo sapiens
aagaagtgcaggatgggtatcctgtgagctttgactgcgtggtgacaggtcagcccatgcccagtgtgcgctggttcaagga

SEQ ID NO: 36003 - DNA, 80 bp, Homo sapiens
atgggtatcctgtgagctttgactgcgtggtgacaggtcagcccatgcccagtgtgcgctggttcaaggatgggaagttg

SEQ ID NO: 36004 - DNA, 81 bp, Homo sapiens
tcctgtgagctttgactgcgtggtgacaggtcagcccatgcccagtgtgcgctggttcaaggatgggaagttgttggagga

SEQ ID NO: 36005 - DNA, 82 bp, Homo sapiens
ttgactgcgtggtgacaggtcagcccatgcccagtgtgcgctggttcaaggatgggaagttgttggaggaggatgatcacta

SEQ ID NO: 36006 - DNA, 81 bp, Homo sapiens
acaggtcagcccatgcccagtgtgcgctggttcaaggatgggaagttgttggaggaggatgatcactacatgattaatgaa

SEQ ID NO: 36007 - DNA, 80 bp, Homo sapiens
ccatgcccagtgtgcgctggttcaaggatgggaagttgttggaggaggatgatcactacatgattaatgaagaccaacag

SEQ ID NO: 36008 - DNA, 78 bp, Homo sapiens
ccagtgtgcgctggttcaaggatgggaagttgttggaggaggatgatcactacatgattaatgaagaccaacagggtg

SEQ ID NO: 36009 - DNA, 84 bp, Homo sapiens
ttcaaggatgggaagttgttggaggaggatgatcactacatgattaatgaagaccaacagggtggccatcagctcatcatcaca

SEQ ID NO: 36010 - DNA, 83 bp, Homo sapiens
atgggaagttgttggaggaggatgatcactacatgattaatgaagaccaacagggtggccatcagctcatcatcacagccgtg

SEQ ID NO: 36011 - DNA, 88 bp, Homo sapiens
ttgttggaggaggatgatcactacatgattaatgaagaccaacagggtggccatcagctcatcatcacagccgtggtgccagcagaca

SEQ ID NO: 36012 - DNA, 88 bp, Homo sapiens
aggatgatcactacatgattaatgaagaccaacagggtggccatcagctcatcatcacagccgtggtgccagcagacatgggcgtcta

SEQ ID NO: 36013 - DNA, 87 bp, Homo sapiens
tacatgattaatgaagaccaacagggtggccatcagctcatcatcacagccgtggtgccagcagacatgggcgtctaccgctgcctg

SEQ ID NO: 36014 - DNA, 85 bp, Homo sapiens
atgaagaccaacagggtggccatcagctcatcatcacagccgtggtgccagcagacatgggcgtctaccgctgcctggccgagaa

SEQ ID NO: 36015 - DNA, 85 bp, Homo sapiens
aacagggtggccatcagctcatcatcacagccgtggtgccagcagacatgggcgtctaccgctgcctggccgagaacagcatggg

SEQ ID NO: 36016 - DNA, 85 bp, Homo sapiens
agctcatcatcacagccgtggtgccagcagacatgggcgtctaccgctgcctggccgagaacagcatgggtgtctcctccaccaa

SEQ ID NO: 36017 - DNA, 83 bp, Homo sapiens
atcatcacagccgtggtgccagcagacatgggcgtctaccgctgcctggccgagaacagcatgggtgtctcctccaccaaggc

SEQ ID NO: 36018 - DNA, 83 bp, Homo sapiens
gtgccagcagacatgggcgtctaccgctgcctggccgagaacagcatgggtgtctcctccaccaaggctgagctccgtgtgga

SEQ ID NO: 36019 - DNA, 81 bp, Homo sapiens
agacatgggcgtctaccgctgcctggccgagaacagcatgggtgtctcctccaccaaggctgagctccgtgtggactgtga

SEQ ID NO: 36020 - DNA, 82 bp, Homo sapiens
tctaccgctgcctggccgagaacagcatgggtgtctcctccaccaaggctgagctccgtgtggactgtgagtactgcgtctg

SEQ ID NO: 36021 - DNA, 79 bp, Homo sapiens
ctggccgagaacagcatgggtgtctcctccaccaaggctgagctccgtgtggactgtgagtactgcgtctggtttggtg

SEQ ID NO: 36022 - DNA, 78 bp, Homo sapiens
aacagcatgggtgtctcctccaccaaggctgagctccgtgtggactgtgagtactgcgtctggtttggtgtctccagg

SEQ ID NO: 36023 - DNA, 76 bp, Homo sapiens
atgggtgtctcctccaccaaggctgagctccgtgtggactgtgagtactgcgtctggtttggtgtctccagggtgg

SEQ ID NO: 36024 - DNA, 83 bp, Homo sapiens
tagcttatgctggggcagatgggatggcagaccttgctccagctcccctcttccttccccagtgacaagcacagactatgaca

SEQ ID NO: 36025 - DNA, 85 bp, Homo sapiens
cagatgggatggcagaccttgctccagctcccctcttccttccccagtgacaagcacagactatgacactgcagcagatgccacg

SEQ ID NO: 36026 - DNA, 85 bp, Homo sapiens
tggcagaccttgctccagctcccctcttccttccccagtgacaagcacagactatgacactgcagcagatgccacggagtcctca

SEQ ID NO: 36027 - DNA, 83 bp, Homo sapiens
ttgctccagctcccctcttccttccccagtgacaagcacagactatgacactgcagcagatgccacggagtcctcatcctact

SEQ ID NO: 36028 - DNA, 82 bp, Homo sapiens
ccctcttccttccccagtgacaagcacagactatgacactgcagcagatgccacggagtcctcatcctacttcagtgcccaa

SEQ ID NO: 36029 - DNA, 84 bp, Homo sapiens
ttccccagtgacaagcacagactatgacactgcagcagatgccacggagtcctcatcctacttcagtgcccaaggctacctgtc

SEQ ID NO: 36030 - DNA, 84 bp, Homo sapiens
agtgacaagcacagactatgacactgcagcagatgccacggagtcctcatcctacttcagtgcccaaggctacctgtccaggta

SEQ ID NO: 36031 - DNA, 82 bp, Homo sapiens
acagactatgacactgcagcagatgccacggagtcctcatcctacttcagtgcccaaggctacctgtccaggtaggggctgc

SEQ ID NO: 36032 - DNA, 80 bp, Homo sapiens
acactgcagcagatgccacggagtcctcatcctacttcagtgcccaaggctacctgtccaggtaggggctgccagaggtg

SEQ ID NO: 36033 - DNA, 78 bp, Homo sapiens
agatgccacggagtcctcatcctacttcagtgcccaaggctacctgtccaggtaggggctgccagaggtgggctgtgc

SEQ ID NO: 36034 - DNA, 78 bp, Homo sapiens
tcctcatcctacttcagtgcccaaggctacctgtccaggtaggggctgccagaggtgggctgtgccccatggactgac

SEQ ID NO: 36035 - DNA, 77 bp, Homo sapiens
tacttcagtgcccaaggctacctgtccaggtaggggctgccagaggtgggctgtgccccatggactgacgtcgcagg

SEQ ID NO: 36036 - DNA, 75 bp, Homo sapiens
ccctcgatgccctgctttatggctgaccccttttctgttctgccagccgggagcaggagggaacagagtccacca

SEQ ID NO: 36037 - DNA, 77 bp, Homo sapiens
atgccctgctttatggctgaccccttttctgttctgccagccgggagcaggagggaacagagtccaccactgatgag

SEQ ID NO: 36038 - DNA, 78 bp, Homo sapiens
tttatggctgaccccttttctgttctgccagccgggagcaggagggaacagagtccaccactgatgagggccagctgc

SEQ ID NO: 36039 - DNA, 77 bp, Homo sapiens
cttttctgttctgccagccgggagcaggagggaacagagtccaccactgatgagggccagctgccccaggtggtgga

SEQ ID NO: 36040 - DNA, 81 bp, Homo sapiens
tgttctgccagccgggagcaggagggaacagagtccaccactgatgagggccagctgccccaggtggtggaggagctgaga

SEQ ID NO: 36041 - DNA, 79 bp, Homo sapiens
ggagcaggagggaacagagtccaccactgatgagggccagctgccccaggtggtggaggagctgagagacctccaggtg

SEQ ID NO: 36042 - DNA, 77 bp, Homo sapiens
ggagggaacagagtccaccactgatgagggccagctgccccaggtggtggaggagctgagagacctccaggtggccc

SEQ ID NO: 36043 - DNA, 79 bp, Homo sapiens
gtccaccactgatgagggccagctgccccaggtggtggaggagctgagagacctccaggtggcccctggcacacgcctg

SEQ ID NO: 36044 - DNA, 79 bp, Homo sapiens
tgatgagggccagctgccccaggtggtggaggagctgagagacctccaggtggcccctggcacacgcctggccaagttc

SEQ ID NO: 36045 - DNA, 78 bp, Homo sapiens
tgccccaggtggtggaggagctgagagacctccaggtggcccctggcacacgcctggccaagttccagctcaaggtga

SEQ ID NO: 36046 - DNA, 78 bp, Homo sapiens
tggtggaggagctgagagacctccaggtggcccctggcacacgcctggccaagttccagctcaaggtgaaaggtgaga

SEQ ID NO: 36047 - DNA, 76 bp, Homo sapiens
aggagctgagagacctccaggtggcccctggcacacgcctggccaagttccagctcaaggtgaaaggtgagaagga

SEQ ID NO: 36048 - DNA, 73 bp, Homo sapiens
agacctccaggtggcccctggcacacgcctggccaagttccagctcaaggtgaaaggtgagaaggagagggag

SEQ ID NO: 36049 - DNA, 75 bp, Homo sapiens
gtggcccctggcacacgcctggccaagttccagctcaaggtgaaaggtgagaaggagagggagtggggacacagc

SEQ ID NO: 36050 - DNA, 73 bp, Homo sapiens
agtgcccgtgggtggtagcccaggctgaccactcctcctcccgtggcccaggctaccctgctcccagattata

SEQ ID NO: 36051 - DNA, 75 bp, Homo sapiens
tggtagcccaggctgaccactcctcctcccgtggcccaggctaccctgctcccagattatactggttcaaagatg

SEQ ID NO: 36052 - DNA, 74 bp, Homo sapiens
aggctgaccactcctcctcccgtggcccaggctaccctgctcccagattatactggttcaaagatggccagccc

SEQ ID NO: 36053 - DNA, 74 bp, Homo sapiens
actcctcctcccgtggcccaggctaccctgctcccagattatactggttcaaagatggccagcccctgaccgca

SEQ ID NO: 36054 - DNA, 82 bp, Homo sapiens
gcccaggctaccctgctcccagattatactggttcaaagatggccagcccctgaccgcatctgcccacatccgcatgactga

SEQ ID NO: 36055 - DNA, 82 bp, Homo sapiens
taccctgctcccagattatactggttcaaagatggccagcccctgaccgcatctgcccacatccgcatgactgacaagaaga

SEQ ID NO: 36056 - DNA, 82 bp, Homo sapiens
agattatactggttcaaagatggccagcccctgaccgcatctgcccacatccgcatgactgacaagaagatcctgcacaccc

SEQ ID NO: 36057 - DNA, 83 bp, Homo sapiens
atactggttcaaagatggccagcccctgaccgcatctgcccacatccgcatgactgacaagaagatcctgcacaccctggaga

SEQ ID NO: 36058 - DNA, 85 bp, Homo sapiens
aaagatggccagcccctgaccgcatctgcccacatccgcatgactgacaagaagatcctgcacaccctggagatcatctccgtca

SEQ ID NO: 36059 - DNA, 83 bp, Homo sapiens
ctgaccgcatctgcccacatccgcatgactgacaagaagatcctgcacaccctggagatcatctccgtcacccgggaggactc

SEQ ID NO: 36060 - DNA, 83 bp, Homo sapiens
tctgcccacatccgcatgactgacaagaagatcctgcacaccctggagatcatctccgtcacccgggaggactctggccagta

SEQ ID NO: 36061 - DNA, 84 bp, Homo sapiens
tccgcatgactgacaagaagatcctgcacaccctggagatcatctccgtcacccgggaggactctggccagtatgcagcctata

SEQ ID NO: 36062 - DNA, 83 bp, Homo sapiens
actgacaagaagatcctgcacaccctggagatcatctccgtcacccgggaggactctggccagtatgcagcctatatcagcaa

SEQ ID NO: 36063 - DNA, 83 bp, Homo sapiens
aagatcctgcacaccctggagatcatctccgtcacccgggaggactctggccagtatgcagcctatatcagcaatgccatggg

SEQ ID NO: 36064 - DNA, 83 bp, Homo sapiens
accctggagatcatctccgtcacccgggaggactctggccagtatgcagcctatatcagcaatgccatgggtgctgcctactc

SEQ ID NO: 36065 - DNA, 84 bp, Homo sapiens
agatcatctccgtcacccgggaggactctggccagtatgcagcctatatcagcaatgccatgggtgctgcctactcgtctgccc

SEQ ID NO: 36066 - DNA, 84 bp, Homo sapiens
tcacccgggaggactctggccagtatgcagcctatatcagcaatgccatgggtgctgcctactcgtctgcccggctgctggttc

SEQ ID NO: 36067 - DNA, 85 bp, Homo sapiens
actctggccagtatgcagcctatatcagcaatgccatgggtgctgcctactcgtctgcccggctgctggttcgaggtgggtgctc

SEQ ID NO: 36068 - DNA, 84 bp, Homo sapiens
ccagtatgcagcctatatcagcaatgccatgggtgctgcctactcgtctgcccggctgctggttcgaggtgggtgctctgaggg

SEQ ID NO: 36069 - DNA, 80 bp, Homo sapiens
agcctatatcagcaatgccatgggtgctgcctactcgtctgcccggctgctggttcgaggtgggtgctctgaggggccgg

SEQ ID NO: 36070 - DNA, 78 bp, Homo sapiens
aatgccatgggtgctgcctactcgtctgcccggctgctggttcgaggtgggtgctctgaggggccgggcagagacttg

SEQ ID NO: 36071 - DNA, 76 bp, Homo sapiens
tgggtgctgcctactcgtctgcccggctgctggttcgaggtgggtgctctgaggggccgggcagagacttgggccc

SEQ ID NO: 36072 - DNA, 76 bp, Homo sapiens
caggcacccgcacagcgccgggtaggagccacggtgggggcctgtgtgtgctgggtgtctgactctagtgcctctt

SEQ ID NO: 36073 - DNA, 75 bp, Homo sapiens
acccgcacagcgccgggtaggagccacggtgggggcctgtgtgtgctgggtgtctgactctagtgcctctttcag

SEQ ID NO: 36074 - DNA, 79 bp, Homo sapiens
ggtaggagccacggtgggggcctgtgtgtgctgggtgtctgactctagtgcctctttcaggccctgatgagccagaaga

SEQ ID NO: 36075 - DNA, 82 bp, Homo sapiens
acggtgggggcctgtgtgtgctgggtgtctgactctagtgcctctttcaggccctgatgagccagaagagaagcctgcatca

SEQ ID NO: 36076 - DNA, 85 bp, Homo sapiens
cctgtgtgtgctgggtgtctgactctagtgcctctttcaggccctgatgagccagaagagaagcctgcatcaggtgaggcagccc

SEQ ID NO: 36077 - DNA, 86 bp, Homo sapiens
gtgtgctgggtgtctgactctagtgcctctttcaggccctgatgagccagaagagaagcctgcatcaggtgaggcagccccagaca

SEQ ID NO: 36078 - DNA, 86 bp, Homo sapiens
tgtctgactctagtgcctctttcaggccctgatgagccagaagagaagcctgcatcaggtgaggcagccccagacaggcagggaga

SEQ ID NO: 36079 - DNA, 83 bp, Homo sapiens
tagtgcctctttcaggccctgatgagccagaagagaagcctgcatcaggtgaggcagccccagacaggcagggagaggccagg

SEQ ID NO: 36080 - DNA, 83 bp, Homo sapiens
ttcaggccctgatgagccagaagagaagcctgcatcaggtgaggcagccccagacaggcagggagaggccaggtggccatggg

SEQ ID NO: 36081 - DNA, 83 bp, Homo sapiens
agccagaagagaagcctgcatcaggtgaggcagccccagacaggcagggagaggccaggtggccatgggtgctgagggcctga

SEQ ID NO: 36082 - DNA, 82 bp, Homo sapiens
aagagaagcctgcatcaggtgaggcagccccagacaggcagggagaggccaggtggccatgggtgctgagggcctgagccta

SEQ ID NO: 36083 - DNA, 85 bp, Homo sapiens
gtgggggctgtgccgaggtctctgccagccagcctgtgtcccctagatgtgcatgagcagctggtgccgccccgaatgctggaga

SEQ ID NO: 36084 - DNA, 85 bp, Homo sapiens
ctgtgccgaggtctctgccagccagcctgtgtcccctagatgtgcatgagcagctggtgccgccccgaatgctggagaggttcac

SEQ ID NO: 36085 - DNA, 82 bp, Homo sapiens
tctgccagccagcctgtgtcccctagatgtgcatgagcagctggtgccgccccgaatgctggagaggttcacccccaagaaa

SEQ ID NO: 36086 - DNA, 79 bp, Homo sapiens
agcctgtgtcccctagatgtgcatgagcagctggtgccgccccgaatgctggagaggttcacccccaagaaagtgaaga

SEQ ID NO: 36087 - DNA, 78 bp, Homo sapiens
ccctagatgtgcatgagcagctggtgccgccccgaatgctggagaggttcacccccaagaaagtgaagaaaggctcca

SEQ ID NO: 36088 - DNA, 80 bp, Homo sapiens
atgtgcatgagcagctggtgccgccccgaatgctggagaggttcacccccaagaaagtgaagaaaggctccagcatcacc

SEQ ID NO: 36089 - DNA, 75 bp, Homo sapiens
agctggtgccgccccgaatgctggagaggttcacccccaagaaagtgaagaaaggctccagcatcaccttctctg

SEQ ID NO: 36090 - DNA, 74 bp, Homo sapiens
cccgaatgctggagaggttcacccccaagaaagtgaagaaaggctccagcatcaccttctctgtgaaggtagaa

SEQ ID NO: 36091 - DNA, 74 bp, Homo sapiens
atgctggagaggttcacccccaagaaagtgaagaaaggctccagcatcaccttctctgtgaaggtagaaggtaa

SEQ ID NO: 36092 - DNA, 71 bp, Homo sapiens
ttcacccccaagaaagtgaagaaaggctccagcatcaccttctctgtgaaggtagaaggtaaggcgtttcc

SEQ ID NO: 36093 - DNA, 75 bp, Homo sapiens
aagtgaagaaaggctccagcatcaccttctctgtgaaggtagaaggtaaggcgtttcctgcccgcagctatggaa

SEQ ID NO: 36094 - DNA, 76 bp, Homo sapiens
aagaaaggctccagcatcaccttctctgtgaaggtagaaggtaaggcgtttcctgcccgcagctatggaaagatca

SEQ ID NO: 36095 - DNA, 71 bp, Homo sapiens
agaccccgctcctggcggggtgcacccaccacctcctgcctgcccctaggacgcccggtgcccaccgtgca

SEQ ID NO: 36096 - DNA, 74 bp, Homo sapiens
tcctggcggggtgcacccaccacctcctgcctgcccctaggacgcccggtgcccaccgtgcactggctcaggga

SEQ ID NO: 36097 - DNA, 77 bp, Homo sapiens
gtgcacccaccacctcctgcctgcccctaggacgcccggtgcccaccgtgcactggctcagggaggaggctgagaga

SEQ ID NO: 36098 - DNA, 79 bp, Homo sapiens
tcctgcctgcccctaggacgcccggtgcccaccgtgcactggctcagggaggaggctgagagaggcgtgctgtggattg

SEQ ID NO: 36099 - DNA, 78 bp, Homo sapiens
ccctaggacgcccggtgcccaccgtgcactggctcagggaggaggctgagagaggcgtgctgtggattggccctgaca

SEQ ID NO: 36100 - DNA, 78 bp, Homo sapiens
cccggtgcccaccgtgcactggctcagggaggaggctgagagaggcgtgctgtggattggccctgacacaccgggcta

SEQ ID NO: 36101 - DNA, 79 bp, Homo sapiens
accgtgcactggctcagggaggaggctgagagaggcgtgctgtggattggccctgacacaccgggctacaccgtggcca

SEQ ID NO: 36102 - DNA, 82 bp, Homo sapiens
actggctcagggaggaggctgagagaggcgtgctgtggattggccctgacacaccgggctacaccgtggccagctctgcgca

SEQ ID NO: 36103 - DNA, 85 bp, Homo sapiens
ggaggctgagagaggcgtgctgtggattggccctgacacaccgggctacaccgtggccagctctgcgcagcagcacagcctggtc

SEQ ID NO: 36104 - DNA, 87 bp, Homo sapiens
tgagagaggcgtgctgtggattggccctgacacaccgggctacaccgtggccagctctgcgcagcagcacagcctggtcctgctgga

SEQ ID NO: 36105 - DNA, 83 bp, Homo sapiens
cgtgctgtggattggccctgacacaccgggctacaccgtggccagctctgcgcagcagcacagcctggtcctgctggacgtgg

SEQ ID NO: 36106 - DNA, 83 bp, Homo sapiens
attggccctgacacaccgggctacaccgtggccagctctgcgcagcagcacagcctggtcctgctggacgtgggccggcagca

SEQ ID NO: 36107 - DNA, 81 bp, Homo sapiens
accgggctacaccgtggccagctctgcgcagcagcacagcctggtcctgctggacgtgggccggcagcaccagggcaccta

SEQ ID NO: 36108 - DNA, 88 bp, Homo sapiens
tacaccgtggccagctctgcgcagcagcacagcctggtcctgctggacgtgggccggcagcaccagggcacctacacatgcattgcca

SEQ ID NO: 36109 - DNA, 88 bp, Homo sapiens
agctctgcgcagcagcacagcctggtcctgctggacgtgggccggcagcaccagggcacctacacatgcattgccagcaacgctgccg

SEQ ID NO: 36110 - DNA, 85 bp, Homo sapiens
agcagcacagcctggtcctgctggacgtgggccggcagcaccagggcacctacacatgcattgccagcaacgctgccggccaggc

SEQ ID NO: 36111 - DNA, 81 bp, Homo sapiens
agcctggtcctgctggacgtgggccggcagcaccagggcacctacacatgcattgccagcaacgctgccggccaggccctc

SEQ ID NO: 36112 - DNA, 85 bp, Homo sapiens
tggacgtgggccggcagcaccagggcacctacacatgcattgccagcaacgctgccggccaggccctctgctccgccagcctgca

SEQ ID NO: 36113 - DNA, 83 bp, Homo sapiens
ccggcagcaccagggcacctacacatgcattgccagcaacgctgccggccaggccctctgctccgccagcctgcacgtctcgg

SEQ ID NO: 36114 - DNA, 82 bp, Homo sapiens
agggcacctacacatgcattgccagcaacgctgccggccaggccctctgctccgccagcctgcacgtctcgggccgtgagtg

SEQ ID NO: 36115 - DNA, 80 bp, Homo sapiens
acctacacatgcattgccagcaacgctgccggccaggccctctgctccgccagcctgcacgtctcgggccgtgagtgggg

SEQ ID NO: 36116 - DNA, 75 bp, Homo sapiens
attgccagcaacgctgccggccaggccctctgctccgccagcctgcacgtctcgggccgtgagtgggggtggggg

SEQ ID NO: 36117 - DNA, 71 bp, Homo sapiens
ggccaggccctctgctccgccagcctgcacgtctcgggccgtgagtgggggtggggggatggggggatggg

SEQ ID NO: 36118 - DNA, 79 bp, Homo sapiens
agtccagatctggaatcagatgtgctggggttgggagcaccgtctgatggcttgccggtcctcctgacagtgcctaagg

SEQ ID NO: 36119 - DNA, 80 bp, Homo sapiens
ctggaatcagatgtgctggggttgggagcaccgtctgatggcttgccggtcctcctgacagtgcctaaggtggaggagca

SEQ ID NO: 36120 - DNA, 77 bp, Homo sapiens
atgtgctggggttgggagcaccgtctgatggcttgccggtcctcctgacagtgcctaaggtggaggagcaggagaaa

SEQ ID NO: 36121 - DNA, 76 bp, Homo sapiens
gttgggagcaccgtctgatggcttgccggtcctcctgacagtgcctaaggtggaggagcaggagaaagtgaaggaa

SEQ ID NO: 36122 - DNA, 77 bp, Homo sapiens
tgatggcttgccggtcctcctgacagtgcctaaggtggaggagcaggagaaagtgaaggaagcgctgatttccactt

SEQ ID NO: 36123 - DNA, 74 bp, Homo sapiens
cttgccggtcctcctgacagtgcctaaggtggaggagcaggagaaagtgaaggaagcgctgatttccactttcc

SEQ ID NO: 36124 - DNA, 78 bp, Homo sapiens
tcctgacagtgcctaaggtggaggagcaggagaaagtgaaggaagcgctgatttccactttcctgcaggggtgagtga

SEQ ID NO: 36125 - DNA, 74 bp, Homo sapiens
taaggtggaggagcaggagaaagtgaaggaagcgctgatttccactttcctgcaggggtgagtgagggttgccc

SEQ ID NO: 36126 - DNA, 74 bp, Homo sapiens
aggagcaggagaaagtgaaggaagcgctgatttccactttcctgcaggggtgagtgagggttgcccctccaggc

SEQ ID NO: 36127 - DNA, 73 bp, Homo sapiens
aagtgaaggaagcgctgatttccactttcctgcaggggtgagtgagggttgcccctccaggccagtccggtca

SEQ ID NO: 36128 - DNA, 72 bp, Homo sapiens
aaggaagcgctgatttccactttcctgcaggggtgagtgagggttgcccctccaggccagtccggtcagggc

SEQ ID NO: 36129 - DNA, 70 bp, Homo sapiens
atttccactttcctgcaggggtgagtgagggttgcccctccaggccagtccggtcagggccagggaggac

SEQ ID NO: 36130 - DNA, 70 bp, Homo sapiens
ataaggacagagggtggtggggtccagcccaggcctctcaggacacccccttcacctgtttaggaccaca

SEQ ID NO: 36131 - DNA, 72 bp, Homo sapiens
agggtggtggggtccagcccaggcctctcaggacacccccttcacctgtttaggaccacacaagccatctca

SEQ ID NO: 36132 - DNA, 75 bp, Homo sapiens
tccagcccaggcctctcaggacacccccttcacctgtttaggaccacacaagccatctcagcacaggggttggaa

SEQ ID NO: 36133 - DNA, 74 bp, Homo sapiens
gcctctcaggacacccccttcacctgtttaggaccacacaagccatctcagcacaggggttggaaactgcgagt

SEQ ID NO: 36134 - DNA, 73 bp, Homo sapiens
acacccccttcacctgtttaggaccacacaagccatctcagcacaggggttggaaactgcgagttttgctgac

SEQ ID NO: 36135 - DNA, 74 bp, Homo sapiens
ccttcacctgtttaggaccacacaagccatctcagcacaggggttggaaactgcgagttttgctgaccttggtg

SEQ ID NO: 36136 - DNA, 75 bp, Homo sapiens
tttaggaccacacaagccatctcagcacaggggttggaaactgcgagttttgctgaccttggtgggcagaggaaa

SEQ ID NO: 36137 - DNA, 76 bp, Homo sapiens
acacaagccatctcagcacaggggttggaaactgcgagttttgctgaccttggtgggcagaggaaaggtacagtca

SEQ ID NO: 36138 - DNA, 73 bp, Homo sapiens
tctcagcacaggggttggaaactgcgagttttgctgaccttggtgggcagaggaaaggtacagtcagggtggg

SEQ ID NO: 36139 - DNA, 75 bp, Homo sapiens
gggttggaaactgcgagttttgctgaccttggtgggcagaggaaaggtacagtcagggtgggtgcatgcttgtga

SEQ ID NO: 36140 - DNA, 75 bp, Homo sapiens
actgcgagttttgctgaccttggtgggcagaggaaaggtacagtcagggtgggtgcatgcttgtgaggggccagg

SEQ ID NO: 36141 - DNA, 77 bp, Homo sapiens
ttgctgaccttggtgggcagaggaaaggtacagtcagggtgggtgcatgcttgtgaggggccagggtggctgatccc

SEQ ID NO: 36142 - DNA, 81 bp, Homo sapiens
tatacatccgaggggcacgcagccacctgagcagagcgtttgtatccgcagaagagcctctggctgccaaggaggccctcg

SEQ ID NO: 36143 - DNA, 80 bp, Homo sapiens
cacgcagccacctgagcagagcgtttgtatccgcagaagagcctctggctgccaaggaggccctcggccacctgtccctc

SEQ ID NO: 36144 - DNA, 78 bp, Homo sapiens
acctgagcagagcgtttgtatccgcagaagagcctctggctgccaaggaggccctcggccacctgtccctcgctgagg

SEQ ID NO: 36145 - DNA, 78 bp, Homo sapiens
agagcgtttgtatccgcagaagagcctctggctgccaaggaggccctcggccacctgtccctcgctgaggtgggcaca

SEQ ID NO: 36146 - DNA, 79 bp, Homo sapiens
tgtatccgcagaagagcctctggctgccaaggaggccctcggccacctgtccctcgctgaggtgggcacagaggagttc

SEQ ID NO: 36147 - DNA, 77 bp, Homo sapiens
aagagcctctggctgccaaggaggccctcggccacctgtccctcgctgaggtgggcacagaggagttcctgcagaaa

SEQ ID NO: 36148 - DNA, 77 bp, Homo sapiens
tgccaaggaggccctcggccacctgtccctcgctgaggtgggcacagaggagttcctgcagaaactgacctcccaga

SEQ ID NO: 36149 - DNA, 78 bp, Homo sapiens
aggccctcggccacctgtccctcgctgaggtgggcacagaggagttcctgcagaaactgacctcccagatcactgaga

SEQ ID NO: 36150 - DNA, 79 bp, Homo sapiens
acctgtccctcgctgaggtgggcacagaggagttcctgcagaaactgacctcccagatcactgagatggtatcggccaa

SEQ ID NO: 36151 - DNA, 83 bp, Homo sapiens
gctgaggtgggcacagaggagttcctgcagaaactgacctcccagatcactgagatggtatcggccaagatcacgcagggtga

SEQ ID NO: 36152 - DNA, 80 bp, Homo sapiens
gtgggcacagaggagttcctgcagaaactgacctcccagatcactgagatggtatcggccaagatcacgcagggtgaggg

SEQ ID NO: 36153 - DNA, 81 bp, Homo sapiens
aggagttcctgcagaaactgacctcccagatcactgagatggtatcggccaagatcacgcagggtgaggggcagcagccca

SEQ ID NO: 36154 - DNA, 81 bp, Homo sapiens
agaaactgacctcccagatcactgagatggtatcggccaagatcacgcagggtgaggggcagcagcccatgtgccagggtc

SEQ ID NO: 36155 - DNA, 79 bp, Homo sapiens
acctcccagatcactgagatggtatcggccaagatcacgcagggtgaggggcagcagcccatgtgccagggtccctggg

SEQ ID NO: 36156 - DNA, 83 bp, Homo sapiens
cctggagagccagaggcaggccagggtgtcatgatccttgcacccccagccaagctgcaggtgcccggaggtgacagtgatga

SEQ ID NO: 36157 - DNA, 81 bp, Homo sapiens
aggcaggccagggtgtcatgatccttgcacccccagccaagctgcaggtgcccggaggtgacagtgatgaggactccaaga

SEQ ID NO: 36158 - DNA, 83 bp, Homo sapiens
agggtgtcatgatccttgcacccccagccaagctgcaggtgcccggaggtgacagtgatgaggactccaagacaccatctgca

SEQ ID NO: 36159 - DNA, 81 bp, Homo sapiens
atgatccttgcacccccagccaagctgcaggtgcccggaggtgacagtgatgaggactccaagacaccatctgcatccccc

SEQ ID NO: 36160 - DNA, 80 bp, Homo sapiens
ccccagccaagctgcaggtgcccggaggtgacagtgatgaggactccaagacaccatctgcatccccccgccatggccga

SEQ ID NO: 36161 - DNA, 81 bp, Homo sapiens
aagctgcaggtgcccggaggtgacagtgatgaggactccaagacaccatctgcatccccccgccatggccgatcacggcca

SEQ ID NO: 36162 - DNA, 79 bp, Homo sapiens
aggtgcccggaggtgacagtgatgaggactccaagacaccatctgcatccccccgccatggccgatcacggccatcctc

SEQ ID NO: 36163 - DNA, 82 bp, Homo sapiens
acagtgatgaggactccaagacaccatctgcatccccccgccatggccgatcacggccatcctccagcatccaggagtcttc

SEQ ID NO: 36164 - DNA, 82 bp, Homo sapiens
atgaggactccaagacaccatctgcatccccccgccatggccgatcacggccatcctccagcatccaggagtcttcctcaga

SEQ ID NO: 36165 - DNA, 81 bp, Homo sapiens
aagacaccatctgcatccccccgccatggccgatcacggccatcctccagcatccaggagtcttcctcagagtcagaggac

SEQ ID NO: 36166 - DNA, 82 bp, Homo sapiens
atctgcatccccccgccatggccgatcacggccatcctccagcatccaggagtcttcctcagagtcagaggacggcgatgcc

SEQ ID NO: 36167 - DNA, 80 bp, Homo sapiens
ccatggccgatcacggccatcctccagcatccaggagtcttcctcagagtcagaggacggcgatgcccgaggcgaggtgg

SEQ ID NO: 36168 - DNA, 80 bp, Homo sapiens
atcacggccatcctccagcatccaggagtcttcctcagagtcagaggacggcgatgcccgaggcgaggtgggcggctgga

SEQ ID NO: 36169 - DNA, 77 bp, Homo sapiens
atcctccagcatccaggagtcttcctcagagtcagaggacggcgatgcccgaggcgaggtgggcggctggaaccctc

SEQ ID NO: 36170 - DNA, 78 bp, Homo sapiens
agcatccaggagtcttcctcagagtcagaggacggcgatgcccgaggcgaggtgggcggctggaaccctctgggagca

SEQ ID NO: 36171 - DNA, 75 bp, Homo sapiens
agtcttcctcagagtcagaggacggcgatgcccgaggcgaggtgggcggctggaaccctctgggagcagggcagg

SEQ ID NO: 36172 - DNA, 78 bp, Homo sapiens
gcacctcccgggtctcaccacttcagcacccccatccctctctcagatctttgacatctacgtggtcaccgctgacta

SEQ ID NO: 36173 - DNA, 78 bp, Homo sapiens
tcccgggtctcaccacttcagcacccccatccctctctcagatctttgacatctacgtggtcaccgctgactacctgc

SEQ ID NO: 36174 - DNA, 75 bp, Homo sapiens
accacttcagcacccccatccctctctcagatctttgacatctacgtggtcaccgctgactacctgcccctaggg

SEQ ID NO: 36175 - DNA, 81 bp, Homo sapiens
cccatccctctctcagatctttgacatctacgtggtcaccgctgactacctgcccctaggggctgagcaggatgccatcac

SEQ ID NO: 36176 - DNA, 82 bp, Homo sapiens
tctcagatctttgacatctacgtggtcaccgctgactacctgcccctaggggctgagcaggatgccatcacgctgcgggaag

SEQ ID NO: 36177 - DNA, 80 bp, Homo sapiens
tttgacatctacgtggtcaccgctgactacctgcccctaggggctgagcaggatgccatcacgctgcgggaaggccagta

SEQ ID NO: 36178 - DNA, 80 bp, Homo sapiens
atctacgtggtcaccgctgactacctgcccctaggggctgagcaggatgccatcacgctgcgggaaggccagtatgtgga

SEQ ID NO: 36179 - DNA, 81 bp, Homo sapiens
accgctgactacctgcccctaggggctgagcaggatgccatcacgctgcgggaaggccagtatgtggaggtcctggatgca

SEQ ID NO: 36180 - DNA, 81 bp, Homo sapiens
tacctgcccctaggggctgagcaggatgccatcacgctgcgggaaggccagtatgtggaggtcctggatgcagcccaccca

SEQ ID NO: 36181 - DNA, 86 bp, Homo sapiens
ggctgagcaggatgccatcacgctgcgggaaggccagtatgtggaggtcctggatgcagcccacccactgcgctggcttgtccgca

SEQ ID NO: 36182 - DNA, 82 bp, Homo sapiens
aggatgccatcacgctgcgggaaggccagtatgtggaggtcctggatgcagcccacccactgcgctggcttgtccgcaccaa

SEQ ID NO: 36183 - DNA, 80 bp, Homo sapiens
atcacgctgcgggaaggccagtatgtggaggtcctggatgcagcccacccactgcgctggcttgtccgcaccaagcccac

SEQ ID NO: 36184 - DNA, 78 bp, Homo sapiens
gggaaggccagtatgtggaggtcctggatgcagcccacccactgcgctggcttgtccgcaccaagcccaccaagtcca

SEQ ID NO: 36185 - DNA, 78 bp, Homo sapiens
agtatgtggaggtcctggatgcagcccacccactgcgctggcttgtccgcaccaagcccaccaagtccagcccctcac

SEQ ID NO: 36186 - DNA, 80 bp, Homo sapiens
tggatgcagcccacccactgcgctggcttgtccgcaccaagcccaccaagtccagcccctcacggcagggctgggtgtca

SEQ ID NO: 36187 - DNA, 76 bp, Homo sapiens
agcccacccactgcgctggcttgtccgcaccaagcccaccaagtccagcccctcacggcagggctgggtgtcacca

SEQ ID NO: 36188 - DNA, 76 bp, Homo sapiens
actgcgctggcttgtccgcaccaagcccaccaagtccagcccctcacggcagggctgggtgtcaccagcctacctg

SEQ ID NO: 36189 - DNA, 74 bp, Homo sapiens
cttgtccgcaccaagcccaccaagtccagcccctcacggcagggctgggtgtcaccagcctacctggacaggag

SEQ ID NO: 36190 - DNA, 74 bp, Homo sapiens
aagcccaccaagtccagcccctcacggcagggctgggtgtcaccagcctacctggacaggaggctcaaggtatc

SEQ ID NO: 36191 - DNA, 76 bp, Homo sapiens
aagtccagcccctcacggcagggctgggtgtcaccagcctacctggacaggaggctcaaggtatctgaatggccag

SEQ ID NO: 36192 - DNA, 76 bp, Homo sapiens
ccctcacggcagggctgggtgtcaccagcctacctggacaggaggctcaaggtatctgaatggccaggcaggaggg

SEQ ID NO: 36193 - DNA, 75 bp, Homo sapiens
agggctgggtgtcaccagcctacctggacaggaggctcaaggtatctgaatggccaggcaggaggggtcctcagg

SEQ ID NO: 36194 - DNA, 73 bp, Homo sapiens
cccgcggggcagggccagagctcagtaccccaacagaaaactcctgtccctcaccagctgtcacctgagtggg

SEQ ID NO: 36195 - DNA, 74 bp, Homo sapiens
agggccagagctcagtaccccaacagaaaactcctgtccctcaccagctgtcacctgagtggggggccgctgag

SEQ ID NO: 36196 - DNA, 73 bp, Homo sapiens
tcagtaccccaacagaaaactcctgtccctcaccagctgtcacctgagtggggggccgctgaggcccctgagt

SEQ ID NO: 36197 - DNA, 71 bp, Homo sapiens
aacagaaaactcctgtccctcaccagctgtcacctgagtggggggccgctgaggcccctgagttccctggg

SEQ ID NO: 36198 - DNA, 72 bp, Homo sapiens
aaactcctgtccctcaccagctgtcacctgagtggggggccgctgaggcccctgagttccctggggaggctg

SEQ ID NO: 36199 - DNA, 75 bp, Homo sapiens
accagctgtcacctgagtggggggccgctgaggcccctgagttccctggggaggctgtgtctgaagacgaataca

SEQ ID NO: 36200 - DNA, 75 bp, Homo sapiens
tgtcacctgagtggggggccgctgaggcccctgagttccctggggaggctgtgtctgaagacgaatacaaggcaa

SEQ ID NO: 36201 - DNA, 76 bp, Homo sapiens
ggggccgctgaggcccctgagttccctggggaggctgtgtctgaagacgaatacaaggcaaggctgaggtgagtga

SEQ ID NO: 36202 - DNA, 76 bp, Homo sapiens
ctgaggcccctgagttccctggggaggctgtgtctgaagacgaatacaaggcaaggctgaggtgagtgactgccgg

SEQ ID NO: 36203 - DNA, 74 bp, Homo sapiens
agttccctggggaggctgtgtctgaagacgaatacaaggcaaggctgaggtgagtgactgccgggccggaggtg

SEQ ID NO: 36204 - DNA, 80 bp, Homo sapiens
gaggctgtgtctgaagacgaatacaaggcaaggctgaggtgagtgactgccgggccggaggtggtggcactggcatccca

SEQ ID NO: 36205 - DNA, 80 bp, Homo sapiens
tgtgtctgaagacgaatacaaggcaaggctgaggtgagtgactgccgggccggaggtggtggcactggcatcccaccagc

SEQ ID NO: 36206 - DNA, 77 bp, Homo sapiens
acgggaagcaggagctccgtggtcccttacggcagccccctcctgcccagctctgtgatccaggagctgctgagttc

SEQ ID NO: 36207 - DNA, 79 bp, Homo sapiens
aggagctccgtggtcccttacggcagccccctcctgcccagctctgtgatccaggagctgctgagttctgagcaggcct

SEQ ID NO: 36208 - DNA, 82 bp, Homo sapiens
ccttacggcagccccctcctgcccagctctgtgatccaggagctgctgagttctgagcaggccttcgtggaggagctgcagt

SEQ ID NO: 36209 - DNA, 86 bp, Homo sapiens
agccccctcctgcccagctctgtgatccaggagctgctgagttctgagcaggccttcgtggaggagctgcagttcctgcagagcca

SEQ ID NO: 36210 - DNA, 90 bp, Homo sapiens
tgcccagctctgtgatccaggagctgctgagttctgagcaggccttcgtggaggagctgcagttcctgcagagccaccacctgcagcacc

SEQ ID NO: 36211 - DNA, 89 bp, Homo sapiens
ctctgtgatccaggagctgctgagttctgagcaggccttcgtggaggagctgcagttcctgcagagccaccacctgcagcacctggagc

SEQ ID NO: 36212 - DNA, 87 bp, Homo sapiens
ccaggagctgctgagttctgagcaggccttcgtggaggagctgcagttcctgcagagccaccacctgcagcacctggagcgctgccc

SEQ ID NO: 36213 - DNA, 85 bp, Homo sapiens
ttctgagcaggccttcgtggaggagctgcagttcctgcagagccaccacctgcagcacctggagcgctgcccccacgtgcccata

SEQ ID NO: 36214 - DNA, 83 bp, Homo sapiens
aggccttcgtggaggagctgcagttcctgcagagccaccacctgcagcacctggagcgctgcccccacgtgcccatagctgtg

SEQ ID NO: 36215 - DNA, 83 bp, Homo sapiens
aggagctgcagttcctgcagagccaccacctgcagcacctggagcgctgcccccacgtgcccatagctgtggccggccagaag

SEQ ID NO: 36216 - DNA, 83 bp, Homo sapiens
agttcctgcagagccaccacctgcagcacctggagcgctgcccccacgtgcccatagctgtggccggccagaaggcagtcatc

SEQ ID NO: 36217 - DNA, 82 bp, Homo sapiens
agccaccacctgcagcacctggagcgctgcccccacgtgcccatagctgtggccggccagaaggcagtcatcttccgcaatg

SEQ ID NO: 36218 - DNA, 84 bp, Homo sapiens
tgcagcacctggagcgctgcccccacgtgcccatagctgtggccggccagaaggcagtcatcttccgcaatgtgcgggacatcg

SEQ ID NO: 36219 - DNA, 80 bp, Homo sapiens
acctggagcgctgcccccacgtgcccatagctgtggccggccagaaggcagtcatcttccgcaatgtgcgggacatcggc

SEQ ID NO: 36220 - DNA, 80 bp, Homo sapiens
ccccacgtgcccatagctgtggccggccagaaggcagtcatcttccgcaatgtgcgggacatcggccgcttccacagcag

SEQ ID NO: 36221 - DNA, 80 bp, Homo sapiens
cgtgcccatagctgtggccggccagaaggcagtcatcttccgcaatgtgcgggacatcggccgcttccacagcaggtggg

SEQ ID NO: 36222 - DNA, 77 bp, Homo sapiens
ctgtggccggccagaaggcagtcatcttccgcaatgtgcgggacatcggccgcttccacagcaggtgggtgggtggg

SEQ ID NO: 36223 - DNA, 79 bp, Homo sapiens
agaaggcagtcatcttccgcaatgtgcgggacatcggccgcttccacagcaggtgggtgggtggggccacacacacaca

SEQ ID NO: 36224 - DNA, 85 bp, Homo sapiens
aggctatggggcgcaggctgagtcctgatgccatcccccttcacagcagcttcctgcaggagttgcagcagtgcgacacggacga

SEQ ID NO: 36225 - DNA, 86 bp, Homo sapiens
gcgcaggctgagtcctgatgccatcccccttcacagcagcttcctgcaggagttgcagcagtgcgacacggacgacgacgtggcca

SEQ ID NO: 36226 - DNA, 85 bp, Homo sapiens
agtcctgatgccatcccccttcacagcagcttcctgcaggagttgcagcagtgcgacacggacgacgacgtggccatgtgcttca

SEQ ID NO: 36227 - DNA, 85 bp, Homo sapiens
atgccatcccccttcacagcagcttcctgcaggagttgcagcagtgcgacacggacgacgacgtggccatgtgcttcatcaagaa

SEQ ID NO: 36228 - DNA, 84 bp, Homo sapiens
tcacagcagcttcctgcaggagttgcagcagtgcgacacggacgacgacgtggccatgtgcttcatcaagaaccaggcggcctt

SEQ ID NO: 36229 - DNA, 83 bp, Homo sapiens
ttcctgcaggagttgcagcagtgcgacacggacgacgacgtggccatgtgcttcatcaagaaccaggcggcctttgagcagta

SEQ ID NO: 36230 - DNA, 77 bp, Homo sapiens
agtgcgacacggacgacgacgtggccatgtgcttcatcaagaaccaggcggcctttgagcagtacctggagttcctg

SEQ ID NO: 36231 - DNA, 75 bp, Homo sapiens
acacggacgacgacgtggccatgtgcttcatcaagaaccaggcggcctttgagcagtacctggagttcctggtgg

SEQ ID NO: 36232 - DNA, 79 bp, Homo sapiens
acgtggccatgtgcttcatcaagaaccaggcggcctttgagcagtacctggagttcctggtggggcgtgtgcaggctga

SEQ ID NO: 36233 - DNA, 78 bp, Homo sapiens
atgtgcttcatcaagaaccaggcggcctttgagcagtacctggagttcctggtggggcgtgtgcaggctgagtcggtg

SEQ ID NO: 36234 - DNA, 78 bp, Homo sapiens
tcaagaaccaggcggcctttgagcagtacctggagttcctggtggggcgtgtgcaggctgagtcggtggtcgtcagca

SEQ ID NO: 36235 - DNA, 77 bp, Homo sapiens
cctttgagcagtacctggagttcctggtggggcgtgtgcaggctgagtcggtggtcgtcagcacggccatccaggag

SEQ ID NO: 36236 - DNA, 76 bp, Homo sapiens
agtacctggagttcctggtggggcgtgtgcaggctgagtcggtggtcgtcagcacggccatccaggagttctacaa

SEQ ID NO: 36237 - DNA, 78 bp, Homo sapiens
agttcctggtggggcgtgtgcaggctgagtcggtggtcgtcagcacggccatccaggagttctacaaggtgcccatgc

SEQ ID NO: 36238 - DNA, 81 bp, Homo sapiens
gggcgtgtgcaggctgagtcggtggtcgtcagcacggccatccaggagttctacaaggtgcccatgcctgaactcatgggc

SEQ ID NO: 36239 - DNA, 79 bp, Homo sapiens
aggctgagtcggtggtcgtcagcacggccatccaggagttctacaaggtgcccatgcctgaactcatgggctcctgaac

SEQ ID NO: 36240 - DNA, 78 bp, Homo sapiens
agtcggtggtcgtcagcacggccatccaggagttctacaaggtgcccatgcctgaactcatgggctcctgaacctcag

SEQ ID NO: 36241 - DNA, 69 bp, Homo sapiens
tgggccttgcactcctgccctaaaacccaccctcctggttcccacagaaatacgcggaggaggccctgt

SEQ ID NO: 36242 - DNA, 70 bp, Homo sapiens
ttgcactcctgccctaaaacccaccctcctggttcccacagaaatacgcggaggaggccctgttggcagg

SEQ ID NO: 36243 - DNA, 65 bp, Homo sapiens
ccctaaaacccaccctcctggttcccacagaaatacgcggaggaggccctgttggcaggggaccc

SEQ ID NO: 36244 - DNA, 70 bp, Homo sapiens
ctcctggttcccacagaaatacgcggaggaggccctgttggcaggggacccctctcagcccccgccacca

SEQ ID NO: 36245 - DNA, 74 bp, Homo sapiens
ccacagaaatacgcggaggaggccctgttggcaggggacccctctcagcccccgccaccacctctgcagcacta

SEQ ID NO: 36246 - DNA, 72 bp, Homo sapiens
aaatacgcggaggaggccctgttggcaggggacccctctcagcccccgccaccacctctgcagcactacctg

SEQ ID NO: 36247 - DNA, 76 bp, Homo sapiens
aggaggccctgttggcaggggacccctctcagcccccgccaccacctctgcagcactacctggagcagccagtgga

SEQ ID NO: 36248 - DNA, 80 bp, Homo sapiens
ttggcaggggacccctctcagcccccgccaccacctctgcagcactacctggagcagccagtggagcgggtgcagcgcta

SEQ ID NO: 36249 - DNA, 82 bp, Homo sapiens
cctctcagcccccgccaccacctctgcagcactacctggagcagccagtggagcgggtgcagcgctaccaggccttgctgaa

SEQ ID NO: 36250 - DNA, 81 bp, Homo sapiens
cccgccaccacctctgcagcactacctggagcagccagtggagcgggtgcagcgctaccaggccttgctgaaggtgggcac

SEQ ID NO: 36251 - DNA, 81 bp, Homo sapiens
accacctctgcagcactacctggagcagccagtggagcgggtgcagcgctaccaggccttgctgaaggtgggcaccacctc

SEQ ID NO: 36252 - DNA, 78 bp, Homo sapiens
agcactacctggagcagccagtggagcgggtgcagcgctaccaggccttgctgaaggtgggcaccacctcccctgccc

SEQ ID NO: 36253 - DNA, 78 bp, Homo sapiens
tggagcagccagtggagcgggtgcagcgctaccaggccttgctgaaggtgggcaccacctcccctgccccgcctcctc

SEQ ID NO: 36254 - DNA, 76 bp, Homo sapiens
ttccagcctgtggagcattctaagccctgaccttcgccccggccccaggagctgatccgcaacaaggcgcggaaca

SEQ ID NO: 36255 - DNA, 76 bp, Homo sapiens
tgtggagcattctaagccctgaccttcgccccggccccaggagctgatccgcaacaaggcgcggaacagacagaac

SEQ ID NO: 36256 - DNA, 78 bp, Homo sapiens
taagccctgaccttcgccccggccccaggagctgatccgcaacaaggcgcggaacagacagaactgcgcgctgctgga

SEQ ID NO: 36257 - DNA, 78 bp, Homo sapiens
accttcgccccggccccaggagctgatccgcaacaaggcgcggaacagacagaactgcgcgctgctggagcaggccta

SEQ ID NO: 36258 - DNA, 82 bp, Homo sapiens
ccccaggagctgatccgcaacaaggcgcggaacagacagaactgcgcgctgctggagcaggcctatgccgtggtgtctgccc

SEQ ID NO: 36259 - DNA, 86 bp, Homo sapiens
ggagctgatccgcaacaaggcgcggaacagacagaactgcgcgctgctggagcaggcctatgccgtggtgtctgccctgccacagc

SEQ ID NO: 36260 - DNA, 85 bp, Homo sapiens
aacaaggcgcggaacagacagaactgcgcgctgctggagcaggcctatgccgtggtgtctgccctgccacagcgcgctgagaaca

SEQ ID NO: 36261 - DNA, 87 bp, Homo sapiens
aacagacagaactgcgcgctgctggagcaggcctatgccgtggtgtctgccctgccacagcgcgctgagaacaagctgcacgtgtcc

SEQ ID NO: 36262 - DNA, 88 bp, Homo sapiens
acagaactgcgcgctgctggagcaggcctatgccgtggtgtctgccctgccacagcgcgctgagaacaagctgcacgtgtccctcatg

SEQ ID NO: 36263 - DNA, 86 bp, Homo sapiens
tgctggagcaggcctatgccgtggtgtctgccctgccacagcgcgctgagaacaagctgcacgtgtccctcatggagaactaccca

SEQ ID NO: 36264 - DNA, 84 bp, Homo sapiens
agcaggcctatgccgtggtgtctgccctgccacagcgcgctgagaacaagctgcacgtgtccctcatggagaactacccaggca

SEQ ID NO: 36265 - DNA, 83 bp, Homo sapiens
tggtgtctgccctgccacagcgcgctgagaacaagctgcacgtgtccctcatggagaactacccaggcaccctgcaggccctg

SEQ ID NO: 36266 - DNA, 83 bp, Homo sapiens
tctgccctgccacagcgcgctgagaacaagctgcacgtgtccctcatggagaactacccaggcaccctgcaggccctgggcga

SEQ ID NO: 36267 - DNA, 80 bp, Homo sapiens
acagcgcgctgagaacaagctgcacgtgtccctcatggagaactacccaggcaccctgcaggccctgggcgagcccatcc

SEQ ID NO: 36268 - DNA, 76 bp, Homo sapiens
agaacaagctgcacgtgtccctcatggagaactacccaggcaccctgcaggccctgggcgagcccatccgccaggt

SEQ ID NO: 36269 - DNA, 72 bp, Homo sapiens
acgtgtccctcatggagaactacccaggcaccctgcaggccctgggcgagcccatccgccaggttggggagg

SEQ ID NO: 36270 - DNA, 72 bp, Homo sapiens
cctcatggagaactacccaggcaccctgcaggccctgggcgagcccatccgccaggttggggagggccaggg

SEQ ID NO: 36271 - DNA, 68 bp, Homo sapiens
aactacccaggcaccctgcaggccctgggcgagcccatccgccaggttggggagggccaggggccggg

SEQ ID NO: 36272 - DNA, 77 bp, Homo sapiens
tgggcaatctggcccaccacaggctgaccgcagcccacaccctcccccagggccacttcatcgtgtgggagggtgca

SEQ ID NO: 36273 - DNA, 73 bp, Homo sapiens
tggcccaccacaggctgaccgcagcccacaccctcccccagggccacttcatcgtgtgggagggtgcaccggg

SEQ ID NO: 36274 - DNA, 73 bp, Homo sapiens
tgaccgcagcccacaccctcccccagggccacttcatcgtgtgggagggtgcaccgggggcccgcatgccctg

SEQ ID NO: 36275 - DNA, 70 bp, Homo sapiens
agcccacaccctcccccagggccacttcatcgtgtgggagggtgcaccgggggcccgcatgccctggaag

SEQ ID NO: 36276 - DNA, 71 bp, Homo sapiens
ccccagggccacttcatcgtgtgggagggtgcaccgggggcccgcatgccctggaagggccacaaccgtca

SEQ ID NO: 36277 - DNA, 71 bp, Homo sapiens
acttcatcgtgtgggagggtgcaccgggggcccgcatgccctggaagggccacaaccgtcacgtgttcctc

SEQ ID NO: 36278 - DNA, 71 bp, Homo sapiens
tgtgggagggtgcaccgggggcccgcatgccctggaagggccacaaccgtcacgtgttcctcttccgcaac

SEQ ID NO: 36279 - DNA, 71 bp, Homo sapiens
tgcaccgggggcccgcatgccctggaagggccacaaccgtcacgtgttcctcttccgcaaccacctggtaa

SEQ ID NO: 36280 - DNA, 73 bp, Homo sapiens
gggcccgcatgccctggaagggccacaaccgtcacgtgttcctcttccgcaaccacctggtaatctgcaagcc

SEQ ID NO: 36281 - DNA, 72 bp, Homo sapiens
ctggaagggccacaaccgtcacgtgttcctcttccgcaaccacctggtaatctgcaagccccggcgagactc

SEQ ID NO: 36282 - DNA, 73 bp, Homo sapiens
cacaaccgtcacgtgttcctcttccgcaaccacctggtaatctgcaagccccggcgagactcccgcaccgata

SEQ ID NO: 36283 - DNA, 73 bp, Homo sapiens
acgtgttcctcttccgcaaccacctggtaatctgcaagccccggcgagactcccgcaccgataccgtcagcta

SEQ ID NO: 36284 - DNA, 73 bp, Homo sapiens
ttcctcttccgcaaccacctggtaatctgcaagccccggcgagactcccgcaccgataccgtcagctacgtgt

SEQ ID NO: 36285 - DNA, 73 bp, Homo sapiens
aaccacctggtaatctgcaagccccggcgagactcccgcaccgataccgtcagctacgtgttccggaacatga

SEQ ID NO: 36286 - DNA, 77 bp, Homo sapiens
ggtaatctgcaagccccggcgagactcccgcaccgataccgtcagctacgtgttccggaacatgatgaaggtctgca

SEQ ID NO: 36287 - DNA, 78 bp, Homo sapiens
cccggcgagactcccgcaccgataccgtcagctacgtgttccggaacatgatgaaggtctgcaggctctgggctgctg

SEQ ID NO: 36288 - DNA, 77 bp, Homo sapiens
accgataccgtcagctacgtgttccggaacatgatgaaggtctgcaggctctgggctgctgggcggggctccctgtc

SEQ ID NO: 36289 - DNA, 77 bp, Homo sapiens
atggtcagcccgtgtccccctccctgtgctgacaccctcccccacccacagctgagcagcatcgacctgaacgacca

SEQ ID NO: 36290 - DNA, 75 bp, Homo sapiens
gtgtccccctccctgtgctgacaccctcccccacccacagctgagcagcatcgacctgaacgaccaggtggaggg

SEQ ID NO: 36291 - DNA, 78 bp, Homo sapiens
tgtgctgacaccctcccccacccacagctgagcagcatcgacctgaacgaccaggtggagggggatgaccgcgccttc

SEQ ID NO: 36292 - DNA, 75 bp, Homo sapiens
cctcccccacccacagctgagcagcatcgacctgaacgaccaggtggagggggatgaccgcgccttcgaggtgtg

SEQ ID NO: 36293 - DNA, 78 bp, Homo sapiens
ccacagctgagcagcatcgacctgaacgaccaggtggagggggatgaccgcgccttcgaggtgtggcaggagcgggag

SEQ ID NO: 36294 - DNA, 75 bp, Homo sapiens
agcagcatcgacctgaacgaccaggtggagggggatgaccgcgccttcgaggtgtggcaggagcgggaggactcg

SEQ ID NO: 36295 - DNA, 73 bp, Homo sapiens
atcgacctgaacgaccaggtggagggggatgaccgcgccttcgaggtgtggcaggagcgggaggactcggtgc

SEQ ID NO: 36296 - DNA, 76 bp, Homo sapiens
accaggtggagggggatgaccgcgccttcgaggtgtggcaggagcgggaggactcggtgcgcaagtacctgctgca

SEQ ID NO: 36297 - DNA, 79 bp, Homo sapiens
gggatgaccgcgccttcgaggtgtggcaggagcgggaggactcggtgcgcaagtacctgctgcaggcacggacagccat

SEQ ID NO: 36298 - DNA, 79 bp, Homo sapiens
accgcgccttcgaggtgtggcaggagcgggaggactcggtgcgcaagtacctgctgcaggcacggacagccattatcaa

SEQ ID NO: 36299 - DNA, 81 bp, Homo sapiens
gtgtggcaggagcgggaggactcggtgcgcaagtacctgctgcaggcacggacagccattatcaagagctcgtgggtgaag

SEQ ID NO: 36300 - DNA, 80 bp, Homo sapiens
aggagcgggaggactcggtgcgcaagtacctgctgcaggcacggacagccattatcaagagctcgtgggtgaaggagatc

SEQ ID NO: 36301 - DNA, 85 bp, Homo sapiens
aggactcggtgcgcaagtacctgctgcaggcacggacagccattatcaagagctcgtgggtgaaggagatctgtggcatccagca

SEQ ID NO: 36302 - DNA, 85 bp, Homo sapiens
aagtacctgctgcaggcacggacagccattatcaagagctcgtgggtgaaggagatctgtggcatccagcagcgtctggccctgc

SEQ ID NO: 36303 - DNA, 87 bp, Homo sapiens
cctgctgcaggcacggacagccattatcaagagctcgtgggtgaaggagatctgtggcatccagcagcgtctggccctgcctgtgtg

SEQ ID NO: 36304 - DNA, 86 bp, Homo sapiens
gacagccattatcaagagctcgtgggtgaaggagatctgtggcatccagcagcgtctggccctgcctgtgtggcgtgagtgtccac

SEQ ID NO: 36305 - DNA, 83 bp, Homo sapiens
attatcaagagctcgtgggtgaaggagatctgtggcatccagcagcgtctggccctgcctgtgtggcgtgagtgtccaccttc

SEQ ID NO: 36306 - DNA, 79 bp, Homo sapiens
agctcgtgggtgaaggagatctgtggcatccagcagcgtctggccctgcctgtgtggcgtgagtgtccaccttcccggg

SEQ ID NO: 36307 - DNA, 79 bp, Homo sapiens
tgaaggagatctgtggcatccagcagcgtctggccctgcctgtgtggcgtgagtgtccaccttcccgggggcccaggtg

SEQ ID NO: 36308 - DNA, 74 bp, Homo sapiens
agcccgatgtccccccacagagcactcagggctgttgtgtgtcctcagggcccccggactttgaagaggagctg

SEQ ID NO: 36309 - DNA, 77 bp, Homo sapiens
ccccacagagcactcagggctgttgtgtgtcctcagggcccccggactttgaagaggagctggccgactgcacagcc

SEQ ID NO: 36310 - DNA, 78 bp, Homo sapiens
cactcagggctgttgtgtgtcctcagggcccccggactttgaagaggagctggccgactgcacagccgagctgggtga

SEQ ID NO: 36311 - DNA, 78 bp, Homo sapiens
ctgttgtgtgtcctcagggcccccggactttgaagaggagctggccgactgcacagccgagctgggtgagacagtcaa

SEQ ID NO: 36312 - DNA, 79 bp, Homo sapiens
tcctcagggcccccggactttgaagaggagctggccgactgcacagccgagctgggtgagacagtcaagctggcctgcc

SEQ ID NO: 36313 - DNA, 80 bp, Homo sapiens
cccggactttgaagaggagctggccgactgcacagccgagctgggtgagacagtcaagctggcctgccgcgtgacgggca

SEQ ID NO: 36314 - DNA, 81 bp, Homo sapiens
ctttgaagaggagctggccgactgcacagccgagctgggtgagacagtcaagctggcctgccgcgtgacgggcacacccaa

SEQ ID NO: 36315 - DNA, 85 bp, Homo sapiens
tggccgactgcacagccgagctgggtgagacagtcaagctggcctgccgcgtgacgggcacacccaagcctgtcatcagctggta

SEQ ID NO: 36316 - DNA, 83 bp, Homo sapiens
actgcacagccgagctgggtgagacagtcaagctggcctgccgcgtgacgggcacacccaagcctgtcatcagctggtacaaa

SEQ ID NO: 36317 - DNA, 78 bp, Homo sapiens
agctgggtgagacagtcaagctggcctgccgcgtgacgggcacacccaagcctgtcatcagctggtacaaaggtaaac

SEQ ID NO: 36318 - DNA, 74 bp, Homo sapiens
agacagtcaagctggcctgccgcgtgacgggcacacccaagcctgtcatcagctggtacaaaggtaaaccccgg

SEQ ID NO: 36319 - DNA, 72 bp, Homo sapiens
aagctggcctgccgcgtgacgggcacacccaagcctgtcatcagctggtacaaaggtaaaccccggggccag

SEQ ID NO: 36320 - DNA, 71 bp, Homo sapiens
gtgacgggcacacccaagcctgtcatcagctggtacaaaggtaaaccccggggccaggggctgtggccttc

SEQ ID NO: 36321 - DNA, 72 bp, Homo sapiens
tgagcccttgggtccccacctgggtgacggcccccgctcgtcctttccagatgggaaagcagtgcaggtgga

SEQ ID NO: 36322 - DNA, 71 bp, Homo sapiens
cccacctgggtgacggcccccgctcgtcctttccagatgggaaagcagtgcaggtggacccccaccacatc

SEQ ID NO: 36323 - DNA, 74 bp, Homo sapiens
tgggtgacggcccccgctcgtcctttccagatgggaaagcagtgcaggtggacccccaccacatcctcattgaa

SEQ ID NO: 36324 - DNA, 77 bp, Homo sapiens
cgctcgtcctttccagatgggaaagcagtgcaggtggacccccaccacatcctcattgaagaccctgatggctcgtg

SEQ ID NO: 36325 - DNA, 82 bp, Homo sapiens
ttccagatgggaaagcagtgcaggtggacccccaccacatcctcattgaagaccctgatggctcgtgtgcactcatcctgga

SEQ ID NO: 36326 - DNA, 81 bp, Homo sapiens
atgggaaagcagtgcaggtggacccccaccacatcctcattgaagaccctgatggctcgtgtgcactcatcctggacagcc

SEQ ID NO: 36327 - DNA, 80 bp, Homo sapiens
caggtggacccccaccacatcctcattgaagaccctgatggctcgtgtgcactcatcctggacagcctgaccggtgtgga

SEQ ID NO: 36328 - DNA, 82 bp, Homo sapiens
cccaccacatcctcattgaagaccctgatggctcgtgtgcactcatcctggacagcctgaccggtgtggactctggccagta

SEQ ID NO: 36329 - DNA, 84 bp, Homo sapiens
atcctcattgaagaccctgatggctcgtgtgcactcatcctggacagcctgaccggtgtggactctggccagtacatgtgcttc

SEQ ID NO: 36330 - DNA, 84 bp, Homo sapiens
ttgaagaccctgatggctcgtgtgcactcatcctggacagcctgaccggtgtggactctggccagtacatgtgcttcgcggcca

SEQ ID NO: 36331 - DNA, 87 bp, Homo sapiens
tgatggctcgtgtgcactcatcctggacagcctgaccggtgtggactctggccagtacatgtgcttcgcggccagcgccgctggcaa

SEQ ID NO: 36332 - DNA, 82 bp, Homo sapiens
actcatcctggacagcctgaccggtgtggactctggccagtacatgtgcttcgcggccagcgccgctggcaactgcagtacc

SEQ ID NO: 36333 - DNA, 82 bp, Homo sapiens
tggacagcctgaccggtgtggactctggccagtacatgtgcttcgcggccagcgccgctggcaactgcagtaccctgggcaa

SEQ ID NO: 36334 - DNA, 80 bp, Homo sapiens
cctgaccggtgtggactctggccagtacatgtgcttcgcggccagcgccgctggcaactgcagtaccctgggcaagatcc

SEQ ID NO: 36335 - DNA, 82 bp, Homo sapiens
tggactctggccagtacatgtgcttcgcggccagcgccgctggcaactgcagtaccctgggcaagatcctggtgcaaggtta

SEQ ID NO: 36336 - DNA, 80 bp, Homo sapiens
ccagtacatgtgcttcgcggccagcgccgctggcaactgcagtaccctgggcaagatcctggtgcaaggttagcctgaag

SEQ ID NO: 36337 - DNA, 78 bp, Homo sapiens
gtgcttcgcggccagcgccgctggcaactgcagtaccctgggcaagatcctggtgcaaggttagcctgaaggccttcc

SEQ ID NO: 36338 - DNA, 75 bp, Homo sapiens
ccagcgccgctggcaactgcagtaccctgggcaagatcctggtgcaaggttagcctgaaggccttcctgggggag

SEQ ID NO: 36339 - DNA, 69 bp, Homo sapiens
ctctctgtctcttccctccacaaccccacagtcccaccacggttcgtgaacaaggtccgggcctcaccc

SEQ ID NO: 36340 - DNA, 68 bp, Homo sapiens
tcttccctccacaaccccacagtcccaccacggttcgtgaacaaggtccgggcctcaccctttgtgga

SEQ ID NO: 36341 - DNA, 68 bp, Homo sapiens
ctccacaaccccacagtcccaccacggttcgtgaacaaggtccgggcctcaccctttgtggagggaga

SEQ ID NO: 36342 - DNA, 68 bp, Homo sapiens
agtcccaccacggttcgtgaacaaggtccgggcctcaccctttgtggagggagaggacgcccagttca

SEQ ID NO: 36343 - DNA, 71 bp, Homo sapiens
ggttcgtgaacaaggtccgggcctcaccctttgtggagggagaggacgcccagttcacctgcaccatcgaa

SEQ ID NO: 36344 - DNA, 70 bp, Homo sapiens
aacaaggtccgggcctcaccctttgtggagggagaggacgcccagttcacctgcaccatcgaaggcgccc

SEQ ID NO: 36345 - DNA, 74 bp, Homo sapiens
gcctcaccctttgtggagggagaggacgcccagttcacctgcaccatcgaaggcgccccgtacccgcagatcag

SEQ ID NO: 36346 - DNA, 72 bp, Homo sapiens
accctttgtggagggagaggacgcccagttcacctgcaccatcgaaggcgccccgtacccgcagatcaggtg

SEQ ID NO: 36347 - DNA, 72 bp, Homo sapiens
agggagaggacgcccagttcacctgcaccatcgaaggcgccccgtacccgcagatcaggtggggcccaggcc

SEQ ID NO: 36348 - DNA, 71 bp, Homo sapiens
acgcccagttcacctgcaccatcgaaggcgccccgtacccgcagatcaggtggggcccaggcctgcccggg

SEQ ID NO: 36349 - DNA, 73 bp, Homo sapiens
acctgcaccatcgaaggcgccccgtacccgcagatcaggtggggcccaggcctgcccggggatggggcatgag

SEQ ID NO: 36350 - DNA, 75 bp, Homo sapiens
tagagcatggcccaagtcctgcctcacgtgccctccgggtggattccaggtggtacaaggacggggccctgctga

SEQ ID NO: 36351 - DNA, 72 bp, Homo sapiens
aagtcctgcctcacgtgccctccgggtggattccaggtggtacaaggacggggccctgctgaccactggcaa

SEQ ID NO: 36352 - DNA, 73 bp, Homo sapiens
tcacgtgccctccgggtggattccaggtggtacaaggacggggccctgctgaccactggcaacaagttccaga

SEQ ID NO: 36353 - DNA, 74 bp, Homo sapiens
ctccgggtggattccaggtggtacaaggacggggccctgctgaccactggcaacaagttccagacactgagtga

SEQ ID NO: 36354 - DNA, 78 bp, Homo sapiens
tggattccaggtggtacaaggacggggccctgctgaccactggcaacaagttccagacactgagtgagcctcgcagcg

SEQ ID NO: 36355 - DNA, 82 bp, Homo sapiens
tacaaggacggggccctgctgaccactggcaacaagttccagacactgagtgagcctcgcagcggcctgctagtgctggtga

SEQ ID NO: 36356 - DNA, 82 bp, Homo sapiens
gggccctgctgaccactggcaacaagttccagacactgagtgagcctcgcagcggcctgctagtgctggtgatccgggcggc

SEQ ID NO: 36357 - DNA, 83 bp, Homo sapiens
tgaccactggcaacaagttccagacactgagtgagcctcgcagcggcctgctagtgctggtgatccgggcggccagcaaggag

SEQ ID NO: 36358 - DNA, 79 bp, Homo sapiens
aacaagttccagacactgagtgagcctcgcagcggcctgctagtgctggtgatccgggcggccagcaaggaggacctgg

SEQ ID NO: 36359 - DNA, 81 bp, Homo sapiens
ttccagacactgagtgagcctcgcagcggcctgctagtgctggtgatccgggcggccagcaaggaggacctggggctctac

SEQ ID NO: 36360 - DNA, 81 bp, Homo sapiens
gtgagcctcgcagcggcctgctagtgctggtgatccgggcggccagcaaggaggacctggggctctacgagtgtgaggtga

SEQ ID NO: 36361 - DNA, 79 bp, Homo sapiens
ctcgcagcggcctgctagtgctggtgatccgggcggccagcaaggaggacctggggctctacgagtgtgaggtgaggag

SEQ ID NO: 36362 - DNA, 79 bp, Homo sapiens
cctgctagtgctggtgatccgggcggccagcaaggaggacctggggctctacgagtgtgaggtgaggagtgcaggagtg

SEQ ID NO: 36363 - DNA, 75 bp, Homo sapiens
ctggtgatccgggcggccagcaaggaggacctggggctctacgagtgtgaggtgaggagtgcaggagtggggacc

SEQ ID NO: 36364 - DNA, 72 bp, Homo sapiens
ccctacccgtggggagccttgggctctgagccggccctgccgtccttgcagctggtgaaccggctgggctcc

SEQ ID NO: 36365 - DNA, 77 bp, Homo sapiens
agccttgggctctgagccggccctgccgtccttgcagctggtgaaccggctgggctccgcgcgggctagtgcggagc

SEQ ID NO: 36366 - DNA, 82 bp, Homo sapiens
tctgagccggccctgccgtccttgcagctggtgaaccggctgggctccgcgcgggctagtgcggagctgcgcattcagagcc

SEQ ID NO: 36367 - DNA, 79 bp, Homo sapiens
ccggccctgccgtccttgcagctggtgaaccggctgggctccgcgcgggctagtgcggagctgcgcattcagagcccca

SEQ ID NO: 36368 - DNA, 83 bp, Homo sapiens
cgtccttgcagctggtgaaccggctgggctccgcgcgggctagtgcggagctgcgcattcagagccccatgctgcaggcccag

SEQ ID NO: 36369 - DNA, 85 bp, Homo sapiens
ctggtgaaccggctgggctccgcgcgggctagtgcggagctgcgcattcagagccccatgctgcaggcccaggagcagtgtcaca

SEQ ID NO: 36370 - DNA, 87 bp, Homo sapiens
ctgggctccgcgcgggctagtgcggagctgcgcattcagagccccatgctgcaggcccaggagcagtgtcacagggagcagctcgtg

SEQ ID NO: 36371 - DNA, 88 bp, Homo sapiens
cgggctagtgcggagctgcgcattcagagccccatgctgcaggcccaggagcagtgtcacagggagcagctcgtggctgcagtggaag

SEQ ID NO: 36372 - DNA, 88 bp, Homo sapiens
tagtgcggagctgcgcattcagagccccatgctgcaggcccaggagcagtgtcacagggagcagctcgtggctgcagtggaaggtaag

SEQ ID NO: 36373 - DNA, 85 bp, Homo sapiens
ctgcgcattcagagccccatgctgcaggcccaggagcagtgtcacagggagcagctcgtggctgcagtggaaggtaagtcccacc

SEQ ID NO: 36374 - DNA, 81 bp, Homo sapiens
cccatgctgcaggcccaggagcagtgtcacagggagcagctcgtggctgcagtggaaggtaagtcccacccctgtcctcgc

SEQ ID NO: 36375 - DNA, 77 bp, Homo sapiens
aggcccaggagcagtgtcacagggagcagctcgtggctgcagtggaaggtaagtcccacccctgtcctcgccaccaa

SEQ ID NO: 36376 - DNA, 77 bp, Homo sapiens
agcagtgtcacagggagcagctcgtggctgcagtggaaggtaagtcccacccctgtcctcgccaccaaggcggctcc

SEQ ID NO: 36377 - DNA, 75 bp, Homo sapiens
ctagcactggctggtctgtaaccctcgctattccgactgttttctttgtagtcactgagcaagagactaaagtcc

SEQ ID NO: 36378 - DNA, 71 bp, Homo sapiens
gtctgtaaccctcgctattccgactgttttctttgtagtcactgagcaagagactaaagtccccaagaaaa

SEQ ID NO: 36379 - DNA, 74 bp, Homo sapiens
tcgctattccgactgttttctttgtagtcactgagcaagagactaaagtccccaagaaaaccgtcatcatgtaa

SEQ ID NO: 36380 - DNA, 74 bp, Homo sapiens
ttccgactgttttctttgtagtcactgagcaagagactaaagtccccaagaaaaccgtcatcatgtaagtgcag

SEQ ID NO: 36381 - DNA, 75 bp, Homo sapiens
ttctttgtagtcactgagcaagagactaaagtccccaagaaaaccgtcatcatgtaagtgcaggcgtgttcctaa

SEQ ID NO: 36382 - DNA, 72 bp, Homo sapiens
actgagcaagagactaaagtccccaagaaaaccgtcatcatgtaagtgcaggcgtgttcctaaccttccttc

SEQ ID NO: 36383 - DNA, 73 bp, Homo sapiens
aagagactaaagtccccaagaaaaccgtcatcatgtaagtgcaggcgtgttcctaaccttccttctgactgca

SEQ ID NO: 36384 - DNA, 80 bp, Homo sapiens
cccaagaaaaccgtcatcatgtaagtgcaggcgtgttcctaaccttccttctgactgcagtgcctcctgcatgccactga

SEQ ID NO: 36385 - DNA, 80 bp, Homo sapiens
aaaaccgtcatcatgtaagtgcaggcgtgttcctaaccttccttctgactgcagtgcctcctgcatgccactgacctgcc

SEQ ID NO: 36386 - DNA, 85 bp, Homo sapiens
atgtaagtgcaggcgtgttcctaaccttccttctgactgcagtgcctcctgcatgccactgacctgcctggatcatgcctgtgtg

SEQ ID NO: 36387 - DNA, 84 bp, Homo sapiens
aggcgtgttcctaaccttccttctgactgcagtgcctcctgcatgccactgacctgcctggatcatgcctgtgtggcccagcca

SEQ ID NO: 36388 - DNA, 88 bp, Homo sapiens
taaccttccttctgactgcagtgcctcctgcatgccactgacctgcctggatcatgcctgtgtggcccagccacctgcttgctgcctg

SEQ ID NO: 36389 - DNA, 94 bp, Homo sapiens
ttctgactgcagtgcctcctgcatgccactgacctgcctggatcatgcctgtgtggcccagccacctgcttgctgcctgtctgctcacataaca

SEQ ID NO: 36390 - DNA, 94 bp, Homo sapiens
tgcctcctgcatgccactgacctgcctggatcatgcctgtgtggcccagccacctgcttgctgcctgtctgctcacataacatgcaccctctga

SEQ ID NO: 36391 - DNA, 93 bp, Homo sapiens
atgccactgacctgcctggatcatgcctgtgtggcccagccacctgcttgctgcctgtctgctcacataacatgcaccctctgactgccagca

SEQ ID NO: 36392 - DNA, 89 bp, Homo sapiens
acctgcctggatcatgcctgtgtggcccagccacctgcttgctgcctgtctgctcacataacatgcaccctctgactgccagcacctta

SEQ ID NO: 36393 - DNA, 87 bp, Homo sapiens
atcatgcctgtgtggcccagccacctgcttgctgcctgtctgctcacataacatgcaccctctgactgccagcaccttacaggtact

SEQ ID NO: 36394 - DNA, 87 bp, Homo sapiens
tgtgtggcccagccacctgcttgctgcctgtctgctcacataacatgcaccctctgactgccagcaccttacaggtacttgcagtta

SEQ ID NO: 36395 - DNA, 86 bp, Homo sapiens
acctgcttgctgcctgtctgctcacataacatgcaccctctgactgccagcaccttacaggtacttgcagttaccttgcataggca

SEQ ID NO: 36396 - DNA, 83 bp, Homo sapiens
tgcctgtctgctcacataacatgcaccctctgactgccagcaccttacaggtacttgcagttaccttgcataggcaccttccc

SEQ ID NO: 36397 - DNA, 81 bp, Homo sapiens
gtctgctcacataacatgcaccctctgactgccagcaccttacaggtacttgcagttaccttgcataggcaccttcccctg

SEQ ID NO: 36398 - DNA, 76 bp, Homo sapiens
tgggcgctgtgcccatcttttctcgggccctctcctccctcccccagagaagagaccatcaccactgtggtgaaga

SEQ ID NO: 36399 - DNA, 75 bp, Homo sapiens
tgtgcccatcttttctcgggccctctcctccctcccccagagaagagaccatcaccactgtggtgaagagcccac

SEQ ID NO: 36400 - DNA, 73 bp, Homo sapiens
ttttctcgggccctctcctccctcccccagagaagagaccatcaccactgtggtgaagagcccacgtggccaa

SEQ ID NO: 36401 - DNA, 72 bp, Homo sapiens
cctctcctccctcccccagagaagagaccatcaccactgtggtgaagagcccacgtggccaacgacggtccc

SEQ ID NO: 36402 - DNA, 73 bp, Homo sapiens
ctcccccagagaagagaccatcaccactgtggtgaagagcccacgtggccaacgacggtcccccagcaagtcc

SEQ ID NO: 36403 - DNA, 69 bp, Homo sapiens
accactgtggtgaagagcccacgtggccaacgacggtcccccagcaagtccccctcccgctcaccttcc

SEQ ID NO: 36404 - DNA, 71 bp, Homo sapiens
gtggtgaagagcccacgtggccaacgacggtcccccagcaagtccccctcccgctcaccttcccgctgctc

SEQ ID NO: 36405 - DNA, 72 bp, Homo sapiens
acgtggccaacgacggtcccccagcaagtccccctcccgctcaccttcccgctgctctgccagcccgctgag

SEQ ID NO: 36406 - DNA, 72 bp, Homo sapiens
aacgacggtcccccagcaagtccccctcccgctcaccttcccgctgctctgccagcccgctgaggccaggcc

SEQ ID NO: 36407 - DNA, 76 bp, Homo sapiens
ccctcccgctcaccttcccgctgctctgccagcccgctgaggccaggcctactggcccccgacctgctgtacctgc

SEQ ID NO: 36408 - DNA, 78 bp, Homo sapiens
ccgctcaccttcccgctgctctgccagcccgctgaggccaggcctactggcccccgacctgctgtacctgccaggtgc

SEQ ID NO: 36409 - DNA, 79 bp, Homo sapiens
tcccgctgctctgccagcccgctgaggccaggcctactggcccccgacctgctgtacctgccaggtgctggccagcccc

SEQ ID NO: 36410 - DNA, 75 bp, Homo sapiens
agcccgctgaggccaggcctactggcccccgacctgctgtacctgccaggtgctggccagccccgcaggccggag

SEQ ID NO: 36411 - DNA, 77 bp, Homo sapiens
tgaggccaggcctactggcccccgacctgctgtacctgccaggtgctggccagccccgcaggccggaggcagaacca

SEQ ID NO: 36412 - DNA, 75 bp, Homo sapiens
cctactggcccccgacctgctgtacctgccaggtgctggccagccccgcaggccggaggcagaaccaggccagaa

SEQ ID NO: 36413 - DNA, 78 bp, Homo sapiens
gacctgctgtacctgccaggtgctggccagccccgcaggccggaggcagaaccaggccagaagcccgtggtgcccaca

SEQ ID NO: 36414 - DNA, 79 bp, Homo sapiens
tacctgccaggtgctggccagccccgcaggccggaggcagaaccaggccagaagcccgtggtgcccacactgtatgtga

SEQ ID NO: 36415 - DNA, 76 bp, Homo sapiens
aggtgctggccagccccgcaggccggaggcagaaccaggccagaagcccgtggtgcccacactgtatgtgacggag

SEQ ID NO: 36416 - DNA, 74 bp, Homo sapiens
agccccgcaggccggaggcagaaccaggccagaagcccgtggtgcccacactgtatgtgacggaggccgaggcc

SEQ ID NO: 36417 - DNA, 75 bp, Homo sapiens
aggccggaggcagaaccaggccagaagcccgtggtgcccacactgtatgtgacggaggccgaggcccactctcca

SEQ ID NO: 36418 - DNA, 76 bp, Homo sapiens
agaaccaggccagaagcccgtggtgcccacactgtatgtgacggaggccgaggcccactctccagctctgcccgga

SEQ ID NO: 36419 - DNA, 75 bp, Homo sapiens
ccagaagcccgtggtgcccacactgtatgtgacggaggccgaggcccactctccagctctgcccggactctcggg

SEQ ID NO: 36420 - DNA, 76 bp, Homo sapiens
tggtgcccacactgtatgtgacggaggccgaggcccactctccagctctgcccggactctcggggccccagcccaa

SEQ ID NO: 36421 - DNA, 73 bp, Homo sapiens
tgacggaggccgaggcccactctccagctctgcccggactctcggggccccagcccaagtgggtggaggtgga

SEQ ID NO: 36422 - DNA, 72 bp, Homo sapiens
cccactctccagctctgcccggactctcggggccccagcccaagtgggtggaggtggaggagaccattgaag

SEQ ID NO: 36423 - DNA, 71 bp, Homo sapiens
agctctgcccggactctcggggccccagcccaagtgggtggaggtggaggagaccattgaagtccgggtga

SEQ ID NO: 36424 - DNA, 70 bp, Homo sapiens
cggactctcggggccccagcccaagtgggtggaggtggaggagaccattgaagtccgggtgaagaagatg

SEQ ID NO: 36425 - DNA, 72 bp, Homo sapiens
caagtgggtggaggtggaggagaccattgaagtccgggtgaagaagatgggcccgcagggtgtgtctcccac

SEQ ID NO: 36426 - DNA, 74 bp, Homo sapiens
gaggtggaggagaccattgaagtccgggtgaagaagatgggcccgcagggtgtgtctcccaccacagaggtgcc

SEQ ID NO: 36427 - DNA, 76 bp, Homo sapiens
agaccattgaagtccgggtgaagaagatgggcccgcagggtgtgtctcccaccacagaggtgcccaggagctcatc

SEQ ID NO: 36428 - DNA, 78 bp, Homo sapiens
gggtgaagaagatgggcccgcagggtgtgtctcccaccacagaggtgcccaggagctcatcggggcatctcttcacac

SEQ ID NO: 36429 - DNA, 79 bp, Homo sapiens
atgggcccgcagggtgtgtctcccaccacagaggtgcccaggagctcatcggggcatctcttcacactgcccggtgcga

SEQ ID NO: 36430 - DNA, 74 bp, Homo sapiens
tcccaccacagaggtgcccaggagctcatcggggcatctcttcacactgcccggtgcgacccccggaggggacc

SEQ ID NO: 36431 - DNA, 73 bp, Homo sapiens
tgcccaggagctcatcggggcatctcttcacactgcccggtgcgacccccggaggggaccccaattccaacaa

SEQ ID NO: 36432 - DNA, 71 bp, Homo sapiens
aggagctcatcggggcatctcttcacactgcccggtgcgacccccggaggggaccccaattccaacaactc

SEQ ID NO: 36433 - DNA, 72 bp, Homo sapiens
catctcttcacactgcccggtgcgacccccggaggggaccccaattccaacaactccaacaacaagctgctg

SEQ ID NO: 36434 - DNA, 70 bp, Homo sapiens
cttcacactgcccggtgcgacccccggaggggaccccaattccaacaactccaacaacaagctgctggcc

SEQ ID NO: 36435 - DNA, 68 bp, Homo sapiens
cccggtgcgacccccggaggggaccccaattccaacaactccaacaacaagctgctggcccaggaggc

SEQ ID NO: 36436 - DNA, 71 bp, Homo sapiens
ccggaggggaccccaattccaacaactccaacaacaagctgctggcccaggaggcctgggcccagggcaca

SEQ ID NO: 36437 - DNA, 77 bp, Homo sapiens
ccaattccaacaactccaacaacaagctgctggcccaggaggcctgggcccagggcacagccatggtcggcgtcaga

SEQ ID NO: 36438 - DNA, 78 bp, Homo sapiens
tccaacaactccaacaacaagctgctggcccaggaggcctgggcccagggcacagccatggtcggcgtcagagagccc

SEQ ID NO: 36439 - DNA, 82 bp, Homo sapiens
acagccatggtcggcgtcagagagccccttgtcttccgcgtggatgccagaggcagtgtggactgggctgcttctggcatgg

SEQ ID NO: 36440 - DNA, 83 bp, Homo sapiens
gtcggcgtcagagagccccttgtcttccgcgtggatgccagaggcagtgtggactgggctgcttctggcatgggcagcctgga

SEQ ID NO: 36441 - DNA, 80 bp, Homo sapiens
agagccccttgtcttccgcgtggatgccagaggcagtgtggactgggctgcttctggcatgggcagcctggaggaggagg

SEQ ID NO: 36442 - DNA, 84 bp, Homo sapiens
tgtcttccgcgtggatgccagaggcagtgtggactgggctgcttctggcatgggcagcctggaggaggagggcaccatggagga

SEQ ID NO: 36443 - DNA, 79 bp, Homo sapiens
aggcagtgtggactgggctgcttctggcatgggcagcctggaggaggagggcaccatggaggaggcgggagaggaagag

SEQ ID NO: 36444 - DNA, 76 bp, Homo sapiens
actgggctgcttctggcatgggcagcctggaggaggagggcaccatggaggaggcgggagaggaagagggggaaga

SEQ ID NO: 36445 - DNA, 74 bp, Homo sapiens
cttctggcatgggcagcctggaggaggagggcaccatggaggaggcgggagaggaagagggggaagacggagac

SEQ ID NO: 36446 - DNA, 71 bp, Homo sapiens
agcctggaggaggagggcaccatggaggaggcgggagaggaagagggggaagacggagacgcctttgtgac

SEQ ID NO: 36447 - DNA, 70 bp, Homo sapiens
accatggaggaggcgggagaggaagagggggaagacggagacgcctttgtgacggaggagtcccaggaca

SEQ ID NO: 36448 - DNA, 70 bp, Homo sapiens
aggcgggagaggaagagggggaagacggagacgcctttgtgacggaggagtcccaggacacacacagcct

SEQ ID NO: 36449 - DNA, 71 bp, Homo sapiens
aagagggggaagacggagacgcctttgtgacggaggagtcccaggacacacacagccttggggatcgtgac

SEQ ID NO: 36450 - DNA, 72 bp, Homo sapiens
aagacggagacgcctttgtgacggaggagtcccaggacacacacagccttggggatcgtgaccccaagatcc

SEQ ID NO: 36451 - DNA, 75 bp, Homo sapiens
agacgcctttgtgacggaggagtcccaggacacacacagccttggggatcgtgaccccaagatcctcacgcacaa

SEQ ID NO: 36452 - DNA, 78 bp, Homo sapiens
acggaggagtcccaggacacacacagccttggggatcgtgaccccaagatcctcacgcacaacggccgcatgctgaca

SEQ ID NO: 36453 - DNA, 81 bp, Homo sapiens
ccaggacacacacagccttggggatcgtgaccccaagatcctcacgcacaacggccgcatgctgacactggctgacctgga

SEQ ID NO: 36454 - DNA, 79 bp, Homo sapiens
acacagccttggggatcgtgaccccaagatcctcacgcacaacggccgcatgctgacactggctgacctggaagattac

SEQ ID NO: 36455 - DNA, 79 bp, Homo sapiens
cttggggatcgtgaccccaagatcctcacgcacaacggccgcatgctgacactggctgacctggaagattacgtgcctg

SEQ ID NO: 36456 - DNA, 77 bp, Homo sapiens
cgtgaccccaagatcctcacgcacaacggccgcatgctgacactggctgacctggaagattacgtgcctggggaagg

SEQ ID NO: 36457 - DNA, 77 bp, Homo sapiens
agatcctcacgcacaacggccgcatgctgacactggctgacctggaagattacgtgcctggggaaggggagaccttc

SEQ ID NO: 36458 - DNA, 75 bp, Homo sapiens
acaacggccgcatgctgacactggctgacctggaagattacgtgcctggggaaggggagaccttccactgtggtg

SEQ ID NO: 36459 - DNA, 72 bp, Homo sapiens
actggctgacctggaagattacgtgcctggggaaggggagaccttccactgtggtggccctgggcctggcgc

SEQ ID NO: 36460 - DNA, 72 bp, Homo sapiens
cctggaagattacgtgcctggggaaggggagaccttccactgtggtggccctgggcctggcgcccctgatga

SEQ ID NO: 36461 - DNA, 72 bp, Homo sapiens
tacgtgcctggggaaggggagaccttccactgtggtggccctgggcctggcgcccctgatgaccctccctgc

SEQ ID NO: 36462 - DNA, 72 bp, Homo sapiens
aaggggagaccttccactgtggtggccctgggcctggcgcccctgatgaccctccctgcgaggtctcggtga

SEQ ID NO: 36463 - DNA, 76 bp, Homo sapiens
accttccactgtggtggccctgggcctggcgcccctgatgaccctccctgcgaggtctcggtgatccagagagaga

SEQ ID NO: 36464 - DNA, 76 bp, Homo sapiens
tggccctgggcctggcgcccctgatgaccctccctgcgaggtctcggtgatccagagagagatcggggagcccacg

SEQ ID NO: 36465 - DNA, 75 bp, Homo sapiens
ctgggcctggcgcccctgatgaccctccctgcgaggtctcggtgatccagagagagatcggggagcccacggtgg

SEQ ID NO: 36466 - DNA, 80 bp, Homo sapiens
ccctgatgaccctccctgcgaggtctcggtgatccagagagagatcggggagcccacggtggggcagcctgtgctgctca

SEQ ID NO: 36467 - DNA, 78 bp, Homo sapiens
accctccctgcgaggtctcggtgatccagagagagatcggggagcccacggtggggcagcctgtgctgctcagcgtgg

SEQ ID NO: 36468 - DNA, 81 bp, Homo sapiens
aggtctcggtgatccagagagagatcggggagcccacggtggggcagcctgtgctgctcagcgtggggcatgcactgggtc

SEQ ID NO: 36469 - DNA, 79 bp, Homo sapiens
atccagagagagatcggggagcccacggtggggcagcctgtgctgctcagcgtggggcatgcactgggtccccgaggcc

SEQ ID NO: 36470 - DNA, 76 bp, Homo sapiens
agcccacggtggggcagcctgtgctgctcagcgtggggcatgcactgggtccccgaggccctctcggcctctttag

SEQ ID NO: 36471 - DNA, 78 bp, Homo sapiens
ggcagcctgtgctgctcagcgtggggcatgcactgggtccccgaggccctctcggcctctttaggcctgagccccgtg

SEQ ID NO: 36472 - DNA, 75 bp, Homo sapiens
cctgtgctgctcagcgtggggcatgcactgggtccccgaggccctctcggcctctttaggcctgagccccgtggg

SEQ ID NO: 36473 - DNA, 74 bp, Homo sapiens
tcagcgtggggcatgcactgggtccccgaggccctctcggcctctttaggcctgagccccgtggggcgtcacca

SEQ ID NO: 36474 - DNA, 66 bp, Homo sapiens
cccgaggccctctcggcctctttaggcctgagccccgtggggcgtcaccaccgggaccccaggtcc

SEQ ID NO: 36475 - DNA, 67 bp, Homo sapiens
tttaggcctgagccccgtggggcgtcaccaccgggaccccaggtccgtagccttgagggcacctcct

SEQ ID NO: 36476 - DNA, 67 bp, Homo sapiens
cctgagccccgtggggcgtcaccaccgggaccccaggtccgtagccttgagggcacctccttcctct

SEQ ID NO: 36477 - DNA, 66 bp, Homo sapiens
accaccgggaccccaggtccgtagccttgagggcacctccttcctcttgcgggaggccccggctcg

SEQ ID NO: 36478 - DNA, 71 bp, Homo sapiens
aggtccgtagccttgagggcacctccttcctcttgcgggaggccccggctcggcctgtgggcagtgctccc

SEQ ID NO: 36479 - DNA, 73 bp, Homo sapiens
cttgagggcacctccttcctcttgcgggaggccccggctcggcctgtgggcagtgctccctggacgcagtctt

SEQ ID NO: 36480 - DNA, 73 bp, Homo sapiens
acctccttcctcttgcgggaggccccggctcggcctgtgggcagtgctccctggacgcagtctttctgcaccc

SEQ ID NO: 36481 - DNA, 76 bp, Homo sapiens
tcttgcgggaggccccggctcggcctgtgggcagtgctccctggacgcagtctttctgcacccgcatccggcgttc

SEQ ID NO: 36482 - DNA, 76 bp, Homo sapiens
aggccccggctcggcctgtgggcagtgctccctggacgcagtctttctgcacccgcatccggcgttctgcggacag

SEQ ID NO: 36483 - DNA, 83 bp, Homo sapiens
tcggcctgtgggcagtgctccctggacgcagtctttctgcacccgcatccggcgttctgcggacagtggccagagcagcttca

SEQ ID NO: 36484 - DNA, 82 bp, Homo sapiens
cagtgctccctggacgcagtctttctgcacccgcatccggcgttctgcggacagtggccagagcagcttcaccacagagctt

SEQ ID NO: 36485 - DNA, 81 bp, Homo sapiens
ctccctggacgcagtctttctgcacccgcatccggcgttctgcggacagtggccagagcagcttcaccacagagctttcca

SEQ ID NO: 36486 - DNA, 80 bp, Homo sapiens
tctttctgcacccgcatccggcgttctgcggacagtggccagagcagcttcaccacagagctttccacccagaccgtcaa

SEQ ID NO: 36487 - DNA, 76 bp, Homo sapiens
acccgcatccggcgttctgcggacagtggccagagcagcttcaccacagagctttccacccagaccgtcaacttcg

SEQ ID NO: 36488 - DNA, 77 bp, Homo sapiens
tccggcgttctgcggacagtggccagagcagcttcaccacagagctttccacccagaccgtcaacttcgggacagtg

SEQ ID NO: 36489 - DNA, 75 bp, Homo sapiens
acagtggccagagcagcttcaccacagagctttccacccagaccgtcaacttcgggacagtgggggagacggtca

SEQ ID NO: 36490 - DNA, 72 bp, Homo sapiens
accacagagctttccacccagaccgtcaacttcgggacagtgggggagacggtcacccttcacatctgccca

SEQ ID NO: 36491 - DNA, 76 bp, Homo sapiens
tcaacttcgggacagtgggggagacggtcacccttcacatctgcccagacagggatggggatgaggcggcacagcc

SEQ ID NO: 36492 - DNA, 82 bp, Homo sapiens
acagtgggggagacggtcacccttcacatctgcccagacagggatggggatgaggcggcacagccctgatgctgctgccatg

SEQ ID NO: 36493 - DNA, 82 bp, Homo sapiens
agacggtcacccttcacatctgcccagacagggatggggatgaggcggcacagccctgatgctgctgccatggtggcttggg

SEQ ID NO: 36494 - DNA, 84 bp, Homo sapiens
ttcacatctgcccagacagggatggggatgaggcggcacagccctgatgctgctgccatggtggcttggggcagcggggagaaa

SEQ ID NO: 36495 - DNA, 81 bp, Homo sapiens
cagacagggatggggatgaggcggcacagccctgatgctgctgccatggtggcttggggcagcggggagaaaggagtgtcc

SEQ ID NO: 36496 - DNA, 81 bp, Homo sapiens
tggggatgaggcggcacagccctgatgctgctgccatggtggcttggggcagcggggagaaaggagtgtccttgaggccta

SEQ ID NO: 36497 - DNA, 80 bp, Homo sapiens
atgaggcggcacagccctgatgctgctgccatggtggcttggggcagcggggagaaaggagtgtccttgaggcctaggac

SEQ ID NO: 36498 - DNA, 79 bp, Homo sapiens
cctgatgctgctgccatggtggcttggggcagcggggagaaaggagtgtccttgaggcctaggacgctgcccggcctca

SEQ ID NO: 36499 - DNA, 80 bp, Homo sapiens
ctgctgccatggtggcttggggcagcggggagaaaggagtgtccttgaggcctaggacgctgcccggcctcagcagcagc

SEQ ID NO: 36500 - DNA, 76 bp, Homo sapiens
atggtggcttggggcagcggggagaaaggagtgtccttgaggcctaggacgctgcccggcctcagcagcagccctg

SEQ ID NO: 36501 - DNA, 75 bp, Homo sapiens
agcggggagaaaggagtgtccttgaggcctaggacgctgcccggcctcagcagcagccctgggagcctcctgagg

SEQ ID NO: 36502 - DNA, 75 bp, Homo sapiens
agaaaggagtgtccttgaggcctaggacgctgcccggcctcagcagcagccctgggagcctcctgagggccctcc

SEQ ID NO: 36503 - DNA, 76 bp, Homo sapiens
gtgtccttgaggcctaggacgctgcccggcctcagcagcagccctgggagcctcctgagggccctccctgtccctg

SEQ ID NO: 36504 - DNA, 74 bp, Homo sapiens
taggacgctgcccggcctcagcagcagccctgggagcctcctgagggccctccctgtccctggccacgggccct

SEQ ID NO: 36505 - DNA, 73 bp, Homo sapiens
ccggcctcagcagcagccctgggagcctcctgagggccctccctgtccctggccacgggcccttcttacctca

SEQ ID NO: 36506 - DNA, 73 bp, Homo sapiens
cagcagccctgggagcctcctgagggccctccctgtccctggccacgggcccttcttacctcactcaacttca

SEQ ID NO: 36507 - DNA, 72 bp, Homo sapiens
tgggagcctcctgagggccctccctgtccctggccacgggcccttcttacctcactcaacttcagccaggag

SEQ ID NO: 36508 - DNA, 71 bp, Homo sapiens
cctcctgagggccctccctgtccctggccacgggcccttcttacctcactcaacttcagccaggaggactg

SEQ ID NO: 36509 - DNA, 73 bp, Homo sapiens
ccctgtccctggccacgggcccttcttacctcactcaacttcagccaggaggactgggtggtgcttgcaatgt

SEQ ID NO: 36510 - DNA, 75 bp, Homo sapiens
ccttcttacctcactcaacttcagccaggaggactgggtggtgcttgcaatgttggaatgaccggctcaaagacc

SEQ ID NO: 36511 - DNA, 77 bp, Homo sapiens
aacttcagccaggaggactgggtggtgcttgcaatgttggaatgaccggctcaaagacctcagctctgggctgtttc

SEQ ID NO: 36512 - DNA, 78 bp, Homo sapiens
aggaggactgggtggtgcttgcaatgttggaatgaccggctcaaagacctcagctctgggctgtttcctgtcagcctg

SEQ ID NO: 36513 - DNA, 81 bp, Homo sapiens
gggtggtgcttgcaatgttggaatgaccggctcaaagacctcagctctgggctgtttcctgtcagcctggcaggagcctca

SEQ ID NO: 36514 - DNA, 79 bp, Homo sapiens
aatgttggaatgaccggctcaaagacctcagctctgggctgtttcctgtcagcctggcaggagcctcaggactgtggac

SEQ ID NO: 36515 - DNA, 79 bp, Homo sapiens
aatgaccggctcaaagacctcagctctgggctgtttcctgtcagcctggcaggagcctcaggactgtggacgaaggatg

SEQ ID NO: 36516 - DNA, 79 bp, Homo sapiens
ctcaaagacctcagctctgggctgtttcctgtcagcctggcaggagcctcaggactgtggacgaaggatgtggccttgg

SEQ ID NO: 36517 - DNA, 79 bp, Homo sapiens
tctgggctgtttcctgtcagcctggcaggagcctcaggactgtggacgaaggatgtggccttgggcatttgtcctgttc

SEQ ID NO: 36518 - DNA, 79 bp, Homo sapiens
tgtttcctgtcagcctggcaggagcctcaggactgtggacgaaggatgtggccttgggcatttgtcctgttcccacatg

SEQ ID NO: 36519 - DNA, 77 bp, Homo sapiens
agcctggcaggagcctcaggactgtggacgaaggatgtggccttgggcatttgtcctgttcccacatgggcctggtc

SEQ ID NO: 36520 - DNA, 74 bp, Homo sapiens
aggagcctcaggactgtggacgaaggatgtggccttgggcatttgtcctgttcccacatgggcctggtccctcc

SEQ ID NO: 36521 - DNA, 73 bp, Homo sapiens
acgaaggatgtggccttgggcatttgtcctgttcccacatgggcctggtccctccctcctggccccagccaca

SEQ ID NO: 36522 - DNA, 77 bp, Homo sapiens
atttgtcctgttcccacatgggcctggtccctccctcctggccccagccacagctgccaggcctgacatggccttgc

SEQ ID NO: 36523 - DNA, 80 bp, Homo sapiens
ttcccacatgggcctggtccctccctcctggccccagccacagctgccaggcctgacatggccttgcctctcctgcagtc

SEQ ID NO: 36524 - DNA, 81 bp, Homo sapiens
tggtccctccctcctggccccagccacagctgccaggcctgacatggccttgcctctcctgcagtcttggtgactgagacc

SEQ ID NO: 36525 - DNA, 80 bp, Homo sapiens
cctcctggccccagccacagctgccaggcctgacatggccttgcctctcctgcagtcttggtgactgagacccttgggtg

SEQ ID NO: 36526 - DNA, 83 bp, Homo sapiens
cagccacagctgccaggcctgacatggccttgcctctcctgcagtcttggtgactgagacccttgggtggcgcttcccagctc

SEQ ID NO: 36527 - DNA, 83 bp, Homo sapiens
acagctgccaggcctgacatggccttgcctctcctgcagtcttggtgactgagacccttgggtggcgcttcccagctctgcag

SEQ ID NO: 36528 - DNA, 80 bp, Homo sapiens
cctgacatggccttgcctctcctgcagtcttggtgactgagacccttgggtggcgcttcccagctctgcaggccctcctg

SEQ ID NO: 36529 - DNA, 80 bp, Homo sapiens
ttgcctctcctgcagtcttggtgactgagacccttgggtggcgcttcccagctctgcaggccctcctggccttttctgca

SEQ ID NO: 36530 - DNA, 79 bp, Homo sapiens
tgcagtcttggtgactgagacccttgggtggcgcttcccagctctgcaggccctcctggccttttctgcagggtggaca

SEQ ID NO: 36531 - DNA, 76 bp, Homo sapiens
cttggtgactgagacccttgggtggcgcttcccagctctgcaggccctcctggccttttctgcagggtggacacag

SEQ ID NO: 36532 - DNA, 75 bp, Homo sapiens
agacccttgggtggcgcttcccagctctgcaggccctcctggccttttctgcagggtggacacagggtctgtgtg

SEQ ID NO: 36533 - DNA, 79 bp, Homo sapiens
ggtggcgcttcccagctctgcaggccctcctggccttttctgcagggtggacacagggtctgtgtgtgggcagcagccc

SEQ ID NO: 36534 - DNA, 81 bp, Homo sapiens
ctctgcaggccctcctggccttttctgcagggtggacacagggtctgtgtgtgggcagcagcccctgtctctcagcaagaa

SEQ ID NO: 36535 - DNA, 82 bp, Homo sapiens
ccttttctgcagggtggacacagggtctgtgtgtgggcagcagcccctgtctctcagcaagaataaagcagcttcctgtgca

SEQ ID NO: 36536 - DNA, 82 bp, Homo sapiens
agggtggacacagggtctgtgtgtgggcagcagcccctgtctctcagcaagaataaagcagcttcctgtgcacctctctgat

SEQ ID NO: 36537 - DNA, 84 bp, Homo sapiens
acacagggtctgtgtgtgggcagcagcccctgtctctcagcaagaataaagcagcttcctgtgcacctctctgattctccttgc

SEQ ID NO: 36538 - DNA, 85 bp, Homo sapiens
tgtgtgtgggcagcagcccctgtctctcagcaagaataaagcagcttcctgtgcacctctctgattctccttgcctctccactgg

SEQ ID NO: 36539 - DNA, 81 bp, Homo sapiens
agcccctgtctctcagcaagaataaagcagcttcctgtgcacctctctgattctccttgcctctccactgggcagccctgg

SEQ ID NO: 36540 - DNA, 73 bp, Homo sapiens
agacccctgggcctcaccccctctgcactcatttgccccttctacagacaccaccctggagcgagcggaccag

SEQ ID NO: 36541 - DNA, 77 bp, Homo sapiens
cctcaccccctctgcactcatttgccccttctacagacaccaccctggagcgagcggaccaggaggtcacatctgtc

SEQ ID NO: 36542 - DNA, 82 bp, Homo sapiens
tctgcactcatttgccccttctacagacaccaccctggagcgagcggaccaggaggtcacatctgtcctgaagagactgctg

SEQ ID NO: 36543 - DNA, 78 bp, Homo sapiens
actcatttgccccttctacagacaccaccctggagcgagcggaccaggaggtcacatctgtcctgaagagactgctgg

SEQ ID NO: 36544 - DNA, 76 bp, Homo sapiens
cccttctacagacaccaccctggagcgagcggaccaggaggtcacatctgtcctgaagagactgctgggccccaag

SEQ ID NO: 36545 - DNA, 76 bp, Homo sapiens
acaccaccctggagcgagcggaccaggaggtcacatctgtcctgaagagactgctgggccccaaggcgccaggccc

SEQ ID NO: 36546 - DNA, 77 bp, Homo sapiens
tggagcgagcggaccaggaggtcacatctgtcctgaagagactgctgggccccaaggcgccaggcccctccacaggg

SEQ ID NO: 36547 - DNA, 75 bp, Homo sapiens
accaggaggtcacatctgtcctgaagagactgctgggccccaaggcgccaggcccctccacaggggacctcactg

SEQ ID NO: 36548 - DNA, 76 bp, Homo sapiens
gtcacatctgtcctgaagagactgctgggccccaaggcgccaggcccctccacaggggacctcactggccctggcc

SEQ ID NO: 36549 - DNA, 73 bp, Homo sapiens
tcctgaagagactgctgggccccaaggcgccaggcccctccacaggggacctcactggccctggcccctgccc

SEQ ID NO: 36550 - DNA, 69 bp, Homo sapiens
actgctgggccccaaggcgccaggcccctccacaggggacctcactggccctggcccctgccccagggg

SEQ ID NO: 36551 - DNA, 69 bp, Homo sapiens
aaggcgccaggcccctccacaggggacctcactggccctggcccctgccccaggggggcacccgcactc

SEQ ID NO: 36552 - DNA, 67 bp, Homo sapiens
ccctccacaggggacctcactggccctggcccctgccccaggggggcacccgcactccaggaaaccg

SEQ ID NO: 36553 - DNA, 68 bp, Homo sapiens
gggacctcactggccctggcccctgccccaggggggcacccgcactccaggaaaccggctcccagccc

SEQ ID NO: 36554 - DNA, 68 bp, Homo sapiens
actggccctggcccctgccccaggggggcacccgcactccaggaaaccggctcccagcccccagtcac

SEQ ID NO: 36555 - DNA, 66 bp, Homo sapiens
ccctgccccaggggggcacccgcactccaggaaaccggctcccagcccccagtcaccggaacttcg

SEQ ID NO: 36556 - DNA, 67 bp, Homo sapiens
aggggggcacccgcactccaggaaaccggctcccagcccccagtcaccggaacttcggaggcacctg

SEQ ID NO: 36557 - DNA, 69 bp, Homo sapiens
acccgcactccaggaaaccggctcccagcccccagtcaccggaacttcggaggcacctggtgaggccca

SEQ ID NO: 36558 - DNA, 77 bp, Homo sapiens
gaaaccggctcccagcccccagtcaccggaacttcggaggcacctggtgaggcccagatgcatgctgatgacaaaga

SEQ ID NO: 36559 - DNA, 76 bp, Homo sapiens
cggctcccagcccccagtcaccggaacttcggaggcacctggtgaggcccagatgcatgctgatgacaaagacccc

SEQ ID NO: 36560 - DNA, 77 bp, Homo sapiens
ttgaagctcacgtgtacccgactcctacagccacctgccctgtctcccagcagccgtgcccccgagggtgccacagc

SEQ ID NO: 36561 - DNA, 73 bp, Homo sapiens
cgtgtacccgactcctacagccacctgccctgtctcccagcagccgtgcccccgagggtgccacagcccctcc

SEQ ID NO: 36562 - DNA, 74 bp, Homo sapiens
actcctacagccacctgccctgtctcccagcagccgtgcccccgagggtgccacagcccctcctccacgaaggc

SEQ ID NO: 36563 - DNA, 75 bp, Homo sapiens
ccacctgccctgtctcccagcagccgtgcccccgagggtgccacagcccctcctccacgaaggcccagagcagga

SEQ ID NO: 36564 - DNA, 75 bp, Homo sapiens
tctcccagcagccgtgcccccgagggtgccacagcccctcctccacgaaggcccagagcaggagccggaggccat

SEQ ID NO: 36565 - DNA, 75 bp, Homo sapiens
agccgtgcccccgagggtgccacagcccctcctccacgaaggcccagagcaggagccggaggccattgccagagc

SEQ ID NO: 36566 - DNA, 76 bp, Homo sapiens
agggtgccacagcccctcctccacgaaggcccagagcaggagccggaggccattgccagagcccaggaatggactg

SEQ ID NO: 36567 - DNA, 77 bp, Homo sapiens
acagcccctcctccacgaaggcccagagcaggagccggaggccattgccagagcccaggaatggactgtgcccattc

SEQ ID NO: 36568 - DNA, 76 bp, Homo sapiens
tccacgaaggcccagagcaggagccggaggccattgccagagcccaggaatggactgtgcccattcggtaacctcc

SEQ ID NO: 36569 - DNA, 77 bp, Homo sapiens
ccagagcaggagccggaggccattgccagagcccaggaatggactgtgcccattcggtaacctccccagactgctgg

SEQ ID NO: 36570 - DNA, 76 bp, Homo sapiens
agccggaggccattgccagagcccaggaatggactgtgcccattcggtaacctccccagactgctgggtcctgcag

SEQ ID NO: 36571 - DNA, 75 bp, Homo sapiens
aggccattgccagagcccaggaatggactgtgcccattcggtaacctccccagactgctgggtcctgcagtgggg

SEQ ID NO: 36572 - DNA, 73 bp, Homo sapiens
ctcagaacgtgtggcggcccggcagagcctcaccccacttcctaaccccaggatggagggtgcagcctggccc

SEQ ID NO: 36573 - DNA, 72 bp, Homo sapiens
cggcccggcagagcctcaccccacttcctaaccccaggatggagggtgcagcctggcccggggcaggcacag

SEQ ID NO: 36574 - DNA, 74 bp, Homo sapiens
agagcctcaccccacttcctaaccccaggatggagggtgcagcctggcccggggcaggcacaggggagctgctc

SEQ ID NO: 36575 - DNA, 75 bp, Homo sapiens
cacttcctaaccccaggatggagggtgcagcctggcccggggcaggcacaggggagctgctctgggacgtccaca

SEQ ID NO: 36576 - DNA, 76 bp, Homo sapiens
taaccccaggatggagggtgcagcctggcccggggcaggcacaggggagctgctctgggacgtccacagccacgtg

SEQ ID NO: 36577 - DNA, 79 bp, Homo sapiens
atggagggtgcagcctggcccggggcaggcacaggggagctgctctgggacgtccacagccacgtggtcagagagacca

SEQ ID NO: 36578 - DNA, 78 bp, Homo sapiens
agcctggcccggggcaggcacaggggagctgctctgggacgtccacagccacgtggtcagagagaccacacagaggac

SEQ ID NO: 36579 - DNA, 80 bp, Homo sapiens
gggcaggcacaggggagctgctctgggacgtccacagccacgtggtcagagagaccacacagaggacctacacataccag

SEQ ID NO: 36580 - DNA, 80 bp, Homo sapiens
aggggagctgctctgggacgtccacagccacgtggtcagagagaccacacagaggacctacacataccaggccatcgaca

SEQ ID NO: 36581 - DNA, 81 bp, Homo sapiens
ctctgggacgtccacagccacgtggtcagagagaccacacagaggacctacacataccaggccatcgacacgcacaccgca

SEQ ID NO: 36582 - DNA, 79 bp, Homo sapiens
acgtccacagccacgtggtcagagagaccacacagaggacctacacataccaggccatcgacacgcacaccgcacgtac

SEQ ID NO: 36583 - DNA, 75 bp, Homo sapiens
acgtggtcagagagaccacacagaggacctacacataccaggccatcgacacgcacaccgcacgtacggggttgg

SEQ ID NO: 36584 - DNA, 74 bp, Homo sapiens
agaccacacagaggacctacacataccaggccatcgacacgcacaccgcacgtacggggttgggcccagctggg

SEQ ID NO: 36585 - DNA, 73 bp, Homo sapiens
acagaggacctacacataccaggccatcgacacgcacaccgcacgtacggggttgggcccagctgggttataa

SEQ ID NO: 36586 - DNA, 74 bp, Homo sapiens
tgtggctggggaggtggtctccacagttccctccctgccctcccagggcccccatccatgcaggtaaccatcga

SEQ ID NO: 36587 - DNA, 75 bp, Homo sapiens
ggaggtggtctccacagttccctccctgccctcccagggcccccatccatgcaggtaaccatcgaggatgtgcag

SEQ ID NO: 36588 - DNA, 78 bp, Homo sapiens
ggtctccacagttccctccctgccctcccagggcccccatccatgcaggtaaccatcgaggatgtgcaggcacagaca

SEQ ID NO: 36589 - DNA, 77 bp, Homo sapiens
ctccctgccctcccagggcccccatccatgcaggtaaccatcgaggatgtgcaggcacagacaggcggaacggccca

SEQ ID NO: 36590 - DNA, 78 bp, Homo sapiens
tcccagggcccccatccatgcaggtaaccatcgaggatgtgcaggcacagacaggcggaacggcccaattcgaggcta

SEQ ID NO: 36591 - DNA, 81 bp, Homo sapiens
cccatccatgcaggtaaccatcgaggatgtgcaggcacagacaggcggaacggcccaattcgaggctatcattgagggcga

SEQ ID NO: 36592 - DNA, 80 bp, Homo sapiens
atgcaggtaaccatcgaggatgtgcaggcacagacaggcggaacggcccaattcgaggctatcattgagggcgacccaca

SEQ ID NO: 36593 - DNA, 78 bp, Homo sapiens
aaccatcgaggatgtgcaggcacagacaggcggaacggcccaattcgaggctatcattgagggcgacccacagccctc

SEQ ID NO: 36594 - DNA, 78 bp, Homo sapiens
tgcaggcacagacaggcggaacggcccaattcgaggctatcattgagggcgacccacagccctcggtgacctggtaca

SEQ ID NO: 36595 - DNA, 72 bp, Homo sapiens
acaggcggaacggcccaattcgaggctatcattgagggcgacccacagccctcggtgacctggtacaaggta

SEQ ID NO: 36596 - DNA, 73 bp, Homo sapiens
aacggcccaattcgaggctatcattgagggcgacccacagccctcggtgacctggtacaaggtaggcgcgcag

SEQ ID NO: 36597 - DNA, 74 bp, Homo sapiens
aattcgaggctatcattgagggcgacccacagccctcggtgacctggtacaaggtaggcgcgcaggtccaagtg

SEQ ID NO: 36598 - DNA, 75 bp, Homo sapiens
ctatcattgagggcgacccacagccctcggtgacctggtacaaggtaggcgcgcaggtccaagtgggtgagattc

SEQ ID NO: 36599 - DNA, 79 bp, Homo sapiens
tcccccagagtgggctgatagcagccctgccggtcctgtgcctccaggacagcgtccagctggtggacagcacccggct

SEQ ID NO: 36600 - DNA, 84 bp, Homo sapiens
tgggctgatagcagccctgccggtcctgtgcctccaggacagcgtccagctggtggacagcacccggcttagccagcagcaaga

SEQ ID NO: 36601 - DNA, 82 bp, Homo sapiens
atagcagccctgccggtcctgtgcctccaggacagcgtccagctggtggacagcacccggcttagccagcagcaagaaggca

SEQ ID NO: 36602 - DNA, 80 bp, Homo sapiens
ccggtcctgtgcctccaggacagcgtccagctggtggacagcacccggcttagccagcagcaagaaggcaccacatactc

SEQ ID NO: 36603 - DNA, 84 bp, Homo sapiens
tgtgcctccaggacagcgtccagctggtggacagcacccggcttagccagcagcaagaaggcaccacatactccctggtgctga

SEQ ID NO: 36604 - DNA, 83 bp, Homo sapiens
acagcgtccagctggtggacagcacccggcttagccagcagcaagaaggcaccacatactccctggtgctgaggcatgtggcc

SEQ ID NO: 36605 - DNA, 82 bp, Homo sapiens
agctggtggacagcacccggcttagccagcagcaagaaggcaccacatactccctggtgctgaggcatgtggcctcgaagga

SEQ ID NO: 36606 - DNA, 78 bp, Homo sapiens
acccggcttagccagcagcaagaaggcaccacatactccctggtgctgaggcatgtggcctcgaaggatgccggcgtt

SEQ ID NO: 36607 - DNA, 81 bp, Homo sapiens
ttagccagcagcaagaaggcaccacatactccctggtgctgaggcatgtggcctcgaaggatgccggcgtttacacctgcc

SEQ ID NO: 36608 - DNA, 77 bp, Homo sapiens
aagaaggcaccacatactccctggtgctgaggcatgtggcctcgaaggatgccggcgtttacacctgcctggcccaa

SEQ ID NO: 36609 - DNA, 76 bp, Homo sapiens
acatactccctggtgctgaggcatgtggcctcgaaggatgccggcgtttacacctgcctggcccaaaacactggtg

SEQ ID NO: 36610 - DNA, 76 bp, Homo sapiens
tccctggtgctgaggcatgtggcctcgaaggatgccggcgtttacacctgcctggcccaaaacactggtggccagg

SEQ ID NO: 36611 - DNA, 78 bp, Homo sapiens
aggcatgtggcctcgaaggatgccggcgtttacacctgcctggcccaaaacactggtggccaggtgctctgcaaggca

SEQ ID NO: 36612 - DNA, 80 bp, Homo sapiens
tcgaaggatgccggcgtttacacctgcctggcccaaaacactggtggccaggtgctctgcaaggcagagctgctggtgct

SEQ ID NO: 36613 - DNA, 79 bp, Homo sapiens
ggatgccggcgtttacacctgcctggcccaaaacactggtggccaggtgctctgcaaggcagagctgctggtgcttggg

SEQ ID NO: 36614 - DNA, 80 bp, Homo sapiens
tacacctgcctggcccaaaacactggtggccaggtgctctgcaaggcagagctgctggtgcttgggggtgagttggtcta

SEQ ID NO: 36615 - DNA, 77 bp, Homo sapiens
gcccaaaacactggtggccaggtgctctgcaaggcagagctgctggtgcttgggggtgagttggtctacccctcctg

SEQ ID NO: 36616 - DNA, 76 bp, Homo sapiens
aaacactggtggccaggtgctctgcaaggcagagctgctggtgcttgggggtgagttggtctacccctcctgggcc

SEQ ID NO: 36617 - DNA, 73 bp, Homo sapiens
ttccatggggatcagggtggtcacctttgcccataccagccgcttcccactccttaggggacaatgagccgga

SEQ ID NO: 36618 - DNA, 75 bp, Homo sapiens
atcagggtggtcacctttgcccataccagccgcttcccactccttaggggacaatgagccggactcagagaagca

SEQ ID NO: 36619 - DNA, 75 bp, Homo sapiens
tggtcacctttgcccataccagccgcttcccactccttaggggacaatgagccggactcagagaagcaaagccac

SEQ ID NO: 36620 - DNA, 75 bp, Homo sapiens
ataccagccgcttcccactccttaggggacaatgagccggactcagagaagcaaagccaccggaggaagctgcac

SEQ ID NO: 36621 - DNA, 76 bp, Homo sapiens
cttcccactccttaggggacaatgagccggactcagagaagcaaagccaccggaggaagctgcactccttctatga

SEQ ID NO: 36622 - DNA, 76 bp, Homo sapiens
actccttaggggacaatgagccggactcagagaagcaaagccaccggaggaagctgcactccttctatgaggtcaa

SEQ ID NO: 36623 - DNA, 78 bp, Homo sapiens
acaatgagccggactcagagaagcaaagccaccggaggaagctgcactccttctatgaggtcaaggaggagattggaa

SEQ ID NO: 36624 - DNA, 77 bp, Homo sapiens
actcagagaagcaaagccaccggaggaagctgcactccttctatgaggtcaaggaggagattggaaggtagcaccca

SEQ ID NO: 36625 - DNA, 75 bp, Homo sapiens
agaagcaaagccaccggaggaagctgcactccttctatgaggtcaaggaggagattggaaggtagcacccagccc

SEQ ID NO: 36626 - DNA, 71 bp, Homo sapiens
accggaggaagctgcactccttctatgaggtcaaggaggagattggaaggtagcacccagccccctttccc

SEQ ID NO: 36627 - DNA, 73 bp, Homo sapiens
aagctgcactccttctatgaggtcaaggaggagattggaaggtagcacccagccccctttcccctggactgcc

SEQ ID NO: 36628 - DNA, 72 bp, Homo sapiens
tctatgaggtcaaggaggagattggaaggtagcacccagccccctttcccctggactgccggatggctcctt

SEQ ID NO: 36629 - DNA, 67 bp, Homo sapiens
tcctttccccaggccacctgggcttccctcactccctccttcctaggggcgtgtttggcttcgtaaa

SEQ ID NO: 36630 - DNA, 71 bp, Homo sapiens
aggccacctgggcttccctcactccctccttcctaggggcgtgtttggcttcgtaaaaagagtgcagcaca

SEQ ID NO: 36631 - DNA, 70 bp, Homo sapiens
tgggcttccctcactccctccttcctaggggcgtgtttggcttcgtaaaaagagtgcagcacaaaggaaa

SEQ ID NO: 36632 - DNA, 71 bp, Homo sapiens
actccctccttcctaggggcgtgtttggcttcgtaaaaagagtgcagcacaaaggaaacaagatcttgtgc

SEQ ID NO: 36633 - DNA, 75 bp, Homo sapiens
ttcctaggggcgtgtttggcttcgtaaaaagagtgcagcacaaaggaaacaagatcttgtgcgctgccaagttca

SEQ ID NO: 36634 - DNA, 74 bp, Homo sapiens
gtgtttggcttcgtaaaaagagtgcagcacaaaggaaacaagatcttgtgcgctgccaagttcatccccctacg

SEQ ID NO: 36635 - DNA, 76 bp, Homo sapiens
ttcgtaaaaagagtgcagcacaaaggaaacaagatcttgtgcgctgccaagttcatccccctacggagcagaactc

SEQ ID NO: 36636 - DNA, 75 bp, Homo sapiens
aaaagagtgcagcacaaaggaaacaagatcttgtgcgctgccaagttcatccccctacggagcagaactcgggcc

SEQ ID NO: 36637 - DNA, 74 bp, Homo sapiens
aaaggaaacaagatcttgtgcgctgccaagttcatccccctacggagcagaactcgggcccaggcatacaggga

SEQ ID NO: 36638 - DNA, 77 bp, Homo sapiens
aaacaagatcttgtgcgctgccaagttcatccccctacggagcagaactcgggcccaggcatacagggagcgagaca

SEQ ID NO: 36639 - DNA, 79 bp, Homo sapiens
ttgtgcgctgccaagttcatccccctacggagcagaactcgggcccaggcatacagggagcgagacatcctggccgcgc

SEQ ID NO: 36640 - DNA, 76 bp, Homo sapiens
aagttcatccccctacggagcagaactcgggcccaggcatacagggagcgagacatcctggccgcgctgagccacc

SEQ ID NO: 36641 - DNA, 77 bp, Homo sapiens
ctacggagcagaactcgggcccaggcatacagggagcgagacatcctggccgcgctgagccacccgctggtcacggg

SEQ ID NO: 36642 - DNA, 78 bp, Homo sapiens
agaactcgggcccaggcatacagggagcgagacatcctggccgcgctgagccacccgctggtcacggggctgctggac

SEQ ID NO: 36643 - DNA, 79 bp, Homo sapiens
cccaggcatacagggagcgagacatcctggccgcgctgagccacccgctggtcacggggctgctggaccagtttgagac

SEQ ID NO: 36644 - DNA, 78 bp, Homo sapiens
atacagggagcgagacatcctggccgcgctgagccacccgctggtcacggggctgctggaccagtttgagacccgcaa

SEQ ID NO: 36645 - DNA, 78 bp, Homo sapiens
acatcctggccgcgctgagccacccgctggtcacggggctgctggaccagtttgagacccgcaagaccctcatcctca

SEQ ID NO: 36646 - DNA, 80 bp, Homo sapiens
gcgctgagccacccgctggtcacggggctgctggaccagtttgagacccgcaagaccctcatcctcatcctggagctgta

SEQ ID NO: 36647 - DNA, 77 bp, Homo sapiens
agccacccgctggtcacggggctgctggaccagtttgagacccgcaagaccctcatcctcatcctggagctgtatcc

SEQ ID NO: 36648 - DNA, 79 bp, Homo sapiens
ctggaccagtttgagacccgcaagaccctcatcctcatcctggagctgtatcctgccctcagcccctgagacggcttga

SEQ ID NO: 36649 - DNA, 77 bp, Homo sapiens
agtttgagacccgcaagaccctcatcctcatcctggagctgtatcctgccctcagcccctgagacggcttgaggagg

SEQ ID NO: 36650 - DNA, 74 bp, Homo sapiens
agtgtgggtttctggggacaggcaggtttcagcctcccaagcctgcttttccttgatgggatcccaggtgctca

SEQ ID NO: 36651 - DNA, 75 bp, Homo sapiens
gtttctggggacaggcaggtttcagcctcccaagcctgcttttccttgatgggatcccaggtgctcatccgagga

SEQ ID NO: 36652 - DNA, 79 bp, Homo sapiens
gcaggtttcagcctcccaagcctgcttttccttgatgggatcccaggtgctcatccgaggagctgctggaccgcctgta

SEQ ID NO: 36653 - DNA, 77 bp, Homo sapiens
agcctcccaagcctgcttttccttgatgggatcccaggtgctcatccgaggagctgctggaccgcctgtacaggaag

SEQ ID NO: 36654 - DNA, 77 bp, Homo sapiens
cctgcttttccttgatgggatcccaggtgctcatccgaggagctgctggaccgcctgtacaggaagggcgtggtgac

SEQ ID NO: 36655 - DNA, 76 bp, Homo sapiens
ttttccttgatgggatcccaggtgctcatccgaggagctgctggaccgcctgtacaggaagggcgtggtgacggag

SEQ ID NO: 36656 - DNA, 76 bp, Homo sapiens
atcccaggtgctcatccgaggagctgctggaccgcctgtacaggaagggcgtggtgacggaggccgaggtgactgg

SEQ ID NO: 36657 - DNA, 78 bp, Homo sapiens
ggtgctcatccgaggagctgctggaccgcctgtacaggaagggcgtggtgacggaggccgaggtgactgggctgccgc

SEQ ID NO: 36658 - DNA, 76 bp, Homo sapiens
aggagctgctggaccgcctgtacaggaagggcgtggtgacggaggccgaggtgactgggctgccgcccgccactgc

SEQ ID NO: 36659 - DNA, 74 bp, Homo sapiens
ctggaccgcctgtacaggaagggcgtggtgacggaggccgaggtgactgggctgccgcccgccactgccccagc

SEQ ID NO: 36660 - DNA, 77 bp, Homo sapiens
tgtacaggaagggcgtggtgacggaggccgaggtgactgggctgccgcccgccactgccccagccatgcaccctgcc

SEQ ID NO: 36661 - DNA, 75 bp, Homo sapiens
gggcgtggtgacggaggccgaggtgactgggctgccgcccgccactgccccagccatgcaccctgccccagcccc

SEQ ID NO: 36662 - DNA, 74 bp, Homo sapiens
ttaaagtggagagggaggctggggctgggctcccgcctgaatagcggcccttgccgcaggtcaaggtctacatc

SEQ ID NO: 36663 - DNA, 77 bp, Homo sapiens
agggaggctggggctgggctcccgcctgaatagcggcccttgccgcaggtcaaggtctacatccagcagctggtgga

SEQ ID NO: 36664 - DNA, 79 bp, Homo sapiens
ggctgggctcccgcctgaatagcggcccttgccgcaggtcaaggtctacatccagcagctggtggaggggctgcactac

SEQ ID NO: 36665 - DNA, 82 bp, Homo sapiens
tcccgcctgaatagcggcccttgccgcaggtcaaggtctacatccagcagctggtggaggggctgcactacctgcacagcca

SEQ ID NO: 36666 - DNA, 81 bp, Homo sapiens
aatagcggcccttgccgcaggtcaaggtctacatccagcagctggtggaggggctgcactacctgcacagccatggcgttc

SEQ ID NO: 36667 - DNA, 84 bp, Homo sapiens
ttgccgcaggtcaaggtctacatccagcagctggtggaggggctgcactacctgcacagccatggcgttctccacctggacata

SEQ ID NO: 36668 - DNA, 79 bp, Homo sapiens
aaggtctacatccagcagctggtggaggggctgcactacctgcacagccatggcgttctccacctggacataaaggttc

SEQ ID NO: 36669 - DNA, 84 bp, Homo sapiens
tacatccagcagctggtggaggggctgcactacctgcacagccatggcgttctccacctggacataaaggttcgcatgtcctca

SEQ ID NO: 36670 - DNA, 78 bp, Homo sapiens
agctggtggaggggctgcactacctgcacagccatggcgttctccacctggacataaaggttcgcatgtcctcacccc

SEQ ID NO: 36671 - DNA, 80 bp, Homo sapiens
ctgcactacctgcacagccatggcgttctccacctggacataaaggttcgcatgtcctcacccctgcaccccagagcctg

SEQ ID NO: 36672 - DNA, 77 bp, Homo sapiens
ctacctgcacagccatggcgttctccacctggacataaaggttcgcatgtcctcacccctgcaccccagagcctggg

SEQ ID NO: 36673 - DNA, 77 bp, Homo sapiens
agccatggcgttctccacctggacataaaggttcgcatgtcctcacccctgcaccccagagcctggggcctgcaggc

SEQ ID NO: 36674 - DNA, 74 bp, Homo sapiens
agtcacccccttagggcacggctctcacccactcccaactctccccaacagccctctaacatcctgatggtgca

SEQ ID NO: 36675 - DNA, 77 bp, Homo sapiens
gcacggctctcacccactcccaactctccccaacagccctctaacatcctgatggtgcatcctgcccgggaagacat

SEQ ID NO: 36676 - DNA, 75 bp, Homo sapiens
tcacccactcccaactctccccaacagccctctaacatcctgatggtgcatcctgcccgggaagacattaaaatc

SEQ ID NO: 36677 - DNA, 75 bp, Homo sapiens
ccaactctccccaacagccctctaacatcctgatggtgcatcctgcccgggaagacattaaaatctgcgactttg

SEQ ID NO: 36678 - DNA, 77 bp, Homo sapiens
caacagccctctaacatcctgatggtgcatcctgcccgggaagacattaaaatctgcgactttggctttgcccagaa

SEQ ID NO: 36679 - DNA, 77 bp, Homo sapiens
ccctctaacatcctgatggtgcatcctgcccgggaagacattaaaatctgcgactttggctttgcccagaacatcac

SEQ ID NO: 36680 - DNA, 79 bp, Homo sapiens
atcctgatggtgcatcctgcccgggaagacattaaaatctgcgactttggctttgcccagaacatcaccccagcagagc

SEQ ID NO: 36681 - DNA, 79 bp, Homo sapiens
atcctgcccgggaagacattaaaatctgcgactttggctttgcccagaacatcaccccagcagagctgcagttcagcca

SEQ ID NO: 36682 - DNA, 78 bp, Homo sapiens
aagacattaaaatctgcgactttggctttgcccagaacatcaccccagcagagctgcagttcagccagtacggctccc

SEQ ID NO: 36683 - DNA, 78 bp, Homo sapiens
attaaaatctgcgactttggctttgcccagaacatcaccccagcagagctgcagttcagccagtacggctcccctgag

SEQ ID NO: 36684 - DNA, 77 bp, Homo sapiens
cgactttggctttgcccagaacatcaccccagcagagctgcagttcagccagtacggctcccctgagttcgtctccc

SEQ ID NO: 36685 - DNA, 80 bp, Homo sapiens
tttgcccagaacatcaccccagcagagctgcagttcagccagtacggctcccctgagttcgtctcccccgagatcatcca

SEQ ID NO: 36686 - DNA, 79 bp, Homo sapiens
aacatcaccccagcagagctgcagttcagccagtacggctcccctgagttcgtctcccccgagatcatccagcagaacc

SEQ ID NO: 36687 - DNA, 79 bp, Homo sapiens
agagctgcagttcagccagtacggctcccctgagttcgtctcccccgagatcatccagcagaaccctgtgagcgaagcc

SEQ ID NO: 36688 - DNA, 77 bp, Homo sapiens
tcagccagtacggctcccctgagttcgtctcccccgagatcatccagcagaaccctgtgagcgaagcctccgacatt

SEQ ID NO: 36689 - DNA, 74 bp, Homo sapiens
agtacggctcccctgagttcgtctcccccgagatcatccagcagaaccctgtgagcgaagcctccgacatttgg

SEQ ID NO: 36690 - DNA, 76 bp, Homo sapiens
ccctgagttcgtctcccccgagatcatccagcagaaccctgtgagcgaagcctccgacatttggtgagtgggtggc

SEQ ID NO: 36691 - DNA, 76 bp, Homo sapiens
cgtctcccccgagatcatccagcagaaccctgtgagcgaagcctccgacatttggtgagtgggtggctgggccaac

SEQ ID NO: 36692 - DNA, 76 bp, Homo sapiens
agatcatccagcagaaccctgtgagcgaagcctccgacatttggtgagtgggtggctgggccaacgggtctgggtc

SEQ ID NO: 36693 - DNA, 78 bp, Homo sapiens
tgggctccccacttccctgtgtgtgtgcctcttacctgacagccaggcctggggtgacacacagtgtgcgcttttgtc

SEQ ID NO: 36694 - DNA, 79 bp, Homo sapiens
acttccctgtgtgtgtgcctcttacctgacagccaggcctggggtgacacacagtgtgcgcttttgtcttgcagggcca

SEQ ID NO: 36695 - DNA, 83 bp, Homo sapiens
tgtgtgtgcctcttacctgacagccaggcctggggtgacacacagtgtgcgcttttgtcttgcagggccatgggtgtcatctc

SEQ ID NO: 36696 - DNA, 81 bp, Homo sapiens
tcttacctgacagccaggcctggggtgacacacagtgtgcgcttttgtcttgcagggccatgggtgtcatctcctacctca

SEQ ID NO: 36697 - DNA, 82 bp, Homo sapiens
acagccaggcctggggtgacacacagtgtgcgcttttgtcttgcagggccatgggtgtcatctcctacctcaggtgagcaga

SEQ ID NO: 36698 - DNA, 81 bp, Homo sapiens
cctggggtgacacacagtgtgcgcttttgtcttgcagggccatgggtgtcatctcctacctcaggtgagcagagccctgcc

SEQ ID NO: 36699 - DNA, 84 bp, Homo sapiens
acacacagtgtgcgcttttgtcttgcagggccatgggtgtcatctcctacctcaggtgagcagagccctgccccatcagctgcc

SEQ ID NO: 36700 - DNA, 83 bp, Homo sapiens
ttttgtcttgcagggccatgggtgtcatctcctacctcaggtgagcagagccctgccccatcagctgcctcctccaaagctga

SEQ ID NO: 36701 - DNA, 86 bp, Homo sapiens
tcttgcagggccatgggtgtcatctcctacctcaggtgagcagagccctgccccatcagctgcctcctccaaagctgacatgagac

SEQ ID NO: 36702 - DNA, 81 bp, Homo sapiens
ggtgtcatctcctacctcaggtgagcagagccctgccccatcagctgcctcctccaaagctgacatgagacccctcccttg

SEQ ID NO: 36703 - DNA, 80 bp, Homo sapiens
atctcctacctcaggtgagcagagccctgccccatcagctgcctcctccaaagctgacatgagacccctcccttgtaggc

SEQ ID NO: 36704 - DNA, 77 bp, Homo sapiens
aggtgagcagagccctgccccatcagctgcctcctccaaagctgacatgagacccctcccttgtaggcccaccgagg

SEQ ID NO: 36705 - DNA, 80 bp, Homo sapiens
atctgcggtcagggcctcatctgagggctggaccctccctctgtcttcagcctgacctgctcatccccatttgccggcga

SEQ ID NO: 36706 - DNA, 80 bp, Homo sapiens
cctcatctgagggctggaccctccctctgtcttcagcctgacctgctcatccccatttgccggcgagagtgaccgtgcca

SEQ ID NO: 36707 - DNA, 76 bp, Homo sapiens
agggctggaccctccctctgtcttcagcctgacctgctcatccccatttgccggcgagagtgaccgtgccaccctc

SEQ ID NO: 36708 - DNA, 77 bp, Homo sapiens
ctccctctgtcttcagcctgacctgctcatccccatttgccggcgagagtgaccgtgccaccctcctgaacgtcctg

SEQ ID NO: 36709 - DNA, 76 bp, Homo sapiens
ctgtcttcagcctgacctgctcatccccatttgccggcgagagtgaccgtgccaccctcctgaacgtcctggaggg

SEQ ID NO: 36710 - DNA, 76 bp, Homo sapiens
acctgctcatccccatttgccggcgagagtgaccgtgccaccctcctgaacgtcctggaggggcgcgtgtcatgga

SEQ ID NO: 36711 - DNA, 75 bp, Homo sapiens
atccccatttgccggcgagagtgaccgtgccaccctcctgaacgtcctggaggggcgcgtgtcatggagcagccc

SEQ ID NO: 36712 - DNA, 78 bp, Homo sapiens
tttgccggcgagagtgaccgtgccaccctcctgaacgtcctggaggggcgcgtgtcatggagcagccccatggctgcc

SEQ ID NO: 36713 - DNA, 78 bp, Homo sapiens
agtgaccgtgccaccctcctgaacgtcctggaggggcgcgtgtcatggagcagccccatggctgcccacctcagcgaa

SEQ ID NO: 36714 - DNA, 77 bp, Homo sapiens
accctcctgaacgtcctggaggggcgcgtgtcatggagcagccccatggctgcccacctcagcgaagacgccaaaga

SEQ ID NO: 36715 - DNA, 80 bp, Homo sapiens
ctgaacgtcctggaggggcgcgtgtcatggagcagccccatggctgcccacctcagcgaagacgccaaagacttcatcaa

SEQ ID NO: 36716 - DNA, 84 bp, Homo sapiens
gggcgcgtgtcatggagcagccccatggctgcccacctcagcgaagacgccaaagacttcatcaaggctacgctgcagagagcc

SEQ ID NO: 36717 - DNA, 86 bp, Homo sapiens
tgtcatggagcagccccatggctgcccacctcagcgaagacgccaaagacttcatcaaggctacgctgcagagagcccctcagtga

SEQ ID NO: 36718 - DNA, 81 bp, Homo sapiens
ccccatggctgcccacctcagcgaagacgccaaagacttcatcaaggctacgctgcagagagcccctcagtgagtgcaccc

SEQ ID NO: 36719 - DNA, 81 bp, Homo sapiens
tgcccacctcagcgaagacgccaaagacttcatcaaggctacgctgcagagagcccctcagtgagtgcacccccaggcttc

SEQ ID NO: 36720 - DNA, 81 bp, Homo sapiens
cctcagcgaagacgccaaagacttcatcaaggctacgctgcagagagcccctcagtgagtgcacccccaggcttctcctgc

SEQ ID NO: 36721 - DNA, 75 bp, Homo sapiens
agagagcccctcagtgagtgcacccccaggcttctcctgcccggggccagtcagccctgccccgggggcagctga

SEQ ID NO: 36722 - DNA, 75 bp, Homo sapiens
ctcagtgagtgcacccccaggcttctcctgcccggggccagtcagccctgccccgggggcagctgaccacctggc

SEQ ID NO: 36723 - DNA, 73 bp, Homo sapiens
tgcccggggccagtcagccctgccccgggggcagctgaccacctggcccctcctgagccttcctctccctgta

SEQ ID NO: 36724 - DNA, 71 bp, Homo sapiens
agtcagccctgccccgggggcagctgaccacctggcccctcctgagccttcctctccctgtagggcccggc

SEQ ID NO: 36725 - DNA, 71 bp, Homo sapiens
ctgccccgggggcagctgaccacctggcccctcctgagccttcctctccctgtagggcccggcctagtgcg

SEQ ID NO: 36726 - DNA, 74 bp, Homo sapiens
cagctgaccacctggcccctcctgagccttcctctccctgtagggcccggcctagtgcggcccagtgcctctcc

SEQ ID NO: 36727 - DNA, 70 bp, Homo sapiens
acctggcccctcctgagccttcctctccctgtagggcccggcctagtgcggcccagtgcctctcccaccc

SEQ ID NO: 36728 - DNA, 71 bp, Homo sapiens
ctcctgagccttcctctccctgtagggcccggcctagtgcggcccagtgcctctcccacccctggttcctg

SEQ ID NO: 36729 - DNA, 72 bp, Homo sapiens
ttcctctccctgtagggcccggcctagtgcggcccagtgcctctcccacccctggttcctggtgagtatcag

SEQ ID NO: 36730 - DNA, 72 bp, Homo sapiens
ccctgtagggcccggcctagtgcggcccagtgcctctcccacccctggttcctggtgagtatcagggtcagc

SEQ ID NO: 36731 - DNA, 75 bp, Homo sapiens
cccggcctagtgcggcccagtgcctctcccacccctggttcctggtgagtatcagggtcagccccacactatgca

SEQ ID NO: 36732 - DNA, 77 bp, Homo sapiens
tgcggcccagtgcctctcccacccctggttcctggtgagtatcagggtcagccccacactatgcagggggagcctga

SEQ ID NO: 36733 - DNA, 74 bp, Homo sapiens
tctcccacccctggttcctggtgagtatcagggtcagccccacactatgcagggggagcctgaggccaacaggg

SEQ ID NO: 36734 - DNA, 77 bp, Homo sapiens
ccacctcggtctcccagaaatccatgcctgcggaggaggcccacttcatcaacaccaagcagctcaagttcctcctg

SEQ ID NO: 36735 - DNA, 78 bp, Homo sapiens
tctcccagaaatccatgcctgcggaggaggcccacttcatcaacaccaagcagctcaagttcctcctggcccgaagtc

SEQ ID NO: 36736 - DNA, 79 bp, Homo sapiens
agaaatccatgcctgcggaggaggcccacttcatcaacaccaagcagctcaagttcctcctggcccgaagtcgctggca

SEQ ID NO: 36737 - DNA, 79 bp, Homo sapiens
tgcggaggaggcccacttcatcaacaccaagcagctcaagttcctcctggcccgaagtcgctggcaggtgagccgtgac

SEQ ID NO: 36738 - DNA, 79 bp, Homo sapiens
ccacttcatcaacaccaagcagctcaagttcctcctggcccgaagtcgctggcaggtgagccgtgaccatctgagtagg

SEQ ID NO: 36739 - DNA, 78 bp, Homo sapiens
aacaccaagcagctcaagttcctcctggcccgaagtcgctggcaggtgagccgtgaccatctgagtagggaccagtga

SEQ ID NO: 36740 - DNA, 76 bp, Homo sapiens
aagcagctcaagttcctcctggcccgaagtcgctggcaggtgagccgtgaccatctgagtagggaccagtgaaggg

SEQ ID NO: 36741 - DNA, 72 bp, Homo sapiens
aagttcctcctggcccgaagtcgctggcaggtgagccgtgaccatctgagtagggaccagtgaaggggaaac

SEQ ID NO: 36742 - DNA, 78 bp, Homo sapiens
tcctgggtctccccacctgatgcctgctgccccccatgcggttccagcgttccctgatgagctacaagtccatcctgg

SEQ ID NO: 36743 - DNA, 82 bp, Homo sapiens
cccacctgatgcctgctgccccccatgcggttccagcgttccctgatgagctacaagtccatcctggtgatgcgctccatcc

SEQ ID NO: 36744 - DNA, 86 bp, Homo sapiens
ctgatgcctgctgccccccatgcggttccagcgttccctgatgagctacaagtccatcctggtgatgcgctccatccctgagctgc

SEQ ID NO: 36745 - DNA, 82 bp, Homo sapiens
ctgccccccatgcggttccagcgttccctgatgagctacaagtccatcctggtgatgcgctccatccctgagctgctgcggg

SEQ ID NO: 36746 - DNA, 81 bp, Homo sapiens
ggttccagcgttccctgatgagctacaagtccatcctggtgatgcgctccatccctgagctgctgcggggcccacccgaca

SEQ ID NO: 36747 - DNA, 80 bp, Homo sapiens
cgttccctgatgagctacaagtccatcctggtgatgcgctccatccctgagctgctgcggggcccacccgacagcccctc

SEQ ID NO: 36748 - DNA, 78 bp, Homo sapiens
agctacaagtccatcctggtgatgcgctccatccctgagctgctgcggggcccacccgacagcccctccctcggcgta

SEQ ID NO: 36749 - DNA, 76 bp, Homo sapiens
agtccatcctggtgatgcgctccatccctgagctgctgcggggcccacccgacagcccctccctcggcgtagcccg

SEQ ID NO: 36750 - DNA, 79 bp, Homo sapiens
tgatgcgctccatccctgagctgctgcggggcccacccgacagcccctccctcggcgtagcccggcacctctgcaggga

SEQ ID NO: 36751 - DNA, 74 bp, Homo sapiens
atccctgagctgctgcggggcccacccgacagcccctccctcggcgtagcccggcacctctgcagggacactgg

SEQ ID NO: 36752 - DNA, 73 bp, Homo sapiens
ctgcggggcccacccgacagcccctccctcggcgtagcccggcacctctgcagggacactggtggctcctcca

SEQ ID NO: 36753 - DNA, 72 bp, Homo sapiens
cccacccgacagcccctccctcggcgtagcccggcacctctgcagggacactggtggctcctccagttcctc

SEQ ID NO: 36754 - DNA, 73 bp, Homo sapiens
acagcccctccctcggcgtagcccggcacctctgcagggacactggtggctcctccagttcctcctcctcctc

SEQ ID NO: 36755 - DNA, 74 bp, Homo sapiens
tcctcctcctcctctgacaacgagctcgccccatttgcccgggctaagtcactgccaccctccccggtgacaca

SEQ ID NO: 36756 - DNA, 75 bp, Homo sapiens
tcctcctctgacaacgagctcgccccatttgcccgggctaagtcactgccaccctccccggtgacacactcacca

SEQ ID NO: 36757 - DNA, 75 bp, Homo sapiens
acaacgagctcgccccatttgcccgggctaagtcactgccaccctccccggtgacacactcaccactgctgcacc

SEQ ID NO: 36758 - DNA, 73 bp, Homo sapiens
agctcgccccatttgcccgggctaagtcactgccaccctccccggtgacacactcaccactgctgcacccccg

SEQ ID NO: 36759 - DNA, 72 bp, Homo sapiens
ccatttgcccgggctaagtcactgccaccctccccggtgacacactcaccactgctgcacccccggggcttc

SEQ ID NO: 36760 - DNA, 71 bp, Homo sapiens
atttgcccgggctaagtcactgccaccctccccggtgacacactcaccactgctgcacccccggggcttcc

SEQ ID NO: 36761 - DNA, 73 bp, Homo sapiens
gggctaagtcactgccaccctccccggtgacacactcaccactgctgcacccccggggcttcctgcggccctc

SEQ ID NO: 36762 - DNA, 74 bp, Homo sapiens
taagtcactgccaccctccccggtgacacactcaccactgctgcacccccggggcttcctgcggccctcggcca

SEQ ID NO: 36763 - DNA, 73 bp, Homo sapiens
aagtcactgccaccctccccggtgacacactcaccactgctgcacccccggggcttcctgcggccctcggcca

SEQ ID NO: 36764 - DNA, 73 bp, Homo sapiens
accctccccggtgacacactcaccactgctgcacccccggggcttcctgcggccctcggccagcctgcctgag

SEQ ID NO: 36765 - DNA, 75 bp, Homo sapiens
cccggtgacacactcaccactgctgcacccccggggcttcctgcggccctcggccagcctgcctgaggaagccga

SEQ ID NO: 36766 - DNA, 79 bp, Homo sapiens
tgacacactcaccactgctgcacccccggggcttcctgcggccctcggccagcctgcctgaggaagccgaggccagtga

SEQ ID NO: 36767 - DNA, 76 bp, Homo sapiens
actgctgcacccccggggcttcctgcggccctcggccagcctgcctgaggaagccgaggccagtgagcgctccacc

SEQ ID NO: 36768 - DNA, 77 bp, Homo sapiens
gggcttcctgcggccctcggccagcctgcctgaggaagccgaggccagtgagcgctccaccgaggccccagctccgc

SEQ ID NO: 36769 - DNA, 78 bp, Homo sapiens
ccagcctgcctgaggaagccgaggccagtgagcgctccaccgaggccccagctccgcctgcatctcccgagggtgccg

SEQ ID NO: 36770 - DNA, 76 bp, Homo sapiens
tgaggaagccgaggccagtgagcgctccaccgaggccccagctccgcctgcatctcccgagggtgccgggccaccg

SEQ ID NO: 36771 - DNA, 75 bp, Homo sapiens
agtgagcgctccaccgaggccccagctccgcctgcatctcccgagggtgccgggccaccggccgcccagggctgc

SEQ ID NO: 36772 - DNA, 74 bp, Homo sapiens
cgaggccccagctccgcctgcatctcccgagggtgccgggccaccggccgcccagggctgcgtgccccggcaca

SEQ ID NO: 36773 - DNA, 77 bp, Homo sapiens
agctccgcctgcatctcccgagggtgccgggccaccggccgcccagggctgcgtgccccggcacagcgtcatccgca

SEQ ID NO: 36774 - DNA, 74 bp, Homo sapiens
agggtgccgggccaccggccgcccagggctgcgtgccccggcacagcgtcatccgcagcctgttctaccaccag

SEQ ID NO: 36775 - DNA, 76 bp, Homo sapiens
ccaccggccgcccagggctgcgtgccccggcacagcgtcatccgcagcctgttctaccaccaggcgggtgagagcc

SEQ ID NO: 36776 - DNA, 78 bp, Homo sapiens
ggctgcgtgccccggcacagcgtcatccgcagcctgttctaccaccaggcgggtgagagccctgagcacggggccctg

SEQ ID NO: 36777 - DNA, 74 bp, Homo sapiens
cccggcacagcgtcatccgcagcctgttctaccaccaggcgggtgagagccctgagcacggggccctggccccg

SEQ ID NO: 36778 - DNA, 74 bp, Homo sapiens
cgtcatccgcagcctgttctaccaccaggcgggtgagagccctgagcacggggccctggccccggggagcaggc

SEQ ID NO: 36779 - DNA, 71 bp, Homo sapiens
agcctgttctaccaccaggcgggtgagagccctgagcacggggccctggccccggggagcaggcggcaccc

SEQ ID NO: 36780 - DNA, 69 bp, Homo sapiens
accaccaggcgggtgagagccctgagcacggggccctggccccggggagcaggcggcacccggcccggc

SEQ ID NO: 36781 - DNA, 73 bp, Homo sapiens
tgagagccctgagcacggggccctggccccggggagcaggcggcacccggcccggcggcggcacctgctgaag

SEQ ID NO: 36782 - DNA, 69 bp, Homo sapiens
gcacggggccctggccccggggagcaggcggcacccggcccggcggcggcacctgctgaagggcgggta

SEQ ID NO: 36783 - DNA, 69 bp, Homo sapiens
cctggccccggggagcaggcggcacccggcccggcggcggcacctgctgaagggcgggtacattgcggg

SEQ ID NO: 36784 - DNA, 75 bp, Homo sapiens
ggagcaggcggcacccggcccggcggcggcacctgctgaagggcgggtacattgcgggggcgctgccaggcctgc

SEQ ID NO: 36785 - DNA, 77 bp, Homo sapiens
gcacccggcccggcggcggcacctgctgaagggcgggtacattgcgggggcgctgccaggcctgcgcgagccactga

SEQ ID NO: 36786 - DNA, 78 bp, Homo sapiens
cccggcggcggcacctgctgaagggcgggtacattgcgggggcgctgccaggcctgcgcgagccactgatggagcacc

SEQ ID NO: 36787 - DNA, 80 bp, Homo sapiens
ctgaagggcgggtacattgcgggggcgctgccaggcctgcgcgagccactgatggagcaccgcgtgctggaggaggaggc

SEQ ID NO: 36788 - DNA, 79 bp, Homo sapiens
cctgcgcgagccactgatggagcaccgcgtgctggaggaggaggccgccagggaggagcaggccaccctcctggccaaa

SEQ ID NO: 36789 - DNA, 75 bp, Homo sapiens
agcaccgcgtgctggaggaggaggccgccagggaggagcaggccaccctcctggccaaagccccctcattcgaga

SEQ ID NO: 36790 - DNA, 74 bp, Homo sapiens
gctggaggaggaggccgccagggaggagcaggccaccctcctggccaaagccccctcattcgagactgccctcc

SEQ ID NO: 36791 - DNA, 72 bp, Homo sapiens
aggaggaggccgccagggaggagcaggccaccctcctggccaaagccccctcattcgagactgccctccggc

SEQ ID NO: 36792 - DNA, 75 bp, Homo sapiens
agggaggagcaggccaccctcctggccaaagccccctcattcgagactgccctccggctgcctgcctctggcacc

SEQ ID NO: 36793 - DNA, 74 bp, Homo sapiens
aggccaccctcctggccaaagccccctcattcgagactgccctccggctgcctgcctctggcacccacttggcc

SEQ ID NO: 36794 - DNA, 76 bp, Homo sapiens
ctcctggccaaagccccctcattcgagactgccctccggctgcctgcctctggcacccacttggcccctggccaca

SEQ ID NO: 36795 - DNA, 75 bp, Homo sapiens
aaagccccctcattcgagactgccctccggctgcctgcctctggcacccacttggcccctggccacagccactcc

SEQ ID NO: 36796 - DNA, 80 bp, Homo sapiens
tcattcgagactgccctccggctgcctgcctctggcacccacttggcccctggccacagccactccctggaacatgactc

SEQ ID NO: 36797 - DNA, 79 bp, Homo sapiens
tgccctccggctgcctgcctctggcacccacttggcccctggccacagccactccctggaacatgactctccgagcacc

SEQ ID NO: 36798 - DNA, 74 bp, Homo sapiens
cctgcctctggcacccacttggcccctggccacagccactccctggaacatgactctccgagcaccccccgccc

SEQ ID NO: 36799 - DNA, 71 bp, Homo sapiens
acttggcccctggccacagccactccctggaacatgactctccgagcaccccccgcccctcctcggaggcc

SEQ ID NO: 36800 - DNA, 75 bp, Homo sapiens
acagccactccctggaacatgactctccgagcaccccccgcccctcctcggaggcctgcggtgaggcacagcgac

SEQ ID NO: 36801 - DNA, 76 bp, Homo sapiens
ctccctggaacatgactctccgagcaccccccgcccctcctcggaggcctgcggtgaggcacagcgactgccttca

SEQ ID NO: 36802 - DNA, 71 bp, Homo sapiens
tccgagcaccccccgcccctcctcggaggcctgcggtgaggcacagcgactgccttcagccccctccgggg

SEQ ID NO: 36803 - DNA, 70 bp, Homo sapiens
cccctcctcggaggcctgcggtgaggcacagcgactgccttcagccccctccgggggggcccctatcagg

SEQ ID NO: 36804 - DNA, 73 bp, Homo sapiens
ctgcggtgaggcacagcgactgccttcagccccctccgggggggcccctatcagggacatggggcaccctcag

SEQ ID NO: 36805 - DNA, 72 bp, Homo sapiens
acagcgactgccttcagccccctccgggggggcccctatcagggacatggggcaccctcagggctccaagca

SEQ ID NO: 36806 - DNA, 73 bp, Homo sapiens
cctccgggggggcccctatcagggacatggggcaccctcagggctccaagcagcttccatccactggtggcca

SEQ ID NO: 36807 - DNA, 81 bp, Homo sapiens
ccctatcagggacatggggcaccctcagggctccaagcagcttccatccactggtggccacccaggcactgctcagccaga

SEQ ID NO: 36808 - DNA, 81 bp, Homo sapiens
agggacatggggcaccctcagggctccaagcagcttccatccactggtggccacccaggcactgctcagccagagaggcca

SEQ ID NO: 36809 - DNA, 80 bp, Homo sapiens
accctcagggctccaagcagcttccatccactggtggccacccaggcactgctcagccagagaggccatccccggacagc

SEQ ID NO: 36810 - DNA, 79 bp, Homo sapiens
agggctccaagcagcttccatccactggtggccacccaggcactgctcagccagagaggccatccccggacagcccttg

SEQ ID NO: 36811 - DNA, 80 bp, Homo sapiens
agcagcttccatccactggtggccacccaggcactgctcagccagagaggccatccccggacagcccttgggggcagcca

SEQ ID NO: 36812 - DNA, 75 bp, Homo sapiens
actggtggccacccaggcactgctcagccagagaggccatccccggacagcccttgggggcagccagcccctttc

SEQ ID NO: 36813 - DNA, 75 bp, Homo sapiens
ccacccaggcactgctcagccagagaggccatccccggacagcccttgggggcagccagcccctttctgccaccc

SEQ ID NO: 36814 - DNA, 75 bp, Homo sapiens
tgctcagccagagaggccatccccggacagcccttgggggcagccagcccctttctgccaccccaagcagggttc

SEQ ID NO: 36815 - DNA, 71 bp, Homo sapiens
agagaggccatccccggacagcccttgggggcagccagcccctttctgccaccccaagcagggttctgccc

SEQ ID NO: 36816 - DNA, 68 bp, Homo sapiens
cccggacagcccttgggggcagccagcccctttctgccaccccaagcagggttctgccccccaggagg

SEQ ID NO: 36817 - DNA, 72 bp, Homo sapiens
acagcccttgggggcagccagcccctttctgccaccccaagcagggttctgccccccaggagggctgcagcc

SEQ ID NO: 36818 - DNA, 73 bp, Homo sapiens
cccaagcagggttctgccccccaggagggctgcagcccccacccagcagttgccccatgccctcctggctcct

SEQ ID NO: 36819 - DNA, 75 bp, Homo sapiens
agggctgcagcccccacccagcagttgccccatgccctcctggctccttccctccaggatcttgcaaagaggccc

SEQ ID NO: 36820 - DNA, 71 bp, Homo sapiens
acccagcagttgccccatgccctcctggctccttccctccaggatcttgcaaagaggcccccttagtaccc

SEQ ID NO: 36821 - DNA, 69 bp, Homo sapiens
cctcctggctccttccctccaggatcttgcaaagaggcccccttagtaccctcaagccccttcttggga

SEQ ID NO: 36822 - DNA, 69 bp, Homo sapiens
cctccaggatcttgcaaagaggcccccttagtaccctcaagccccttcttgggacagccccaggcaccc

SEQ ID NO: 36823 - DNA, 67 bp, Homo sapiens
cttgcaaagaggcccccttagtaccctcaagccccttcttgggacagccccaggcaccccctgcccc

SEQ ID NO: 36824 - DNA, 68 bp, Homo sapiens
cccttagtaccctcaagccccttcttgggacagccccaggcaccccctgcccctgccaaagcaagccc

SEQ ID NO: 36825 - DNA, 71 bp, Homo sapiens
ctcaagccccttcttgggacagccccaggcaccccctgcccctgccaaagcaagccccccattggactcta

SEQ ID NO: 36826 - DNA, 70 bp, Homo sapiens
ccttcttgggacagccccaggcaccccctgcccctgccaaagcaagccccccattggactctaagatggg

SEQ ID NO: 36827 - DNA, 73 bp, Homo sapiens
agccccaggcaccccctgcccctgccaaagcaagccccccattggactctaagatggggcctggagacatctc

SEQ ID NO: 36828 - DNA, 72 bp, Homo sapiens
accccctgcccctgccaaagcaagccccccattggactctaagatggggcctggagacatctctcttcctgg

SEQ ID NO: 36829 - DNA, 73 bp, Homo sapiens
ccctgccaaagcaagccccccattggactctaagatggggcctggagacatctctcttcctgggaggccaaaa

SEQ ID NO: 36830 - DNA, 70 bp, Homo sapiens
aaagcaagccccccattggactctaagatggggcctggagacatctctcttcctgggaggccaaaacccg

SEQ ID NO: 36831 - DNA, 71 bp, Homo sapiens
attggactctaagatggggcctggagacatctctcttcctgggaggccaaaacccggcccctgcagttccc

SEQ ID NO: 36832 - DNA, 69 bp, Homo sapiens
ttcctgggaggccaaaacccggcccctgcagttccccagggtcagcctcccaggcgagctcttcccaag

SEQ ID NO: 36833 - DNA, 70 bp, Homo sapiens
aaaacccggcccctgcagttccccagggtcagcctcccaggcgagctcttcccaagtgagctccctcagg

SEQ ID NO: 36834 - DNA, 74 bp, Homo sapiens
ccctgcagttccccagggtcagcctcccaggcgagctcttcccaagtgagctccctcagggtgggctcctccca

SEQ ID NO: 36835 - DNA, 77 bp, Homo sapiens
gtcagcctcccaggcgagctcttcccaagtgagctccctcagggtgggctcctcccaggtgggcacagagcctggcc

SEQ ID NO: 36836 - DNA, 74 bp, Homo sapiens
aggcgagctcttcccaagtgagctccctcagggtgggctcctcccaggtgggcacagagcctggcccctccctg

SEQ ID NO: 36837 - DNA, 74 bp, Homo sapiens
cttcccaagtgagctccctcagggtgggctcctcccaggtgggcacagagcctggcccctccctggatgcggag

SEQ ID NO: 36838 - DNA, 74 bp, Homo sapiens
agctccctcagggtgggctcctcccaggtgggcacagagcctggcccctccctggatgcggagggctggaccca

SEQ ID NO: 36839 - DNA, 74 bp, Homo sapiens
agggtgggctcctcccaggtgggcacagagcctggcccctccctggatgcggagggctggacccaggaggctga

SEQ ID NO: 36840 - DNA, 79 bp, Homo sapiens
ggaggctgaggatctgtccgactccacacccaccttgcagcggcctcaggaacaggcgaccatgcgcaagttctccctg

SEQ ID NO: 36841 - DNA, 78 bp, Homo sapiens
ctgaggatctgtccgactccacacccaccttgcagcggcctcaggaacaggcgaccatgcgcaagttctccctgggtg

SEQ ID NO: 36842 - DNA, 75 bp, Homo sapiens
gtccgactccacacccaccttgcagcggcctcaggaacaggcgaccatgcgcaagttctccctgggtggtcgcgg

SEQ ID NO: 36843 - DNA, 76 bp, Homo sapiens
agcggcctcaggaacaggcgaccatgcgcaagttctccctgggtggtcgcgggggctacgcaggcgtggctggcta

SEQ ID NO: 36844 - DNA, 76 bp, Homo sapiens
aacaggcgaccatgcgcaagttctccctgggtggtcgcgggggctacgcaggcgtggctggctatggcacctttgc

SEQ ID NO: 36845 - DNA, 74 bp, Homo sapiens
accatgcgcaagttctccctgggtggtcgcgggggctacgcaggcgtggctggctatggcacctttgcctttgg

SEQ ID NO: 36846 - DNA, 75 bp, Homo sapiens
aagttctccctgggtggtcgcgggggctacgcaggcgtggctggctatggcacctttgcctttggtggagatgca

SEQ ID NO: 36847 - DNA, 78 bp, Homo sapiens
ctgggtggtcgcgggggctacgcaggcgtggctggctatggcacctttgcctttggtggagatgcagggggcatgctg

SEQ ID NO: 36848 - DNA, 79 bp, Homo sapiens
gggctacgcaggcgtggctggctatggcacctttgcctttggtggagatgcagggggcatgctggggcaggggcccatg

SEQ ID NO: 36849 - DNA, 78 bp, Homo sapiens
aggcgtggctggctatggcacctttgcctttggtggagatgcagggggcatgctggggcaggggcccatgtgggccag

SEQ ID NO: 36850 - DNA, 79 bp, Homo sapiens
ctggctatggcacctttgcctttggtggagatgcagggggcatgctggggcaggggcccatgtgggccaggatagcctg

SEQ ID NO: 36851 - DNA, 77 bp, Homo sapiens
acctttgcctttggtggagatgcagggggcatgctggggcaggggcccatgtgggccaggatagcctgggctgtgtc

SEQ ID NO: 36852 - DNA, 80 bp, Homo sapiens
tttggtggagatgcagggggcatgctggggcaggggcccatgtgggccaggatagcctgggctgtgtcccagtcagagga

SEQ ID NO: 36853 - DNA, 81 bp, Homo sapiens
agatgcagggggcatgctggggcaggggcccatgtgggccaggatagcctgggctgtgtcccagtcagaggaggaggagca

SEQ ID NO: 36854 - DNA, 79 bp, Homo sapiens
atgctggggcaggggcccatgtgggccaggatagcctgggctgtgtcccagtcagaggaggaggagcaggaggaggcca

SEQ ID NO: 36855 - DNA, 78 bp, Homo sapiens
gggcccatgtgggccaggatagcctgggctgtgtcccagtcagaggaggaggagcaggaggaggccagggctgagtcc

SEQ ID NO: 36856 - DNA, 78 bp, Homo sapiens
atgtgggccaggatagcctgggctgtgtcccagtcagaggaggaggagcaggaggaggccagggctgagtcccagtcg

SEQ ID NO: 36857 - DNA, 80 bp, Homo sapiens
aggatagcctgggctgtgtcccagtcagaggaggaggagcaggaggaggccagggctgagtcccagtcggaggagcagca

SEQ ID NO: 36858 - DNA, 81 bp, Homo sapiens
tgtgtcccagtcagaggaggaggagcaggaggaggccagggctgagtcccagtcggaggagcagcaggaggccagggctga

SEQ ID NO: 36859 - DNA, 80 bp, Homo sapiens
ggagcaggaggaggccagggctgagtcccagtcggaggagcagcaggaggccagggctgagagcccactgccccaggtca

SEQ ID NO: 36860 - DNA, 82 bp, Homo sapiens
tcccagtcggaggagcagcaggaggccagggctgagagcccactgccccaggtcagtgcaaggcctgtgcctgaggtcggca

SEQ ID NO: 36861 - DNA, 80 bp, Homo sapiens
ccagggctgagagcccactgccccaggtcagtgcaaggcctgtgcctgaggtcggcagggctcccaccaggagctctcca

SEQ ID NO: 36862 - DNA, 79 bp, Homo sapiens
agagcccactgccccaggtcagtgcaaggcctgtgcctgaggtcggcagggctcccaccaggagctctccagagcccac

SEQ ID NO: 36863 - DNA, 79 bp, Homo sapiens
tcagtgcaaggcctgtgcctgaggtcggcagggctcccaccaggagctctccagagcccaccccatgggaggacatcgg

SEQ ID NO: 36864 - DNA, 77 bp, Homo sapiens
tgtgcctgaggtcggcagggctcccaccaggagctctccagagcccaccccatgggaggacatcgggcaggtctccc

SEQ ID NO: 36865 - DNA, 78 bp, Homo sapiens
tgaggtcggcagggctcccaccaggagctctccagagcccaccccatgggaggacatcgggcaggtctccctggtgca

SEQ ID NO: 36866 - DNA, 77 bp, Homo sapiens
aggagctctccagagcccaccccatgggaggacatcgggcaggtctccctggtgcagatccgggacctgtcaggtga

SEQ ID NO: 36867 - DNA, 76 bp, Homo sapiens
agagcccaccccatgggaggacatcgggcaggtctccctggtgcagatccgggacctgtcaggtgatgcggaggcg

SEQ ID NO: 36868 - DNA, 78 bp, Homo sapiens
acatcgggcaggtctccctggtgcagatccgggacctgtcaggtgatgcggaggcggccgacacaatatccctggaca

SEQ ID NO: 36869 - DNA, 76 bp, Homo sapiens
aggtctccctggtgcagatccgggacctgtcaggtgatgcggaggcggccgacacaatatccctggacatttccga

SEQ ID NO: 36870 - DNA, 76 bp, Homo sapiens
ctggtgcagatccgggacctgtcaggtgatgcggaggcggccgacacaatatccctggacatttccgaggtggacc

SEQ ID NO: 36871 - DNA, 74 bp, Homo sapiens
ggacctgtcaggtgatgcggaggcggccgacacaatatccctggacatttccgaggtggaccccgcctacctca

SEQ ID NO: 36872 - DNA, 74 bp, Homo sapiens
tgtcaggtgatgcggaggcggccgacacaatatccctggacatttccgaggtggaccccgcctacctcaacctc

SEQ ID NO: 36873 - DNA, 71 bp, Homo sapiens
aggcggccgacacaatatccctggacatttccgaggtggaccccgcctacctcaacctctcagacctgtac

SEQ ID NO: 36874 - DNA, 73 bp, Homo sapiens
accccgcctacctcaacctctcagacctgtacgatatcaagtacctcccattcgagtttatgatcttcaggaa

SEQ ID NO: 36875 - DNA, 75 bp, Homo sapiens
cctctcagacctgtacgatatcaagtacctcccattcgagtttatgatcttcaggaaagtccccaagtccgctca

SEQ ID NO: 36876 - DNA, 76 bp, Homo sapiens
ctgtacgatatcaagtacctcccattcgagtttatgatcttcaggaaagtccccaagtccgctcagccagagccgc

SEQ ID NO: 36877 - DNA, 75 bp, Homo sapiens
cccattcgagtttatgatcttcaggaaagtccccaagtccgctcagccagagccgccctcccccatggctgagga

SEQ ID NO: 36878 - DNA, 77 bp, Homo sapiens
tttatgatcttcaggaaagtccccaagtccgctcagccagagccgccctcccccatggctgaggaggagctggccga

SEQ ID NO: 36879 - DNA, 72 bp, Homo sapiens
aggaaagtccccaagtccgctcagccagagccgccctcccccatggctgaggaggagctggccgagttcccg

SEQ ID NO: 36880 - DNA, 74 bp, Homo sapiens
cccaagtccgctcagccagagccgccctcccccatggctgaggaggagctggccgagttcccggagcccacgtg

SEQ ID NO: 36881 - DNA, 75 bp, Homo sapiens
ctcagccagagccgccctcccccatggctgaggaggagctggccgagttcccggagcccacgtggccctggccag

SEQ ID NO: 36882 - DNA, 72 bp, Homo sapiens
agccgccctcccccatggctgaggaggagctggccgagttcccggagcccacgtggccctggccaggtgaac

SEQ ID NO: 36883 - DNA, 73 bp, Homo sapiens
atggctgaggaggagctggccgagttcccggagcccacgtggccctggccaggtgaactgggcccccacgcag

SEQ ID NO: 36884 - DNA, 74 bp, Homo sapiens
ggagctggccgagttcccggagcccacgtggccctggccaggtgaactgggcccccacgcaggcctggagatca

SEQ ID NO: 36885 - DNA, 75 bp, Homo sapiens
gagttcccggagcccacgtggccctggccaggtgaactgggcccccacgcaggcctggagatcacagaggagtca

SEQ ID NO: 36886 - DNA, 77 bp, Homo sapiens
agcccacgtggccctggccaggtgaactgggcccccacgcaggcctggagatcacagaggagtcagaggatgtggac

SEQ ID NO: 36887 - DNA, 83 bp, Homo sapiens
tggccctggccaggtgaactgggcccccacgcaggcctggagatcacagaggagtcagaggatgtggacgcgctgctggcaga

SEQ ID NO: 36888 - DNA, 82 bp, Homo sapiens
ccaggtgaactgggcccccacgcaggcctggagatcacagaggagtcagaggatgtggacgcgctgctggcagaggctgccg

SEQ ID NO: 36889 - DNA, 83 bp, Homo sapiens
actgggcccccacgcaggcctggagatcacagaggagtcagaggatgtggacgcgctgctggcagaggctgccgtgggcagga

SEQ ID NO: 36890 - DNA, 84 bp, Homo sapiens
agatcacagaggagtcagaggatgtggacgcgctgctggcagaggctgccgtgggcaggaagcgcaagtggtcctcgccgtcac

SEQ ID NO: 36891 - DNA, 83 bp, Homo sapiens
agtcagaggatgtggacgcgctgctggcagaggctgccgtgggcaggaagcgcaagtggtcctcgccgtcacgcagcctcttc

SEQ ID NO: 36892 - DNA, 81 bp, Homo sapiens
aggatgtggacgcgctgctggcagaggctgccgtgggcaggaagcgcaagtggtcctcgccgtcacgcagcctcttccact

SEQ ID NO: 36893 - DNA, 79 bp, Homo sapiens
acgcgctgctggcagaggctgccgtgggcaggaagcgcaagtggtcctcgccgtcacgcagcctcttccacttccctgg

SEQ ID NO: 36894 - DNA, 77 bp, Homo sapiens
agaggctgccgtgggcaggaagcgcaagtggtcctcgccgtcacgcagcctcttccacttccctgggaggcacctgc

SEQ ID NO: 36895 - DNA, 78 bp, Homo sapiens
cgtgggcaggaagcgcaagtggtcctcgccgtcacgcagcctcttccacttccctgggaggcacctgccgctggatga

SEQ ID NO: 36896 - DNA, 81 bp, Homo sapiens
aagcgcaagtggtcctcgccgtcacgcagcctcttccacttccctgggaggcacctgccgctggatgagcctgcagagctg

SEQ ID NO: 36897 - DNA, 84 bp, Homo sapiens
tcctcgccgtcacgcagcctcttccacttccctgggaggcacctgccgctggatgagcctgcagagctggggctgcgtgagaga

SEQ ID NO: 36898 - DNA, 83 bp, Homo sapiens
ccgtcacgcagcctcttccacttccctgggaggcacctgccgctggatgagcctgcagagctggggctgcgtgagagagtgaa

SEQ ID NO: 36899 - DNA, 84 bp, Homo sapiens
ttccctgggaggcacctgccgctggatgagcctgcagagctggggctgcgtgagagagtgaaggcctccgtggagcacatctcc

SEQ ID NO: 36900 - DNA, 83 bp, Homo sapiens
acctgccgctggatgagcctgcagagctggggctgcgtgagagagtgaaggcctccgtggagcacatctcccggatcctgaag

SEQ ID NO: 36901 - DNA, 83 bp, Homo sapiens
gatgagcctgcagagctggggctgcgtgagagagtgaaggcctccgtggagcacatctcccggatcctgaagggcaggccgga

SEQ ID NO: 36902 - DNA, 79 bp, Homo sapiens
cagagctggggctgcgtgagagagtgaaggcctccgtggagcacatctcccggatcctgaagggcaggccggaaggtga

SEQ ID NO: 36903 - DNA, 75 bp, Homo sapiens
gggctgcgtgagagagtgaaggcctccgtggagcacatctcccggatcctgaagggcaggccggaaggtgaaccc

SEQ ID NO: 36904 - DNA, 71 bp, Homo sapiens
agagagtgaaggcctccgtggagcacatctcccggatcctgaagggcaggccggaaggtgaacccccaccc

SEQ ID NO: 36905 - DNA, 75 bp, Homo sapiens
tactacccagaggggccaggcctcctgaccatgaccttcactggccctcttcctcctgcaggtctggagaaggag

SEQ ID NO: 36906 - DNA, 73 bp, Homo sapiens
ccaggcctcctgaccatgaccttcactggccctcttcctcctgcaggtctggagaaggaggggccccccagga

SEQ ID NO: 36907 - DNA, 72 bp, Homo sapiens
cctcctgaccatgaccttcactggccctcttcctcctgcaggtctggagaaggaggggccccccaggaagaa

SEQ ID NO: 36908 - DNA, 71 bp, Homo sapiens
atgaccttcactggccctcttcctcctgcaggtctggagaaggaggggccccccaggaagaagccaggcct

SEQ ID NO: 36909 - DNA, 70 bp, Homo sapiens
cctcttcctcctgcaggtctggagaaggaggggccccccaggaagaagccaggccttgcttccttccggc

SEQ ID NO: 36910 - DNA, 73 bp, Homo sapiens
ctgcaggtctggagaaggaggggccccccaggaagaagccaggccttgcttccttccggctctcaggtctgaa

SEQ ID NO: 36911 - DNA, 73 bp, Homo sapiens
tggagaaggaggggccccccaggaagaagccaggccttgcttccttccggctctcaggtctgaagagctggga

SEQ ID NO: 36912 - DNA, 74 bp, Homo sapiens
gggccccccaggaagaagccaggccttgcttccttccggctctcaggtctgaagagctgggaccgaggtgagca

SEQ ID NO: 36913 - DNA, 76 bp, Homo sapiens
aggaagaagccaggccttgcttccttccggctctcaggtctgaagagctgggaccgaggtgagcaggcccaacaca

SEQ ID NO: 36914 - DNA, 77 bp, Homo sapiens
aagccaggccttgcttccttccggctctcaggtctgaagagctgggaccgaggtgagcaggcccaacacagagacca

SEQ ID NO: 36915 - DNA, 78 bp, Homo sapiens
ttgcttccttccggctctcaggtctgaagagctgggaccgaggtgagcaggcccaacacagagaccaggccccactgc

SEQ ID NO: 36916 - DNA, 77 bp, Homo sapiens
ggcctggaggtcacccctgaaggctgacctcaccctccctcctcagcgccgacattcctaagggagctctcagatga

SEQ ID NO: 36917 - DNA, 77 bp, Homo sapiens
aggtcacccctgaaggctgacctcaccctccctcctcagcgccgacattcctaagggagctctcagatgagactgtg

SEQ ID NO: 36918 - DNA, 77 bp, Homo sapiens
aaggctgacctcaccctccctcctcagcgccgacattcctaagggagctctcagatgagactgtggtcctgggccag

SEQ ID NO: 36919 - DNA, 79 bp, Homo sapiens
acctcaccctccctcctcagcgccgacattcctaagggagctctcagatgagactgtggtcctgggccagtcagtgaca

SEQ ID NO: 36920 - DNA, 84 bp, Homo sapiens
tcctcagcgccgacattcctaagggagctctcagatgagactgtggtcctgggccagtcagtgacactggcctgccaggtgtca

SEQ ID NO: 36921 - DNA, 83 bp, Homo sapiens
cgacattcctaagggagctctcagatgagactgtggtcctgggccagtcagtgacactggcctgccaggtgtcagcccagcca

SEQ ID NO: 36922 - DNA, 85 bp, Homo sapiens
tcctaagggagctctcagatgagactgtggtcctgggccagtcagtgacactggcctgccaggtgtcagcccagccagctgccca

SEQ ID NO: 36923 - DNA, 86 bp, Homo sapiens
tcagatgagactgtggtcctgggccagtcagtgacactggcctgccaggtgtcagcccagccagctgcccaggccacctggagcaa

SEQ ID NO: 36924 - DNA, 81 bp, Homo sapiens
tgtggtcctgggccagtcagtgacactggcctgccaggtgtcagcccagccagctgcccaggccacctggagcaaaggtaa

SEQ ID NO: 36925 - DNA, 82 bp, Homo sapiens
tgggccagtcagtgacactggcctgccaggtgtcagcccagccagctgcccaggccacctggagcaaaggtaagaagctgtc

SEQ ID NO: 36926 - DNA, 80 bp, Homo sapiens
gtcagtgacactggcctgccaggtgtcagcccagccagctgcccaggccacctggagcaaaggtaagaagctgtcccagg

SEQ ID NO: 36927 - DNA, 77 bp, Homo sapiens
ctggcctgccaggtgtcagcccagccagctgcccaggccacctggagcaaaggtaagaagctgtcccaggggctggg

SEQ ID NO: 36928 - DNA, 78 bp, Homo sapiens
tgtcagcccagccagctgcccaggccacctggagcaaaggtaagaagctgtcccaggggctgggggctgtgtgaaatc

SEQ ID NO: 36929 - DNA, 84 bp, Homo sapiens
gtgtgaggcctggctgtggcatgaggcttgctctgtccttttgcagacggagcccccctggagagcagcagccgtgtcctcatc

SEQ ID NO: 36930 - DNA, 84 bp, Homo sapiens
aggcctggctgtggcatgaggcttgctctgtccttttgcagacggagcccccctggagagcagcagccgtgtcctcatctctgc

SEQ ID NO: 36931 - DNA, 81 bp, Homo sapiens
atgaggcttgctctgtccttttgcagacggagcccccctggagagcagcagccgtgtcctcatctctgccaccctcaagaa

SEQ ID NO: 36932 - DNA, 80 bp, Homo sapiens
ttgctctgtccttttgcagacggagcccccctggagagcagcagccgtgtcctcatctctgccaccctcaagaacttcca

SEQ ID NO: 36933 - DNA, 80 bp, Homo sapiens
tccttttgcagacggagcccccctggagagcagcagccgtgtcctcatctctgccaccctcaagaacttccagcttctga

SEQ ID NO: 36934 - DNA, 79 bp, Homo sapiens
agcccccctggagagcagcagccgtgtcctcatctctgccaccctcaagaacttccagcttctgaccatcctggtggtg

SEQ ID NO: 36935 - DNA, 83 bp, Homo sapiens
tggagagcagcagccgtgtcctcatctctgccaccctcaagaacttccagcttctgaccatcctggtggtggtggctgaggac

SEQ ID NO: 36936 - DNA, 79 bp, Homo sapiens
agcagccgtgtcctcatctctgccaccctcaagaacttccagcttctgaccatcctggtggtggtggctgaggacctgg

SEQ ID NO: 36937 - DNA, 81 bp, Homo sapiens
tcatctctgccaccctcaagaacttccagcttctgaccatcctggtggtggtggctgaggacctgggtgtgtacacctgca

SEQ ID NO: 36938 - DNA, 79 bp, Homo sapiens
accctcaagaacttccagcttctgaccatcctggtggtggtggctgaggacctgggtgtgtacacctgcagcgtgagca

SEQ ID NO: 36939 - DNA, 81 bp, Homo sapiens
aagaacttccagcttctgaccatcctggtggtggtggctgaggacctgggtgtgtacacctgcagcgtgagcaatgcgctg

SEQ ID NO: 36940 - DNA, 82 bp, Homo sapiens
ttctgaccatcctggtggtggtggctgaggacctgggtgtgtacacctgcagcgtgagcaatgcgctggggacagtgaccac

SEQ ID NO: 36941 - DNA, 79 bp, Homo sapiens
atcctggtggtggtggctgaggacctgggtgtgtacacctgcagcgtgagcaatgcgctggggacagtgaccaccacgg

SEQ ID NO: 36942 - DNA, 79 bp, Homo sapiens
tggctgaggacctgggtgtgtacacctgcagcgtgagcaatgcgctggggacagtgaccaccacgggcgtcctccggaa

SEQ ID NO: 36943 - DNA, 77 bp, Homo sapiens
cctgggtgtgtacacctgcagcgtgagcaatgcgctggggacagtgaccaccacgggcgtcctccggaaggcaggta

SEQ ID NO: 36944 - DNA, 78 bp, Homo sapiens
tgtacacctgcagcgtgagcaatgcgctggggacagtgaccaccacgggcgtcctccggaaggcaggtacgtgggcca

SEQ ID NO: 36945 - DNA, 74 bp, Homo sapiens
agcgtgagcaatgcgctggggacagtgaccaccacgggcgtcctccggaaggcaggtacgtgggccacactggg

SEQ ID NO: 36946 - DNA, 72 bp, Homo sapiens
agcaatgcgctggggacagtgaccaccacgggcgtcctccggaaggcaggtacgtgggccacactgggggtc

SEQ ID NO: 36947 - DNA, 80 bp, Homo sapiens
tgggtgcccaccctggagtcactgaccattgggcagtgccttgcagagcgcccctcatcttcgccatgcccggatatcgg

SEQ ID NO: 36948 - DNA, 79 bp, Homo sapiens
ccctggagtcactgaccattgggcagtgccttgcagagcgcccctcatcttcgccatgcccggatatcggggaggtgta

SEQ ID NO: 36949 - DNA, 79 bp, Homo sapiens
agtcactgaccattgggcagtgccttgcagagcgcccctcatcttcgccatgcccggatatcggggaggtgtacgcgga

SEQ ID NO: 36950 - DNA, 79 bp, Homo sapiens
attgggcagtgccttgcagagcgcccctcatcttcgccatgcccggatatcggggaggtgtacgcggatggggtgctgc

SEQ ID NO: 36951 - DNA, 80 bp, Homo sapiens
tgccttgcagagcgcccctcatcttcgccatgcccggatatcggggaggtgtacgcggatggggtgctgctggtctggaa

SEQ ID NO: 36952 - DNA, 75 bp, Homo sapiens
cccctcatcttcgccatgcccggatatcggggaggtgtacgcggatggggtgctgctggtctggaagcccgtgga

SEQ ID NO: 36953 - DNA, 75 bp, Homo sapiens
atcttcgccatgcccggatatcggggaggtgtacgcggatggggtgctgctggtctggaagcccgtggaatccta

SEQ ID NO: 36954 - DNA, 73 bp, Homo sapiens
ccggatatcggggaggtgtacgcggatggggtgctgctggtctggaagcccgtggaatcctacggccctgtga

SEQ ID NO: 36955 - DNA, 76 bp, Homo sapiens
gggaggtgtacgcggatggggtgctgctggtctggaagcccgtggaatcctacggccctgtgacctacattgtgca

SEQ ID NO: 36956 - DNA, 80 bp, Homo sapiens
tgtacgcggatggggtgctgctggtctggaagcccgtggaatcctacggccctgtgacctacattgtgcagtgcagccta

SEQ ID NO: 36957 - DNA, 80 bp, Homo sapiens
gtgctgctggtctggaagcccgtggaatcctacggccctgtgacctacattgtgcagtgcagcctagaaggtatgaggtg

SEQ ID NO: 36958 - DNA, 77 bp, Homo sapiens
tggtctggaagcccgtggaatcctacggccctgtgacctacattgtgcagtgcagcctagaaggtatgaggtggccc

SEQ ID NO: 36959 - DNA, 75 bp, Homo sapiens
agcccgtggaatcctacggccctgtgacctacattgtgcagtgcagcctagaaggtatgaggtggcccctgtacc

SEQ ID NO: 36960 - DNA, 75 bp, Homo sapiens
atcctacggccctgtgacctacattgtgcagtgcagcctagaaggtatgaggtggcccctgtacccgaggctccg

SEQ ID NO: 36961 - DNA, 80 bp, Homo sapiens
gtgtgtggaggcctcagtggcccctcacgtgctcctgtgtggccaggcggcagctggaccacactggcctccgacatctt

SEQ ID NO: 36962 - DNA, 83 bp, Homo sapiens
gcctcagtggcccctcacgtgctcctgtgtggccaggcggcagctggaccacactggcctccgacatctttgactgctgctac

SEQ ID NO: 36963 - DNA, 82 bp, Homo sapiens
agtggcccctcacgtgctcctgtgtggccaggcggcagctggaccacactggcctccgacatctttgactgctgctacctga

SEQ ID NO: 36964 - DNA, 84 bp, Homo sapiens
acgtgctcctgtgtggccaggcggcagctggaccacactggcctccgacatctttgactgctgctacctgaccagcaagctctc

SEQ ID NO: 36965 - DNA, 81 bp, Homo sapiens
tgtgtggccaggcggcagctggaccacactggcctccgacatctttgactgctgctacctgaccagcaagctctcccgggg

SEQ ID NO: 36966 - DNA, 79 bp, Homo sapiens
cagctggaccacactggcctccgacatctttgactgctgctacctgaccagcaagctctcccggggtggcacctacacc

SEQ ID NO: 36967 - DNA, 77 bp, Homo sapiens
acactggcctccgacatctttgactgctgctacctgaccagcaagctctcccggggtggcacctacaccttccgcac

SEQ ID NO: 36968 - DNA, 80 bp, Homo sapiens
ctccgacatctttgactgctgctacctgaccagcaagctctcccggggtggcacctacaccttccgcacggcatgtgtca

SEQ ID NO: 36969 - DNA, 81 bp, Homo sapiens
atctttgactgctgctacctgaccagcaagctctcccggggtggcacctacaccttccgcacggcatgtgtcagcaaggca

SEQ ID NO: 36970 - DNA, 79 bp, Homo sapiens
tgctacctgaccagcaagctctcccggggtggcacctacaccttccgcacggcatgtgtcagcaaggcaggaatgggtc

SEQ ID NO: 36971 - DNA, 76 bp, Homo sapiens
accagcaagctctcccggggtggcacctacaccttccgcacggcatgtgtcagcaaggcaggaatgggtccctaca

SEQ ID NO: 36972 - DNA, 76 bp, Homo sapiens
tctcccggggtggcacctacaccttccgcacggcatgtgtcagcaaggcaggaatgggtccctacagcagcccctc

SEQ ID NO: 36973 - DNA, 76 bp, Homo sapiens
acctacaccttccgcacggcatgtgtcagcaaggcaggaatgggtccctacagcagcccctcggagcaagtcctcc

SEQ ID NO: 36974 - DNA, 76 bp, Homo sapiens
accttccgcacggcatgtgtcagcaaggcaggaatgggtccctacagcagcccctcggagcaagtcctcctgggag

SEQ ID NO: 36975 - DNA, 76 bp, Homo sapiens
atgtgtcagcaaggcaggaatgggtccctacagcagcccctcggagcaagtcctcctgggagggcccagccacctg

SEQ ID NO: 36976 - DNA, 74 bp, Homo sapiens
agcaaggcaggaatgggtccctacagcagcccctcggagcaagtcctcctgggagggcccagccacctgggtga

SEQ ID NO: 36977 - DNA, 74 bp, Homo sapiens
aatgggtccctacagcagcccctcggagcaagtcctcctgggagggcccagccacctgggtgagccacaccaca

SEQ ID NO: 36978 - DNA, 73 bp, Homo sapiens
ccctacagcagcccctcggagcaagtcctcctgggagggcccagccacctgggtgagccacaccacactcggg

SEQ ID NO: 36979 - DNA, 72 bp, Homo sapiens
cctcggagcaagtcctcctgggagggcccagccacctgggtgagccacaccacactcggggcttggagggtg

SEQ ID NO: 36980 - DNA, 76 bp, Homo sapiens
gggctgtggggatgccctcttcaccccctcttatcatctgcccctcctcccacagcctctgaggaggagagccagg

SEQ ID NO: 36981 - DNA, 76 bp, Homo sapiens
gggatgccctcttcaccccctcttatcatctgcccctcctcccacagcctctgaggaggagagccaggggcggtca

SEQ ID NO: 36982 - DNA, 75 bp, Homo sapiens
tcttcaccccctcttatcatctgcccctcctcccacagcctctgaggaggagagccaggggcggtcagcccaacc

SEQ ID NO: 36983 - DNA, 77 bp, Homo sapiens
ttatcatctgcccctcctcccacagcctctgaggaggagagccaggggcggtcagcccaacccctgcccagcacaaa

SEQ ID NO: 36984 - DNA, 72 bp, Homo sapiens
cccctcctcccacagcctctgaggaggagagccaggggcggtcagcccaacccctgcccagcacaaagacct

SEQ ID NO: 36985 - DNA, 78 bp, Homo sapiens
cacagcctctgaggaggagagccaggggcggtcagcccaacccctgcccagcacaaagaccttcgcattccagacaca

SEQ ID NO: 36986 - DNA, 79 bp, Homo sapiens
tctgaggaggagagccaggggcggtcagcccaacccctgcccagcacaaagaccttcgcattccagacacagatccaga

SEQ ID NO: 36987 - DNA, 78 bp, Homo sapiens
agagccaggggcggtcagcccaacccctgcccagcacaaagaccttcgcattccagacacagatccagaggtgcagtg

SEQ ID NO: 36988 - DNA, 77 bp, Homo sapiens
gggcggtcagcccaacccctgcccagcacaaagaccttcgcattccagacacagatccagaggtgcagtggcctggg

SEQ ID NO: 36989 - DNA, 77 bp, Homo sapiens
aacccctgcccagcacaaagaccttcgcattccagacacagatccagaggtgcagtggcctggggggctgcaggcgg

SEQ ID NO: 36990 - DNA, 77 bp, Homo sapiens
agcacaaagaccttcgcattccagacacagatccagaggtgcagtggcctggggggctgcaggcgggtggggccagg

SEQ ID NO: 36991 - DNA, 76 bp, Homo sapiens
aagaccttcgcattccagacacagatccagaggtgcagtggcctggggggctgcaggcgggtggggccagggcctg

SEQ ID NO: 36992 - DNA, 75 bp, Homo sapiens
aatgggaggggaccacccaccagcctgaccgctgtccccttgagcaggggccgcttcagcgtggtgcggcaatgc

SEQ ID NO: 36993 - DNA, 76 bp, Homo sapiens
gggaccacccaccagcctgaccgctgtccccttgagcaggggccgcttcagcgtggtgcggcaatgctgggagaag

SEQ ID NO: 36994 - DNA, 77 bp, Homo sapiens
accagcctgaccgctgtccccttgagcaggggccgcttcagcgtggtgcggcaatgctgggagaaggccagcgggcg

SEQ ID NO: 36995 - DNA, 77 bp, Homo sapiens
accgctgtccccttgagcaggggccgcttcagcgtggtgcggcaatgctgggagaaggccagcgggcgggcgctggc

SEQ ID NO: 36996 - DNA, 80 bp, Homo sapiens
ttgagcaggggccgcttcagcgtggtgcggcaatgctgggagaaggccagcgggcgggcgctggccgccaagatcatccc

SEQ ID NO: 36997 - DNA, 77 bp, Homo sapiens
ccgcttcagcgtggtgcggcaatgctgggagaaggccagcgggcgggcgctggccgccaagatcatcccctaccacc

SEQ ID NO: 36998 - DNA, 76 bp, Homo sapiens
tggtgcggcaatgctgggagaaggccagcgggcgggcgctggccgccaagatcatcccctaccaccccaaggacaa

SEQ ID NO: 36999 - DNA, 77 bp, Homo sapiens
aaggccagcgggcgggcgctggccgccaagatcatcccctaccaccccaaggacaagacagcagtgctgcgcgaata

SEQ ID NO: 37000 - DNA, 78 bp, Homo sapiens
ggcgggcgctggccgccaagatcatcccctaccaccccaaggacaagacagcagtgctgcgcgaatacgaggccctca

SEQ ID NO: 37001 - DNA, 76 bp, Homo sapiens
ctggccgccaagatcatcccctaccaccccaaggacaagacagcagtgctgcgcgaatacgaggccctcaagggcc

SEQ ID NO: 37002 - DNA, 76 bp, Homo sapiens
aagatcatcccctaccaccccaaggacaagacagcagtgctgcgcgaatacgaggccctcaagggcctgcgccacc

SEQ ID NO: 37003 - DNA, 75 bp, Homo sapiens
ccctaccaccccaaggacaagacagcagtgctgcgcgaatacgaggccctcaagggcctgcgccacccgcacctg

SEQ ID NO: 37004 - DNA, 82 bp, Homo sapiens
aggacaagacagcagtgctgcgcgaatacgaggccctcaagggcctgcgccacccgcacctggcccagctgcacgcagccta

SEQ ID NO: 37005 - DNA, 83 bp, Homo sapiens
agacagcagtgctgcgcgaatacgaggccctcaagggcctgcgccacccgcacctggcccagctgcacgcagcctacctcagc

SEQ ID NO: 37006 - DNA, 79 bp, Homo sapiens
tgcgcgaatacgaggccctcaagggcctgcgccacccgcacctggcccagctgcacgcagcctacctcagcccccggca

SEQ ID NO: 37007 - DNA, 78 bp, Homo sapiens
aggccctcaagggcctgcgccacccgcacctggcccagctgcacgcagcctacctcagcccccggcacctggtgctca

SEQ ID NO: 37008 - DNA, 81 bp, Homo sapiens
tcaagggcctgcgccacccgcacctggcccagctgcacgcagcctacctcagcccccggcacctggtgctcatcttggagc

SEQ ID NO: 37009 - DNA, 80 bp, Homo sapiens
acccgcacctggcccagctgcacgcagcctacctcagcccccggcacctggtgctcatcttggagctgtgctctgggccc

SEQ ID NO: 37010 - DNA, 83 bp, Homo sapiens
acctggcccagctgcacgcagcctacctcagcccccggcacctggtgctcatcttggagctgtgctctgggcccgagctgctc

SEQ ID NO: 37011 - DNA, 83 bp, Homo sapiens
agctgcacgcagcctacctcagcccccggcacctggtgctcatcttggagctgtgctctgggcccgagctgctcccctgcctg

SEQ ID NO: 37012 - DNA, 81 bp, Homo sapiens
tacctcagcccccggcacctggtgctcatcttggagctgtgctctgggcccgagctgctcccctgcctggccgagaggtga

SEQ ID NO: 37013 - DNA, 80 bp, Homo sapiens
ccggcacctggtgctcatcttggagctgtgctctgggcccgagctgctcccctgcctggccgagaggtgagggtggcctg

SEQ ID NO: 37014 - DNA, 78 bp, Homo sapiens
acctggtgctcatcttggagctgtgctctgggcccgagctgctcccctgcctggccgagaggtgagggtggcctgggg

SEQ ID NO: 37015 - DNA, 78 bp, Homo sapiens
tcttggagctgtgctctgggcccgagctgctcccctgcctggccgagaggtgagggtggcctggggtggtgtggttga

SEQ ID NO: 37016 - DNA, 79 bp, Homo sapiens
tgtgctctgggcccgagctgctcccctgcctggccgagaggtgagggtggcctggggtggtgtggttgagctgatggac

SEQ ID NO: 37017 - DNA, 73 bp, Homo sapiens
gtggcccccaccccggagcctgggctgagcagcttctgccccccagggcctcctactcagaatccgaggtgaa

SEQ ID NO: 37018 - DNA, 72 bp, Homo sapiens
accccggagcctgggctgagcagcttctgccccccagggcctcctactcagaatccgaggtgaaggactacc

SEQ ID NO: 37019 - DNA, 80 bp, Homo sapiens
tgggctgagcagcttctgccccccagggcctcctactcagaatccgaggtgaaggactacctgtggcagatgttgagtgc

SEQ ID NO: 37020 - DNA, 76 bp, Homo sapiens
agcttctgccccccagggcctcctactcagaatccgaggtgaaggactacctgtggcagatgttgagtgccaccca

SEQ ID NO: 37021 - DNA, 77 bp, Homo sapiens
ccccagggcctcctactcagaatccgaggtgaaggactacctgtggcagatgttgagtgccacccagtacctgcaca

SEQ ID NO: 37022 - DNA, 80 bp, Homo sapiens
ctcctactcagaatccgaggtgaaggactacctgtggcagatgttgagtgccacccagtacctgcacaaccagcacatcc

SEQ ID NO: 37023 - DNA, 81 bp, Homo sapiens
agaatccgaggtgaaggactacctgtggcagatgttgagtgccacccagtacctgcacaaccagcacatcctgcacctgga

SEQ ID NO: 37024 - DNA, 80 bp, Homo sapiens
aggtgaaggactacctgtggcagatgttgagtgccacccagtacctgcacaaccagcacatcctgcacctggacctgagg

SEQ ID NO: 37025 - DNA, 85 bp, Homo sapiens
tacctgtggcagatgttgagtgccacccagtacctgcacaaccagcacatcctgcacctggacctgaggtccgagaacatgatca

SEQ ID NO: 37026 - DNA, 83 bp, Homo sapiens
atgttgagtgccacccagtacctgcacaaccagcacatcctgcacctggacctgaggtccgagaacatgatcatcaccgaata

SEQ ID NO: 37027 - DNA, 83 bp, Homo sapiens
cacccagtacctgcacaaccagcacatcctgcacctggacctgaggtccgagaacatgatcatcaccgaatacaacctgctca

SEQ ID NO: 37028 - DNA, 81 bp, Homo sapiens
agtacctgcacaaccagcacatcctgcacctggacctgaggtccgagaacatgatcatcaccgaatacaacctgctcaagg

SEQ ID NO: 37029 - DNA, 81 bp, Homo sapiens
agcacatcctgcacctggacctgaggtccgagaacatgatcatcaccgaatacaacctgctcaaggtcgtggacctgggca

SEQ ID NO: 37030 - DNA, 81 bp, Homo sapiens
atcctgcacctggacctgaggtccgagaacatgatcatcaccgaatacaacctgctcaaggtcgtggacctgggcaatgca

SEQ ID NO: 37031 - DNA, 83 bp, Homo sapiens
tggacctgaggtccgagaacatgatcatcaccgaatacaacctgctcaaggtcgtggacctgggcaatgcacagagcctcagc

SEQ ID NO: 37032 - DNA, 82 bp, Homo sapiens
gtccgagaacatgatcatcaccgaatacaacctgctcaaggtcgtggacctgggcaatgcacagagcctcagccaggagaag

SEQ ID NO: 37033 - DNA, 84 bp, Homo sapiens
atgatcatcaccgaatacaacctgctcaaggtcgtggacctgggcaatgcacagagcctcagccaggagaaggtgctgccctca

SEQ ID NO: 37034 - DNA, 81 bp, Homo sapiens
aatacaacctgctcaaggtcgtggacctgggcaatgcacagagcctcagccaggagaaggtgctgccctcagacaagttca

SEQ ID NO: 37035 - DNA, 80 bp, Homo sapiens
tcaaggtcgtggacctgggcaatgcacagagcctcagccaggagaaggtgctgccctcagacaagttcaaggactaccta

SEQ ID NO: 37036 - DNA, 81 bp, Homo sapiens
tggacctgggcaatgcacagagcctcagccaggagaaggtgctgccctcagacaagttcaaggactacctagagaccatgg

SEQ ID NO: 37037 - DNA, 81 bp, Homo sapiens
aatgcacagagcctcagccaggagaaggtgctgccctcagacaagttcaaggactacctagagaccatgggtgcgtgtgtg

SEQ ID NO: 37038 - DNA, 78 bp, Homo sapiens
agcctcagccaggagaaggtgctgccctcagacaagttcaaggactacctagagaccatgggtgcgtgtgtggacagt

SEQ ID NO: 37039 - DNA, 76 bp, Homo sapiens
agccaggagaaggtgctgccctcagacaagttcaaggactacctagagaccatgggtgcgtgtgtggacagttggg

SEQ ID NO: 37040 - DNA, 74 bp, Homo sapiens
ctgccctcagacaagttcaaggactacctagagaccatgggtgcgtgtgtggacagttggggggacctcacctg

SEQ ID NO: 37041 - DNA, 79 bp, Homo sapiens
actcactcatgcccaccacctgtgtccctccacctgagcccaaccacatgtgcccctcccagctccagagctcctggag

SEQ ID NO: 37042 - DNA, 77 bp, Homo sapiens
tgcccaccacctgtgtccctccacctgagcccaaccacatgtgcccctcccagctccagagctcctggagggccagg

SEQ ID NO: 37043 - DNA, 77 bp, Homo sapiens
tgtccctccacctgagcccaaccacatgtgcccctcccagctccagagctcctggagggccagggggctgttccaca

SEQ ID NO: 37044 - DNA, 78 bp, Homo sapiens
acctgagcccaaccacatgtgcccctcccagctccagagctcctggagggccagggggctgttccacagacagacatc

SEQ ID NO: 37045 - DNA, 78 bp, Homo sapiens
aaccacatgtgcccctcccagctccagagctcctggagggccagggggctgttccacagacagacatctgggccatcg

SEQ ID NO: 37046 - DNA, 80 bp, Homo sapiens
cctcccagctccagagctcctggagggccagggggctgttccacagacagacatctgggccatcggtgtgacagccttca

SEQ ID NO: 37047 - DNA, 83 bp, Homo sapiens
tccagagctcctggagggccagggggctgttccacagacagacatctgggccatcggtgtgacagccttcatcatgtgagtcc

SEQ ID NO: 37048 - DNA, 81 bp, Homo sapiens
ctcctggagggccagggggctgttccacagacagacatctgggccatcggtgtgacagccttcatcatgtgagtcctccaa

SEQ ID NO: 37049 - DNA, 80 bp, Homo sapiens
ccagggggctgttccacagacagacatctgggccatcggtgtgacagccttcatcatgtgagtcctccaacctgtctggg

SEQ ID NO: 37050 - DNA, 81 bp, Homo sapiens
ttccacagacagacatctgggccatcggtgtgacagccttcatcatgtgagtcctccaacctgtctgggggttgctaggtg

SEQ ID NO: 37051 - DNA, 78 bp, Homo sapiens
tgggccatcggtgtgacagccttcatcatgtgagtcctccaacctgtctgggggttgctaggtgggcggggcagtctc

SEQ ID NO: 37052 - DNA, 76 bp, Homo sapiens
tctacccaaggagggtgacctcagggcccgtgcacccgccacctgcgcaggctgagcgccgagtacccggtgagca

SEQ ID NO: 37053 - DNA, 79 bp, Homo sapiens
gtgacctcagggcccgtgcacccgccacctgcgcaggctgagcgccgagtacccggtgagcagcgagggtgcacgcgac

SEQ ID NO: 37054 - DNA, 80 bp, Homo sapiens
agggcccgtgcacccgccacctgcgcaggctgagcgccgagtacccggtgagcagcgagggtgcacgcgacctgcagaga

SEQ ID NO: 37055 - DNA, 81 bp, Homo sapiens
acccgccacctgcgcaggctgagcgccgagtacccggtgagcagcgagggtgcacgcgacctgcagagaggactgcgcaag

SEQ ID NO: 37056 - DNA, 81 bp, Homo sapiens
acctgcgcaggctgagcgccgagtacccggtgagcagcgagggtgcacgcgacctgcagagaggactgcgcaaggggctgg

SEQ ID NO: 37057 - DNA, 81 bp, Homo sapiens
ctgagcgccgagtacccggtgagcagcgagggtgcacgcgacctgcagagaggactgcgcaaggggctggtccggctgagc

SEQ ID NO: 37058 - DNA, 80 bp, Homo sapiens
agtacccggtgagcagcgagggtgcacgcgacctgcagagaggactgcgcaaggggctggtccggctgagccgctgctac

SEQ ID NO: 37059 - DNA, 83 bp, Homo sapiens
tgagcagcgagggtgcacgcgacctgcagagaggactgcgcaaggggctggtccggctgagccgctgctacgcggggctgtcc

SEQ ID NO: 37060 - DNA, 77 bp, Homo sapiens
agggtgcacgcgacctgcagagaggactgcgcaaggggctggtccggctgagccgctgctacgcggggctgtccggg

SEQ ID NO: 37061 - DNA, 77 bp, Homo sapiens
tgcagagaggactgcgcaaggggctggtccggctgagccgctgctacgcggggctgtccgggggcgccgtggccttc

SEQ ID NO: 37062 - DNA, 73 bp, Homo sapiens
agaggactgcgcaaggggctggtccggctgagccgctgctacgcggggctgtccgggggcgccgtggccttcc

SEQ ID NO: 37063 - DNA, 78 bp, Homo sapiens
gggctggtccggctgagccgctgctacgcggggctgtccgggggcgccgtggccttcctgcgcagcactctgtgcgcc

SEQ ID NO: 37064 - DNA, 78 bp, Homo sapiens
ggtccggctgagccgctgctacgcggggctgtccgggggcgccgtggccttcctgcgcagcactctgtgcgcccagcc

SEQ ID NO: 37065 - DNA, 76 bp, Homo sapiens
agccgctgctacgcggggctgtccgggggcgccgtggccttcctgcgcagcactctgtgcgcccagccctggtaag

SEQ ID NO: 37066 - DNA, 75 bp, Homo sapiens
gggctgtccgggggcgccgtggccttcctgcgcagcactctgtgcgcccagccctggtaaggcgcgcccctctcc

SEQ ID NO: 37067 - DNA, 75 bp, Homo sapiens
gtccgggggcgccgtggccttcctgcgcagcactctgtgcgcccagccctggtaaggcgcgcccctctcctcctc

SEQ ID NO: 37068 - DNA, 75 bp, Homo sapiens
ccgtggccttcctgcgcagcactctgtgcgcccagccctggtaaggcgcgcccctctcctcctccttctccccgc

SEQ ID NO: 37069 - DNA, 74 bp, Homo sapiens
acacccctcccgccgctgggccacgtgctgagcctatgtccgtcccaggggccggccctgcgcgtccagctgcc

SEQ ID NO: 37070 - DNA, 79 bp, Homo sapiens
ccgctgggccacgtgctgagcctatgtccgtcccaggggccggccctgcgcgtccagctgcctgcagtgcccgtggcta

SEQ ID NO: 37071 - DNA, 78 bp, Homo sapiens
acgtgctgagcctatgtccgtcccaggggccggccctgcgcgtccagctgcctgcagtgcccgtggctaacagaggag

SEQ ID NO: 37072 - DNA, 77 bp, Homo sapiens
ctgagcctatgtccgtcccaggggccggccctgcgcgtccagctgcctgcagtgcccgtggctaacagaggagggcc

SEQ ID NO: 37073 - DNA, 74 bp, Homo sapiens
tccgtcccaggggccggccctgcgcgtccagctgcctgcagtgcccgtggctaacagaggagggcccggcctgt

SEQ ID NO: 37074 - DNA, 75 bp, Homo sapiens
ccggccctgcgcgtccagctgcctgcagtgcccgtggctaacagaggagggcccggcctgttcgcggcccgcgcc

SEQ ID NO: 37075 - DNA, 74 bp, Homo sapiens
cgtccagctgcctgcagtgcccgtggctaacagaggagggcccggcctgttcgcggcccgcgcccgtgaccttc

SEQ ID NO: 37076 - DNA, 70 bp, Homo sapiens
cctgcagtgcccgtggctaacagaggagggcccggcctgttcgcggcccgcgcccgtgaccttccctacc

SEQ ID NO: 37077 - DNA, 69 bp, Homo sapiens
agtgcccgtggctaacagaggagggcccggcctgttcgcggcccgcgcccgtgaccttccctaccgcgc

SEQ ID NO: 37078 - DNA, 71 bp, Homo sapiens
taacagaggagggcccggcctgttcgcggcccgcgcccgtgaccttccctaccgcgcggctgcgcgtcttc

SEQ ID NO: 37079 - DNA, 74 bp, Homo sapiens
cccggcctgttcgcggcccgcgcccgtgaccttccctaccgcgcggctgcgcgtcttcgtgcgcaatcgcgaga

SEQ ID NO: 37080 - DNA, 75 bp, Homo sapiens
cctgttcgcggcccgcgcccgtgaccttccctaccgcgcggctgcgcgtcttcgtgcgcaatcgcgagaagagac

SEQ ID NO: 37081 - DNA, 79 bp, Homo sapiens
cgcccgtgaccttccctaccgcgcggctgcgcgtcttcgtgcgcaatcgcgagaagagacgcgcgctgctgtacaagag

SEQ ID NO: 37082 - DNA, 81 bp, Homo sapiens
tgaccttccctaccgcgcggctgcgcgtcttcgtgcgcaatcgcgagaagagacgcgcgctgctgtacaagaggcacaacc

SEQ ID NO: 37083 - DNA, 81 bp, Homo sapiens
ctaccgcgcggctgcgcgtcttcgtgcgcaatcgcgagaagagacgcgcgctgctgtacaagaggcacaacctggcccagg

SEQ ID NO: 37084 - DNA, 83 bp, Homo sapiens
ctgcgcgtcttcgtgcgcaatcgcgagaagagacgcgcgctgctgtacaagaggcacaacctggcccaggtgcgctgagggtc

SEQ ID NO: 37085 - DNA, 80 bp, Homo sapiens
ttcgtgcgcaatcgcgagaagagacgcgcgctgctgtacaagaggcacaacctggcccaggtgcgctgagggtcgccccg

SEQ ID NO: 37086 - DNA, 77 bp, Homo sapiens
gagaagagacgcgcgctgctgtacaagaggcacaacctggcccaggtgcgctgagggtcgccccggccacacccttg

SEQ ID NO: 37087 - DNA, 76 bp, Homo sapiens
agacgcgcgctgctgtacaagaggcacaacctggcccaggtgcgctgagggtcgccccggccacacccttggtctc

SEQ ID NO: 37088 - DNA, 72 bp, Homo sapiens
tgtacaagaggcacaacctggcccaggtgcgctgagggtcgccccggccacacccttggtctccccgctggg

SEQ ID NO: 37089 - DNA, 73 bp, Homo sapiens
cacaacctggcccaggtgcgctgagggtcgccccggccacacccttggtctccccgctgggggtcgctgcaga

SEQ ID NO: 37090 - DNA, 73 bp, Homo sapiens
cccaggtgcgctgagggtcgccccggccacacccttggtctccccgctgggggtcgctgcagacgcgccaata

SEQ ID NO: 37091 - DNA, 71 bp, Homo sapiens
gtcgccccggccacacccttggtctccccgctgggggtcgctgcagacgcgccaataaaaacgcacagccg

SEQ ID NO: 37092 - DNA, 71 bp, Homo sapiens
acccttggtctccccgctgggggtcgctgcagacgcgccaataaaaacgcacagccgggcgagaagtcttc

SEQ ID NO: 37093 - DNA, 74 bp, Homo sapiens
tccccgctgggggtcgctgcagacgcgccaataaaaacgcacagccgggcgagaagtcttccgtctcgttgcat

SEQ ID NO: 37094 - DNA, 73 bp, Homo sapiens
gggtcgctgcagacgcgccaataaaaacgcacagccgggcgagaagtcttccgtctcgttgcattattttctt

SEQ ID NO: 37095 - DNA, 72 bp, Homo sapiens
ctgcagacgcgccaataaaaacgcacagccgggcgagaagtcttccgtctcgttgcattattttcttttggg

SEQ ID NO: 37096 - DNA, 74 bp, Homo sapiens
aaggttcattgcttcatgccaaggaaatcaagaacttgagcacacacggagtaaggttaagagcagaggtttaa

SEQ ID NO: 37097 - DNA, 73 bp, Homo sapiens
atgccaaggaaatcaagaacttgagcacacacggagtaaggttaagagcagaggtttaataggcaaaagagaa

SEQ ID NO: 37098 - DNA, 70 bp, Homo sapiens
aaggaaatcaagaacttgagcacacacggagtaaggttaagagcagaggtttaataggcaaaagagaaag

SEQ ID NO: 37099 - DNA, 70 bp, Homo sapiens
agaacttgagcacacacggagtaaggttaagagcagaggtttaataggcaaaagagaaaggaggcttggg

SEQ ID NO: 37100 - DNA, 71 bp, Homo sapiens
aaaacaaaaaaaccttcaaaggtagtatcacaatgtgaataaactgagaatgtggaagtctccacatttca

SEQ ID NO: 37101 - DNA, 75 bp, Homo sapiens
aaaaaccttcaaaggtagtatcacaatgtgaataaactgagaatgtggaagtctccacatttcacatacaccatc

SEQ ID NO: 37102 - DNA, 79 bp, Homo sapiens
tcaaaggtagtatcacaatgtgaataaactgagaatgtggaagtctccacatttcacatacaccatccataaagaagta

SEQ ID NO: 37103 - DNA, 78 bp, Homo sapiens
aaggtagtatcacaatgtgaataaactgagaatgtggaagtctccacatttcacatacaccatccataaagaagtata

SEQ ID NO: 37104 - DNA, 78 bp, Homo sapiens
gtagtatcacaatgtgaataaactgagaatgtggaagtctccacatttcacatacaccatccataaagaagtataaaa

SEQ ID NO: 37105 - DNA, 79 bp, Homo sapiens
tgaataaactgagaatgtggaagtctccacatttcacatacaccatccataaagaagtataaaactcaacacatgaata

SEQ ID NO: 37106 - DNA, 78 bp, Homo sapiens
gaataaactgagaatgtggaagtctccacatttcacatacaccatccataaagaagtataaaactcaacacatgaata

SEQ ID NO: 37107 - DNA, 79 bp, Homo sapiens
aaactgagaatgtggaagtctccacatttcacatacaccatccataaagaagtataaaactcaacacatgaatagcaga

SEQ ID NO: 37108 - DNA, 83 bp, Homo sapiens
aagtctccacatttcacatacaccatccataaagaagtataaaactcaacacatgaatagcagacgatgctatcagcagataa

SEQ ID NO: 37109 - DNA, 84 bp, Homo sapiens
agtctccacatttcacatacaccatccataaagaagtataaaactcaacacatgaatagcagacgatgctatcagcagataata

SEQ ID NO: 37110 - DNA, 82 bp, Homo sapiens
atttcacatacaccatccataaagaagtataaaactcaacacatgaatagcagacgatgctatcagcagataatagcacttt

SEQ ID NO: 37111 - DNA, 82 bp, Homo sapiens
acatacaccatccataaagaagtataaaactcaacacatgaatagcagacgatgctatcagcagataatagcacttttatta

SEQ ID NO: 37112 - DNA, 83 bp, Homo sapiens
ataaagaagtataaaactcaacacatgaatagcagacgatgctatcagcagataatagcacttttattagcagtactcagcag

SEQ ID NO: 37113 - DNA, 83 bp, Homo sapiens
tataaaactcaacacatgaatagcagacgatgctatcagcagataatagcacttttattagcagtactcagcaggaaaagaaa

SEQ ID NO: 37114 - DNA, 82 bp, Homo sapiens
aacacatgaatagcagacgatgctatcagcagataatagcacttttattagcagtactcagcaggaaaagaaaaagcagttc

SEQ ID NO: 37115 - DNA, 79 bp, Homo sapiens
aatagcagacgatgctatcagcagataatagcacttttattagcagtactcagcaggaaaagaaaaagcagttcctggt

SEQ ID NO: 37116 - DNA, 76 bp, Homo sapiens
tatcagcagataatagcacttttattagcagtactcagcaggaaaagaaaaagcagttcctggttgttatttctgt

SEQ ID NO: 37117 - DNA, 72 bp, Homo sapiens
cagataatagcacttttattagcagtactcagcaggaaaagaaaaagcagttcctggttgttatttctgttt

SEQ ID NO: 37118 - DNA, 69 bp, Homo sapiens
agtactcagcaggaaaagaaaaagcagttcctggttgttatttctgttttctctgtttcttagggcgtc

SEQ ID NO: 37119 - DNA, 65 bp, Homo sapiens
aggaaaagaaaaagcagttcctggttgttatttctgttttctctgtttcttagggcgtccacttt

SEQ ID NO: 37120 - DNA, 68 bp, Homo sapiens
agaaaaagcagttcctggttgttatttctgttttctctgtttcttagggcgtccacttttcttctgtc

SEQ ID NO: 37121 - DNA, 67 bp, Homo sapiens
tggttgttatttctgttttctctgtttcttagggcgtccacttttcttctgtcctttcttcttcgtt

SEQ ID NO: 37122 - DNA, 67 bp, Homo sapiens
tatttctgttttctctgtttcttagggcgtccacttttcttctgtcctttcttcttcgttttaagga

SEQ ID NO: 37123 - DNA, 67 bp, Homo sapiens
tctctgtttcttagggcgtccacttttcttctgtcctttcttcttcgttttaaggagaacagctttt

SEQ ID NO: 37124 - DNA, 67 bp, Homo sapiens
ttagggcgtccacttttcttctgtcctttcttcttcgttttaaggagaacagctttttctccaataa

SEQ ID NO: 37125 - DNA, 67 bp, Homo sapiens
gtccacttttcttctgtcctttcttcttcgttttaaggagaacagctttttctccaataaataagct

SEQ ID NO: 37126 - DNA, 67 bp, Homo sapiens
gtcctttcttcttcgttttaaggagaacagctttttctccaataaataagcttttaggatgtccttc

SEQ ID NO: 37127 - DNA, 70 bp, Homo sapiens
tcttcgttttaaggagaacagctttttctccaataaataagcttttaggatgtccttctgcagttttgga

SEQ ID NO: 37128 - DNA, 69 bp, Homo sapiens
tttaaggagaacagctttttctccaataaataagcttttaggatgtccttctgcagttttggaagtaaa

SEQ ID NO: 37129 - DNA, 69 bp, Homo sapiens
gctttttctccaataaataagcttttaggatgtccttctgcagttttggaagtaaaattaagtccctgc

SEQ ID NO: 37130 - DNA, 69 bp, Homo sapiens
tctccaataaataagcttttaggatgtccttctgcagttttggaagtaaaattaagtccctgcttaggt

SEQ ID NO: 37131 - DNA, 69 bp, Homo sapiens
ataagcttttaggatgtccttctgcagttttggaagtaaaattaagtccctgcttaggtttactgacat

SEQ ID NO: 37132 - DNA, 71 bp, Homo sapiens
tgtccttctgcagttttggaagtaaaattaagtccctgcttaggtttactgacattcttcaatcgtggatt

SEQ ID NO: 37133 - DNA, 70 bp, Homo sapiens
ctgcagttttggaagtaaaattaagtccctgcttaggtttactgacattcttcaatcgtggatttgaatt

SEQ ID NO: 37134 - DNA, 68 bp, Homo sapiens
ggaagtaaaattaagtccctgcttaggtttactgacattcttcaatcgtggatttgaattttgttgtt

SEQ ID NO: 37135 - DNA, 68 bp, Homo sapiens
ttaagtccctgcttaggtttactgacattcttcaatcgtggatttgaattttgttgtttaaatttttc

SEQ ID NO: 37136 - DNA, 69 bp, Homo sapiens
tgcttaggtttactgacattcttcaatcgtggatttgaattttgttgtttaaatttttctttattaaca

SEQ ID NO: 37137 - DNA, 72 bp, Homo sapiens
gacattcttcaatcgtggatttgaattttgttgtttaaatttttctttattaacagaacgcatgactctgag

SEQ ID NO: 37138 - DNA, 71 bp, Homo sapiens
tcaatcgtggatttgaattttgttgtttaaatttttctttattaacagaacgcatgactctgagttttctc

SEQ ID NO: 37139 - DNA, 72 bp, Homo sapiens
tgaattttgttgtttaaatttttctttattaacagaacgcatgactctgagttttctccccatgagttcaga

SEQ ID NO: 37140 - DNA, 70 bp, Homo sapiens
gttgtttaaatttttctttattaacagaacgcatgactctgagttttctccccatgagttcagaattatt

SEQ ID NO: 37141 - DNA, 77 bp, Homo sapiens
tttctttattaacagaacgcatgactctgagttttctccccatgagttcagaattatttaatttcagagcaagatga

SEQ ID NO: 37142 - DNA, 78 bp, Homo sapiens
ttattaacagaacgcatgactctgagttttctccccatgagttcagaattatttaatttcagagcaagatgaacagaa

SEQ ID NO: 37143 - DNA, 79 bp, Homo sapiens
atgactctgagttttctccccatgagttcagaattatttaatttcagagcaagatgaacagaatctgtattctgcaaaa

SEQ ID NO: 37144 - DNA, 78 bp, Homo sapiens
cccatgagttcagaattatttaatttcagagcaagatgaacagaatctgtattctgcaaaagaaaacacaatacatta

SEQ ID NO: 37145 - DNA, 78 bp, Homo sapiens
gaattatttaatttcagagcaagatgaacagaatctgtattctgcaaaagaaaacacaatacattaattgctaccaga

SEQ ID NO: 37146 - DNA, 75 bp, Homo sapiens
cctcccagggcacttcgaaggacagtgacaatgcattagtctcccatacctcaaagagcacatagccaaaccctt

SEQ ID NO: 37147 - DNA, 79 bp, Homo sapiens
ttcgaaggacagtgacaatgcattagtctcccatacctcaaagagcacatagccaaaccctttgccgatgcctgtcatt

SEQ ID NO: 37148 - DNA, 79 bp, Homo sapiens
aggacagtgacaatgcattagtctcccatacctcaaagagcacatagccaaaccctttgccgatgcctgtcattttgtc

SEQ ID NO: 37149 - DNA, 79 bp, Homo sapiens
aatgcattagtctcccatacctcaaagagcacatagccaaaccctttgccgatgcctgtcattttgtctctcacaatcc

SEQ ID NO: 37150 - DNA, 81 bp, Homo sapiens
tcccatacctcaaagagcacatagccaaaccctttgccgatgcctgtcattttgtctctcacaatcctcacggccatgata

SEQ ID NO: 37151 - DNA, 79 bp, Homo sapiens
aaagagcacatagccaaaccctttgccgatgcctgtcattttgtctctcacaatcctcacggccatgatacttccacag

SEQ ID NO: 37152 - DNA, 78 bp, Homo sapiens
atagccaaaccctttgccgatgcctgtcattttgtctctcacaatcctcacggccatgatacttccacagtccagaaa

SEQ ID NO: 37153 - DNA, 78 bp, Homo sapiens
aaccctttgccgatgcctgtcattttgtctctcacaatcctcacggccatgatacttccacagtccagaaagtgcttc

SEQ ID NO: 37154 - DNA, 82 bp, Homo sapiens
cctgtcattttgtctctcacaatcctcacggccatgatacttccacagtccagaaagtgcttctcaatggcagattcttcaa

SEQ ID NO: 37155 - DNA, 80 bp, Homo sapiens
attttgtctctcacaatcctcacggccatgatacttccacagtccagaaagtgcttctcaatggcagattcttcaacttc

SEQ ID NO: 37156 - DNA, 77 bp, Homo sapiens
aatcctcacggccatgatacttccacagtccagaaagtgcttctcaatggcagattcttcaacttctgaaaacaaat

SEQ ID NO: 37157 - DNA, 78 bp, Homo sapiens
ggccatgatacttccacagtccagaaagtgcttctcaatggcagattcttcaacttctgaaaacaaattcaatcaaaa

SEQ ID NO: 37158 - DNA, 76 bp, Homo sapiens
atacttccacagtccagaaagtgcttctcaatggcagattcttcaacttctgaaaacaaattcaatcaaaatggaa

SEQ ID NO: 37159 - DNA, 66 bp, Homo sapiens
aaacattaagttactactcagttcttatttccttgttatttatttagtaatattaactgtactttg

SEQ ID NO: 37160 - DNA, 66 bp, Homo sapiens
tactactcagttcttatttccttgttatttatttagtaatattaactgtactttgtttaaacaaac

SEQ ID NO: 37161 - DNA, 65 bp, Homo sapiens
tatttccttgttatttatttagtaatattaactgtactttgtttaaacaaacttactataaggga

SEQ ID NO: 37162 - DNA, 65 bp, Homo sapiens
ttgttatttatttagtaatattaactgtactttgtttaaacaaacttactataagggagattccc

SEQ ID NO: 37163 - DNA, 65 bp, Homo sapiens
tagtaatattaactgtactttgtttaaacaaacttactataagggagattccccacaaaaaccga

SEQ ID NO: 37164 - DNA, 67 bp, Homo sapiens
actgtactttgtttaaacaaacttactataagggagattccccacaaaaaccgatctcttgtctctc

SEQ ID NO: 37165 - DNA, 67 bp, Homo sapiens
gtttaaacaaacttactataagggagattccccacaaaaaccgatctcttgtctctctgaaacaaaa

SEQ ID NO: 37166 - DNA, 68 bp, Homo sapiens
aacttactataagggagattccccacaaaaaccgatctcttgtctctctgaaacaaaaagacagttaa

SEQ ID NO: 37167 - DNA, 68 bp, Homo sapiens
ctataagggagattccccacaaaaaccgatctcttgtctctctgaaacaaaaagacagttaataaaaa

SEQ ID NO: 37168 - DNA, 71 bp, Homo sapiens
cccacaaaaaccgatctcttgtctctctgaaacaaaaagacagttaataaaaatcactcactagaccagaa

SEQ ID NO: 37169 - DNA, 71 bp, Homo sapiens
aaccgatctcttgtctctctgaaacaaaaagacagttaataaaaatcactcactagaccagaaaatggaag

SEQ ID NO: 37170 - DNA, 72 bp, Homo sapiens
gtctctctgaaacaaaaagacagttaataaaaatcactcactagaccagaaaatggaagtcatcgaaaatcc

SEQ ID NO: 37171 - DNA, 70 bp, Homo sapiens
aaagcctggaaggaaacatttctctctacaaagctctcgttctttaaacaaatcaagtactacttacaga

SEQ ID NO: 37172 - DNA, 73 bp, Homo sapiens
aaggaaacatttctctctacaaagctctcgttctttaaacaaatcaagtactacttacagatgaggtctcaga

SEQ ID NO: 37173 - DNA, 79 bp, Homo sapiens
tctctacaaagctctcgttctttaaacaaatcaagtactacttacagatgaggtctcagatgcgagatcaactctaata

SEQ ID NO: 37174 - DNA, 76 bp, Homo sapiens
aaagctctcgttctttaaacaaatcaagtactacttacagatgaggtctcagatgcgagatcaactctaatacgaa

SEQ ID NO: 37175 - DNA, 80 bp, Homo sapiens
ttctttaaacaaatcaagtactacttacagatgaggtctcagatgcgagatcaactctaatacgaaatccatctgcaatc

SEQ ID NO: 37176 - DNA, 80 bp, Homo sapiens
aatcaagtactacttacagatgaggtctcagatgcgagatcaactctaatacgaaatccatctgcaatctgggccccatt

SEQ ID NO: 37177 - DNA, 82 bp, Homo sapiens
ttacagatgaggtctcagatgcgagatcaactctaatacgaaatccatctgcaatctgggccccatttctgtattataaata

SEQ ID NO: 37178 - DNA, 78 bp, Homo sapiens
aggtctcagatgcgagatcaactctaatacgaaatccatctgcaatctgggccccatttctgtattataaatacaaag

SEQ ID NO: 37179 - DNA, 75 bp, Homo sapiens
atgcgagatcaactctaatacgaaatccatctgcaatctgggccccatttctgtattataaatacaaagggaaaa

SEQ ID NO: 37180 - DNA, 72 bp, Homo sapiens
atcaactctaatacgaaatccatctgcaatctgggccccatttctgtattataaatacaaagggaaaatggt

SEQ ID NO: 37181 - DNA, 71 bp, Homo sapiens
cgaaatccatctgcaatctgggccccatttctgtattataaatacaaagggaaaatggttgttaaaaatga

SEQ ID NO: 37182 - DNA, 73 bp, Homo sapiens
tctgcaatctgggccccatttctgtattataaatacaaagggaaaatggttgttaaaaatgagcactcgatta

SEQ ID NO: 37183 - DNA, 72 bp, Homo sapiens
ctcatacatacttataggacaattattctgttcaaacctaagggataaaattaccttttcaatgcttgcgtg

SEQ ID NO: 37184 - DNA, 73 bp, Homo sapiens
acatacttataggacaattattctgttcaaacctaagggataaaattaccttttcaatgcttgcgtggcagca

SEQ ID NO: 37185 - DNA, 71 bp, Homo sapiens
aattattctgttcaaacctaagggataaaattaccttttcaatgcttgcgtggcagcactctcctccttaa

SEQ ID NO: 37186 - DNA, 73 bp, Homo sapiens
tgttcaaacctaagggataaaattaccttttcaatgcttgcgtggcagcactctcctccttaaacacaacata

SEQ ID NO: 37187 - DNA, 74 bp, Homo sapiens
taagggataaaattaccttttcaatgcttgcgtggcagcactctcctccttaaacacaacataggcattaatat

SEQ ID NO: 37188 - DNA, 74 bp, Homo sapiens
aaaattaccttttcaatgcttgcgtggcagcactctcctccttaaacacaacataggcattaatatttttctga

SEQ ID NO: 37189 - DNA, 78 bp, Homo sapiens
ttttcaatgcttgcgtggcagcactctcctccttaaacacaacataggcattaatatttttctgatcaggatgaattt

SEQ ID NO: 37190 - DNA, 77 bp, Homo sapiens
tggcagcactctcctccttaaacacaacataggcattaatatttttctgatcaggatgaattttacgtctacaccaa

SEQ ID NO: 37191 - DNA, 74 bp, Homo sapiens
gcactctcctccttaaacacaacataggcattaatatttttctgatcaggatgaattttacgtctacaccaaaa

SEQ ID NO: 37192 - DNA, 69 bp, Homo sapiens
ccttaaacacaacataggcattaatatttttctgatcaggatgaattttacgtctacaccaaaaaaaaa

SEQ ID NO: 37193 - DNA, 65 bp, Homo sapiens
gttaagaaatggtctcactttttagccaaaaaggaagaaagtttaaggtgactccctttctctaa

SEQ ID NO: 37194 - DNA, 64 bp, Homo sapiens
ggtctcactttttagccaaaaaggaagaaagtttaaggtgactccctttctctaattataaact

SEQ ID NO: 37195 - DNA, 67 bp, Homo sapiens
agccaaaaaggaagaaagtttaaggtgactccctttctctaattataaacttactttattgctgcca

SEQ ID NO: 37196 - DNA, 66 bp, Homo sapiens
ggaagaaagtttaaggtgactccctttctctaattataaacttactttattgctgccaactttttg

SEQ ID NO: 37197 - DNA, 68 bp, Homo sapiens
ttaaggtgactccctttctctaattataaacttactttattgctgccaactttttggatagcgttccc

SEQ ID NO: 37198 - DNA, 71 bp, Homo sapiens
tccctttctctaattataaacttactttattgctgccaactttttggatagcgttccctctgctggaatct

SEQ ID NO: 37199 - DNA, 71 bp, Homo sapiens
aattataaacttactttattgctgccaactttttggatagcgttccctctgctggaatctttcaagagaaa

SEQ ID NO: 37200 - DNA, 70 bp, Homo sapiens
taaacttactttattgctgccaactttttggatagcgttccctctgctggaatctttcaagagaaaaaaa

SEQ ID NO: 37201 - DNA, 70 bp, Homo sapiens
aagttcatctgatttaaatgcaataaattttaatattatgtaattttacgggggaatgaaacataccaga

SEQ ID NO: 37202 - DNA, 71 bp, Homo sapiens
catctgatttaaatgcaataaattttaatattatgtaattttacgggggaatgaaacataccagagaacga

SEQ ID NO: 37203 - DNA, 69 bp, Homo sapiens
gcaataaattttaatattatgtaattttacgggggaatgaaacataccagagaacgaaatcgtacagat

SEQ ID NO: 37204 - DNA, 72 bp, Homo sapiens
taatattatgtaattttacgggggaatgaaacataccagagaacgaaatcgtacagattctatttgtccata

SEQ ID NO: 37205 - DNA, 71 bp, Homo sapiens
ttatgtaattttacgggggaatgaaacataccagagaacgaaatcgtacagattctatttgtccatactct

SEQ ID NO: 37206 - DNA, 69 bp, Homo sapiens
ggggaatgaaacataccagagaacgaaatcgtacagattctatttgtccatactctttaaaaaacgact

SEQ ID NO: 37207 - DNA, 72 bp, Homo sapiens
gaaacataccagagaacgaaatcgtacagattctatttgtccatactctttaaaaaacgacttcagcttcta

SEQ ID NO: 37208 - DNA, 70 bp, Homo sapiens
ccagagaacgaaatcgtacagattctatttgtccatactctttaaaaaacgacttcagcttctaaaatta

SEQ ID NO: 37209 - DNA, 66 bp, Homo sapiens
aaatcgtacagattctatttgtccatactctttaaaaaacgacttcagcttctaaaattaaaaaaa

SEQ ID NO: 37210 - DNA, 71 bp, Homo sapiens
gaacaaagttattaacttctctgaacttttaccatatacaaactcaccttcttattacatgtaacaggcaa

SEQ ID NO: 37211 - DNA, 71 bp, Homo sapiens
ttaacttctctgaacttttaccatatacaaactcaccttcttattacatgtaacaggcaaattcccaacaa

SEQ ID NO: 37212 - DNA, 71 bp, Homo sapiens
ctctgaacttttaccatatacaaactcaccttcttattacatgtaacaggcaaattcccaacaaacacagt

SEQ ID NO: 37213 - DNA, 73 bp, Homo sapiens
ttaccatatacaaactcaccttcttattacatgtaacaggcaaattcccaacaaacacagttctctcattctt

SEQ ID NO: 37214 - DNA, 74 bp, Homo sapiens
tacaaactcaccttcttattacatgtaacaggcaaattcccaacaaacacagttctctcattctttaatctctc

SEQ ID NO: 37215 - DNA, 75 bp, Homo sapiens
tcttattacatgtaacaggcaaattcccaacaaacacagttctctcattctttaatctctcttcttcttggttga

SEQ ID NO: 37216 - DNA, 74 bp, Homo sapiens
acatgtaacaggcaaattcccaacaaacacagttctctcattctttaatctctcttcttcttggttgatttgaa

SEQ ID NO: 37217 - DNA, 71 bp, Homo sapiens
ggcaaattcccaacaaacacagttctctcattctttaatctctcttcttcttggttgatttgaattttctt

SEQ ID NO: 37218 - DNA, 73 bp, Homo sapiens
aacacagttctctcattctttaatctctcttcttcttggttgatttgaattttctttctttgactgacaactg

SEQ ID NO: 37219 - DNA, 76 bp, Homo sapiens
tctctcattctttaatctctcttcttcttggttgatttgaattttctttctttgactgacaactgtgtcttctgtg

SEQ ID NO: 37220 - DNA, 76 bp, Homo sapiens
tctttaatctctcttcttcttggttgatttgaattttctttctttgactgacaactgtgtcttctgtgtcatcaag

SEQ ID NO: 37221 - DNA, 77 bp, Homo sapiens
tcttcttggttgatttgaattttctttctttgactgacaactgtgtcttctgtgtcatcaagtatttttctatctgc

SEQ ID NO: 37222 - DNA, 75 bp, Homo sapiens
ggttgatttgaattttctttctttgactgacaactgtgtcttctgtgtcatcaagtatttttctatctgctactt

SEQ ID NO: 37223 - DNA, 74 bp, Homo sapiens
ttttctttctttgactgacaactgtgtcttctgtgtcatcaagtatttttctatctgctactttaacaccaggt

SEQ ID NO: 37224 - DNA, 75 bp, Homo sapiens
tttgactgacaactgtgtcttctgtgtcatcaagtatttttctatctgctactttaacaccaggttgagaatttt

SEQ ID NO: 37225 - DNA, 72 bp, Homo sapiens
acaactgtgtcttctgtgtcatcaagtatttttctatctgctactttaacaccaggttgagaatttttcctt

SEQ ID NO: 37226 - DNA, 71 bp, Homo sapiens
tgtgtcatcaagtatttttctatctgctactttaacaccaggttgagaatttttccttttctgcccttgtt

SEQ ID NO: 37227 - DNA, 69 bp, Homo sapiens
agtatttttctatctgctactttaacaccaggttgagaatttttccttttctgcccttgtttctggtga

SEQ ID NO: 37228 - DNA, 69 bp, Homo sapiens
ttttctatctgctactttaacaccaggttgagaatttttccttttctgcccttgtttctggtgaatttc

SEQ ID NO: 37229 - DNA, 71 bp, Homo sapiens
accaggttgagaatttttccttttctgcccttgtttctggtgaatttcttcttctaaatcagcactcgcta

SEQ ID NO: 37230 - DNA, 71 bp, Homo sapiens
ttttccttttctgcccttgtttctggtgaatttcttcttctaaatcagcactcgctagagcgctttccctt

SEQ ID NO: 37231 - DNA, 71 bp, Homo sapiens
cttttctgcccttgtttctggtgaatttcttcttctaaatcagcactcgctagagcgctttccctttttaa

SEQ ID NO: 37232 - DNA, 71 bp, Homo sapiens
ttgtttctggtgaatttcttcttctaaatcagcactcgctagagcgctttccctttttaaggcaaaaaata

SEQ ID NO: 37233 - DNA, 67 bp, Homo sapiens
gttaatttaccatctaatttctttaacatcaaataagagaattttaccaacctgtctgccaactttt

SEQ ID NO: 37234 - DNA, 68 bp, Homo sapiens
aatttctttaacatcaaataagagaattttaccaacctgtctgccaactttttttctgcgttagtgtg

SEQ ID NO: 37235 - DNA, 69 bp, Homo sapiens
aacatcaaataagagaattttaccaacctgtctgccaactttttttctgcgttagtgtgtttcttcttc

SEQ ID NO: 37236 - DNA, 69 bp, Homo sapiens
aataagagaattttaccaacctgtctgccaactttttttctgcgttagtgtgtttcttcttcgctttca

SEQ ID NO: 37237 - DNA, 66 bp, Homo sapiens
attttaccaacctgtctgccaactttttttctgcgttagtgtgtttcttcttcgctttcacttttt

SEQ ID NO: 37238 - DNA, 70 bp, Homo sapiens
tctgccaactttttttctgcgttagtgtgtttcttcttcgctttcacttttttggcaggttcttgcgaaa

SEQ ID NO: 37239 - DNA, 70 bp, Homo sapiens
tttttctgcgttagtgtgtttcttcttcgctttcacttttttggcaggttcttgcgaaagtggtctttca

SEQ ID NO: 37240 - DNA, 72 bp, Homo sapiens
ttagtgtgtttcttcttcgctttcacttttttggcaggttcttgcgaaagtggtctttcaatctgggatgta

SEQ ID NO: 37241 - DNA, 70 bp, Homo sapiens
tttcttcttcgctttcacttttttggcaggttcttgcgaaagtggtctttcaatctgggatgtactttct

SEQ ID NO: 37242 - DNA, 72 bp, Homo sapiens
ttcgctttcacttttttggcaggttcttgcgaaagtggtctttcaatctgggatgtactttcttcctcctca

SEQ ID NO: 37243 - DNA, 70 bp, Homo sapiens
ttggcaggttcttgcgaaagtggtctttcaatctgggatgtactttcttcctcctcattccgtttcgttt

SEQ ID NO: 37244 - DNA, 67 bp, Homo sapiens
aggttcttgcgaaagtggtctttcaatctgggatgtactttcttcctcctcattccgtttcgttttt

SEQ ID NO: 37245 - DNA, 68 bp, Homo sapiens
tggtctttcaatctgggatgtactttcttcctcctcattccgtttcgtttttttgatggtttgctttt

SEQ ID NO: 37246 - DNA, 67 bp, Homo sapiens
tttcaatctgggatgtactttcttcctcctcattccgtttcgtttttttgatggtttgctttttaaa

SEQ ID NO: 37247 - DNA, 65 bp, Homo sapiens
ggatgtactttcttcctcctcattccgtttcgtttttttgatggtttgctttttaaaagtttgaa

SEQ ID NO: 37248 - DNA, 72 bp, Homo sapiens
tatgtaagtggttctaacgagctattcgggaagaaagcccagtgacttactttaggcacaggcacgtacacg

SEQ ID NO: 37249 - DNA, 72 bp, Homo sapiens
ttctaacgagctattcgggaagaaagcccagtgacttactttaggcacaggcacgtacacgggttgaatctg

SEQ ID NO: 37250 - DNA, 73 bp, Homo sapiens
aagaaagcccagtgacttactttaggcacaggcacgtacacgggttgaatctggggctccagagaactgaaga

SEQ ID NO: 37251 - DNA, 74 bp, Homo sapiens
agtgacttactttaggcacaggcacgtacacgggttgaatctggggctccagagaactgaagagggacgccagc

SEQ ID NO: 37252 - DNA, 74 bp, Homo sapiens
tttaggcacaggcacgtacacgggttgaatctggggctccagagaactgaagagggacgccagccgaccggtgc

SEQ ID NO: 37253 - DNA, 72 bp, Homo sapiens
acgtacacgggttgaatctggggctccagagaactgaagagggacgccagccgaccggtgccacctctggaa

SEQ ID NO: 37254 - DNA, 72 bp, Homo sapiens
acgggttgaatctggggctccagagaactgaagagggacgccagccgaccggtgccacctctggaatggtgt

SEQ ID NO: 37255 - DNA, 75 bp, Homo sapiens
ggctccagagaactgaagagggacgccagccgaccggtgccacctctggaatggtgttcgccgcgaaataagcta

SEQ ID NO: 37256 - DNA, 73 bp, Homo sapiens
aactgaagagggacgccagccgaccggtgccacctctggaatggtgttcgccgcgaaataagctactggcgac

SEQ ID NO: 37257 - DNA, 73 bp, Homo sapiens
agggacgccagccgaccggtgccacctctggaatggtgttcgccgcgaaataagctactggcgacctgtccaa

SEQ ID NO: 37258 - DNA, 73 bp, Homo sapiens
ccgaccggtgccacctctggaatggtgttcgccgcgaaataagctactggcgacctgtccaagcctgtagtct

SEQ ID NO: 37259 - DNA, 74 bp, Homo sapiens
cacctctggaatggtgttcgccgcgaaataagctactggcgacctgtccaagcctgtagtcttccggcggactc

SEQ ID NO: 37260 - DNA, 72 bp, Homo sapiens
aatggtgttcgccgcgaaataagctactggcgacctgtccaagcctgtagtcttccggcggactcccgcgaa

SEQ ID NO: 37261 - DNA, 72 bp, Homo sapiens
ttcgccgcgaaataagctactggcgacctgtccaagcctgtagtcttccggcggactcccgcgaacgccgtc

SEQ ID NO: 37262 - DNA, 71 bp, Homo sapiens
aaataagctactggcgacctgtccaagcctgtagtcttccggcggactcccgcgaacgccgtcgtcaggat

SEQ ID NO: 37263 - DNA, 73 bp, Homo sapiens
ctggcgacctgtccaagcctgtagtcttccggcggactcccgcgaacgccgtcgtcaggattctctctagaaa

SEQ ID NO: 37264 - DNA, 72 bp, Homo sapiens
aagcctgtagtcttccggcggactcccgcgaacgccgtcgtcaggattctctctagaaatggacgacagaaa

SEQ ID NO: 37265 - DNA, 74 bp, Homo sapiens
gtagtcttccggcggactcccgcgaacgccgtcgtcaggattctctctagaaatggacgacagaaactcagcca

SEQ ID NO: 37266 - DNA, 70 bp, Homo sapiens
agggaacgtacaacatccctccccaggtactcgtgccgcgcgccactcacccctcctggacacttctctt

SEQ ID NO: 37267 - DNA, 70 bp, Homo sapiens
aacatccctccccaggtactcgtgccgcgcgccactcacccctcctggacacttctctttctcttccgtt

SEQ ID NO: 37268 - DNA, 73 bp, Homo sapiens
aggtactcgtgccgcgcgccactcacccctcctggacacttctctttctcttccgtttgctcatcccttccaa

SEQ ID NO: 37269 - DNA, 75 bp, Homo sapiens
tgccgcgcgccactcacccctcctggacacttctctttctcttccgtttgctcatcccttccaaggccattctta

SEQ ID NO: 37270 - DNA, 71 bp, Homo sapiens
actcacccctcctggacacttctctttctcttccgtttgctcatcccttccaaggccattcttactccaaa

SEQ ID NO: 37271 - DNA, 73 bp, Homo sapiens
tcctggacacttctctttctcttccgtttgctcatcccttccaaggccattcttactccaaagactcccagac

SEQ ID NO: 37272 - DNA, 79 bp, Homo sapiens
tctctttctcttccgtttgctcatcccttccaaggccattcttactccaaagactcccagactgcagctgcgcgccagc

SEQ ID NO: 37273 - DNA, 80 bp, Homo sapiens
tctcttccgtttgctcatcccttccaaggccattcttactccaaagactcccagactgcagctgcgcgccagctcgcact

SEQ ID NO: 37274 - DNA, 78 bp, Homo sapiens
tttgctcatcccttccaaggccattcttactccaaagactcccagactgcagctgcgcgccagctcgcacttccgggt

SEQ ID NO: 37275 - DNA, 76 bp, Homo sapiens
ttccaaggccattcttactccaaagactcccagactgcagctgcgcgccagctcgcacttccgggttccgggcact

SEQ ID NO: 37276 - DNA, 77 bp, Homo sapiens
attcttactccaaagactcccagactgcagctgcgcgccagctcgcacttccgggttccgggcacttccgctctctg

SEQ ID NO: 37277 - DNA, 78 bp, Homo sapiens
tccaaagactcccagactgcagctgcgcgccagctcgcacttccgggttccgggcacttccgctctctggccacgccc

SEQ ID NO: 37278 - DNA, 76 bp, Homo sapiens
ccagactgcagctgcgcgccagctcgcacttccgggttccgggcacttccgctctctggccacgccccctcccctc

SEQ ID NO: 37279 - DNA, 73 bp, Homo sapiens
tgcgcgccagctcgcacttccgggttccgggcacttccgctctctggccacgccccctcccctccggcagtcg

SEQ ID NO: 37280 - DNA, 70 bp, Homo sapiens
agctcgcacttccgggttccgggcacttccgctctctggccacgccccctcccctccggcagtcggccgc

SEQ ID NO: 37281 - DNA, 67 bp, Homo sapiens
ttccgggttccgggcacttccgctctctggccacgccccctcccctccggcagtcggccgccgggcg

SEQ ID NO: 37282 - DNA, 69 bp, Homo sapiens
cgggcacttccgctctctggccacgccccctcccctccggcagtcggccgccgggcggcggcgaaggga

SEQ ID NO: 37283 - DNA, 70 bp, Homo sapiens
tctggccacgccccctcccctccggcagtcggccgccgggcggcggcgaagggaggcgctgggtgaggga

SEQ ID NO: 37284 - DNA, 67 bp, Homo sapiens
ccccctcccctccggcagtcggccgccgggcggcggcgaagggaggcgctgggtgagggagcaggtt

SEQ ID NO: 37285 - DNA, 70 bp, Homo sapiens
tccggcagtcggccgccgggcggcggcgaagggaggcgctgggtgagggagcaggtttgtcgccgtcggt

SEQ ID NO: 37286 - DNA, 70 bp, Homo sapiens
cggcggcgaagggaggcgctgggtgagggagcaggtttgtcgccgtcggttggtggtcctcgccgtttca

SEQ ID NO: 37287 - DNA, 69 bp, Homo sapiens
aagggaggcgctgggtgagggagcaggtttgtcgccgtcggttggtggtcctcgccgtttcagaaaagc

SEQ ID NO: 37288 - DNA, 69 bp, Homo sapiens
gggtgagggagcaggtttgtcgccgtcggttggtggtcctcgccgtttcagaaaagcctcattttggga

SEQ ID NO: 37289 - DNA, 69 bp, Homo sapiens
agggagcaggtttgtcgccgtcggttggtggtcctcgccgtttcagaaaagcctcattttgggagtgaa

SEQ ID NO: 37290 - DNA, 69 bp, Homo sapiens
tttgtcgccgtcggttggtggtcctcgccgtttcagaaaagcctcattttgggagtgaaggacgtcttc

SEQ ID NO: 37291 - DNA, 75 bp, Homo sapiens
tcgccgtttcagaaaagcctcattttgggagtgaaggacgtcttctgggagtggttgaagcctgcagtgtgaaga

SEQ ID NO: 37292 - DNA, 77 bp, Homo sapiens
tttcagaaaagcctcattttgggagtgaaggacgtcttctgggagtggttgaagcctgcagtgtgaagaatcagcca

SEQ ID NO: 37293 - DNA, 75 bp, Homo sapiens
attttgggagtgaaggacgtcttctgggagtggttgaagcctgcagtgtgaagaatcagccaggctaggagcggg

SEQ ID NO: 37294 - DNA, 74 bp, Homo sapiens
tcatcacatacagaaatgaactaaaattactaaatcttttagaaacaaaaatcaaggattcacaaactatggca

SEQ ID NO: 37295 - DNA, 69 bp, Homo sapiens
cagaaatgaactaaaattactaaatcttttagaaacaaaaatcaaggattcacaaactatggcatttta

SEQ ID NO: 37296 - DNA, 70 bp, Homo sapiens
aattactaaatcttttagaaacaaaaatcaaggattcacaaactatggcattttatttcagagcctttgc

SEQ ID NO: 37297 - DNA, 72 bp, Homo sapiens
cttttagaaacaaaaatcaaggattcacaaactatggcattttatttcagagcctttgcttacatttgtaca

SEQ ID NO: 37298 - DNA, 74 bp, Homo sapiens
aacaaaaatcaaggattcacaaactatggcattttatttcagagcctttgcttacatttgtacaatatattaca

SEQ ID NO: 37299 - DNA, 76 bp, Homo sapiens
caaggattcacaaactatggcattttatttcagagcctttgcttacatttgtacaatatattacataattcttcat

SEQ ID NO: 37300 - DNA, 77 bp, Homo sapiens
aactatggcattttatttcagagcctttgcttacatttgtacaatatattacataattcttcattgtttgcagatcc

SEQ ID NO: 37301 - DNA, 78 bp, Homo sapiens
ggcattttatttcagagcctttgcttacatttgtacaatatattacataattcttcattgtttgcagatcctaatata

SEQ ID NO: 37302 - DNA, 78 bp, Homo sapiens
cagagcctttgcttacatttgtacaatatattacataattcttcattgtttgcagatcctaatatatactttatagct

SEQ ID NO: 37303 - DNA, 77 bp, Homo sapiens
ttgcttacatttgtacaatatattacataattcttcattgtttgcagatcctaatatatactttatagcttttattc

SEQ ID NO: 37304 - DNA, 76 bp, Homo sapiens
ttgtacaatatattacataattcttcattgtttgcagatcctaatatatactttatagcttttattctataagctt

SEQ ID NO: 37305 - DNA, 74 bp, Homo sapiens
cttcattgtttgcagatcctaatatatactttatagcttttattctataagcttttttcttcaacattttgctg

SEQ ID NO: 37306 - DNA, 74 bp, Homo sapiens
gcagatcctaatatatactttatagcttttattctataagcttttttcttcaacattttgctgtcaacaaatct

SEQ ID NO: 37307 - DNA, 72 bp, Homo sapiens
tatatactttatagcttttattctataagcttttttcttcaacattttgctgtcaacaaatctttacagtcc

SEQ ID NO: 37308 - DNA, 72 bp, Homo sapiens
ctttatagcttttattctataagcttttttcttcaacattttgctgtcaacaaatctttacagtcctgtaca

SEQ ID NO: 37309 - DNA, 73 bp, Homo sapiens
tctataagcttttttcttcaacattttgctgtcaacaaatctttacagtcctgtacaaatttgaataacttga

SEQ ID NO: 37310 - DNA, 70 bp, Homo sapiens
tttttcttcaacattttgctgtcaacaaatctttacagtcctgtacaaatttgaataacttgaaaccatt

SEQ ID NO: 37311 - DNA, 72 bp, Homo sapiens
cttcaacattttgctgtcaacaaatctttacagtcctgtacaaatttgaataacttgaaaccattttcaaca

SEQ ID NO: 37312 - DNA, 71 bp, Homo sapiens
tgctgtcaacaaatctttacagtcctgtacaaatttgaataacttgaaaccattttcaacaaaattagtta

SEQ ID NO: 37313 - DNA, 71 bp, Homo sapiens
tctttacagtcctgtacaaatttgaataacttgaaaccattttcaacaaaattagttactgtaagcacaca

SEQ ID NO: 37314 - DNA, 71 bp, Homo sapiens
tcctgtacaaatttgaataacttgaaaccattttcaacaaaattagttactgtaagcacacactacaagac

SEQ ID NO: 37315 - DNA, 71 bp, Homo sapiens
ttgaataacttgaaaccattttcaacaaaattagttactgtaagcacacactacaagactgaaaatgcttt

SEQ ID NO: 37316 - DNA, 71 bp, Homo sapiens
cttgaaaccattttcaacaaaattagttactgtaagcacacactacaagactgaaaatgcttttcttagaa

SEQ ID NO: 37317 - DNA, 71 bp, Homo sapiens
ccattttcaacaaaattagttactgtaagcacacactacaagactgaaaatgcttttcttagaaaagttga

SEQ ID NO: 37318 - DNA, 74 bp, Homo sapiens
ttagttactgtaagcacacactacaagactgaaaatgcttttcttagaaaagttgaatgtaaaggattctgaca

SEQ ID NO: 37319 - DNA, 76 bp, Homo sapiens
taagcacacactacaagactgaaaatgcttttcttagaaaagttgaatgtaaaggattctgacacgttagcatcta

SEQ ID NO: 37320 - DNA, 75 bp, Homo sapiens
cacactacaagactgaaaatgcttttcttagaaaagttgaatgtaaaggattctgacacgttagcatctacaaca

SEQ ID NO: 37321 - DNA, 72 bp, Homo sapiens
ttcttagaaaagttgaatgtaaaggattctgacacgttagcatctacaacaaaacgcattgaaattcccacg

SEQ ID NO: 37322 - DNA, 70 bp, Homo sapiens
aacaaaacgcattgaaattcccacgtcgtattgccaggaaacaaagaaaacatgccagccccatccaaaa

SEQ ID NO: 37323 - DNA, 70 bp, Homo sapiens
attgaaattcccacgtcgtattgccaggaaacaaagaaaacatgccagccccatccaaaaaaagtacaca

SEQ ID NO: 37324 - DNA, 70 bp, Homo sapiens
acgtcgtattgccaggaaacaaagaaaacatgccagccccatccaaaaaaagtacacagaactacaatta

SEQ ID NO: 37325 - DNA, 68 bp, Homo sapiens
ccaggaaacaaagaaaacatgccagccccatccaaaaaaagtacacagaactacaattaaaacagtaa

SEQ ID NO: 37326 - DNA, 70 bp, Homo sapiens
catgccagccccatccaaaaaaagtacacagaactacaattaaaacagtaaaacagtctgtacaataaag

SEQ ID NO: 37327 - DNA, 68 bp, Homo sapiens
cccatccaaaaaaagtacacagaactacaattaaaacagtaaaacagtctgtacaataaagtactgtg

SEQ ID NO: 37328 - DNA, 72 bp, Homo sapiens
aagtacacagaactacaattaaaacagtaaaacagtctgtacaataaagtactgtgtattaacagtgccaga

SEQ ID NO: 37329 - DNA, 72 bp, Homo sapiens
actacaattaaaacagtaaaacagtctgtacaataaagtactgtgtattaacagtgccagatattaaatagc

SEQ ID NO: 37330 - DNA, 76 bp, Homo sapiens
aacagtaaaacagtctgtacaataaagtactgtgtattaacagtgccagatattaaatagcttgaatgaacacatc

SEQ ID NO: 37331 - DNA, 79 bp, Homo sapiens
aacagtctgtacaataaagtactgtgtattaacagtgccagatattaaatagcttgaatgaacacatccacaatataca

SEQ ID NO: 37332 - DNA, 79 bp, Homo sapiens
tgtacaataaagtactgtgtattaacagtgccagatattaaatagcttgaatgaacacatccacaatatacaaatgtct

SEQ ID NO: 37333 - DNA, 79 bp, Homo sapiens
gtactgtgtattaacagtgccagatattaaatagcttgaatgaacacatccacaatatacaaatgtcttacaaaggtga

SEQ ID NO: 37334 - DNA, 78 bp, Homo sapiens
cagtgccagatattaaatagcttgaatgaacacatccacaatatacaaatgtcttacaaaggtgaagaattaaataca

SEQ ID NO: 37335 - DNA, 77 bp, Homo sapiens
gcttgaatgaacacatccacaatatacaaatgtcttacaaaggtgaagaattaaatacaagtgccaaacagaacaga

SEQ ID NO: 37336 - DNA, 76 bp, Homo sapiens
gaacacatccacaatatacaaatgtcttacaaaggtgaagaattaaatacaagtgccaaacagaacagagattgga

SEQ ID NO: 37337 - DNA, 76 bp, Homo sapiens
caaaggtgaagaattaaatacaagtgccaaacagaacagagattggaatcatacaacataaagtcaatacaagtga

SEQ ID NO: 37338 - DNA, 76 bp, Homo sapiens
ttaaatacaagtgccaaacagaacagagattggaatcatacaacataaagtcaatacaagtgaaaacaattttgca

SEQ ID NO: 37339 - DNA, 74 bp, Homo sapiens
aacagaacagagattggaatcatacaacataaagtcaatacaagtgaaaacaattttgcattcattttggattt

SEQ ID NO: 37340 - DNA, 75 bp, Homo sapiens
agattggaatcatacaacataaagtcaatacaagtgaaaacaattttgcattcattttggattttatacaaggca

SEQ ID NO: 37341 - DNA, 72 bp, Homo sapiens
catacaacataaagtcaatacaagtgaaaacaattttgcattcattttggattttatacaaggcatttaatt

SEQ ID NO: 37342 - DNA, 72 bp, Homo sapiens
tcaatacaagtgaaaacaattttgcattcattttggattttatacaaggcatttaattttataggcctacca

SEQ ID NO: 37343 - DNA, 69 bp, Homo sapiens
caagtgaaaacaattttgcattcattttggattttatacaaggcatttaattttataggcctaccaccc

SEQ ID NO: 37344 - DNA, 68 bp, Homo sapiens
cattttggattttatacaaggcatttaattttataggcctaccacccccattagctatttatatttaa

SEQ ID NO: 37345 - DNA, 69 bp, Homo sapiens
tatacaaggcatttaattttataggcctaccacccccattagctatttatatttaaaataaccaccatc

SEQ ID NO: 37346 - DNA, 69 bp, Homo sapiens
ttataggcctaccacccccattagctatttatatttaaaataaccaccatccttttgagacagttccta

SEQ ID NO: 37347 - DNA, 70 bp, Homo sapiens
ctaccacccccattagctatttatatttaaaataaccaccatccttttgagacagttcctatcaacaatc

SEQ ID NO: 37348 - DNA, 73 bp, Homo sapiens
gctatttatatttaaaataaccaccatccttttgagacagttcctatcaacaatcttgaaccatactaataca

SEQ ID NO: 37349 - DNA, 71 bp, Homo sapiens
tttaaaataaccaccatccttttgagacagttcctatcaacaatcttgaaccatactaatacattacttgt

SEQ ID NO: 37350 - DNA, 71 bp, Homo sapiens
ccttttgagacagttcctatcaacaatcttgaaccatactaatacattacttgttcctgaagtccttttgt

SEQ ID NO: 37351 - DNA, 75 bp, Homo sapiens
tcaacaatcttgaaccatactaatacattacttgttcctgaagtccttttgttgtagctcataataaaataagca

SEQ ID NO: 37352 - DNA, 74 bp, Homo sapiens
gaaccatactaatacattacttgttcctgaagtccttttgttgtagctcataataaaataagcaatacaaatga

SEQ ID NO: 37353 - DNA, 74 bp, Homo sapiens
ctaatacattacttgttcctgaagtccttttgttgtagctcataataaaataagcaatacaaatgaattatctg

SEQ ID NO: 37354 - DNA, 73 bp, Homo sapiens
tgttgtagctcataataaaataagcaatacaaatgaattatctgtatttaagggaaaagaaacatttacaaga

SEQ ID NO: 37355 - DNA, 70 bp, Homo sapiens
cataataaaataagcaatacaaatgaattatctgtatttaagggaaaagaaacatttacaagaaaacaca

SEQ ID NO: 37356 - DNA, 69 bp, Homo sapiens
gcaatacaaatgaattatctgtatttaagggaaaagaaacatttacaagaaaacacaaaaatataactg

SEQ ID NO: 37357 - DNA, 69 bp, Homo sapiens
tgaattatctgtatttaagggaaaagaaacatttacaagaaaacacaaaaatataactgttataattca

SEQ ID NO: 37358 - DNA, 69 bp, Homo sapiens
tctgtatttaagggaaaagaaacatttacaagaaaacacaaaaatataactgttataattcattatgaa

SEQ ID NO: 37359 - DNA, 69 bp, Homo sapiens
gggaaaagaaacatttacaagaaaacacaaaaatataactgttataattcattatgaataaatatacac

SEQ ID NO: 37360 - DNA, 72 bp, Homo sapiens
ttacaagaaaacacaaaaatataactgttataattcattatgaataaatatacactttgaactggctaagta

SEQ ID NO: 37361 - DNA, 73 bp, Homo sapiens
acacaaaaatataactgttataattcattatgaataaatatacactttgaactggctaagtacaatctttata

SEQ ID NO: 37362 - DNA, 73 bp, Homo sapiens
aaaatataactgttataattcattatgaataaatatacactttgaactggctaagtacaatctttatacattg

SEQ ID NO: 37363 - DNA, 74 bp, Homo sapiens
taattcattatgaataaatatacactttgaactggctaagtacaatctttatacattgtttaagatttaataca

SEQ ID NO: 37364 - DNA, 71 bp, Homo sapiens
tacactttgaactggctaagtacaatctttatacattgtttaagatttaatacagtttattagccattttc

SEQ ID NO: 37365 - DNA, 69 bp, Homo sapiens
tttgaactggctaagtacaatctttatacattgtttaagatttaatacagtttattagccattttcttt

SEQ ID NO: 37366 - DNA, 73 bp, Homo sapiens
tacaatctttatacattgtttaagatttaatacagtttattagccattttcttttttcacacaatgtatatca

SEQ ID NO: 37367 - DNA, 68 bp, Homo sapiens
ttgtttaagatttaatacagtttattagccattttcttttttcacacaatgtatatcaaaattaaaaa

SEQ ID NO: 37368 - DNA, 67 bp, Homo sapiens
attaaaaaaaaatactgatttatagaaaaatggcaaagtacagtagttccattccaatttgaagggc

SEQ ID NO: 37369 - DNA, 71 bp, Homo sapiens
aaatactgatttatagaaaaatggcaaagtacagtagttccattccaatttgaagggccatgaaaagccac

SEQ ID NO: 37370 - DNA, 72 bp, Homo sapiens
tatagaaaaatggcaaagtacagtagttccattccaatttgaagggccatgaaaagccactgcaagaccttt

SEQ ID NO: 37371 - DNA, 71 bp, Homo sapiens
agaaaaatggcaaagtacagtagttccattccaatttgaagggccatgaaaagccactgcaagacctttta

SEQ ID NO: 37372 - DNA, 72 bp, Homo sapiens
atggcaaagtacagtagttccattccaatttgaagggccatgaaaagccactgcaagaccttttagcctaat

SEQ ID NO: 37373 - DNA, 71 bp, Homo sapiens
aagtacagtagttccattccaatttgaagggccatgaaaagccactgcaagaccttttagcctaattcaaa

SEQ ID NO: 37374 - DNA, 71 bp, Homo sapiens
tagttccattccaatttgaagggccatgaaaagccactgcaagaccttttagcctaattcaaacctgtaaa

SEQ ID NO: 37375 - DNA, 72 bp, Homo sapiens
attccaatttgaagggccatgaaaagccactgcaagaccttttagcctaattcaaacctgtaaacatgttca

SEQ ID NO: 37376 - DNA, 71 bp, Homo sapiens
aatttgaagggccatgaaaagccactgcaagaccttttagcctaattcaaacctgtaaacatgttcagtct

SEQ ID NO: 37377 - DNA, 69 bp, Homo sapiens
aagggccatgaaaagccactgcaagaccttttagcctaattcaaacctgtaaacatgttcagtcttttt

SEQ ID NO: 37378 - DNA, 70 bp, Homo sapiens
ccatgaaaagccactgcaagaccttttagcctaattcaaacctgtaaacatgttcagtcttttttaaaga

SEQ ID NO: 37379 - DNA, 69 bp, Homo sapiens
gaaaagccactgcaagaccttttagcctaattcaaacctgtaaacatgttcagtcttttttaaagagaa

SEQ ID NO: 37380 - DNA, 69 bp, Homo sapiens
tgcaagaccttttagcctaattcaaacctgtaaacatgttcagtcttttttaaagagaatctttaatat

SEQ ID NO: 37381 - DNA, 68 bp, Homo sapiens
gcctaattcaaacctgtaaacatgttcagtcttttttaaagagaatctttaatatttggttaccagga

SEQ ID NO: 37382 - DNA, 71 bp, Homo sapiens
catgttcagtcttttttaaagagaatctttaatatttggttaccaggattgatgtctaatatcctgttaac

SEQ ID NO: 37383 - DNA, 73 bp, Homo sapiens
gagaatctttaatatttggttaccaggattgatgtctaatatcctgttaactgcaggttttgaatttattaca

SEQ ID NO: 37384 - DNA, 75 bp, Homo sapiens
ggttaccaggattgatgtctaatatcctgttaactgcaggttttgaatttattacatgtgcttgacttatacaat

SEQ ID NO: 37385 - DNA, 73 bp, Homo sapiens
tatcctgttaactgcaggttttgaatttattacatgtgcttgacttatacaattaaagccaccctaaggtgac

SEQ ID NO: 37386 - DNA, 72 bp, Homo sapiens
actgcaggttttgaatttattacatgtgcttgacttatacaattaaagccaccctaaggtgacttgctttaa

SEQ ID NO: 37387 - DNA, 69 bp, Homo sapiens
gttttgaatttattacatgtgcttgacttatacaattaaagccaccctaaggtgacttgctttaaaaaa

SEQ ID NO: 37388 - DNA, 70 bp, Homo sapiens
catgtgcttgacttatacaattaaagccaccctaaggtgacttgctttaaaaaacaattaccttgtacaa

SEQ ID NO: 37389 - DNA, 69 bp, Homo sapiens
gcttgacttatacaattaaagccaccctaaggtgacttgctttaaaaaacaattaccttgtacaaatga

SEQ ID NO: 37390 - DNA, 66 bp, Homo sapiens
tacaattaaagccaccctaaggtgacttgctttaaaaaacaattaccttgtacaaatgaaaatagg

SEQ ID NO: 37391 - DNA, 66 bp, Homo sapiens
gccaccctaaggtgacttgctttaaaaaacaattaccttgtacaaatgaaaataggttcatatttt

SEQ ID NO: 37392 - DNA, 67 bp, Homo sapiens
ggtgacttgctttaaaaaacaattaccttgtacaaatgaaaataggttcatattttttcataaataa

SEQ ID NO: 37393 - DNA, 65 bp, Homo sapiens
tttaaaaaacaattaccttgtacaaatgaaaataggttcatattttttcataaataaatggaaaa

SEQ ID NO: 37394 - DNA, 71 bp, Homo sapiens
tttcataaataaatggaaaaatatcaaatgttccagctttaacaaaatacaagggaatacatatacagtaa

SEQ ID NO: 37395 - DNA, 73 bp, Homo sapiens
atatcaaatgttccagctttaacaaaatacaagggaatacatatacagtaagttatcttaacatgttctgacc

SEQ ID NO: 37396 - DNA, 71 bp, Homo sapiens
atgttccagctttaacaaaatacaagggaatacatatacagtaagttatcttaacatgttctgacccaccc

SEQ ID NO: 37397 - DNA, 70 bp, Homo sapiens
aacaaaatacaagggaatacatatacagtaagttatcttaacatgttctgacccaccccttaactatgct

SEQ ID NO: 37398 - DNA, 74 bp, Homo sapiens
aatacatatacagtaagttatcttaacatgttctgacccaccccttaactatgcttactgtattgtctctacag

SEQ ID NO: 37399 - DNA, 73 bp, Homo sapiens
agtaagttatcttaacatgttctgacccaccccttaactatgcttactgtattgtctctacaggcagtgaaaa

SEQ ID NO: 37400 - DNA, 76 bp, Homo sapiens
tcttaacatgttctgacccaccccttaactatgcttactgtattgtctctacaggcagtgaaaagcctccatttgc

SEQ ID NO: 37401 - DNA, 76 bp, Homo sapiens
ttctgacccaccccttaactatgcttactgtattgtctctacaggcagtgaaaagcctccatttgccacagtggaa

SEQ ID NO: 37402 - DNA, 76 bp, Homo sapiens
cttaactatgcttactgtattgtctctacaggcagtgaaaagcctccatttgccacagtggaaggccttccagtta

SEQ ID NO: 37403 - DNA, 77 bp, Homo sapiens
ttactgtattgtctctacaggcagtgaaaagcctccatttgccacagtggaaggccttccagttaccagacacacaa

SEQ ID NO: 37404 - DNA, 77 bp, Homo sapiens
tattgtctctacaggcagtgaaaagcctccatttgccacagtggaaggccttccagttaccagacacacaattccca

SEQ ID NO: 37405 - DNA, 74 bp, Homo sapiens
cagtgaaaagcctccatttgccacagtggaaggccttccagttaccagacacacaattcccagacaagttggaa

SEQ ID NO: 37406 - DNA, 72 bp, Homo sapiens
cctccatttgccacagtggaaggccttccagttaccagacacacaattcccagacaagttggaaacaattat

SEQ ID NO: 37407 - DNA, 74 bp, Homo sapiens
atttgccacagtggaaggccttccagttaccagacacacaattcccagacaagttggaaacaattattgcttga

SEQ ID NO: 37408 - DNA, 71 bp, Homo sapiens
aaggccttccagttaccagacacacaattcccagacaagttggaaacaattattgcttgaggaaaagcagt

SEQ ID NO: 37409 - DNA, 72 bp, Homo sapiens
agttaccagacacacaattcccagacaagttggaaacaattattgcttgaggaaaagcagttcattgtactt

SEQ ID NO: 37410 - DNA, 73 bp, Homo sapiens
agacacacaattcccagacaagttggaaacaattattgcttgaggaaaagcagttcattgtactttttcttca

SEQ ID NO: 37411 - DNA, 73 bp, Homo sapiens
tggaaacaattattgcttgaggaaaagcagttcattgtactttttcttcataaaaaagtgcacttaagtgcca

SEQ ID NO: 37412 - DNA, 74 bp, Homo sapiens
ttattgcttgaggaaaagcagttcattgtactttttcttcataaaaaagtgcacttaagtgccaagtcagcttg

SEQ ID NO: 37413 - DNA, 72 bp, Homo sapiens
gcagttcattgtactttttcttcataaaaaagtgcacttaagtgccaagtcagcttgtcaagaaacaatttt

SEQ ID NO: 37414 - DNA, 70 bp, Homo sapiens
gtactttttcttcataaaaaagtgcacttaagtgccaagtcagcttgtcaagaaacaatttttaaatata

SEQ ID NO: 37415 - DNA, 72 bp, Homo sapiens
aaaaaagtgcacttaagtgccaagtcagcttgtcaagaaacaatttttaaatataaaatagtgcttgtctga

SEQ ID NO: 37416 - DNA, 73 bp, Homo sapiens
agtgcacttaagtgccaagtcagcttgtcaagaaacaatttttaaatataaaatagtgcttgtctgatatttt

SEQ ID NO: 37417 - DNA, 76 bp, Homo sapiens
gccaagtcagcttgtcaagaaacaatttttaaatataaaatagtgcttgtctgatatttttttgtgccactgtgca

SEQ ID NO: 37418 - DNA, 75 bp, Homo sapiens
cagcttgtcaagaaacaatttttaaatataaaatagtgcttgtctgatatttttttgtgccactgtgcagtataa

SEQ ID NO: 37419 - DNA, 70 bp, Homo sapiens
agaaacaatttttaaatataaaatagtgcttgtctgatatttttttgtgccactgtgcagtataaaaaaa

SEQ ID NO: 37420 - DNA, 74 bp, Homo sapiens
atataaaatagtgcttgtctgatatttttttgtgccactgtgcagtataaaaaaaaagtggccctcaacagcca

SEQ ID NO: 37421 - DNA, 73 bp, Homo sapiens
aaatagtgcttgtctgatatttttttgtgccactgtgcagtataaaaaaaaagtggccctcaacagccattaa

SEQ ID NO: 37422 - DNA, 74 bp, Homo sapiens
tgatatttttttgtgccactgtgcagtataaaaaaaaagtggccctcaacagccattaagtgcaaagtgcttta

SEQ ID NO: 37423 - DNA, 75 bp, Homo sapiens
actgtgcagtataaaaaaaaagtggccctcaacagccattaagtgcaaagtgctttagcaagtcctgctgtcacc

SEQ ID NO: 37424 - DNA, 77 bp, Homo sapiens
aaaaaaagtggccctcaacagccattaagtgcaaagtgctttagcaagtcctgctgtcacctgcactcaactgacat

SEQ ID NO: 37425 - DNA, 79 bp, Homo sapiens
aagtggccctcaacagccattaagtgcaaagtgctttagcaagtcctgctgtcacctgcactcaactgacattccattt

SEQ ID NO: 37426 - DNA, 85 bp, Homo sapiens
agccattaagtgcaaagtgctttagcaagtcctgctgtcacctgcactcaactgacattccattttgtgatgcgctggacattga

SEQ ID NO: 37427 - DNA, 83 bp, Homo sapiens
taagtgcaaagtgctttagcaagtcctgctgtcacctgcactcaactgacattccattttgtgatgcgctggacattgacggt

SEQ ID NO: 37428 - DNA, 82 bp, Homo sapiens
tttagcaagtcctgctgtcacctgcactcaactgacattccattttgtgatgcgctggacattgacggttcagctaaagtta

SEQ ID NO: 37429 - DNA, 79 bp, Homo sapiens
aactgacattccattttgtgatgcgctggacattgacggttcagctaaagttaacataacagcagctgttatggaactg

SEQ ID NO: 37430 - DNA, 79 bp, Homo sapiens
attttgtgatgcgctggacattgacggttcagctaaagttaacataacagcagctgttatggaactggatgaaggtgaa

SEQ ID NO: 37431 - DNA, 80 bp, Homo sapiens
gtgatgcgctggacattgacggttcagctaaagttaacataacagcagctgttatggaactggatgaaggtgaagaggag

SEQ ID NO: 37432 - DNA, 78 bp, Homo sapiens
attgacggttcagctaaagttaacataacagcagctgttatggaactggatgaaggtgaagaggaggatgaggatgta

SEQ ID NO: 37433 - DNA, 81 bp, Homo sapiens
ttcagctaaagttaacataacagcagctgttatggaactggatgaaggtgaagaggaggatgaggatgtagcagcacctaa

SEQ ID NO: 37434 - DNA, 78 bp, Homo sapiens
aagttaacataacagcagctgttatggaactggatgaaggtgaagaggaggatgaggatgtagcagcacctaaggaaa

SEQ ID NO: 37435 - DNA, 77 bp, Homo sapiens
agcagctgttatggaactggatgaaggtgaagaggaggatgaggatgtagcagcacctaaggaaaagggagaccaaa

SEQ ID NO: 37436 - DNA, 75 bp, Homo sapiens
ttatggaactggatgaaggtgaagaggaggatgaggatgtagcagcacctaaggaaaagggagaccaaaccaaga

SEQ ID NO: 37437 - DNA, 74 bp, Homo sapiens
tctctctttcttctttaaacgctttctcctccgatcaatggaagctacttcagattttaatgacagataatgtt

SEQ ID NO: 37438 - DNA, 72 bp, Homo sapiens
ctttcttctttaaacgctttctcctccgatcaatggaagctacttcagattttaatgacagataatgttttc

SEQ ID NO: 37439 - DNA, 75 bp, Homo sapiens
taaacgctttctcctccgatcaatggaagctacttcagattttaatgacagataatgttttctgatttcttgaag

SEQ ID NO: 37440 - DNA, 75 bp, Homo sapiens
ctcctccgatcaatggaagctacttcagattttaatgacagataatgttttctgatttcttgaagtttttcttga

SEQ ID NO: 37441 - DNA, 75 bp, Homo sapiens
ggaagctacttcagattttaatgacagataatgttttctgatttcttgaagtttttcttgaagaattgtgatgcg

SEQ ID NO: 37442 - DNA, 75 bp, Homo sapiens
cagattttaatgacagataatgttttctgatttcttgaagtttttcttgaagaattgtgatgcgttcggcacttg

SEQ ID NO: 37443 - DNA, 77 bp, Homo sapiens
tgacagataatgttttctgatttcttgaagtttttcttgaagaattgtgatgcgttcggcacttgtcatattttcca

SEQ ID NO: 37444 - DNA, 74 bp, Homo sapiens
taatgttttctgatttcttgaagtttttcttgaagaattgtgatgcgttcggcacttgtcatattttccaggtc

SEQ ID NO: 37445 - DNA, 72 bp, Homo sapiens
tttcttgaagtttttcttgaagaattgtgatgcgttcggcacttgtcatattttccaggtccgctataaatt

SEQ ID NO: 37446 - DNA, 71 bp, Homo sapiens
aagtttttcttgaagaattgtgatgcgttcggcacttgtcatattttccaggtccgctataaatttaaagc

SEQ ID NO: 37447 - DNA, 74 bp, Homo sapiens
cttgaagaattgtgatgcgttcggcacttgtcatattttccaggtccgctataaatttaaagctttcattaaca

SEQ ID NO: 37448 - DNA, 74 bp, Homo sapiens
tgtgatgcgttcggcacttgtcatattttccaggtccgctataaatttaaagctttcattaacagacattttta

SEQ ID NO: 37449 - DNA, 74 bp, Homo sapiens
ggatgaagtttgtatgcttgtcaatttaacatgtcacttacacatctgaaaactccatttgtaaactttgggta

SEQ ID NO: 37450 - DNA, 73 bp, Homo sapiens
tgcttgtcaatttaacatgtcacttacacatctgaaaactccatttgtaaactttgggtaatcgattactggg

SEQ ID NO: 37451 - DNA, 70 bp, Homo sapiens
caatttaacatgtcacttacacatctgaaaactccatttgtaaactttgggtaatcgattactgggttcc

SEQ ID NO: 37452 - DNA, 73 bp, Homo sapiens
atgtcacttacacatctgaaaactccatttgtaaactttgggtaatcgattactgggttccttgagatcagga

SEQ ID NO: 37453 - DNA, 72 bp, Homo sapiens
tctgaaaactccatttgtaaactttgggtaatcgattactgggttccttgagatcaggatccttatcaccat

SEQ ID NO: 37454 - DNA, 70 bp, Homo sapiens
aactccatttgtaaactttgggtaatcgattactgggttccttgagatcaggatccttatcaccattctt

SEQ ID NO: 37455 - DNA, 71 bp, Homo sapiens
gtaaactttgggtaatcgattactgggttccttgagatcaggatccttatcaccattctttccacattttc

SEQ ID NO: 37456 - DNA, 75 bp, Homo sapiens
taatcgattactgggttccttgagatcaggatccttatcaccattctttccacattttcctggagactgcgtcct

SEQ ID NO: 37457 - DNA, 75 bp, Homo sapiens
ggttccttgagatcaggatccttatcaccattctttccacattttcctggagactgcgtccttgcgggagatttg

SEQ ID NO: 37458 - DNA, 78 bp, Homo sapiens
ttgagatcaggatccttatcaccattctttccacattttcctggagactgcgtccttgcgggagatttggtactatga

SEQ ID NO: 37459 - DNA, 75 bp, Homo sapiens
atccttatcaccattctttccacattttcctggagactgcgtccttgcgggagatttggtactatgagacttcat

SEQ ID NO: 37460 - DNA, 74 bp, Homo sapiens
attctttccacattttcctggagactgcgtccttgcgggagatttggtactatgagacttcattccagtggaaa

SEQ ID NO: 37461 - DNA, 75 bp, Homo sapiens
attttcctggagactgcgtccttgcgggagatttggtactatgagacttcattccagtggaaactgatttgactg

SEQ ID NO: 37462 - DNA, 77 bp, Homo sapiens
agactgcgtccttgcgggagatttggtactatgagacttcattccagtggaaactgatttgactggctgactcttag

SEQ ID NO: 37463 - DNA, 75 bp, Homo sapiens
cttgcgggagatttggtactatgagacttcattccagtggaaactgatttgactggctgactcttagttatactt

SEQ ID NO: 37464 - DNA, 77 bp, Homo sapiens
atttggtactatgagacttcattccagtggaaactgatttgactggctgactcttagttatactttcaccagctgaa

SEQ ID NO: 37465 - DNA, 77 bp, Homo sapiens
tactatgagacttcattccagtggaaactgatttgactggctgactcttagttatactttcaccagctgaaagttct

SEQ ID NO: 37466 - DNA, 76 bp, Homo sapiens
attccagtggaaactgatttgactggctgactcttagttatactttcaccagctgaaagttcttcactatcactac

SEQ ID NO: 37467 - DNA, 77 bp, Homo sapiens
aaactgatttgactggctgactcttagttatactttcaccagctgaaagttcttcactatcactactatttgctgaa

SEQ ID NO: 37468 - DNA, 75 bp, Homo sapiens
ctgactcttagttatactttcaccagctgaaagttcttcactatcactactatttgctgaaagagaaagaaaaga

SEQ ID NO: 37469 - DNA, 73 bp, Homo sapiens
agttatactttcaccagctgaaagttcttcactatcactactatttgctgaaagagaaagaaaagatttaata

SEQ ID NO: 37470 - DNA, 69 bp, Homo sapiens
ttttgtctattttgttttttaaagcaagtagccttacagaatttgtgtgactttttttgagtgtacaga

SEQ ID NO: 37471 - DNA, 69 bp, Homo sapiens
tttgttttttaaagcaagtagccttacagaatttgtgtgactttttttgagtgtacagacaaaatcaaa

SEQ ID NO: 37472 - DNA, 72 bp, Homo sapiens
aaagcaagtagccttacagaatttgtgtgactttttttgagtgtacagacaaaatcaaaatagtgtactatc

SEQ ID NO: 37473 - DNA, 71 bp, Homo sapiens
agccttacagaatttgtgtgactttttttgagtgtacagacaaaatcaaaatagtgtactatcccataccc

SEQ ID NO: 37474 - DNA, 73 bp, Homo sapiens
cagaatttgtgtgactttttttgagtgtacagacaaaatcaaaatagtgtactatcccataccctgaatacca

SEQ ID NO: 37475 - DNA, 70 bp, Homo sapiens
gactttttttgagtgtacagacaaaatcaaaatagtgtactatcccataccctgaataccattttcttac

SEQ ID NO: 37476 - DNA, 69 bp, Homo sapiens
gtgtacagacaaaatcaaaatagtgtactatcccataccctgaataccattttcttactgggggtaaaa

SEQ ID NO: 37477 - DNA, 70 bp, Homo sapiens
gacaaaatcaaaatagtgtactatcccataccctgaataccattttcttactgggggtaaaattatcagc

SEQ ID NO: 37478 - DNA, 69 bp, Homo sapiens
caaaatagtgtactatcccataccctgaataccattttcttactgggggtaaaattatcagctattatt

SEQ ID NO: 37479 - DNA, 67 bp, Homo sapiens
actatcccataccctgaataccattttcttactgggggtaaaattatcagctattatttttatattt

SEQ ID NO: 37480 - DNA, 66 bp, Homo sapiens
ttttaaaaattagagatttcacacttactgccttttcccttctttttgttgtttaccactgttgct

SEQ ID NO: 37481 - DNA, 69 bp, Homo sapiens
aattagagatttcacacttactgccttttcccttctttttgttgtttaccactgttgctttatggcttc

SEQ ID NO: 37482 - DNA, 67 bp, Homo sapiens
acacttactgccttttcccttctttttgttgtttaccactgttgctttatggcttcttttctgcttt

SEQ ID NO: 37483 - DNA, 70 bp, Homo sapiens
tactgccttttcccttctttttgttgtttaccactgttgctttatggcttcttttctgcttttttgatga

SEQ ID NO: 37484 - DNA, 71 bp, Homo sapiens
tctttttgttgtttaccactgttgctttatggcttcttttctgcttttttgatgaacttcctcctccctga

SEQ ID NO: 37485 - DNA, 73 bp, Homo sapiens
ttgttgtttaccactgttgctttatggcttcttttctgcttttttgatgaacttcctcctccctgagcatctt

SEQ ID NO: 37486 - DNA, 75 bp, Homo sapiens
actgttgctttatggcttcttttctgcttttttgatgaacttcctcctccctgagcatctttcactcttttctga

SEQ ID NO: 37487 - DNA, 75 bp, Homo sapiens
tttatggcttcttttctgcttttttgatgaacttcctcctccctgagcatctttcactcttttctgacctgtaca

SEQ ID NO: 37488 - DNA, 75 bp, Homo sapiens
ctgcttttttgatgaacttcctcctccctgagcatctttcactcttttctgacctgtacaggctatgaagggaaa

SEQ ID NO: 37489 - DNA, 74 bp, Homo sapiens
tttttgatgaacttcctcctccctgagcatctttcactcttttctgacctgtacaggctatgaagggaaaggaa

SEQ ID NO: 37490 - DNA, 73 bp, Homo sapiens
ctcctccctgagcatctttcactcttttctgacctgtacaggctatgaagggaaaggaattaagtaacacaaa

SEQ ID NO: 37491 - DNA, 73 bp, Homo sapiens
ttacaggtgtgagtgaccacacctggccagtaaaatcttactgttgaaagcctaatattctgaaataaaggat

SEQ ID NO: 37492 - DNA, 73 bp, Homo sapiens
tgagtgaccacacctggccagtaaaatcttactgttgaaagcctaatattctgaaataaaggattctttcatt

SEQ ID NO: 37493 - DNA, 72 bp, Homo sapiens
cacacctggccagtaaaatcttactgttgaaagcctaatattctgaaataaaggattctttcattttgaaga

SEQ ID NO: 37494 - DNA, 74 bp, Homo sapiens
gccagtaaaatcttactgttgaaagcctaatattctgaaataaaggattctttcattttgaagattagtcatgc

SEQ ID NO: 37495 - DNA, 77 bp, Homo sapiens
ctgttgaaagcctaatattctgaaataaaggattctttcattttgaagattagtcatgcctggatagttcagttgca

SEQ ID NO: 37496 - DNA, 78 bp, Homo sapiens
aagcctaatattctgaaataaaggattctttcattttgaagattagtcatgcctggatagttcagttgcatgagatag

SEQ ID NO: 37497 - DNA, 81 bp, Homo sapiens
tgaaataaaggattctttcattttgaagattagtcatgcctggatagttcagttgcatgagatagtatggcacagataaaa

SEQ ID NO: 37498 - DNA, 83 bp, Homo sapiens
gattctttcattttgaagattagtcatgcctggatagttcagttgcatgagatagtatggcacagataaaatcatagtagtta

SEQ ID NO: 37499 - DNA, 82 bp, Homo sapiens
ttttgaagattagtcatgcctggatagttcagttgcatgagatagtatggcacagataaaatcatagtagttatacttgtaa

SEQ ID NO: 37500 - DNA, 82 bp, Homo sapiens
attagtcatgcctggatagttcagttgcatgagatagtatggcacagataaaatcatagtagttatacttgtaaatgtgaaa

SEQ ID NO: 37501 - DNA, 82 bp, Homo sapiens
tagtcatgcctggatagttcagttgcatgagatagtatggcacagataaaatcatagtagttatacttgtaaatgtgaaaaa

SEQ ID NO: 37502 - DNA, 79 bp, Homo sapiens
atgcctggatagttcagttgcatgagatagtatggcacagataaaatcatagtagttatacttgtaaatgtgaaaaaaa

SEQ ID NO: 37503 - DNA, 79 bp, Homo sapiens
tggatagttcagttgcatgagatagtatggcacagataaaatcatagtagttatacttgtaaatgtgaaaaaaagcaaa

SEQ ID NO: 37504 - DNA, 78 bp, Homo sapiens
gttcagttgcatgagatagtatggcacagataaaatcatagtagttatacttgtaaatgtgaaaaaaagcaaagaaca

SEQ ID NO: 37505 - DNA, 78 bp, Homo sapiens
gttgcatgagatagtatggcacagataaaatcatagtagttatacttgtaaatgtgaaaaaaagcaaagaacatttca

SEQ ID NO: 37506 - DNA, 76 bp, Homo sapiens
catgagatagtatggcacagataaaatcatagtagttatacttgtaaatgtgaaaaaaagcaaagaacatttcaat

SEQ ID NO: 37507 - DNA, 74 bp, Homo sapiens
gatagtatggcacagataaaatcatagtagttatacttgtaaatgtgaaaaaaagcaaagaacatttcaattta

SEQ ID NO: 37508 - DNA, 75 bp, Homo sapiens
tatggcacagataaaatcatagtagttatacttgtaaatgtgaaaaaaagcaaagaacatttcaatttaattgca

SEQ ID NO: 37509 - DNA, 72 bp, Homo sapiens
cacagataaaatcatagtagttatacttgtaaatgtgaaaaaaagcaaagaacatttcaatttaattgcaag

SEQ ID NO: 37510 - DNA, 70 bp, Homo sapiens
taaaatcatagtagttatacttgtaaatgtgaaaaaaagcaaagaacatttcaatttaattgcaagtatt

SEQ ID NO: 37511 - DNA, 69 bp, Homo sapiens
atcatagtagttatacttgtaaatgtgaaaaaaagcaaagaacatttcaatttaattgcaagtattttt

SEQ ID NO: 37512 - DNA, 68 bp, Homo sapiens
taatttattttaaaacagaaatgttttaagtcaagattcctgagaaaacatagaattaactaatttga

SEQ ID NO: 37513 - DNA, 73 bp, Homo sapiens
gaaatgttttaagtcaagattcctgagaaaacatagaattaactaatttgatctagaccatatctctttaagc

SEQ ID NO: 37514 - DNA, 74 bp, Homo sapiens
gtcaagattcctgagaaaacatagaattaactaatttgatctagaccatatctctttaagctttgctgaaaacc

SEQ ID NO: 37515 - DNA, 75 bp, Homo sapiens
ctgagaaaacatagaattaactaatttgatctagaccatatctctttaagctttgctgaaaacctaaagctagca

SEQ ID NO: 37516 - DNA, 74 bp, Homo sapiens
catagaattaactaatttgatctagaccatatctctttaagctttgctgaaaacctaaagctagcattctaaaa

SEQ ID NO: 37517 - DNA, 72 bp, Homo sapiens
taatttgatctagaccatatctctttaagctttgctgaaaacctaaagctagcattctaaaatcttttacgg

SEQ ID NO: 37518 - DNA, 73 bp, Homo sapiens
gatctagaccatatctctttaagctttgctgaaaacctaaagctagcattctaaaatcttttacggtatataa

SEQ ID NO: 37519 - DNA, 70 bp, Homo sapiens
catatctctttaagctttgctgaaaacctaaagctagcattctaaaatcttttacggtatataaaaaaca

SEQ ID NO: 37520 - DNA, 71 bp, Homo sapiens
taagctttgctgaaaacctaaagctagcattctaaaatcttttacggtatataaaaaacatactccagtgc

SEQ ID NO: 37521 - DNA, 72 bp, Homo sapiens
gctttgctgaaaacctaaagctagcattctaaaatcttttacggtatataaaaaacatactccagtgctctg

SEQ ID NO: 37522 - DNA, 72 bp, Homo sapiens
cctaaagctagcattctaaaatcttttacggtatataaaaaacatactccagtgctctgtctttacgatgga

SEQ ID NO: 37523 - DNA, 72 bp, Homo sapiens
gctagcattctaaaatcttttacggtatataaaaaacatactccagtgctctgtctttacgatggaaaagtg

SEQ ID NO: 37524 - DNA, 71 bp, Homo sapiens
tctaaaatcttttacggtatataaaaaacatactccagtgctctgtctttacgatggaaaagtgtgttcca

SEQ ID NO: 37525 - DNA, 70 bp, Homo sapiens
aatcttttacggtatataaaaaacatactccagtgctctgtctttacgatggaaaagtgtgttccaaagc

SEQ ID NO: 37526 - DNA, 75 bp, Homo sapiens
tataaaaaacatactccagtgctctgtctttacgatggaaaagtgtgttccaaagccaggtgtcagcctagagta

SEQ ID NO: 37527 - DNA, 76 bp, Homo sapiens
atactccagtgctctgtctttacgatggaaaagtgtgttccaaagccaggtgtcagcctagagtatactgatttaa

SEQ ID NO: 37528 - DNA, 75 bp, Homo sapiens
agtgctctgtctttacgatggaaaagtgtgttccaaagccaggtgtcagcctagagtatactgatttaaagatac

SEQ ID NO: 37529 - DNA, 75 bp, Homo sapiens
tctttacgatggaaaagtgtgttccaaagccaggtgtcagcctagagtatactgatttaaagatacctgaatgaa

SEQ ID NO: 37530 - DNA, 73 bp, Homo sapiens
aaagtgtgttccaaagccaggtgtcagcctagagtatactgatttaaagatacctgaatgaagtggtttataa

SEQ ID NO: 37531 - DNA, 72 bp, Homo sapiens
gttccaaagccaggtgtcagcctagagtatactgatttaaagatacctgaatgaagtggtttataagaaaaa

SEQ ID NO: 37532 - DNA, 76 bp, Homo sapiens
caggtgtcagcctagagtatactgatttaaagatacctgaatgaagtggtttataagaaaaatgatgacagaagta

SEQ ID NO: 37533 - DNA, 77 bp, Homo sapiens
agtatactgatttaaagatacctgaatgaagtggtttataagaaaaatgatgacagaagtatggctatggcaccatc

SEQ ID NO: 37534 - DNA, 76 bp, Homo sapiens
tacctgaatgaagtggtttataagaaaaatgatgacagaagtatggctatggcaccatcgaaaggcactaatactt

SEQ ID NO: 37535 - DNA, 75 bp, Homo sapiens
atgaagtggtttataagaaaaatgatgacagaagtatggctatggcaccatcgaaaggcactaatactttgggaa

SEQ ID NO: 37536 - DNA, 74 bp, Homo sapiens
agaaaaatgatgacagaagtatggctatggcaccatcgaaaggcactaatactttgggaaggtaccgatttgaa

SEQ ID NO: 37537 - DNA, 73 bp, Homo sapiens
atgacagaagtatggctatggcaccatcgaaaggcactaatactttgggaaggtaccgatttgaatttccact

SEQ ID NO: 37538 - DNA, 70 bp, Homo sapiens
aagtatggctatggcaccatcgaaaggcactaatactttgggaaggtaccgatttgaatttccactttta

SEQ ID NO: 37539 - DNA, 70 bp, Homo sapiens
tatggcaccatcgaaaggcactaatactttgggaaggtaccgatttgaatttccacttttaacaatttca

SEQ ID NO: 37540 - DNA, 65 bp, Homo sapiens
cgaaaggcactaatactttgggaaggtaccgatttgaatttccacttttaacaatttcacggaaa

SEQ ID NO: 37541 - DNA, 64 bp, Homo sapiens
ctaatactttgggaaggtaccgatttgaatttccacttttaacaatttcacggaaaatcaaaaa

SEQ ID NO: 37542 - DNA, 64 bp, Homo sapiens
gggaaggtaccgatttgaatttccacttttaacaatttcacggaaaatcaaaaaagtattactg

SEQ ID NO: 37543 - DNA, 66 bp, Homo sapiens
tgaatttccacttttaacaatttcacggaaaatcaaaaaagtattactgtaggttattaacgtaca

SEQ ID NO: 37544 - DNA, 65 bp, Homo sapiens
cttttaacaatttcacggaaaatcaaaaaagtattactgtaggttattaacgtacacattggtcc

SEQ ID NO: 37545 - DNA, 72 bp, Homo sapiens
aatcaaaaaagtattactgtaggttattaacgtacacattggtccttcaatttggaagctatgcatctaaga

SEQ ID NO: 37546 - DNA, 74 bp, Homo sapiens
aaagtattactgtaggttattaacgtacacattggtccttcaatttggaagctatgcatctaagaaagcatcaa

SEQ ID NO: 37547 - DNA, 75 bp, Homo sapiens
attaacgtacacattggtccttcaatttggaagctatgcatctaagaaagcatcaaattcctttacaaactcaca

SEQ ID NO: 37548 - DNA, 76 bp, Homo sapiens
ttcaatttggaagctatgcatctaagaaagcatcaaattcctttacaaactcacacaagttagtcaggcttgaaaa

SEQ ID NO: 37549 - DNA, 77 bp, Homo sapiens
aagctatgcatctaagaaagcatcaaattcctttacaaactcacacaagttagtcaggcttgaaaatcagtttgaca

SEQ ID NO: 37550 - DNA, 73 bp, Homo sapiens
taagaaagcatcaaattcctttacaaactcacacaagttagtcaggcttgaaaatcagtttgacacggttgtc

SEQ ID NO: 37551 - DNA, 76 bp, Homo sapiens
caagttagtcaggcttgaaaatcagtttgacacggttgtctgaggaaagcagtgcctggacagttggttgctccaa

SEQ ID NO: 37552 - DNA, 74 bp, Homo sapiens
aatcagtttgacacggttgtctgaggaaagcagtgcctggacagttggttgctccaaacccctacatacagtat

SEQ ID NO: 37553 - DNA, 73 bp, Homo sapiens
tttgacacggttgtctgaggaaagcagtgcctggacagttggttgctccaaacccctacatacagtatttggt

SEQ ID NO: 37554 - DNA, 73 bp, Homo sapiens
ttgtctgaggaaagcagtgcctggacagttggttgctccaaacccctacatacagtatttggttaagggtgga

SEQ ID NO: 37555 - DNA, 70 bp, Homo sapiens
agtgcctggacagttggttgctccaaacccctacatacagtatttggttaagggtggaggggtctgtcaa

SEQ ID NO: 37556 - DNA, 69 bp, Homo sapiens
acagttggttgctccaaacccctacatacagtatttggttaagggtggaggggtctgtcaataaatcaa

SEQ ID NO: 37557 - DNA, 69 bp, Homo sapiens
ctccaaacccctacatacagtatttggttaagggtggaggggtctgtcaataaatcaaaatgttcgtga

SEQ ID NO: 37558 - DNA, 73 bp, Homo sapiens
ctacatacagtatttggttaagggtggaggggtctgtcaataaatcaaaatgttcgtgagaaactgcacatta

SEQ ID NO: 37559 - DNA, 73 bp, Homo sapiens
tatttggttaagggtggaggggtctgtcaataaatcaaaatgttcgtgagaaactgcacattacaattgcaaa

SEQ ID NO: 37560 - DNA, 75 bp, Homo sapiens
gggtctgtcaataaatcaaaatgttcgtgagaaactgcacattacaattgcaaaaacaatgttacagaaatagat

SEQ ID NO: 37561 - DNA, 81 bp, Homo sapiens
atgttcgtgagaaactgcacattacaattgcaaaaacaatgttacagaaatagatttaagctgctcatgccatatagtcaa

SEQ ID NO: 37562 - DNA, 82 bp, Homo sapiens
aaactgcacattacaattgcaaaaacaatgttacagaaatagatttaagctgctcatgccatatagtcaaccactgcatata

SEQ ID NO: 37563 - DNA, 83 bp, Homo sapiens
gcacattacaattgcaaaaacaatgttacagaaatagatttaagctgctcatgccatatagtcaaccactgcatataatgaat

SEQ ID NO: 37564 - DNA, 79 bp, Homo sapiens
aaaaacaatgttacagaaatagatttaagctgctcatgccatatagtcaaccactgcatataatgaattctcaaacagg

SEQ ID NO: 37565 - DNA, 79 bp, Homo sapiens
aaatagatttaagctgctcatgccatatagtcaaccactgcatataatgaattctcaaacaggtttggatttgggcctg

SEQ ID NO: 37566 - DNA, 78 bp, Homo sapiens
atatagtcaaccactgcatataatgaattctcaaacaggtttggatttgggcctgggtgcaatttctagcatgtgttc

SEQ ID NO: 37567 - DNA, 77 bp, Homo sapiens
aaccactgcatataatgaattctcaaacaggtttggatttgggcctgggtgcaatttctagcatgtgttctggtcca

SEQ ID NO: 37568 - DNA, 74 bp, Homo sapiens
ataatgaattctcaaacaggtttggatttgggcctgggtgcaatttctagcatgtgttctggtccacaataaaa

SEQ ID NO: 37569 - DNA, 78 bp, Homo sapiens
ggtttggatttgggcctgggtgcaatttctagcatgtgttctggtccacaataaaatgccatggatggctcaagcaaa

SEQ ID NO: 37570 - DNA, 80 bp, Homo sapiens
tttgggcctgggtgcaatttctagcatgtgttctggtccacaataaaatgccatggatggctcaagcaaagcacattaaa

SEQ ID NO: 37571 - DNA, 79 bp, Homo sapiens
atgtgttctggtccacaataaaatgccatggatggctcaagcaaagcacattaaagccttctcaagcttttaaatgcat

SEQ ID NO: 37572 - DNA, 80 bp, Homo sapiens
gtccacaataaaatgccatggatggctcaagcaaagcacattaaagccttctcaagcttttaaatgcattccactattca

SEQ ID NO: 37573 - DNA, 75 bp, Homo sapiens
gatggctcaagcaaagcacattaaagccttctcaagcttttaaatgcattccactattcattttcaaattacctt

SEQ ID NO: 37574 - DNA, 73 bp, Homo sapiens
ctcaagcaaagcacattaaagccttctcaagcttttaaatgcattccactattcattttcaaattacctttaa

SEQ ID NO: 37575 - DNA, 68 bp, Homo sapiens
gccttctcaagcttttaaatgcattccactattcattttcaaattacctttaaaatttccatttttac

SEQ ID NO: 37576 - DNA, 70 bp, Homo sapiens
gcttttaaatgcattccactattcattttcaaattacctttaaaatttccatttttaccatgttcacaca

SEQ ID NO: 37577 - DNA, 71 bp, Homo sapiens
gcattccactattcattttcaaattacctttaaaatttccatttttaccatgttcacacaaatatgacact

SEQ ID NO: 37578 - DNA, 71 bp, Homo sapiens
tacctttaaaatttccatttttaccatgttcacacaaatatgacacttaatcgcctcaggttataacaaga

SEQ ID NO: 37579 - DNA, 76 bp, Homo sapiens
tttccatttttaccatgttcacacaaatatgacacttaatcgcctcaggttataacaagagatactgtgaaatcat

SEQ ID NO: 37580 - DNA, 76 bp, Homo sapiens
tgttcacacaaatatgacacttaatcgcctcaggttataacaagagatactgtgaaatcattgaaactttaagagg

SEQ ID NO: 37581 - DNA, 72 bp, Homo sapiens
aatatgacacttaatcgcctcaggttataacaagagatactgtgaaatcattgaaactttaagaggggaaac

SEQ ID NO: 37582 - DNA, 69 bp, Homo sapiens
caggttataacaagagatactgtgaaatcattgaaactttaagaggggaaaccctaaaataagtcaaca

SEQ ID NO: 37583 - DNA, 69 bp, Homo sapiens
gagatactgtgaaatcattgaaactttaagaggggaaaccctaaaataagtcaacatacacattttcct

SEQ ID NO: 37584 - DNA, 69 bp, Homo sapiens
tgtgaaatcattgaaactttaagaggggaaaccctaaaataagtcaacatacacattttccttctcacc

SEQ ID NO: 37585 - DNA, 69 bp, Homo sapiens
gggaaaccctaaaataagtcaacatacacattttccttctcacctttttcaggatgttctggttctggc

SEQ ID NO: 37586 - DNA, 74 bp, Homo sapiens
taaaataagtcaacatacacattttccttctcacctttttcaggatgttctggttctggctgattactactgct

SEQ ID NO: 37587 - DNA, 77 bp, Homo sapiens
attttccttctcacctttttcaggatgttctggttctggctgattactactgcttgagctcacactggcatcaaaac

SEQ ID NO: 37588 - DNA, 82 bp, Homo sapiens
tggttctggctgattactactgcttgagctcacactggcatcaaaacctgctggcgagctattcccttcagactggaggtct

SEQ ID NO: 37589 - DNA, 82 bp, Homo sapiens
ctgattactactgcttgagctcacactggcatcaaaacctgctggcgagctattcccttcagactggaggtcttggagctcc

SEQ ID NO: 37590 - DNA, 77 bp, Homo sapiens
atcaaaacctgctggcgagctattcccttcagactggaggtcttggagctccccagcaacactatccacctcaattg

SEQ ID NO: 37591 - DNA, 78 bp, Homo sapiens
agctattcccttcagactggaggtcttggagctccccagcaacactatccacctcaattgtgctatcagtttcactct

SEQ ID NO: 37592 - DNA, 77 bp, Homo sapiens
cccagcaacactatccacctcaattgtgctatcagtttcactcttgatacttcgaacctcttcttggtttggagcca

SEQ ID NO: 37593 - DNA, 78 bp, Homo sapiens
tatccacctcaattgtgctatcagtttcactcttgatacttcgaacctcttcttggtttggagccagtggttctgata

SEQ ID NO: 37594 - DNA, 76 bp, Homo sapiens
aattgtgctatcagtttcactcttgatacttcgaacctcttcttggtttggagccagtggttctgatactgttaca

SEQ ID NO: 37595 - DNA, 75 bp, Homo sapiens
ctatcagtttcactcttgatacttcgaacctcttcttggtttggagccagtggttctgatactgttacagaagac

SEQ ID NO: 37596 - DNA, 77 bp, Homo sapiens
ttcactcttgatacttcgaacctcttcttggtttggagccagtggttctgatactgttacagaagactgctgccggc

SEQ ID NO: 37597 - DNA, 77 bp, Homo sapiens
ttcgaacctcttcttggtttggagccagtggttctgatactgttacagaagactgctgccggctgccttctgttaca

SEQ ID NO: 37598 - DNA, 80 bp, Homo sapiens
ttcttggtttggagccagtggttctgatactgttacagaagactgctgccggctgccttctgttacagtgactgatgaag

SEQ ID NO: 37599 - DNA, 78 bp, Homo sapiens
actgctgccggctgccttctgttacagtgactgatgaaggcgattcaggtgtagtaggaggggtatttagcactgaat

SEQ ID NO: 37600 - DNA, 79 bp, Homo sapiens
gctgccttctgttacagtgactgatgaaggcgattcaggtgtagtaggaggggtatttagcactgaattactgccacta

SEQ ID NO: 37601 - DNA, 77 bp, Homo sapiens
tgttacagtgactgatgaaggcgattcaggtgtagtaggaggggtatttagcactgaattactgccactacttggaa

SEQ ID NO: 37602 - DNA, 75 bp, Homo sapiens
agtgactgatgaaggcgattcaggtgtagtaggaggggtatttagcactgaattactgccactacttggaaattc

SEQ ID NO: 37603 - DNA, 75 bp, Homo sapiens
gtgtagtaggaggggtatttagcactgaattactgccactacttggaaattctgcttttctgtcattgacctcta

SEQ ID NO: 37604 - DNA, 71 bp, Homo sapiens
aattactgccactacttggaaattctgcttttctgtcattgacctctactgttttttcttcaatgggttta

SEQ ID NO: 37605 - DNA, 71 bp, Homo sapiens
actacttggaaattctgcttttctgtcattgacctctactgttttttcttcaatgggtttactatcgacat

SEQ ID NO: 37606 - DNA, 72 bp, Homo sapiens
tgcttttctgtcattgacctctactgttttttcttcaatgggtttactatcgacattgactggaggtggttt

SEQ ID NO: 37607 - DNA, 72 bp, Homo sapiens
ttctgtcattgacctctactgttttttcttcaatgggtttactatcgacattgactggaggtggtttttcta

SEQ ID NO: 37608 - DNA, 69 bp, Homo sapiens
acctctactgttttttcttcaatgggtttactatcgacattgactggaggtggtttttctagttctaca

SEQ ID NO: 37609 - DNA, 70 bp, Homo sapiens
tttttcttcaatgggtttactatcgacattgactggaggtggtttttctagttctacactgggtgaacaa

SEQ ID NO: 37610 - DNA, 70 bp, Homo sapiens
aatgggtttactatcgacattgactggaggtggtttttctagttctacactgggtgaacaactctcctct

SEQ ID NO: 37611 - DNA, 77 bp, Homo sapiens
actatcgacattgactggaggtggtttttctagttctacactgggtgaacaactctcctcttcagccacagtctgca

SEQ ID NO: 37612 - DNA, 77 bp, Homo sapiens
ttgactggaggtggtttttctagttctacactgggtgaacaactctcctcttcagccacagtctgcagtgactcctc

SEQ ID NO: 37613 - DNA, 76 bp, Homo sapiens
gtggtttttctagttctacactgggtgaacaactctcctcttcagccacagtctgcagtgactcctctgccacccc

SEQ ID NO: 37614 - DNA, 79 bp, Homo sapiens
tagttctacactgggtgaacaactctcctcttcagccacagtctgcagtgactcctctgccaccccctcctctggggca

SEQ ID NO: 37615 - DNA, 79 bp, Homo sapiens
ctgggtgaacaactctcctcttcagccacagtctgcagtgactcctctgccaccccctcctctggggcaggatgcggtg

SEQ ID NO: 37616 - DNA, 84 bp, Homo sapiens
ttcagccacagtctgcagtgactcctctgccaccccctcctctggggcaggatgcggtggggaagctgcagcctcagtatcaga

SEQ ID NO: 37617 - DNA, 79 bp, Homo sapiens
tctgccaccccctcctctggggcaggatgcggtggggaagctgcagcctcagtatcagagtctgaaaaaagctctttca

SEQ ID NO: 37618 - DNA, 76 bp, Homo sapiens
cctcctctggggcaggatgcggtggggaagctgcagcctcagtatcagagtctgaaaaaagctctttcagcgtttt

SEQ ID NO: 37619 - DNA, 76 bp, Homo sapiens
ggcaggatgcggtggggaagctgcagcctcagtatcagagtctgaaaaaagctctttcagcgtttttttaggccac

SEQ ID NO: 37620 - DNA, 76 bp, Homo sapiens
aagctgcagcctcagtatcagagtctgaaaaaagctctttcagcgtttttttaggccactgtccctgaatacttga

SEQ ID NO: 37621 - DNA, 72 bp, Homo sapiens
tctgaaaaaagctctttcagcgtttttttaggccactgtccctgaatacttgaccagacatcttttcgatct

SEQ ID NO: 37622 - DNA, 70 bp, Homo sapiens
aaaaagctctttcagcgtttttttaggccactgtccctgaatacttgaccagacatcttttcgatctttg

SEQ ID NO: 37623 - DNA, 71 bp, Homo sapiens
cgtttttttaggccactgtccctgaatacttgaccagacatcttttcgatctttggccctgctgttttgaa

SEQ ID NO: 37624 - DNA, 74 bp, Homo sapiens
ttttaggccactgtccctgaatacttgaccagacatcttttcgatctttggccctgctgttttgaagtctttca

SEQ ID NO: 37625 - DNA, 74 bp, Homo sapiens
cctgaatacttgaccagacatcttttcgatctttggccctgctgttttgaagtctttcatcagagttatttaaa

SEQ ID NO: 37626 - DNA, 72 bp, Homo sapiens
atacttgaccagacatcttttcgatctttggccctgctgttttgaagtctttcatcagagttatttaaaagt

SEQ ID NO: 37627 - DNA, 70 bp, Homo sapiens
agacatcttttcgatctttggccctgctgttttgaagtctttcatcagagttatttaaaagtttaatcct

SEQ ID NO: 37628 - DNA, 70 bp, Homo sapiens
cgatctttggccctgctgttttgaagtctttcatcagagttatttaaaagtttaatccttttttctgcca

SEQ ID NO: 37629 - DNA, 71 bp, Homo sapiens
tgaagtctttcatcagagttatttaaaagtttaatccttttttctgccacttctgaaaatcctgaatagaa

SEQ ID NO: 37630 - DNA, 69 bp, Homo sapiens
tcagagttatttaaaagtttaatccttttttctgccacttctgaaaatcctgaatagaaaccagttgtc

SEQ ID NO: 37631 - DNA, 68 bp, Homo sapiens
taaaagtttaatccttttttctgccacttctgaaaatcctgaatagaaaccagttgtccgtagagatt

SEQ ID NO: 37632 - DNA, 68 bp, Homo sapiens
gtttaatccttttttctgccacttctgaaaatcctgaatagaaaccagttgtccgtagagattttctt

SEQ ID NO: 37633 - DNA, 69 bp, Homo sapiens
tctgaaaatcctgaatagaaaccagttgtccgtagagattttcttttttcctccaaaccattgtatttc

SEQ ID NO: 37634 - DNA, 67 bp, Homo sapiens
gaatagaaaccagttgtccgtagagattttcttttttcctccaaaccattgtatttcttagttggtg

SEQ ID NO: 37635 - DNA, 68 bp, Homo sapiens
gaaaccagttgtccgtagagattttcttttttcctccaaaccattgtatttcttagttggtgtcatct

SEQ ID NO: 37636 - DNA, 68 bp, Homo sapiens
gtccgtagagattttcttttttcctccaaaccattgtatttcttagttggtgtcatctttgcttttgt

SEQ ID NO: 37637 - DNA, 71 bp, Homo sapiens
cttttttcctccaaaccattgtatttcttagttggtgtcatctttgcttttgtttcttcttcatcttcatc

SEQ ID NO: 37638 - DNA, 78 bp, Homo sapiens
tctttgcttttgtttcttcttcatcttcatctgaagagctgttgctactgttttccatgcaaagtgattctttgttct

SEQ ID NO: 37639 - DNA, 77 bp, Homo sapiens
ttttgtttcttcttcatcttcatctgaagagctgttgctactgttttccatgcaaagtgattctttgttcttggcct

SEQ ID NO: 37640 - DNA, 77 bp, Homo sapiens
ttcatcttcatctgaagagctgttgctactgttttccatgcaaagtgattctttgttcttggccttctcttcctttt

SEQ ID NO: 37641 - DNA, 77 bp, Homo sapiens
ttcatctgaagagctgttgctactgttttccatgcaaagtgattctttgttcttggccttctcttcctttttgccag

SEQ ID NO: 37642 - DNA, 74 bp, Homo sapiens
tgttgctactgttttccatgcaaagtgattctttgttcttggccttctcttcctttttgccaggtgatccagtt

SEQ ID NO: 37643 - DNA, 72 bp, Homo sapiens
tactgttttccatgcaaagtgattctttgttcttggccttctcttcctttttgccaggtgatccagttttta

SEQ ID NO: 37644 - DNA, 72 bp, Homo sapiens
ttggccttctcttcctttttgccaggtgatccagtttttagacactcttctgtattgcaataccttctttta

SEQ ID NO: 37645 - DNA, 70 bp, Homo sapiens
tcctttttgccaggtgatccagtttttagacactcttctgtattgcaataccttcttttaccacgtttta

SEQ ID NO: 37646 - DNA, 69 bp, Homo sapiens
tccagtttttagacactcttctgtattgcaataccttcttttaccacgttttatttgtggttttgaaga

SEQ ID NO: 37647 - DNA, 69 bp, Homo sapiens
ctgtattgcaataccttcttttaccacgttttatttgtggttttgaagatttatctgttgtgtccttct

SEQ ID NO: 37648 - DNA, 68 bp, Homo sapiens
tttaccacgttttatttgtggttttgaagatttatctgttgtgtccttcttgacatcctttctctttt

SEQ ID NO: 37649 - DNA, 74 bp, Homo sapiens
tttgtggttttgaagatttatctgttgtgtccttcttgacatcctttctcttttttgtgacttcatcttcttca

SEQ ID NO: 37650 - DNA, 78 bp, Homo sapiens
tgaagatttatctgttgtgtccttcttgacatcctttctcttttttgtgacttcatcttcttcataatcagtatcttc

SEQ ID NO: 37651 - DNA, 78 bp, Homo sapiens
tatctgttgtgtccttcttgacatcctttctcttttttgtgacttcatcttcttcataatcagtatcttcggataata

SEQ ID NO: 37652 - DNA, 76 bp, Homo sapiens
gtgtccttcttgacatcctttctcttttttgtgacttcatcttcttcataatcagtatcttcggataatacttcta

SEQ ID NO: 37653 - DNA, 75 bp, Homo sapiens
gacatcctttctcttttttgtgacttcatcttcttcataatcagtatcttcggataatacttctatatctttcct

SEQ ID NO: 37654 - DNA, 76 bp, Homo sapiens
tttttgtgacttcatcttcttcataatcagtatcttcggataatacttctatatctttccttaatctttctggaga

SEQ ID NO: 37655 - DNA, 77 bp, Homo sapiens
ttcatcttcttcataatcagtatcttcggataatacttctatatctttccttaatctttctggagattttgacactg

SEQ ID NO: 37656 - DNA, 74 bp, Homo sapiens
cttcttcataatcagtatcttcggataatacttctatatctttccttaatctttctggagattttgacactggt

SEQ ID NO: 37657 - DNA, 73 bp, Homo sapiens
cagtatcttcggataatacttctatatctttccttaatctttctggagattttgacactggtttggatattac

SEQ ID NO: 37658 - DNA, 75 bp, Homo sapiens
tcggataatacttctatatctttccttaatctttctggagattttgacactggtttggatattaccaaatctgca

SEQ ID NO: 37659 - DNA, 74 bp, Homo sapiens
cttctatatctttccttaatctttctggagattttgacactggtttggatattaccaaatctgcatgaactttg

SEQ ID NO: 37660 - DNA, 75 bp, Homo sapiens
tttctggagattttgacactggtttggatattaccaaatctgcatgaactttgttttcttctagcaaagatgaac

SEQ ID NO: 37661 - DNA, 74 bp, Homo sapiens
gtttggatattaccaaatctgcatgaactttgttttcttctagcaaagatgaactgttctgttcctcctttgaa

SEQ ID NO: 37662 - DNA, 76 bp, Homo sapiens
caaatctgcatgaactttgttttcttctagcaaagatgaactgttctgttcctcctttgaaataagatcatttctg

SEQ ID NO: 37663 - DNA, 76 bp, Homo sapiens
tgcatgaactttgttttcttctagcaaagatgaactgttctgttcctcctttgaaataagatcatttctgttgttg

SEQ ID NO: 37664 - DNA, 77 bp, Homo sapiens
tttcttctagcaaagatgaactgttctgttcctcctttgaaataagatcatttctgttgttggtcaaatgatcaatc

SEQ ID NO: 37665 - DNA, 76 bp, Homo sapiens
caaagatgaactgttctgttcctcctttgaaataagatcatttctgttgttggtcaaatgatcaatcttagattcc

SEQ ID NO: 37666 - DNA, 75 bp, Homo sapiens
aactgttctgttcctcctttgaaataagatcatttctgttgttggtcaaatgatcaatcttagattcctctttgc

SEQ ID NO: 37667 - DNA, 77 bp, Homo sapiens
cctcctttgaaataagatcatttctgttgttggtcaaatgatcaatcttagattcctctttgccattattatccatg

SEQ ID NO: 37668 - DNA, 79 bp, Homo sapiens
aaataagatcatttctgttgttggtcaaatgatcaatcttagattcctctttgccattattatccatgtcttgagcacc

SEQ ID NO: 37669 - DNA, 81 bp, Homo sapiens
atttctgttgttggtcaaatgatcaatcttagattcctctttgccattattatccatgtcttgagcacctctctcatcttc

SEQ ID NO: 37670 - DNA, 86 bp, Homo sapiens
aaatgatcaatcttagattcctctttgccattattatccatgtcttgagcacctctctcatcttcctgctcactgtcttcagcaga

SEQ ID NO: 37671 - DNA, 84 bp, Homo sapiens
ttagattcctctttgccattattatccatgtcttgagcacctctctcatcttcctgctcactgtcttcagcagaactttcagaa

SEQ ID NO: 37672 - DNA, 84 bp, Homo sapiens
tttgccattattatccatgtcttgagcacctctctcatcttcctgctcactgtcttcagcagaactttcagaagctagaaaata

SEQ ID NO: 37673 - DNA, 83 bp, Homo sapiens
ttattatccatgtcttgagcacctctctcatcttcctgctcactgtcttcagcagaactttcagaagctagaaaataacagaa

SEQ ID NO: 37674 - DNA, 79 bp, Homo sapiens
tgtcttgagcacctctctcatcttcctgctcactgtcttcagcagaactttcagaagctagaaaataacagaaaaaaaa

SEQ ID NO: 37675 - DNA, 70 bp, Homo sapiens
aaattaaaatcaaatacttgcacaacagaacgattgttatgtttaccttgaagtccattaaggatcgaag

SEQ ID NO: 37676 - DNA, 73 bp, Homo sapiens
caaatacttgcacaacagaacgattgttatgtttaccttgaagtccattaaggatcgaagtaatttctatgga

SEQ ID NO: 37677 - DNA, 72 bp, Homo sapiens
acttgcacaacagaacgattgttatgtttaccttgaagtccattaaggatcgaagtaatttctatggactta

SEQ ID NO: 37678 - DNA, 74 bp, Homo sapiens
cagaacgattgttatgtttaccttgaagtccattaaggatcgaagtaatttctatggacttaatatgagcagta

SEQ ID NO: 37679 - DNA, 75 bp, Homo sapiens
tgtttaccttgaagtccattaaggatcgaagtaatttctatggacttaatatgagcagtatcagagtttttggca

SEQ ID NO: 37680 - DNA, 80 bp, Homo sapiens
ttgaagtccattaaggatcgaagtaatttctatggacttaatatgagcagtatcagagtttttggcatcagtgagatcca

SEQ ID NO: 37681 - DNA, 79 bp, Homo sapiens
ttaaggatcgaagtaatttctatggacttaatatgagcagtatcagagtttttggcatcagtgagatccagtttggata

SEQ ID NO: 37682 - DNA, 78 bp, Homo sapiens
aagtaatttctatggacttaatatgagcagtatcagagtttttggcatcagtgagatccagtttggataccatttcag

SEQ ID NO: 37683 - DNA, 82 bp, Homo sapiens
tctatggacttaatatgagcagtatcagagtttttggcatcagtgagatccagtttggataccatttcaggagatggatttg

SEQ ID NO: 37684 - DNA, 82 bp, Homo sapiens
taatatgagcagtatcagagtttttggcatcagtgagatccagtttggataccatttcaggagatggatttgtctgaaatgg

SEQ ID NO: 37685 - DNA, 77 bp, Homo sapiens
agtatcagagtttttggcatcagtgagatccagtttggataccatttcaggagatggatttgtctgaaatggtggtt

SEQ ID NO: 37686 - DNA, 78 bp, Homo sapiens
tttttggcatcagtgagatccagtttggataccatttcaggagatggatttgtctgaaatggtggtttggacaagcgc

SEQ ID NO: 37687 - DNA, 74 bp, Homo sapiens
agatccagtttggataccatttcaggagatggatttgtctgaaatggtggtttggacaagcgccgaagtttaca

SEQ ID NO: 37688 - DNA, 71 bp, Homo sapiens
tttggataccatttcaggagatggatttgtctgaaatggtggtttggacaagcgccgaagtttacagtttt

SEQ ID NO: 37689 - DNA, 71 bp, Homo sapiens
tttcaggagatggatttgtctgaaatggtggtttggacaagcgccgaagtttacagttttttggagagtat

SEQ ID NO: 37690 - DNA, 70 bp, Homo sapiens
agatggatttgtctgaaatggtggtttggacaagcgccgaagtttacagttttttggagagtatttttca

SEQ ID NO: 37691 - DNA, 68 bp, Homo sapiens
tgaaatggtggtttggacaagcgccgaagtttacagttttttggagagtatttttcatctttgtcttt

SEQ ID NO: 37692 - DNA, 66 bp, Homo sapiens
ggtggtttggacaagcgccgaagtttacagttttttggagagtatttttcatctttgtctttttct

SEQ ID NO: 37693 - DNA, 66 bp, Homo sapiens
acaagcgccgaagtttacagttttttggagagtatttttcatctttgtctttttctttgtctaatt

SEQ ID NO: 37694 - DNA, 67 bp, Homo sapiens
ttacagttttttggagagtatttttcatctttgtctttttctttgtctaatttattctaggttaaga

SEQ ID NO: 37695 - DNA, 65 bp, Homo sapiens
ttttttggagagtatttttcatctttgtctttttctttgtctaatttattctaggttaagaaaaa

SEQ ID NO: 37696 - DNA, 66 bp, Homo sapiens
gtatttttcatctttgtctttttctttgtctaatttattctaggttaagaaaaaaagtatgtcgta

SEQ ID NO: 37697 - DNA, 66 bp, Homo sapiens
catttggaggaaaacttctttttaagagctaatagtgtgtagtaaaaacaagcacttacctttatt

SEQ ID NO: 37698 - DNA, 66 bp, Homo sapiens
cttctttttaagagctaatagtgtgtagtaaaaacaagcacttacctttattttcttccgatgttt

SEQ ID NO: 37699 - DNA, 70 bp, Homo sapiens
agagctaatagtgtgtagtaaaaacaagcacttacctttattttcttccgatgttttatctttggcacat

SEQ ID NO: 37700 - DNA, 71 bp, Homo sapiens
gtgtgtagtaaaaacaagcacttacctttattttcttccgatgttttatctttggcacatttttatcagca

SEQ ID NO: 37701 - DNA, 69 bp, Homo sapiens
aaaacaagcacttacctttattttcttccgatgttttatctttggcacatttttatcagcaggtcttac

SEQ ID NO: 37702 - DNA, 71 bp, Homo sapiens
cttacctttattttcttccgatgttttatctttggcacatttttatcagcaggtcttactattttatctgc

SEQ ID NO: 37703 - DNA, 74 bp, Homo sapiens
ttttcttccgatgttttatctttggcacatttttatcagcaggtcttactattttatctgctttaatccattca

SEQ ID NO: 37704 - DNA, 76 bp, Homo sapiens
ccgatgttttatctttggcacatttttatcagcaggtcttactattttatctgctttaatccattcatcgtatcta

SEQ ID NO: 37705 - DNA, 74 bp, Homo sapiens
ttggcacatttttatcagcaggtcttactattttatctgctttaatccattcatcgtatctaaaattaaaggaa

SEQ ID NO: 37706 - DNA, 71 bp, Homo sapiens
acatttttatcagcaggtcttactattttatctgctttaatccattcatcgtatctaaaattaaaggaaat

SEQ ID NO: 37707 - DNA, 72 bp, Homo sapiens
cagcaggtcttactattttatctgctttaatccattcatcgtatctaaaattaaaggaaattaatataaata

SEQ ID NO: 37708 - DNA, 73 bp, Homo sapiens
ttttatctgctttaatccattcatcgtatctaaaattaaaggaaattaatataaatatgtacaatatatacca

SEQ ID NO: 37709 - DNA, 74 bp, Homo sapiens
ttataattgtttttaggtaataatcactagctaaaactcaagttacctcacattccatccgcagtaatgcacca

SEQ ID NO: 37710 - DNA, 73 bp, Homo sapiens
ttttaggtaataatcactagctaaaactcaagttacctcacattccatccgcagtaatgcaccaagtaaagga

SEQ ID NO: 37711 - DNA, 75 bp, Homo sapiens
taataatcactagctaaaactcaagttacctcacattccatccgcagtaatgcaccaagtaaaggacctctccac

SEQ ID NO: 37712 - DNA, 75 bp, Homo sapiens
ctaaaactcaagttacctcacattccatccgcagtaatgcaccaagtaaaggacctctccaccttcgacatcaga

SEQ ID NO: 37713 - DNA, 78 bp, Homo sapiens
ctcacattccatccgcagtaatgcaccaagtaaaggacctctccaccttcgacatcagaatctttaatactagcttca

SEQ ID NO: 37714 - DNA, 75 bp, Homo sapiens
atccgcagtaatgcaccaagtaaaggacctctccaccttcgacatcagaatctttaatactagcttcatacattt

SEQ ID NO: 37715 - DNA, 73 bp, Homo sapiens
aatgcaccaagtaaaggacctctccaccttcgacatcagaatctttaatactagcttcatacattttttgatt

SEQ ID NO: 37716 - DNA, 71 bp, Homo sapiens
gtaaaggacctctccaccttcgacatcagaatctttaatactagcttcatacattttttgatttttccctc

SEQ ID NO: 37717 - DNA, 72 bp, Homo sapiens
accttcgacatcagaatctttaatactagcttcatacattttttgatttttccctcgtccataccgcacttg

SEQ ID NO: 37718 - DNA, 73 bp, Homo sapiens
acatcagaatctttaatactagcttcatacattttttgatttttccctcgtccataccgcacttggactttca

SEQ ID NO: 37719 - DNA, 72 bp, Homo sapiens
atctttaatactagcttcatacattttttgatttttccctcgtccataccgcacttggactttcatgcctgg

SEQ ID NO: 37720 - DNA, 75 bp, Homo sapiens
ttcatacattttttgatttttccctcgtccataccgcacttggactttcatgcctggtggatagcactcaaactc

SEQ ID NO: 37721 - DNA, 73 bp, Homo sapiens
tttttgatttttccctcgtccataccgcacttggactttcatgcctggtggatagcactcaaactcctcttcc

SEQ ID NO: 37722 - DNA, 74 bp, Homo sapiens
atttttccctcgtccataccgcacttggactttcatgcctggtggatagcactcaaactcctcttcctcattgt

SEQ ID NO: 37723 - DNA, 82 bp, Homo sapiens
ataccgcacttggactttcatgcctggtggatagcactcaaactcctcttcctcattgttgtcatcatcatcttcatcctct

SEQ ID NO: 37724 - DNA, 81 bp, Homo sapiens
acttggactttcatgcctggtggatagcactcaaactcctcttcctcattgttgtcatcatcatcttcatcctcttcttct

SEQ ID NO: 37725 - DNA, 73 bp, Homo sapiens
cctcctcctcttctgcttcttcatcatcttcatcttcttctttattcgtttcatctcttgaaaggtttaaaaa

SEQ ID NO: 37726 - DNA, 75 bp, Homo sapiens
ctcttctgcttcttcatcatcttcatcttcttctttattcgtttcatctcttgaaaggtttaaaaaattgcagag

SEQ ID NO: 37727 - DNA, 70 bp, Homo sapiens
aagaatccatcaagctgaaatgcatcgtaaccaaaaacaattttcttacccagattttgctttttcttcc

SEQ ID NO: 37728 - DNA, 70 bp, Homo sapiens
aagctgaaatgcatcgtaaccaaaaacaattttcttacccagattttgctttttcttcctcagcttctac

SEQ ID NO: 37729 - DNA, 69 bp, Homo sapiens
atgcatcgtaaccaaaaacaattttcttacccagattttgctttttcttcctcagcttctacctttatg

SEQ ID NO: 37730 - DNA, 69 bp, Homo sapiens
aaaacaattttcttacccagattttgctttttcttcctcagcttctacctttatgttgagggattcatc

SEQ ID NO: 37731 - DNA, 70 bp, Homo sapiens
attttcttacccagattttgctttttcttcctcagcttctacctttatgttgagggattcatctacccta

SEQ ID NO: 37732 - DNA, 74 bp, Homo sapiens
attttgctttttcttcctcagcttctacctttatgttgagggattcatctaccctagttgtgtcatcatctttg

SEQ ID NO: 37733 - DNA, 77 bp, Homo sapiens
tttcttcctcagcttctacctttatgttgagggattcatctaccctagttgtgtcatcatctttgtcatccagattt

SEQ ID NO: 37734 - DNA, 78 bp, Homo sapiens
agcttctacctttatgttgagggattcatctaccctagttgtgtcatcatctttgtcatccagattttcattgtcttc

SEQ ID NO: 37735 - DNA, 76 bp, Homo sapiens
tttatgttgagggattcatctaccctagttgtgtcatcatctttgtcatccagattttcattgtcttctggttttt

SEQ ID NO: 37736 - DNA, 75 bp, Homo sapiens
agggattcatctaccctagttgtgtcatcatctttgtcatccagattttcattgtcttctggttttttaatgtta

SEQ ID NO: 37737 - DNA, 74 bp, Homo sapiens
catctaccctagttgtgtcatcatctttgtcatccagattttcattgtcttctggttttttaatgttaacttct

SEQ ID NO: 37738 - DNA, 75 bp, Homo sapiens
gttgtgtcatcatctttgtcatccagattttcattgtcttctggttttttaatgttaacttctttttcctgatca

SEQ ID NO: 37739 - DNA, 72 bp, Homo sapiens
tttgtcatccagattttcattgtcttctggttttttaatgttaacttctttttcctgatcagaatgtgtagg

SEQ ID NO: 37740 - DNA, 73 bp, Homo sapiens
catccagattttcattgtcttctggttttttaatgttaacttctttttcctgatcagaatgtgtaggtataga

SEQ ID NO: 37741 - DNA, 71 bp, Homo sapiens
tgtcttctggttttttaatgttaacttctttttcctgatcagaatgtgtaggtatagattctaataaattc

SEQ ID NO: 37742 - DNA, 69 bp, Homo sapiens
tctggttttttaatgttaacttctttttcctgatcagaatgtgtaggtatagattctaataaattcttt

SEQ ID NO: 37743 - DNA, 69 bp, Homo sapiens
gttaacttctttttcctgatcagaatgtgtaggtatagattctaataaattctttttacttccctagaa

SEQ ID NO: 37744 - DNA, 72 bp, Homo sapiens
ttttcctgatcagaatgtgtaggtatagattctaataaattctttttacttccctagaaaaagatcagagga

SEQ ID NO: 37745 - DNA, 71 bp, Homo sapiens
gatcagaatgtgtaggtatagattctaataaattctttttacttccctagaaaaagatcagaggaaagaaa

SEQ ID NO: 37746 - DNA, 68 bp, Homo sapiens
gtgtaggtatagattctaataaattctttttacttccctagaaaaagatcagaggaaagaaaccaaca

SEQ ID NO: 37747 - DNA, 70 bp, Homo sapiens
ggaaaatataccaaagaaagcaaaagacaattaacaatatctgatttaccagagagggcttaatattttc

SEQ ID NO: 37748 - DNA, 69 bp, Homo sapiens
taccaaagaaagcaaaagacaattaacaatatctgatttaccagagagggcttaatattttcttttctt

SEQ ID NO: 37749 - DNA, 73 bp, Homo sapiens
tcttttctttcaatttcatcctcaataggcttttcttctcttggtattatattcctctcctcctccatcttta

SEQ ID NO: 37750 - DNA, 72 bp, Homo sapiens
ctttcaatttcatcctcaataggcttttcttctcttggtattatattcctctcctcctccatctttatttct

SEQ ID NO: 37751 - DNA, 74 bp, Homo sapiens
ctcaataggcttttcttctcttggtattatattcctctcctcctccatctttatttctttgatctctgtttcat

SEQ ID NO: 37752 - DNA, 72 bp, Homo sapiens
aggcttttcttctcttggtattatattcctctcctcctccatctttatttctttgatctctgtttcattttc

SEQ ID NO: 37753 - DNA, 71 bp, Homo sapiens
ctcttggtattatattcctctcctcctccatctttatttctttgatctctgtttcattttcctccttaact

SEQ ID NO: 37754 - DNA, 70 bp, Homo sapiens
ttatattcctctcctcctccatctttatttctttgatctctgtttcattttcctccttaacttttatttc

SEQ ID NO: 37755 - DNA, 68 bp, Homo sapiens
ctcctcctccatctttatttctttgatctctgtttcattttcctccttaacttttatttcttttacat

SEQ ID NO: 37756 - DNA, 67 bp, Homo sapiens
ctttatttctttgatctctgtttcattttcctccttaacttttatttcttttacattttcacactcc

SEQ ID NO: 37757 - DNA, 71 bp, Homo sapiens
tgatctctgtttcattttcctccttaacttttatttcttttacattttcacactccttacattgcttgtta

SEQ ID NO: 37758 - DNA, 68 bp, Homo sapiens
ctgtttcattttcctccttaacttttatttcttttacattttcacactccttacattgcttgttaaca

SEQ ID NO: 37759 - DNA, 69 bp, Homo sapiens
cctccttaacttttatttcttttacattttcacactccttacattgcttgttaacaactttctctggca

SEQ ID NO: 37760 - DNA, 76 bp, Homo sapiens
tatttcttttacattttcacactccttacattgcttgttaacaactttctctggcaatgccatctgaaattcaatg

SEQ ID NO: 37761 - DNA, 80 bp, Homo sapiens
ttacattttcacactccttacattgcttgttaacaactttctctggcaatgccatctgaaattcaatgttggctgatcta

SEQ ID NO: 37762 - DNA, 80 bp, Homo sapiens
actccttacattgcttgttaacaactttctctggcaatgccatctgaaattcaatgttggctgatctacagtactcctca

SEQ ID NO: 37763 - DNA, 79 bp, Homo sapiens
ttaacaactttctctggcaatgccatctgaaattcaatgttggctgatctacagtactcctcaaaaccatataagtatc

SEQ ID NO: 37764 - DNA, 82 bp, Homo sapiens
tttctctggcaatgccatctgaaattcaatgttggctgatctacagtactcctcaaaaccatataagtatctggaaacatga

SEQ ID NO: 37765 - DNA, 79 bp, Homo sapiens
catctgaaattcaatgttggctgatctacagtactcctcaaaaccatataagtatctggaaacatgaagagaaattaca

SEQ ID NO: 37766 - DNA, 76 bp, Homo sapiens
attcaatgttggctgatctacagtactcctcaaaaccatataagtatctggaaacatgaagagaaattacatttgg

SEQ ID NO: 37767 - DNA, 76 bp, Homo sapiens
ttggctgatctacagtactcctcaaaaccatataagtatctggaaacatgaagagaaattacatttggtgaaaaca

SEQ ID NO: 37768 - DNA, 73 bp, Homo sapiens
tgctttctaggtaaaaatactgaagataatcatatcaattatactaacttactttttataagcacatttaaca

SEQ ID NO: 37769 - DNA, 77 bp, Homo sapiens
aatactgaagataatcatatcaattatactaacttactttttataagcacatttaacattgtatcctgcagctgaat

SEQ ID NO: 37770 - DNA, 77 bp, Homo sapiens
gataatcatatcaattatactaacttactttttataagcacatttaacattgtatcctgcagctgaatttaagacag

SEQ ID NO: 37771 - DNA, 75 bp, Homo sapiens
tcaattatactaacttactttttataagcacatttaacattgtatcctgcagctgaatttaagacagggattcca

SEQ ID NO: 37772 - DNA, 73 bp, Homo sapiens
aacttactttttataagcacatttaacattgtatcctgcagctgaatttaagacagggattccaagatcttgg

SEQ ID NO: 37773 - DNA, 75 bp, Homo sapiens
ttttataagcacatttaacattgtatcctgcagctgaatttaagacagggattccaagatcttggtagacttgtt

SEQ ID NO: 37774 - DNA, 76 bp, Homo sapiens
agcacatttaacattgtatcctgcagctgaatttaagacagggattccaagatcttggtagacttgtttccaaaca

SEQ ID NO: 37775 - DNA, 76 bp, Homo sapiens
attgtatcctgcagctgaatttaagacagggattccaagatcttggtagacttgtttccaaacagctccactttca

SEQ ID NO: 37776 - DNA, 74 bp, Homo sapiens
agctgaatttaagacagggattccaagatcttggtagacttgtttccaaacagctccactttcaatctaatgga

SEQ ID NO: 37777 - DNA, 72 bp, Homo sapiens
atttaagacagggattccaagatcttggtagacttgtttccaaacagctccactttcaatctaatggacaaa

SEQ ID NO: 37778 - DNA, 71 bp, Homo sapiens
attccaagatcttggtagacttgtttccaaacagctccactttcaatctaatggacaaagtgaaacaaaaa

SEQ ID NO: 37779 - DNA, 70 bp, Homo sapiens
cttggtagacttgtttccaaacagctccactttcaatctaatggacaaagtgaaacaaaaactctcaaat

SEQ ID NO: 37780 - DNA, 75 bp, Homo sapiens
gagaaaacatgttacatgaaaaagatgtttcagtttgactacaacactcacattatcaaatcctccaagtttgtg

SEQ ID NO: 37781 - DNA, 76 bp, Homo sapiens
catgttacatgaaaaagatgtttcagtttgactacaacactcacattatcaaatcctccaagtttgtgtacaagtc

SEQ ID NO: 37782 - DNA, 74 bp, Homo sapiens
agatgtttcagtttgactacaacactcacattatcaaatcctccaagtttgtgtacaagtctgaataacttaaa

SEQ ID NO: 37783 - DNA, 75 bp, Homo sapiens
cagtttgactacaacactcacattatcaaatcctccaagtttgtgtacaagtctgaataacttaaagagattcaa

SEQ ID NO: 37784 - DNA, 74 bp, Homo sapiens
ctacaacactcacattatcaaatcctccaagtttgtgtacaagtctgaataacttaaagagattcaaatttcga

SEQ ID NO: 37785 - DNA, 73 bp, Homo sapiens
ttatcaaatcctccaagtttgtgtacaagtctgaataacttaaagagattcaaatttcgatatccaagtacag

SEQ ID NO: 37786 - DNA, 71 bp, Homo sapiens
ctccaagtttgtgtacaagtctgaataacttaaagagattcaaatttcgatatccaagtacaggtcgtttg

SEQ ID NO: 37787 - DNA, 71 bp, Homo sapiens
gtgtacaagtctgaataacttaaagagattcaaatttcgatatccaagtacaggtcgtttgttaataggtg

SEQ ID NO: 37788 - DNA, 70 bp, Homo sapiens
gtctgaataacttaaagagattcaaatttcgatatccaagtacaggtcgtttgttaataggtgtacctgt

SEQ ID NO: 37789 - DNA, 69 bp, Homo sapiens
aacttaaagagattcaaatttcgatatccaagtacaggtcgtttgttaataggtgtacctgttacagaa

SEQ ID NO: 37790 - DNA, 69 bp, Homo sapiens
agattcaaatttcgatatccaagtacaggtcgtttgttaataggtgtacctgttacagaaaacacaaac

SEQ ID NO: 37791 - DNA, 72 bp, Homo sapiens
tatccaagtacaggtcgtttgttaataggtgtacctgttacagaaaacacaaactatattagatccacacta

SEQ ID NO: 37792 - DNA, 70 bp, Homo sapiens
ttaagatactaattatctgtccaaaacttaccacgttaatgataaataaaaaatactcacctctatcttc

SEQ ID NO: 37793 - DNA, 70 bp, Homo sapiens
atactaattatctgtccaaaacttaccacgttaatgataaataaaaaatactcacctctatcttccataa

SEQ ID NO: 37794 - DNA, 69 bp, Homo sapiens
ctgtccaaaacttaccacgttaatgataaataaaaaatactcacctctatcttccataaatttgtacaa

SEQ ID NO: 37795 - DNA, 71 bp, Homo sapiens
ccacgttaatgataaataaaaaatactcacctctatcttccataaatttgtacaattgctgaagaaagttc

SEQ ID NO: 37796 - DNA, 70 bp, Homo sapiens
gataaataaaaaatactcacctctatcttccataaatttgtacaattgctgaagaaagttctccctttct

SEQ ID NO: 37797 - DNA, 71 bp, Homo sapiens
aaatactcacctctatcttccataaatttgtacaattgctgaagaaagttctccctttcttctggaaatgg

SEQ ID NO: 37798 - DNA, 71 bp, Homo sapiens
cacctctatcttccataaatttgtacaattgctgaagaaagttctccctttcttctggaaatggttctatt

SEQ ID NO: 37799 - DNA, 70 bp, Homo sapiens
cttccataaatttgtacaattgctgaagaaagttctccctttcttctggaaatggttctatttcttccta

SEQ ID NO: 37800 - DNA, 71 bp, Homo sapiens
gtacaattgctgaagaaagttctccctttcttctggaaatggttctatttcttcctaattttaatcacaga

SEQ ID NO: 37801 - DNA, 70 bp, Homo sapiens
gctgaagaaagttctccctttcttctggaaatggttctatttcttcctaattttaatcacagaagaatat

SEQ ID NO: 37802 - DNA, 68 bp, Homo sapiens
agttctccctttcttctggaaatggttctatttcttcctaattttaatcacagaagaatattattttc

SEQ ID NO: 37803 - DNA, 70 bp, Homo sapiens
cttctggaaatggttctatttcttcctaattttaatcacagaagaatattattttcttcaattaagcatt

SEQ ID NO: 37804 - DNA, 75 bp, Homo sapiens
tgcgcccagcctggtggatactttcttaatcatctcattaaaaaaagcataggaagactaagacatgtttttgag

SEQ ID NO: 37805 - DNA, 73 bp, Homo sapiens
cagcctggtggatactttcttaatcatctcattaaaaaaagcataggaagactaagacatgtttttgaggtta

SEQ ID NO: 37806 - DNA, 71 bp, Homo sapiens
gatactttcttaatcatctcattaaaaaaagcataggaagactaagacatgtttttgaggttattaggaaa

SEQ ID NO: 37807 - DNA, 71 bp, Homo sapiens
catctcattaaaaaaagcataggaagactaagacatgtttttgaggttattaggaaaatcaggcttaatat

SEQ ID NO: 37808 - DNA, 68 bp, Homo sapiens
aaaaagcataggaagactaagacatgtttttgaggttattaggaaaatcaggcttaatattttctatt

SEQ ID NO: 37809 - DNA, 74 bp, Homo sapiens
gcataggaagactaagacatgtttttgaggttattaggaaaatcaggcttaatattttctatttcacaagatca

SEQ ID NO: 37810 - DNA, 72 bp, Homo sapiens
aagacatgtttttgaggttattaggaaaatcaggcttaatattttctatttcacaagatcatatatctaaag

SEQ ID NO: 37811 - DNA, 72 bp, Homo sapiens
tttgaggttattaggaaaatcaggcttaatattttctatttcacaagatcatatatctaaagtaaccaagta

SEQ ID NO: 37812 - DNA, 74 bp, Homo sapiens
taggaaaatcaggcttaatattttctatttcacaagatcatatatctaaagtaaccaagtaaactatctgatta

SEQ ID NO: 37813 - DNA, 78 bp, Homo sapiens
tcaggcttaatattttctatttcacaagatcatatatctaaagtaaccaagtaaactatctgattatgaggatctcaa

SEQ ID NO: 37814 - DNA, 79 bp, Homo sapiens
tttctatttcacaagatcatatatctaaagtaaccaagtaaactatctgattatgaggatctcaaatacaagattatga

SEQ ID NO: 37815 - DNA, 78 bp, Homo sapiens
atttcacaagatcatatatctaaagtaaccaagtaaactatctgattatgaggatctcaaatacaagattatgaaata

SEQ ID NO: 37816 - DNA, 78 bp, Homo sapiens
atcatatatctaaagtaaccaagtaaactatctgattatgaggatctcaaatacaagattatgaaatatttctcatac

SEQ ID NO: 37817 - DNA, 74 bp, Homo sapiens
agtaaccaagtaaactatctgattatgaggatctcaaatacaagattatgaaatatttctcatactaaaaatac

SEQ ID NO: 37818 - DNA, 78 bp, Homo sapiens
aactatctgattatgaggatctcaaatacaagattatgaaatatttctcatactaaaaatacttatatgagtaatgac

SEQ ID NO: 37819 - DNA, 79 bp, Homo sapiens
ctgattatgaggatctcaaatacaagattatgaaatatttctcatactaaaaatacttatatgagtaatgacttaatgc

SEQ ID NO: 37820 - DNA, 76 bp, Homo sapiens
ggatctcaaatacaagattatgaaatatttctcatactaaaaatacttatatgagtaatgacttaatgccaaatcc

SEQ ID NO: 37821 - DNA, 73 bp, Homo sapiens
agattatgaaatatttctcatactaaaaatacttatatgagtaatgacttaatgccaaatcctaacccacaag

SEQ ID NO: 37822 - DNA, 70 bp, Homo sapiens
ctcatactaaaaatacttatatgagtaatgacttaatgccaaatcctaacccacaagggaaacccaactg

SEQ ID NO: 37823 - DNA, 68 bp, Homo sapiens
aaaatacttatatgagtaatgacttaatgccaaatcctaacccacaagggaaacccaactgttattta

SEQ ID NO: 37824 - DNA, 67 bp, Homo sapiens
atgagtaatgacttaatgccaaatcctaacccacaagggaaacccaactgttatttataattttaaa

SEQ ID NO: 37825 - DNA, 66 bp, Homo sapiens
gacttaatgccaaatcctaacccacaagggaaacccaactgttatttataattttaaaaggtatca

SEQ ID NO: 37826 - DNA, 64 bp, Homo sapiens
atcctaacccacaagggaaacccaactgttatttataattttaaaaggtatcaactgttttcac

SEQ ID NO: 37827 - DNA, 64 bp, Homo sapiens
cccacaagggaaacccaactgttatttataattttaaaaggtatcaactgttttcacttacttc

SEQ ID NO: 37828 - DNA, 69 bp, Homo sapiens
cccaactgttatttataattttaaaaggtatcaactgttttcacttacttcttcttcactgctattatc

SEQ ID NO: 37829 - DNA, 68 bp, Homo sapiens
ttataattttaaaaggtatcaactgttttcacttacttcttcttcactgctattatcctccttttctt

SEQ ID NO: 37830 - DNA, 72 bp, Homo sapiens
taaaaggtatcaactgttttcacttacttcttcttcactgctattatcctccttttctttttcatcatcttc

SEQ ID NO: 37831 - DNA, 73 bp, Homo sapiens
gtatcaactgttttcacttacttcttcttcactgctattatcctccttttctttttcatcatcttcctcctcc

SEQ ID NO: 37832 - DNA, 79 bp, Homo sapiens
ttcttcctctgcttcactgctagagctatcttctttcaattcagtcttccagttagcaggaatagttctacttttgtga

SEQ ID NO: 37833 - DNA, 79 bp, Homo sapiens
tctgcttcactgctagagctatcttctttcaattcagtcttccagttagcaggaatagttctacttttgtgaaattcaa

SEQ ID NO: 37834 - DNA, 77 bp, Homo sapiens
tagagctatcttctttcaattcagtcttccagttagcaggaatagttctacttttgtgaaattcaagtgcctgttca

SEQ ID NO: 37835 - DNA, 74 bp, Homo sapiens
tatcttctttcaattcagtcttccagttagcaggaatagttctacttttgtgaaattcaagtgcctgttcaaag

SEQ ID NO: 37836 - DNA, 73 bp, Homo sapiens
aattcagtcttccagttagcaggaatagttctacttttgtgaaattcaagtgcctgttcaaaggctggaaaca

SEQ ID NO: 37837 - DNA, 72 bp, Homo sapiens
agttagcaggaatagttctacttttgtgaaattcaagtgcctgttcaaaggctggaaacagaccacaaggta

SEQ ID NO: 37838 - DNA, 73 bp, Homo sapiens
aatagttctacttttgtgaaattcaagtgcctgttcaaaggctggaaacagaccacaaggtacatgaactgaa

SEQ ID NO: 37839 - DNA, 67 bp, Homo sapiens
cttcaaaaacactttagcagtttttacagtacttgtaatttattccaagattatccttaccttgctt

SEQ ID NO: 37840 - DNA, 71 bp, Homo sapiens
tttagcagtttttacagtacttgtaatttattccaagattatccttaccttgctttaaaacagcatcaggc

SEQ ID NO: 37841 - DNA, 72 bp, Homo sapiens
ttttacagtacttgtaatttattccaagattatccttaccttgctttaaaacagcatcaggctttggtgcag

SEQ ID NO: 37842 - DNA, 74 bp, Homo sapiens
ttgtaatttattccaagattatccttaccttgctttaaaacagcatcaggctttggtgcagtgtcactagtaat

SEQ ID NO: 37843 - DNA, 75 bp, Homo sapiens
atttattccaagattatccttaccttgctttaaaacagcatcaggctttggtgcagtgtcactagtaatttcatg

SEQ ID NO: 37844 - DNA, 75 bp, Homo sapiens
attatccttaccttgctttaaaacagcatcaggctttggtgcagtgtcactagtaatttcatggacatcttttct

SEQ ID NO: 37845 - DNA, 78 bp, Homo sapiens
tgctttaaaacagcatcaggctttggtgcagtgtcactagtaatttcatggacatcttttcttggaactgaagtacta

SEQ ID NO: 37846 - DNA, 78 bp, Homo sapiens
taaaacagcatcaggctttggtgcagtgtcactagtaatttcatggacatcttttcttggaactgaagtactatatat

SEQ ID NO: 37847 - DNA, 73 bp, Homo sapiens
caggctttggtgcagtgtcactagtaatttcatggacatcttttcttggaactgaagtactatatattttttt

SEQ ID NO: 37848 - DNA, 68 bp, Homo sapiens
caaaataacagcatatatttataaactggtttttcaaaccaagtaaattatacttacaattttccatc

SEQ ID NO: 37849 - DNA, 69 bp, Homo sapiens
gcatatatttataaactggtttttcaaaccaagtaaattatacttacaattttccatctttgaaagatc

SEQ ID NO: 37850 - DNA, 67 bp, Homo sapiens
taaactggtttttcaaaccaagtaaattatacttacaattttccatctttgaaagatcgaacaagaa

SEQ ID NO: 37851 - DNA, 69 bp, Homo sapiens
tggtttttcaaaccaagtaaattatacttacaattttccatctttgaaagatcgaacaagaatattgtc

SEQ ID NO: 37852 - DNA, 70 bp, Homo sapiens
ccaagtaaattatacttacaattttccatctttgaaagatcgaacaagaatattgtccttttttacagca

SEQ ID NO: 37853 - DNA, 75 bp, Homo sapiens
acttacaattttccatctttgaaagatcgaacaagaatattgtccttttttacagcaatctcatcactacaatca

SEQ ID NO: 37854 - DNA, 76 bp, Homo sapiens
tttccatctttgaaagatcgaacaagaatattgtccttttttacagcaatctcatcactacaatcaggacaaacca

SEQ ID NO: 37855 - DNA, 74 bp, Homo sapiens
tctttgaaagatcgaacaagaatattgtccttttttacagcaatctcatcactacaatcaggacaaaccacctt

SEQ ID NO: 37856 - DNA, 72 bp, Homo sapiens
atcgaacaagaatattgtccttttttacagcaatctcatcactacaatcaggacaaaccaccttttaagaaa

SEQ ID NO: 37857 - DNA, 71 bp, Homo sapiens
tgtccttttttacagcaatctcatcactacaatcaggacaaaccaccttttaagaaaaagggtgaagctat

SEQ ID NO: 37858 - DNA, 71 bp, Homo sapiens
tttttacagcaatctcatcactacaatcaggacaaaccaccttttaagaaaaagggtgaagctattataac

SEQ ID NO: 37859 - DNA, 70 bp, Homo sapiens
ctcatcactacaatcaggacaaaccaccttttaagaaaaagggtgaagctattataactaaaagaactca

SEQ ID NO: 37860 - DNA, 72 bp, Homo sapiens
aacttataaagtttgaaattaaactcttgtatactgaagctactcaccaatgcaggaaaccacagtgctttc

SEQ ID NO: 37861 - DNA, 72 bp, Homo sapiens
aagtttgaaattaaactcttgtatactgaagctactcaccaatgcaggaaaccacagtgctttctttttatc

SEQ ID NO: 37862 - DNA, 74 bp, Homo sapiens
ttaaactcttgtatactgaagctactcaccaatgcaggaaaccacagtgctttctttttatccaaactaatgta

SEQ ID NO: 37863 - DNA, 77 bp, Homo sapiens
ttgtatactgaagctactcaccaatgcaggaaaccacagtgctttctttttatccaaactaatgtaatctacacata

SEQ ID NO: 37864 - DNA, 73 bp, Homo sapiens
aagctactcaccaatgcaggaaaccacagtgctttctttttatccaaactaatgtaatctacacatacaactt

SEQ ID NO: 37865 - DNA, 75 bp, Homo sapiens
aatgcaggaaaccacagtgctttctttttatccaaactaatgtaatctacacatacaactttgcctagtagctca

SEQ ID NO: 37866 - DNA, 75 bp, Homo sapiens
acagtgctttctttttatccaaactaatgtaatctacacatacaactttgcctagtagctcatcaatctgtttcc

SEQ ID NO: 37867 - DNA, 78 bp, Homo sapiens
ctttttatccaaactaatgtaatctacacatacaactttgcctagtagctcatcaatctgtttcctatcatcctcatc

SEQ ID NO: 37868 - DNA, 83 bp, Homo sapiens
tatccaaactaatgtaatctacacatacaactttgcctagtagctcatcaatctgtttcctatcatcctcatcttcatcactg

SEQ ID NO: 37869 - DNA, 85 bp, Homo sapiens
aatgtaatctacacatacaactttgcctagtagctcatcaatctgtttcctatcatcctcatcttcatcactggaggatgatgaa

SEQ ID NO: 37870 - DNA, 84 bp, Homo sapiens
acatacaactttgcctagtagctcatcaatctgtttcctatcatcctcatcttcatcactggaggatgatgaagactcttcctc

SEQ ID NO: 37871 - DNA, 84 bp, Homo sapiens
tttgcctagtagctcatcaatctgtttcctatcatcctcatcttcatcactggaggatgatgaagactcttcctctggtctagg

SEQ ID NO: 37872 - DNA, 82 bp, Homo sapiens
ctcatcaatctgtttcctatcatcctcatcttcatcactggaggatgatgaagactcttcctctggtctagggagagaaaaa

SEQ ID NO: 37873 - DNA, 79 bp, Homo sapiens
atctgtttcctatcatcctcatcttcatcactggaggatgatgaagactcttcctctggtctagggagagaaaaaaata

SEQ ID NO: 37874 - DNA, 76 bp, Homo sapiens
actagaaggagaaatgaattcaggttcaactaacagtcatgaaaatggacttacatatgattagatcttcttcctc

SEQ ID NO: 37875 - DNA, 75 bp, Homo sapiens
agaaatgaattcaggttcaactaacagtcatgaaaatggacttacatatgattagatcttcttcctctatttgtt

SEQ ID NO: 37876 - DNA, 74 bp, Homo sapiens
caggttcaactaacagtcatgaaaatggacttacatatgattagatcttcttcctctatttgttttctttccta

SEQ ID NO: 37877 - DNA, 76 bp, Homo sapiens
agtcatgaaaatggacttacatatgattagatcttcttcctctatttgttttctttcctatgactggagtgccaaa

SEQ ID NO: 37878 - DNA, 76 bp, Homo sapiens
aaaatggacttacatatgattagatcttcttcctctatttgttttctttcctatgactggagtgccaaaatgctca

SEQ ID NO: 37879 - DNA, 77 bp, Homo sapiens
ttacatatgattagatcttcttcctctatttgttttctttcctatgactggagtgccaaaatgctcagggttggtga

SEQ ID NO: 37880 - DNA, 74 bp, Homo sapiens
attagatcttcttcctctatttgttttctttcctatgactggagtgccaaaatgctcagggttggtgagtggga

SEQ ID NO: 37881 - DNA, 77 bp, Homo sapiens
tctatttgttttctttcctatgactggagtgccaaaatgctcagggttggtgagtgggagctggtctaatgtctgtg

SEQ ID NO: 37882 - DNA, 76 bp, Homo sapiens
tttctttcctatgactggagtgccaaaatgctcagggttggtgagtgggagctggtctaatgtctgtgggtaagaa

SEQ ID NO: 37883 - DNA, 77 bp, Homo sapiens
tcctatgactggagtgccaaaatgctcagggttggtgagtgggagctggtctaatgtctgtgggtaagaacataaac

SEQ ID NO: 37884 - DNA, 74 bp, Homo sapiens
agtgccaaaatgctcagggttggtgagtgggagctggtctaatgtctgtgggtaagaacataaacccatcaaaa

SEQ ID NO: 37885 - DNA, 72 bp, Homo sapiens
aatgctcagggttggtgagtgggagctggtctaatgtctgtgggtaagaacataaacccatcaaaaaattaa

SEQ ID NO: 37886 - DNA, 72 bp, Homo sapiens
ttattcctcccaataaaaaatattaagacatgttcatttgttaaatgatgacttacttcactttcagcaaaa

SEQ ID NO: 37887 - DNA, 73 bp, Homo sapiens
cctcccaataaaaaatattaagacatgttcatttgttaaatgatgacttacttcactttcagcaaaatgcctc

SEQ ID NO: 37888 - DNA, 77 bp, Homo sapiens
aaatattaagacatgttcatttgttaaatgatgacttacttcactttcagcaaaatgcctctctcctttcaggcaca

SEQ ID NO: 37889 - DNA, 80 bp, Homo sapiens
atgttcatttgttaaatgatgacttacttcactttcagcaaaatgcctctctcctttcaggcacagtgaagatcgtctca

SEQ ID NO: 37890 - DNA, 79 bp, Homo sapiens
tttgttaaatgatgacttacttcactttcagcaaaatgcctctctcctttcaggcacagtgaagatcgtctcagtgtct

SEQ ID NO: 37891 - DNA, 82 bp, Homo sapiens
acttacttcactttcagcaaaatgcctctctcctttcaggcacagtgaagatcgtctcagtgtcttctcatctccgtcatca

SEQ ID NO: 37892 - DNA, 80 bp, Homo sapiens
actttcagcaaaatgcctctctcctttcaggcacagtgaagatcgtctcagtgtcttctcatctccgtcatcaaaaacta

SEQ ID NO: 37893 - DNA, 79 bp, Homo sapiens
aaaatgcctctctcctttcaggcacagtgaagatcgtctcagtgtcttctcatctccgtcatcaaaaactatgagaggg

SEQ ID NO: 37894 - DNA, 77 bp, Homo sapiens
tcctttcaggcacagtgaagatcgtctcagtgtcttctcatctccgtcatcaaaaactatgagagggggtaaaaatg

SEQ ID NO: 37895 - DNA, 77 bp, Homo sapiens
aggcacagtgaagatcgtctcagtgtcttctcatctccgtcatcaaaaactatgagagggggtaaaaatggaagcta

SEQ ID NO: 37896 - DNA, 74 bp, Homo sapiens
atcgtctcagtgtcttctcatctccgtcatcaaaaactatgagagggggtaaaaatggaagctactgaaggatt

SEQ ID NO: 37897 - DNA, 72 bp, Homo sapiens
ctcagtgtcttctcatctccgtcatcaaaaactatgagagggggtaaaaatggaagctactgaaggattttt

SEQ ID NO: 37898 - DNA, 69 bp, Homo sapiens
ttttaaaagaaaatttattttcttacctacagtgtaccaactcgcatctgttagtttattgataacagc

SEQ ID NO: 37899 - DNA, 75 bp, Homo sapiens
aaatttattttcttacctacagtgtaccaactcgcatctgttagtttattgataacagcttcctgatatgcacca

SEQ ID NO: 37900 - DNA, 78 bp, Homo sapiens
ttttcttacctacagtgtaccaactcgcatctgttagtttattgataacagcttcctgatatgcaccatcaagattct

SEQ ID NO: 37901 - DNA, 82 bp, Homo sapiens
tacagtgtaccaactcgcatctgttagtttattgataacagcttcctgatatgcaccatcaagattcttcacttccacaata

SEQ ID NO: 37902 - DNA, 81 bp, Homo sapiens
accaactcgcatctgttagtttattgataacagcttcctgatatgcaccatcaagattcttcacttccacaatagctccta

SEQ ID NO: 37903 - DNA, 77 bp, Homo sapiens
ttagtttattgataacagcttcctgatatgcaccatcaagattcttcacttccacaatagctcctacctaaagtatt

SEQ ID NO: 37904 - DNA, 77 bp, Homo sapiens
ttattgataacagcttcctgatatgcaccatcaagattcttcacttccacaatagctcctacctaaagtatttttaa

SEQ ID NO: 37905 - DNA, 75 bp, Homo sapiens
cttcctgatatgcaccatcaagattcttcacttccacaatagctcctacctaaagtatttttaaacatgttagaa

SEQ ID NO: 37906 - DNA, 72 bp, Homo sapiens
atatgcaccatcaagattcttcacttccacaatagctcctacctaaagtatttttaaacatgttagaaaaac

SEQ ID NO: 37907 - DNA, 67 bp, Homo sapiens
caagattcttcacttccacaatagctcctacctaaagtatttttaaacatgttagaaaaacttttaa

SEQ ID NO: 37908 - DNA, 69 bp, Homo sapiens
ataccaagtatgattattttttcccaaacaaccattagaattaacaatgaatacatgaattacctttag

SEQ ID NO: 37909 - DNA, 69 bp, Homo sapiens
gtatgattattttttcccaaacaaccattagaattaacaatgaatacatgaattacctttagtgggccc

SEQ ID NO: 37910 - DNA, 71 bp, Homo sapiens
tttcccaaacaaccattagaattaacaatgaatacatgaattacctttagtgggccctttatgtggtcatc

SEQ ID NO: 37911 - DNA, 71 bp, Homo sapiens
aacaaccattagaattaacaatgaatacatgaattacctttagtgggccctttatgtggtcatcctgaact

SEQ ID NO: 37912 - DNA, 73 bp, Homo sapiens
attaacaatgaatacatgaattacctttagtgggccctttatgtggtcatcctgaacttccactgttgaagaa

SEQ ID NO: 37913 - DNA, 74 bp, Homo sapiens
aatacatgaattacctttagtgggccctttatgtggtcatcctgaacttccactgttgaagaatcatgtctaaa

SEQ ID NO: 37914 - DNA, 74 bp, Homo sapiens
attacctttagtgggccctttatgtggtcatcctgaacttccactgttgaagaatcatgtctaaatgtcaccta

SEQ ID NO: 37915 - DNA, 77 bp, Homo sapiens
ttagtgggccctttatgtggtcatcctgaacttccactgttgaagaatcatgtctaaatgtcacctagagattataa

SEQ ID NO: 37916 - DNA, 77 bp, Homo sapiens
tttatgtggtcatcctgaacttccactgttgaagaatcatgtctaaatgtcacctagagattataagtttaattagc

SEQ ID NO: 37917 - DNA, 76 bp, Homo sapiens
tcatcctgaacttccactgttgaagaatcatgtctaaatgtcacctagagattataagtttaattagccaccaaaa

SEQ ID NO: 37918 - DNA, 72 bp, Homo sapiens
cttccactgttgaagaatcatgtctaaatgtcacctagagattataagtttaattagccaccaaaaataaac

SEQ ID NO: 37919 - DNA, 77 bp, Homo sapiens
acatatcaaatgctgaacatacaatttatgaaatctataaatactgtaccttgactttgacaagtctttttgctgtc

SEQ ID NO: 37920 - DNA, 78 bp, Homo sapiens
tgctgaacatacaatttatgaaatctataaatactgtaccttgactttgacaagtctttttgctgtcttgatcttggc

SEQ ID NO: 37921 - DNA, 75 bp, Homo sapiens
acaatttatgaaatctataaatactgtaccttgactttgacaagtctttttgctgtcttgatcttggcttcacaa

SEQ ID NO: 37922 - DNA, 73 bp, Homo sapiens
aaatctataaatactgtaccttgactttgacaagtctttttgctgtcttgatcttggcttcacaaaaggctcc

SEQ ID NO: 37923 - DNA, 73 bp, Homo sapiens
aaatactgtaccttgactttgacaagtctttttgctgtcttgatcttggcttcacaaaaggctcctctgtatt

SEQ ID NO: 37924 - DNA, 78 bp, Homo sapiens
ccttgactttgacaagtctttttgctgtcttgatcttggcttcacaaaaggctcctctgtatttagcactcacatcag

SEQ ID NO: 37925 - DNA, 80 bp, Homo sapiens
agtctttttgctgtcttgatcttggcttcacaaaaggctcctctgtatttagcactcacatcagtgcccactgtcaaata

SEQ ID NO: 37926 - DNA, 83 bp, Homo sapiens
tgtcttgatcttggcttcacaaaaggctcctctgtatttagcactcacatcagtgcccactgtcaaatagggaggctcatcaa

SEQ ID NO: 37927 - DNA, 80 bp, Homo sapiens
ttggcttcacaaaaggctcctctgtatttagcactcacatcagtgcccactgtcaaatagggaggctcatcaagggccta

SEQ ID NO: 37928 - DNA, 76 bp, Homo sapiens
acaaaaggctcctctgtatttagcactcacatcagtgcccactgtcaaatagggaggctcatcaagggcctaaaaa

SEQ ID NO: 37929 - DNA, 79 bp, Homo sapiens
tctgtatttagcactcacatcagtgcccactgtcaaatagggaggctcatcaagggcctaaaaatgcaaagaaatataa

SEQ ID NO: 37930 - DNA, 77 bp, Homo sapiens
atttagcactcacatcagtgcccactgtcaaatagggaggctcatcaagggcctaaaaatgcaaagaaatataatta

SEQ ID NO: 37931 - DNA, 74 bp, Homo sapiens
acatcagtgcccactgtcaaatagggaggctcatcaagggcctaaaaatgcaaagaaatataattagatttaaa

SEQ ID NO: 37932 - DNA, 69 bp, Homo sapiens
acctcgtcgaaacctcctacttcctgaattcgataaccccagagattcgttttccgcaggcaatcttac

SEQ ID NO: 37933 - DNA, 72 bp, Homo sapiens
aaacctcctacttcctgaattcgataaccccagagattcgttttccgcaggcaatcttaccttcatgatgac

SEQ ID NO: 37934 - DNA, 75 bp, Homo sapiens
tacttcctgaattcgataaccccagagattcgttttccgcaggcaatcttaccttcatgatgactctgggaccaa

SEQ ID NO: 37935 - DNA, 73 bp, Homo sapiens
aattcgataaccccagagattcgttttccgcaggcaatcttaccttcatgatgactctgggaccaaggtatcc

SEQ ID NO: 37936 - DNA, 73 bp, Homo sapiens
agagattcgttttccgcaggcaatcttaccttcatgatgactctgggaccaaggtatcctctaaaacaccagg

SEQ ID NO: 37937 - DNA, 74 bp, Homo sapiens
ttcgttttccgcaggcaatcttaccttcatgatgactctgggaccaaggtatcctctaaaacaccaggttcagc

SEQ ID NO: 37938 - DNA, 75 bp, Homo sapiens
aggcaatcttaccttcatgatgactctgggaccaaggtatcctctaaaacaccaggttcagctgcacctggaggg

SEQ ID NO: 37939 - DNA, 74 bp, Homo sapiens
ttaccttcatgatgactctgggaccaaggtatcctctaaaacaccaggttcagctgcacctggaggggaaacaa

SEQ ID NO: 37940 - DNA, 71 bp, Homo sapiens
atgactctgggaccaaggtatcctctaaaacaccaggttcagctgcacctggaggggaaacaaaagacacc

SEQ ID NO: 37941 - DNA, 71 bp, Homo sapiens
aaggtatcctctaaaacaccaggttcagctgcacctggaggggaaacaaaagacacccagtcaacaccaca

SEQ ID NO: 37942 - DNA, 72 bp, Homo sapiens
atcctctaaaacaccaggttcagctgcacctggaggggaaacaaaagacacccagtcaacaccacaggagcc

SEQ ID NO: 37943 - DNA, 75 bp, Homo sapiens
acaccaggttcagctgcacctggaggggaaacaaaagacacccagtcaacaccacaggagcccctctgcactggc

SEQ ID NO: 37944 - DNA, 68 bp, Homo sapiens
actcggggctccctccggccccgccatccccgcaaacccaaccacctacacagctcggcagcttcccg

SEQ ID NO: 37945 - DNA, 71 bp, Homo sapiens
tccggccccgccatccccgcaaacccaaccacctacacagctcggcagcttcccgtccccattgtcgagac

SEQ ID NO: 37946 - DNA, 70 bp, Homo sapiens
ccatccccgcaaacccaaccacctacacagctcggcagcttcccgtccccattgtcgagacccgacggag

SEQ ID NO: 37947 - DNA, 67 bp, Homo sapiens
aaacccaaccacctacacagctcggcagcttcccgtccccattgtcgagacccgacggagtttcccg

SEQ ID NO: 37948 - DNA, 71 bp, Homo sapiens
acctacacagctcggcagcttcccgtccccattgtcgagacccgacggagtttcccgtctacgacaatgac

SEQ ID NO: 37949 - DNA, 71 bp, Homo sapiens
ctcggcagcttcccgtccccattgtcgagacccgacggagtttcccgtctacgacaatgacgccatttctg

SEQ ID NO: 37950 - DNA, 72 bp, Homo sapiens
agcttcccgtccccattgtcgagacccgacggagtttcccgtctacgacaatgacgccatttctgtcagaga

SEQ ID NO: 37951 - DNA, 73 bp, Homo sapiens
attgtcgagacccgacggagtttcccgtctacgacaatgacgccatttctgtcagagaagaaactcacaacaa

SEQ ID NO: 37952 - DNA, 71 bp, Homo sapiens
agacccgacggagtttcccgtctacgacaatgacgccatttctgtcagagaagaaactcacaacaagcccg

SEQ ID NO: 37953 - DNA, 73 bp, Homo sapiens
agtttcccgtctacgacaatgacgccatttctgtcagagaagaaactcacaacaagcccggcgtccggcgcag

SEQ ID NO: 37954 - DNA, 74 bp, Homo sapiens
cgtctacgacaatgacgccatttctgtcagagaagaaactcacaacaagcccggcgtccggcgcagggccggcc

SEQ ID NO: 37955 - DNA, 74 bp, Homo sapiens
atgacgccatttctgtcagagaagaaactcacaacaagcccggcgtccggcgcagggccggccgctctccccta

SEQ ID NO: 37956 - DNA, 72 bp, Homo sapiens
tttctgtcagagaagaaactcacaacaagcccggcgtccggcgcagggccggccgctctcccctagggcctc

SEQ ID NO: 37957 - DNA, 69 bp, Homo sapiens
agaagaaactcacaacaagcccggcgtccggcgcagggccggccgctctcccctagggcctcggcgccc

SEQ ID NO: 37958 - DNA, 69 bp, Homo sapiens
acaacaagcccggcgtccggcgcagggccggccgctctcccctagggcctcggcgcccggccgagcgaa

SEQ ID NO: 37959 - DNA, 69 bp, Homo sapiens
ccggcgtccggcgcagggccggccgctctcccctagggcctcggcgcccggccgagcgaatccgcgccc

SEQ ID NO: 37960 - DNA, 69 bp, Homo sapiens
agggccggccgctctcccctagggcctcggcgcccggccgagcgaatccgcgcccccacgcgccgcgtc

SEQ ID NO: 37961 - DNA, 71 bp, Homo sapiens
ctctcccctagggcctcggcgcccggccgagcgaatccgcgcccccacgcgccgcgtccgagcgagaggcc

SEQ ID NO: 37962 - DNA, 70 bp, Homo sapiens
ctagggcctcggcgcccggccgagcgaatccgcgcccccacgcgccgcgtccgagcgagaggccggccgg

SEQ ID NO: 37963 - DNA, 69 bp, Homo sapiens
cgcccggccgagcgaatccgcgcccccacgcgccgcgtccgagcgagaggccggccgggggccaccgag

SEQ ID NO: 37964 - DNA, 70 bp, Homo sapiens
cgagcgaatccgcgcccccacgcgccgcgtccgagcgagaggccggccgggggccaccgaggggccagga

SEQ ID NO: 37965 - DNA, 69 bp, Homo sapiens
tccgcgcccccacgcgccgcgtccgagcgagaggccggccgggggccaccgaggggccaggagggcctg

SEQ ID NO: 37966 - DNA, 70 bp, Homo sapiens
gccgcgtccgagcgagaggccggccgggggccaccgaggggccaggagggcctgtgggccgcgggcagga

SEQ ID NO: 37967 - DNA, 68 bp, Homo sapiens
gtccgagcgagaggccggccgggggccaccgaggggccaggagggcctgtgggccgcgggcaggaccg

SEQ ID NO: 37968 - DNA, 67 bp, Homo sapiens
aggccggccgggggccaccgaggggccaggagggcctgtgggccgcgggcaggaccggcccgccaca

SEQ ID NO: 37969 - DNA, 70 bp, Homo sapiens
ccaccgaggggccaggagggcctgtgggccgcgggcaggaccggcccgccacagagcccctgcccacgtc

SEQ ID NO: 37970 - DNA, 69 bp, Homo sapiens
gccaggagggcctgtgggccgcgggcaggaccggcccgccacagagcccctgcccacgtcccgttccgg

SEQ ID NO: 37971 - DNA, 70 bp, Homo sapiens
agggcctgtgggccgcgggcaggaccggcccgccacagagcccctgcccacgtcccgttccgggctcaga

SEQ ID NO: 37972 - DNA, 70 bp, Homo sapiens
gcgggcaggaccggcccgccacagagcccctgcccacgtcccgttccgggctcagacccgacaagtggga

SEQ ID NO: 37973 - DNA, 71 bp, Homo sapiens
accggcccgccacagagcccctgcccacgtcccgttccgggctcagacccgacaagtgggagcgagatcaa

SEQ ID NO: 37974 - DNA, 74 bp, Homo sapiens
ccgccacagagcccctgcccacgtcccgttccgggctcagacccgacaagtgggagcgagatcaacatctggcc

SEQ ID NO: 37975 - DNA, 71 bp, Homo sapiens
cctgcccacgtcccgttccgggctcagacccgacaagtgggagcgagatcaacatctggccccgccgcggg

SEQ ID NO: 37976 - DNA, 70 bp, Homo sapiens
acgtcccgttccgggctcagacccgacaagtgggagcgagatcaacatctggccccgccgcggggacaac

SEQ ID NO: 37977 - DNA, 69 bp, Homo sapiens
acccgacaagtgggagcgagatcaacatctggccccgccgcggggacaacgtgagggccgagggccccg

SEQ ID NO: 37978 - DNA, 65 bp, Homo sapiens
aaaagaacccccttaggagaccacgaaagccccagaaaatatccctaccttcctcggaggcgaga

SEQ ID NO: 37979 - DNA, 72 bp, Homo sapiens
ttaggagaccacgaaagccccagaaaatatccctaccttcctcggaggcgagatctgaccctggcacgtcca

SEQ ID NO: 37980 - DNA, 72 bp, Homo sapiens
agaccacgaaagccccagaaaatatccctaccttcctcggaggcgagatctgaccctggcacgtccagagtc

SEQ ID NO: 37981 - DNA, 71 bp, Homo sapiens
aatatccctaccttcctcggaggcgagatctgaccctggcacgtccagagtcccctctctccttctccccc

SEQ ID NO: 37982 - DNA, 70 bp, Homo sapiens
ccttcctcggaggcgagatctgaccctggcacgtccagagtcccctctctccttctcccccccaaaacca

SEQ ID NO: 37983 - DNA, 70 bp, Homo sapiens
aggcgagatctgaccctggcacgtccagagtcccctctctccttctcccccccaaaaccagcaggcccgg

SEQ ID NO: 37984 - DNA, 70 bp, Homo sapiens
tgaccctggcacgtccagagtcccctctctccttctcccccccaaaaccagcaggcccgggggagagatg

SEQ ID NO: 37985 - DNA, 67 bp, Homo sapiens
acgtccagagtcccctctctccttctcccccccaaaaccagcaggcccgggggagagatggggaaga

SEQ ID NO: 37986 - DNA, 67 bp, Homo sapiens
tctctccttctcccccccaaaaccagcaggcccgggggagagatggggaagaagggcggcgggtcca

SEQ ID NO: 37987 - DNA, 70 bp, Homo sapiens
tctcccccccaaaaccagcaggcccgggggagagatggggaagaagggcggcgggtccagcggctgctga

SEQ ID NO: 37988 - DNA, 72 bp, Homo sapiens
aaaaccagcaggcccgggggagagatggggaagaagggcggcgggtccagcggctgctgaggcagaggctcc

SEQ ID NO: 37989 - DNA, 72 bp, Homo sapiens
aggcccgggggagagatggggaagaagggcggcgggtccagcggctgctgaggcagaggctccggctcctcc

SEQ ID NO: 37990 - DNA, 74 bp, Homo sapiens
agagatggggaagaagggcggcgggtccagcggctgctgaggcagaggctccggctcctcctcctcccgcggcg

SEQ ID NO: 37991 - DNA, 74 bp, Homo sapiens
aagaagggcggcgggtccagcggctgctgaggcagaggctccggctcctcctcctcccgcggcggcgactggta

SEQ ID NO: 37992 - DNA, 73 bp, Homo sapiens
cgggtccagcggctgctgaggcagaggctccggctcctcctcctcccgcggcggcgactggtacctttgtttg

SEQ ID NO: 37993 - DNA, 74 bp, Homo sapiens
gctgctgaggcagaggctccggctcctcctcctcccgcggcggcgactggtacctttgtttggcggccgctcgg

SEQ ID NO: 37994 - DNA, 73 bp, Homo sapiens
tgaggcagaggctccggctcctcctcctcccgcggcggcgactggtacctttgtttggcggccgctcgggctc

SEQ ID NO: 37995 - DNA, 68 bp, Homo sapiens
ggctcctcctcctcccgcggcggcgactggtacctttgtttggcggccgctcgggctccctggttggg

SEQ ID NO: 37996 - DNA, 67 bp, Homo sapiens
tcctcctcccgcggcggcgactggtacctttgtttggcggccgctcgggctccctggttggggggag

SEQ ID NO: 37997 - DNA, 65 bp, Homo sapiens
cggcgactggtacctttgtttggcggccgctcgggctccctggttggggggagggggacgacgaa

SEQ ID NO: 37998 - DNA, 63 bp, Homo sapiens
actggtacctttgtttggcggccgctcgggctccctggttggggggagggggacgacgaaaaa

SEQ ID NO: 37999 - DNA, 62 bp, Homo sapiens
ttgtttggcggccgctcgggctccctggttggggggagggggacgacgaaaaatcccccccg

SEQ ID NO: 38000 - DNA, 61 bp, Homo sapiens
ctcgggctccctggttggggggagggggacgacgaaaaatcccccccggactggaggtccg

SEQ ID NO: 38001 - DNA, 60 bp, Homo sapiens
ctccctggttggggggagggggacgacgaaaaatcccccccggactggaggtccgggccc

SEQ ID NO: 38002 - DNA, 66 bp, Homo sapiens
gagggggacgacgaaaaatcccccccggactggaggtccgggcccccaatcgcgctgccctccaga

SEQ ID NO: 38003 - DNA, 66 bp, Homo sapiens
ggacgacgaaaaatcccccccggactggaggtccgggcccccaatcgcgctgccctccagaggacg

SEQ ID NO: 38004 - DNA, 71 bp, Homo sapiens
ccccccggactggaggtccgggcccccaatcgcgctgccctccagaggacggcggcgatggaccctctgca

SEQ ID NO: 38005 - DNA, 74 bp, Homo sapiens
cggactggaggtccgggcccccaatcgcgctgccctccagaggacggcggcgatggaccctctgcagctccctc

SEQ ID NO: 38006 - DNA, 74 bp, Homo sapiens
gggcccccaatcgcgctgccctccagaggacggcggcgatggaccctctgcagctccctccgggcaaaggtcca

SEQ ID NO: 38007 - DNA, 75 bp, Homo sapiens
ccaatcgcgctgccctccagaggacggcggcgatggaccctctgcagctccctccgggcaaaggtccaggcggtg

SEQ ID NO: 38008 - DNA, 72 bp, Homo sapiens
ccctccagaggacggcggcgatggaccctctgcagctccctccgggcaaaggtccaggcggtggccgtggcg

SEQ ID NO: 38009 - DNA, 74 bp, Homo sapiens
acggcggcgatggaccctctgcagctccctccgggcaaaggtccaggcggtggccgtggcggcggcaagatgaa

SEQ ID NO: 38010 - DNA, 76 bp, Homo sapiens
atggaccctctgcagctccctccgggcaaaggtccaggcggtggccgtggcggcggcaagatgaagctcaagagtc

SEQ ID NO: 38011 - DNA, 73 bp, Homo sapiens
agctccctccgggcaaaggtccaggcggtggccgtggcggcggcaagatgaagctcaagagtctccctccgct

SEQ ID NO: 38012 - DNA, 74 bp, Homo sapiens
gggcaaaggtccaggcggtggccgtggcggcggcaagatgaagctcaagagtctccctccgcttcggcgaccga

SEQ ID NO: 38013 - DNA, 76 bp, Homo sapiens
aggtccaggcggtggccgtggcggcggcaagatgaagctcaagagtctccctccgcttcggcgaccgagctcctca

SEQ ID NO: 38014 - DNA, 75 bp, Homo sapiens
aagctcaagagtctccctccgcttcggcgaccgagctcctcactccggactcgactgacgggcaaacatcgcttc

SEQ ID NO: 38015 - DNA, 72 bp, Homo sapiens
cgcttcggcgaccgagctcctcactccggactcgactgacgggcaaacatcgcttcccccccaccgactcta

SEQ ID NO: 38016 - DNA, 69 bp, Homo sapiens
accgagctcctcactccggactcgactgacgggcaaacatcgcttcccccccaccgactctaggttccc

SEQ ID NO: 38017 - DNA, 67 bp, Homo sapiens
tcactccggactcgactgacgggcaaacatcgcttcccccccaccgactctaggttccccccctttc

SEQ ID NO: 38018 - DNA, 65 bp, Homo sapiens
cggactcgactgacgggcaaacatcgcttcccccccaccgactctaggttccccccctttctccc

SEQ ID NO: 38019 - DNA, 63 bp, Homo sapiens
ggcaaacatcgcttcccccccaccgactctaggttccccccctttctcccctcccctagattt

SEQ ID NO: 38020 - DNA, 61 bp, Homo sapiens
acatcgcttcccccccaccgactctaggttccccccctttctcccctcccctagatttttt

SEQ ID NO: 38021 - DNA, 62 bp, Homo sapiens
gggcgcttttaaaacaccgatctgggttttttaaaaacctcctttgaaaaaataatggcaaa

SEQ ID NO: 38022 - DNA, 61 bp, Homo sapiens
aaaacaccgatctgggttttttaaaaacctcctttgaaaaaataatggcaaactcgacggg

SEQ ID NO: 38023 - DNA, 63 bp, Homo sapiens
atctgggttttttaaaaacctcctttgaaaaaataatggcaaactcgacggggaaggcgcctc

SEQ ID NO: 38024 - DNA, 65 bp, Homo sapiens
tttaaaaacctcctttgaaaaaataatggcaaactcgacggggaaggcgcctccggacgagcgga

SEQ ID NO: 38025 - DNA, 68 bp, Homo sapiens
tgaaaaaataatggcaaactcgacggggaaggcgcctccggacgagcggagaaagggactcgctttcc

SEQ ID NO: 38026 - DNA, 69 bp, Homo sapiens
aataatggcaaactcgacggggaaggcgcctccggacgagcggagaaagggactcgctttcctggacga

SEQ ID NO: 38027 - DNA, 70 bp, Homo sapiens
aactcgacggggaaggcgcctccggacgagcggagaaagggactcgctttcctggacgagctgcggcagt

SEQ ID NO: 38028 - DNA, 75 bp, Homo sapiens
gggaaggcgcctccggacgagcggagaaagggactcgctttcctggacgagctgcggcagttccaccacagcaga

SEQ ID NO: 38029 - DNA, 78 bp, Homo sapiens
tccggacgagcggagaaagggactcgctttcctggacgagctgcggcagttccaccacagcagagggtgagagcagaa

SEQ ID NO: 38030 - DNA, 74 bp, Homo sapiens
cggagaaagggactcgctttcctggacgagctgcggcagttccaccacagcagagggtgagagcagaaccgggg

SEQ ID NO: 38031 - DNA, 75 bp, Homo sapiens
actcgctttcctggacgagctgcggcagttccaccacagcagagggtgagagcagaaccgggggggcagcgccgg

SEQ ID NO: 38032 - DNA, 76 bp, Homo sapiens
tcctggacgagctgcggcagttccaccacagcagagggtgagagcagaaccgggggggcagcgccggggcgagccg

SEQ ID NO: 38033 - DNA, 65 bp, Homo sapiens
ccgggcacggggtcccggctgacaagtgcggggctttttctctcccgcaggtcgccttttaaaaa

SEQ ID NO: 38034 - DNA, 67 bp, Homo sapiens
gtcccggctgacaagtgcggggctttttctctcccgcaggtcgccttttaaaaaaatccctgcggtg

SEQ ID NO: 38035 - DNA, 65 bp, Homo sapiens
acaagtgcggggctttttctctcccgcaggtcgccttttaaaaaaatccctgcggtgggtgggaa

SEQ ID NO: 38036 - DNA, 67 bp, Homo sapiens
ggctttttctctcccgcaggtcgccttttaaaaaaatccctgcggtgggtgggaaggagctggatct

SEQ ID NO: 38037 - DNA, 68 bp, Homo sapiens
tttctctcccgcaggtcgccttttaaaaaaatccctgcggtgggtgggaaggagctggatcttcacgg

SEQ ID NO: 38038 - DNA, 69 bp, Homo sapiens
aggtcgccttttaaaaaaatccctgcggtgggtgggaaggagctggatcttcacggtctctacaccaga

SEQ ID NO: 38039 - DNA, 71 bp, Homo sapiens
aaaaaatccctgcggtgggtgggaaggagctggatcttcacggtctctacaccagagtcactactttaggc

SEQ ID NO: 38040 - DNA, 74 bp, Homo sapiens
tgcggtgggtgggaaggagctggatcttcacggtctctacaccagagtcactactttaggcggattcgcgaagg

SEQ ID NO: 38041 - DNA, 74 bp, Homo sapiens
gggaaggagctggatcttcacggtctctacaccagagtcactactttaggcggattcgcgaaggtgagtggaag

SEQ ID NO: 38042 - DNA, 72 bp, Homo sapiens
tggatcttcacggtctctacaccagagtcactactttaggcggattcgcgaaggtgagtggaagttttaatt

SEQ ID NO: 38043 - DNA, 71 bp, Homo sapiens
cttcacggtctctacaccagagtcactactttaggcggattcgcgaaggtgagtggaagttttaatttgta

SEQ ID NO: 38044 - DNA, 71 bp, Homo sapiens
tctacaccagagtcactactttaggcggattcgcgaaggtgagtggaagttttaatttgtatttccctctc

SEQ ID NO: 38045 - DNA, 73 bp, Homo sapiens
aagattttcttagattgttcacgttcagacaactgtgcctgtgttttaccaggtttctgagaagaatcagtgg

SEQ ID NO: 38046 - DNA, 74 bp, Homo sapiens
tagattgttcacgttcagacaactgtgcctgtgttttaccaggtttctgagaagaatcagtggggagaaattgt

SEQ ID NO: 38047 - DNA, 74 bp, Homo sapiens
tcagacaactgtgcctgtgttttaccaggtttctgagaagaatcagtggggagaaattgttgaagagttcaact

SEQ ID NO: 38048 - DNA, 71 bp, Homo sapiens
aactgtgcctgtgttttaccaggtttctgagaagaatcagtggggagaaattgttgaagagttcaactttc

SEQ ID NO: 38049 - DNA, 69 bp, Homo sapiens
ttttaccaggtttctgagaagaatcagtggggagaaattgttgaagagttcaactttcccagaagttgt

SEQ ID NO: 38050 - DNA, 72 bp, Homo sapiens
ttctgagaagaatcagtggggagaaattgttgaagagttcaactttcccagaagttgttctaacgctgcctt

SEQ ID NO: 38051 - DNA, 70 bp, Homo sapiens
aatcagtggggagaaattgttgaagagttcaactttcccagaagttgttctaacgctgcctttgctttaa

SEQ ID NO: 38052 - DNA, 70 bp, Homo sapiens
gagaaattgttgaagagttcaactttcccagaagttgttctaacgctgcctttgctttaaaacagtatta

SEQ ID NO: 38053 - DNA, 70 bp, Homo sapiens
ttgttgaagagttcaactttcccagaagttgttctaacgctgcctttgctttaaaacagtattacttgcg

SEQ ID NO: 38054 - DNA, 70 bp, Homo sapiens
aactttcccagaagttgttctaacgctgcctttgctttaaaacagtattacttgcggtgagtagtagtga

SEQ ID NO: 38055 - DNA, 71 bp, Homo sapiens
agaagttgttctaacgctgcctttgctttaaaacagtattacttgcggtgagtagtagtgacttttccata

SEQ ID NO: 38056 - DNA, 71 bp, Homo sapiens
taacgctgcctttgctttaaaacagtattacttgcggtgagtagtagtgacttttccatagtatttggaaa

SEQ ID NO: 38057 - DNA, 69 bp, Homo sapiens
tataaatctatttttaaatgtttgctgtgctgtttttctgtttcagttacctagaaaagtacgagaaag

SEQ ID NO: 38058 - DNA, 69 bp, Homo sapiens
tttttaaatgtttgctgtgctgtttttctgtttcagttacctagaaaagtacgagaaagttcatcattt

SEQ ID NO: 38059 - DNA, 70 bp, Homo sapiens
aaatgtttgctgtgctgtttttctgtttcagttacctagaaaagtacgagaaagttcatcattttgggga

SEQ ID NO: 38060 - DNA, 72 bp, Homo sapiens
tgtttttctgtttcagttacctagaaaagtacgagaaagttcatcattttggggaggatgatgatgaggtac

SEQ ID NO: 38061 - DNA, 74 bp, Homo sapiens
tttcagttacctagaaaagtacgagaaagttcatcattttggggaggatgatgatgaggtaccaccaggcaatc

SEQ ID NO: 38062 - DNA, 73 bp, Homo sapiens
gttacctagaaaagtacgagaaagttcatcattttggggaggatgatgatgaggtaccaccaggcaatccaaa

SEQ ID NO: 38063 - DNA, 76 bp, Homo sapiens
aagtacgagaaagttcatcattttggggaggatgatgatgaggtaccaccaggcaatccaaagccacagcttccta

SEQ ID NO: 38064 - DNA, 77 bp, Homo sapiens
aaagttcatcattttggggaggatgatgatgaggtaccaccaggcaatccaaagccacagcttcctattggtgcaat

SEQ ID NO: 38065 - DNA, 78 bp, Homo sapiens
ttttggggaggatgatgatgaggtaccaccaggcaatccaaagccacagcttcctattggtgcaattccatcttccta

SEQ ID NO: 38066 - DNA, 80 bp, Homo sapiens
atgatgatgaggtaccaccaggcaatccaaagccacagcttcctattggtgcaattccatcttcctacaattaccagcaa

SEQ ID NO: 38067 - DNA, 76 bp, Homo sapiens
aggtaccaccaggcaatccaaagccacagcttcctattggtgcaattccatcttcctacaattaccagcaacacag

SEQ ID NO: 38068 - DNA, 75 bp, Homo sapiens
aatccaaagccacagcttcctattggtgcaattccatcttcctacaattaccagcaacacagtgtgtcgggtaaa

SEQ ID NO: 38069 - DNA, 78 bp, Homo sapiens
cacagcttcctattggtgcaattccatcttcctacaattaccagcaacacagtgtgtcgggtaaatatcactgcaaat

SEQ ID NO: 38070 - DNA, 77 bp, Homo sapiens
ttcctattggtgcaattccatcttcctacaattaccagcaacacagtgtgtcgggtaaatatcactgcaaattaaca

SEQ ID NO: 38071 - DNA, 76 bp, Homo sapiens
aattccatcttcctacaattaccagcaacacagtgtgtcgggtaaatatcactgcaaattaacaggatatatgtcc

SEQ ID NO: 38072 - DNA, 72 bp, Homo sapiens
ggtatctgatctttgatatacttaaggtattttttttctttgttagattatctgcgtcaaagttatgggctg

SEQ ID NO: 38073 - DNA, 71 bp, Homo sapiens
ctttgatatacttaaggtattttttttctttgttagattatctgcgtcaaagttatgggctgtccatggac

SEQ ID NO: 38074 - DNA, 69 bp, Homo sapiens
cttaaggtattttttttctttgttagattatctgcgtcaaagttatgggctgtccatggactttaattc

SEQ ID NO: 38075 - DNA, 73 bp, Homo sapiens
tttttttctttgttagattatctgcgtcaaagttatgggctgtccatggactttaattcgccaaatgattata

SEQ ID NO: 38076 - DNA, 74 bp, Homo sapiens
ctttgttagattatctgcgtcaaagttatgggctgtccatggactttaattcgccaaatgattataataaattg

SEQ ID NO: 38077 - DNA, 75 bp, Homo sapiens
attatctgcgtcaaagttatgggctgtccatggactttaattcgccaaatgattataataaattggtgctttcac

SEQ ID NO: 38078 - DNA, 74 bp, Homo sapiens
aaagttatgggctgtccatggactttaattcgccaaatgattataataaattggtgctttcactgttatctgga

SEQ ID NO: 38079 - DNA, 75 bp, Homo sapiens
tgtccatggactttaattcgccaaatgattataataaattggtgctttcactgttatctggactcccaaatgaag

SEQ ID NO: 38080 - DNA, 74 bp, Homo sapiens
atggactttaattcgccaaatgattataataaattggtgctttcactgttatctggactcccaaatgaagtgga

SEQ ID NO: 38081 - DNA, 75 bp, Homo sapiens
attcgccaaatgattataataaattggtgctttcactgttatctggactcccaaatgaagtggactttgctatta

SEQ ID NO: 38082 - DNA, 78 bp, Homo sapiens
ttggtgctttcactgttatctggactcccaaatgaagtggactttgctattaacgtatgcactctcctatcaaatgaa

SEQ ID NO: 38083 - DNA, 79 bp, Homo sapiens
tttcactgttatctggactcccaaatgaagtggactttgctattaacgtatgcactctcctatcaaatgaaagcaagca

SEQ ID NO: 38084 - DNA, 80 bp, Homo sapiens
gactcccaaatgaagtggactttgctattaacgtatgcactctcctatcaaatgaaagcaagcacgtcatgcaacttgaa

SEQ ID NO: 38085 - DNA, 78 bp, Homo sapiens
aaatgaagtggactttgctattaacgtatgcactctcctatcaaatgaaagcaagcacgtcatgcaacttgaaaaaga

SEQ ID NO: 38086 - DNA, 78 bp, Homo sapiens
tggactttgctattaacgtatgcactctcctatcaaatgaaagcaagcacgtcatgcaacttgaaaaagatcctaaaa

SEQ ID NO: 38087 - DNA, 79 bp, Homo sapiens
tattaacgtatgcactctcctatcaaatgaaagcaagcacgtcatgcaacttgaaaaagatcctaaaatcatcacttta

SEQ ID NO: 38088 - DNA, 77 bp, Homo sapiens
actctcctatcaaatgaaagcaagcacgtcatgcaacttgaaaaagatcctaaaatcatcactttactacttgctaa

SEQ ID NO: 38089 - DNA, 77 bp, Homo sapiens
tatcaaatgaaagcaagcacgtcatgcaacttgaaaaagatcctaaaatcatcactttactacttgctaatgccggg

SEQ ID NO: 38090 - DNA, 75 bp, Homo sapiens
aagcaagcacgtcatgcaacttgaaaaagatcctaaaatcatcactttactacttgctaatgccggggtgtttga

SEQ ID NO: 38091 - DNA, 72 bp, Homo sapiens
tgcaacttgaaaaagatcctaaaatcatcactttactacttgctaatgccggggtgtttgacgacagtaagt

SEQ ID NO: 38092 - DNA, 70 bp, Homo sapiens
ttgaaaaagatcctaaaatcatcactttactacttgctaatgccggggtgtttgacgacagtaagtttta

SEQ ID NO: 38093 - DNA, 72 bp, Homo sapiens
aaaatcatcactttactacttgctaatgccggggtgtttgacgacagtaagttttaagctgaatgtattata

SEQ ID NO: 38094 - DNA, 71 bp, Homo sapiens
cactttactacttgctaatgccggggtgtttgacgacagtaagttttaagctgaatgtattatataattct

SEQ ID NO: 38095 - DNA, 69 bp, Homo sapiens
atttatttgttttttagctttaggatccttttccactgtatttggagaagaatggaaagagaagactga

SEQ ID NO: 38096 - DNA, 71 bp, Homo sapiens
tttttagctttaggatccttttccactgtatttggagaagaatggaaagagaagactgatagagacttcgt

SEQ ID NO: 38097 - DNA, 71 bp, Homo sapiens
ttaggatccttttccactgtatttggagaagaatggaaagagaagactgatagagacttcgttaaggtaaa

SEQ ID NO: 38098 - DNA, 70 bp, Homo sapiens
ccttttccactgtatttggagaagaatggaaagagaagactgatagagacttcgttaaggtaaatcattt

SEQ ID NO: 38099 - DNA, 70 bp, Homo sapiens
ctgtatttggagaagaatggaaagagaagactgatagagacttcgttaaggtaaatcattttaattaaaa

SEQ ID NO: 38100 - DNA, 72 bp, Homo sapiens
gaatggaaagagaagactgatagagacttcgttaaggtaaatcattttaattaaaatgttgattcattgagt

SEQ ID NO: 38101 - DNA, 76 bp, Homo sapiens
gaagactgatagagacttcgttaaggtaaatcattttaattaaaatgttgattcattgagttacatgcagctaagc

SEQ ID NO: 38102 - DNA, 74 bp, Homo sapiens
tgactatttctaaagcaatagaatagttgtttcaaatcatggagaattaaataatttatcattacagttttgga

SEQ ID NO: 38103 - DNA, 76 bp, Homo sapiens
gcaatagaatagttgtttcaaatcatggagaattaaataatttatcattacagttttggaaagacatcgttgatga

SEQ ID NO: 38104 - DNA, 74 bp, Homo sapiens
agttgtttcaaatcatggagaattaaataatttatcattacagttttggaaagacatcgttgatgataatgaag

SEQ ID NO: 38105 - DNA, 76 bp, Homo sapiens
aatcatggagaattaaataatttatcattacagttttggaaagacatcgttgatgataatgaagttcgtgacctca

SEQ ID NO: 38106 - DNA, 76 bp, Homo sapiens
gaattaaataatttatcattacagttttggaaagacatcgttgatgataatgaagttcgtgacctcatttctgaca

SEQ ID NO: 38107 - DNA, 76 bp, Homo sapiens
atttatcattacagttttggaaagacatcgttgatgataatgaagttcgtgacctcatttctgacagaaacaagtc

SEQ ID NO: 38108 - DNA, 77 bp, Homo sapiens
attacagttttggaaagacatcgttgatgataatgaagttcgtgacctcatttctgacagaaacaagtctcatggta

SEQ ID NO: 38109 - DNA, 78 bp, Homo sapiens
ttggaaagacatcgttgatgataatgaagttcgtgacctcatttctgacagaaacaagtctcatggtaagttagtgaa

SEQ ID NO: 38110 - DNA, 75 bp, Homo sapiens
gttgatgataatgaagttcgtgacctcatttctgacagaaacaagtctcatggtaagttagtgaaagcaaaattt

SEQ ID NO: 38111 - DNA, 73 bp, Homo sapiens
ataatgaagttcgtgacctcatttctgacagaaacaagtctcatggtaagttagtgaaagcaaaatttttcaa

SEQ ID NO: 38112 - DNA, 71 bp, Homo sapiens
cgtgacctcatttctgacagaaacaagtctcatggtaagttagtgaaagcaaaatttttcaaaacctttga

SEQ ID NO: 38113 - DNA, 69 bp, Homo sapiens
tttctgacagaaacaagtctcatggtaagttagtgaaagcaaaatttttcaaaacctttgaagtattaa

SEQ ID NO: 38114 - DNA, 67 bp, Homo sapiens
caaaatttttcaaaacctttgaagtattaataaatgaaatattaagtgaaatatgtattttctattg

SEQ ID NO: 38115 - DNA, 74 bp, Homo sapiens
tattaataaatgaaatattaagtgaaatatgtattttctattgtagaaggtacatcaggagaatggatttggga

SEQ ID NO: 38116 - DNA, 73 bp, Homo sapiens
tgaaatattaagtgaaatatgtattttctattgtagaaggtacatcaggagaatggatttgggagtctttatt

SEQ ID NO: 38117 - DNA, 74 bp, Homo sapiens
agtgaaatatgtattttctattgtagaaggtacatcaggagaatggatttgggagtctttatttcatccacctc

SEQ ID NO: 38118 - DNA, 73 bp, Homo sapiens
aatatgtattttctattgtagaaggtacatcaggagaatggatttgggagtctttatttcatccacctcgaaa

SEQ ID NO: 38119 - DNA, 75 bp, Homo sapiens
ttctattgtagaaggtacatcaggagaatggatttgggagtctttatttcatccacctcgaaagctgggcattaa

SEQ ID NO: 38120 - DNA, 74 bp, Homo sapiens
aaggtacatcaggagaatggatttgggagtctttatttcatccacctcgaaagctgggcattaacgatattgaa

SEQ ID NO: 38121 - DNA, 73 bp, Homo sapiens
agaatggatttgggagtctttatttcatccacctcgaaagctgggcattaacgatattgaaggacagcgggta

SEQ ID NO: 38122 - DNA, 73 bp, Homo sapiens
tttgggagtctttatttcatccacctcgaaagctgggcattaacgatattgaaggacagcgggtacttcagat

SEQ ID NO: 38123 - DNA, 77 bp, Homo sapiens
tttatttcatccacctcgaaagctgggcattaacgatattgaaggacagcgggtacttcagattgcagtgattttga

SEQ ID NO: 38124 - DNA, 76 bp, Homo sapiens
atccacctcgaaagctgggcattaacgatattgaaggacagcgggtacttcagattgcagtgattttgagaaatct

SEQ ID NO: 38125 - DNA, 74 bp, Homo sapiens
attaacgatattgaaggacagcgggtacttcagattgcagtgattttgagaaatctttcctttgaggagggcaa

SEQ ID NO: 38126 - DNA, 75 bp, Homo sapiens
ttgaaggacagcgggtacttcagattgcagtgattttgagaaatctttcctttgaggagggcaatgttaagctct

SEQ ID NO: 38127 - DNA, 77 bp, Homo sapiens
tacttcagattgcagtgattttgagaaatctttcctttgaggagggcaatgttaagctcttggcagctaatcgtacc

SEQ ID NO: 38128 - DNA, 76 bp, Homo sapiens
attgcagtgattttgagaaatctttcctttgaggagggcaatgttaagctcttggcagctaatcgtacctgtcttc

SEQ ID NO: 38129 - DNA, 73 bp, Homo sapiens
ttgagaaatctttcctttgaggagggcaatgttaagctcttggcagctaatcgtacctgtcttcgtttcctat

SEQ ID NO: 38130 - DNA, 71 bp, Homo sapiens
atctttcctttgaggagggcaatgttaagctcttggcagctaatcgtacctgtcttcgtttcctattactt

SEQ ID NO: 38131 - DNA, 75 bp, Homo sapiens
aggagggcaatgttaagctcttggcagctaatcgtacctgtcttcgtttcctattactttctgcacatagtcatt

SEQ ID NO: 38132 - DNA, 74 bp, Homo sapiens
aatgttaagctcttggcagctaatcgtacctgtcttcgtttcctattactttctgcacatagtcattttatttc

SEQ ID NO: 38133 - DNA, 74 bp, Homo sapiens
tggcagctaatcgtacctgtcttcgtttcctattactttctgcacatagtcattttatttctttaaggcaatta

SEQ ID NO: 38134 - DNA, 70 bp, Homo sapiens
aatcgtacctgtcttcgtttcctattactttctgcacatagtcattttatttctttaaggcaattaggcc

SEQ ID NO: 38135 - DNA, 72 bp, Homo sapiens
cttcgtttcctattactttctgcacatagtcattttatttctttaaggcaattaggccttgacacattagga

SEQ ID NO: 38136 - DNA, 76 bp, Homo sapiens
tcctattactttctgcacatagtcattttatttctttaaggcaattaggccttgacacattaggaaatattgcagc

SEQ ID NO: 38137 - DNA, 76 bp, Homo sapiens
ctttctgcacatagtcattttatttctttaaggcaattaggccttgacacattaggaaatattgcagctgaggtaa

SEQ ID NO: 38138 - DNA, 78 bp, Homo sapiens
tagtcattttatttctttaaggcaattaggccttgacacattaggaaatattgcagctgaggtaagcatgtgactgta

SEQ ID NO: 38139 - DNA, 74 bp, Homo sapiens
tatacaactctggaagaagcatagctcaataatagtgttgtttctttttccagcttttactggaccctgttgat

SEQ ID NO: 38140 - DNA, 71 bp, Homo sapiens
agaagcatagctcaataatagtgttgtttctttttccagcttttactggaccctgttgatttcaaaactac

SEQ ID NO: 38141 - DNA, 74 bp, Homo sapiens
tagctcaataatagtgttgtttctttttccagcttttactggaccctgttgatttcaaaactactcatctgatg

SEQ ID NO: 38142 - DNA, 73 bp, Homo sapiens
tgttgtttctttttccagcttttactggaccctgttgatttcaaaactactcatctgatgtttcatactgtta

SEQ ID NO: 38143 - DNA, 74 bp, Homo sapiens
ttttccagcttttactggaccctgttgatttcaaaactactcatctgatgtttcatactgttacaaaatgtcta

SEQ ID NO: 38144 - DNA, 76 bp, Homo sapiens
cagcttttactggaccctgttgatttcaaaactactcatctgatgtttcatactgttacaaaatgtctaatgtcaa

SEQ ID NO: 38145 - DNA, 76 bp, Homo sapiens
tggaccctgttgatttcaaaactactcatctgatgtttcatactgttacaaaatgtctaatgtcaagggatagatt

SEQ ID NO: 38146 - DNA, 76 bp, Homo sapiens
tcaaaactactcatctgatgtttcatactgttacaaaatgtctaatgtcaagggatagatttttaaagatgagagg

SEQ ID NO: 38147 - DNA, 76 bp, Homo sapiens
actactcatctgatgtttcatactgttacaaaatgtctaatgtcaagggatagatttttaaagatgagaggtgagt

SEQ ID NO: 38148 - DNA, 73 bp, Homo sapiens
gtttcatactgttacaaaatgtctaatgtcaagggatagatttttaaagatgagaggtgagttttcactgaag

SEQ ID NO: 38149 - DNA, 72 bp, Homo sapiens
ctgttacaaaatgtctaatgtcaagggatagatttttaaagatgagaggtgagttttcactgaagtatttac

SEQ ID NO: 38150 - DNA, 71 bp, Homo sapiens
atgtctaatgtcaagggatagatttttaaagatgagaggtgagttttcactgaagtatttactttctaaag

SEQ ID NO: 38151 - DNA, 70 bp, Homo sapiens
gtgagttttcactgaagtatttactttctaaagtaaacaaactatcatttcttagtaatacatatttgta

SEQ ID NO: 38152 - DNA, 74 bp, Homo sapiens
actatcatttcttagtaatacatatttgtatgtttttcaggcatggaaattttgggaaatctttgcaaagcaga

SEQ ID NO: 38153 - DNA, 73 bp, Homo sapiens
gtaatacatatttgtatgtttttcaggcatggaaattttgggaaatctttgcaaagcagaagataatggtgtt

SEQ ID NO: 38154 - DNA, 71 bp, Homo sapiens
tttgtatgtttttcaggcatggaaattttgggaaatctttgcaaagcagaagataatggtgttttaatttg

SEQ ID NO: 38155 - DNA, 76 bp, Homo sapiens
tttcaggcatggaaattttgggaaatctttgcaaagcagaagataatggtgttttaatttgtgaatatgtggatca

SEQ ID NO: 38156 - DNA, 76 bp, Homo sapiens
gcatggaaattttgggaaatctttgcaaagcagaagataatggtgttttaatttgtgaatatgtggatcaggattc

SEQ ID NO: 38157 - DNA, 76 bp, Homo sapiens
ttttgggaaatctttgcaaagcagaagataatggtgttttaatttgtgaatatgtggatcaggattcctacagaga

SEQ ID NO: 38158 - DNA, 82 bp, Homo sapiens
tgcaaagcagaagataatggtgttttaatttgtgaatatgtggatcaggattcctacagagagatcatttgtcatctcactt

SEQ ID NO: 38159 - DNA, 79 bp, Homo sapiens
aagataatggtgttttaatttgtgaatatgtggatcaggattcctacagagagatcatttgtcatctcactttacctga

SEQ ID NO: 38160 - DNA, 82 bp, Homo sapiens
gttttaatttgtgaatatgtggatcaggattcctacagagagatcatttgtcatctcactttacctgatgtgctgcttgtaa

SEQ ID NO: 38161 - DNA, 85 bp, Homo sapiens
aatttgtgaatatgtggatcaggattcctacagagagatcatttgtcatctcactttacctgatgtgctgcttgtaatctcaaca

SEQ ID NO: 38162 - DNA, 87 bp, Homo sapiens
tggatcaggattcctacagagagatcatttgtcatctcactttacctgatgtgctgcttgtaatctcaacactcgaggtgctataca

SEQ ID NO: 38163 - DNA, 85 bp, Homo sapiens
agatcatttgtcatctcactttacctgatgtgctgcttgtaatctcaacactcgaggtgctatacatgctcacggaaatgggaga

SEQ ID NO: 38164 - DNA, 83 bp, Homo sapiens
atttgtcatctcactttacctgatgtgctgcttgtaatctcaacactcgaggtgctatacatgctcacggaaatgggagatgt

SEQ ID NO: 38165 - DNA, 83 bp, Homo sapiens
tttacctgatgtgctgcttgtaatctcaacactcgaggtgctatacatgctcacggaaatgggagatgttgcttgcacaaaaa

SEQ ID NO: 38166 - DNA, 83 bp, Homo sapiens
atgtgctgcttgtaatctcaacactcgaggtgctatacatgctcacggaaatgggagatgttgcttgcacaaaaattgcaaaa

SEQ ID NO: 38167 - DNA, 79 bp, Homo sapiens
taatctcaacactcgaggtgctatacatgctcacggaaatgggagatgttgcttgcacaaaaattgcaaaagtagaaaa

SEQ ID NO: 38168 - DNA, 79 bp, Homo sapiens
aacactcgaggtgctatacatgctcacggaaatgggagatgttgcttgcacaaaaattgcaaaagtagaaaagagcata

SEQ ID NO: 38169 - DNA, 78 bp, Homo sapiens
ctatacatgctcacggaaatgggagatgttgcttgcacaaaaattgcaaaagtagaaaagagcataggtaagactgga

SEQ ID NO: 38170 - DNA, 74 bp, Homo sapiens
tcacggaaatgggagatgttgcttgcacaaaaattgcaaaagtagaaaagagcataggtaagactggaccaaaa

SEQ ID NO: 38171 - DNA, 72 bp, Homo sapiens
ggagatgttgcttgcacaaaaattgcaaaagtagaaaagagcataggtaagactggaccaaaaaacacttat

SEQ ID NO: 38172 - DNA, 70 bp, Homo sapiens
gttgcttgcacaaaaattgcaaaagtagaaaagagcataggtaagactggaccaaaaaacacttattttc

SEQ ID NO: 38173 - DNA, 78 bp, Homo sapiens
tttttatttattttagacatgttagtgtgtctggtttctatggatattcagatgtttggccctgatgcactagctgcg

SEQ ID NO: 38174 - DNA, 79 bp, Homo sapiens
ttttagacatgttagtgtgtctggtttctatggatattcagatgtttggccctgatgcactagctgcggtaaaactcat

SEQ ID NO: 38175 - DNA, 80 bp, Homo sapiens
acatgttagtgtgtctggtttctatggatattcagatgtttggccctgatgcactagctgcggtaaaactcattgaacac

SEQ ID NO: 38176 - DNA, 79 bp, Homo sapiens
tgtctggtttctatggatattcagatgtttggccctgatgcactagctgcggtaaaactcattgaacacccaagttcca

SEQ ID NO: 38177 - DNA, 80 bp, Homo sapiens
tggatattcagatgtttggccctgatgcactagctgcggtaaaactcattgaacacccaagttccagtcatcaaatgtta

SEQ ID NO: 38178 - DNA, 80 bp, Homo sapiens
attcagatgtttggccctgatgcactagctgcggtaaaactcattgaacacccaagttccagtcatcaaatgttatctga

SEQ ID NO: 38179 - DNA, 78 bp, Homo sapiens
cctgatgcactagctgcggtaaaactcattgaacacccaagttccagtcatcaaatgttatctgaaattaggccacaa

SEQ ID NO: 38180 - DNA, 76 bp, Homo sapiens
actagctgcggtaaaactcattgaacacccaagttccagtcatcaaatgttatctgaaattaggccacaagctata

SEQ ID NO: 38181 - DNA, 76 bp, Homo sapiens
aaaactcattgaacacccaagttccagtcatcaaatgttatctgaaattaggccacaagctatagagcaagtccaa

SEQ ID NO: 38182 - DNA, 76 bp, Homo sapiens
attgaacacccaagttccagtcatcaaatgttatctgaaattaggccacaagctatagagcaagtccaaacccaga

SEQ ID NO: 38183 - DNA, 81 bp, Homo sapiens
aagttccagtcatcaaatgttatctgaaattaggccacaagctatagagcaagtccaaacccagactcatgtagcatctgc

SEQ ID NO: 38184 - DNA, 79 bp, Homo sapiens
atcaaatgttatctgaaattaggccacaagctatagagcaagtccaaacccagactcatgtagcatctgccccaggtta

SEQ ID NO: 38185 - DNA, 77 bp, Homo sapiens
ttatctgaaattaggccacaagctatagagcaagtccaaacccagactcatgtagcatctgccccaggttagtgttt

SEQ ID NO: 38186 - DNA, 77 bp, Homo sapiens
aattaggccacaagctatagagcaagtccaaacccagactcatgtagcatctgccccaggttagtgttttcacatat

SEQ ID NO: 38187 - DNA, 76 bp, Homo sapiens
aagctatagagcaagtccaaacccagactcatgtagcatctgccccaggttagtgttttcacatattctttttcag

SEQ ID NO: 38188 - DNA, 73 bp, Homo sapiens
aagtccaaacccagactcatgtagcatctgccccaggttagtgttttcacatattctttttcagtgtggttac

SEQ ID NO: 38189 - DNA, 75 bp, Homo sapiens
agactcatgtagcatctgccccaggttagtgttttcacatattctttttcagtgtggttacgagtgtataagatt

SEQ ID NO: 38190 - DNA, 75 bp, Homo sapiens
tagcatctgccccaggttagtgttttcacatattctttttcagtgtggttacgagtgtataagatttgatcctaa

SEQ ID NO: 38191 - DNA, 71 bp, Homo sapiens
cccaggttagtgttttcacatattctttttcagtgtggttacgagtgtataagatttgatcctaagaataa

SEQ ID NO: 38192 - DNA, 74 bp, Homo sapiens
gttttcacatattctttttcagtgtggttacgagtgtataagatttgatcctaagaataaatttcaatgtgcag

SEQ ID NO: 38193 - DNA, 74 bp, Homo sapiens
attctttttcagtgtggttacgagtgtataagatttgatcctaagaataaatttcaatgtgcagtatagagaac

SEQ ID NO: 38194 - DNA, 77 bp, Homo sapiens
cagtgtggttacgagtgtataagatttgatcctaagaataaatttcaatgtgcagtatagagaactgatattttaca

SEQ ID NO: 38195 - DNA, 77 bp, Homo sapiens
cgagtgtataagatttgatcctaagaataaatttcaatgtgcagtatagagaactgatattttacagtatagtaggc

SEQ ID NO: 38196 - DNA, 76 bp, Homo sapiens
agatttgatcctaagaataaatttcaatgtgcagtatagagaactgatattttacagtatagtaggccaaagtgga

SEQ ID NO: 38197 - DNA, 74 bp, Homo sapiens
cctaagaataaatttcaatgtgcagtatagagaactgatattttacagtatagtaggccaaagtggaatttgga

SEQ ID NO: 38198 - DNA, 76 bp, Homo sapiens
gtgcagtatagagaactgatattttacagtatagtaggccaaagtggaatttggatatgtactctaatttcttaga

SEQ ID NO: 38199 - DNA, 75 bp, Homo sapiens
gagaactgatattttacagtatagtaggccaaagtggaatttggatatgtactctaatttcttagatattataca

SEQ ID NO: 38200 - DNA, 73 bp, Homo sapiens
ttttacagtatagtaggccaaagtggaatttggatatgtactctaatttcttagatattatacattccaggag

SEQ ID NO: 38201 - DNA, 76 bp, Homo sapiens
atagtaggccaaagtggaatttggatatgtactctaatttcttagatattatacattccaggagtagcaggatcaa

SEQ ID NO: 38202 - DNA, 78 bp, Homo sapiens
aaagtggaatttggatatgtactctaatttcttagatattatacattccaggagtagcaggatcaaggtgagctcata

SEQ ID NO: 38203 - DNA, 79 bp, Homo sapiens
atttggatatgtactctaatttcttagatattatacattccaggagtagcaggatcaaggtgagctcataggaagaata

SEQ ID NO: 38204 - DNA, 78 bp, Homo sapiens
tctaatttcttagatattatacattccaggagtagcaggatcaaggtgagctcataggaagaatagtataataggaaa

SEQ ID NO: 38205 - DNA, 76 bp, Homo sapiens
cttagatattatacattccaggagtagcaggatcaaggtgagctcataggaagaatagtataataggaaaattaag

SEQ ID NO: 38206 - DNA, 76 bp, Homo sapiens
attatacattccaggagtagcaggatcaaggtgagctcataggaagaatagtataataggaaaattaagttcggca

SEQ ID NO: 38207 - DNA, 74 bp, Homo sapiens
agtagcaggatcaaggtgagctcataggaagaatagtataataggaaaattaagttcggcaggatttagagtaa

SEQ ID NO: 38208 - DNA, 76 bp, Homo sapiens
gatcaaggtgagctcataggaagaatagtataataggaaaattaagttcggcaggatttagagtaatgtgatgaat

SEQ ID NO: 38209 - DNA, 76 bp, Homo sapiens
gtgagctcataggaagaatagtataataggaaaattaagttcggcaggatttagagtaatgtgatgaattagatat

SEQ ID NO: 38210 - DNA, 74 bp, Homo sapiens
agaatagtataataggaaaattaagttcggcaggatttagagtaatgtgatgaattagatattcataattacga

SEQ ID NO: 38211 - DNA, 76 bp, Homo sapiens
ataggaaaattaagttcggcaggatttagagtaatgtgatgaattagatattcataattacgatagctataagtgc

SEQ ID NO: 38212 - DNA, 79 bp, Homo sapiens
taagttcggcaggatttagagtaatgtgatgaattagatattcataattacgatagctataagtgccccaataggcata

SEQ ID NO: 38213 - DNA, 78 bp, Homo sapiens
cggcaggatttagagtaatgtgatgaattagatattcataattacgatagctataagtgccccaataggcatattatt

SEQ ID NO: 38214 - DNA, 80 bp, Homo sapiens
gtaatgtgatgaattagatattcataattacgatagctataagtgccccaataggcatattatttgtgattttggtcatg

SEQ ID NO: 38215 - DNA, 79 bp, Homo sapiens
gtgatgaattagatattcataattacgatagctataagtgccccaataggcatattatttgtgattttggtcatgggaa

SEQ ID NO: 38216 - DNA, 77 bp, Homo sapiens
aattacgatagctataagtgccccaataggcatattatttgtgattttggtcatgggaaattgacatgccaggaata

SEQ ID NO: 38217 - DNA, 77 bp, Homo sapiens
cccaataggcatattatttgtgattttggtcatgggaaattgacatgccaggaatagattattcatatattacctta

SEQ ID NO: 38218 - DNA, 80 bp, Homo sapiens
attttggtcatgggaaattgacatgccaggaatagattattcatatattaccttatgattttctcaggtgatcatcagga

SEQ ID NO: 38219 - DNA, 80 bp, Homo sapiens
ggaaattgacatgccaggaatagattattcatatattaccttatgattttctcaggtgatcatcaggacgcgtaagtata

SEQ ID NO: 38220 - DNA, 78 bp, Homo sapiens
gaatagattattcatatattaccttatgattttctcaggtgatcatcaggacgcgtaagtataatacttctaatgtcc

SEQ ID NO: 38221 - DNA, 76 bp, Homo sapiens
catatattaccttatgattttctcaggtgatcatcaggacgcgtaagtataatacttctaatgtccttaagtgttg

SEQ ID NO: 38222 - DNA, 75 bp, Homo sapiens
ttatgattttctcaggtgatcatcaggacgcgtaagtataatacttctaatgtccttaagtgttggaaccaacac

SEQ ID NO: 38223 - DNA, 74 bp, Homo sapiens
attttctcaggtgatcatcaggacgcgtaagtataatacttctaatgtccttaagtgttggaaccaacaccaca

SEQ ID NO: 38224 - DNA, 72 bp, Homo sapiens
acgcgtaagtataatacttctaatgtccttaagtgttggaaccaacaccacagaatcaacagcctaggagaa

SEQ ID NO: 38225 - DNA, 85 bp, Homo sapiens
acacatgcacatatgtatacacacacttacaagcatgtatacctgcatttatgcacctttcctagtgtctcttagctcaattctg

SEQ ID NO: 38226 - DNA, 81 bp, Homo sapiens
atatgtatacacacacttacaagcatgtatacctgcatttatgcacctttcctagtgtctcttagctcaattctgtttagc

SEQ ID NO: 38227 - DNA, 80 bp, Homo sapiens
acacacttacaagcatgtatacctgcatttatgcacctttcctagtgtctcttagctcaattctgtttagctcaactgta

SEQ ID NO: 38228 - DNA, 80 bp, Homo sapiens
tatacctgcatttatgcacctttcctagtgtctcttagctcaattctgtttagctcaactgtaattatagtacagacatg

SEQ ID NO: 38229 - DNA, 78 bp, Homo sapiens
tttcctagtgtctcttagctcaattctgtttagctcaactgtaattatagtacagacatgtctaataaccagacttca

SEQ ID NO: 38230 - DNA, 78 bp, Homo sapiens
tcttagctcaattctgtttagctcaactgtaattatagtacagacatgtctaataaccagacttcagtccttgaactc

SEQ ID NO: 38231 - DNA, 75 bp, Homo sapiens
aattctgtttagctcaactgtaattatagtacagacatgtctaataaccagacttcagtccttgaactccttcca

SEQ ID NO: 38232 - DNA, 78 bp, Homo sapiens
ttagctcaactgtaattatagtacagacatgtctaataaccagacttcagtccttgaactccttccactggctcatta

SEQ ID NO: 38233 - DNA, 78 bp, Homo sapiens
aattatagtacagacatgtctaataaccagacttcagtccttgaactccttccactggctcattatgagtcatcattt

SEQ ID NO: 38234 - DNA, 78 bp, Homo sapiens
tacagacatgtctaataaccagacttcagtccttgaactccttccactggctcattatgagtcatcattttttatatt

SEQ ID NO: 38235 - DNA, 76 bp, Homo sapiens
tgtctaataaccagacttcagtccttgaactccttccactggctcattatgagtcatcattttttatattttacca

SEQ ID NO: 38236 - DNA, 72 bp, Homo sapiens
agacttcagtccttgaactccttccactggctcattatgagtcatcattttttatattttaccacccttaac

SEQ ID NO: 38237 - DNA, 69 bp, Homo sapiens
gtccttgaactccttccactggctcattatgagtcatcattttttatattttaccacccttaacctttt

SEQ ID NO: 38238 - DNA, 70 bp, Homo sapiens
tccttccactggctcattatgagtcatcattttttatattttaccacccttaacctttttttggagtgct

SEQ ID NO: 38239 - DNA, 69 bp, Homo sapiens
ggctcattatgagtcatcattttttatattttaccacccttaacctttttttggagtgctttctctacc

SEQ ID NO: 38240 - DNA, 65 bp, Homo sapiens
gagtcatcattttttatattttaccacccttaacctttttttggagtgctttctctaccttggtt

SEQ ID NO: 38241 - DNA, 66 bp, Homo sapiens
ccacccttaacctttttttggagtgctttctctaccttggtttatactaaaaatacatatttcatc

SEQ ID NO: 38242 - DNA, 69 bp, Homo sapiens
tttttttggagtgctttctctaccttggtttatactaaaaatacatatttcatctcacctacccttcca

SEQ ID NO: 38243 - DNA, 70 bp, Homo sapiens
agtgctttctctaccttggtttatactaaaaatacatatttcatctcacctacccttccatttcctatcc

SEQ ID NO: 38244 - DNA, 71 bp, Homo sapiens
ttctctaccttggtttatactaaaaatacatatttcatctcacctacccttccatttcctatcctctcacc

SEQ ID NO: 38245 - DNA, 71 bp, Homo sapiens
tcacctacccttccatttcctatcctctcacctcctgctgtccccaagacacttaatctttctttatattt

SEQ ID NO: 38246 - DNA, 72 bp, Homo sapiens
ttccatttcctatcctctcacctcctgctgtccccaagacacttaatctttctttatattttttgaatggag

SEQ ID NO: 38247 - DNA, 75 bp, Homo sapiens
tatcctctcacctcctgctgtccccaagacacttaatctttctttatattttttgaatggaggatgctcgtgttc

SEQ ID NO: 38248 - DNA, 75 bp, Homo sapiens
ctcctgctgtccccaagacacttaatctttctttatattttttgaatggaggatgctcgtgttctcaattgatct

SEQ ID NO: 38249 - DNA, 74 bp, Homo sapiens
gctgtccccaagacacttaatctttctttatattttttgaatggaggatgctcgtgttctcaattgatcttaat

SEQ ID NO: 38250 - DNA, 76 bp, Homo sapiens
agacacttaatctttctttatattttttgaatggaggatgctcgtgttctcaattgatcttaattctcactttgca

SEQ ID NO: 38251 - DNA, 80 bp, Homo sapiens
ttttgaatggaggatgctcgtgttctcaattgatcttaattctcactttgcaattaatacagaggctgtgtagaatgaat

SEQ ID NO: 38252 - DNA, 80 bp, Homo sapiens
tttgaatggaggatgctcgtgttctcaattgatcttaattctcactttgcaattaatacagaggctgtgtagaatgaatt

SEQ ID NO: 38253 - DNA, 79 bp, Homo sapiens
aggatgctcgtgttctcaattgatcttaattctcactttgcaattaatacagaggctgtgtagaatgaatttcttcaat

SEQ ID NO: 38254 - DNA, 79 bp, Homo sapiens
ggatgctcgtgttctcaattgatcttaattctcactttgcaattaatacagaggctgtgtagaatgaatttcttcaatt

SEQ ID NO: 38255 - DNA, 75 bp, Homo sapiens
ctcaattgatcttaattctcactttgcaattaatacagaggctgtgtagaatgaatttcttcaattttttactcc

SEQ ID NO: 38256 - DNA, 75 bp, Homo sapiens
ttgatcttaattctcactttgcaattaatacagaggctgtgtagaatgaatttcttcaattttttactccttcag

SEQ ID NO: 38257 - DNA, 74 bp, Homo sapiens
gatcttaattctcactttgcaattaatacagaggctgtgtagaatgaatttcttcaattttttactccttcagt

SEQ ID NO: 38258 - DNA, 72 bp, Homo sapiens
ctcactttgcaattaatacagaggctgtgtagaatgaatttcttcaattttttactccttcagttacaaact

SEQ ID NO: 38259 - DNA, 75 bp, Homo sapiens
tgcaattaatacagaggctgtgtagaatgaatttcttcaattttttactccttcagttacaaacttattagcatc

SEQ ID NO: 38260 - DNA, 73 bp, Homo sapiens
gctgtgtagaatgaatttcttcaattttttactccttcagttacaaacttattagcatctggactcattttcc

SEQ ID NO: 38261 - DNA, 75 bp, Homo sapiens
tcaattttttactccttcagttacaaacttattagcatctggactcattttcctttagcttctgctcatttcaga

SEQ ID NO: 38262 - DNA, 77 bp, Homo sapiens
tccttcagttacaaacttattagcatctggactcattttcctttagcttctgctcatttcagaaagagatgctaatt

SEQ ID NO: 38263 - DNA, 76 bp, Homo sapiens
agttacaaacttattagcatctggactcattttcctttagcttctgctcatttcagaaagagatgctaatttcttc

SEQ ID NO: 38264 - DNA, 77 bp, Homo sapiens
actcattttcctttagcttctgctcatttcagaaagagatgctaatttcttctgaaacttactctgaatatcagtct

SEQ ID NO: 38265 - DNA, 76 bp, Homo sapiens
ttttcctttagcttctgctcatttcagaaagagatgctaatttcttctgaaacttactctgaatatcagtctttcc

SEQ ID NO: 38266 - DNA, 81 bp, Homo sapiens
tgctcatttcagaaagagatgctaatttcttctgaaacttactctgaatatcagtctttcccatctccatgttcccatatc

SEQ ID NO: 38267 - DNA, 76 bp, Homo sapiens
agaaagagatgctaatttcttctgaaacttactctgaatatcagtctttcccatctccatgttcccatatcttaaa

SEQ ID NO: 38268 - DNA, 75 bp, Homo sapiens
tctgaaacttactctgaatatcagtctttcccatctccatgttcccatatcttaaatctctttttatttactcac

SEQ ID NO: 38269 - DNA, 73 bp, Homo sapiens
tactctgaatatcagtctttcccatctccatgttcccatatcttaaatctctttttatttactcactttttcc

SEQ ID NO: 38270 - DNA, 71 bp, Homo sapiens
cccatctccatgttcccatatcttaaatctctttttatttactcactttttcctttcagctagaaatgcgt

SEQ ID NO: 38271 - DNA, 69 bp, Homo sapiens
gttcccatatcttaaatctctttttatttactcactttttcctttcagctagaaatgcgtttaggtctc

SEQ ID NO: 38272 - DNA, 68 bp, Homo sapiens
cttaaatctctttttatttactcactttttcctttcagctagaaatgcgtttaggtctcttatcctcc

SEQ ID NO: 38273 - DNA, 70 bp, Homo sapiens
atctctttttatttactcactttttcctttcagctagaaatgcgtttaggtctcttatcctccctcgcta

SEQ ID NO: 38274 - DNA, 69 bp, Homo sapiens
atttactcactttttcctttcagctagaaatgcgtttaggtctcttatcctccctcgctagccccaaac

SEQ ID NO: 38275 - DNA, 67 bp, Homo sapiens
tttttcctttcagctagaaatgcgtttaggtctcttatcctccctcgctagccccaaaccaaaaatt

SEQ ID NO: 38276 - DNA, 69 bp, Homo sapiens
tagaaatgcgtttaggtctcttatcctccctcgctagccccaaaccaaaaatttcattatccttaatct

SEQ ID NO: 38277 - DNA, 76 bp, Homo sapiens
tcttatcctccctcgctagccccaaaccaaaaatttcattatccttaatctttagccatcacatccattcatcaga

SEQ ID NO: 38278 - DNA, 77 bp, Homo sapiens
tcgctagccccaaaccaaaaatttcattatccttaatctttagccatcacatccattcatcagatcttgttgagtct

SEQ ID NO: 38279 - DNA, 75 bp, Homo sapiens
cccaaaccaaaaatttcattatccttaatctttagccatcacatccattcatcagatcttgttgagtcttcctaa

SEQ ID NO: 38280 - DNA, 76 bp, Homo sapiens
aaaaatttcattatccttaatctttagccatcacatccattcatcagatcttgttgagtcttcctaaatacctggc

SEQ ID NO: 38281 - DNA, 82 bp, Homo sapiens
tttagccatcacatccattcatcagatcttgttgagtcttcctaaatacctggccttttcaattgccaatgcttatgaatga

SEQ ID NO: 38282 - DNA, 80 bp, Homo sapiens
atccattcatcagatcttgttgagtcttcctaaatacctggccttttcaattgccaatgcttatgaatgagattgaactc

SEQ ID NO: 38283 - DNA, 81 bp, Homo sapiens
agatcttgttgagtcttcctaaatacctggccttttcaattgccaatgcttatgaatgagattgaactctcatcatctcta

SEQ ID NO: 38284 - DNA, 82 bp, Homo sapiens
ttgagtcttcctaaatacctggccttttcaattgccaatgcttatgaatgagattgaactctcatcatctctagctatctgt

SEQ ID NO: 38285 - DNA, 83 bp, Homo sapiens
taaatacctggccttttcaattgccaatgcttatgaatgagattgaactctcatcatctctagctatctgttctcacgttcat

SEQ ID NO: 38286 - DNA, 84 bp, Homo sapiens
ccttttcaattgccaatgcttatgaatgagattgaactctcatcatctctagctatctgttctcacgttcattcatggtcccaa

SEQ ID NO: 38287 - DNA, 84 bp, Homo sapiens
aattgccaatgcttatgaatgagattgaactctcatcatctctagctatctgttctcacgttcattcatggtcccaatttgtct

SEQ ID NO: 38288 - DNA, 83 bp, Homo sapiens
tatgaatgagattgaactctcatcatctctagctatctgttctcacgttcattcatggtcccaatttgtcttctactccaact

SEQ ID NO: 38289 - DNA, 80 bp, Homo sapiens
attgaactctcatcatctctagctatctgttctcacgttcattcatggtcccaatttgtcttctactccaacttgtagta

SEQ ID NO: 38290 - DNA, 80 bp, Homo sapiens
tcatcatctctagctatctgttctcacgttcattcatggtcccaatttgtcttctactccaacttgtagtatgaaaatta

SEQ ID NO: 38291 - DNA, 78 bp, Homo sapiens
tctctagctatctgttctcacgttcattcatggtcccaatttgtcttctactccaacttgtagtatgaaaattatgta

SEQ ID NO: 38292 - DNA, 75 bp, Homo sapiens
ggtcccaatttgtcttctactccaacttgtagtatgaaaattatgtactctatgcaaagtatgtaataagtatca

SEQ ID NO: 38293 - DNA, 80 bp, Homo sapiens
tgaaaattatgtactctatgcaaagtatgtaataagtatcacatatttcattgatttccattatgtccttctgaagtgta

SEQ ID NO: 38294 - DNA, 82 bp, Homo sapiens
gcaaagtatgtaataagtatcacatatttcattgatttccattatgtccttctgaagtgtatagatttgtgtcatatgttca

SEQ ID NO: 38295 - DNA, 82 bp, Homo sapiens
tgtaataagtatcacatatttcattgatttccattatgtccttctgaagtgtatagatttgtgtcatatgttcactcaacta

SEQ ID NO: 38296 - DNA, 82 bp, Homo sapiens
tcacatatttcattgatttccattatgtccttctgaagtgtatagatttgtgtcatatgttcactcaactaacttggatcca

SEQ ID NO: 38297 - DNA, 78 bp, Homo sapiens
ttgatttccattatgtccttctgaagtgtatagatttgtgtcatatgttcactcaactaacttggatccacctaacaa

SEQ ID NO: 38298 - DNA, 76 bp, Homo sapiens
attatgtccttctgaagtgtatagatttgtgtcatatgttcactcaactaacttggatccacctaacaaaagtgga

SEQ ID NO: 38299 - DNA, 76 bp, Homo sapiens
ttctgaagtgtatagatttgtgtcatatgttcactcaactaacttggatccacctaacaaaagtggacaaataaca

SEQ ID NO: 38300 - DNA, 76 bp, Homo sapiens
tatagatttgtgtcatatgttcactcaactaacttggatccacctaacaaaagtggacaaataacagaaggcacaa

SEQ ID NO: 38301 - DNA, 75 bp, Homo sapiens
tgtcatatgttcactcaactaacttggatccacctaacaaaagtggacaaataacagaaggcacaaaatagataa

SEQ ID NO: 38302 - DNA, 70 bp, Homo sapiens
gttcactcaactaacttggatccacctaacaaaagtggacaaataacagaaggcacaaaatagataattt

SEQ ID NO: 38303 - DNA, 73 bp, Homo sapiens
taacttggatccacctaacaaaagtggacaaataacagaaggcacaaaatagataattttgactgccagtcta

SEQ ID NO: 38304 - DNA, 75 bp, Homo sapiens
aaagtggacaaataacagaaggcacaaaatagataattttgactgccagtctattcaatgagctttcaactacag

SEQ ID NO: 38305 - DNA, 77 bp, Homo sapiens
caaataacagaaggcacaaaatagataattttgactgccagtctattcaatgagctttcaactacaggtaatagatg

SEQ ID NO: 38306 - DNA, 76 bp, Homo sapiens
cacaaaatagataattttgactgccagtctattcaatgagctttcaactacaggtaatagatgttaaacagccgat

SEQ ID NO: 38307 - DNA, 74 bp, Homo sapiens
actgccagtctattcaatgagctttcaactacaggtaatagatgttaaacagccgatttatattggggaatctt

SEQ ID NO: 38308 - DNA, 72 bp, Homo sapiens
gctttcaactacaggtaatagatgttaaacagccgatttatattggggaatctttggtcagaatattaatgg

SEQ ID NO: 38309 - DNA, 71 bp, Homo sapiens
caggtaatagatgttaaacagccgatttatattggggaatctttggtcagaatattaatggtttctcaacc

SEQ ID NO: 38310 - DNA, 72 bp, Homo sapiens
gatgttaaacagccgatttatattggggaatctttggtcagaatattaatggtttctcaaccttgagaaaga

SEQ ID NO: 38311 - DNA, 71 bp, Homo sapiens
aacagccgatttatattggggaatctttggtcagaatattaatggtttctcaaccttgagaaagaaatgaa

SEQ ID NO: 38312 - DNA, 73 bp, Homo sapiens
tttggtcagaatattaatggtttctcaaccttgagaaagaaatgaaactgttcatattgctagttaagtggga

SEQ ID NO: 38313 - DNA, 71 bp, Homo sapiens
agaatattaatggtttctcaaccttgagaaagaaatgaaactgttcatattgctagttaagtgggaggtgg

SEQ ID NO: 38314 - DNA, 69 bp, Homo sapiens
gtttctcaaccttgagaaagaaatgaaactgttcatattgctagttaagtgggaggtgggaatgttttt

SEQ ID NO: 38315 - DNA, 71 bp, Homo sapiens
cttgagaaagaaatgaaactgttcatattgctagttaagtgggaggtgggaatgttttttaccatcaaaga

SEQ ID NO: 38316 - DNA, 69 bp, Homo sapiens
agaaatgaaactgttcatattgctagttaagtgggaggtgggaatgttttttaccatcaaagaagaaac

SEQ ID NO: 38317 - DNA, 68 bp, Homo sapiens
aactgttcatattgctagttaagtgggaggtgggaatgttttttaccatcaaagaagaaactaaagat

SEQ ID NO: 38318 - DNA, 67 bp, Homo sapiens
gctagttaagtgggaggtgggaatgttttttaccatcaaagaagaaactaaagattaaattaattga

SEQ ID NO: 38319 - DNA, 67 bp, Homo sapiens
gtgggaggtgggaatgttttttaccatcaaagaagaaactaaagattaaattaattgagggacataa

SEQ ID NO: 38320 - DNA, 69 bp, Homo sapiens
tgggaatgttttttaccatcaaagaagaaactaaagattaaattaattgagggacataaaggagcagtg

SEQ ID NO: 38321 - DNA, 71 bp, Homo sapiens
tttaccatcaaagaagaaactaaagattaaattaattgagggacataaaggagcagtgttagagaaattga

SEQ ID NO: 38322 - DNA, 73 bp, Homo sapiens
gaagaaactaaagattaaattaattgagggacataaaggagcagtgttagagaaattgataaaatgtcagtga

SEQ ID NO: 38323 - DNA, 75 bp, Homo sapiens
gattaaattaattgagggacataaaggagcagtgttagagaaattgataaaatgtcagtgaatactcaagggtga

SEQ ID NO: 38324 - DNA, 78 bp, Homo sapiens
cagtgttagagaaattgataaaatgtcagtgaatactcaagggtgatttgatgaagactattttttgctgcatggtta

SEQ ID NO: 38325 - DNA, 77 bp, Homo sapiens
ataaaatgtcagtgaatactcaagggtgatttgatgaagactattttttgctgcatggttagcctttgaccttcaca

SEQ ID NO: 38326 - DNA, 75 bp, Homo sapiens
aagggtgatttgatgaagactattttttgctgcatggttagcctttgaccttcacagttcttttgacctcagcaa

SEQ ID NO: 38327 - DNA, 76 bp, Homo sapiens
tttgatgaagactattttttgctgcatggttagcctttgaccttcacagttcttttgacctcagcaaatgaaccta

SEQ ID NO: 38328 - DNA, 75 bp, Homo sapiens
tttttgctgcatggttagcctttgaccttcacagttcttttgacctcagcaaatgaacctacttctcaatctaaa

SEQ ID NO: 38329 - DNA, 71 bp, Homo sapiens
atggttagcctttgaccttcacagttcttttgacctcagcaaatgaacctacttctcaatctaaaatttgg

SEQ ID NO: 38330 - DNA, 74 bp, Homo sapiens
acagttcttttgacctcagcaaatgaacctacttctcaatctaaaatttggtcctcatttggcaaatgaatgaa

SEQ ID NO: 38331 - DNA, 73 bp, Homo sapiens
cttttgacctcagcaaatgaacctacttctcaatctaaaatttggtcctcatttggcaaatgaatgaatttaa

SEQ ID NO: 38332 - DNA, 75 bp, Homo sapiens
tcagcaaatgaacctacttctcaatctaaaatttggtcctcatttggcaaatgaatgaatttaaacattgagaat

SEQ ID NO: 38333 - DNA, 72 bp, Homo sapiens
aacctacttctcaatctaaaatttggtcctcatttggcaaatgaatgaatttaaacattgagaatttgtggc

SEQ ID NO: 38334 - DNA, 75 bp, Homo sapiens
tcaatctaaaatttggtcctcatttggcaaatgaatgaatttaaacattgagaatttgtggcttattcatttatg

SEQ ID NO: 38335 - DNA, 75 bp, Homo sapiens
ggtcctcatttggcaaatgaatgaatttaaacattgagaatttgtggcttattcatttatgtagtaattaattca

SEQ ID NO: 38336 - DNA, 77 bp, Homo sapiens
ggcaaatgaatgaatttaaacattgagaatttgtggcttattcatttatgtagtaattaattcattcatagagatgg

SEQ ID NO: 38337 - DNA, 78 bp, Homo sapiens
tgaatttaaacattgagaatttgtggcttattcatttatgtagtaattaattcattcatagagatgggactagactgc

SEQ ID NO: 38338 - DNA, 80 bp, Homo sapiens
cattgagaatttgtggcttattcatttatgtagtaattaattcattcatagagatgggactagactgctcaggattgaaa

SEQ ID NO: 38339 - DNA, 78 bp, Homo sapiens
gaatttgtggcttattcatttatgtagtaattaattcattcatagagatgggactagactgctcaggattgaaaagag

SEQ ID NO: 38340 - DNA, 78 bp, Homo sapiens
ttcatttatgtagtaattaattcattcatagagatgggactagactgctcaggattgaaaagagttaattttcagctg

SEQ ID NO: 38341 - DNA, 80 bp, Homo sapiens
ttatgtagtaattaattcattcatagagatgggactagactgctcaggattgaaaagagttaattttcagctggagagca

SEQ ID NO: 38342 - DNA, 78 bp, Homo sapiens
attaattcattcatagagatgggactagactgctcaggattgaaaagagttaattttcagctggagagcactttatta

SEQ ID NO: 38343 - DNA, 78 bp, Homo sapiens
atagagatgggactagactgctcaggattgaaaagagttaattttcagctggagagcactttattacttgtgctctcc

SEQ ID NO: 38344 - DNA, 78 bp, Homo sapiens
actagactgctcaggattgaaaagagttaattttcagctggagagcactttattacttgtgctctccctgaatgacaa

SEQ ID NO: 38345 - DNA, 74 bp, Homo sapiens
agagttaattttcagctggagagcactttattacttgtgctctccctgaatgacaactttaaattgtttgattg

SEQ ID NO: 38346 - DNA, 75 bp, Homo sapiens
taattttcagctggagagcactttattacttgtgctctccctgaatgacaactttaaattgtttgattggttatc

SEQ ID NO: 38347 - DNA, 71 bp, Homo sapiens
agagcactttattacttgtgctctccctgaatgacaactttaaattgtttgattggttatcctttgtggtt

SEQ ID NO: 38348 - DNA, 73 bp, Homo sapiens
tattacttgtgctctccctgaatgacaactttaaattgtttgattggttatcctttgtggtttagctattgcc

SEQ ID NO: 38349 - DNA, 73 bp, Homo sapiens
tctccctgaatgacaactttaaattgtttgattggttatcctttgtggtttagctattgcctgcatagtttaa

SEQ ID NO: 38350 - DNA, 75 bp, Homo sapiens
ctgaatgacaactttaaattgtttgattggttatcctttgtggtttagctattgcctgcatagtttaatgctgct

SEQ ID NO: 38351 - DNA, 70 bp, Homo sapiens
actttaaattgtttgattggttatcctttgtggtttagctattgcctgcatagtttaatgctgctttttt

SEQ ID NO: 38352 - DNA, 73 bp, Homo sapiens
gtttgattggttatcctttgtggtttagctattgcctgcatagtttaatgctgctttttttggaattaccatc

SEQ ID NO: 38353 - DNA, 69 bp, Homo sapiens
cctttgtggtttagctattgcctgcatagtttaatgctgctttttttggaattaccatctttaaacttt

SEQ ID NO: 38354 - DNA, 72 bp, Homo sapiens
ttagctattgcctgcatagtttaatgctgctttttttggaattaccatctttaaactttttgctcacttccc

SEQ ID NO: 38355 - DNA, 69 bp, Homo sapiens
taatgctgctttttttggaattaccatctttaaactttttgctcacttccctcaatccctctgaaaact

SEQ ID NO: 38356 - DNA, 66 bp, Homo sapiens
ttttttggaattaccatctttaaactttttgctcacttccctcaatccctctgaaaacttttataa

SEQ ID NO: 38357 - DNA, 63 bp, Homo sapiens
ctttaaactttttgctcacttccctcaatccctctgaaaacttttataaccttttacccattt

SEQ ID NO: 38358 - DNA, 66 bp, Homo sapiens
gctcacttccctcaatccctctgaaaacttttataaccttttacccatttttaggttaacatctaa

SEQ ID NO: 38359 - DNA, 64 bp, Homo sapiens
cttccctcaatccctctgaaaacttttataaccttttacccatttttaggttaacatctaaatc

SEQ ID NO: 38360 - DNA, 66 bp, Homo sapiens
tccctctgaaaacttttataaccttttacccatttttaggttaacatctaaatctctatcataatt

SEQ ID NO: 38361 - DNA, 73 bp, Homo sapiens
ttacccatttttaggttaacatctaaatctctatcataatttaaatagttgcaaagtatgtattgtcttgatg

SEQ ID NO: 38362 - DNA, 75 bp, Homo sapiens
ttaacatctaaatctctatcataatttaaatagttgcaaagtatgtattgtcttgatgtatattaaactacattt

SEQ ID NO: 38363 - DNA, 72 bp, Homo sapiens
catttttaaaagaaaataattacagtgctttttgtatgcagtggaatcttgataccatcattcattttttaa

SEQ ID NO: 38364 - DNA, 71 bp, Homo sapiens
tttttaaaagaaaataattacagtgctttttgtatgcagtggaatcttgataccatcattcattttttaaa

SEQ ID NO: 38365 - DNA, 73 bp, Homo sapiens
agaaaataattacagtgctttttgtatgcagtggaatcttgataccatcattcattttttaaaatacacaaac

SEQ ID NO: 38366 - DNA, 74 bp, Homo sapiens
gaaaataattacagtgctttttgtatgcagtggaatcttgataccatcattcattttttaaaatacacaaactc

SEQ ID NO: 38367 - DNA, 77 bp, Homo sapiens
tacagtgctttttgtatgcagtggaatcttgataccatcattcattttttaaaatacacaaactctttaacatcaga

SEQ ID NO: 38368 - DNA, 75 bp, Homo sapiens
tgctttttgtatgcagtggaatcttgataccatcattcattttttaaaatacacaaactctttaacatcagaaat

SEQ ID NO: 38369 - DNA, 68 bp, Homo sapiens
ttcattttttaaaatacacaaactctttaacatcagaaattttataatattcctctttcaccttgaac

SEQ ID NO: 38370 - DNA, 69 bp, Homo sapiens
aaaatacacaaactctttaacatcagaaattttataatattcctctttcaccttgaacttgtattccag

SEQ ID NO: 38371 - DNA, 73 bp, Homo sapiens
cacaaactctttaacatcagaaattttataatattcctctttcaccttgaacttgtattccagtatcctcaca

SEQ ID NO: 38372 - DNA, 72 bp, Homo sapiens
acatcagaaattttataatattcctctttcaccttgaacttgtattccagtatcctcacaagagttttatcc

SEQ ID NO: 38373 - DNA, 73 bp, Homo sapiens
tttataatattcctctttcaccttgaacttgtattccagtatcctcacaagagttttatcctaatataataca

SEQ ID NO: 38374 - DNA, 71 bp, Homo sapiens
aatattcctctttcaccttgaacttgtattccagtatcctcacaagagttttatcctaatataatacattt

SEQ ID NO: 38375 - DNA, 74 bp, Homo sapiens
tcaccttgaacttgtattccagtatcctcacaagagttttatcctaatataatacattttatgtttgagattct

SEQ ID NO: 38376 - DNA, 70 bp, Homo sapiens
aacttgtattccagtatcctcacaagagttttatcctaatataatacattttatgtttgagattcttttt

SEQ ID NO: 38377 - DNA, 73 bp, Homo sapiens
cagtatcctcacaagagttttatcctaatataatacattttatgtttgagattcttttttattcatcaccctg

SEQ ID NO: 38378 - DNA, 72 bp, Homo sapiens
cacaagagttttatcctaatataatacattttatgtttgagattcttttttattcatcaccctgtcaatact

SEQ ID NO: 38379 - DNA, 71 bp, Homo sapiens
atcctaatataatacattttatgtttgagattcttttttattcatcaccctgtcaatactttttagttaca

SEQ ID NO: 38380 - DNA, 69 bp, Homo sapiens
acattttatgtttgagattcttttttattcatcaccctgtcaatactttttagttacaaaatagacatt

SEQ ID NO: 38381 - DNA, 68 bp, Homo sapiens
tgtttgagattcttttttattcatcaccctgtcaatactttttagttacaaaatagacatttttaaag

SEQ ID NO: 38382 - DNA, 65 bp, Homo sapiens
gattcttttttattcatcaccctgtcaatactttttagttacaaaatagacatttttaaagtttt

SEQ ID NO: 38383 - DNA, 66 bp, Homo sapiens
attcatcaccctgtcaatactttttagttacaaaatagacatttttaaagtttttcaattccttgt

SEQ ID NO: 38384 - DNA, 66 bp, Homo sapiens
tcaccctgtcaatactttttagttacaaaatagacatttttaaagtttttcaattccttgttattc

SEQ ID NO: 38385 - DNA, 64 bp, Homo sapiens
cctgtcaatactttttagttacaaaatagacatttttaaagtttttcaattccttgttattctt

SEQ ID NO: 38386 - DNA, 64 bp, Homo sapiens
ctttttagttacaaaatagacatttttaaagtttttcaattccttgttattctttaaagctcta

SEQ ID NO: 38387 - DNA, 64 bp, Homo sapiens
tagttacaaaatagacatttttaaagtttttcaattccttgttattctttaaagctctaaattt

SEQ ID NO: 38388 - DNA, 63 bp, Homo sapiens
acaaaatagacatttttaaagtttttcaattccttgttattctttaaagctctaaattttaaa

SEQ ID NO: 38389 - DNA, 73 bp, Homo sapiens
tatatgattcagacttataatttataatatgactttatacttttcatgttttccttagttcctttgtataaca

SEQ ID NO: 38390 - DNA, 70 bp, Homo sapiens
tcagacttataatttataatatgactttatacttttcatgttttccttagttcctttgtataacataggg

SEQ ID NO: 38391 - DNA, 67 bp, Homo sapiens
ataatatgactttatacttttcatgttttccttagttcctttgtataacataggggagaagaaaagg

SEQ ID NO: 38392 - DNA, 69 bp, Homo sapiens
tttatacttttcatgttttccttagttcctttgtataacataggggagaagaaaaggtaacatacatca

SEQ ID NO: 38393 - DNA, 71 bp, Homo sapiens
tcatgttttccttagttcctttgtataacataggggagaagaaaaggtaacatacatcatttttctacaga

SEQ ID NO: 38394 - DNA, 71 bp, Homo sapiens
ccttagttcctttgtataacataggggagaagaaaaggtaacatacatcatttttctacagatctcttcaa

SEQ ID NO: 38395 - DNA, 73 bp, Homo sapiens
cctttgtataacataggggagaagaaaaggtaacatacatcatttttctacagatctcttcaacatgttagaa

SEQ ID NO: 38396 - DNA, 74 bp, Homo sapiens
cataggggagaagaaaaggtaacatacatcatttttctacagatctcttcaacatgttagaaaataataggtga

SEQ ID NO: 38397 - DNA, 75 bp, Homo sapiens
gagaagaaaaggtaacatacatcatttttctacagatctcttcaacatgttagaaaataataggtgatttactca

SEQ ID NO: 38398 - DNA, 78 bp, Homo sapiens
catacatcatttttctacagatctcttcaacatgttagaaaataataggtgatttactcatttattcattgaccttga

SEQ ID NO: 38399 - DNA, 74 bp, Homo sapiens
catttttctacagatctcttcaacatgttagaaaataataggtgatttactcatttattcattgaccttgaaac

SEQ ID NO: 38400 - DNA, 74 bp, Homo sapiens
tacagatctcttcaacatgttagaaaataataggtgatttactcatttattcattgaccttgaaacttttagaa

SEQ ID NO: 38401 - DNA, 74 bp, Homo sapiens
gcaaatagtgactaacttttaagaaatgatgtagctaatgtatttttttctttagcttccagagcagttgtagc

SEQ ID NO: 38402 - DNA, 77 bp, Homo sapiens
tagtgactaacttttaagaaatgatgtagctaatgtatttttttctttagcttccagagcagttgtagcgcagcatg

SEQ ID NO: 38403 - DNA, 78 bp, Homo sapiens
ttttaagaaatgatgtagctaatgtatttttttctttagcttccagagcagttgtagcgcagcatgttgctccacctc

SEQ ID NO: 38404 - DNA, 80 bp, Homo sapiens
atgatgtagctaatgtatttttttctttagcttccagagcagttgtagcgcagcatgttgctccacctccaggaatagtg

SEQ ID NO: 38405 - DNA, 79 bp, Homo sapiens
tatttttttctttagcttccagagcagttgtagcgcagcatgttgctccacctccaggaatagtggaaatagatagtga

SEQ ID NO: 38406 - DNA, 79 bp, Homo sapiens
tttctttagcttccagagcagttgtagcgcagcatgttgctccacctccaggaatagtggaaatagatagtgagaagtt

SEQ ID NO: 38407 - DNA, 81 bp, Homo sapiens
agagcagttgtagcgcagcatgttgctccacctccaggaatagtggaaatagatagtgagaagtttgcttgtcagtggtaa

SEQ ID NO: 38408 - DNA, 79 bp, Homo sapiens
tagcgcagcatgttgctccacctccaggaatagtggaaatagatagtgagaagtttgcttgtcagtggtaagtggttta

SEQ ID NO: 38409 - DNA, 74 bp, Homo sapiens
atgttgctccacctccaggaatagtggaaatagatagtgagaagtttgcttgtcagtggtaagtggtttatttc

SEQ ID NO: 38410 - DNA, 71 bp, Homo sapiens
acctccaggaatagtggaaatagatagtgagaagtttgcttgtcagtggtaagtggtttatttctattaag

SEQ ID NO: 38411 - DNA, 72 bp, Homo sapiens
tagtggaaatagatagtgagaagtttgcttgtcagtggtaagtggtttatttctattaaggatttatccttg

SEQ ID NO: 38412 - DNA, 71 bp, Homo sapiens
gaaatagatagtgagaagtttgcttgtcagtggtaagtggtttatttctattaaggatttatccttgggag

SEQ ID NO: 38413 - DNA, 72 bp, Homo sapiens
ggagtttcctagagtatattgtataatgcttaatttttctcctcttttaggctaaatgctcattttgaagta

SEQ ID NO: 38414 - DNA, 73 bp, Homo sapiens
gtatattgtataatgcttaatttttctcctcttttaggctaaatgctcattttgaagtaaatccagattgttc

SEQ ID NO: 38415 - DNA, 72 bp, Homo sapiens
aatgcttaatttttctcctcttttaggctaaatgctcattttgaagtaaatccagattgttctgtttctcga

SEQ ID NO: 38416 - DNA, 74 bp, Homo sapiens
ttttctcctcttttaggctaaatgctcattttgaagtaaatccagattgttctgtttctcgagcagaaatgtat

SEQ ID NO: 38417 - DNA, 76 bp, Homo sapiens
cctcttttaggctaaatgctcattttgaagtaaatccagattgttctgtttctcgagcagaaatgtattctgaata

SEQ ID NO: 38418 - DNA, 79 bp, Homo sapiens
aatgctcattttgaagtaaatccagattgttctgtttctcgagcagaaatgtattctgaatacctctcgacttgcagta

SEQ ID NO: 38419 - DNA, 76 bp, Homo sapiens
ttttgaagtaaatccagattgttctgtttctcgagcagaaatgtattctgaatacctctcgacttgcagtaaatta

SEQ ID NO: 38420 - DNA, 78 bp, Homo sapiens
taaatccagattgttctgtttctcgagcagaaatgtattctgaatacctctcgacttgcagtaaattagctcgtggtg

SEQ ID NO: 38421 - DNA, 77 bp, Homo sapiens
ttgttctgtttctcgagcagaaatgtattctgaatacctctcgacttgcagtaaattagctcgtggtggaatcctaa

SEQ ID NO: 38422 - DNA, 77 bp, Homo sapiens
gagcagaaatgtattctgaatacctctcgacttgcagtaaattagctcgtggtggaatcctaacatcaactggattt

SEQ ID NO: 38423 - DNA, 75 bp, Homo sapiens
aaatgtattctgaatacctctcgacttgcagtaaattagctcgtggtggaatcctaacatcaactggattttata

SEQ ID NO: 38424 - DNA, 73 bp, Homo sapiens
aatacctctcgacttgcagtaaattagctcgtggtggaatcctaacatcaactggattttataaatgtcttag

SEQ ID NO: 38425 - DNA, 74 bp, Homo sapiens
acttgcagtaaattagctcgtggtggaatcctaacatcaactggattttataaatgtcttaggtaggatccata

SEQ ID NO: 38426 - DNA, 71 bp, Homo sapiens
aaattagctcgtggtggaatcctaacatcaactggattttataaatgtcttaggtaggatccatagttctt

SEQ ID NO: 38427 - DNA, 71 bp, Homo sapiens
ctcgtggtggaatcctaacatcaactggattttataaatgtcttaggtaggatccatagttctttaaataa

SEQ ID NO: 38428 - DNA, 76 bp, Homo sapiens
agtcaatgtgatagttatcaaaacttactgattatgtatgtactttacagaacggtctttccaaatcatacagtga

SEQ ID NO: 38429 - DNA, 74 bp, Homo sapiens
gttatcaaaacttactgattatgtatgtactttacagaacggtctttccaaatcatacagtgaagagagtggag

SEQ ID NO: 38430 - DNA, 73 bp, Homo sapiens
aaaacttactgattatgtatgtactttacagaacggtctttccaaatcatacagtgaagagagtggaggattc

SEQ ID NO: 38431 - DNA, 77 bp, Homo sapiens
attatgtatgtactttacagaacggtctttccaaatcatacagtgaagagagtggaggattccagtagcaatgggca

SEQ ID NO: 38432 - DNA, 79 bp, Homo sapiens
tactttacagaacggtctttccaaatcatacagtgaagagagtggaggattccagtagcaatgggcaggcacatattca

SEQ ID NO: 38433 - DNA, 80 bp, Homo sapiens
gtctttccaaatcatacagtgaagagagtggaggattccagtagcaatgggcaggcacatattcatgtggtaggagtaaa

SEQ ID NO: 38434 - DNA, 78 bp, Homo sapiens
aaatcatacagtgaagagagtggaggattccagtagcaatgggcaggcacatattcatgtggtaggagtaaaacggag

SEQ ID NO: 38435 - DNA, 77 bp, Homo sapiens
agtgaagagagtggaggattccagtagcaatgggcaggcacatattcatgtggtaggagtaaaacggagggctatac

SEQ ID NO: 38436 - DNA, 77 bp, Homo sapiens
gaggattccagtagcaatgggcaggcacatattcatgtggtaggagtaaaacggagggctataccacttcccattca

SEQ ID NO: 38437 - DNA, 77 bp, Homo sapiens
agtagcaatgggcaggcacatattcatgtggtaggagtaaaacggagggctataccacttcccattcagatgtacta

SEQ ID NO: 38438 - DNA, 80 bp, Homo sapiens
atgggcaggcacatattcatgtggtaggagtaaaacggagggctataccacttcccattcagatgtactatcagcagcaa

SEQ ID NO: 38439 - DNA, 77 bp, Homo sapiens
tattcatgtggtaggagtaaaacggagggctataccacttcccattcagatgtactatcagcagcaaccagtttcta

SEQ ID NO: 38440 - DNA, 75 bp, Homo sapiens
tgtggtaggagtaaaacggagggctataccacttcccattcagatgtactatcagcagcaaccagtttctacttc

SEQ ID NO: 38441 - DNA, 75 bp, Homo sapiens
taaaacggagggctataccacttcccattcagatgtactatcagcagcaaccagtttctacttctgttgttcgtg

SEQ ID NO: 38442 - DNA, 80 bp, Homo sapiens
tataccacttcccattcagatgtactatcagcagcaaccagtttctacttctgttgttcgtgttgattctgttcctgatg

SEQ ID NO: 38443 - DNA, 80 bp, Homo sapiens
acttcccattcagatgtactatcagcagcaaccagtttctacttctgttgttcgtgttgattctgttcctgatgtatctc

SEQ ID NO: 38444 - DNA, 81 bp, Homo sapiens
agatgtactatcagcagcaaccagtttctacttctgttgttcgtgttgattctgttcctgatgtatctcctgctccttcac

SEQ ID NO: 38445 - DNA, 79 bp, Homo sapiens
cagcaaccagtttctacttctgttgttcgtgttgattctgttcctgatgtatctcctgctccttcacctgcaggtgtta

SEQ ID NO: 38446 - DNA, 76 bp, Homo sapiens
tttctacttctgttgttcgtgttgattctgttcctgatgtatctcctgctccttcacctgcaggtgttaattttta

SEQ ID NO: 38447 - DNA, 76 bp, Homo sapiens
acttctgttgttcgtgttgattctgttcctgatgtatctcctgctccttcacctgcaggtgttaatttttattgta

SEQ ID NO: 38448 - DNA, 74 bp, Homo sapiens
ttcgtgttgattctgttcctgatgtatctcctgctccttcacctgcaggtgttaatttttattgtatttttaaa

SEQ ID NO: 38449 - DNA, 75 bp, Homo sapiens
ttcagtcatttcatttggaattttgacgttttcttcatattttcaggaatccctcatggatcacaaaccatagga

SEQ ID NO: 38450 - DNA, 72 bp, Homo sapiens
tcatttggaattttgacgttttcttcatattttcaggaatccctcatggatcacaaaccataggaaaccatt

SEQ ID NO: 38451 - DNA, 71 bp, Homo sapiens
aattttgacgttttcttcatattttcaggaatccctcatggatcacaaaccataggaaaccattttcagag

SEQ ID NO: 38452 - DNA, 75 bp, Homo sapiens
ttcttcatattttcaggaatccctcatggatcacaaaccataggaaaccattttcagaggactcctgttgccaac

SEQ ID NO: 38453 - DNA, 74 bp, Homo sapiens
tattttcaggaatccctcatggatcacaaaccataggaaaccattttcagaggactcctgttgccaaccaatct

SEQ ID NO: 38454 - DNA, 75 bp, Homo sapiens
aatccctcatggatcacaaaccataggaaaccattttcagaggactcctgttgccaaccaatcttcaaatctgac

SEQ ID NO: 38455 - DNA, 76 bp, Homo sapiens
atcacaaaccataggaaaccattttcagaggactcctgttgccaaccaatcttcaaatctgactgcaacacaaatg

SEQ ID NO: 38456 - DNA, 74 bp, Homo sapiens
aaccataggaaaccattttcagaggactcctgttgccaaccaatcttcaaatctgactgcaacacaaatgtctt

SEQ ID NO: 38457 - DNA, 75 bp, Homo sapiens
aaccattttcagaggactcctgttgccaaccaatcttcaaatctgactgcaacacaaatgtcttttcctgtacaa

SEQ ID NO: 38458 - DNA, 76 bp, Homo sapiens
aggactcctgttgccaaccaatcttcaaatctgactgcaacacaaatgtcttttcctgtacaaggtgttcatactg

SEQ ID NO: 38459 - DNA, 76 bp, Homo sapiens
ccaaccaatcttcaaatctgactgcaacacaaatgtcttttcctgtacaaggtgttcatactgtggcacaaactgt

SEQ ID NO: 38460 - DNA, 77 bp, Homo sapiens
aatcttcaaatctgactgcaacacaaatgtcttttcctgtacaaggtgttcatactgtggcacaaactgtttcaaga

SEQ ID NO: 38461 - DNA, 74 bp, Homo sapiens
tcttttcctgtacaaggtgttcatactgtggcacaaactgtttcaagaattccacaaaatccttcacctcatac

SEQ ID NO: 38462 - DNA, 74 bp, Homo sapiens
aaggtgttcatactgtggcacaaactgtttcaagaattccacaaaatccttcacctcatacccaccagcaacaa

SEQ ID NO: 38463 - DNA, 76 bp, Homo sapiens
aactgtttcaagaattccacaaaatccttcacctcatacccaccagcaacaaaatgctccagtgactgtcattcaa

SEQ ID NO: 38464 - DNA, 76 bp, Homo sapiens
tttcaagaattccacaaaatccttcacctcatacccaccagcaacaaaatgctccagtgactgtcattcaaagtaa

SEQ ID NO: 38465 - DNA, 74 bp, Homo sapiens
aaaatccttcacctcatacccaccagcaacaaaatgctccagtgactgtcattcaaagtaaagctccaattcct

SEQ ID NO: 38466 - DNA, 75 bp, Homo sapiens
acctcatacccaccagcaacaaaatgctccagtgactgtcattcaaagtaaagctccaattccttgtgaagttgt

SEQ ID NO: 38467 - DNA, 74 bp, Homo sapiens
atacccaccagcaacaaaatgctccagtgactgtcattcaaagtaaagctccaattccttgtgaagttgttaag

SEQ ID NO: 38468 - DNA, 74 bp, Homo sapiens
aacaaaatgctccagtgactgtcattcaaagtaaagctccaattccttgtgaagttgttaaggctacagttatc

SEQ ID NO: 38469 - DNA, 74 bp, Homo sapiens
agtgactgtcattcaaagtaaagctccaattccttgtgaagttgttaaggctacagttatccagaattccatac

SEQ ID NO: 38470 - DNA, 72 bp, Homo sapiens
attcaaagtaaagctccaattccttgtgaagttgttaaggctacagttatccagaattccataccccagaca

SEQ ID NO: 38471 - DNA, 71 bp, Homo sapiens
agtaaagctccaattccttgtgaagttgttaaggctacagttatccagaattccataccccagacaggagt

SEQ ID NO: 38472 - DNA, 72 bp, Homo sapiens
aagttgttaaggctacagttatccagaattccataccccagacaggagttcctgttagtattgctgttggag

SEQ ID NO: 38473 - DNA, 74 bp, Homo sapiens
taaggctacagttatccagaattccataccccagacaggagttcctgttagtattgctgttggaggaggacctc

SEQ ID NO: 38474 - DNA, 75 bp, Homo sapiens
tatccagaattccataccccagacaggagttcctgttagtattgctgttggaggaggacctccacagagttctgt

SEQ ID NO: 38475 - DNA, 76 bp, Homo sapiens
ataccccagacaggagttcctgttagtattgctgttggaggaggacctccacagagttctgttgttcagaatcata

SEQ ID NO: 38476 - DNA, 76 bp, Homo sapiens
agacaggagttcctgttagtattgctgttggaggaggacctccacagagttctgttgttcagaatcatagtacagg

SEQ ID NO: 38477 - DNA, 77 bp, Homo sapiens
tgttagtattgctgttggaggaggacctccacagagttctgttgttcagaatcatagtacagggccacaacctgtta

SEQ ID NO: 38478 - DNA, 77 bp, Homo sapiens
aggaggacctccacagagttctgttgttcagaatcatagtacagggccacaacctgttacagttgtgaattctcaga

SEQ ID NO: 38479 - DNA, 82 bp, Homo sapiens
agaatcatagtacagggccacaacctgttacagttgtgaattctcagacattgcttcaccatccatctgtaattccacagca

SEQ ID NO: 38480 - DNA, 82 bp, Homo sapiens
acaacctgttacagttgtgaattctcagacattgcttcaccatccatctgtaattccacagcagtctccattacacacagtg

SEQ ID NO: 38481 - DNA, 84 bp, Homo sapiens
tacagttgtgaattctcagacattgcttcaccatccatctgtaattccacagcagtctccattacacacagtggtaccaggaca

SEQ ID NO: 38482 - DNA, 81 bp, Homo sapiens
attgcttcaccatccatctgtaattccacagcagtctccattacacacagtggtaccaggacagatcccttcaggcactcc

SEQ ID NO: 38483 - DNA, 79 bp, Homo sapiens
catctgtaattccacagcagtctccattacacacagtggtaccaggacagatcccttcaggcactcctgttacagtaat

SEQ ID NO: 38484 - DNA, 77 bp, Homo sapiens
agtctccattacacacagtggtaccaggacagatcccttcaggcactcctgttacagtaattcaacaagctgtccca

SEQ ID NO: 38485 - DNA, 79 bp, Homo sapiens
ttacacacagtggtaccaggacagatcccttcaggcactcctgttacagtaattcaacaagctgtcccacagagtcata

SEQ ID NO: 38486 - DNA, 80 bp, Homo sapiens
taccaggacagatcccttcaggcactcctgttacagtaattcaacaagctgtcccacagagtcatatgtttggcagagta

SEQ ID NO: 38487 - DNA, 80 bp, Homo sapiens
agatcccttcaggcactcctgttacagtaattcaacaagctgtcccacagagtcatatgtttggcagagtacagaacata

SEQ ID NO: 38488 - DNA, 83 bp, Homo sapiens
ttcaggcactcctgttacagtaattcaacaagctgtcccacagagtcatatgtttggcagagtacagaacataccagcatgta

SEQ ID NO: 38489 - DNA, 80 bp, Homo sapiens
ttacagtaattcaacaagctgtcccacagagtcatatgtttggcagagtacagaacataccagcatgtacttctacagtt

SEQ ID NO: 38490 - DNA, 81 bp, Homo sapiens
taattcaacaagctgtcccacagagtcatatgtttggcagagtacagaacataccagcatgtacttctacagtttcacagg

SEQ ID NO: 38491 - DNA, 81 bp, Homo sapiens
tcccacagagtcatatgtttggcagagtacagaacataccagcatgtacttctacagtttcacagggtcaacagttaatca

SEQ ID NO: 38492 - DNA, 78 bp, Homo sapiens
tttggcagagtacagaacataccagcatgtacttctacagtttcacagggtcaacagttaatcaccacatcaccccaa

SEQ ID NO: 38493 - DNA, 78 bp, Homo sapiens
tacagaacataccagcatgtacttctacagtttcacagggtcaacagttaatcaccacatcaccccaacctgtgcaaa

SEQ ID NO: 38494 - DNA, 79 bp, Homo sapiens
tacttctacagtttcacagggtcaacagttaatcaccacatcaccccaacctgtgcaaacttcatctcaacagacatca

SEQ ID NO: 38495 - DNA, 79 bp, Homo sapiens
agtttcacagggtcaacagttaatcaccacatcaccccaacctgtgcaaacttcatctcaacagacatcagctggtagc

SEQ ID NO: 38496 - DNA, 81 bp, Homo sapiens
acagttaatcaccacatcaccccaacctgtgcaaacttcatctcaacagacatcagctggtagccagtcacaagatactgt

SEQ ID NO: 38497 - DNA, 86 bp, Homo sapiens
taatcaccacatcaccccaacctgtgcaaacttcatctcaacagacatcagctggtagccagtcacaagatactgttatcatagca

SEQ ID NO: 38498 - DNA, 82 bp, Homo sapiens
cccaacctgtgcaaacttcatctcaacagacatcagctggtagccagtcacaagatactgttatcatagcacccccacagta

SEQ ID NO: 38499 - DNA, 82 bp, Homo sapiens
gcaaacttcatctcaacagacatcagctggtagccagtcacaagatactgttatcatagcacccccacagtatgtaacaact

SEQ ID NO: 38500 - DNA, 85 bp, Homo sapiens
tctcaacagacatcagctggtagccagtcacaagatactgttatcatagcacccccacagtatgtaacaacttctgcatccaata

SEQ ID NO: 38501 - DNA, 84 bp, Homo sapiens
acatcagctggtagccagtcacaagatactgttatcatagcacccccacagtatgtaacaacttctgcatccaatattgtctca

SEQ ID NO: 38502 - DNA, 81 bp, Homo sapiens
caagatactgttatcatagcacccccacagtatgtaacaacttctgcatccaatattgtctcagcaacttcagtacagaat

SEQ ID NO: 38503 - DNA, 81 bp, Homo sapiens
tactgttatcatagcacccccacagtatgtaacaacttctgcatccaatattgtctcagcaacttcagtacagaattttca

SEQ ID NO: 38504 - DNA, 79 bp, Homo sapiens
atagcacccccacagtatgtaacaacttctgcatccaatattgtctcagcaacttcagtacagaattttcaggtagcta

SEQ ID NO: 38505 - DNA, 79 bp, Homo sapiens
tatgtaacaacttctgcatccaatattgtctcagcaacttcagtacagaattttcaggtagctacaggacaaatggtta

SEQ ID NO: 38506 - DNA, 77 bp, Homo sapiens
aacaacttctgcatccaatattgtctcagcaacttcagtacagaattttcaggtagctacaggacaaatggttacta

SEQ ID NO: 38507 - DNA, 77 bp, Homo sapiens
caatattgtctcagcaacttcagtacagaattttcaggtagctacaggacaaatggttactattgctggtgtcccaa

SEQ ID NO: 38508 - DNA, 77 bp, Homo sapiens
tctcagcaacttcagtacagaattttcaggtagctacaggacaaatggttactattgctggtgtcccaagtccacaa

SEQ ID NO: 38509 - DNA, 72 bp, Homo sapiens
agaattttcaggtagctacaggacaaatggttactattgctggtgtcccaagtccacaagcctcaagggtag

SEQ ID NO: 38510 - DNA, 73 bp, Homo sapiens
tagctacaggacaaatggttactattgctggtgtcccaagtccacaagcctcaagggtagggtttcagaacat

SEQ ID NO: 38511 - DNA, 71 bp, Homo sapiens
aaatggttactattgctggtgtcccaagtccacaagcctcaagggtagggtttcagaacattgcaccaaaa

SEQ ID NO: 38512 - DNA, 72 bp, Homo sapiens
gttactattgctggtgtcccaagtccacaagcctcaagggtagggtttcagaacattgcaccaaaacctctc

SEQ ID NO: 38513 - DNA, 72 bp, Homo sapiens
tgtcccaagtccacaagcctcaagggtagggtttcagaacattgcaccaaaacctctcccttctcagcaagt

SEQ ID NO: 38514 - DNA, 73 bp, Homo sapiens
cctcaagggtagggtttcagaacattgcaccaaaacctctcccttctcagcaagtttcatctacagtggtaca

SEQ ID NO: 38515 - DNA, 78 bp, Homo sapiens
tttcagaacattgcaccaaaacctctcccttctcagcaagtttcatctacagtggtacagcagcctattcaacaacca

SEQ ID NO: 38516 - DNA, 79 bp, Homo sapiens
aacattgcaccaaaacctctcccttctcagcaagtttcatctacagtggtacagcagcctattcaacaaccacagcagc

SEQ ID NO: 38517 - DNA, 76 bp, Homo sapiens
aaaacctctcccttctcagcaagtttcatctacagtggtacagcagcctattcaacaaccacagcagccaacccaa

SEQ ID NO: 38518 - DNA, 81 bp, Homo sapiens
tctcagcaagtttcatctacagtggtacagcagcctattcaacaaccacagcagccaacccaacaaagcgtagtgattgta

SEQ ID NO: 38519 - DNA, 77 bp, Homo sapiens
aagtttcatctacagtggtacagcagcctattcaacaaccacagcagccaacccaacaaagcgtagtgattgtaagc

SEQ ID NO: 38520 - DNA, 79 bp, Homo sapiens
tattcaacaaccacagcagccaacccaacaaagcgtagtgattgtaagccagccagctcaacaaggtcaaacttatgca

SEQ ID NO: 38521 - DNA, 78 bp, Homo sapiens
aagcgtagtgattgtaagccagccagctcaacaaggtcaaacttatgcaccagccattcaccaaattgttcttgctaa

SEQ ID NO: 38522 - DNA, 80 bp, Homo sapiens
attgtaagccagccagctcaacaaggtcaaacttatgcaccagccattcaccaaattgttcttgctaatccagcagctct

SEQ ID NO: 38523 - DNA, 81 bp, Homo sapiens
acaaggtcaaacttatgcaccagccattcaccaaattgttcttgctaatccagcagctcttccagctggtcagacagttca

SEQ ID NO: 38524 - DNA, 83 bp, Homo sapiens
ttatgcaccagccattcaccaaattgttcttgctaatccagcagctcttccagctggtcagacagttcagctaactggacaac

SEQ ID NO: 38525 - DNA, 79 bp, Homo sapiens
attcaccaaattgttcttgctaatccagcagctcttccagctggtcagacagttcagctaactggacaacctaacataa

SEQ ID NO: 38526 - DNA, 79 bp, Homo sapiens
aattgttcttgctaatccagcagctcttccagctggtcagacagttcagctaactggacaacctaacataactccatct

SEQ ID NO: 38527 - DNA, 83 bp, Homo sapiens
ttgctaatccagcagctcttccagctggtcagacagttcagctaactggacaacctaacataactccatcttcttcaccatca

SEQ ID NO: 38528 - DNA, 78 bp, Homo sapiens
ctggtcagacagttcagctaactggacaacctaacataactccatcttcttcaccatcacctgtcccagctactaata

SEQ ID NO: 38529 - DNA, 73 bp, Homo sapiens
taactggacaacctaacataactccatcttcttcaccatcacctgtcccagctactaataaccaagtccctac

SEQ ID NO: 38530 - DNA, 75 bp, Homo sapiens
acaacctaacataactccatcttcttcaccatcacctgtcccagctactaataaccaagtccctactgccatgtc

SEQ ID NO: 38531 - DNA, 76 bp, Homo sapiens
ataactccatcttcttcaccatcacctgtcccagctactaataaccaagtccctactgccatgtcgtcgtcctcta

SEQ ID NO: 38532 - DNA, 76 bp, Homo sapiens
ttcttcaccatcacctgtcccagctactaataaccaagtccctactgccatgtcgtcgtcctctacccctcaatca

SEQ ID NO: 38533 - DNA, 73 bp, Homo sapiens
ctgtcccagctactaataaccaagtccctactgccatgtcgtcgtcctctacccctcaatcacagggaccacc

SEQ ID NO: 38534 - DNA, 74 bp, Homo sapiens
tactaataaccaagtccctactgccatgtcgtcgtcctctacccctcaatcacagggaccacctcctactgtca

SEQ ID NO: 38535 - DNA, 74 bp, Homo sapiens
ataaccaagtccctactgccatgtcgtcgtcctctacccctcaatcacagggaccacctcctactgtcagtcaa

SEQ ID NO: 38536 - DNA, 77 bp, Homo sapiens
tactgccatgtcgtcgtcctctacccctcaatcacagggaccacctcctactgtcagtcaaatgttatctgtgaaaa

SEQ ID NO: 38537 - DNA, 77 bp, Homo sapiens
atgtcgtcgtcctctacccctcaatcacagggaccacctcctactgtcagtcaaatgttatctgtgaaaaggcagca

SEQ ID NO: 38538 - DNA, 81 bp, Homo sapiens
accacctcctactgtcagtcaaatgttatctgtgaaaaggcagcaacagcagcaacattcaccagcacccccaccacagca

SEQ ID NO: 38539 - DNA, 82 bp, Homo sapiens
tgtcagtcaaatgttatctgtgaaaaggcagcaacagcagcaacattcaccagcacccccaccacagcaggtacaagtacaa

SEQ ID NO: 38540 - DNA, 80 bp, Homo sapiens
tgaaaaggcagcaacagcagcaacattcaccagcacccccaccacagcaggtacaagtacaagttcagcagccccaacaa

SEQ ID NO: 38541 - DNA, 77 bp, Homo sapiens
aacattcaccagcacccccaccacagcaggtacaagtacaagttcagcagccccaacaagtacagatgcaagttcaa

SEQ ID NO: 38542 - DNA, 76 bp, Homo sapiens
agcacccccaccacagcaggtacaagtacaagttcagcagccccaacaagtacagatgcaagttcaacctcaacag

SEQ ID NO: 38543 - DNA, 79 bp, Homo sapiens
accacagcaggtacaagtacaagttcagcagccccaacaagtacagatgcaagttcaacctcaacagtcgaatgcagga

SEQ ID NO: 38544 - DNA, 76 bp, Homo sapiens
aggtacaagtacaagttcagcagccccaacaagtacagatgcaagttcaacctcaacagtcgaatgcaggagttgg

SEQ ID NO: 38545 - DNA, 81 bp, Homo sapiens
tacaagttcagcagccccaacaagtacagatgcaagttcaacctcaacagtcgaatgcaggagttggtcagcctgcctctg

SEQ ID NO: 38546 - DNA, 79 bp, Homo sapiens
ccccaacaagtacagatgcaagttcaacctcaacagtcgaatgcaggagttggtcagcctgcctctggtgagtcgagtc

SEQ ID NO: 38547 - DNA, 79 bp, Homo sapiens
aacctcaacagtcgaatgcaggagttggtcagcctgcctctggtgagtcgagtctgattaaacagcttctgcttccgaa

SEQ ID NO: 38548 - DNA, 76 bp, Homo sapiens
agttggtcagcctgcctctggtgagtcgagtctgattaaacagcttctgcttccgaaacgtggtccttcaacacca

SEQ ID NO: 38549 - DNA, 72 bp, Homo sapiens
agtcgagtctgattaaacagcttctgcttccgaaacgtggtccttcaacaccaggtggtaagcttattctcc

SEQ ID NO: 38550 - DNA, 73 bp, Homo sapiens
agtctgattaaacagcttctgcttccgaaacgtggtccttcaacaccaggtggtaagcttattctcccagctc

SEQ ID NO: 38551 - DNA, 70 bp, Homo sapiens
cgaaacgtggtccttcaacaccaggtggtaagcttattctcccagctccacagattcctccccctaataa

SEQ ID NO: 38552 - DNA, 75 bp, Homo sapiens
gtccttcaacaccaggtggtaagcttattctcccagctccacagattcctccccctaataatgcaagagctccta

SEQ ID NO: 38553 - DNA, 77 bp, Homo sapiens
tcccagctccacagattcctccccctaataatgcaagagctcctagccctcaggtggtctatcaggtggccagtaac

SEQ ID NO: 38554 - DNA, 76 bp, Homo sapiens
acagattcctccccctaataatgcaagagctcctagccctcaggtggtctatcaggtggccagtaaccaagccgca

SEQ ID NO: 38555 - DNA, 76 bp, Homo sapiens
aataatgcaagagctcctagccctcaggtggtctatcaggtggccagtaaccaagccgcaggttttggagtgcagg

SEQ ID NO: 38556 - DNA, 74 bp, Homo sapiens
agctcctagccctcaggtggtctatcaggtggccagtaaccaagccgcaggttttggagtgcaggggcaaactc

SEQ ID NO: 38557 - DNA, 77 bp, Homo sapiens
aggtggtctatcaggtggccagtaaccaagccgcaggttttggagtgcaggggcaaactccagctcagcagctattg

SEQ ID NO: 38558 - DNA, 77 bp, Homo sapiens
gtctatcaggtggccagtaaccaagccgcaggttttggagtgcaggggcaaactccagctcagcagctattggttgg

SEQ ID NO: 38559 - DNA, 77 bp, Homo sapiens
agtaaccaagccgcaggttttggagtgcaggggcaaactccagctcagcagctattggttgggcagcaaaatgttca

SEQ ID NO: 38560 - DNA, 77 bp, Homo sapiens
aagccgcaggttttggagtgcaggggcaaactccagctcagcagctattggttgggcagcaaaatgttcagttggtc

SEQ ID NO: 38561 - DNA, 78 bp, Homo sapiens
gttttggagtgcaggggcaaactccagctcagcagctattggttgggcagcaaaatgttcagttggtcccaagtgcaa

SEQ ID NO: 38562 - DNA, 78 bp, Homo sapiens
gggcaaactccagctcagcagctattggttgggcagcaaaatgttcagttggtcccaagtgcaatgccaccctcaggg

SEQ ID NO: 38563 - DNA, 75 bp, Homo sapiens
agcagctattggttgggcagcaaaatgttcagttggtcccaagtgcaatgccaccctcagggggagtacaaactg

SEQ ID NO: 38564 - DNA, 75 bp, Homo sapiens
tgggcagcaaaatgttcagttggtcccaagtgcaatgccaccctcagggggagtacaaactgtgcccatttcgaa

SEQ ID NO: 38565 - DNA, 74 bp, Homo sapiens
aagtgcaatgccaccctcagggggagtacaaactgtgcccatttcgaacttacaaatattgccaggtccactga

SEQ ID NO: 38566 - DNA, 73 bp, Homo sapiens
ccaccctcagggggagtacaaactgtgcccatttcgaacttacaaatattgccaggtccactgatctcaaata

SEQ ID NO: 38567 - DNA, 74 bp, Homo sapiens
aaactgtgcccatttcgaacttacaaatattgccaggtccactgatctcaaatagcccagcaaccattttccaa

SEQ ID NO: 38568 - DNA, 73 bp, Homo sapiens
atttcgaacttacaaatattgccaggtccactgatctcaaatagcccagcaaccattttccaagggacttctg

SEQ ID NO: 38569 - DNA, 75 bp, Homo sapiens
tacaaatattgccaggtccactgatctcaaatagcccagcaaccattttccaagggacttctggcaaccaggtaa

SEQ ID NO: 38570 - DNA, 72 bp, Homo sapiens
aggtccactgatctcaaatagcccagcaaccattttccaagggacttctggcaaccaggtaaccataacagt

SEQ ID NO: 38571 - DNA, 73 bp, Homo sapiens
atctcaaatagcccagcaaccattttccaagggacttctggcaaccaggtaaccataacagttgtgccaaata

SEQ ID NO: 38572 - DNA, 69 bp, Homo sapiens
cccagcaaccattttccaagggacttctggcaaccaggtaaccataacagttgtgccaaatacgagttt

SEQ ID NO: 38573 - DNA, 69 bp, Homo sapiens
aaccattttccaagggacttctggcaaccaggtaaccataacagttgtgccaaatacgagttttgcacc

SEQ ID NO: 38574 - DNA, 77 bp, Homo sapiens
tctggcaaccaggtaaccataacagttgtgccaaatacgagttttgcacctgcaactgtgagtcagggaaatgcaac

SEQ ID NO: 38575 - DNA, 79 bp, Homo sapiens
aggtaaccataacagttgtgccaaatacgagttttgcacctgcaactgtgagtcagggaaatgcaactcagctcattgc

SEQ ID NO: 38576 - DNA, 82 bp, Homo sapiens
acagttgtgccaaatacgagttttgcacctgcaactgtgagtcagggaaatgcaactcagctcattgctccagcaggaatta

SEQ ID NO: 38577 - DNA, 81 bp, Homo sapiens
aactgtgagtcagggaaatgcaactcagctcattgctccagcaggaattaccatgagcggaacgcagacaggagttggact

SEQ ID NO: 38578 - DNA, 80 bp, Homo sapiens
gggaaatgcaactcagctcattgctccagcaggaattaccatgagcggaacgcagacaggagttggacttccagtacaaa

SEQ ID NO: 38579 - DNA, 79 bp, Homo sapiens
aactcagctcattgctccagcaggaattaccatgagcggaacgcagacaggagttggacttccagtacaaacgcttcca

SEQ ID NO: 38580 - DNA, 78 bp, Homo sapiens
attgctccagcaggaattaccatgagcggaacgcagacaggagttggacttccagtacaaacgcttccagccactcaa

SEQ ID NO: 38581 - DNA, 78 bp, Homo sapiens
agcaggaattaccatgagcggaacgcagacaggagttggacttccagtacaaacgcttccagccactcaagcatctcc

SEQ ID NO: 38582 - DNA, 80 bp, Homo sapiens
ttaccatgagcggaacgcagacaggagttggacttccagtacaaacgcttccagccactcaagcatctcctgctggacaa

SEQ ID NO: 38583 - DNA, 81 bp, Homo sapiens
aacgcagacaggagttggacttccagtacaaacgcttccagccactcaagcatctcctgctggacaatcatcatgtactac

SEQ ID NO: 38584 - DNA, 81 bp, Homo sapiens
acttccagtacaaacgcttccagccactcaagcatctcctgctggacaatcatcatgtactactgctactcccccattcaa

SEQ ID NO: 38585 - DNA, 80 bp, Homo sapiens
aaacgcttccagccactcaagcatctcctgctggacaatcatcatgtactactgctactcccccattcaaaggtgataaa

SEQ ID NO: 38586 - DNA, 80 bp, Homo sapiens
cactcaagcatctcctgctggacaatcatcatgtactactgctactcccccattcaaaggtgataaaataatttgccaaa

SEQ ID NO: 38587 - DNA, 77 bp, Homo sapiens
aagcatctcctgctggacaatcatcatgtactactgctactcccccattcaaaggtgataaaataatttgccaaaag

SEQ ID NO: 38588 - DNA, 74 bp, Homo sapiens
ctggacaatcatcatgtactactgctactcccccattcaaaggtgataaaataatttgccaaaaggaggaggaa

SEQ ID NO: 38589 - DNA, 70 bp, Homo sapiens
atgtactactgctactcccccattcaaaggtgataaaataatttgccaaaaggaggaggaagcaaaggaa

SEQ ID NO: 38590 - DNA, 71 bp, Homo sapiens
ctactgctactcccccattcaaaggtgataaaataatttgccaaaaggaggaggaagcaaaggaagcaaca

SEQ ID NO: 38591 - DNA, 73 bp, Homo sapiens
cattcaaaggtgataaaataatttgccaaaaggaggaggaagcaaaggaagcaacaggtttacatgttcatga

SEQ ID NO: 38592 - DNA, 71 bp, Homo sapiens
tgataaaataatttgccaaaaggaggaggaagcaaaggaagcaacaggtttacatgttcatgaacgtaaaa

SEQ ID NO: 38593 - DNA, 71 bp, Homo sapiens
aaaggaggaggaagcaaaggaagcaacaggtttacatgttcatgaacgtaaaattgaagtcatggagaacc

SEQ ID NO: 38594 - DNA, 72 bp, Homo sapiens
aagcaaaggaagcaacaggtttacatgttcatgaacgtaaaattgaagtcatggagaacccgtcctgccgac

SEQ ID NO: 38595 - DNA, 74 bp, Homo sapiens
gcaacaggtttacatgttcatgaacgtaaaattgaagtcatggagaacccgtcctgccgacgaggagccacaaa

SEQ ID NO: 38596 - DNA, 75 bp, Homo sapiens
ttcatgaacgtaaaattgaagtcatggagaacccgtcctgccgacgaggagccacaaacaccagcaatggggata

SEQ ID NO: 38597 - DNA, 72 bp, Homo sapiens
aaattgaagtcatggagaacccgtcctgccgacgaggagccacaaacaccagcaatggggatacaaaggaaa

SEQ ID NO: 38598 - DNA, 75 bp, Homo sapiens
agtcatggagaacccgtcctgccgacgaggagccacaaacaccagcaatggggatacaaaggaaaatgaaatgca

SEQ ID NO: 38599 - DNA, 72 bp, Homo sapiens
atacaaaggaaaatgaaatgcatgtgggaagtcttttaaatgggagaaagtacagtgactcaagtctacctc

SEQ ID NO: 38600 - DNA, 71 bp, Homo sapiens
aaaatgaaatgcatgtgggaagtcttttaaatgggagaaagtacagtgactcaagtctacctccttcaaac

SEQ ID NO: 38601 - DNA, 69 bp, Homo sapiens
atgtgggaagtcttttaaatgggagaaagtacagtgactcaagtctacctccttcaaactcagggaaaa

SEQ ID NO: 38602 - DNA, 68 bp, Homo sapiens
aagtcttttaaatgggagaaagtacagtgactcaagtctacctccttcaaactcagggaaaattcaaa

SEQ ID NO: 38603 - DNA, 77 bp, Homo sapiens
tacagtgactcaagtctacctccttcaaactcagggaaaattcaaagtgagactaatcagtgctcactaatcagtaa

SEQ ID NO: 38604 - DNA, 76 bp, Homo sapiens
aagtctacctccttcaaactcagggaaaattcaaagtgagactaatcagtgctcactaatcagtaatgggccatca

SEQ ID NO: 38605 - DNA, 77 bp, Homo sapiens
tccttcaaactcagggaaaattcaaagtgagactaatcagtgctcactaatcagtaatgggccatcattggaattag

SEQ ID NO: 38606 - DNA, 77 bp, Homo sapiens
aactcagggaaaattcaaagtgagactaatcagtgctcactaatcagtaatgggccatcattggaattaggtgagaa

SEQ ID NO: 38607 - DNA, 81 bp, Homo sapiens
attcaaagtgagactaatcagtgctcactaatcagtaatgggccatcattggaattaggtgagaatggagcatctgggaaa

SEQ ID NO: 38608 - DNA, 80 bp, Homo sapiens
agtgctcactaatcagtaatgggccatcattggaattaggtgagaatggagcatctgggaaacagaactcagaacaaata

SEQ ID NO: 38609 - DNA, 82 bp, Homo sapiens
taatcagtaatgggccatcattggaattaggtgagaatggagcatctgggaaacagaactcagaacaaatagacatgcaaga

SEQ ID NO: 38610 - DNA, 81 bp, Homo sapiens
catcattggaattaggtgagaatggagcatctgggaaacagaactcagaacaaatagacatgcaagatatcaaaagtgatt

SEQ ID NO: 38611 - DNA, 79 bp, Homo sapiens
aattaggtgagaatggagcatctgggaaacagaactcagaacaaatagacatgcaagatatcaaaagtgatttgagaaa

SEQ ID NO: 38612 - DNA, 77 bp, Homo sapiens
aatggagcatctgggaaacagaactcagaacaaatagacatgcaagatatcaaaagtgatttgagaaaaccgctagt

SEQ ID NO: 38613 - DNA, 75 bp, Homo sapiens
ctgggaaacagaactcagaacaaatagacatgcaagatatcaaaagtgatttgagaaaaccgctagttaatggaa

SEQ ID NO: 38614 - DNA, 77 bp, Homo sapiens
caaatagacatgcaagatatcaaaagtgatttgagaaaaccgctagttaatggaatctgtgattttgataaaggaga

SEQ ID NO: 38615 - DNA, 76 bp, Homo sapiens
agacatgcaagatatcaaaagtgatttgagaaaaccgctagttaatggaatctgtgattttgataaaggagatggt

SEQ ID NO: 38616 - DNA, 74 bp, Homo sapiens
caaaagtgatttgagaaaaccgctagttaatggaatctgtgattttgataaaggagatggttctcatttaagca

SEQ ID NO: 38617 - DNA, 73 bp, Homo sapiens
gtgatttgagaaaaccgctagttaatggaatctgtgattttgataaaggagatggttctcatttaagcaaaaa

SEQ ID NO: 38618 - DNA, 71 bp, Homo sapiens
aaaaccgctagttaatggaatctgtgattttgataaaggagatggttctcatttaagcaaaaacattccaa

SEQ ID NO: 38619 - DNA, 75 bp, Homo sapiens
tggaatctgtgattttgataaaggagatggttctcatttaagcaaaaacattccaaatcataaaacttccaatca

SEQ ID NO: 38620 - DNA, 73 bp, Homo sapiens
aaaggagatggttctcatttaagcaaaaacattccaaatcataaaacttccaatcatgtaggaaatggtgaga

SEQ ID NO: 38621 - DNA, 75 bp, Homo sapiens
ggttctcatttaagcaaaaacattccaaatcataaaacttccaatcatgtaggaaatggtgagatatctccaatg

SEQ ID NO: 38622 - DNA, 75 bp, Homo sapiens
taagcaaaaacattccaaatcataaaacttccaatcatgtaggaaatggtgagatatctccaatggaaccacaag

SEQ ID NO: 38623 - DNA, 75 bp, Homo sapiens
ttccaaatcataaaacttccaatcatgtaggaaatggtgagatatctccaatggaaccacaagggactttagata

SEQ ID NO: 38624 - DNA, 79 bp, Homo sapiens
aatcatgtaggaaatggtgagatatctccaatggaaccacaagggactttagatatcactcagcaagatactgccaaag

SEQ ID NO: 38625 - DNA, 80 bp, Homo sapiens
gaaatggtgagatatctccaatggaaccacaagggactttagatatcactcagcaagatactgccaaaggtgatcaacta

SEQ ID NO: 38626 - DNA, 78 bp, Homo sapiens
agatatctccaatggaaccacaagggactttagatatcactcagcaagatactgccaaaggtgatcaactagaaagaa

SEQ ID NO: 38627 - DNA, 75 bp, Homo sapiens
aatggaaccacaagggactttagatatcactcagcaagatactgccaaaggtgatcaactagaaagaatttctaa

SEQ ID NO: 38628 - DNA, 75 bp, Homo sapiens
aagggactttagatatcactcagcaagatactgccaaaggtgatcaactagaaagaatttctaatggacctgtat

SEQ ID NO: 38629 - DNA, 76 bp, Homo sapiens
tttagatatcactcagcaagatactgccaaaggtgatcaactagaaagaatttctaatggacctgtattaactttg

SEQ ID NO: 38630 - DNA, 72 bp, Homo sapiens
actcagcaagatactgccaaaggtgatcaactagaaagaatttctaatggacctgtattaactttgggtggt

SEQ ID NO: 38631 - DNA, 74 bp, Homo sapiens
agatactgccaaaggtgatcaactagaaagaatttctaatggacctgtattaactttgggtggttcatctgtga

SEQ ID NO: 38632 - DNA, 74 bp, Homo sapiens
ctagaaagaatttctaatggacctgtattaactttgggtggttcatctgtgagcagtatacaggaggcttcaaa

SEQ ID NO: 38633 - DNA, 76 bp, Homo sapiens
aatttctaatggacctgtattaactttgggtggttcatctgtgagcagtatacaggaggcttcaaatgcggcaaca

SEQ ID NO: 38634 - DNA, 78 bp, Homo sapiens
tgtattaactttgggtggttcatctgtgagcagtatacaggaggcttcaaatgcggcaacacagcaatttagtggtac

SEQ ID NO: 38635 - DNA, 78 bp, Homo sapiens
taactttgggtggttcatctgtgagcagtatacaggaggcttcaaatgcggcaacacagcaatttagtggtactgatt

SEQ ID NO: 38636 - DNA, 82 bp, Homo sapiens
ttcatctgtgagcagtatacaggaggcttcaaatgcggcaacacagcaatttagtggtactgatttgcttaatggacctcta

SEQ ID NO: 38637 - DNA, 79 bp, Homo sapiens
agcagtatacaggaggcttcaaatgcggcaacacagcaatttagtggtactgatttgcttaatggacctctagcttcaa

SEQ ID NO: 38638 - DNA, 78 bp, Homo sapiens
gaggcttcaaatgcggcaacacagcaatttagtggtactgatttgcttaatggacctctagcttcaagtttgaattca

SEQ ID NO: 38639 - DNA, 80 bp, Homo sapiens
ttcaaatgcggcaacacagcaatttagtggtactgatttgcttaatggacctctagcttcaagtttgaattcagatgtgc

SEQ ID NO: 38640 - DNA, 79 bp, Homo sapiens
aacacagcaatttagtggtactgatttgcttaatggacctctagcttcaagtttgaattcagatgtgcctcagcaacgc

SEQ ID NO: 38641 - DNA, 79 bp, Homo sapiens
atttgcttaatggacctctagcttcaagtttgaattcagatgtgcctcagcaacgcccaagtgtagttgtctcaccaca

SEQ ID NO: 38642 - DNA, 80 bp, Homo sapiens
ttaatggacctctagcttcaagtttgaattcagatgtgcctcagcaacgcccaagtgtagttgtctcaccacattctaca

SEQ ID NO: 38643 - DNA, 80 bp, Homo sapiens
tagcttcaagtttgaattcagatgtgcctcagcaacgcccaagtgtagttgtctcaccacattctacaacctctgttata

SEQ ID NO: 38644 - DNA, 77 bp, Homo sapiens
agcaacgcccaagtgtagttgtctcaccacattctacaacctctgttatacagggacatcaaatcatagcagttccc

SEQ ID NO: 38645 - DNA, 79 bp, Homo sapiens
gtgtagttgtctcaccacattctacaacctctgttatacagggacatcaaatcatagcagttcccgactcaggatcaaa

SEQ ID NO: 38646 - DNA, 79 bp, Homo sapiens
ttgtctcaccacattctacaacctctgttatacagggacatcaaatcatagcagttcccgactcaggatcaaaagtatc

SEQ ID NO: 38647 - DNA, 77 bp, Homo sapiens
acattctacaacctctgttatacagggacatcaaatcatagcagttcccgactcaggatcaaaagtatcccattctc

SEQ ID NO: 38648 - DNA, 79 bp, Homo sapiens
atacagggacatcaaatcatagcagttcccgactcaggatcaaaagtatcccattctcctgccctatcatctgacgttc

SEQ ID NO: 38649 - DNA, 76 bp, Homo sapiens
aaatcatagcagttcccgactcaggatcaaaagtatcccattctcctgccctatcatctgacgttcggtctacaaa

SEQ ID NO: 38650 - DNA, 78 bp, Homo sapiens
agttcccgactcaggatcaaaagtatcccattctcctgccctatcatctgacgttcggtctacaaatggcacagcaga

SEQ ID NO: 38651 - DNA, 79 bp, Homo sapiens
aggatcaaaagtatcccattctcctgccctatcatctgacgttcggtctacaaatggcacagcagaatgcaaaactgta

SEQ ID NO: 38652 - DNA, 77 bp, Homo sapiens
aaaagtatcccattctcctgccctatcatctgacgttcggtctacaaatggcacagcagaatgcaaaactgtaaaga

SEQ ID NO: 38653 - DNA, 81 bp, Homo sapiens
attctcctgccctatcatctgacgttcggtctacaaatggcacagcagaatgcaaaactgtaaagaggccagcagaggata

SEQ ID NO: 38654 - DNA, 81 bp, Homo sapiens
tatcatctgacgttcggtctacaaatggcacagcagaatgcaaaactgtaaagaggccagcagaggatactgatagggaaa

SEQ ID NO: 38655 - DNA, 77 bp, Homo sapiens
acgttcggtctacaaatggcacagcagaatgcaaaactgtaaagaggccagcagaggatactgatagggaaacagtc

SEQ ID NO: 38656 - DNA, 80 bp, Homo sapiens
tacaaatggcacagcagaatgcaaaactgtaaagaggccagcagaggatactgatagggaaacagtcgcaggaattccaa

SEQ ID NO: 38657 - DNA, 76 bp, Homo sapiens
agcagaatgcaaaactgtaaagaggccagcagaggatactgatagggaaacagtcgcaggaattccaaataaagta

SEQ ID NO: 38658 - DNA, 71 bp, Homo sapiens
aaaactgtaaagaggccagcagaggatactgatagggaaacagtcgcaggaattccaaataaagtaggagt

SEQ ID NO: 38659 - DNA, 73 bp, Homo sapiens
aagaggccagcagaggatactgatagggaaacagtcgcaggaattccaaataaagtaggagttagaattgtta

SEQ ID NO: 38660 - DNA, 73 bp, Homo sapiens
agaggatactgatagggaaacagtcgcaggaattccaaataaagtaggagttagaattgttacaatcagtgac

SEQ ID NO: 38661 - DNA, 72 bp, Homo sapiens
tgatagggaaacagtcgcaggaattccaaataaagtaggagttagaattgttacaatcagtgaccccaacaa

SEQ ID NO: 38662 - DNA, 75 bp, Homo sapiens
aaacagtcgcaggaattccaaataaagtaggagttagaattgttacaatcagtgaccccaacaatgctggctgca

SEQ ID NO: 38663 - DNA, 75 bp, Homo sapiens
aattccaaataaagtaggagttagaattgttacaatcagtgaccccaacaatgctggctgcagcgcaacaatggt

SEQ ID NO: 38664 - DNA, 79 bp, Homo sapiens
aaataaagtaggagttagaattgttacaatcagtgaccccaacaatgctggctgcagcgcaacaatggttgctgtgcca

SEQ ID NO: 38665 - DNA, 86 bp, Homo sapiens
agttagaattgttacaatcagtgaccccaacaatgctggctgcagcgcaacaatggttgctgtgccagcaggagcagatccaagca

SEQ ID NO: 38666 - DNA, 88 bp, Homo sapiens
tgaccccaacaatgctggctgcagcgcaacaatggttgctgtgccagcaggagcagatccaagcactgtagctaaagtagcaatagaa

SEQ ID NO: 38667 - DNA, 89 bp, Homo sapiens
aatgctggctgcagcgcaacaatggttgctgtgccagcaggagcagatccaagcactgtagctaaagtagcaatagaaagtgctgttca

SEQ ID NO: 38668 - DNA, 87 bp, Homo sapiens
ctgcagcgcaacaatggttgctgtgccagcaggagcagatccaagcactgtagctaaagtagcaatagaaagtgctgttcagcaaaa

SEQ ID NO: 38669 - DNA, 84 bp, Homo sapiens
aacaatggttgctgtgccagcaggagcagatccaagcactgtagctaaagtagcaatagaaagtgctgttcagcaaaagcaaca

SEQ ID NO: 38670 - DNA, 87 bp, Homo sapiens
tgccagcaggagcagatccaagcactgtagctaaagtagcaatagaaagtgctgttcagcaaaagcaacagcatccaccaacatatg

SEQ ID NO: 38671 - DNA, 84 bp, Homo sapiens
agcagatccaagcactgtagctaaagtagcaatagaaagtgctgttcagcaaaagcaacagcatccaccaacatatgtacagaa

SEQ ID NO: 38672 - DNA, 83 bp, Homo sapiens
atccaagcactgtagctaaagtagcaatagaaagtgctgttcagcaaaagcaacagcatccaccaacatatgtacagaatgtg

SEQ ID NO: 38673 - DNA, 80 bp, Homo sapiens
ctaaagtagcaatagaaagtgctgttcagcaaaagcaacagcatccaccaacatatgtacagaatgtggtcccgcaggta

SEQ ID NO: 38674 - DNA, 78 bp, Homo sapiens
aatagaaagtgctgttcagcaaaagcaacagcatccaccaacatatgtacagaatgtggtcccgcaggtaagttattc

SEQ ID NO: 38675 - DNA, 81 bp, Homo sapiens
aaagtgctgttcagcaaaagcaacagcatccaccaacatatgtacagaatgtggtcccgcaggtaagttattccatgatca

SEQ ID NO: 38676 - DNA, 80 bp, Homo sapiens
aaaagcaacagcatccaccaacatatgtacagaatgtggtcccgcaggtaagttattccatgatcacatttctcttatga

SEQ ID NO: 38677 - DNA, 79 bp, Homo sapiens
tttttcagtgtcatgtcacaaactctgcatttgttctttttcacagaacactcctatgccaccttcaccagctgtacaa

SEQ ID NO: 38678 - DNA, 80 bp, Homo sapiens
agtgtcatgtcacaaactctgcatttgttctttttcacagaacactcctatgccaccttcaccagctgtacaagtgcagg

SEQ ID NO: 38679 - DNA, 77 bp, Homo sapiens
aaactctgcatttgttctttttcacagaacactcctatgccaccttcaccagctgtacaagtgcagggccagcctaa

SEQ ID NO: 38680 - DNA, 77 bp, Homo sapiens
atttgttctttttcacagaacactcctatgccaccttcaccagctgtacaagtgcagggccagcctaacagttctca

SEQ ID NO: 38681 - DNA, 78 bp, Homo sapiens
ctttttcacagaacactcctatgccaccttcaccagctgtacaagtgcagggccagcctaacagttctcagccttctc

SEQ ID NO: 38682 - DNA, 80 bp, Homo sapiens
aacactcctatgccaccttcaccagctgtacaagtgcagggccagcctaacagttctcagccttctccattcagtggatc

SEQ ID NO: 38683 - DNA, 81 bp, Homo sapiens
accttcaccagctgtacaagtgcagggccagcctaacagttctcagccttctccattcagtggatccagtcagcctggaga

SEQ ID NO: 38684 - DNA, 83 bp, Homo sapiens
agctgtacaagtgcagggccagcctaacagttctcagccttctccattcagtggatccagtcagcctggagatccaatgagaa

SEQ ID NO: 38685 - DNA, 80 bp, Homo sapiens
acaagtgcagggccagcctaacagttctcagccttctccattcagtggatccagtcagcctggagatccaatgagaaaac

SEQ ID NO: 38686 - DNA, 78 bp, Homo sapiens
agcctaacagttctcagccttctccattcagtggatccagtcagcctggagatccaatgagaaaacctggacagaact

SEQ ID NO: 38687 - DNA, 81 bp, Homo sapiens
agttctcagccttctccattcagtggatccagtcagcctggagatccaatgagaaaacctggacagaacttcatgtgtctg

SEQ ID NO: 38688 - DNA, 83 bp, Homo sapiens
tctccattcagtggatccagtcagcctggagatccaatgagaaaacctggacagaacttcatgtgtctgtggcagtcttgtaa

SEQ ID NO: 38689 - DNA, 79 bp, Homo sapiens
tggatccagtcagcctggagatccaatgagaaaacctggacagaacttcatgtgtctgtggcagtcttgtaaaaagtaa

SEQ ID NO: 38690 - DNA, 78 bp, Homo sapiens
tcagcctggagatccaatgagaaaacctggacagaacttcatgtgtctgtggcagtcttgtaaaaagtaaatggcaat

SEQ ID NO: 38691 - DNA, 73 bp, Homo sapiens
atccaatgagaaaacctggacagaacttcatgtgtctgtggcagtcttgtaaaaagtaaatggcaattttatt

SEQ ID NO: 38692 - DNA, 75 bp, Homo sapiens
atgagaaaacctggacagaacttcatgtgtctgtggcagtcttgtaaaaagtaaatggcaattttatttgatata

SEQ ID NO: 38693 - DNA, 74 bp, Homo sapiens
ctggacagaacttcatgtgtctgtggcagtcttgtaaaaagtaaatggcaattttatttgatatataaaagtat

SEQ ID NO: 38694 - DNA, 70 bp, Homo sapiens
atatacttgaatacatccaagtgtctactacttttattttttataggtggtttcagacaccctcacaggt

SEQ ID NO: 38695 - DNA, 70 bp, Homo sapiens
tgaatacatccaagtgtctactacttttattttttataggtggtttcagacaccctcacaggttttctac

SEQ ID NO: 38696 - DNA, 70 bp, Homo sapiens
aagtgtctactacttttattttttataggtggtttcagacaccctcacaggttttctaccatgcagcaac

SEQ ID NO: 38697 - DNA, 72 bp, Homo sapiens
cttttattttttataggtggtttcagacaccctcacaggttttctaccatgcagcaactgaacatggaggaa

SEQ ID NO: 38698 - DNA, 75 bp, Homo sapiens
tttttataggtggtttcagacaccctcacaggttttctaccatgcagcaactgaacatggaggaaaagatgtata

SEQ ID NO: 38699 - DNA, 78 bp, Homo sapiens
tttcagacaccctcacaggttttctaccatgcagcaactgaacatggaggaaaagatgtatatccagggcagtgtctt

SEQ ID NO: 38700 - DNA, 76 bp, Homo sapiens
accctcacaggttttctaccatgcagcaactgaacatggaggaaaagatgtatatccagggcagtgtctttgggaa

SEQ ID NO: 38701 - DNA, 76 bp, Homo sapiens
aggttttctaccatgcagcaactgaacatggaggaaaagatgtatatccagggcagtgtctttgggaaggttgtga

SEQ ID NO: 38702 - DNA, 79 bp, Homo sapiens
atgcagcaactgaacatggaggaaaagatgtatatccagggcagtgtctttgggaaggttgtgagccttttcagcgaca

SEQ ID NO: 38703 - DNA, 73 bp, Homo sapiens
aacatggaggaaaagatgtatatccagggcagtgtctttgggaaggttgtgagccttttcagcgacagcggtt

SEQ ID NO: 38704 - DNA, 71 bp, Homo sapiens
aaaagatgtatatccagggcagtgtctttgggaaggttgtgagccttttcagcgacagcggttttctttta

SEQ ID NO: 38705 - DNA, 71 bp, Homo sapiens
atgtatatccagggcagtgtctttgggaaggttgtgagccttttcagcgacagcggttttcttttattacc

SEQ ID NO: 38706 - DNA, 70 bp, Homo sapiens
agtgtctttgggaaggttgtgagccttttcagcgacagcggttttcttttattacccacttgcaggtaca

SEQ ID NO: 38707 - DNA, 68 bp, Homo sapiens
ggaaggttgtgagccttttcagcgacagcggttttcttttattacccacttgcaggtacactttttaa

SEQ ID NO: 38708 - DNA, 69 bp, Homo sapiens
ttgtgagccttttcagcgacagcggttttcttttattacccacttgcaggtacactttttaaatactat

SEQ ID NO: 38709 - DNA, 70 bp, Homo sapiens
ttcagcgacagcggttttcttttattacccacttgcaggtacactttttaaatactatttgatcagtaac

SEQ ID NO: 38710 - DNA, 75 bp, Homo sapiens
atttgactgcattaaagattttgacgtgccattctcttgcttcctcttcctcaaaaaggataagcactgttcaaa

SEQ ID NO: 38711 - DNA, 74 bp, Homo sapiens
ttaaagattttgacgtgccattctcttgcttcctcttcctcaaaaaggataagcactgttcaaaggatgcccta

SEQ ID NO: 38712 - DNA, 75 bp, Homo sapiens
gtgccattctcttgcttcctcttcctcaaaaaggataagcactgttcaaaggatgccctacttgcaggattaaaa

SEQ ID NO: 38713 - DNA, 74 bp, Homo sapiens
cttgcttcctcttcctcaaaaaggataagcactgttcaaaggatgccctacttgcaggattaaaacaagatgaa

SEQ ID NO: 38714 - DNA, 74 bp, Homo sapiens
tcttcctcaaaaaggataagcactgttcaaaggatgccctacttgcaggattaaaacaagatgaaccaggacaa

SEQ ID NO: 38715 - DNA, 73 bp, Homo sapiens
aaaaaggataagcactgttcaaaggatgccctacttgcaggattaaaacaagatgaaccaggacaagcaggaa

SEQ ID NO: 38716 - DNA, 75 bp, Homo sapiens
actgttcaaaggatgccctacttgcaggattaaaacaagatgaaccaggacaagcaggaagtcagaagtcttcta

SEQ ID NO: 38717 - DNA, 74 bp, Homo sapiens
aaggatgccctacttgcaggattaaaacaagatgaaccaggacaagcaggaagtcagaagtcttctaccaagta

SEQ ID NO: 38718 - DNA, 74 bp, Homo sapiens
tacttgcaggattaaaacaagatgaaccaggacaagcaggaagtcagaagtcttctaccaagtaaggaaaatga

SEQ ID NO: 38719 - DNA, 70 bp, Homo sapiens
attaaaacaagatgaaccaggacaagcaggaagtcagaagtcttctaccaagtaaggaaaatgagtttac

SEQ ID NO: 38720 - DNA, 73 bp, Homo sapiens
tgaaccaggacaagcaggaagtcagaagtcttctaccaagtaaggaaaatgagtttacttcctgttgtacata

SEQ ID NO: 38721 - DNA, 70 bp, Homo sapiens
acaagcaggaagtcagaagtcttctaccaagtaaggaaaatgagtttacttcctgttgtacatacaaaaa

SEQ ID NO: 38722 - DNA, 81 bp, Homo sapiens
ctctctctctgatcaatttaggcagccaactgtagggggcacaagctcaactcctagagcacaaaaggccattgtgaatca

SEQ ID NO: 38723 - DNA, 81 bp, Homo sapiens
tctctgatcaatttaggcagccaactgtagggggcacaagctcaactcctagagcacaaaaggccattgtgaatcatccca

SEQ ID NO: 38724 - DNA, 81 bp, Homo sapiens
ttaggcagccaactgtagggggcacaagctcaactcctagagcacaaaaggccattgtgaatcatcccagtgctgcactta

SEQ ID NO: 38725 - DNA, 81 bp, Homo sapiens
aactgtagggggcacaagctcaactcctagagcacaaaaggccattgtgaatcatcccagtgctgcacttatggctctgag

SEQ ID NO: 38726 - DNA, 83 bp, Homo sapiens
acaagctcaactcctagagcacaaaaggccattgtgaatcatcccagtgctgcacttatggctctgaggagaggatcaagaaa

SEQ ID NO: 38727 - DNA, 80 bp, Homo sapiens
aactcctagagcacaaaaggccattgtgaatcatcccagtgctgcacttatggctctgaggagaggatcaagaaaccttg

SEQ ID NO: 38728 - DNA, 79 bp, Homo sapiens
acaaaaggccattgtgaatcatcccagtgctgcacttatggctctgaggagaggatcaagaaaccttgtctttcgagat

SEQ ID NO: 38729 - DNA, 79 bp, Homo sapiens
attgtgaatcatcccagtgctgcacttatggctctgaggagaggatcaagaaaccttgtctttcgagattttacagtaa

SEQ ID NO: 38730 - DNA, 80 bp, Homo sapiens
aatcatcccagtgctgcacttatggctctgaggagaggatcaagaaaccttgtctttcgagattttacagtaagcatgcc

SEQ ID NO: 38731 - DNA, 76 bp, Homo sapiens
tgcacttatggctctgaggagaggatcaagaaaccttgtctttcgagattttacagtaagcatgccttgaaaccct

SEQ ID NO: 38732 - DNA, 75 bp, Homo sapiens
gctctgaggagaggatcaagaaaccttgtctttcgagattttacagtaagcatgccttgaaacccttatctgtaa

SEQ ID NO: 38733 - DNA, 71 bp, Homo sapiens
agaggatcaagaaaccttgtctttcgagattttacagtaagcatgccttgaaacccttatctgtaaaagtc

SEQ ID NO: 38734 - DNA, 68 bp, Homo sapiens
ttcctttctttttaaggatgaaaaagagggaccaataactaaacacatccgactaacagctgccttaa

SEQ ID NO: 38735 - DNA, 69 bp, Homo sapiens
ggatgaaaaagagggaccaataactaaacacatccgactaacagctgccttaatattaaaaaatattgg

SEQ ID NO: 38736 - DNA, 71 bp, Homo sapiens
gagggaccaataactaaacacatccgactaacagctgccttaatattaaaaaatattggtaaatattcaga

SEQ ID NO: 38737 - DNA, 74 bp, Homo sapiens
ctaaacacatccgactaacagctgccttaatattaaaaaatattggtaaatattcagaatgtggtcgcaggtga

SEQ ID NO: 38738 - DNA, 75 bp, Homo sapiens
catccgactaacagctgccttaatattaaaaaatattggtaaatattcagaatgtggtcgcaggtgagtaatatg

SEQ ID NO: 38739 - DNA, 75 bp, Homo sapiens
cagctgccttaatattaaaaaatattggtaaatattcagaatgtggtcgcaggtgagtaatatgttttctgtagc

SEQ ID NO: 38740 - DNA, 72 bp, Homo sapiens
ttaaaaaatattggtaaatattcagaatgtggtcgcaggtgagtaatatgttttctgtagccaaagtgaatt

SEQ ID NO: 38741 - DNA, 72 bp, Homo sapiens
attggtaaatattcagaatgtggtcgcaggtgagtaatatgttttctgtagccaaagtgaatttagtttatt

SEQ ID NO: 38742 - DNA, 71 bp, Homo sapiens
aaatattcagaatgtggtcgcaggtgagtaatatgttttctgtagccaaagtgaatttagtttattttatt

SEQ ID NO: 38743 - DNA, 68 bp, Homo sapiens
tttatttttacatataagttaataaaattagataactgtattttcttcattgtttttctcatcaattt

SEQ ID NO: 38744 - DNA, 74 bp, Homo sapiens
tacatataagttaataaaattagataactgtattttcttcattgtttttctcatcaattttgcaaatacatcca

SEQ ID NO: 38745 - DNA, 70 bp, Homo sapiens
gttaataaaattagataactgtattttcttcattgtttttctcatcaattttgcaaatacatccaaaagt

SEQ ID NO: 38746 - DNA, 74 bp, Homo sapiens
gataactgtattttcttcattgtttttctcatcaattttgcaaatacatccaaaagtttatgcctaggtcaggc

SEQ ID NO: 38747 - DNA, 77 bp, Homo sapiens
ttttcttcattgtttttctcatcaattttgcaaatacatccaaaagtttatgcctaggtcaggccatgatgagctct

SEQ ID NO: 38748 - DNA, 75 bp, Homo sapiens
attgtttttctcatcaattttgcaaatacatccaaaagtttatgcctaggtcaggccatgatgagctcttaaaag

SEQ ID NO: 38749 - DNA, 77 bp, Homo sapiens
ttctcatcaattttgcaaatacatccaaaagtttatgcctaggtcaggccatgatgagctcttaaaagtcaaaaata

SEQ ID NO: 38750 - DNA, 74 bp, Homo sapiens
tttgcaaatacatccaaaagtttatgcctaggtcaggccatgatgagctcttaaaagtcaaaaataaatagaag

SEQ ID NO: 38751 - DNA, 72 bp, Homo sapiens
catccaaaagtttatgcctaggtcaggccatgatgagctcttaaaagtcaaaaataaatagaagttaaaaca

SEQ ID NO: 38752 - DNA, 70 bp, Homo sapiens
atgcctaggtcaggccatgatgagctcttaaaagtcaaaaataaatagaagttaaaacaaccaaaaggtg

SEQ ID NO: 38753 - DNA, 69 bp, Homo sapiens
ggtcaggccatgatgagctcttaaaagtcaaaaataaatagaagttaaaacaaccaaaaggtggtctct

SEQ ID NO: 38754 - DNA, 67 bp, Homo sapiens
tgatgagctcttaaaagtcaaaaataaatagaagttaaaacaaccaaaaggtggtctcttaagttgt

SEQ ID NO: 38755 - DNA, 62 bp, Homo sapiens
aagtcaaaaataaatagaagttaaaacaaccaaaaggtggtctcttaagttgttttattaag

SEQ ID NO: 38756 - DNA, 71 bp, Homo sapiens
atgtcatcccttaaaagcaaccattttgttcctctccagctgttttctgacaccattttctaaattttcta

SEQ ID NO: 38757 - DNA, 73 bp, Homo sapiens
aagcaaccattttgttcctctccagctgttttctgacaccattttctaaattttctagaaacatgaatgaaga

SEQ ID NO: 38758 - DNA, 73 bp, Homo sapiens
accattttgttcctctccagctgttttctgacaccattttctaaattttctagaaacatgaatgaagattgaa

SEQ ID NO: 38759 - DNA, 76 bp, Homo sapiens
tccagctgttttctgacaccattttctaaattttctagaaacatgaatgaagattgaaaaagaattttgctgtgca

SEQ ID NO: 38760 - DNA, 74 bp, Homo sapiens
ctgttttctgacaccattttctaaattttctagaaacatgaatgaagattgaaaaagaattttgctgtgcagcc

SEQ ID NO: 38761 - DNA, 74 bp, Homo sapiens
ccattttctaaattttctagaaacatgaatgaagattgaaaaagaattttgctgtgcagccttccatatttaga

SEQ ID NO: 38762 - DNA, 75 bp, Homo sapiens
ttttctagaaacatgaatgaagattgaaaaagaattttgctgtgcagccttccatatttagaaaggtactatgga

SEQ ID NO: 38763 - DNA, 77 bp, Homo sapiens
tagaaacatgaatgaagattgaaaaagaattttgctgtgcagccttccatatttagaaaggtactatggagaggctg

SEQ ID NO: 38764 - DNA, 74 bp, Homo sapiens
aatgaagattgaaaaagaattttgctgtgcagccttccatatttagaaaggtactatggagaggctgggcgcgg

SEQ ID NO: 38765 - DNA, 78 bp, Homo sapiens
tcatcgctgtgaccttggagactgacaatcttctatatgtttttttgcagattgttaaagagacatgaaaataactta

SEQ ID NO: 38766 - DNA, 78 bp, Homo sapiens
cttggagactgacaatcttctatatgtttttttgcagattgttaaagagacatgaaaataacttatcagtgctagcca

SEQ ID NO: 38767 - DNA, 77 bp, Homo sapiens
tatatgtttttttgcagattgttaaagagacatgaaaataacttatcagtgctagccattagtaacatggaagcttc

SEQ ID NO: 38768 - DNA, 76 bp, Homo sapiens
tttttgcagattgttaaagagacatgaaaataacttatcagtgctagccattagtaacatggaagcttcctccacc

SEQ ID NO: 38769 - DNA, 75 bp, Homo sapiens
ttgttaaagagacatgaaaataacttatcagtgctagccattagtaacatggaagcttcctccacccttgccaaa

SEQ ID NO: 38770 - DNA, 75 bp, Homo sapiens
atgaaaataacttatcagtgctagccattagtaacatggaagcttcctccacccttgccaaatgcctttatgaac

SEQ ID NO: 38771 - DNA, 74 bp, Homo sapiens
ataacttatcagtgctagccattagtaacatggaagcttcctccacccttgccaaatgcctttatgaacttaat

SEQ ID NO: 38772 - DNA, 72 bp, Homo sapiens
agtgctagccattagtaacatggaagcttcctccacccttgccaaatgcctttatgaacttaattttacagt

SEQ ID NO: 38773 - DNA, 71 bp, Homo sapiens
attagtaacatggaagcttcctccacccttgccaaatgcctttatgaacttaattttacagttcagagtaa

SEQ ID NO: 38774 - DNA, 69 bp, Homo sapiens
aagcttcctccacccttgccaaatgcctttatgaacttaattttacagttcagagtaaggaacaagaaa

SEQ ID NO: 38775 - DNA, 70 bp, Homo sapiens
cacccttgccaaatgcctttatgaacttaattttacagttcagagtaaggaacaagaaaaagactcagaa

SEQ ID NO: 38776 - DNA, 74 bp, Homo sapiens
ccaaatgcctttatgaacttaattttacagttcagagtaaggaacaagaaaaagactcagaaatgctgcagtga

SEQ ID NO: 38777 - DNA, 74 bp, Homo sapiens
tttacagttcagagtaaggaacaagaaaaagactcagaaatgctgcagtgaaaaataattccacttacacagtg

SEQ ID NO: 38778 - DNA, 72 bp, Homo sapiens
agttcagagtaaggaacaagaaaaagactcagaaatgctgcagtgaaaaataattccacttacacagtgggg

SEQ ID NO: 38779 - DNA, 71 bp, Homo sapiens
aaggaacaagaaaaagactcagaaatgctgcagtgaaaaataattccacttacacagtgggggactcaaag

SEQ ID NO: 38780 - DNA, 75 bp, Homo sapiens
aaaaagactcagaaatgctgcagtgaaaaataattccacttacacagtgggggactcaaagtcagccacatttca

SEQ ID NO: 38781 - DNA, 77 bp, Homo sapiens
aatgctgcagtgaaaaataattccacttacacagtgggggactcaaagtcagccacatttcacatactgttactgaa

SEQ ID NO: 38782 - DNA, 73 bp, Homo sapiens
agtgaaaaataattccacttacacagtgggggactcaaagtcagccacatttcacatactgttactgaagaaa

SEQ ID NO: 38783 - DNA, 75 bp, Homo sapiens
attccacttacacagtgggggactcaaagtcagccacatttcacatactgttactgaagaaagcaccaagtctta

SEQ ID NO: 38784 - DNA, 74 bp, Homo sapiens
acagtgggggactcaaagtcagccacatttcacatactgttactgaagaaagcaccaagtcttaatggaacaaa

SEQ ID NO: 38785 - DNA, 77 bp, Homo sapiens
tcaaagtcagccacatttcacatactgttactgaagaaagcaccaagtcttaatggaacaaagaccatagaatgaat

SEQ ID NO: 38786 - DNA, 76 bp, Homo sapiens
tcagccacatttcacatactgttactgaagaaagcaccaagtcttaatggaacaaagaccatagaatgaattattt

SEQ ID NO: 38787 - DNA, 75 bp, Homo sapiens
tcacatactgttactgaagaaagcaccaagtcttaatggaacaaagaccatagaatgaattattttatctcctcc

SEQ ID NO: 38788 - DNA, 78 bp, Homo sapiens
ttactgaagaaagcaccaagtcttaatggaacaaagaccatagaatgaattattttatctcctcccatgatgctgaga

SEQ ID NO: 38789 - DNA, 76 bp, Homo sapiens
aaagcaccaagtcttaatggaacaaagaccatagaatgaattattttatctcctcccatgatgctgagaggaagct

SEQ ID NO: 38790 - DNA, 78 bp, Homo sapiens
agtcttaatggaacaaagaccatagaatgaattattttatctcctcccatgatgctgagaggaagcttcgtattctga

SEQ ID NO: 38791 - DNA, 81 bp, Homo sapiens
aacaaagaccatagaatgaattattttatctcctcccatgatgctgagaggaagcttcgtattctgatctctgagtgaatc

SEQ ID NO: 38792 - DNA, 80 bp, Homo sapiens
aatgaattattttatctcctcccatgatgctgagaggaagcttcgtattctgatctctgagtgaatccctttgttctctg

SEQ ID NO: 38793 - DNA, 78 bp, Homo sapiens
ttttatctcctcccatgatgctgagaggaagcttcgtattctgatctctgagtgaatccctttgttctctgtttaaaa

SEQ ID NO: 38794 - DNA, 78 bp, Homo sapiens
tcctcccatgatgctgagaggaagcttcgtattctgatctctgagtgaatccctttgttctctgtttaaaaaaatcta

SEQ ID NO: 38795 - DNA, 74 bp, Homo sapiens
atgctgagaggaagcttcgtattctgatctctgagtgaatccctttgttctctgtttaaaaaaatctaaaaaga

SEQ ID NO: 38796 - DNA, 77 bp, Homo sapiens
aaaaaaaagaactgctgtgggattgtcaaccagcttatctgcaggatgtttcagatctgataaatcctgatggaaac

SEQ ID NO: 38797 - DNA, 85 bp, Homo sapiens
gattgtcaaccagcttatctgcaggatgtttcagatctgataaatcctgatggaaactggtatgatcagaattcagtaccatcca

SEQ ID NO: 38798 - DNA, 85 bp, Homo sapiens
cagcttatctgcaggatgtttcagatctgataaatcctgatggaaactggtatgatcagaattcagtaccatccacattggaata

SEQ ID NO: 38799 - DNA, 86 bp, Homo sapiens
tatctgcaggatgtttcagatctgataaatcctgatggaaactggtatgatcagaattcagtaccatccacattggaatatacatg

SEQ ID NO: 38800 - DNA, 82 bp, Homo sapiens
atgtttcagatctgataaatcctgatggaaactggtatgatcagaattcagtaccatccacattggaatatacatggaatat

SEQ ID NO: 38801 - DNA, 77 bp, Homo sapiens
ataaatcctgatggaaactggtatgatcagaattcagtaccatccacattggaatatacatggaatattgtaaaacc

SEQ ID NO: 38802 - DNA, 84 bp, Homo sapiens
tatgatcagaattcagtaccatccacattggaatatacatggaatattgtaaaacctacatgagcagatgaaatagaagcatta

SEQ ID NO: 38803 - DNA, 81 bp, Homo sapiens
tcagaattcagtaccatccacattggaatatacatggaatattgtaaaacctacatgagcagatgaaatagaagcattaaa

SEQ ID NO: 38804 - DNA, 79 bp, Homo sapiens
cattggaatatacatggaatattgtaaaacctacatgagcagatgaaatagaagcattaaatatttttatctatatcca

SEQ ID NO: 38805 - DNA, 76 bp, Homo sapiens
ggaatattgtaaaacctacatgagcagatgaaatagaagcattaaatatttttatctatatccaaaaaggagcaca

SEQ ID NO: 38806 - DNA, 74 bp, Homo sapiens
attgtaaaacctacatgagcagatgaaatagaagcattaaatatttttatctatatccaaaaaggagcacattt

SEQ ID NO: 38807 - DNA, 76 bp, Homo sapiens
ctacatgagcagatgaaatagaagcattaaatatttttatctatatccaaaaaggagcacatttttatatttacaa

SEQ ID NO: 38808 - DNA, 70 bp, Homo sapiens
gatgaaatagaagcattaaatatttttatctatatccaaaaaggagcacatttttatatttacaaaaccg

SEQ ID NO: 38809 - DNA, 68 bp, Homo sapiens
gcattaaatatttttatctatatccaaaaaggagcacatttttatatttacaaaaccgtttaagctgg

SEQ ID NO: 38810 - DNA, 67 bp, Homo sapiens
tttttatctatatccaaaaaggagcacatttttatatttacaaaaccgtttaagctggtttgaataa

SEQ ID NO: 38811 - DNA, 67 bp, Homo sapiens
gagcacatttttatatttacaaaaccgtttaagctggtttgaataatttaaaaaagtttcagcacac

SEQ ID NO: 38812 - DNA, 65 bp, Homo sapiens
ttatatttacaaaaccgtttaagctggtttgaataatttaaaaaagtttcagcacacctataccc

SEQ ID NO: 38813 - DNA, 67 bp, Homo sapiens
caaaaccgtttaagctggtttgaataatttaaaaaagtttcagcacacctatacccccgatctcaga

SEQ ID NO: 38814 - DNA, 68 bp, Homo sapiens
tttaagctggtttgaataatttaaaaaagtttcagcacacctatacccccgatctcagagggggccac

SEQ ID NO: 38815 - DNA, 71 bp, Homo sapiens
aataatttaaaaaagtttcagcacacctatacccccgatctcagagggggccaccaatatctagctatgga

SEQ ID NO: 38816 - DNA, 74 bp, Homo sapiens
ctatacccccgatctcagagggggccaccaatatctagctatggatcgtgtgttttgtttagaaatcagtagct

SEQ ID NO: 38817 - DNA, 74 bp, Homo sapiens
atctcagagggggccaccaatatctagctatggatcgtgtgttttgtttagaaatcagtagcttggttttctta

SEQ ID NO: 38818 - DNA, 75 bp, Homo sapiens
tatctagctatggatcgtgtgttttgtttagaaatcagtagcttggttttcttacttgagccaatatattttcac

SEQ ID NO: 38819 - DNA, 71 bp, Homo sapiens
atggatcgtgtgttttgtttagaaatcagtagcttggttttcttacttgagccaatatattttcacttatt

SEQ ID NO: 38820 - DNA, 72 bp, Homo sapiens
gtgttttgtttagaaatcagtagcttggttttcttacttgagccaatatattttcacttatttattatcata

SEQ ID NO: 38821 - DNA, 71 bp, Homo sapiens
atcagtagcttggttttcttacttgagccaatatattttcacttatttattatcataaaaatttaccagtc

SEQ ID NO: 38822 - DNA, 74 bp, Homo sapiens
tcttacttgagccaatatattttcacttatttattatcataaaaatttaccagtctgaatagatcttgtaaata

SEQ ID NO: 38823 - DNA, 73 bp, Homo sapiens
agccaatatattttcacttatttattatcataaaaatttaccagtctgaatagatcttgtaaatatttgtgaa

SEQ ID NO: 38824 - DNA, 73 bp, Homo sapiens
cacttatttattatcataaaaatttaccagtctgaatagatcttgtaaatatttgtgaatagaatgaatacct

SEQ ID NO: 38825 - DNA, 80 bp, Homo sapiens
tatcataaaaatttaccagtctgaatagatcttgtaaatatttgtgaatagaatgaatacctttcatgccactgcagcca

SEQ ID NO: 38826 - DNA, 77 bp, Homo sapiens
aaaaatttaccagtctgaatagatcttgtaaatatttgtgaatagaatgaatacctttcatgccactgcagccactg

SEQ ID NO: 38827 - DNA, 80 bp, Homo sapiens
tcttgtaaatatttgtgaatagaatgaatacctttcatgccactgcagccactggaaatacattctgtggtgtcctagaa

SEQ ID NO: 38828 - DNA, 80 bp, Homo sapiens
aatatttgtgaatagaatgaatacctttcatgccactgcagccactggaaatacattctgtggtgtcctagaagcattat

SEQ ID NO: 38829 - DNA, 78 bp, Homo sapiens
aatagaatgaatacctttcatgccactgcagccactggaaatacattctgtggtgtcctagaagcattattggtaggt

SEQ ID NO: 38830 - DNA, 76 bp, Homo sapiens
ctttcatgccactgcagccactggaaatacattctgtggtgtcctagaagcattattggtaggttctaaagttttc

SEQ ID NO: 38831 - DNA, 73 bp, Homo sapiens
actgcagccactggaaatacattctgtggtgtcctagaagcattattggtaggttctaaagttttctagactt

SEQ ID NO: 38832 - DNA, 72 bp, Homo sapiens
ctggaaatacattctgtggtgtcctagaagcattattggtaggttctaaagttttctagactttcctgtcaa

SEQ ID NO: 38833 - DNA, 71 bp, Homo sapiens
attctgtggtgtcctagaagcattattggtaggttctaaagttttctagactttcctgtcaattgtaagta

SEQ ID NO: 38834 - DNA, 70 bp, Homo sapiens
gtggtgtcctagaagcattattggtaggttctaaagttttctagactttcctgtcaattgtaagtaattg

SEQ ID NO: 38835 - DNA, 75 bp, Homo sapiens
ggtaggttctaaagttttctagactttcctgtcaattgtaagtaattgtgatatattctatgcagtggatgaatg

SEQ ID NO: 38836 - DNA, 75 bp, Homo sapiens
ctaaagttttctagactttcctgtcaattgtaagtaattgtgatatattctatgcagtggatgaatgttctttaa

SEQ ID NO: 38837 - DNA, 76 bp, Homo sapiens
ctagactttcctgtcaattgtaagtaattgtgatatattctatgcagtggatgaatgttctttaaatttgtgtaaa

SEQ ID NO: 38838 - DNA, 79 bp, Homo sapiens
agtaattgtgatatattctatgcagtggatgaatgttctttaaatttgtgtaaatacttctgcaaaggtactgatgctg

SEQ ID NO: 38839 - DNA, 75 bp, Homo sapiens
atgcagtggatgaatgttctttaaatttgtgtaaatacttctgcaaaggtactgatgctgtaaagtcaaaacagt

SEQ ID NO: 38840 - DNA, 71 bp, Homo sapiens
tgttctttaaatttgtgtaaatacttctgcaaaggtactgatgctgtaaagtcaaaacagttttgtggaac

SEQ ID NO: 38841 - DNA, 71 bp, Homo sapiens
atttgtgtaaatacttctgcaaaggtactgatgctgtaaagtcaaaacagttttgtggaactgtgattttt

SEQ ID NO: 38842 - DNA, 70 bp, Homo sapiens
gtaaatacttctgcaaaggtactgatgctgtaaagtcaaaacagttttgtggaactgtgatttttttttc

SEQ ID NO: 38843 - DNA, 76 bp, Homo sapiens
ttttttgtattatacaccttgtagaactcattttgctggctgaaagagtatggaataatatatctcatgtcatttt

SEQ ID NO: 38844 - DNA, 79 bp, Homo sapiens
tgtattatacaccttgtagaactcattttgctggctgaaagagtatggaataatatatctcatgtcattttttagaaga

SEQ ID NO: 38845 - DNA, 74 bp, Homo sapiens
accttgtagaactcattttgctggctgaaagagtatggaataatatatctcatgtcattttttagaagaaaaac

SEQ ID NO: 38846 - DNA, 74 bp, Homo sapiens
actcattttgctggctgaaagagtatggaataatatatctcatgtcattttttagaagaaaaactatttgaagg

SEQ ID NO: 38847 - DNA, 69 bp, Homo sapiens
gagtatggaataatatatctcatgtcattttttagaagaaaaactatttgaaggtattttttggttttc

SEQ ID NO: 38848 - DNA, 69 bp, Homo sapiens
tatctcatgtcattttttagaagaaaaactatttgaaggtattttttggttttccttaacatgtatcca

SEQ ID NO: 38849 - DNA, 67 bp, Homo sapiens
catgtcattttttagaagaaaaactatttgaaggtattttttggttttccttaacatgtatccactg

SEQ ID NO: 38850 - DNA, 65 bp, Homo sapiens
gaagaaaaactatttgaaggtattttttggttttccttaacatgtatccactgtaaacgtttgtc

SEQ ID NO: 38851 - DNA, 69 bp, Homo sapiens
atttgaaggtattttttggttttccttaacatgtatccactgtaaacgtttgtcgtgtacaagctcaga

SEQ ID NO: 38852 - DNA, 71 bp, Homo sapiens
ttggttttccttaacatgtatccactgtaaacgtttgtcgtgtacaagctcagagcttggacagaattttt

SEQ ID NO: 38853 - DNA, 73 bp, Homo sapiens
ttaacatgtatccactgtaaacgtttgtcgtgtacaagctcagagcttggacagaattttttgtatttgtaaa

SEQ ID NO: 38854 - DNA, 70 bp, Homo sapiens
ccactgtaaacgtttgtcgtgtacaagctcagagcttggacagaattttttgtatttgtaaattggttta

SEQ ID NO: 38855 - DNA, 71 bp, Homo sapiens
acgtttgtcgtgtacaagctcagagcttggacagaattttttgtatttgtaaattggtttaaatacatgga

SEQ ID NO: 38856 - DNA, 71 bp, Homo sapiens
gtacaagctcagagcttggacagaattttttgtatttgtaaattggtttaaatacatggaattttatacag

SEQ ID NO: 38857 - DNA, 67 bp, Homo sapiens
gcttggacagaattttttgtatttgtaaattggtttaaatacatggaattttatacaggttttctcc

SEQ ID NO: 38858 - DNA, 67 bp, Homo sapiens
attttttgtatttgtaaattggtttaaatacatggaattttatacaggttttctcctgtgttatata

SEQ ID NO: 38859 - DNA, 73 bp, Homo sapiens
atttgtaaattggtttaaatacatggaattttatacaggttttctcctgtgttatatatgcattatgtgcagg

SEQ ID NO: 38860 - DNA, 76 bp, Homo sapiens
catggaattttatacaggttttctcctgtgttatatatgcattatgtgcaggtatgatattttcttcactactttt

SEQ ID NO: 38861 - DNA, 76 bp, Homo sapiens
ttttatacaggttttctcctgtgttatatatgcattatgtgcaggtatgatattttcttcactactttttctatct

SEQ ID NO: 38862 - DNA, 78 bp, Homo sapiens
ctgtgttatatatgcattatgtgcaggtatgatattttcttcactactttttctatcttaatatagtgtggaatttta

SEQ ID NO: 38863 - DNA, 76 bp, Homo sapiens
atgcattatgtgcaggtatgatattttcttcactactttttctatcttaatatagtgtggaattttattgtattat

SEQ ID NO: 38864 - DNA, 74 bp, Homo sapiens
gtgcaggtatgatattttcttcactactttttctatcttaatatagtgtggaattttattgtattattcttcca

SEQ ID NO: 38865 - DNA, 72 bp, Homo sapiens
cactactttttctatcttaatatagtgtggaattttattgtattattcttccattcttaatactgtaccaca

SEQ ID NO: 38866 - DNA, 76 bp, Homo sapiens
tcttaatatagtgtggaattttattgtattattcttccattcttaatactgtaccacattcctgctcagaaactgc

SEQ ID NO: 38867 - DNA, 75 bp, Homo sapiens
ttattgtattattcttccattcttaatactgtaccacattcctgctcagaaactgctcacttccttaaattgtct

SEQ ID NO: 38868 - DNA, 73 bp, Homo sapiens
gtattattcttccattcttaatactgtaccacattcctgctcagaaactgctcacttccttaaattgtctttt

SEQ ID NO: 38869 - DNA, 71 bp, Homo sapiens
attcttaatactgtaccacattcctgctcagaaactgctcacttccttaaattgtcttttttcccccagcg

SEQ ID NO: 38870 - DNA, 73 bp, Homo sapiens
atactgtaccacattcctgctcagaaactgctcacttccttaaattgtcttttttcccccagcgtgaaatgta

SEQ ID NO: 38871 - DNA, 72 bp, Homo sapiens
attcctgctcagaaactgctcacttccttaaattgtcttttttcccccagcgtgaaatgtatccatttataa

SEQ ID NO: 38872 - DNA, 70 bp, Homo sapiens
agaaactgctcacttccttaaattgtcttttttcccccagcgtgaaatgtatccatttataactgcctat

SEQ ID NO: 38873 - DNA, 71 bp, Homo sapiens
ttccttaaattgtcttttttcccccagcgtgaaatgtatccatttataactgcctattgcctgttctatta

SEQ ID NO: 38874 - DNA, 73 bp, Homo sapiens
ttgtcttttttcccccagcgtgaaatgtatccatttataactgcctattgcctgttctattagcatccaaaaa

SEQ ID NO: 38875 - DNA, 76 bp, Homo sapiens
tgaaatgtatccatttataactgcctattgcctgttctattagcatccaaaaatgtggaaggcctcccaaccacca

SEQ ID NO: 38876 - DNA, 74 bp, Homo sapiens
gtatccatttataactgcctattgcctgttctattagcatccaaaaatgtggaaggcctcccaaccaccatttc

SEQ ID NO: 38877 - DNA, 76 bp, Homo sapiens
taactgcctattgcctgttctattagcatccaaaaatgtggaaggcctcccaaccaccatttctgctgtgtcctta

SEQ ID NO: 38878 - DNA, 76 bp, Homo sapiens
ctgttctattagcatccaaaaatgtggaaggcctcccaaccaccatttctgctgtgtccttaggatgtgcagtaaa

SEQ ID NO: 38879 - DNA, 75 bp, Homo sapiens
tattagcatccaaaaatgtggaaggcctcccaaccaccatttctgctgtgtccttaggatgtgcagtaaaaaata

SEQ ID NO: 38880 - DNA, 74 bp, Homo sapiens
gcctcccaaccaccatttctgctgtgtccttaggatgtgcagtaaaaaatatagacctaacagtttatgttata

SEQ ID NO: 38881 - DNA, 73 bp, Homo sapiens
ctgctgtgtccttaggatgtgcagtaaaaaatatagacctaacagtttatgttatagaatggctttatttact

SEQ ID NO: 38882 - DNA, 70 bp, Homo sapiens
gtccttaggatgtgcagtaaaaaatatagacctaacagtttatgttatagaatggctttatttactttgg

SEQ ID NO: 38883 - DNA, 70 bp, Homo sapiens
gcagtaaaaaatatagacctaacagtttatgttatagaatggctttatttactttggtgactgtttatag

SEQ ID NO: 38884 - DNA, 67 bp, Homo sapiens
aaaatatagacctaacagtttatgttatagaatggctttatttactttggtgactgtttatagtttt

SEQ ID NO: 38885 - DNA, 66 bp, Homo sapiens
cctaacagtttatgttatagaatggctttatttactttggtgactgtttatagtttttaaataaaa

SEQ ID NO: 38886 - DNA, 68 bp, Homo sapiens
tgttatagaatggctttatttactttggtgactgtttatagtttttaaataaaagactgaacattttc

SEQ ID NO: 38887 - DNA, 67 bp, Homo sapiens
tggctttatttactttggtgactgtttatagtttttaaataaaagactgaacattttcttgagtcct

SEQ ID NO: 38888 - DNA, 71 bp, Homo sapiens
ctttggtgactgtttatagtttttaaataaaagactgaacattttcttgagtccttcatttctgagtatgc

SEQ ID NO: 38889 - DNA, 73 bp, Homo sapiens
tgactgtttatagtttttaaataaaagactgaacattttcttgagtccttcatttctgagtatgcttaagaca

SEQ ID NO: 38890 - DNA, 73 bp, Homo sapiens
tttaaataaaagactgaacattttcttgagtccttcatttctgagtatgcttaagacatcttaaaaatataga

SEQ ID NO: 38891 - DNA, 74 bp, Homo sapiens
aaaagactgaacattttcttgagtccttcatttctgagtatgcttaagacatcttaaaaatatagagagaattc

SEQ ID NO: 38892 - DNA, 77 bp, Homo sapiens
cattttcttgagtccttcatttctgagtatgcttaagacatcttaaaaatatagagagaattctaaattcagctgaa

SEQ ID NO: 38893 - DNA, 76 bp, Homo sapiens
ttctgagtatgcttaagacatcttaaaaatatagagagaattctaaattcagctgaaggcaaggtataacggtcac

SEQ ID NO: 38894 - DNA, 74 bp, Homo sapiens
tgcttaagacatcttaaaaatatagagagaattctaaattcagctgaaggcaaggtataacggtcacctaccta

SEQ ID NO: 38895 - DNA, 73 bp, Homo sapiens
catcttaaaaatatagagagaattctaaattcagctgaaggcaaggtataacggtcacctacctatttgatta

SEQ ID NO: 38896 - DNA, 76 bp, Homo sapiens
gaattctaaattcagctgaaggcaaggtataacggtcacctacctatttgattatatgttgattgataacatatta

SEQ ID NO: 38897 - DNA, 76 bp, Homo sapiens
cagctgaaggcaaggtataacggtcacctacctatttgattatatgttgattgataacatattaaatagagaacaa

SEQ ID NO: 38898 - DNA, 74 bp, Homo sapiens
ggcaaggtataacggtcacctacctatttgattatatgttgattgataacatattaaatagagaacaaataaga

SEQ ID NO: 38899 - DNA, 78 bp, Homo sapiens
atttgattatatgttgattgataacatattaaatagagaacaaataagagaggtcctttacatgacaaatttgcatga

SEQ ID NO: 38900 - DNA, 78 bp, Homo sapiens
atgttgattgataacatattaaatagagaacaaataagagaggtcctttacatgacaaatttgcatgaaataagcaga

SEQ ID NO: 38901 - DNA, 76 bp, Homo sapiens
gataacatattaaatagagaacaaataagagaggtcctttacatgacaaatttgcatgaaataagcagattaacca

SEQ ID NO: 38902 - DNA, 73 bp, Homo sapiens
aaatagagaacaaataagagaggtcctttacatgacaaatttgcatgaaataagcagattaaccaagtattta

SEQ ID NO: 38903 - DNA, 72 bp, Homo sapiens
gagaacaaataagagaggtcctttacatgacaaatttgcatgaaataagcagattaaccaagtatttatttt

SEQ ID NO: 38904 - DNA, 76 bp, Homo sapiens
gaggtcctttacatgacaaatttgcatgaaataagcagattaaccaagtatttatttttcatcttgttataatgca

SEQ ID NO: 38905 - DNA, 81 bp, Homo sapiens
ataagcagattaaccaagtatttatttttcatcttgttataatgcagagcaaatgtagagaacagcaaatgattgatgcag

SEQ ID NO: 38906 - DNA, 80 bp, Homo sapiens
aaccaagtatttatttttcatcttgttataatgcagagcaaatgtagagaacagcaaatgattgatgcagttaaagctca

SEQ ID NO: 38907 - DNA, 82 bp, Homo sapiens
tcttgttataatgcagagcaaatgtagagaacagcaaatgattgatgcagttaaagctcaatatgcctttttttactggata

SEQ ID NO: 38908 - DNA, 82 bp, Homo sapiens
ttataatgcagagcaaatgtagagaacagcaaatgattgatgcagttaaagctcaatatgcctttttttactggatactgta

SEQ ID NO: 38909 - DNA, 78 bp, Homo sapiens
aatgtagagaacagcaaatgattgatgcagttaaagctcaatatgcctttttttactggatactgtacatttggctaa

SEQ ID NO: 38910 - DNA, 74 bp, Homo sapiens
aatgattgatgcagttaaagctcaatatgcctttttttactggatactgtacatttggctaaaagcttttattg

SEQ ID NO: 38911 - DNA, 72 bp, Homo sapiens
gcagttaaagctcaatatgcctttttttactggatactgtacatttggctaaaagcttttattgtttgatgt

SEQ ID NO: 38912 - DNA, 72 bp, Homo sapiens
gctcaatatgcctttttttactggatactgtacatttggctaaaagcttttattgtttgatgttgtgtttct

SEQ ID NO: 38913 - DNA, 73 bp, Homo sapiens
ttttactggatactgtacatttggctaaaagcttttattgtttgatgttgtgtttcttgactgtttattcaga

SEQ ID NO: 38914 - DNA, 75 bp, Homo sapiens
ctggatactgtacatttggctaaaagcttttattgtttgatgttgtgtttcttgactgtttattcagaatcacag

SEQ ID NO: 38915 - DNA, 77 bp, Homo sapiens
gcttttattgtttgatgttgtgtttcttgactgtttattcagaatcacagtgtatccaaatcttcagcttgaatttg

SEQ ID NO: 38916 - DNA, 80 bp, Homo sapiens
tattgtttgatgttgtgtttcttgactgtttattcagaatcacagtgtatccaaatcttcagcttgaatttggaggcaga

SEQ ID NO: 38917 - DNA, 79 bp, Homo sapiens
tgtttcttgactgtttattcagaatcacagtgtatccaaatcttcagcttgaatttggaggcagattcttagagtgaaa

SEQ ID NO: 38918 - DNA, 78 bp, Homo sapiens
ttgactgtttattcagaatcacagtgtatccaaatcttcagcttgaatttggaggcagattcttagagtgaaaaagcc

SEQ ID NO: 38919 - DNA, 79 bp, Homo sapiens
tattcagaatcacagtgtatccaaatcttcagcttgaatttggaggcagattcttagagtgaaaaagcctcagtttcca

SEQ ID NO: 38920 - DNA, 74 bp, Homo sapiens
agtgtatccaaatcttcagcttgaatttggaggcagattcttagagtgaaaaagcctcagtttccatattaaaa

SEQ ID NO: 38921 - DNA, 72 bp, Homo sapiens
ccaaatcttcagcttgaatttggaggcagattcttagagtgaaaaagcctcagtttccatattaaaaatgtt

SEQ ID NO: 38922 - DNA, 70 bp, Homo sapiens
agcttgaatttggaggcagattcttagagtgaaaaagcctcagtttccatattaaaaatgttttaaatat

SEQ ID NO: 38923 - DNA, 68 bp, Homo sapiens
aaatgttttaaatattttgattgaattagtaccaatgtaaaatctagtttcttcctgaaggaggatcc

SEQ ID NO: 38924 - DNA, 75 bp, Homo sapiens
attgaattagtaccaatgtaaaatctagtttcttcctgaaggaggatccctggcgctgtcctgccatgtctcaaa

SEQ ID NO: 38925 - DNA, 76 bp, Homo sapiens
taccaatgtaaaatctagtttcttcctgaaggaggatccctggcgctgtcctgccatgtctcaaaggaatgtttga

SEQ ID NO: 38926 - DNA, 76 bp, Homo sapiens
tgtcctgccatgtctcaaaggaatgtttgagaaacttcatctaatattagttataaggttgtggaatttatgcttg

SEQ ID NO: 38927 - DNA, 71 bp, Homo sapiens
caaaggaatgtttgagaaacttcatctaatattagttataaggttgtggaatttatgcttggcccaccttc

SEQ ID NO: 38928 - DNA, 73 bp, Homo sapiens
aacttcatctaatattagttataaggttgtggaatttatgcttggcccaccttccaagactggcactgcccaa

SEQ ID NO: 38929 - DNA, 73 bp, Homo sapiens
ctaatattagttataaggttgtggaatttatgcttggcccaccttccaagactggcactgcccaacagacacc

SEQ ID NO: 38930 - DNA, 77 bp, Homo sapiens
ttataaggttgtggaatttatgcttggcccaccttccaagactggcactgcccaacagacaccgctgaaatcatgtg

SEQ ID NO: 38931 - DNA, 76 bp, Homo sapiens
aatttatgcttggcccaccttccaagactggcactgcccaacagacaccgctgaaatcatgtgggtatccctagga

SEQ ID NO: 38932 - DNA, 78 bp, Homo sapiens
ttggcccaccttccaagactggcactgcccaacagacaccgctgaaatcatgtgggtatccctaggatggccttcaga

SEQ ID NO: 38933 - DNA, 78 bp, Homo sapiens
cttccaagactggcactgcccaacagacaccgctgaaatcatgtgggtatccctaggatggccttcagagccctcaaa

SEQ ID NO: 38934 - DNA, 77 bp, Homo sapiens
actggcactgcccaacagacaccgctgaaatcatgtgggtatccctaggatggccttcagagccctcaaacttacaa

SEQ ID NO: 38935 - DNA, 75 bp, Homo sapiens
aacagacaccgctgaaatcatgtgggtatccctaggatggccttcagagccctcaaacttacaagcacctggtag

SEQ ID NO: 38936 - DNA, 78 bp, Homo sapiens
tgaaatcatgtgggtatccctaggatggccttcagagccctcaaacttacaagcacctggtagttgacatcatatggg

SEQ ID NO: 38937 - DNA, 74 bp, Homo sapiens
atccctaggatggccttcagagccctcaaacttacaagcacctggtagttgacatcatatggggaattttctat

SEQ ID NO: 38938 - DNA, 75 bp, Homo sapiens
ttcagagccctcaaacttacaagcacctggtagttgacatcatatggggaattttctattcaccgtacttatcca

SEQ ID NO: 38939 - DNA, 71 bp, Homo sapiens
cctcaaacttacaagcacctggtagttgacatcatatggggaattttctattcaccgtacttatccaaaaa

SEQ ID NO: 38940 - DNA, 71 bp, Homo sapiens
cttacaagcacctggtagttgacatcatatggggaattttctattcaccgtacttatccaaaaatctcttt

SEQ ID NO: 38941 - DNA, 68 bp, Homo sapiens
cctggtagttgacatcatatggggaattttctattcaccgtacttatccaaaaatctcttttaaaaag

SEQ ID NO: 38942 - DNA, 65 bp, Homo sapiens
gggaattttctattcaccgtacttatccaaaaatctcttttaaaaagtaaatttgtgcaacaacg

SEQ ID NO: 38943 - DNA, 69 bp, Homo sapiens
tatccaaaaatctcttttaaaaagtaaatttgtgcaacaacgtttatttgaaagataatgtcttctcaa

SEQ ID NO: 38944 - DNA, 68 bp, Homo sapiens
ctcttttaaaaagtaaatttgtgcaacaacgtttatttgaaagataatgtcttctcaaaatcagaaac

SEQ ID NO: 38945 - DNA, 71 bp, Homo sapiens
aaagtaaatttgtgcaacaacgtttatttgaaagataatgtcttctcaaaatcagaaactgcagtggtaat

SEQ ID NO: 38946 - DNA, 72 bp, Homo sapiens
aatttgtgcaacaacgtttatttgaaagataatgtcttctcaaaatcagaaactgcagtggtaattaaatta

SEQ ID NO: 38947 - DNA, 71 bp, Homo sapiens
caacgtttatttgaaagataatgtcttctcaaaatcagaaactgcagtggtaattaaattaatagaaaaga

SEQ ID NO: 38948 - DNA, 73 bp, Homo sapiens
gaaagataatgtcttctcaaaatcagaaactgcagtggtaattaaattaatagaaaagagaacaaactgcagg

SEQ ID NO: 38949 - DNA, 71 bp, Homo sapiens
gtcttctcaaaatcagaaactgcagtggtaattaaattaatagaaaagagaacaaactgcaggtttagaaa

SEQ ID NO: 38950 - DNA, 69 bp, Homo sapiens
caaaatcagaaactgcagtggtaattaaattaatagaaaagagaacaaactgcaggtttagaaaaatgg

SEQ ID NO: 38951 - DNA, 71 bp, Homo sapiens
tgcagtggtaattaaattaatagaaaagagaacaaactgcaggtttagaaaaatggttttcatattcacca

SEQ ID NO: 38952 - DNA, 79 bp, Homo sapiens
aatggttttcatattcaccattcttccacctcattgaattgcatgctgtagttctagcttttctgctataatatgtaaa

SEQ ID NO: 38953 - DNA, 80 bp, Homo sapiens
acctcattgaattgcatgctgtagttctagcttttctgctataatatgtaaatatgactgtagccttttaagcttcagtc

SEQ ID NO: 38954 - DNA, 78 bp, Homo sapiens
tagttctagcttttctgctataatatgtaaatatgactgtagccttttaagcttcagtctcagcagagaatttcctaa

SEQ ID NO: 38955 - DNA, 78 bp, Homo sapiens
ttttctgctataatatgtaaatatgactgtagccttttaagcttcagtctcagcagagaatttcctaaatgcgtttga

SEQ ID NO: 38956 - DNA, 76 bp, Homo sapiens
atatgtaaatatgactgtagccttttaagcttcagtctcagcagagaatttcctaaatgcgtttgacctaatgaaa

SEQ ID NO: 38957 - DNA, 77 bp, Homo sapiens
aaatatgactgtagccttttaagcttcagtctcagcagagaatttcctaaatgcgtttgacctaatgaaactgatca

SEQ ID NO: 38958 - DNA, 76 bp, Homo sapiens
cttttaagcttcagtctcagcagagaatttcctaaatgcgtttgacctaatgaaactgatcatggcttcccactta

SEQ ID NO: 38959 - DNA, 75 bp, Homo sapiens
tcagtctcagcagagaatttcctaaatgcgtttgacctaatgaaactgatcatggcttcccacttaggtttttct

SEQ ID NO: 38960 - DNA, 72 bp, Homo sapiens
cagagaatttcctaaatgcgtttgacctaatgaaactgatcatggcttcccacttaggtttttcttcttata

SEQ ID NO: 38961 - DNA, 70 bp, Homo sapiens
aatttcctaaatgcgtttgacctaatgaaactgatcatggcttcccacttaggtttttcttcttatagct

SEQ ID NO: 38962 - DNA, 73 bp, Homo sapiens
atgcgtttgacctaatgaaactgatcatggcttcccacttaggtttttcttcttatagctttatagaactata

SEQ ID NO: 38963 - DNA, 75 bp, Homo sapiens
tgaaactgatcatggcttcccacttaggtttttcttcttatagctttatagaactatataataatatggacttgc

SEQ ID NO: 38964 - DNA, 76 bp, Homo sapiens
ctgatcatggcttcccacttaggtttttcttcttatagctttatagaactatataataatatggacttgctgtgta

SEQ ID NO: 38965 - DNA, 72 bp, Homo sapiens
cttcccacttaggtttttcttcttatagctttatagaactatataataatatggacttgctgtgtaatggaa

SEQ ID NO: 38966 - DNA, 76 bp, Homo sapiens
tttcttcttatagctttatagaactatataataatatggacttgctgtgtaatggaattaaagtgcttttgcacaa

SEQ ID NO: 38967 - DNA, 78 bp, Homo sapiens
atagctttatagaactatataataatatggacttgctgtgtaatggaattaaagtgcttttgcacaataagttctgca

SEQ ID NO: 38968 - DNA, 75 bp, Homo sapiens
atggacttgctgtgtaatggaattaaagtgcttttgcacaataagttctgcaaaaccctctcattcatgaaaagg

SEQ ID NO: 38969 - DNA, 77 bp, Homo sapiens
taatggaattaaagtgcttttgcacaataagttctgcaaaaccctctcattcatgaaaaggtgctccttgctagaca

SEQ ID NO: 38970 - DNA, 75 bp, Homo sapiens
aattaaagtgcttttgcacaataagttctgcaaaaccctctcattcatgaaaaggtgctccttgctagacagaaa

SEQ ID NO: 38971 - DNA, 73 bp, Homo sapiens
aaaaccctctcattcatgaaaaggtgctccttgctagacagaaacttgctgatttacagtattgttatttttg

SEQ ID NO: 38972 - DNA, 76 bp, Homo sapiens
tcattcatgaaaaggtgctccttgctagacagaaacttgctgatttacagtattgttatttttgtctaaagttctg

SEQ ID NO: 38973 - DNA, 75 bp, Homo sapiens
aggtgctccttgctagacagaaacttgctgatttacagtattgttatttttgtctaaagttctgtaaatacatgc

SEQ ID NO: 38974 - DNA, 74 bp, Homo sapiens
cttgctagacagaaacttgctgatttacagtattgttatttttgtctaaagttctgtaaatacatgctttaatg

SEQ ID NO: 38975 - DNA, 73 bp, Homo sapiens
gaaacttgctgatttacagtattgttatttttgtctaaagttctgtaaatacatgctttaatgttatctttga

SEQ ID NO: 38976 - DNA, 74 bp, Homo sapiens
tgatttacagtattgttatttttgtctaaagttctgtaaatacatgctttaatgttatctttgagaaatctatg

SEQ ID NO: 38977 - DNA, 73 bp, Homo sapiens
ttatttttgtctaaagttctgtaaatacatgctttaatgttatctttgagaaatctatgtaaataatatagtc

SEQ ID NO: 38978 - DNA, 76 bp, Homo sapiens
ctaaagttctgtaaatacatgctttaatgttatctttgagaaatctatgtaaataatatagtctacaacatagaga

SEQ ID NO: 38979 - DNA, 78 bp, Homo sapiens
gttctgtaaatacatgctttaatgttatctttgagaaatctatgtaaataatatagtctacaacatagagactgtata

SEQ ID NO: 38980 - DNA, 79 bp, Homo sapiens
tacatgctttaatgttatctttgagaaatctatgtaaataatatagtctacaacatagagactgtataattctgtgtta

SEQ ID NO: 38981 - DNA, 82 bp, Homo sapiens
tatctttgagaaatctatgtaaataatatagtctacaacatagagactgtataattctgtgttatatatgtgcctagtgctc

SEQ ID NO: 38982 - DNA, 83 bp, Homo sapiens
gagaaatctatgtaaataatatagtctacaacatagagactgtataattctgtgttatatatgtgcctagtgctctgttggca

SEQ ID NO: 38983 - DNA, 82 bp, Homo sapiens
atgtaaataatatagtctacaacatagagactgtataattctgtgttatatatgtgcctagtgctctgttggcactcaataa

SEQ ID NO: 38984 - DNA, 79 bp, Homo sapiens
atagtctacaacatagagactgtataattctgtgttatatatgtgcctagtgctctgttggcactcaataaattttaag

SEQ ID NO: 38985 - DNA, 78 bp, Homo sapiens
caacatagagactgtataattctgtgttatatatgtgcctagtgctctgttggcactcaataaattttaagtaacaaa

SEQ ID NO: 38986 - DNA, 78 bp, Homo sapiens
ctgtataattctgtgttatatatgtgcctagtgctctgttggcactcaataaattttaagtaacaaaattgataatca

SEQ ID NO: 38987 - DNA, 79 bp, Homo sapiens
gtgttatatatgtgcctagtgctctgttggcactcaataaattttaagtaacaaaattgataatcatatagcgaaggca

SEQ ID NO: 38988 - DNA, 76 bp, Homo sapiens
gtgcctagtgctctgttggcactcaataaattttaagtaacaaaattgataatcatatagcgaaggcatatttttc

SEQ ID NO: 38989 - DNA, 75 bp, Homo sapiens
gctctgttggcactcaataaattttaagtaacaaaattgataatcatatagcgaaggcatatttttcttccaagc

SEQ ID NO: 38990 - DNA, 75 bp, Homo sapiens
gcactcaataaattttaagtaacaaaattgataatcatatagcgaaggcatatttttcttccaagctcaagtcag

SEQ ID NO: 38991 - DNA, 77 bp, Homo sapiens
tttaagtaacaaaattgataatcatatagcgaaggcatatttttcttccaagctcaagtcaggattgtgactatata

SEQ ID NO: 38992 - DNA, 81 bp, Homo sapiens
caaaattgataatcatatagcgaaggcatatttttcttccaagctcaagtcaggattgtgactatatattaatgagactca

SEQ ID NO: 38993 - DNA, 81 bp, Homo sapiens
ataatcatatagcgaaggcatatttttcttccaagctcaagtcaggattgtgactatatattaatgagactcagtaatcca

SEQ ID NO: 38994 - DNA, 78 bp, Homo sapiens
atagcgaaggcatatttttcttccaagctcaagtcaggattgtgactatatattaatgagactcagtaatccaaccca

SEQ ID NO: 38995 - DNA, 76 bp, Homo sapiens
atttttcttccaagctcaagtcaggattgtgactatatattaatgagactcagtaatccaacccacacctgagaac

SEQ ID NO: 38996 - DNA, 78 bp, Homo sapiens
agctcaagtcaggattgtgactatatattaatgagactcagtaatccaacccacacctgagaactcgtctcattactt

SEQ ID NO: 38997 - DNA, 77 bp, Homo sapiens
aagtcaggattgtgactatatattaatgagactcagtaatccaacccacacctgagaactcgtctcattactttata

SEQ ID NO: 38998 - DNA, 79 bp, Homo sapiens
ctatatattaatgagactcagtaatccaacccacacctgagaactcgtctcattactttatagtcatgtcatgtatgtt

SEQ ID NO: 38999 - DNA, 77 bp, Homo sapiens
tattaatgagactcagtaatccaacccacacctgagaactcgtctcattactttatagtcatgtcatgtatgttttt

SEQ ID NO: 39000 - DNA, 76 bp, Homo sapiens
caacccacacctgagaactcgtctcattactttatagtcatgtcatgtatgtttttttaaccatgaaatgacaata

SEQ ID NO: 39001 - DNA, 75 bp, Homo sapiens
cctgagaactcgtctcattactttatagtcatgtcatgtatgtttttttaaccatgaaatgacaataaaatgatt

SEQ ID NO: 39002 - DNA, 72 bp, Homo sapiens
cgtctcattactttatagtcatgtcatgtatgtttttttaaccatgaaatgacaataaaatgatttttaaaa

SEQ ID NO: 39003 - DNA, 72 bp, Homo sapiens
cgggagccgtttctatagcgacgggaggagggcgtggccgtcccttgccctctgccgggctctcacagcctc

SEQ ID NO: 39004 - DNA, 74 bp, Homo sapiens
tttctatagcgacgggaggagggcgtggccgtcccttgccctctgccgggctctcacagcctcccgcagcggcg

SEQ ID NO: 39005 - DNA, 73 bp, Homo sapiens
acgggaggagggcgtggccgtcccttgccctctgccgggctctcacagcctcccgcagcggcgggcggtcagc

SEQ ID NO: 39006 - DNA, 80 bp, Homo sapiens
tggccgtcccttgccctctgccgggctctcacagcctcccgcagcggcgggcggtcagcgccggcctcatgcagctcctc

SEQ ID NO: 39007 - DNA, 80 bp, Homo sapiens
ttgccctctgccgggctctcacagcctcccgcagcggcgggcggtcagcgccggcctcatgcagctcctcccgccgccta

SEQ ID NO: 39008 - DNA, 81 bp, Homo sapiens
tctgccgggctctcacagcctcccgcagcggcgggcggtcagcgccggcctcatgcagctcctcccgccgcctatccgcac

SEQ ID NO: 39009 - DNA, 78 bp, Homo sapiens
tcacagcctcccgcagcggcgggcggtcagcgccggcctcatgcagctcctcccgccgcctatccgcaccggaacaaa

SEQ ID NO: 39010 - DNA, 75 bp, Homo sapiens
tcccgcagcggcgggcggtcagcgccggcctcatgcagctcctcccgccgcctatccgcaccggaacaaagtaag

SEQ ID NO: 39011 - DNA, 75 bp, Homo sapiens
gcggtcagcgccggcctcatgcagctcctcccgccgcctatccgcaccggaacaaagtaagggccgcggaggctc

SEQ ID NO: 39012 - DNA, 73 bp, Homo sapiens
ccggcctcatgcagctcctcccgccgcctatccgcaccggaacaaagtaagggccgcggaggctcgtacttca

SEQ ID NO: 39013 - DNA, 75 bp, Homo sapiens
atgcagctcctcccgccgcctatccgcaccggaacaaagtaagggccgcggaggctcgtacttcacgagcagtca

SEQ ID NO: 39014 - DNA, 73 bp, Homo sapiens
attacttagatttgactcctcctgccaatttattttttactttccctcatgcaggactcaaatggatgctaaa

SEQ ID NO: 39015 - DNA, 71 bp, Homo sapiens
actcctcctgccaatttattttttactttccctcatgcaggactcaaatggatgctaaaaagccaaggaaa

SEQ ID NO: 39016 - DNA, 73 bp, Homo sapiens
caatttattttttactttccctcatgcaggactcaaatggatgctaaaaagccaaggaaatgtgatttgactc

SEQ ID NO: 39017 - DNA, 73 bp, Homo sapiens
tttttactttccctcatgcaggactcaaatggatgctaaaaagccaaggaaatgtgatttgactcccttcctg

SEQ ID NO: 39018 - DNA, 74 bp, Homo sapiens
tttccctcatgcaggactcaaatggatgctaaaaagccaaggaaatgtgatttgactcccttcctggttttgaa

SEQ ID NO: 39019 - DNA, 71 bp, Homo sapiens
aggactcaaatggatgctaaaaagccaaggaaatgtgatttgactcccttcctggttttgaaagcaagaaa

SEQ ID NO: 39020 - DNA, 70 bp, Homo sapiens
aatggatgctaaaaagccaaggaaatgtgatttgactcccttcctggttttgaaagcaagaaagaaacaa

SEQ ID NO: 39021 - DNA, 67 bp, Homo sapiens
aaaagccaaggaaatgtgatttgactcccttcctggttttgaaagcaagaaagaaacaaaagttcac

SEQ ID NO: 39022 - DNA, 69 bp, Homo sapiens
atgtgatttgactcccttcctggttttgaaagcaagaaagaaacaaaagttcacctctgcgaaggtaaa

SEQ ID NO: 39023 - DNA, 68 bp, Homo sapiens
ctcccttcctggttttgaaagcaagaaagaaacaaaagttcacctctgcgaaggtaaagatccttgaa

SEQ ID NO: 39024 - DNA, 69 bp, Homo sapiens
ttcctggttttgaaagcaagaaagaaacaaaagttcacctctgcgaaggtaaagatccttgaattttca

SEQ ID NO: 39025 - DNA, 69 bp, Homo sapiens
aaagcaagaaagaaacaaaagttcacctctgcgaaggtaaagatccttgaattttcactggggaagaga

SEQ ID NO: 39026 - DNA, 74 bp, Homo sapiens
tatacagtgtgggataaagccatgccaagcattgttcctattttcttccacttgatccaggttggaagtaaact

SEQ ID NO: 39027 - DNA, 72 bp, Homo sapiens
ataaagccatgccaagcattgttcctattttcttccacttgatccaggttggaagtaaactttcggttcaga

SEQ ID NO: 39028 - DNA, 73 bp, Homo sapiens
atgccaagcattgttcctattttcttccacttgatccaggttggaagtaaactttcggttcagatccagaagc

SEQ ID NO: 39029 - DNA, 69 bp, Homo sapiens
attgttcctattttcttccacttgatccaggttggaagtaaactttcggttcagatccagaagccacct

SEQ ID NO: 39030 - DNA, 72 bp, Homo sapiens
cttccacttgatccaggttggaagtaaactttcggttcagatccagaagccaccttccaatatcaagaactc

SEQ ID NO: 39031 - DNA, 72 bp, Homo sapiens
acttgatccaggttggaagtaaactttcggttcagatccagaagccaccttccaatatcaagaactccagaa

SEQ ID NO: 39032 - DNA, 73 bp, Homo sapiens
gaagtaaactttcggttcagatccagaagccaccttccaatatcaagaactccagaatgacccaagtctttca

SEQ ID NO: 39033 - DNA, 72 bp, Homo sapiens
aaactttcggttcagatccagaagccaccttccaatatcaagaactccagaatgacccaagtctttcataag

SEQ ID NO: 39034 - DNA, 76 bp, Homo sapiens
agatccagaagccaccttccaatatcaagaactccagaatgacccaagtctttcataaggtagggagtgatggtca

SEQ ID NO: 39035 - DNA, 73 bp, Homo sapiens
ccaccttccaatatcaagaactccagaatgacccaagtctttcataaggtagggagtgatggtcagctccttt

SEQ ID NO: 39036 - DNA, 75 bp, Homo sapiens
aatatcaagaactccagaatgacccaagtctttcataaggtagggagtgatggtcagctccttttctctaggaga

SEQ ID NO: 39037 - DNA, 75 bp, Homo sapiens
agaactccagaatgacccaagtctttcataaggtagggagtgatggtcagctccttttctctaggagagaatgag

SEQ ID NO: 39038 - DNA, 70 bp, Homo sapiens
ttacctcacaaaagccttatgaggtaggccccatttttgttcccatggtagtgatgaaataattgaggtt

SEQ ID NO: 39039 - DNA, 69 bp, Homo sapiens
aaaagccttatgaggtaggccccatttttgttcccatggtagtgatgaaataattgaggtttcgagaaa

SEQ ID NO: 39040 - DNA, 74 bp, Homo sapiens
ttatgaggtaggccccatttttgttcccatggtagtgatgaaataattgaggtttcgagaaagagtcagtgtga

SEQ ID NO: 39041 - DNA, 74 bp, Homo sapiens
cccatttttgttcccatggtagtgatgaaataattgaggtttcgagaaagagtcagtgtgagctgttgaaagcc

SEQ ID NO: 39042 - DNA, 79 bp, Homo sapiens
ttcccatggtagtgatgaaataattgaggtttcgagaaagagtcagtgtgagctgttgaaagcctgcagctagtaagta

SEQ ID NO: 39043 - DNA, 80 bp, Homo sapiens
tgatgaaataattgaggtttcgagaaagagtcagtgtgagctgttgaaagcctgcagctagtaagtagtagagcagggac

SEQ ID NO: 39044 - DNA, 78 bp, Homo sapiens
aaataattgaggtttcgagaaagagtcagtgtgagctgttgaaagcctgcagctagtaagtagtagagcagggactca

SEQ ID NO: 39045 - DNA, 79 bp, Homo sapiens
tttcgagaaagagtcagtgtgagctgttgaaagcctgcagctagtaagtagtagagcagggactcaaacccagagccca

SEQ ID NO: 39046 - DNA, 80 bp, Homo sapiens
agtcagtgtgagctgttgaaagcctgcagctagtaagtagtagagcagggactcaaacccagagcccatgtgtttgttga

SEQ ID NO: 39047 - DNA, 81 bp, Homo sapiens
agctgttgaaagcctgcagctagtaagtagtagagcagggactcaaacccagagcccatgtgtttgttgactctgctgctc

SEQ ID NO: 39048 - DNA, 80 bp, Homo sapiens
aaagcctgcagctagtaagtagtagagcagggactcaaacccagagcccatgtgtttgttgactctgctgctctggaatc

SEQ ID NO: 39049 - DNA, 80 bp, Homo sapiens
agctagtaagtagtagagcagggactcaaacccagagcccatgtgtttgttgactctgctgctctggaatctgcatttct

SEQ ID NO: 39050 - DNA, 72 bp, Homo sapiens
acgttttcttgcctaaggcttttgtaacacatgcaatttctccttctacagaacaccagtgttacttcactc

SEQ ID NO: 39051 - DNA, 73 bp, Homo sapiens
taaggcttttgtaacacatgcaatttctccttctacagaacaccagtgttacttcactcccctttgtggacac

SEQ ID NO: 39052 - DNA, 72 bp, Homo sapiens
tttgtaacacatgcaatttctccttctacagaacaccagtgttacttcactcccctttgtggacaccaaggg

SEQ ID NO: 39053 - DNA, 69 bp, Homo sapiens
aatttctccttctacagaacaccagtgttacttcactcccctttgtggacaccaaggggaagaagaata

SEQ ID NO: 39054 - DNA, 69 bp, Homo sapiens
ttctacagaacaccagtgttacttcactcccctttgtggacaccaaggggaagaagaatacggtaagct

SEQ ID NO: 39055 - DNA, 69 bp, Homo sapiens
ccagtgttacttcactcccctttgtggacaccaaggggaagaagaatacggtaagcttcccacacatta

SEQ ID NO: 39056 - DNA, 70 bp, Homo sapiens
ttacttcactcccctttgtggacaccaaggggaagaagaatacggtaagcttcccacacattagcaagaa

SEQ ID NO: 39057 - DNA, 74 bp, Homo sapiens
tttgtggacaccaaggggaagaagaatacggtaagcttcccacacattagcaagaaagtcctgctgaagtcatc

SEQ ID NO: 39058 - DNA, 74 bp, Homo sapiens
accaaggggaagaagaatacggtaagcttcccacacattagcaagaaagtcctgctgaagtcatccctgctgta

SEQ ID NO: 39059 - DNA, 80 bp, Homo sapiens
aagaagaatacggtaagcttcccacacattagcaagaaagtcctgctgaagtcatccctgctgtatcaggtgagtgcaga

SEQ ID NO: 39060 - DNA, 80 bp, Homo sapiens
atacggtaagcttcccacacattagcaagaaagtcctgctgaagtcatccctgctgtatcaggtgagtgcagacggactg

SEQ ID NO: 39061 - DNA, 81 bp, Homo sapiens
cttcccacacattagcaagaaagtcctgctgaagtcatccctgctgtatcaggtgagtgcagacggactggaccctgagaa

SEQ ID NO: 39062 - DNA, 81 bp, Homo sapiens
attagcaagaaagtcctgctgaagtcatccctgctgtatcaggtgagtgcagacggactggaccctgagaaggcaggtgaa

SEQ ID NO: 39063 - DNA, 75 bp, Homo sapiens
aggagagtcctaagtagttatttattgcaaacctcttttcctggacaggagaatcaagctcacaatcagatgccg

SEQ ID NO: 39064 - DNA, 79 bp, Homo sapiens
taagtagttatttattgcaaacctcttttcctggacaggagaatcaagctcacaatcagatgccggcctcagagctcaa

SEQ ID NO: 39065 - DNA, 81 bp, Homo sapiens
tatttattgcaaacctcttttcctggacaggagaatcaagctcacaatcagatgccggcctcagagctcaaggcttcagaa

SEQ ID NO: 39066 - DNA, 77 bp, Homo sapiens
aacctcttttcctggacaggagaatcaagctcacaatcagatgccggcctcagagctcaaggcttcagaaatacctt

SEQ ID NO: 39067 - DNA, 81 bp, Homo sapiens
tggacaggagaatcaagctcacaatcagatgccggcctcagagctcaaggcttcagaaatacctttccaccctagcattaa

SEQ ID NO: 39068 - DNA, 77 bp, Homo sapiens
agaatcaagctcacaatcagatgccggcctcagagctcaaggcttcagaaatacctttccaccctagcattaaaacc

SEQ ID NO: 39069 - DNA, 75 bp, Homo sapiens
acaatcagatgccggcctcagagctcaaggcttcagaaatacctttccaccctagcattaaaacccaggatccca

SEQ ID NO: 39070 - DNA, 74 bp, Homo sapiens
agatgccggcctcagagctcaaggcttcagaaatacctttccaccctagcattaaaacccaggatcccaaggca

SEQ ID NO: 39071 - DNA, 73 bp, Homo sapiens
agagctcaaggcttcagaaatacctttccaccctagcattaaaacccaggatcccaaggcagaggagaagtca

SEQ ID NO: 39072 - DNA, 70 bp, Homo sapiens
cttcagaaatacctttccaccctagcattaaaacccaggatcccaaggcagaggagaagtcaccaaagaa

SEQ ID NO: 39073 - DNA, 73 bp, Homo sapiens
ttccaccctagcattaaaacccaggatcccaaggcagaggagaagtcaccaaagaagcaaaaggtgactctga

SEQ ID NO: 39074 - DNA, 73 bp, Homo sapiens
attaaaacccaggatcccaaggcagaggagaagtcaccaaagaagcaaaaggtgactctgacagcggcaggta

SEQ ID NO: 39075 - DNA, 74 bp, Homo sapiens
aacccaggatcccaaggcagaggagaagtcaccaaagaagcaaaaggtgactctgacagcggcaggtatgcctt

SEQ ID NO: 39076 - DNA, 76 bp, Homo sapiens
aaggcagaggagaagtcaccaaagaagcaaaaggtgactctgacagcggcaggtatgcctttggggcagtagcagg

SEQ ID NO: 39077 - DNA, 74 bp, Homo sapiens
aggagaagtcaccaaagaagcaaaaggtgactctgacagcggcaggtatgcctttggggcagtagcagggtggg

SEQ ID NO: 39078 - DNA, 74 bp, Homo sapiens
atccggggcaaatcccatgctgcctcaactgaactcacaattgtagtgtttttcacacagaggccctaaagctt

SEQ ID NO: 39079 - DNA, 73 bp, Homo sapiens
aaatcccatgctgcctcaactgaactcacaattgtagtgtttttcacacagaggccctaaagctttttaagaa

SEQ ID NO: 39080 - DNA, 75 bp, Homo sapiens
atgctgcctcaactgaactcacaattgtagtgtttttcacacagaggccctaaagctttttaagaaccagctgtc

SEQ ID NO: 39081 - DNA, 75 bp, Homo sapiens
tgaactcacaattgtagtgtttttcacacagaggccctaaagctttttaagaaccagctgtctccatatgaacaa

SEQ ID NO: 39082 - DNA, 72 bp, Homo sapiens
aattgtagtgtttttcacacagaggccctaaagctttttaagaaccagctgtctccatatgaacaaagtgaa

SEQ ID NO: 39083 - DNA, 73 bp, Homo sapiens
tttttcacacagaggccctaaagctttttaagaaccagctgtctccatatgaacaaagtgaaatcctgggcta

SEQ ID NO: 39084 - DNA, 73 bp, Homo sapiens
aggccctaaagctttttaagaaccagctgtctccatatgaacaaagtgaaatcctgggctacgcggagctgtg

SEQ ID NO: 39085 - DNA, 74 bp, Homo sapiens
taaagctttttaagaaccagctgtctccatatgaacaaagtgaaatcctgggctacgcggagctgtggttcctg

SEQ ID NO: 39086 - DNA, 76 bp, Homo sapiens
ttaagaaccagctgtctccatatgaacaaagtgaaatcctgggctacgcggagctgtggttcctgggtcttgaagc

SEQ ID NO: 39087 - DNA, 78 bp, Homo sapiens
tgtctccatatgaacaaagtgaaatcctgggctacgcggagctgtggttcctgggtcttgaagccaagaagctcgaca

SEQ ID NO: 39088 - DNA, 75 bp, Homo sapiens
acaaagtgaaatcctgggctacgcggagctgtggttcctgggtcttgaagccaagaagctcgacacggctcctga

SEQ ID NO: 39089 - DNA, 73 bp, Homo sapiens
aaatcctgggctacgcggagctgtggttcctgggtcttgaagccaagaagctcgacacggctcctgagaaatt

SEQ ID NO: 39090 - DNA, 75 bp, Homo sapiens
tacgcggagctgtggttcctgggtcttgaagccaagaagctcgacacggctcctgagaaatttagcaagacgagt

SEQ ID NO: 39091 - DNA, 77 bp, Homo sapiens
ctgtggttcctgggtcttgaagccaagaagctcgacacggctcctgagaaatttagcaagacgagttttgatgatga

SEQ ID NO: 39092 - DNA, 82 bp, Homo sapiens
ggtcttgaagccaagaagctcgacacggctcctgagaaatttagcaagacgagttttgatgatgagcatggcttctatctga

SEQ ID NO: 39093 - DNA, 81 bp, Homo sapiens
aagccaagaagctcgacacggctcctgagaaatttagcaagacgagttttgatgatgagcatggcttctatctgaaggtga

SEQ ID NO: 39094 - DNA, 79 bp, Homo sapiens
aagctcgacacggctcctgagaaatttagcaagacgagttttgatgatgagcatggcttctatctgaaggtgatggggg

SEQ ID NO: 39095 - DNA, 79 bp, Homo sapiens
tcctgagaaatttagcaagacgagttttgatgatgagcatggcttctatctgaaggtgatgggggtgggggccatggga

SEQ ID NO: 39096 - DNA, 75 bp, Homo sapiens
aaatttagcaagacgagttttgatgatgagcatggcttctatctgaaggtgatgggggtgggggccatgggaacc

SEQ ID NO: 39097 - DNA, 76 bp, Homo sapiens
aagacgagttttgatgatgagcatggcttctatctgaaggtgatgggggtgggggccatgggaacctgcaggggcc

SEQ ID NO: 39098 - DNA, 81 bp, Homo sapiens
tgggagcccatggctttgctcttcacctccggcctggcttccacaggtcctgcatgatcacattgcctaccgctatgaagt

SEQ ID NO: 39099 - DNA, 82 bp, Homo sapiens
tggctttgctcttcacctccggcctggcttccacaggtcctgcatgatcacattgcctaccgctatgaagttctggagacaa

SEQ ID NO: 39100 - DNA, 80 bp, Homo sapiens
tcttcacctccggcctggcttccacaggtcctgcatgatcacattgcctaccgctatgaagttctggagacaatcgggaa

SEQ ID NO: 39101 - DNA, 77 bp, Homo sapiens
cctccggcctggcttccacaggtcctgcatgatcacattgcctaccgctatgaagttctggagacaatcgggaaggg

SEQ ID NO: 39102 - DNA, 77 bp, Homo sapiens
ttccacaggtcctgcatgatcacattgcctaccgctatgaagttctggagacaatcgggaaggggtcctttggacag

SEQ ID NO: 39103 - DNA, 78 bp, Homo sapiens
tgcatgatcacattgcctaccgctatgaagttctggagacaatcgggaaggggtcctttggacaggtggccaagtgct

SEQ ID NO: 39104 - DNA, 74 bp, Homo sapiens
atcacattgcctaccgctatgaagttctggagacaatcgggaaggggtcctttggacaggtggccaagtgcttg

SEQ ID NO: 39105 - DNA, 73 bp, Homo sapiens
taccgctatgaagttctggagacaatcgggaaggggtcctttggacaggtggccaagtgcttggatcacaaaa

SEQ ID NO: 39106 - DNA, 72 bp, Homo sapiens
aagttctggagacaatcgggaaggggtcctttggacaggtggccaagtgcttggatcacaaaaacaatgagc

SEQ ID NO: 39107 - DNA, 72 bp, Homo sapiens
aatcgggaaggggtcctttggacaggtggccaagtgcttggatcacaaaaacaatgagctggtggccctgaa

SEQ ID NO: 39108 - DNA, 76 bp, Homo sapiens
gggtcctttggacaggtggccaagtgcttggatcacaaaaacaatgagctggtggccctgaaaatcatcaggaaca

SEQ ID NO: 39109 - DNA, 77 bp, Homo sapiens
ctttggacaggtggccaagtgcttggatcacaaaaacaatgagctggtggccctgaaaatcatcaggaacaagaaga

SEQ ID NO: 39110 - DNA, 76 bp, Homo sapiens
ccaagtgcttggatcacaaaaacaatgagctggtggccctgaaaatcatcaggaacaagaagaggtgtggcttggg

SEQ ID NO: 39111 - DNA, 78 bp, Homo sapiens
ttggatcacaaaaacaatgagctggtggccctgaaaatcatcaggaacaagaagaggtgtggcttggggatgacatag

SEQ ID NO: 39112 - DNA, 77 bp, Homo sapiens
aaaaacaatgagctggtggccctgaaaatcatcaggaacaagaagaggtgtggcttggggatgacataggccacaga

SEQ ID NO: 39113 - DNA, 72 bp, Homo sapiens
atgtttctatccccatttcccaccctgccggccactcccaatcaccttaggtttcaccagcaggccctgatg

SEQ ID NO: 39114 - DNA, 75 bp, Homo sapiens
atttcccaccctgccggccactcccaatcaccttaggtttcaccagcaggccctgatggagctgaagatcctgga

SEQ ID NO: 39115 - DNA, 79 bp, Homo sapiens
ctgccggccactcccaatcaccttaggtttcaccagcaggccctgatggagctgaagatcctggaagctctcagaaaga

SEQ ID NO: 39116 - DNA, 77 bp, Homo sapiens
actcccaatcaccttaggtttcaccagcaggccctgatggagctgaagatcctggaagctctcagaaagaaggacaa

SEQ ID NO: 39117 - DNA, 77 bp, Homo sapiens
aatcaccttaggtttcaccagcaggccctgatggagctgaagatcctggaagctctcagaaagaaggacaaagacaa

SEQ ID NO: 39118 - DNA, 79 bp, Homo sapiens
tttcaccagcaggccctgatggagctgaagatcctggaagctctcagaaagaaggacaaagacaacacctacaatgtgg

SEQ ID NO: 39119 - DNA, 80 bp, Homo sapiens
ccctgatggagctgaagatcctggaagctctcagaaagaaggacaaagacaacacctacaatgtggtgcatatgaaggac

SEQ ID NO: 39120 - DNA, 78 bp, Homo sapiens
gctgaagatcctggaagctctcagaaagaaggacaaagacaacacctacaatgtggtgcatatgaaggactttttcta

SEQ ID NO: 39121 - DNA, 74 bp, Homo sapiens
atcctggaagctctcagaaagaaggacaaagacaacacctacaatgtggtgcatatgaaggactttttctactt

SEQ ID NO: 39122 - DNA, 76 bp, Homo sapiens
tctcagaaagaaggacaaagacaacacctacaatgtggtgcatatgaaggactttttctactttcgcaatcacttc

SEQ ID NO: 39123 - DNA, 76 bp, Homo sapiens
aggacaaagacaacacctacaatgtggtgcatatgaaggactttttctactttcgcaatcacttctgcatcacctt

SEQ ID NO: 39124 - DNA, 78 bp, Homo sapiens
aagacaacacctacaatgtggtgcatatgaaggactttttctactttcgcaatcacttctgcatcacctttgagctcc

SEQ ID NO: 39125 - DNA, 79 bp, Homo sapiens
atgtggtgcatatgaaggactttttctactttcgcaatcacttctgcatcacctttgagctcctggggtcagctgcctt

SEQ ID NO: 39126 - DNA, 76 bp, Homo sapiens
atatgaaggactttttctactttcgcaatcacttctgcatcacctttgagctcctggggtcagctgccttttcttc

SEQ ID NO: 39127 - DNA, 75 bp, Homo sapiens
tttttctactttcgcaatcacttctgcatcacctttgagctcctggggtcagctgccttttcttcttaactcatt

SEQ ID NO: 39128 - DNA, 75 bp, Homo sapiens
tatgtttttttacacccatatgcatcacttttcccctcttttccagaatcaacttgtatgagttgatgaagaata

SEQ ID NO: 39129 - DNA, 74 bp, Homo sapiens
tttttacacccatatgcatcacttttcccctcttttccagaatcaacttgtatgagttgatgaagaataacaac

SEQ ID NO: 39130 - DNA, 76 bp, Homo sapiens
atatgcatcacttttcccctcttttccagaatcaacttgtatgagttgatgaagaataacaactttcaaggcttca

SEQ ID NO: 39131 - DNA, 75 bp, Homo sapiens
tttcccctcttttccagaatcaacttgtatgagttgatgaagaataacaactttcaaggcttcagtctgtccata

SEQ ID NO: 39132 - DNA, 76 bp, Homo sapiens
ttttccagaatcaacttgtatgagttgatgaagaataacaactttcaaggcttcagtctgtccatagttcggcgct

SEQ ID NO: 39133 - DNA, 78 bp, Homo sapiens
aatcaacttgtatgagttgatgaagaataacaactttcaaggcttcagtctgtccatagttcggcgcttcactctctc

SEQ ID NO: 39134 - DNA, 78 bp, Homo sapiens
gtatgagttgatgaagaataacaactttcaaggcttcagtctgtccatagttcggcgcttcactctctctgttttgaa

SEQ ID NO: 39135 - DNA, 79 bp, Homo sapiens
atgaagaataacaactttcaaggcttcagtctgtccatagttcggcgcttcactctctctgttttgaagtgcttgcaga

SEQ ID NO: 39136 - DNA, 78 bp, Homo sapiens
aactttcaaggcttcagtctgtccatagttcggcgcttcactctctctgttttgaagtgcttgcagatgctttcggta

SEQ ID NO: 39137 - DNA, 81 bp, Homo sapiens
ttcagtctgtccatagttcggcgcttcactctctctgttttgaagtgcttgcagatgctttcggtagagaaaatcattcac

SEQ ID NO: 39138 - DNA, 83 bp, Homo sapiens
tccatagttcggcgcttcactctctctgttttgaagtgcttgcagatgctttcggtagagaaaatcattcactgtgatctcaa

SEQ ID NO: 39139 - DNA, 82 bp, Homo sapiens
cgcttcactctctctgttttgaagtgcttgcagatgctttcggtagagaaaatcattcactgtgatctcaagcccgtgagta

SEQ ID NO: 39140 - DNA, 81 bp, Homo sapiens
actctctctgttttgaagtgcttgcagatgctttcggtagagaaaatcattcactgtgatctcaagcccgtgagtaccatc

SEQ ID NO: 39141 - DNA, 79 bp, Homo sapiens
gttttgaagtgcttgcagatgctttcggtagagaaaatcattcactgtgatctcaagcccgtgagtaccatctccgtcc

SEQ ID NO: 39142 - DNA, 83 bp, Homo sapiens
ttgcagatgctttcggtagagaaaatcattcactgtgatctcaagcccgtgagtaccatctccgtcctgccatggacacactc

SEQ ID NO: 39143 - DNA, 77 bp, Homo sapiens
taagtagagggcctagggccgcattactgtagcttgacatatgtcttttcttctctctaggaaaatatagtgctata

SEQ ID NO: 39144 - DNA, 74 bp, Homo sapiens
cctagggccgcattactgtagcttgacatatgtcttttcttctctctaggaaaatatagtgctataccaaaagg

SEQ ID NO: 39145 - DNA, 76 bp, Homo sapiens
tactgtagcttgacatatgtcttttcttctctctaggaaaatatagtgctataccaaaagggccaagcctctgtta

SEQ ID NO: 39146 - DNA, 74 bp, Homo sapiens
ttgacatatgtcttttcttctctctaggaaaatatagtgctataccaaaagggccaagcctctgttaaagtcat

SEQ ID NO: 39147 - DNA, 72 bp, Homo sapiens
ttttcttctctctaggaaaatatagtgctataccaaaagggccaagcctctgttaaagtcattgactttgga

SEQ ID NO: 39148 - DNA, 76 bp, Homo sapiens
tctaggaaaatatagtgctataccaaaagggccaagcctctgttaaagtcattgactttggatcaagctgttatga

SEQ ID NO: 39149 - DNA, 74 bp, Homo sapiens
aaaatatagtgctataccaaaagggccaagcctctgttaaagtcattgactttggatcaagctgttatgaacac

SEQ ID NO: 39150 - DNA, 74 bp, Homo sapiens
ctataccaaaagggccaagcctctgttaaagtcattgactttggatcaagctgttatgaacaccagaaaggtga

SEQ ID NO: 39151 - DNA, 74 bp, Homo sapiens
aaagggccaagcctctgttaaagtcattgactttggatcaagctgttatgaacaccagaaaggtgagccccatg

SEQ ID NO: 39152 - DNA, 79 bp, Homo sapiens
tgttaaagtcattgactttggatcaagctgttatgaacaccagaaaggtgagccccatgtcagtcccatcatctgagtt

SEQ ID NO: 39153 - DNA, 80 bp, Homo sapiens
attgactttggatcaagctgttatgaacaccagaaaggtgagccccatgtcagtcccatcatctgagttttcctattgca

SEQ ID NO: 39154 - DNA, 79 bp, Homo sapiens
tttggatcaagctgttatgaacaccagaaaggtgagccccatgtcagtcccatcatctgagttttcctattgcaatttc

SEQ ID NO: 39155 - DNA, 70 bp, Homo sapiens
ggggagagcgttctggagggtaagaagtttgtcccacgaggtttctcttactttgcctccgcagtataca

SEQ ID NO: 39156 - DNA, 71 bp, Homo sapiens
ttctggagggtaagaagtttgtcccacgaggtttctcttactttgcctccgcagtatacacgtacatccaa

SEQ ID NO: 39157 - DNA, 70 bp, Homo sapiens
taagaagtttgtcccacgaggtttctcttactttgcctccgcagtatacacgtacatccaaagccggttc

SEQ ID NO: 39158 - DNA, 69 bp, Homo sapiens
agtttgtcccacgaggtttctcttactttgcctccgcagtatacacgtacatccaaagccggttctacc

SEQ ID NO: 39159 - DNA, 71 bp, Homo sapiens
aggtttctcttactttgcctccgcagtatacacgtacatccaaagccggttctaccgatccccagaagtga

SEQ ID NO: 39160 - DNA, 74 bp, Homo sapiens
tcttactttgcctccgcagtatacacgtacatccaaagccggttctaccgatccccagaagtgatcctgggcca

SEQ ID NO: 39161 - DNA, 72 bp, Homo sapiens
ctccgcagtatacacgtacatccaaagccggttctaccgatccccagaagtgatcctgggccacccctacga

SEQ ID NO: 39162 - DNA, 71 bp, Homo sapiens
acgtacatccaaagccggttctaccgatccccagaagtgatcctgggccacccctacgacgtggccattga

SEQ ID NO: 39163 - DNA, 73 bp, Homo sapiens
atccaaagccggttctaccgatccccagaagtgatcctgggccacccctacgacgtggccattgacatgtgga

SEQ ID NO: 39164 - DNA, 78 bp, Homo sapiens
ggttctaccgatccccagaagtgatcctgggccacccctacgacgtggccattgacatgtggagcctgggctgcatca

SEQ ID NO: 39165 - DNA, 79 bp, Homo sapiens
cagaagtgatcctgggccacccctacgacgtggccattgacatgtggagcctgggctgcatcacggcggagttgtacac

SEQ ID NO: 39166 - DNA, 79 bp, Homo sapiens
tgatcctgggccacccctacgacgtggccattgacatgtggagcctgggctgcatcacggcggagttgtacacgggcta

SEQ ID NO: 39167 - DNA, 75 bp, Homo sapiens
ccctacgacgtggccattgacatgtggagcctgggctgcatcacggcggagttgtacacgggctaccccctgttc

SEQ ID NO: 39168 - DNA, 73 bp, Homo sapiens
acgtggccattgacatgtggagcctgggctgcatcacggcggagttgtacacgggctaccccctgttccccgg

SEQ ID NO: 39169 - DNA, 74 bp, Homo sapiens
attgacatgtggagcctgggctgcatcacggcggagttgtacacgggctaccccctgttccccggggagaatga

SEQ ID NO: 39170 - DNA, 73 bp, Homo sapiens
agcctgggctgcatcacggcggagttgtacacgggctaccccctgttccccggggagaatgaggtggagcagc

SEQ ID NO: 39171 - DNA, 75 bp, Homo sapiens
atcacggcggagttgtacacgggctaccccctgttccccggggagaatgaggtggagcagctggcctgcatcatg

SEQ ID NO: 39172 - DNA, 74 bp, Homo sapiens
cggagttgtacacgggctaccccctgttccccggggagaatgaggtggagcagctggcctgcatcatggaggta

SEQ ID NO: 39173 - DNA, 73 bp, Homo sapiens
acacgggctaccccctgttccccggggagaatgaggtggagcagctggcctgcatcatggaggtacgcggagg

SEQ ID NO: 39174 - DNA, 77 bp, Homo sapiens
tgttccccggggagaatgaggtggagcagctggcctgcatcatggaggtacgcggagggctggcggtcggctcccac

SEQ ID NO: 39175 - DNA, 75 bp, Homo sapiens
tacgctccacccctcagcctttgaatctgtgctcccacaaagaatgaaccaattgaattatccttattaaggtgc

SEQ ID NO: 39176 - DNA, 77 bp, Homo sapiens
ctcagcctttgaatctgtgctcccacaaagaatgaaccaattgaattatccttattaaggtgctgggtctgccgcca

SEQ ID NO: 39177 - DNA, 76 bp, Homo sapiens
atctgtgctcccacaaagaatgaaccaattgaattatccttattaaggtgctgggtctgccgccagccggcttcat

SEQ ID NO: 39178 - DNA, 76 bp, Homo sapiens
ctcccacaaagaatgaaccaattgaattatccttattaaggtgctgggtctgccgccagccggcttcattcagaca

SEQ ID NO: 39179 - DNA, 77 bp, Homo sapiens
agaatgaaccaattgaattatccttattaaggtgctgggtctgccgccagccggcttcattcagacagcctccagga

SEQ ID NO: 39180 - DNA, 78 bp, Homo sapiens
aattgaattatccttattaaggtgctgggtctgccgccagccggcttcattcagacagcctccaggagacagacattc

SEQ ID NO: 39181 - DNA, 78 bp, Homo sapiens
tattaaggtgctgggtctgccgccagccggcttcattcagacagcctccaggagacagacattctttggtaagtccta

SEQ ID NO: 39182 - DNA, 81 bp, Homo sapiens
ctgggtctgccgccagccggcttcattcagacagcctccaggagacagacattctttggtaagtcctagtgtgtctcatga

SEQ ID NO: 39183 - DNA, 81 bp, Homo sapiens
cgccagccggcttcattcagacagcctccaggagacagacattctttggtaagtcctagtgtgtctcatgaggtgtcacag

SEQ ID NO: 39184 - DNA, 82 bp, Homo sapiens
ttcattcagacagcctccaggagacagacattctttggtaagtcctagtgtgtctcatgaggtgtcacaggccttgaagaca

SEQ ID NO: 39185 - DNA, 81 bp, Homo sapiens
cagcctccaggagacagacattctttggtaagtcctagtgtgtctcatgaggtgtcacaggccttgaagacacctgccata

SEQ ID NO: 39186 - DNA, 70 bp, Homo sapiens
ccactaaagatttacacctgaaactaaatacagaatgttctatctctacagattccaaaggttttcctaa

SEQ ID NO: 39187 - DNA, 70 bp, Homo sapiens
cacctgaaactaaatacagaatgttctatctctacagattccaaaggttttcctaaaaatataaccaaca

SEQ ID NO: 39188 - DNA, 68 bp, Homo sapiens
actaaatacagaatgttctatctctacagattccaaaggttttcctaaaaatataaccaacaacaggg

SEQ ID NO: 39189 - DNA, 67 bp, Homo sapiens
cagaatgttctatctctacagattccaaaggttttcctaaaaatataaccaacaacagggggaaaaa

SEQ ID NO: 39190 - DNA, 64 bp, Homo sapiens
ctctacagattccaaaggttttcctaaaaatataaccaacaacagggggaaaaaaagataccca

SEQ ID NO: 39191 - DNA, 62 bp, Homo sapiens
ccaaaggttttcctaaaaatataaccaacaacagggggaaaaaaagatacccagattccaag

SEQ ID NO: 39192 - DNA, 65 bp, Homo sapiens
ttttcctaaaaatataaccaacaacagggggaaaaaaagatacccagattccaaggacctcacga

SEQ ID NO: 39193 - DNA, 68 bp, Homo sapiens
aaatataaccaacaacagggggaaaaaaagatacccagattccaaggacctcacgatggtgctgaaaa

SEQ ID NO: 39194 - DNA, 70 bp, Homo sapiens
aacaacagggggaaaaaaagatacccagattccaaggacctcacgatggtgctgaaaacctatgacacca

SEQ ID NO: 39195 - DNA, 74 bp, Homo sapiens
aaaaagatacccagattccaaggacctcacgatggtgctgaaaacctatgacaccagcttcctggactttctca

SEQ ID NO: 39196 - DNA, 75 bp, Homo sapiens
atacccagattccaaggacctcacgatggtgctgaaaacctatgacaccagcttcctggactttctcagaaggtg

SEQ ID NO: 39197 - DNA, 74 bp, Homo sapiens
aaggacctcacgatggtgctgaaaacctatgacaccagcttcctggactttctcagaaggtgtttggtgtgagt

SEQ ID NO: 39198 - DNA, 75 bp, Homo sapiens
atggtgctgaaaacctatgacaccagcttcctggactttctcagaaggtgtttggtgtgagtttgttgggacatc

SEQ ID NO: 39199 - DNA, 74 bp, Homo sapiens
aaaacctatgacaccagcttcctggactttctcagaaggtgtttggtgtgagtttgttgggacatctctgcttc

SEQ ID NO: 39200 - DNA, 76 bp, Homo sapiens
tatgacaccagcttcctggactttctcagaaggtgtttggtgtgagtttgttgggacatctctgcttctgggtttc

SEQ ID NO: 39201 - DNA, 68 bp, Homo sapiens
tattaaaaggaaataaaacaataacccatgtggggctttgttggggtgcagatgggaaccttctcttc

SEQ ID NO: 39202 - DNA, 70 bp, Homo sapiens
aataaaacaataacccatgtggggctttgttggggtgcagatgggaaccttctcttcgcatgaccccgga

SEQ ID NO: 39203 - DNA, 72 bp, Homo sapiens
ataacccatgtggggctttgttggggtgcagatgggaaccttctcttcgcatgaccccggaccaggccctca

SEQ ID NO: 39204 - DNA, 77 bp, Homo sapiens
ctttgttggggtgcagatgggaaccttctcttcgcatgaccccggaccaggccctcaagcatgcttggattcatcag

SEQ ID NO: 39205 - DNA, 80 bp, Homo sapiens
gtgcagatgggaaccttctcttcgcatgaccccggaccaggccctcaagcatgcttggattcatcagtctcggaacctca

SEQ ID NO: 39206 - DNA, 77 bp, Homo sapiens
atgggaaccttctcttcgcatgaccccggaccaggccctcaagcatgcttggattcatcagtctcggaacctcaagc

SEQ ID NO: 39207 - DNA, 80 bp, Homo sapiens
ttctcttcgcatgaccccggaccaggccctcaagcatgcttggattcatcagtctcggaacctcaagccacagcccaggc

SEQ ID NO: 39208 - DNA, 77 bp, Homo sapiens
cccggaccaggccctcaagcatgcttggattcatcagtctcggaacctcaagccacagcccaggccccagaccctga

SEQ ID NO: 39209 - DNA, 78 bp, Homo sapiens
gccctcaagcatgcttggattcatcagtctcggaacctcaagccacagcccaggccccagaccctgaggaaatccaat

SEQ ID NO: 39210 - DNA, 74 bp, Homo sapiens
atgcttggattcatcagtctcggaacctcaagccacagcccaggccccagaccctgaggaaatccaattccttt

SEQ ID NO: 39211 - DNA, 71 bp, Homo sapiens
attcatcagtctcggaacctcaagccacagcccaggccccagaccctgaggaaatccaattcctttttccc

SEQ ID NO: 39212 - DNA, 70 bp, Homo sapiens
agtctcggaacctcaagccacagcccaggccccagaccctgaggaaatccaattcctttttcccctctga

SEQ ID NO: 39213 - DNA, 70 bp, Homo sapiens
agccacagcccaggccccagaccctgaggaaatccaattcctttttcccctctgagacaaggaaggacaa

SEQ ID NO: 39214 - DNA, 68 bp, Homo sapiens
caggccccagaccctgaggaaatccaattcctttttcccctctgagacaaggaaggacaaggttcaag

SEQ ID NO: 39215 - DNA, 71 bp, Homo sapiens
accctgaggaaatccaattcctttttcccctctgagacaaggaaggacaaggttcaaggctgtcatcactc

SEQ ID NO: 39216 - DNA, 72 bp, Homo sapiens
aaatccaattcctttttcccctctgagacaaggaaggacaaggttcaaggctgtcatcactcgagcagaaaa

SEQ ID NO: 39217 - DNA, 72 bp, Homo sapiens
aattcctttttcccctctgagacaaggaaggacaaggttcaaggctgtcatcactcgagcagaaaaggtaca

SEQ ID NO: 39218 - DNA, 77 bp, Homo sapiens
tctgagacaaggaaggacaaggttcaaggctgtcatcactcgagcagaaaaggtacagcctgtcaaataaccagtcc

SEQ ID NO: 39219 - DNA, 74 bp, Homo sapiens
aaggaaggacaaggttcaaggctgtcatcactcgagcagaaaaggtacagcctgtcaaataaccagtcctagtc

SEQ ID NO: 39220 - DNA, 80 bp, Homo sapiens
tataatccacatttgaatcttgttcccttctgtcttctctctcctttagcagatgagatcaccaaagagactacagagaa

SEQ ID NO: 39221 - DNA, 76 bp, Homo sapiens
atttgaatcttgttcccttctgtcttctctctcctttagcagatgagatcaccaaagagactacagagaaaacaaa

SEQ ID NO: 39222 - DNA, 76 bp, Homo sapiens
ttgttcccttctgtcttctctctcctttagcagatgagatcaccaaagagactacagagaaaacaaaagatagccc

SEQ ID NO: 39223 - DNA, 80 bp, Homo sapiens
cttctctctcctttagcagatgagatcaccaaagagactacagagaaaacaaaagatagccccacgaagcatgttcagca

SEQ ID NO: 39224 - DNA, 82 bp, Homo sapiens
ctttagcagatgagatcaccaaagagactacagagaaaacaaaagatagccccacgaagcatgttcagcattcaggtgatca

SEQ ID NO: 39225 - DNA, 82 bp, Homo sapiens
atgagatcaccaaagagactacagagaaaacaaaagatagccccacgaagcatgttcagcattcaggtgatcagcaggactg

SEQ ID NO: 39226 - DNA, 80 bp, Homo sapiens
accaaagagactacagagaaaacaaaagatagccccacgaagcatgttcagcattcaggtgatcagcaggactgtctcca

SEQ ID NO: 39227 - DNA, 84 bp, Homo sapiens
cagagaaaacaaaagatagccccacgaagcatgttcagcattcaggtgatcagcaggactgtctccagcacggagctgacactg

SEQ ID NO: 39228 - DNA, 83 bp, Homo sapiens
aaaacaaaagatagccccacgaagcatgttcagcattcaggtgatcagcaggactgtctccagcacggagctgacactgttca

SEQ ID NO: 39229 - DNA, 87 bp, Homo sapiens
atgttcagcattcaggtgatcagcaggactgtctccagcacggagctgacactgttcagctgcctcaactggtagacgctcccaaga

SEQ ID NO: 39230 - DNA, 85 bp, Homo sapiens
attcaggtgatcagcaggactgtctccagcacggagctgacactgttcagctgcctcaactggtagacgctcccaagaagtcaga

SEQ ID NO: 39231 - DNA, 86 bp, Homo sapiens
atcagcaggactgtctccagcacggagctgacactgttcagctgcctcaactggtagacgctcccaagaagtcagaggcagctgtc

SEQ ID NO: 39232 - DNA, 82 bp, Homo sapiens
ggactgtctccagcacggagctgacactgttcagctgcctcaactggtagacgctcccaagaagtcagaggcagctgtcggg

SEQ ID NO: 39233 - DNA, 79 bp, Homo sapiens
acggagctgacactgttcagctgcctcaactggtagacgctcccaagaagtcagaggcagctgtcggggcggaggtgtc

SEQ ID NO: 39234 - DNA, 79 bp, Homo sapiens
acactgttcagctgcctcaactggtagacgctcccaagaagtcagaggcagctgtcggggcggaggtgtccatgacctc

SEQ ID NO: 39235 - DNA, 77 bp, Homo sapiens
agctgcctcaactggtagacgctcccaagaagtcagaggcagctgtcggggcggaggtgtccatgacctccccagga

SEQ ID NO: 39236 - DNA, 76 bp, Homo sapiens
tggtagacgctcccaagaagtcagaggcagctgtcggggcggaggtgtccatgacctccccaggacagagcaaaaa

SEQ ID NO: 39237 - DNA, 74 bp, Homo sapiens
acgctcccaagaagtcagaggcagctgtcggggcggaggtgtccatgacctccccaggacagagcaaaaacttc

SEQ ID NO: 39238 - DNA, 74 bp, Homo sapiens
aagtcagaggcagctgtcggggcggaggtgtccatgacctccccaggacagagcaaaaacttctccctcaagaa

SEQ ID NO: 39239 - DNA, 70 bp, Homo sapiens
tgtcggggcggaggtgtccatgacctccccaggacagagcaaaaacttctccctcaagaacacaaacgtt

SEQ ID NO: 39240 - DNA, 68 bp, Homo sapiens
cggaggtgtccatgacctccccaggacagagcaaaaacttctccctcaagaacacaaacgttttaccc

SEQ ID NO: 39241 - DNA, 69 bp, Homo sapiens
atgacctccccaggacagagcaaaaacttctccctcaagaacacaaacgttttaccccctattgtatga

SEQ ID NO: 39242 - DNA, 69 bp, Homo sapiens
aggacagagcaaaaacttctccctcaagaacacaaacgttttaccccctattgtatgacctttgctgag

SEQ ID NO: 39243 - DNA, 67 bp, Homo sapiens
aaaaacttctccctcaagaacacaaacgttttaccccctattgtatgacctttgctgagggtatgtc

SEQ ID NO: 39244 - DNA, 70 bp, Homo sapiens
ttctccctcaagaacacaaacgttttaccccctattgtatgacctttgctgagggtatgtcctgctcctt

SEQ ID NO: 39245 - DNA, 69 bp, Homo sapiens
aagaacacaaacgttttaccccctattgtatgacctttgctgagggtatgtcctgctcctttccaccag

SEQ ID NO: 39246 - DNA, 79 bp, Homo sapiens
tattgtatgacctttgctgagggtatgtcctgctcctttccaccagtgatttgtattaagacagcacttatattgtaca

SEQ ID NO: 39247 - DNA, 75 bp, Homo sapiens
acctttgctgagggtatgtcctgctcctttccaccagtgatttgtattaagacagcacttatattgtacaatact

SEQ ID NO: 39248 - DNA, 75 bp, Homo sapiens
gtatgtcctgctcctttccaccagtgatttgtattaagacagcacttatattgtacaatacttcagactgttttt

SEQ ID NO: 39249 - DNA, 73 bp, Homo sapiens
cctgctcctttccaccagtgatttgtattaagacagcacttatattgtacaatacttcagactgtttttttta

SEQ ID NO: 39250 - DNA, 73 bp, Homo sapiens
ttccaccagtgatttgtattaagacagcacttatattgtacaatacttcagactgttttttttaaatacataa

SEQ ID NO: 39251 - DNA, 68 bp, Homo sapiens
aagacagcacttatattgtacaatacttcagactgttttttttaaatacataaaactttatgttaaaa

SEQ ID NO: 39252 - DNA, 66 bp, Homo sapiens
ttgtacaatacttcagactgttttttttaaatacataaaactttatgttaaaaaactctattaaca

SEQ ID NO: 39253 - DNA, 67 bp, Homo sapiens
caatacttcagactgttttttttaaatacataaaactttatgttaaaaaactctattaacatggcca

SEQ ID NO: 39254 - DNA, 68 bp, Homo sapiens
ttttttttaaatacataaaactttatgttaaaaaactctattaacatggccaattggcatgactcctc

SEQ ID NO: 39255 - DNA, 74 bp, Homo sapiens
ccagggagaagctgggaagtttaactagaactagatctaacagtcttaatattcatgtatttattctcagaaca

SEQ ID NO: 39256 - DNA, 74 bp, Homo sapiens
gaagctgggaagtttaactagaactagatctaacagtcttaatattcatgtatttattctcagaacatacaaac

SEQ ID NO: 39257 - DNA, 78 bp, Homo sapiens
ctagatctaacagtcttaatattcatgtatttattctcagaacatacaaacttatcttctcagagaatagaaaacaga

SEQ ID NO: 39258 - DNA, 79 bp, Homo sapiens
cagtcttaatattcatgtatttattctcagaacatacaaacttatcttctcagagaatagaaaacagagatttcactca

SEQ ID NO: 39259 - DNA, 80 bp, Homo sapiens
ttcatgtatttattctcagaacatacaaacttatcttctcagagaatagaaaacagagatttcactcagtgacaaagatg

SEQ ID NO: 39260 - DNA, 79 bp, Homo sapiens
atttattctcagaacatacaaacttatcttctcagagaatagaaaacagagatttcactcagtgacaaagatggacaca

SEQ ID NO: 39261 - DNA, 79 bp, Homo sapiens
agaacatacaaacttatcttctcagagaatagaaaacagagatttcactcagtgacaaagatggacacagccagttcac

SEQ ID NO: 39262 - DNA, 77 bp, Homo sapiens
aaacttatcttctcagagaatagaaaacagagatttcactcagtgacaaagatggacacagccagttcaccgtgtcc

SEQ ID NO: 39263 - DNA, 76 bp, Homo sapiens
agagaatagaaaacagagatttcactcagtgacaaagatggacacagccagttcaccgtgtccccccatctactta

SEQ ID NO: 39264 - DNA, 73 bp, Homo sapiens
agatttcactcagtgacaaagatggacacagccagttcaccgtgtccccccatctacttagaaaatcccctgg

SEQ ID NO: 39265 - DNA, 69 bp, Homo sapiens
agtgacaaagatggacacagccagttcaccgtgtccccccatctacttagaaaatcccctgggggaggg

SEQ ID NO: 39266 - DNA, 73 bp, Homo sapiens
gacacagccagttcaccgtgtccccccatctacttagaaaatcccctgggggaggggatgcctagagcataca

SEQ ID NO: 39267 - DNA, 70 bp, Homo sapiens
agttcaccgtgtccccccatctacttagaaaatcccctgggggaggggatgcctagagcatacagcaccc

SEQ ID NO: 39268 - DNA, 71 bp, Homo sapiens
tgtccccccatctacttagaaaatcccctgggggaggggatgcctagagcatacagcaccccttggtgcgg

SEQ ID NO: 39269 - DNA, 74 bp, Homo sapiens
tacttagaaaatcccctgggggaggggatgcctagagcatacagcaccccttggtgcggggctgtgcacaggtc

SEQ ID NO: 39270 - DNA, 73 bp, Homo sapiens
aaaatcccctgggggaggggatgcctagagcatacagcaccccttggtgcggggctgtgcacaggtctaaaga

SEQ ID NO: 39271 - DNA, 76 bp, Homo sapiens
ggaggggatgcctagagcatacagcaccccttggtgcggggctgtgcacaggtctaaagactctcaacttccttta

SEQ ID NO: 39272 - DNA, 75 bp, Homo sapiens
cctagagcatacagcaccccttggtgcggggctgtgcacaggtctaaagactctcaacttcctttaccatccaaa

SEQ ID NO: 39273 - DNA, 73 bp, Homo sapiens
atacagcaccccttggtgcggggctgtgcacaggtctaaagactctcaacttcctttaccatccaaacaggaa

SEQ ID NO: 39274 - DNA, 75 bp, Homo sapiens
ttggtgcggggctgtgcacaggtctaaagactctcaacttcctttaccatccaaacaggaaaacagctgtccaga

SEQ ID NO: 39275 - DNA, 77 bp, Homo sapiens
gctgtgcacaggtctaaagactctcaacttcctttaccatccaaacaggaaaacagctgtccagatgacagtaagat

SEQ ID NO: 39276 - DNA, 74 bp, Homo sapiens
acaggtctaaagactctcaacttcctttaccatccaaacaggaaaacagctgtccagatgacagtaagattcca

SEQ ID NO: 39277 - DNA, 75 bp, Homo sapiens
aagactctcaacttcctttaccatccaaacaggaaaacagctgtccagatgacagtaagattccactgtctgtaa

SEQ ID NO: 39278 - DNA, 75 bp, Homo sapiens
aacttcctttaccatccaaacaggaaaacagctgtccagatgacagtaagattccactgtctgtaatcctcatgg

SEQ ID NO: 39279 - DNA, 80 bp, Homo sapiens
aaaacagctgtccagatgacagtaagattccactgtctgtaatcctcatggtgccaggtctcctggggcatctagggcaa

SEQ ID NO: 39280 - DNA, 85 bp, Homo sapiens
tccagatgacagtaagattccactgtctgtaatcctcatggtgccaggtctcctggggcatctagggcaatgatgctactgcagt

SEQ ID NO: 39281 - DNA, 84 bp, Homo sapiens
actgtctgtaatcctcatggtgccaggtctcctggggcatctagggcaatgatgctactgcagtttatgcagttacacagtcaa

SEQ ID NO: 39282 - DNA, 84 bp, Homo sapiens
ctgtaatcctcatggtgccaggtctcctggggcatctagggcaatgatgctactgcagtttatgcagttacacagtcaagtctg

SEQ ID NO: 39283 - DNA, 83 bp, Homo sapiens
atggtgccaggtctcctggggcatctagggcaatgatgctactgcagtttatgcagttacacagtcaagtctgtgccaaagga

SEQ ID NO: 39284 - DNA, 80 bp, Homo sapiens
atctagggcaatgatgctactgcagtttatgcagttacacagtcaagtctgtgccaaaggaggtcccatccggcggccag

SEQ ID NO: 39285 - DNA, 78 bp, Homo sapiens
atgatgctactgcagtttatgcagttacacagtcaagtctgtgccaaaggaggtcccatccggcggccaggtttctgt

SEQ ID NO: 39286 - DNA, 77 bp, Homo sapiens
tactgcagtttatgcagttacacagtcaagtctgtgccaaaggaggtcccatccggcggccaggtttctgttcagtc

SEQ ID NO: 39287 - DNA, 77 bp, Homo sapiens
tatgcagttacacagtcaagtctgtgccaaaggaggtcccatccggcggccaggtttctgttcagtctggggagcaa

SEQ ID NO: 39288 - DNA, 75 bp, Homo sapiens
acagtcaagtctgtgccaaaggaggtcccatccggcggccaggtttctgttcagtctggggagcaatgccaactg

SEQ ID NO: 39289 - DNA, 76 bp, Homo sapiens
tgtgccaaaggaggtcccatccggcggccaggtttctgttcagtctggggagcaatgccaactggctgcccccata

SEQ ID NO: 39290 - DNA, 76 bp, Homo sapiens
aggaggtcccatccggcggccaggtttctgttcagtctggggagcaatgccaactggctgcccccatagcctggca

SEQ ID NO: 39291 - DNA, 81 bp, Homo sapiens
atccggcggccaggtttctgttcagtctggggagcaatgccaactggctgcccccatagcctggcatgagctgatggccca

SEQ ID NO: 39292 - DNA, 84 bp, Homo sapiens
ttctgttcagtctggggagcaatgccaactggctgcccccatagcctggcatgagctgatggcccagtgcaatcccaaagcaaa

SEQ ID NO: 39293 - DNA, 83 bp, Homo sapiens
ttcagtctggggagcaatgccaactggctgcccccatagcctggcatgagctgatggcccagtgcaatcccaaagcaaagaag

SEQ ID NO: 39294 - DNA, 82 bp, Homo sapiens
agcaatgccaactggctgcccccatagcctggcatgagctgatggcccagtgcaatcccaaagcaaagaagggcagaactgg

SEQ ID NO: 39295 - DNA, 80 bp, Homo sapiens
actggctgcccccatagcctggcatgagctgatggcccagtgcaatcccaaagcaaagaagggcagaactgggccaagaa

SEQ ID NO: 39296 - DNA, 78 bp, Homo sapiens
atgagctgatggcccagtgcaatcccaaagcaaagaagggcagaactgggccaagaagctgtggtaatttgctctccc

SEQ ID NO: 39297 - DNA, 74 bp, Homo sapiens
aatcccaaagcaaagaagggcagaactgggccaagaagctgtggtaatttgctctccctgcctccgacagcgtc

SEQ ID NO: 39298 - DNA, 74 bp, Homo sapiens
aaagcaaagaagggcagaactgggccaagaagctgtggtaatttgctctccctgcctccgacagcgtcgtcctc

SEQ ID NO: 39299 - DNA, 75 bp, Homo sapiens
aagggcagaactgggccaagaagctgtggtaatttgctctccctgcctccgacagcgtcgtcctctccttttgca

SEQ ID NO: 39300 - DNA, 77 bp, Homo sapiens
tgggccaagaagctgtggtaatttgctctccctgcctccgacagcgtcgtcctctccttttgcagccccacacgcag

SEQ ID NO: 39301 - DNA, 77 bp, Homo sapiens
aagctgtggtaatttgctctccctgcctccgacagcgtcgtcctctccttttgcagccccacacgcaggcctcctga

SEQ ID NO: 39302 - DNA, 75 bp, Homo sapiens
aatttgctctccctgcctccgacagcgtcgtcctctccttttgcagccccacacgcaggcctcctgacctgaggg

SEQ ID NO: 39303 - DNA, 76 bp, Homo sapiens
ctgcctccgacagcgtcgtcctctccttttgcagccccacacgcaggcctcctgacctgagggtctgggctaggga

SEQ ID NO: 39304 - DNA, 73 bp, Homo sapiens
cgtcgtcctctccttttgcagccccacacgcaggcctcctgacctgagggtctgggctagggagttggattgt

SEQ ID NO: 39305 - DNA, 73 bp, Homo sapiens
tcctctccttttgcagccccacacgcaggcctcctgacctgagggtctgggctagggagttggattgttttcc

SEQ ID NO: 39306 - DNA, 71 bp, Homo sapiens
agccccacacgcaggcctcctgacctgagggtctgggctagggagttggattgttttcctaagcccccata

SEQ ID NO: 39307 - DNA, 72 bp, Homo sapiens
caggcctcctgacctgagggtctgggctagggagttggattgttttcctaagcccccatatcccaagagtga

SEQ ID NO: 39308 - DNA, 72 bp, Homo sapiens
tgacctgagggtctgggctagggagttggattgttttcctaagcccccatatcccaagagtgaggacctgga

SEQ ID NO: 39309 - DNA, 69 bp, Homo sapiens
agggtctgggctagggagttggattgttttcctaagcccccatatcccaagagtgaggacctggaaaga

SEQ ID NO: 39310 - DNA, 70 bp, Homo sapiens
ctagggagttggattgttttcctaagcccccatatcccaagagtgaggacctggaaagagggatgtgagg

SEQ ID NO: 39311 - DNA, 69 bp, Homo sapiens
attgttttcctaagcccccatatcccaagagtgaggacctggaaagagggatgtgagggttctgaaaaa

SEQ ID NO: 39312 - DNA, 77 bp, Homo sapiens
atatcccaagagtgaggacctggaaagagggatgtgagggttctgaaaaacaggcatcaggcagctttggagatgcc

SEQ ID NO: 39313 - DNA, 78 bp, Homo sapiens
agtgaggacctggaaagagggatgtgagggttctgaaaaacaggcatcaggcagctttggagatgccctcagcccaca

SEQ ID NO: 39314 - DNA, 79 bp, Homo sapiens
aaagagggatgtgagggttctgaaaaacaggcatcaggcagctttggagatgccctcagcccacaggaagagtgctgtg

SEQ ID NO: 39315 - DNA, 82 bp, Homo sapiens
atgtgagggttctgaaaaacaggcatcaggcagctttggagatgccctcagcccacaggaagagtgctgtgtcaggcaaaga

SEQ ID NO: 39316 - DNA, 83 bp, Homo sapiens
ttctgaaaaacaggcatcaggcagctttggagatgccctcagcccacaggaagagtgctgtgtcaggcaaagatggtctcttc

SEQ ID NO: 39317 - DNA, 82 bp, Homo sapiens
aggcatcaggcagctttggagatgccctcagcccacaggaagagtgctgtgtcaggcaaagatggtctcttcccggcgcttc

SEQ ID NO: 39318 - DNA, 80 bp, Homo sapiens
agatgccctcagcccacaggaagagtgctgtgtcaggcaaagatggtctcttcccggcgcttcttggtgaggatggtgcc

SEQ ID NO: 39319 - DNA, 80 bp, Homo sapiens
ccacaggaagagtgctgtgtcaggcaaagatggtctcttcccggcgcttcttggtgaggatggtgcctggcttatgctgg

SEQ ID NO: 39320 - DNA, 81 bp, Homo sapiens
aagagtgctgtgtcaggcaaagatggtctcttcccggcgcttcttggtgaggatggtgcctggcttatgctgggcatctgg

SEQ ID NO: 39321 - DNA, 80 bp, Homo sapiens
tcaggcaaagatggtctcttcccggcgcttcttggtgaggatggtgcctggcttatgctgggcatctgggtggttggcta

SEQ ID NO: 39322 - DNA, 76 bp, Homo sapiens
aaagatggtctcttcccggcgcttcttggtgaggatggtgcctggcttatgctgggcatctgggtggttggctagt

SEQ ID NO: 39323 - DNA, 75 bp, Homo sapiens
ttcccggcgcttcttggtgaggatggtgcctggcttatgctgggcatctgggtggttggctagttcggggggaca

SEQ ID NO: 39324 - DNA, 76 bp, Homo sapiens
ttcttggtgaggatggtgcctggcttatgctgggcatctgggtggttggctagttcggggggacaggaagacactg

SEQ ID NO: 39325 - DNA, 74 bp, Homo sapiens
atggtgcctggcttatgctgggcatctgggtggttggctagttcggggggacaggaagacactgggctttccag

SEQ ID NO: 39326 - DNA, 74 bp, Homo sapiens
cttatgctgggcatctgggtggttggctagttcggggggacaggaagacactgggctttccaggatagcttgct

SEQ ID NO: 39327 - DNA, 77 bp, Homo sapiens
tggttggctagttcggggggacaggaagacactgggctttccaggatagcttgcttcagctcgtagaacacagcaga

SEQ ID NO: 39328 - DNA, 77 bp, Homo sapiens
acaggaagacactgggctttccaggatagcttgcttcagctcgtagaacacagcagagtcctcttttgtgaggaagg

SEQ ID NO: 39329 - DNA, 80 bp, Homo sapiens
agacactgggctttccaggatagcttgcttcagctcgtagaacacagcagagtcctcttttgtgaggaaggtgatggcca

SEQ ID NO: 39330 - DNA, 78 bp, Homo sapiens
tttccaggatagcttgcttcagctcgtagaacacagcagagtcctcttttgtgaggaaggtgatggccaccccactct

SEQ ID NO: 39331 - DNA, 81 bp, Homo sapiens
tagcttgcttcagctcgtagaacacagcagagtcctcttttgtgaggaaggtgatggccaccccactcttgcctgctcgtc

SEQ ID NO: 39332 - DNA, 77 bp, Homo sapiens
agctcgtagaacacagcagagtcctcttttgtgaggaaggtgatggccaccccactcttgcctgctcgtcccgtgcg

SEQ ID NO: 39333 - DNA, 77 bp, Homo sapiens
aacacagcagagtcctcttttgtgaggaaggtgatggccaccccactcttgcctgctcgtcccgtgcggccaatgcg

SEQ ID NO: 39334 - DNA, 77 bp, Homo sapiens
tcttttgtgaggaaggtgatggccaccccactcttgcctgctcgtcccgtgcggccaatgcggtggatgtaatctgg

SEQ ID NO: 39335 - DNA, 75 bp, Homo sapiens
aggaaggtgatggccaccccactcttgcctgctcgtcccgtgcggccaatgcggtggatgtaatctggggaatgg

SEQ ID NO: 39336 - DNA, 76 bp, Homo sapiens
tggccaccccactcttgcctgctcgtcccgtgcggccaatgcggtggatgtaatctggggaatgggaagaacgtca

SEQ ID NO: 39337 - DNA, 78 bp, Homo sapiens
actcttgcctgctcgtcccgtgcggccaatgcggtggatgtaatctggggaatgggaagaacgtcactcagcatagcc

SEQ ID NO: 39338 - DNA, 75 bp, Homo sapiens
taaggaatctgacttcaccctggattgaagctgctttccctggaacttaccttcaatatttttggccatatcata

SEQ ID NO: 39339 - DNA, 75 bp, Homo sapiens
ttcaccctggattgaagctgctttccctggaacttaccttcaatatttttggccatatcatagttgacaaccata

SEQ ID NO: 39340 - DNA, 76 bp, Homo sapiens
attgaagctgctttccctggaacttaccttcaatatttttggccatatcatagttgacaaccatagacacatcttg

SEQ ID NO: 39341 - DNA, 76 bp, Homo sapiens
tttccctggaacttaccttcaatatttttggccatatcatagttgacaaccatagacacatcttggatgtcaatac

SEQ ID NO: 39342 - DNA, 78 bp, Homo sapiens
tggaacttaccttcaatatttttggccatatcatagttgacaaccatagacacatcttggatgtcaataccacgacca

SEQ ID NO: 39343 - DNA, 81 bp, Homo sapiens
ccttcaatatttttggccatatcatagttgacaaccatagacacatcttggatgtcaataccacgaccagccacatctgta

SEQ ID NO: 39344 - DNA, 82 bp, Homo sapiens
tttggccatatcatagttgacaaccatagacacatcttggatgtcaataccacgaccagccacatctgtagccaccaaaata

SEQ ID NO: 39345 - DNA, 81 bp, Homo sapiens
atcatagttgacaaccatagacacatcttggatgtcaataccacgaccagccacatctgtagccaccaaaatatccttggc

SEQ ID NO: 39346 - DNA, 77 bp, Homo sapiens
aaccatagacacatcttggatgtcaataccacgaccagccacatctgtagccaccaaaatatccttggccccagcct

SEQ ID NO: 39347 - DNA, 77 bp, Homo sapiens
tcttggatgtcaataccacgaccagccacatctgtagccaccaaaatatccttggccccagccttgaggttggacaa

SEQ ID NO: 39348 - DNA, 76 bp, Homo sapiens
atgtcaataccacgaccagccacatctgtagccaccaaaatatccttggccccagccttgaggttggacaacgcaa

SEQ ID NO: 39349 - DNA, 76 bp, Homo sapiens
accagccacatctgtagccaccaaaatatccttggccccagccttgaggttggacaacgcaaactctcgctgctcc

SEQ ID NO: 39350 - DNA, 74 bp, Homo sapiens
atctgtagccaccaaaatatccttggccccagccttgaggttggacaacgcaaactctcgctgctcctggcctt

SEQ ID NO: 39351 - DNA, 71 bp, Homo sapiens
accaaaatatccttggccccagccttgaggttggacaacgcaaactctcgctgctcctggccttttccacc

SEQ ID NO: 39352 - DNA, 77 bp, Homo sapiens
tatccttggccccagccttgaggttggacaacgcaaactctcgctgctcctggccttttccaccgtgcagtgtgcaa

SEQ ID NO: 39353 - DNA, 78 bp, Homo sapiens
agccttgaggttggacaacgcaaactctcgctgctcctggccttttccaccgtgcagtgtgcaagcattgtactgttg

SEQ ID NO: 39354 - DNA, 77 bp, Homo sapiens
aggttggacaacgcaaactctcgctgctcctggccttttccaccgtgcagtgtgcaagcattgtactgttggaagaa

SEQ ID NO: 39355 - DNA, 78 bp, Homo sapiens
aaactctcgctgctcctggccttttccaccgtgcagtgtgcaagcattgtactgttggaagaatggtgaagtgaagag

SEQ ID NO: 39356 - DNA, 75 bp, Homo sapiens
aaagcagtgccacagaggctagactttgttctcccctgccagacacacccccatcttctccagggatttggccaa

SEQ ID NO: 39357 - DNA, 75 bp, Homo sapiens
ccacagaggctagactttgttctcccctgccagacacacccccatcttctccagggatttggccaacacgtcgca

SEQ ID NO: 39358 - DNA, 73 bp, Homo sapiens
tagactttgttctcccctgccagacacacccccatcttctccagggatttggccaacacgtcgcagcccttct

SEQ ID NO: 39359 - DNA, 74 bp, Homo sapiens
tcccctgccagacacacccccatcttctccagggatttggccaacacgtcgcagcccttcttctggttgacaaa

SEQ ID NO: 39360 - DNA, 73 bp, Homo sapiens
agacacacccccatcttctccagggatttggccaacacgtcgcagcccttcttctggttgacaaaaataatga

SEQ ID NO: 39361 - DNA, 73 bp, Homo sapiens
atcttctccagggatttggccaacacgtcgcagcccttcttctggttgacaaaaataatgatgggtgggtcaa

SEQ ID NO: 39362 - DNA, 72 bp, Homo sapiens
agggatttggccaacacgtcgcagcccttcttctggttgacaaaaataatgatgggtgggtcaaagccttgc

SEQ ID NO: 39363 - DNA, 77 bp, Homo sapiens
caacacgtcgcagcccttcttctggttgacaaaaataatgatgggtgggtcaaagccttgctccaagattgccagca

SEQ ID NO: 39364 - DNA, 75 bp, Homo sapiens
cagcccttcttctggttgacaaaaataatgatgggtgggtcaaagccttgctccaagattgccagcagctttttc

SEQ ID NO: 39365 - DNA, 75 bp, Homo sapiens
ttcttctggttgacaaaaataatgatgggtgggtcaaagccttgctccaagattgccagcagctttttcctggaa

SEQ ID NO: 39366 - DNA, 75 bp, Homo sapiens
ttgacaaaaataatgatgggtgggtcaaagccttgctccaagattgccagcagctttttcctggaaggaagagga

SEQ ID NO: 39367 - DNA, 74 bp, Homo sapiens
taatgatgggtgggtcaaagccttgctccaagattgccagcagctttttcctggaaggaagaggagaaaaacaa

SEQ ID NO: 39368 - DNA, 77 bp, Homo sapiens
agccattttattctccaccctgtttcccctggctcagctgccctcatacctcttttctgactctgacatgaggaaga

SEQ ID NO: 39369 - DNA, 77 bp, Homo sapiens
tattctccaccctgtttcccctggctcagctgccctcatacctcttttctgactctgacatgaggaagaccttctgt

SEQ ID NO: 39370 - DNA, 80 bp, Homo sapiens
tgtttcccctggctcagctgccctcatacctcttttctgactctgacatgaggaagaccttctgttccacacgctcatgg

SEQ ID NO: 39371 - DNA, 82 bp, Homo sapiens
ctcagctgccctcatacctcttttctgactctgacatgaggaagaccttctgttccacacgctcatggggcttgcctgcgga

SEQ ID NO: 39372 - DNA, 82 bp, Homo sapiens
tcatacctcttttctgactctgacatgaggaagaccttctgttccacacgctcatggggcttgcctgcggagccaatgtaca

SEQ ID NO: 39373 - DNA, 82 bp, Homo sapiens
ttttctgactctgacatgaggaagaccttctgttccacacgctcatggggcttgcctgcggagccaatgtacaccacagcag

SEQ ID NO: 39374 - DNA, 82 bp, Homo sapiens
tgacatgaggaagaccttctgttccacacgctcatggggcttgcctgcggagccaatgtacaccacagcaggtcgccgaaga

SEQ ID NO: 39375 - DNA, 79 bp, Homo sapiens
aagaccttctgttccacacgctcatggggcttgcctgcggagccaatgtacaccacagcaggtcgccgaagatagctcc

SEQ ID NO: 39376 - DNA, 82 bp, Homo sapiens
cttctgttccacacgctcatggggcttgcctgcggagccaatgtacaccacagcaggtcgccgaagatagctcctggccaga

SEQ ID NO: 39377 - DNA, 81 bp, Homo sapiens
acacgctcatggggcttgcctgcggagccaatgtacaccacagcaggtcgccgaagatagctcctggccagacgctccacc

SEQ ID NO: 39378 - DNA, 80 bp, Homo sapiens
cttgcctgcggagccaatgtacaccacagcaggtcgccgaagatagctcctggccagacgctccaccgctgggggcatgg

SEQ ID NO: 39379 - DNA, 79 bp, Homo sapiens
agccaatgtacaccacagcaggtcgccgaagatagctcctggccagacgctccaccgctgggggcatggtggccgtgaa

SEQ ID NO: 39380 - DNA, 80 bp, Homo sapiens
atgtacaccacagcaggtcgccgaagatagctcctggccagacgctccaccgctgggggcatggtggccgtgaacatgac

SEQ ID NO: 39381 - DNA, 77 bp, Homo sapiens
ggtcgccgaagatagctcctggccagacgctccaccgctgggggcatggtggccgtgaacatgactgtctacgaaaa

SEQ ID NO: 39382 - DNA, 77 bp, Homo sapiens
aagatagctcctggccagacgctccaccgctgggggcatggtggccgtgaacatgactgtctacgaaaacaggaggc

SEQ ID NO: 39383 - DNA, 77 bp, Homo sapiens
ctcctggccagacgctccaccgctgggggcatggtggccgtgaacatgactgtctacgaaaacaggaggctcagccc

SEQ ID NO: 39384 - DNA, 68 bp, Homo sapiens
cccgccttggcctgtccaacttttcccagcccagggaagcagccttacttggcggtacttatgttttc

SEQ ID NO: 39385 - DNA, 68 bp, Homo sapiens
tgtccaacttttcccagcccagggaagcagccttacttggcggtacttatgttttcccgactcaaagt

SEQ ID NO: 39386 - DNA, 67 bp, Homo sapiens
aacttttcccagcccagggaagcagccttacttggcggtacttatgttttcccgactcaaagttggc

SEQ ID NO: 39387 - DNA, 71 bp, Homo sapiens
agggaagcagccttacttggcggtacttatgttttcccgactcaaagttggccagcatcttctcagggtcc

SEQ ID NO: 39388 - DNA, 74 bp, Homo sapiens
agccttacttggcggtacttatgttttcccgactcaaagttggccagcatcttctcagggtcctcagcctcatc

SEQ ID NO: 39389 - DNA, 75 bp, Homo sapiens
cttggcggtacttatgttttcccgactcaaagttggccagcatcttctcagggtcctcagcctcatccgtgtctg

SEQ ID NO: 39390 - DNA, 79 bp, Homo sapiens
ttatgttttcccgactcaaagttggccagcatcttctcagggtcctcagcctcatccgtgtctggcttctggttgctga

SEQ ID NO: 39391 - DNA, 84 bp, Homo sapiens
ccgactcaaagttggccagcatcttctcagggtcctcagcctcatccgtgtctggcttctggttgctgacaggcatgtgctcca

SEQ ID NO: 39392 - DNA, 85 bp, Homo sapiens
agttggccagcatcttctcagggtcctcagcctcatccgtgtctggcttctggttgctgacaggcatgtgctccaggatcttctg

SEQ ID NO: 39393 - DNA, 86 bp, Homo sapiens
ttctcagggtcctcagcctcatccgtgtctggcttctggttgctgacaggcatgtgctccaggatcttctggacatctggctcaaa

SEQ ID NO: 39394 - DNA, 89 bp, Homo sapiens
ctcagcctcatccgtgtctggcttctggttgctgacaggcatgtgctccaggatcttctggacatctggctcaaagcccatgtcaatca

SEQ ID NO: 39395 - DNA, 87 bp, Homo sapiens
atccgtgtctggcttctggttgctgacaggcatgtgctccaggatcttctggacatctggctcaaagcccatgtcaatcatcctatc

SEQ ID NO: 39396 - DNA, 90 bp, Homo sapiens
gcttctggttgctgacaggcatgtgctccaggatcttctggacatctggctcaaagcccatgtcaatcatcctatctgcctcatccagaa

SEQ ID NO: 39397 - DNA, 90 bp, Homo sapiens
gttgctgacaggcatgtgctccaggatcttctggacatctggctcaaagcccatgtcaatcatcctatctgcctcatccagaaccacata

SEQ ID NO: 39398 - DNA, 86 bp, Homo sapiens
atgtgctccaggatcttctggacatctggctcaaagcccatgtcaatcatcctatctgcctcatccagaaccacataggtacagcg

SEQ ID NO: 39399 - DNA, 86 bp, Homo sapiens
aggatcttctggacatctggctcaaagcccatgtcaatcatcctatctgcctcatccagaaccacataggtacagcggctcagcac

SEQ ID NO: 39400 - DNA, 86 bp, Homo sapiens
ttctggacatctggctcaaagcccatgtcaatcatcctatctgcctcatccagaaccacataggtacagcggctcagcaccaggta

SEQ ID NO: 39401 - DNA, 85 bp, Homo sapiens
tcaaagcccatgtcaatcatcctatctgcctcatccagaaccacataggtacagcggctcagcaccaggtagcggttctccagca

SEQ ID NO: 39402 - DNA, 87 bp, Homo sapiens
ccatgtcaatcatcctatctgcctcatccagaaccacataggtacagcggctcagcaccaggtagcggttctccagcacatcaatca

SEQ ID NO: 39403 - DNA, 84 bp, Homo sapiens
atcatcctatctgcctcatccagaaccacataggtacagcggctcagcaccaggtagcggttctccagcacatcaatcaaacgc

SEQ ID NO: 39404 - DNA, 80 bp, Homo sapiens
ctgcctcatccagaaccacataggtacagcggctcagcaccaggtagcggttctccagcacatcaatcaaacgcccaggg

SEQ ID NO: 39405 - DNA, 79 bp, Homo sapiens
accacataggtacagcggctcagcaccaggtagcggttctccagcacatcaatcaaacgcccaggggtagcaatcacaa

SEQ ID NO: 39406 - DNA, 82 bp, Homo sapiens
tacagcggctcagcaccaggtagcggttctccagcacatcaatcaaacgcccaggggtagcaatcacaatctgaggagtaca

SEQ ID NO: 39407 - DNA, 80 bp, Homo sapiens
agcaccaggtagcggttctccagcacatcaatcaaacgcccaggggtagcaatcacaatctgaggagtacagtataatca

SEQ ID NO: 39408 - DNA, 78 bp, Homo sapiens
aggtagcggttctccagcacatcaatcaaacgcccaggggtagcaatcacaatctgaggagtacagtataatcattta

SEQ ID NO: 39409 - DNA, 81 bp, Homo sapiens
ttctccagcacatcaatcaaacgcccaggggtagcaatcacaatctgaggagtacagtataatcatttatagcccagcagg

SEQ ID NO: 39410 - DNA, 79 bp, Homo sapiens
aagatagccttcccagacagcaggctggctgctagatagaaaaacaaacctcacaacccatgcgcagcctgaagccctg

SEQ ID NO: 39411 - DNA, 80 bp, Homo sapiens
ttcccagacagcaggctggctgctagatagaaaaacaaacctcacaacccatgcgcagcctgaagccctggtcttctctg

SEQ ID NO: 39412 - DNA, 82 bp, Homo sapiens
gctggctgctagatagaaaaacaaacctcacaacccatgcgcagcctgaagccctggtcttctctggagatgccaccaatga

SEQ ID NO: 39413 - DNA, 81 bp, Homo sapiens
tagatagaaaaacaaacctcacaacccatgcgcagcctgaagccctggtcttctctggagatgccaccaatgacagccaca

SEQ ID NO: 39414 - DNA, 81 bp, Homo sapiens
aaacaaacctcacaacccatgcgcagcctgaagccctggtcttctctggagatgccaccaatgacagccacagtgcggata

SEQ ID NO: 39415 - DNA, 80 bp, Homo sapiens
acaacccatgcgcagcctgaagccctggtcttctctggagatgccaccaatgacagccacagtgcggatacctagcggtt

SEQ ID NO: 39416 - DNA, 78 bp, Homo sapiens
gcagcctgaagccctggtcttctctggagatgccaccaatgacagccacagtgcggatacctagcggtttcccaaact

SEQ ID NO: 39417 - DNA, 76 bp, Homo sapiens
aagccctggtcttctctggagatgccaccaatgacagccacagtgcggatacctagcggtttcccaaacttgatgg

SEQ ID NO: 39418 - DNA, 79 bp, Homo sapiens
ttctctggagatgccaccaatgacagccacagtgcggatacctagcggtttcccaaacttgatggtctcttcctcaatc

SEQ ID NO: 39419 - DNA, 79 bp, Homo sapiens
agatgccaccaatgacagccacagtgcggatacctagcggtttcccaaacttgatggtctcttcctcaatctgttgagc

SEQ ID NO: 39420 - DNA, 77 bp, Homo sapiens
aatgacagccacagtgcggatacctagcggtttcccaaacttgatggtctcttcctcaatctgttgagccaactcac

SEQ ID NO: 39421 - DNA, 73 bp, Homo sapiens
agtgcggatacctagcggtttcccaaacttgatggtctcttcctcaatctgttgagccaactcacgggtggga

SEQ ID NO: 39422 - DNA, 73 bp, Homo sapiens
atacctagcggtttcccaaacttgatggtctcttcctcaatctgttgagccaactcacgggtgggagccagga

SEQ ID NO: 39423 - DNA, 76 bp, Homo sapiens
gtttcccaaacttgatggtctcttcctcaatctgttgagccaactcacgggtgggagccaggatgatggcataagg

SEQ ID NO: 39424 - DNA, 79 bp, Homo sapiens
acttgatggtctcttcctcaatctgttgagccaactcacgggtgggagccaggatgatggcataagggccttggtctga

SEQ ID NO: 39425 - DNA, 79 bp, Homo sapiens
ttcctcaatctgttgagccaactcacgggtgggagccaggatgatggcataagggccttggtctgactcttcgatcctg

SEQ ID NO: 39426 - DNA, 78 bp, Homo sapiens
tgttgagccaactcacgggtgggagccaggatgatggcataagggccttggtctgactcttcgatcctgtggtaaaca

SEQ ID NO: 39427 - DNA, 75 bp, Homo sapiens
aactcacgggtgggagccaggatgatggcataagggccttggtctgactcttcgatcctgtggtaaacagggtgc

SEQ ID NO: 39428 - DNA, 78 bp, Homo sapiens
ggagccaggatgatggcataagggccttggtctgactcttcgatcctgtggtaaacagggtgccccacagcttcgtga

SEQ ID NO: 39429 - DNA, 76 bp, Homo sapiens
tttcctacccagacaaacccactccagctggtgctagctgacctcacctgtcaattttgggaagtgtggtgatcca

SEQ ID NO: 39430 - DNA, 78 bp, Homo sapiens
acccagacaaacccactccagctggtgctagctgacctcacctgtcaattttgggaagtgtggtgatccagaccagca

SEQ ID NO: 39431 - DNA, 80 bp, Homo sapiens
acccactccagctggtgctagctgacctcacctgtcaattttgggaagtgtggtgatccagaccagcagagggatgagga

SEQ ID NO: 39432 - DNA, 81 bp, Homo sapiens
ctggtgctagctgacctcacctgtcaattttgggaagtgtggtgatccagaccagcagagggatgaggaaggctgctgtct

SEQ ID NO: 39433 - DNA, 80 bp, Homo sapiens
acctcacctgtcaattttgggaagtgtggtgatccagaccagcagagggatgaggaaggctgctgtcttgccactgccag

SEQ ID NO: 39434 - DNA, 84 bp, Homo sapiens
ctgtcaattttgggaagtgtggtgatccagaccagcagagggatgaggaaggctgctgtcttgccactgccagtctcagccaca

SEQ ID NO: 39435 - DNA, 86 bp, Homo sapiens
aagtgtggtgatccagaccagcagagggatgaggaaggctgctgtcttgccactgccagtctcagccacaccaatgatgtcacgat

SEQ ID NO: 39436 - DNA, 87 bp, Homo sapiens
atccagaccagcagagggatgaggaaggctgctgtcttgccactgccagtctcagccacaccaatgatgtcacgattctgtagccca

SEQ ID NO: 39437 - DNA, 85 bp, Homo sapiens
gcagagggatgaggaaggctgctgtcttgccactgccagtctcagccacaccaatgatgtcacgattctgtagcccaatgggaat

SEQ ID NO: 39438 - DNA, 85 bp, Homo sapiens
atgaggaaggctgctgtcttgccactgccagtctcagccacaccaatgatgtcacgattctgtagcccaatgggaattgcctgac

SEQ ID NO: 39439 - DNA, 86 bp, Homo sapiens
tgctgtcttgccactgccagtctcagccacaccaatgatgtcacgattctgtagcccaatgggaattgcctgacgctgtataggtg

SEQ ID NO: 39440 - DNA, 82 bp, Homo sapiens
cactgccagtctcagccacaccaatgatgtcacgattctgtagcccaatgggaattgcctgacgctgtataggtgttggttc

SEQ ID NO: 39441 - DNA, 81 bp, Homo sapiens
agtctcagccacaccaatgatgtcacgattctgtagcccaatgggaattgcctgacgctgtataggtgttggttcctgcag

SEQ ID NO: 39442 - DNA, 79 bp, Homo sapiens
ccacaccaatgatgtcacgattctgtagcccaatgggaattgcctgacgctgtataggtgttggttcctgcagtgaccc

SEQ ID NO: 39443 - DNA, 77 bp, Homo sapiens
tcacgattctgtagcccaatgggaattgcctgacgctgtataggtgttggttcctgcagtgaccccaagaaagagta

SEQ ID NO: 39444 - DNA, 75 bp, Homo sapiens
ttctgtagcccaatgggaattgcctgacgctgtataggtgttggttcctgcagtgaccccaagaaagagtaatag

SEQ ID NO: 39445 - DNA, 76 bp, Homo sapiens
aactagtgtaggaacatgtcagatctcttgggccaatctatccctccttaccttgtagccacacttatcaatgacc

SEQ ID NO: 39446 - DNA, 78 bp, Homo sapiens
aacatgtcagatctcttgggccaatctatccctccttaccttgtagccacacttatcaatgacctccaagatgtgtgg

SEQ ID NO: 39447 - DNA, 77 bp, Homo sapiens
agatctcttgggccaatctatccctccttaccttgtagccacacttatcaatgacctccaagatgtgtgggggcaga

SEQ ID NO: 39448 - DNA, 75 bp, Homo sapiens
aatctatccctccttaccttgtagccacacttatcaatgacctccaagatgtgtgggggcagagaagagtctttc

SEQ ID NO: 39449 - DNA, 77 bp, Homo sapiens
tccttaccttgtagccacacttatcaatgacctccaagatgtgtgggggcagagaagagtctttccaggatcggatg

SEQ ID NO: 39450 - DNA, 77 bp, Homo sapiens
ttgtagccacacttatcaatgacctccaagatgtgtgggggcagagaagagtctttccaggatcggatgggattggg

SEQ ID NO: 39451 - DNA, 77 bp, Homo sapiens
acacttatcaatgacctccaagatgtgtgggggcagagaagagtctttccaggatcggatgggattggggatcttgc

SEQ ID NO: 39452 - DNA, 75 bp, Homo sapiens
atgacctccaagatgtgtgggggcagagaagagtctttccaggatcggatgggattggggatcttgccacctttg

SEQ ID NO: 39453 - DNA, 77 bp, Homo sapiens
atgtgtgggggcagagaagagtctttccaggatcggatgggattggggatcttgccacctttggtggtgatgctgta

SEQ ID NO: 39454 - DNA, 76 bp, Homo sapiens
gagaagagtctttccaggatcggatgggattggggatcttgccacctttggtggtgatgctgtagtcctcacggaa

SEQ ID NO: 39455 - DNA, 75 bp, Homo sapiens
agtctttccaggatcggatgggattggggatcttgccacctttggtggtgatgctgtagtcctcacggaagatcc

SEQ ID NO: 39456 - DNA, 76 bp, Homo sapiens
atcggatgggattggggatcttgccacctttggtggtgatgctgtagtcctcacggaagatccgccagtccctgtc

SEQ ID NO: 39457 - DNA, 79 bp, Homo sapiens
tggggatcttgccacctttggtggtgatgctgtagtcctcacggaagatccgccagtccctgtccgtcatctcatctaa

SEQ ID NO: 39458 - DNA, 76 bp, Homo sapiens
ttgccacctttggtggtgatgctgtagtcctcacggaagatccgccagtccctgtccgtcatctcatctaactttt

SEQ ID NO: 39459 - DNA, 80 bp, Homo sapiens
atgctgtagtcctcacggaagatccgccagtccctgtccgtcatctcatctaactttttctgagaccaatgacgatcatc

SEQ ID NO: 39460 - DNA, 79 bp, Homo sapiens
acggaagatccgccagtccctgtccgtcatctcatctaactttttctgagaccaatgacgatcatcccagcgctgcttg

SEQ ID NO: 39461 - DNA, 80 bp, Homo sapiens
agatccgccagtccctgtccgtcatctcatctaactttttctgagaccaatgacgatcatcccagcgctgcttggcttcc

SEQ ID NO: 39462 - DNA, 78 bp, Homo sapiens
tgtccgtcatctcatctaactttttctgagaccaatgacgatcatcccagcgctgcttggcttccttcttacgaagtt

SEQ ID NO: 39463 - DNA, 77 bp, Homo sapiens
atctcatctaactttttctgagaccaatgacgatcatcccagcgctgcttggcttccttcttacgaagtttgcggag

SEQ ID NO: 39464 - DNA, 75 bp, Homo sapiens
aactttttctgagaccaatgacgatcatcccagcgctgcttggcttccttcttacgaagtttgcggagtcttgcc

SEQ ID NO: 39465 - DNA, 76 bp, Homo sapiens
agcgctgcttggcttccttcttacgaagtttgcggagtcttgccctggagcagggtgtgaggagtaagtagaatca

SEQ ID NO: 39466 - DNA, 77 bp, Homo sapiens
ttctgtagagcctctgggctctgtccagccaccctagccttgatcactcactcctcctgctccttttcttccagggt

SEQ ID NO: 39467 - DNA, 77 bp, Homo sapiens
tgggctctgtccagccaccctagccttgatcactcactcctcctgctccttttcttccagggttcgcctcttctcca

SEQ ID NO: 39468 - DNA, 75 bp, Homo sapiens
tgtccagccaccctagccttgatcactcactcctcctgctccttttcttccagggttcgcctcttctccattagg

SEQ ID NO: 39469 - DNA, 75 bp, Homo sapiens
ctagccttgatcactcactcctcctgctccttttcttccagggttcgcctcttctccattaggtctccatagaaa

SEQ ID NO: 39470 - DNA, 75 bp, Homo sapiens
atcactcactcctcctgctccttttcttccagggttcgcctcttctccattaggtctccatagaaacgtgactgc

SEQ ID NO: 39471 - DNA, 75 bp, Homo sapiens
tcctcctgctccttttcttccagggttcgcctcttctccattaggtctccatagaaacgtgactgctctcgcttc

SEQ ID NO: 39472 - DNA, 78 bp, Homo sapiens
tttcttccagggttcgcctcttctccattaggtctccatagaaacgtgactgctctcgcttctgctgcttgaggtcaa

SEQ ID NO: 39473 - DNA, 83 bp, Homo sapiens
gttcgcctcttctccattaggtctccatagaaacgtgactgctctcgcttctgctgcttgaggtcaatgcctgcaatgaagcc

SEQ ID NO: 39474 - DNA, 83 bp, Homo sapiens
ttctccattaggtctccatagaaacgtgactgctctcgcttctgctgcttgaggtcaatgcctgcaatgaagcctcgccctaa

SEQ ID NO: 39475 - DNA, 81 bp, Homo sapiens
attaggtctccatagaaacgtgactgctctcgcttctgctgcttgaggtcaatgcctgcaatgaagcctcgccctaacaac

SEQ ID NO: 39476 - DNA, 83 bp, Homo sapiens
atagaaacgtgactgctctcgcttctgctgcttgaggtcaatgcctgcaatgaagcctcgccctaacaactgcacctggtgcc

SEQ ID NO: 39477 - DNA, 82 bp, Homo sapiens
actgctctcgcttctgctgcttgaggtcaatgcctgcaatgaagcctcgccctaacaactgcacctggtgccgttctttgta

SEQ ID NO: 39478 - DNA, 79 bp, Homo sapiens
ttgaggtcaatgcctgcaatgaagcctcgccctaacaactgcacctggtgccgttctttgtacctgggattgagataga

SEQ ID NO: 39479 - DNA, 76 bp, Homo sapiens
aatgcctgcaatgaagcctcgccctaacaactgcacctggtgccgttctttgtacctgggattgagatagaggaaa

SEQ ID NO: 39480 - DNA, 72 bp, Homo sapiens
atgaagcctcgccctaacaactgcacctggtgccgttctttgtacctgggattgagatagaggaaaagaaaa

SEQ ID NO: 39481 - DNA, 76 bp, Homo sapiens
taggactgcctagtggaaaagacctagaactcaggcctgaagccactcacagggggttgtagtcaatggatgtgtc

SEQ ID NO: 39482 - DNA, 79 bp, Homo sapiens
ctagtggaaaagacctagaactcaggcctgaagccactcacagggggttgtagtcaatggatgtgtcctcagatgcatc

SEQ ID NO: 39483 - DNA, 79 bp, Homo sapiens
tagaactcaggcctgaagccactcacagggggttgtagtcaatggatgtgtcctcagatgcatcccactcaaaaacaaa

SEQ ID NO: 39484 - DNA, 76 bp, Homo sapiens
aggcctgaagccactcacagggggttgtagtcaatggatgtgtcctcagatgcatcccactcaaaaacaaatttcc

SEQ ID NO: 39485 - DNA, 77 bp, Homo sapiens
actcacagggggttgtagtcaatggatgtgtcctcagatgcatcccactcaaaaacaaatttccggtcattgagatg

SEQ ID NO: 39486 - DNA, 77 bp, Homo sapiens
gggttgtagtcaatggatgtgtcctcagatgcatcccactcaaaaacaaatttccggtcattgagatgtctcgttcg

SEQ ID NO: 39487 - DNA, 76 bp, Homo sapiens
aatggatgtgtcctcagatgcatcccactcaaaaacaaatttccggtcattgagatgtctcgttcggcgccgcttt

SEQ ID NO: 39488 - DNA, 78 bp, Homo sapiens
atgtgtcctcagatgcatcccactcaaaaacaaatttccggtcattgagatgtctcgttcggcgccgctttttgatgc

SEQ ID NO: 39489 - DNA, 73 bp, Homo sapiens
catcccactcaaaaacaaatttccggtcattgagatgtctcgttcggcgccgctttttgatgccacccaggta

SEQ ID NO: 39490 - DNA, 70 bp, Homo sapiens
aaaaacaaatttccggtcattgagatgtctcgttcggcgccgctttttgatgccacccaggtaacgctcc

SEQ ID NO: 39491 - DNA, 71 bp, Homo sapiens
aaatttccggtcattgagatgtctcgttcggcgccgctttttgatgccacccaggtaacgctcctacccag

SEQ ID NO: 39492 - DNA, 73 bp, Homo sapiens
attgagatgtctcgttcggcgccgctttttgatgccacccaggtaacgctcctacccagggacagaacacaaa

SEQ ID NO: 39493 - DNA, 74 bp, Homo sapiens
tcgttcggcgccgctttttgatgccacccaggtaacgctcctacccagggacagaacacaaagcacatgagctt

SEQ ID NO: 39494 - DNA, 78 bp, Homo sapiens
aacctcatttttgtgtgggagagaagtgaagatggagccaaggcctgcaccttaatggcatgcagttccttgctctta

SEQ ID NO: 39495 - DNA, 80 bp, Homo sapiens
tttgtgtgggagagaagtgaagatggagccaaggcctgcaccttaatggcatgcagttccttgctcttatccttctcttc

SEQ ID NO: 39496 - DNA, 78 bp, Homo sapiens
agaagtgaagatggagccaaggcctgcaccttaatggcatgcagttccttgctcttatccttctcttcccggatcttc

SEQ ID NO: 39497 - DNA, 77 bp, Homo sapiens
atggagccaaggcctgcaccttaatggcatgcagttccttgctcttatccttctcttcccggatcttctgccgccct

SEQ ID NO: 39498 - DNA, 77 bp, Homo sapiens
aaggcctgcaccttaatggcatgcagttccttgctcttatccttctcttcccggatcttctgccgcccttcctcatc

SEQ ID NO: 39499 - DNA, 78 bp, Homo sapiens
atggcatgcagttccttgctcttatccttctcttcccggatcttctgccgcccttcctcatcctcatttccattggtc

SEQ ID NO: 39500 - DNA, 76 bp, Homo sapiens
atgcagttccttgctcttatccttctcttcccggatcttctgccgcccttcctcatcctcatttccattggtctcc

SEQ ID NO: 39501 - DNA, 75 bp, Homo sapiens
ttgctcttatccttctcttcccggatcttctgccgcccttcctcatcctcatttccattggtctcccgttccatc

SEQ ID NO: 39502 - DNA, 72 bp, Homo sapiens
ccttctcttcccggatcttctgccgcccttcctcatcctcatttccattggtctcccgttccatcctctccc

SEQ ID NO: 39503 - DNA, 72 bp, Homo sapiens
atcttctgccgcccttcctcatcctcatttccattggtctcccgttccatcctctccctgcgttcccgacgt

SEQ ID NO: 39504 - DNA, 69 bp, Homo sapiens
cccttcctcatcctcatttccattggtctcccgttccatcctctccctgcgttcccgacgttcccgttc

SEQ ID NO: 39505 - DNA, 70 bp, Homo sapiens
atcctcatttccattggtctcccgttccatcctctccctgcgttcccgacgttcccgttcctgaggatct

SEQ ID NO: 39506 - DNA, 72 bp, Homo sapiens
atttccattggtctcccgttccatcctctccctgcgttcccgacgttcccgttcctgaggatcttctgcaga

SEQ ID NO: 39507 - DNA, 71 bp, Homo sapiens
gtctcccgttccatcctctccctgcgttcccgacgttcccgttcctgaggatcttctgcagaccaaagaaa

SEQ ID NO: 39508 - DNA, 75 bp, Homo sapiens
atcctctccctgcgttcccgacgttcccgttcctgaggatcttctgcagaccaaagaaagcaaagctgcagaaga

SEQ ID NO: 39509 - DNA, 70 bp, Homo sapiens
actctttcctcttccatctaggggctacacagggtagaataacaaacccaacatcttcctgcccaagtct

SEQ ID NO: 39510 - DNA, 71 bp, Homo sapiens
tcttccatctaggggctacacagggtagaataacaaacccaacatcttcctgcccaagtcttggaactgtt

SEQ ID NO: 39511 - DNA, 68 bp, Homo sapiens
gggctacacagggtagaataacaaacccaacatcttcctgcccaagtcttggaactgtttccttttct

SEQ ID NO: 39512 - DNA, 68 bp, Homo sapiens
acacagggtagaataacaaacccaacatcttcctgcccaagtcttggaactgtttccttttcttcctc

SEQ ID NO: 39513 - DNA, 70 bp, Homo sapiens
aataacaaacccaacatcttcctgcccaagtcttggaactgtttccttttcttcctctcttcttcaagca

SEQ ID NO: 39514 - DNA, 74 bp, Homo sapiens
aacatcttcctgcccaagtcttggaactgtttccttttcttcctctcttcttcaagcatcctctgccgctcttc

SEQ ID NO: 39515 - DNA, 74 bp, Homo sapiens
tcctgcccaagtcttggaactgtttccttttcttcctctcttcttcaagcatcctctgccgctcttccacctcc

SEQ ID NO: 39516 - DNA, 76 bp, Homo sapiens
tggaactgtttccttttcttcctctcttcttcaagcatcctctgccgctcttccacctcctgctgccgtcgcttta

SEQ ID NO: 39517 - DNA, 78 bp, Homo sapiens
tgtttccttttcttcctctcttcttcaagcatcctctgccgctcttccacctcctgctgccgtcgctttagagcttca

SEQ ID NO: 39518 - DNA, 81 bp, Homo sapiens
ctctcttcttcaagcatcctctgccgctcttccacctcctgctgccgtcgctttagagcttcagcctctcgttctgcttta

SEQ ID NO: 39519 - DNA, 81 bp, Homo sapiens
ttcttcaagcatcctctgccgctcttccacctcctgctgccgtcgctttagagcttcagcctctcgttctgctttagagag

SEQ ID NO: 39520 - DNA, 78 bp, Homo sapiens
atcctctgccgctcttccacctcctgctgccgtcgctttagagcttcagcctctcgttctgctttagagaggaacttg

SEQ ID NO: 39521 - DNA, 76 bp, Homo sapiens
ttccacctcctgctgccgtcgctttagagcttcagcctctcgttctgctttagagaggaacttgggctacaaaaga

SEQ ID NO: 39522 - DNA, 77 bp, Homo sapiens
tcctgctgccgtcgctttagagcttcagcctctcgttctgctttagagaggaacttgggctacaaaagagattggaa

SEQ ID NO: 39523 - DNA, 74 bp, Homo sapiens
ctttagagcttcagcctctcgttctgctttagagaggaacttgggctacaaaagagattggaactgtcaacaaa

SEQ ID NO: 39524 - DNA, 75 bp, Homo sapiens
agcttcagcctctcgttctgctttagagaggaacttgggctacaaaagagattggaactgtcaacaaaggatctg

SEQ ID NO: 39525 - DNA, 78 bp, Homo sapiens
cccagtctgtggtattgtgttatggcagcctgagccgatgaatgaagaccctcaagtacttaccttagcctcagcttc

SEQ ID NO: 39526 - DNA, 80 bp, Homo sapiens
tctgtggtattgtgttatggcagcctgagccgatgaatgaagaccctcaagtacttaccttagcctcagcttcttcctca

SEQ ID NO: 39527 - DNA, 77 bp, Homo sapiens
tatggcagcctgagccgatgaatgaagaccctcaagtacttaccttagcctcagcttcttcctcagcctttttcttg

SEQ ID NO: 39528 - DNA, 75 bp, Homo sapiens
ctgagccgatgaatgaagaccctcaagtacttaccttagcctcagcttcttcctcagcctttttcttggccagaa

SEQ ID NO: 39529 - DNA, 74 bp, Homo sapiens
atgaatgaagaccctcaagtacttaccttagcctcagcttcttcctcagcctttttcttggccagaagctcctc

SEQ ID NO: 39530 - DNA, 72 bp, Homo sapiens
agaccctcaagtacttaccttagcctcagcttcttcctcagcctttttcttggccagaagctcctccaggga

SEQ ID NO: 39531 - DNA, 75 bp, Homo sapiens
ttaccttagcctcagcttcttcctcagcctttttcttggccagaagctcctccagggataatggctgggcctgaa

SEQ ID NO: 39532 - DNA, 76 bp, Homo sapiens
tcagcttcttcctcagcctttttcttggccagaagctcctccagggataatggctgggcctgaagataaaacagaa

SEQ ID NO: 39533 - DNA, 73 bp, Homo sapiens
ttcctcagcctttttcttggccagaagctcctccagggataatggctgggcctgaagataaaacagaacttta

SEQ ID NO: 39534 - DNA, 72 bp, Homo sapiens
tttttcttggccagaagctcctccagggataatggctgggcctgaagataaaacagaactttagtctataaa

SEQ ID NO: 39535 - DNA, 72 bp, Homo sapiens
agaagctcctccagggataatggctgggcctgaagataaaacagaactttagtctataaaggctctctccct

SEQ ID NO: 39536 - DNA, 73 bp, Homo sapiens
tccagggataatggctgggcctgaagataaaacagaactttagtctataaaggctctctccctttaaagatca

SEQ ID NO: 39537 - DNA, 73 bp, Homo sapiens
atcaacaaagcaacgcacgagttgaagatgaaaaatatccttcctctcctttaccttaggcttcttatcacca

SEQ ID NO: 39538 - DNA, 75 bp, Homo sapiens
cacgagttgaagatgaaaaatatccttcctctcctttaccttaggcttcttatcaccatgttcatcctcttcatc

SEQ ID NO: 39539 - DNA, 73 bp, Homo sapiens
aagatgaaaaatatccttcctctcctttaccttaggcttcttatcaccatgttcatcctcttcatccttctta

SEQ ID NO: 39540 - DNA, 72 bp, Homo sapiens
aaaaatatccttcctctcctttaccttaggcttcttatcaccatgttcatcctcttcatccttcttagagtc

SEQ ID NO: 39541 - DNA, 75 bp, Homo sapiens
tctcctttaccttaggcttcttatcaccatgttcatcctcttcatccttcttagagtctctgtccttccgagatt

SEQ ID NO: 39542 - DNA, 74 bp, Homo sapiens
ttaggcttcttatcaccatgttcatcctcttcatccttcttagagtctctgtccttccgagatttaaagtcttt

SEQ ID NO: 39543 - DNA, 75 bp, Homo sapiens
ttcttatcaccatgttcatcctcttcatccttcttagagtctctgtccttccgagatttaaagtcttttcctcga

SEQ ID NO: 39544 - DNA, 74 bp, Homo sapiens
tgttcatcctcttcatccttcttagagtctctgtccttccgagatttaaagtcttttcctcgaccaggagataa

SEQ ID NO: 39545 - DNA, 73 bp, Homo sapiens
tcatccttcttagagtctctgtccttccgagatttaaagtcttttcctcgaccaggagataagctttgaggaa

SEQ ID NO: 39546 - DNA, 70 bp, Homo sapiens
ttagagtctctgtccttccgagatttaaagtcttttcctcgaccaggagataagctttgaggaaaaggaa

SEQ ID NO: 39547 - DNA, 69 bp, Homo sapiens
tctctgtccttccgagatttaaagtcttttcctcgaccaggagataagctttgaggaaaaggaacaagg

SEQ ID NO: 39548 - DNA, 70 bp, Homo sapiens
agatttaaagtcttttcctcgaccaggagataagctttgaggaaaaggaacaaggtccacatcactctta

SEQ ID NO: 39549 - DNA, 69 bp, Homo sapiens
aagaaatgggagcattcccctaaagccccctctcattccttcatgtacctggatcgtttacggtccttg

SEQ ID NO: 39550 - DNA, 71 bp, Homo sapiens
agcattcccctaaagccccctctcattccttcatgtacctggatcgtttacggtccttgtcccgtctgtgc

SEQ ID NO: 39551 - DNA, 72 bp, Homo sapiens
taaagccccctctcattccttcatgtacctggatcgtttacggtccttgtcccgtctgtgcccatccttgtc

SEQ ID NO: 39552 - DNA, 74 bp, Homo sapiens
tcattccttcatgtacctggatcgtttacggtccttgtcccgtctgtgcccatccttgtctcgatctcggtcct

SEQ ID NO: 39553 - DNA, 72 bp, Homo sapiens
atgtacctggatcgtttacggtccttgtcccgtctgtgcccatccttgtctcgatctcggtccttcttattc

SEQ ID NO: 39554 - DNA, 72 bp, Homo sapiens
cctggatcgtttacggtccttgtcccgtctgtgcccatccttgtctcgatctcggtccttcttattccgatc

SEQ ID NO: 39555 - DNA, 72 bp, Homo sapiens
ttacggtccttgtcccgtctgtgcccatccttgtctcgatctcggtccttcttattccgatcccgctcctta

SEQ ID NO: 39556 - DNA, 73 bp, Homo sapiens
cgtctgtgcccatccttgtctcgatctcggtccttcttattccgatcccgctccttatctcgttctcgttctt

SEQ ID NO: 39557 - DNA, 73 bp, Homo sapiens
ccatccttgtctcgatctcggtccttcttattccgatcccgctccttatctcgttctcgttctttgtgccgtc

SEQ ID NO: 39558 - DNA, 73 bp, Homo sapiens
tcgatctcggtccttcttattccgatcccgctccttatctcgttctcgttctttgtgccgtcgttctctggaa

SEQ ID NO: 39559 - DNA, 72 bp, Homo sapiens
tccttcttattccgatcccgctccttatctcgttctcgttctttgtgccgtcgttctctggaagaccgcaaa

SEQ ID NO: 39560 - DNA, 71 bp, Homo sapiens
ttattccgatcccgctccttatctcgttctcgttctttgtgccgtcgttctctggaagaccgcaaatttaa

SEQ ID NO: 39561 - DNA, 71 bp, Homo sapiens
ctccttatctcgttctcgttctttgtgccgtcgttctctggaagaccgcaaatttaagagttcacttggta

SEQ ID NO: 39562 - DNA, 70 bp, Homo sapiens
atctgaaacgtactctcccttcccatgtaataacatacaaagttactttacctttctgcagatttggaac

SEQ ID NO: 39563 - DNA, 70 bp, Homo sapiens
tactctcccttcccatgtaataacatacaaagttactttacctttctgcagatttggaacgggaacgaga

SEQ ID NO: 39564 - DNA, 72 bp, Homo sapiens
taacatacaaagttactttacctttctgcagatttggaacgggaacgagagcgagaacggctgcctcctcga

SEQ ID NO: 39565 - DNA, 72 bp, Homo sapiens
ctttacctttctgcagatttggaacgggaacgagagcgagaacggctgcctcctcgacgtctatcccttgaa

SEQ ID NO: 39566 - DNA, 75 bp, Homo sapiens
ctgcagatttggaacgggaacgagagcgagaacggctgcctcctcgacgtctatcccttgaacgatgccgctttc

SEQ ID NO: 39567 - DNA, 74 bp, Homo sapiens
tggaacgggaacgagagcgagaacggctgcctcctcgacgtctatcccttgaacgatgccgctttctatcttta

SEQ ID NO: 39568 - DNA, 74 bp, Homo sapiens
gggaacgagagcgagaacggctgcctcctcgacgtctatcccttgaacgatgccgctttctatctttagatggg

SEQ ID NO: 39569 - DNA, 72 bp, Homo sapiens
agaacggctgcctcctcgacgtctatcccttgaacgatgccgctttctatctttagatggggaagacttccg

SEQ ID NO: 39570 - DNA, 71 bp, Homo sapiens
tcctcgacgtctatcccttgaacgatgccgctttctatctttagatggggaagacttccggtcccggtctc

SEQ ID NO: 39571 - DNA, 70 bp, Homo sapiens
acgtctatcccttgaacgatgccgctttctatctttagatggggaagacttccggtcccggtctctatcc

SEQ ID NO: 39572 - DNA, 74 bp, Homo sapiens
ttgaacgatgccgctttctatctttagatggggaagacttccggtcccggtctctatcccgctctctgtcagga

SEQ ID NO: 39573 - DNA, 73 bp, Homo sapiens
ctttctatctttagatggggaagacttccggtcccggtctctatcccgctctctgtcaggagtccgtgatcgc

SEQ ID NO: 39574 - DNA, 71 bp, Homo sapiens
aagacttccggtcccggtctctatcccgctctctgtcaggagtccgtgatcgcttcctttcctccttggaa

SEQ ID NO: 39575 - DNA, 75 bp, Homo sapiens
ttccggtcccggtctctatcccgctctctgtcaggagtccgtgatcgcttcctttcctccttggaaggtgatgca

SEQ ID NO: 39576 - DNA, 76 bp, Homo sapiens
tctatcccgctctctgtcaggagtccgtgatcgcttcctttcctccttggaaggtgatgcatcacggtcctttttg

SEQ ID NO: 39577 - DNA, 79 bp, Homo sapiens
tctctgtcaggagtccgtgatcgcttcctttcctccttggaaggtgatgcatcacggtcctttttgtcagccagctctc

SEQ ID NO: 39578 - DNA, 77 bp, Homo sapiens
aggagtccgtgatcgcttcctttcctccttggaaggtgatgcatcacggtcctttttgtcagccagctctcctgcca

SEQ ID NO: 39579 - DNA, 79 bp, Homo sapiens
atcgcttcctttcctccttggaaggtgatgcatcacggtcctttttgtcagccagctctcctgccatctgtaatgagta

SEQ ID NO: 39580 - DNA, 79 bp, Homo sapiens
tttcctccttggaaggtgatgcatcacggtcctttttgtcagccagctctcctgccatctgtaatgagtaggaagagta

SEQ ID NO: 39581 - DNA, 80 bp, Homo sapiens
aggtgatgcatcacggtcctttttgtcagccagctctcctgccatctgtaatgagtaggaagagtacttacaatgtacta

SEQ ID NO: 39582 - DNA, 80 bp, Homo sapiens
atgcatcacggtcctttttgtcagccagctctcctgccatctgtaatgagtaggaagagtacttacaatgtactaggcac

SEQ ID NO: 39583 - DNA, 70 bp, Homo sapiens
actctagccctttctgtaagctcgtgggaaccgcctccaccgcccgggactcaccaccctgagtctgaac

SEQ ID NO: 39584 - DNA, 69 bp, Homo sapiens
ctttctgtaagctcgtgggaaccgcctccaccgcccgggactcaccaccctgagtctgaaccgcccaac

SEQ ID NO: 39585 - DNA, 70 bp, Homo sapiens
agctcgtgggaaccgcctccaccgcccgggactcaccaccctgagtctgaaccgcccaacgcggcctcaa

SEQ ID NO: 39586 - DNA, 69 bp, Homo sapiens
aaccgcctccaccgcccgggactcaccaccctgagtctgaaccgcccaacgcggcctcaacgtcgcgga

SEQ ID NO: 39587 - DNA, 71 bp, Homo sapiens
ccgggactcaccaccctgagtctgaaccgcccaacgcggcctcaacgtcgcggagccgtcgccatctttcc

SEQ ID NO: 39588 - DNA, 69 bp, Homo sapiens
accaccctgagtctgaaccgcccaacgcggcctcaacgtcgcggagccgtcgccatctttcccgtttcc

SEQ ID NO: 39589 - DNA, 73 bp, Homo sapiens
tctgaaccgcccaacgcggcctcaacgtcgcggagccgtcgccatctttcccgtttcctggtcgcggagatga

SEQ ID NO: 39590 - DNA, 71 bp, Homo sapiens
accgcccaacgcggcctcaacgtcgcggagccgtcgccatctttcccgtttcctggtcgcggagatgaaca

SEQ ID NO: 39591 - DNA, 69 bp, Homo sapiens
cggcctcaacgtcgcggagccgtcgccatctttcccgtttcctggtcgcggagatgaacaccccccacc

SEQ ID NO: 39592 - DNA, 66 bp, Homo sapiens
cgtcgcggagccgtcgccatctttcccgtttcctggtcgcggagatgaacaccccccacccccccg

SEQ ID NO: 39593 - DNA, 69 bp, Homo sapiens
tcgccatctttcccgtttcctggtcgcggagatgaacaccccccacccccccggccgcgaggcaagctg

SEQ ID NO: 39594 - DNA, 66 bp, Homo sapiens
ctttcccgtttcctggtcgcggagatgaacaccccccacccccccggccgcgaggcaagctgggaa

SEQ ID NO: 39595 - DNA, 70 bp, Homo sapiens
aaagaaggggcataagacccagatctttaaaccaccactcagaatccatatttgaaaagcaaccatttat

SEQ ID NO: 39596 - DNA, 72 bp, Homo sapiens
agacccagatctttaaaccaccactcagaatccatatttgaaaagcaaccatttattagaaccaatacaaga

SEQ ID NO: 39597 - DNA, 73 bp, Homo sapiens
agatctttaaaccaccactcagaatccatatttgaaaagcaaccatttattagaaccaatacaagagtatgaa

SEQ ID NO: 39598 - DNA, 71 bp, Homo sapiens
caccactcagaatccatatttgaaaagcaaccatttattagaaccaatacaagagtatgaaaagggggaaa

SEQ ID NO: 39599 - DNA, 68 bp, Homo sapiens
tccatatttgaaaagcaaccatttattagaaccaatacaagagtatgaaaagggggaaaagaggaggg

SEQ ID NO: 39600 - DNA, 68 bp, Homo sapiens
ttgaaaagcaaccatttattagaaccaatacaagagtatgaaaagggggaaaagaggagggtagaaga

SEQ ID NO: 39601 - DNA, 65 bp, Homo sapiens
aaccatttattagaaccaatacaagagtatgaaaagggggaaaagaggagggtagaagaggggga

SEQ ID NO: 39602 - DNA, 71 bp, Homo sapiens
tagaaccaatacaagagtatgaaaagggggaaaagaggagggtagaagagggggagagaatgaggtctgca

SEQ ID NO: 39603 - DNA, 73 bp, Homo sapiens
aagagtatgaaaagggggaaaagaggagggtagaagagggggagagaatgaggtctgcatcagatgtcagtta

SEQ ID NO: 39604 - DNA, 74 bp, Homo sapiens
gggggaaaagaggagggtagaagagggggagagaatgaggtctgcatcagatgtcagttatggaaacacataaa

SEQ ID NO: 39605 - DNA, 75 bp, Homo sapiens
aggagggtagaagagggggagagaatgaggtctgcatcagatgtcagttatggaaacacataaatgcttactttt

SEQ ID NO: 39606 - DNA, 76 bp, Homo sapiens
tagaagagggggagagaatgaggtctgcatcagatgtcagttatggaaacacataaatgcttactttttaaacatt

SEQ ID NO: 39607 - DNA, 76 bp, Homo sapiens
ggagagaatgaggtctgcatcagatgtcagttatggaaacacataaatgcttactttttaaacatttacatttaaa

SEQ ID NO: 39608 - DNA, 75 bp, Homo sapiens
tgaggtctgcatcagatgtcagttatggaaacacataaatgcttactttttaaacatttacatttaaaaggtgaa

SEQ ID NO: 39609 - DNA, 73 bp, Homo sapiens
atcagatgtcagttatggaaacacataaatgcttactttttaaacatttacatttaaaaggtgaacatatata

SEQ ID NO: 39610 - DNA, 70 bp, Homo sapiens
gttatggaaacacataaatgcttactttttaaacatttacatttaaaaggtgaacatatatatagaccac

SEQ ID NO: 39611 - DNA, 70 bp, Homo sapiens
cacataaatgcttactttttaaacatttacatttaaaaggtgaacatatatatagaccacttatacttta

SEQ ID NO: 39612 - DNA, 66 bp, Homo sapiens
gcttactttttaaacatttacatttaaaaggtgaacatatatatagaccacttatactttaaaaaa

SEQ ID NO: 39613 - DNA, 68 bp, Homo sapiens
aaaaatcaaaagcagacatgtttggctgaaataaaaccaagaaacacagctaaaactcccccataaac

SEQ ID NO: 39614 - DNA, 68 bp, Homo sapiens
caaaagcagacatgtttggctgaaataaaaccaagaaacacagctaaaactcccccataaacctaaaa

SEQ ID NO: 39615 - DNA, 67 bp, Homo sapiens
tttggctgaaataaaaccaagaaacacagctaaaactcccccataaacctaaaagtccatggagaat

SEQ ID NO: 39616 - DNA, 68 bp, Homo sapiens
ataaaaccaagaaacacagctaaaactcccccataaacctaaaagtccatggagaattcaatttctca

SEQ ID NO: 39617 - DNA, 69 bp, Homo sapiens
accaagaaacacagctaaaactcccccataaacctaaaagtccatggagaattcaatttctcatttcca

SEQ ID NO: 39618 - DNA, 72 bp, Homo sapiens
taaaactcccccataaacctaaaagtccatggagaattcaatttctcatttccattcagaaatctggctaca

SEQ ID NO: 39619 - DNA, 74 bp, Homo sapiens
acctaaaagtccatggagaattcaatttctcatttccattcagaaatctggctacaaagtgatttgtttgctat

SEQ ID NO: 39620 - DNA, 77 bp, Homo sapiens
atggagaattcaatttctcatttccattcagaaatctggctacaaagtgatttgtttgctatttgggacagtacaga

SEQ ID NO: 39621 - DNA, 77 bp, Homo sapiens
atttctcatttccattcagaaatctggctacaaagtgatttgtttgctatttgggacagtacagagtgctgaaagaa

SEQ ID NO: 39622 - DNA, 75 bp, Homo sapiens
atttccattcagaaatctggctacaaagtgatttgtttgctatttgggacagtacagagtgctgaaagaaaccca

SEQ ID NO: 39623 - DNA, 76 bp, Homo sapiens
agaaatctggctacaaagtgatttgtttgctatttgggacagtacagagtgctgaaagaaacccagctcttgagtc

SEQ ID NO: 39624 - DNA, 77 bp, Homo sapiens
tacaaagtgatttgtttgctatttgggacagtacagagtgctgaaagaaacccagctcttgagtctcttagatccca

SEQ ID NO: 39625 - DNA, 76 bp, Homo sapiens
atttgtttgctatttgggacagtacagagtgctgaaagaaacccagctcttgagtctcttagatcccatcctgtag

SEQ ID NO: 39626 - DNA, 76 bp, Homo sapiens
ctatttgggacagtacagagtgctgaaagaaacccagctcttgagtctcttagatcccatcctgtaggaagtggtg

SEQ ID NO: 39627 - DNA, 76 bp, Homo sapiens
acagtacagagtgctgaaagaaacccagctcttgagtctcttagatcccatcctgtaggaagtggtgggaaagcca

SEQ ID NO: 39628 - DNA, 76 bp, Homo sapiens
tgaaagaaacccagctcttgagtctcttagatcccatcctgtaggaagtggtgggaaagccagcggaccatgggca

SEQ ID NO: 39629 - DNA, 75 bp, Homo sapiens
aacccagctcttgagtctcttagatcccatcctgtaggaagtggtgggaaagccagcggaccatgggcaagtcaa

SEQ ID NO: 39630 - DNA, 74 bp, Homo sapiens
agtctcttagatcccatcctgtaggaagtggtgggaaagccagcggaccatgggcaagtcaactcctggctact

SEQ ID NO: 39631 - DNA, 75 bp, Homo sapiens
ttagatcccatcctgtaggaagtggtgggaaagccagcggaccatgggcaagtcaactcctggctacttggcagg

SEQ ID NO: 39632 - DNA, 76 bp, Homo sapiens
tcctgtaggaagtggtgggaaagccagcggaccatgggcaagtcaactcctggctacttggcagggagtcagactg

SEQ ID NO: 39633 - DNA, 78 bp, Homo sapiens
agtggtgggaaagccagcggaccatgggcaagtcaactcctggctacttggcagggagtcagactgtgctctctccat

SEQ ID NO: 39634 - DNA, 78 bp, Homo sapiens
aagccagcggaccatgggcaagtcaactcctggctacttggcagggagtcagactgtgctctctccattccccaggac

SEQ ID NO: 39635 - DNA, 79 bp, Homo sapiens
atgggcaagtcaactcctggctacttggcagggagtcagactgtgctctctccattccccaggactccacagaaccatc

SEQ ID NO: 39636 - DNA, 79 bp, Homo sapiens
aactcctggctacttggcagggagtcagactgtgctctctccattccccaggactccacagaaccatctggtactgcta

SEQ ID NO: 39637 - DNA, 81 bp, Homo sapiens
agggagtcagactgtgctctctccattccccaggactccacagaaccatctggtactgctagtgctgggtgaacagtgaga

SEQ ID NO: 39638 - DNA, 83 bp, Homo sapiens
tgtgctctctccattccccaggactccacagaaccatctggtactgctagtgctgggtgaacagtgagagcagagtccacaaa

SEQ ID NO: 39639 - DNA, 80 bp, Homo sapiens
ctctccattccccaggactccacagaaccatctggtactgctagtgctgggtgaacagtgagagcagagtccacaaaaca

SEQ ID NO: 39640 - DNA, 80 bp, Homo sapiens
aggactccacagaaccatctggtactgctagtgctgggtgaacagtgagagcagagtccacaaaacacagagaaccagaa

SEQ ID NO: 39641 - DNA, 81 bp, Homo sapiens
agaaccatctggtactgctagtgctgggtgaacagtgagagcagagtccacaaaacacagagaaccagaatgtgaccgcaa

SEQ ID NO: 39642 - DNA, 80 bp, Homo sapiens
tgctgggtgaacagtgagagcagagtccacaaaacacagagaaccagaatgtgaccgcaaggagccaggaccttgtgctt

SEQ ID NO: 39643 - DNA, 79 bp, Homo sapiens
cagtgagagcagagtccacaaaacacagagaaccagaatgtgaccgcaaggagccaggaccttgtgctttttcatggat

SEQ ID NO: 39644 - DNA, 75 bp, Homo sapiens
agagtccacaaaacacagagaaccagaatgtgaccgcaaggagccaggaccttgtgctttttcatggattacaaa

SEQ ID NO: 39645 - DNA, 74 bp, Homo sapiens
acaaaacacagagaaccagaatgtgaccgcaaggagccaggaccttgtgctttttcatggattacaaatctagg

SEQ ID NO: 39646 - DNA, 74 bp, Homo sapiens
aatgtgaccgcaaggagccaggaccttgtgctttttcatggattacaaatctagggccaaggagagggaaagca

SEQ ID NO: 39647 - DNA, 73 bp, Homo sapiens
gagccaggaccttgtgctttttcatggattacaaatctagggccaaggagagggaaagcagaaagagccctat

SEQ ID NO: 39648 - DNA, 71 bp, Homo sapiens
accttgtgctttttcatggattacaaatctagggccaaggagagggaaagcagaaagagccctattgggaa

SEQ ID NO: 39649 - DNA, 74 bp, Homo sapiens
ggccaaggagagggaaagcagaaagagccctattgggaagaggagctggctgcgcccctaaactgagatggaaa

SEQ ID NO: 39650 - DNA, 73 bp, Homo sapiens
agagggaaagcagaaagagccctattgggaagaggagctggctgcgcccctaaactgagatggaaagagtaag

SEQ ID NO: 39651 - DNA, 76 bp, Homo sapiens
aagcagaaagagccctattgggaagaggagctggctgcgcccctaaactgagatggaaagagtaaggctcttgagc

SEQ ID NO: 39652 - DNA, 75 bp, Homo sapiens
agccctattgggaagaggagctggctgcgcccctaaactgagatggaaagagtaaggctcttgagcccacacctg

SEQ ID NO: 39653 - DNA, 76 bp, Homo sapiens
agaggagctggctgcgcccctaaactgagatggaaagagtaaggctcttgagcccacacctggccaagtagaaata

SEQ ID NO: 39654 - DNA, 74 bp, Homo sapiens
ctgcgcccctaaactgagatggaaagagtaaggctcttgagcccacacctggccaagtagaaatagtgtccaaa

SEQ ID NO: 39655 - DNA, 74 bp, Homo sapiens
taaactgagatggaaagagtaaggctcttgagcccacacctggccaagtagaaatagtgtccaaagttttctca

SEQ ID NO: 39656 - DNA, 69 bp, Homo sapiens
ttgagcccacacctggccaagtagaaatagtgtccaaagttttctcaaaccagagggaaaaaaggtcaa

SEQ ID NO: 39657 - DNA, 71 bp, Homo sapiens
aaagttttctcaaaccagagggaaaaaaggtcaaggttaggttcagactgcagacactaagagatgacaga

SEQ ID NO: 39658 - DNA, 76 bp, Homo sapiens
ggaaaaaaggtcaaggttaggttcagactgcagacactaagagatgacagatgttgaatacggtgaatgggatgaa

SEQ ID NO: 39659 - DNA, 80 bp, Homo sapiens
tcaaggttaggttcagactgcagacactaagagatgacagatgttgaatacggtgaatgggatgaagctttaaggatcaa

SEQ ID NO: 39660 - DNA, 81 bp, Homo sapiens
taggttcagactgcagacactaagagatgacagatgttgaatacggtgaatgggatgaagctttaaggatcaatgcccaat

SEQ ID NO: 39661 - DNA, 81 bp, Homo sapiens
actgcagacactaagagatgacagatgttgaatacggtgaatgggatgaagctttaaggatcaatgcccaattctgagtgt

SEQ ID NO: 39662 - DNA, 80 bp, Homo sapiens
taagagatgacagatgttgaatacggtgaatgggatgaagctttaaggatcaatgcccaattctgagtgttatacacatt

SEQ ID NO: 39663 - DNA, 76 bp, Homo sapiens
atgttgaatacggtgaatgggatgaagctttaaggatcaatgcccaattctgagtgttatacacatttctaggaaa

SEQ ID NO: 39664 - DNA, 74 bp, Homo sapiens
aatacggtgaatgggatgaagctttaaggatcaatgcccaattctgagtgttatacacatttctaggaaaaata

SEQ ID NO: 39665 - DNA, 75 bp, Homo sapiens
ggatgaagctttaaggatcaatgcccaattctgagtgttatacacatttctaggaaaaataattccaatgtagct

SEQ ID NO: 39666 - DNA, 71 bp, Homo sapiens
atcaatgcccaattctgagtgttatacacatttctaggaaaaataattccaatgtagcttttgggggtggg

SEQ ID NO: 39667 - DNA, 66 bp, Homo sapiens
ttatacacatttctaggaaaaataattccaatgtagcttttgggggtggggggtggaaataaggtg

SEQ ID NO: 39668 - DNA, 67 bp, Homo sapiens
taggaaaaataattccaatgtagcttttgggggtggggggtggaaataaggtggtcacatttattca

SEQ ID NO: 39669 - DNA, 71 bp, Homo sapiens
ggtggggggtggaaataaggtggtcacatttattcaatcagctggtccctatgaggaaggagaggcccagg

SEQ ID NO: 39670 - DNA, 75 bp, Homo sapiens
ggtggaaataaggtggtcacatttattcaatcagctggtccctatgaggaaggagaggcccaggtacagatacca

SEQ ID NO: 39671 - DNA, 73 bp, Homo sapiens
atttattcaatcagctggtccctatgaggaaggagaggcccaggtacagataccacaaaggggtacagtgacc

SEQ ID NO: 39672 - DNA, 74 bp, Homo sapiens
aatcagctggtccctatgaggaaggagaggcccaggtacagataccacaaaggggtacagtgacccagctgtcc

SEQ ID NO: 39673 - DNA, 73 bp, Homo sapiens
tatgaggaaggagaggcccaggtacagataccacaaaggggtacagtgacccagctgtcctgggattggttgg

SEQ ID NO: 39674 - DNA, 71 bp, Homo sapiens
agaggcccaggtacagataccacaaaggggtacagtgacccagctgtcctgggattggttggggagtggta

SEQ ID NO: 39675 - DNA, 74 bp, Homo sapiens
gtacagataccacaaaggggtacagtgacccagctgtcctgggattggttggggagtggtaagcaatgacataa

SEQ ID NO: 39676 - DNA, 73 bp, Homo sapiens
ataccacaaaggggtacagtgacccagctgtcctgggattggttggggagtggtaagcaatgacataaatcaa

SEQ ID NO: 39677 - DNA, 73 bp, Homo sapiens
gtacagtgacccagctgtcctgggattggttggggagtggtaagcaatgacataaatcaaaaccattgagggt

SEQ ID NO: 39678 - DNA, 76 bp, Homo sapiens
cagctgtcctgggattggttggggagtggtaagcaatgacataaatcaaaaccattgagggttgctttgatcctga

SEQ ID NO: 39679 - DNA, 79 bp, Homo sapiens
tggggagtggtaagcaatgacataaatcaaaaccattgagggttgctttgatcctgagacagtctgagtctgcttcaaa

SEQ ID NO: 39680 - DNA, 79 bp, Homo sapiens
gtggtaagcaatgacataaatcaaaaccattgagggttgctttgatcctgagacagtctgagtctgcttcaaacccatg

SEQ ID NO: 39681 - DNA, 74 bp, Homo sapiens
ataaatcaaaaccattgagggttgctttgatcctgagacagtctgagtctgcttcaaacccatggggaaaggaa

SEQ ID NO: 39682 - DNA, 72 bp, Homo sapiens
aaaaccattgagggttgctttgatcctgagacagtctgagtctgcttcaaacccatggggaaaggaacttta

SEQ ID NO: 39683 - DNA, 71 bp, Homo sapiens
agggttgctttgatcctgagacagtctgagtctgcttcaaacccatggggaaaggaactttaatccccaac

SEQ ID NO: 39684 - DNA, 74 bp, Homo sapiens
atcctgagacagtctgagtctgcttcaaacccatggggaaaggaactttaatccccaacctgcagagagaaata

SEQ ID NO: 39685 - DNA, 73 bp, Homo sapiens
acagtctgagtctgcttcaaacccatggggaaaggaactttaatccccaacctgcagagagaaatacgcagta

SEQ ID NO: 39686 - DNA, 72 bp, Homo sapiens
agtctgcttcaaacccatggggaaaggaactttaatccccaacctgcagagagaaatacgcagtagcatccc

SEQ ID NO: 39687 - DNA, 80 bp, Homo sapiens
ttaatccccaacctgcagagagaaatacgcagtagcatccctgcctcacgattccctaatccaatgctcttgaatctgaa

SEQ ID NO: 39688 - DNA, 80 bp, Homo sapiens
aacctgcagagagaaatacgcagtagcatccctgcctcacgattccctaatccaatgctcttgaatctgaaatggcctcc

SEQ ID NO: 39689 - DNA, 81 bp, Homo sapiens
aaatacgcagtagcatccctgcctcacgattccctaatccaatgctcttgaatctgaaatggcctccctctgtgaatgcaa

SEQ ID NO: 39690 - DNA, 82 bp, Homo sapiens
tagcatccctgcctcacgattccctaatccaatgctcttgaatctgaaatggcctccctctgtgaatgcaagacacagaaaa

SEQ ID NO: 39691 - DNA, 78 bp, Homo sapiens
cctcacgattccctaatccaatgctcttgaatctgaaatggcctccctctgtgaatgcaagacacagaaaatcccaag

SEQ ID NO: 39692 - DNA, 78 bp, Homo sapiens
attccctaatccaatgctcttgaatctgaaatggcctccctctgtgaatgcaagacacagaaaatcccaagtgccttc

SEQ ID NO: 39693 - DNA, 78 bp, Homo sapiens
aatgctcttgaatctgaaatggcctccctctgtgaatgcaagacacagaaaatcccaagtgccttccccaacaacatc

SEQ ID NO: 39694 - DNA, 75 bp, Homo sapiens
atctgaaatggcctccctctgtgaatgcaagacacagaaaatcccaagtgccttccccaacaacatcctaagtaa

SEQ ID NO: 39695 - DNA, 74 bp, Homo sapiens
cctccctctgtgaatgcaagacacagaaaatcccaagtgccttccccaacaacatcctaagtaagtctggacta

SEQ ID NO: 39696 - DNA, 75 bp, Homo sapiens
tgaatgcaagacacagaaaatcccaagtgccttccccaacaacatcctaagtaagtctggactagtaagattcca

SEQ ID NO: 39697 - DNA, 72 bp, Homo sapiens
acacagaaaatcccaagtgccttccccaacaacatcctaagtaagtctggactagtaagattccaacattca

SEQ ID NO: 39698 - DNA, 71 bp, Homo sapiens
aaaatcccaagtgccttccccaacaacatcctaagtaagtctggactagtaagattccaacattcatgaaa

SEQ ID NO: 39699 - DNA, 75 bp, Homo sapiens
cttccccaacaacatcctaagtaagtctggactagtaagattccaacattcatgaaaacactgtcaacatctgaa

SEQ ID NO: 39700 - DNA, 77 bp, Homo sapiens
aacaacatcctaagtaagtctggactagtaagattccaacattcatgaaaacactgtcaacatctgaactagcagct

SEQ ID NO: 39701 - DNA, 78 bp, Homo sapiens
cctaagtaagtctggactagtaagattccaacattcatgaaaacactgtcaacatctgaactagcagctttgatgagg

SEQ ID NO: 39702 - DNA, 79 bp, Homo sapiens
tctggactagtaagattccaacattcatgaaaacactgtcaacatctgaactagcagctttgatgaggggtggggggca

SEQ ID NO: 39703 - DNA, 77 bp, Homo sapiens
ttcatgaaaacactgtcaacatctgaactagcagctttgatgaggggtggggggcagaaaatttgccgagtcactaa

SEQ ID NO: 39704 - DNA, 74 bp, Homo sapiens
aacactgtcaacatctgaactagcagctttgatgaggggtggggggcagaaaatttgccgagtcactaagtagt

SEQ ID NO: 39705 - DNA, 73 bp, Homo sapiens
aacatctgaactagcagctttgatgaggggtggggggcagaaaatttgccgagtcactaagtagttccagtct

SEQ ID NO: 39706 - DNA, 75 bp, Homo sapiens
agctttgatgaggggtggggggcagaaaatttgccgagtcactaagtagttccagtcttggagacagctcagtga

SEQ ID NO: 39707 - DNA, 77 bp, Homo sapiens
gggcagaaaatttgccgagtcactaagtagttccagtcttggagacagctcagtgaggaccaaagcctgtgtgtcag

SEQ ID NO: 39708 - DNA, 78 bp, Homo sapiens
agtcactaagtagttccagtcttggagacagctcagtgaggaccaaagcctgtgtgtcaggcttaaactctggctcaa

SEQ ID NO: 39709 - DNA, 81 bp, Homo sapiens
tagttccagtcttggagacagctcagtgaggaccaaagcctgtgtgtcaggcttaaactctggctcaagacatcctccaca

SEQ ID NO: 39710 - DNA, 81 bp, Homo sapiens
tggagacagctcagtgaggaccaaagcctgtgtgtcaggcttaaactctggctcaagacatcctccacagaggaccctgaa

SEQ ID NO: 39711 - DNA, 77 bp, Homo sapiens
agtgaggaccaaagcctgtgtgtcaggcttaaactctggctcaagacatcctccacagaggaccctgaagtattcta

SEQ ID NO: 39712 - DNA, 74 bp, Homo sapiens
aaagcctgtgtgtcaggcttaaactctggctcaagacatcctccacagaggaccctgaagtattctattaactt

SEQ ID NO: 39713 - DNA, 76 bp, Homo sapiens
tgtgtcaggcttaaactctggctcaagacatcctccacagaggaccctgaagtattctattaactttgatttacaa

SEQ ID NO: 39714 - DNA, 76 bp, Homo sapiens
tggctcaagacatcctccacagaggaccctgaagtattctattaactttgatttacaatgcctcacaacaacaccc

SEQ ID NO: 39715 - DNA, 74 bp, Homo sapiens
acatcctccacagaggaccctgaagtattctattaactttgatttacaatgcctcacaacaacacccctgtgag

SEQ ID NO: 39716 - DNA, 72 bp, Homo sapiens
aggaccctgaagtattctattaactttgatttacaatgcctcacaacaacacccctgtgaggtaggtcagta

SEQ ID NO: 39717 - DNA, 72 bp, Homo sapiens
atttacaatgcctcacaacaacacccctgtgaggtaggtcagtattattaaccccatttgacagatggggaa

SEQ ID NO: 39718 - DNA, 72 bp, Homo sapiens
aggtaggtcagtattattaaccccatttgacagatggggaactgaggcattgaaagaagtgacttgcccaag

SEQ ID NO: 39719 - DNA, 80 bp, Homo sapiens
ttgcccaaggtcaaccattatcaatcagttgaggaggtgggcacacagagtcagcatccactcgattcttgttccatttc

SEQ ID NO: 39720 - DNA, 79 bp, Homo sapiens
aaggtcaaccattatcaatcagttgaggaggtgggcacacagagtcagcatccactcgattcttgttccatttcccaga

SEQ ID NO: 39721 - DNA, 79 bp, Homo sapiens
attatcaatcagttgaggaggtgggcacacagagtcagcatccactcgattcttgttccatttcccagagcattttacc

SEQ ID NO: 39722 - DNA, 80 bp, Homo sapiens
gttgaggaggtgggcacacagagtcagcatccactcgattcttgttccatttcccagagcattttacctctcagagtgta

SEQ ID NO: 39723 - DNA, 82 bp, Homo sapiens
tgggcacacagagtcagcatccactcgattcttgttccatttcccagagcattttacctctcagagtgtacttgggagcaga

SEQ ID NO: 39724 - DNA, 78 bp, Homo sapiens
agagtcagcatccactcgattcttgttccatttcccagagcattttacctctcagagtgtacttgggagcagagggaa

SEQ ID NO: 39725 - DNA, 76 bp, Homo sapiens
atccactcgattcttgttccatttcccagagcattttacctctcagagtgtacttgggagcagagggaagttggca

SEQ ID NO: 39726 - DNA, 76 bp, Homo sapiens
ttgttccatttcccagagcattttacctctcagagtgtacttgggagcagagggaagttggcaggatacacctcat

SEQ ID NO: 39727 - DNA, 76 bp, Homo sapiens
atttcccagagcattttacctctcagagtgtacttgggagcagagggaagttggcaggatacacctcattccacaa

SEQ ID NO: 39728 - DNA, 74 bp, Homo sapiens
ttttacctctcagagtgtacttgggagcagagggaagttggcaggatacacctcattccacaaactagattaat

SEQ ID NO: 39729 - DNA, 75 bp, Homo sapiens
agagtgtacttgggagcagagggaagttggcaggatacacctcattccacaaactagattaattcaataactgaa

SEQ ID NO: 39730 - DNA, 73 bp, Homo sapiens
gggagcagagggaagttggcaggatacacctcattccacaaactagattaattcaataactgaagggtattaa

SEQ ID NO: 39731 - DNA, 72 bp, Homo sapiens
caggatacacctcattccacaaactagattaattcaataactgaagggtattaactgagggcctattattta

SEQ ID NO: 39732 - DNA, 71 bp, Homo sapiens
acacctcattccacaaactagattaattcaataactgaagggtattaactgagggcctattatttatctag

SEQ ID NO: 39733 - DNA, 72 bp, Homo sapiens
aactgaagggtattaactgagggcctattatttatctagtataatgtgaggaatcttggaaaaatgaactgc

SEQ ID NO: 39734 - DNA, 73 bp, Homo sapiens
ggtattaactgagggcctattatttatctagtataatgtgaggaatcttggaaaaatgaactgcttctgaaag

SEQ ID NO: 39735 - DNA, 77 bp, Homo sapiens
gagggcctattatttatctagtataatgtgaggaatcttggaaaaatgaactgcttctgaaagtcatgttatagatg

SEQ ID NO: 39736 - DNA, 75 bp, Homo sapiens
atttatctagtataatgtgaggaatcttggaaaaatgaactgcttctgaaagtcatgttatagatgttttgaaaa

SEQ ID NO: 39737 - DNA, 74 bp, Homo sapiens
gtataatgtgaggaatcttggaaaaatgaactgcttctgaaagtcatgttatagatgttttgaaaataaaatta

SEQ ID NO: 39738 - DNA, 72 bp, Homo sapiens
aggaatcttggaaaaatgaactgcttctgaaagtcatgttatagatgttttgaaaataaaattacatcttta

SEQ ID NO: 39739 - DNA, 74 bp, Homo sapiens
aaatgaactgcttctgaaagtcatgttatagatgttttgaaaataaaattacatctttaacattaaggacatga

SEQ ID NO: 39740 - DNA, 71 bp, Homo sapiens
agtcatgttatagatgttttgaaaataaaattacatctttaacattaaggacatgaattattttgtaaaga

SEQ ID NO: 39741 - DNA, 71 bp, Homo sapiens
catctttaacattaaggacatgaattattttgtaaagaaatattcactttatcttaggaggtgaaggacta

SEQ ID NO: 39742 - DNA, 73 bp, Homo sapiens
gtaaagaaatattcactttatcttaggaggtgaaggactaagtcacactgatttctcagagttttatactgag

SEQ ID NO: 39743 - DNA, 73 bp, Homo sapiens
tttatcttaggaggtgaaggactaagtcacactgatttctcagagttttatactgagtaacctgaattcctaa

SEQ ID NO: 39744 - DNA, 72 bp, Homo sapiens
aggtgaaggactaagtcacactgatttctcagagttttatactgagtaacctgaattcctaaaatccagaaa

SEQ ID NO: 39745 - DNA, 75 bp, Homo sapiens
actaagtcacactgatttctcagagttttatactgagtaacctgaattcctaaaatccagaaagcaagatcacat

SEQ ID NO: 39746 - DNA, 76 bp, Homo sapiens
tgatttctcagagttttatactgagtaacctgaattcctaaaatccagaaagcaagatcacattccaacagaaaca

SEQ ID NO: 39747 - DNA, 75 bp, Homo sapiens
cagagttttatactgagtaacctgaattcctaaaatccagaaagcaagatcacattccaacagaaacaatgaata

SEQ ID NO: 39748 - DNA, 72 bp, Homo sapiens
actgagtaacctgaattcctaaaatccagaaagcaagatcacattccaacagaaacaatgaataagaacctt

SEQ ID NO: 39749 - DNA, 71 bp, Homo sapiens
acctgaattcctaaaatccagaaagcaagatcacattccaacagaaacaatgaataagaaccttttcccca

SEQ ID NO: 39750 - DNA, 71 bp, Homo sapiens
taaaatccagaaagcaagatcacattccaacagaaacaatgaataagaaccttttccccagtggtggttct

SEQ ID NO: 39751 - DNA, 73 bp, Homo sapiens
caagatcacattccaacagaaacaatgaataagaaccttttccccagtggtggttcttggtagcgctcttata

SEQ ID NO: 39752 - DNA, 70 bp, Homo sapiens
aaacaatgaataagaaccttttccccagtggtggttcttggtagcgctcttataaagctgcaagttggtg

SEQ ID NO: 39753 - DNA, 70 bp, Homo sapiens
ataagaaccttttccccagtggtggttcttggtagcgctcttataaagctgcaagttggtggcgtgggaa

SEQ ID NO: 39754 - DNA, 74 bp, Homo sapiens
tccccagtggtggttcttggtagcgctcttataaagctgcaagttggtggcgtgggaatcctagcaccacaaaa

SEQ ID NO: 39755 - DNA, 74 bp, Homo sapiens
tggttcttggtagcgctcttataaagctgcaagttggtggcgtgggaatcctagcaccacaaaacaccctctta

SEQ ID NO: 39756 - DNA, 76 bp, Homo sapiens
ttggtagcgctcttataaagctgcaagttggtggcgtgggaatcctagcaccacaaaacaccctcttactacatca

SEQ ID NO: 39757 - DNA, 75 bp, Homo sapiens
tcttataaagctgcaagttggtggcgtgggaatcctagcaccacaaaacaccctcttactacatcacatccctcc

SEQ ID NO: 39758 - DNA, 71 bp, Homo sapiens
aagttggtggcgtgggaatcctagcaccacaaaacaccctcttactacatcacatccctccccacaatacc

SEQ ID NO: 39759 - DNA, 72 bp, Homo sapiens
ggtggcgtgggaatcctagcaccacaaaacaccctcttactacatcacatccctccccacaatacccagagg

SEQ ID NO: 39760 - DNA, 73 bp, Homo sapiens
aatcctagcaccacaaaacaccctcttactacatcacatccctccccacaatacccagagggctgcatttttc

SEQ ID NO: 39761 - DNA, 70 bp, Homo sapiens
acaaaacaccctcttactacatcacatccctccccacaatacccagagggctgcatttttccaacctttc

SEQ ID NO: 39762 - DNA, 77 bp, Homo sapiens
tcttactacatcacatccctccccacaatacccagagggctgcatttttccaacctttctgcctcagctcaacttca

SEQ ID NO: 39763 - DNA, 75 bp, Homo sapiens
atcacatccctccccacaatacccagagggctgcatttttccaacctttctgcctcagctcaacttcaagagtta

SEQ ID NO: 39764 - DNA, 76 bp, Homo sapiens
cccacaatacccagagggctgcatttttccaacctttctgcctcagctcaacttcaagagttacagcatcttcaaa

SEQ ID NO: 39765 - DNA, 75 bp, Homo sapiens
aatacccagagggctgcatttttccaacctttctgcctcagctcaacttcaagagttacagcatcttcaaaaaca

SEQ ID NO: 39766 - DNA, 73 bp, Homo sapiens
aacctttctgcctcagctcaacttcaagagttacagcatcttcaaaaacacctcaagggtaaggatacaaatg

SEQ ID NO: 39767 - DNA, 75 bp, Homo sapiens
ttctgcctcagctcaacttcaagagttacagcatcttcaaaaacacctcaagggtaaggatacaaatggtgaccc

SEQ ID NO: 39768 - DNA, 71 bp, Homo sapiens
acttcaagagttacagcatcttcaaaaacacctcaagggtaaggatacaaatggtgacccctgcttttcta

SEQ ID NO: 39769 - DNA, 69 bp, Homo sapiens
atcttcaaaaacacctcaagggtaaggatacaaatggtgacccctgcttttctattcagggagagggga

SEQ ID NO: 39770 - DNA, 69 bp, Homo sapiens
aaacacctcaagggtaaggatacaaatggtgacccctgcttttctattcagggagaggggatgaaaata

SEQ ID NO: 39771 - DNA, 74 bp, Homo sapiens
taaggatacaaatggtgacccctgcttttctattcagggagaggggatgaaaatattctctgtaactaatcata

SEQ ID NO: 39772 - DNA, 73 bp, Homo sapiens
aaatggtgacccctgcttttctattcagggagaggggatgaaaatattctctgtaactaatcatatagactct

SEQ ID NO: 39773 - DNA, 74 bp, Homo sapiens
ccctgcttttctattcagggagaggggatgaaaatattctctgtaactaatcatatagactcttgaattctttc

SEQ ID NO: 39774 - DNA, 76 bp, Homo sapiens
tttctattcagggagaggggatgaaaatattctctgtaactaatcatatagactcttgaattctttcctcctgtga

SEQ ID NO: 39775 - DNA, 75 bp, Homo sapiens
aggggatgaaaatattctctgtaactaatcatatagactcttgaattctttcctcctgtgagagatgtaactctt

SEQ ID NO: 39776 - DNA, 75 bp, Homo sapiens
gaaaatattctctgtaactaatcatatagactcttgaattctttcctcctgtgagagatgtaactctttaacaaa

SEQ ID NO: 39777 - DNA, 72 bp, Homo sapiens
ctctgtaactaatcatatagactcttgaattctttcctcctgtgagagatgtaactctttaacaaaaaaaag

SEQ ID NO: 39778 - DNA, 71 bp, Homo sapiens
aatcatatagactcttgaattctttcctcctgtgagagatgtaactctttaacaaaaaaaaggtagaagaa

SEQ ID NO: 39779 - DNA, 67 bp, Homo sapiens
ctcttgaattctttcctcctgtgagagatgtaactctttaacaaaaaaaaggtagaagaaaaaacag

SEQ ID NO: 39780 - DNA, 68 bp, Homo sapiens
tcctcctgtgagagatgtaactctttaacaaaaaaaaggtagaagaaaaaacagttatgtcttttctc

SEQ ID NO: 39781 - DNA, 62 bp, Homo sapiens
aaaaaaaggtagaagaaaaaacagttatgtcttttctccccctttggatttactttggattc

SEQ ID NO: 39782 - DNA, 70 bp, Homo sapiens
aacagttatgtcttttctccccctttggatttactttggattctggtagaaatcattatgtctcttatcc

SEQ ID NO: 39783 - DNA, 71 bp, Homo sapiens
atgtcttttctccccctttggatttactttggattctggtagaaatcattatgtctcttatcctaaactga

SEQ ID NO: 39784 - DNA, 70 bp, Homo sapiens
cccctttggatttactttggattctggtagaaatcattatgtctcttatcctaaactgaggaggtgaggg

SEQ ID NO: 39785 - DNA, 73 bp, Homo sapiens
atttactttggattctggtagaaatcattatgtctcttatcctaaactgaggaggtgaggggtgagggtgaca

SEQ ID NO: 39786 - DNA, 74 bp, Homo sapiens
attctggtagaaatcattatgtctcttatcctaaactgaggaggtgaggggtgagggtgacacgagacaaacac

SEQ ID NO: 39787 - DNA, 75 bp, Homo sapiens
tagaaatcattatgtctcttatcctaaactgaggaggtgaggggtgagggtgacacgagacaaacaccaaactca

SEQ ID NO: 39788 - DNA, 74 bp, Homo sapiens
tatgtctcttatcctaaactgaggaggtgaggggtgagggtgacacgagacaaacaccaaactcaccaccagcc

SEQ ID NO: 39789 - DNA, 71 bp, Homo sapiens
taaactgaggaggtgaggggtgagggtgacacgagacaaacaccaaactcaccaccagccctcgtttagaa

SEQ ID NO: 39790 - DNA, 71 bp, Homo sapiens
ggtgaggggtgagggtgacacgagacaaacaccaaactcaccaccagccctcgtttagaatccaatcctaa

SEQ ID NO: 39791 - DNA, 72 bp, Homo sapiens
tgagggtgacacgagacaaacaccaaactcaccaccagccctcgtttagaatccaatcctaaagctaccgga

SEQ ID NO: 39792 - DNA, 70 bp, Homo sapiens
accaccagccctcgtttagaatccaatcctaaagctaccggaaaccagaacactgacttgagccttaaga

SEQ ID NO: 39793 - DNA, 74 bp, Homo sapiens
tcgtttagaatccaatcctaaagctaccggaaaccagaacactgacttgagccttaagagtgttgtgacatgat

SEQ ID NO: 39794 - DNA, 74 bp, Homo sapiens
tagaatccaatcctaaagctaccggaaaccagaacactgacttgagccttaagagtgttgtgacatgattaaac

SEQ ID NO: 39795 - DNA, 74 bp, Homo sapiens
tcctaaagctaccggaaaccagaacactgacttgagccttaagagtgttgtgacatgattaaactgtcttttca

SEQ ID NO: 39796 - DNA, 74 bp, Homo sapiens
aaaccagaacactgacttgagccttaagagtgttgtgacatgattaaactgtcttttcaggtgttctcaaagaa

SEQ ID NO: 39797 - DNA, 75 bp, Homo sapiens
agaacactgacttgagccttaagagtgttgtgacatgattaaactgtcttttcaggtgttctcaaagaatttcta

SEQ ID NO: 39798 - DNA, 75 bp, Homo sapiens
cttgagccttaagagtgttgtgacatgattaaactgtcttttcaggtgttctcaaagaatttctaggcagaaagc

SEQ ID NO: 39799 - DNA, 73 bp, Homo sapiens
aagagtgttgtgacatgattaaactgtcttttcaggtgttctcaaagaatttctaggcagaaagcctctcctt

SEQ ID NO: 39800 - DNA, 72 bp, Homo sapiens
acatgattaaactgtcttttcaggtgttctcaaagaatttctaggcagaaagcctctcctttcttccatacc

SEQ ID NO: 39801 - DNA, 72 bp, Homo sapiens
aaactgtcttttcaggtgttctcaaagaatttctaggcagaaagcctctcctttcttccatacctcttcaca

SEQ ID NO: 39802 - DNA, 75 bp, Homo sapiens
aggtgttctcaaagaatttctaggcagaaagcctctcctttcttccatacctcttcacagcagccagtgtaggaa

SEQ ID NO: 39803 - DNA, 75 bp, Homo sapiens
aagaatttctaggcagaaagcctctcctttcttccatacctcttcacagcagccagtgtaggaagtccccacata

SEQ ID NO: 39804 - DNA, 77 bp, Homo sapiens
tctaggcagaaagcctctcctttcttccatacctcttcacagcagccagtgtaggaagtccccacatacaacagaaa

SEQ ID NO: 39805 - DNA, 74 bp, Homo sapiens
aaagcctctcctttcttccatacctcttcacagcagccagtgtaggaagtccccacatacaacagaaactcaaa

SEQ ID NO: 39806 - DNA, 77 bp, Homo sapiens
tttcttccatacctcttcacagcagccagtgtaggaagtccccacatacaacagaaactcaaaagatgatttatcaa

SEQ ID NO: 39807 - DNA, 78 bp, Homo sapiens
tcttcacagcagccagtgtaggaagtccccacatacaacagaaactcaaaagatgatttatcaacacatacagtaaaa

SEQ ID NO: 39808 - DNA, 76 bp, Homo sapiens
gccagtgtaggaagtccccacatacaacagaaactcaaaagatgatttatcaacacatacagtaaaatgttcacta

SEQ ID NO: 39809 - DNA, 74 bp, Homo sapiens
tgtaggaagtccccacatacaacagaaactcaaaagatgatttatcaacacatacagtaaaatgttcactaggg

SEQ ID NO: 39810 - DNA, 73 bp, Homo sapiens
cccacatacaacagaaactcaaaagatgatttatcaacacatacagtaaaatgttcactaggggccgggtgcg

SEQ ID NO: 39811 - DNA, 65 bp, Homo sapiens
aaaaaaaaaggttcaatatggatactctaggtacaggaaccattccaagacctaaatagattttt

SEQ ID NO: 39812 - DNA, 72 bp, Homo sapiens
ttttttttttcctcactgatagctgatcacattaaacaggtacaggtgctaagaaagtttaagactgatctt

SEQ ID NO: 39813 - DNA, 77 bp, Homo sapiens
tttttcctcactgatagctgatcacattaaacaggtacaggtgctaagaaagtttaagactgatcttttggcaatga

SEQ ID NO: 39814 - DNA, 75 bp, Homo sapiens
tagctgatcacattaaacaggtacaggtgctaagaaagtttaagactgatcttttggcaatgacagtttaggtta

SEQ ID NO: 39815 - DNA, 70 bp, Homo sapiens
attaaacaggtacaggtgctaagaaagtttaagactgatcttttggcaatgacagtttaggttaactctg

SEQ ID NO: 39816 - DNA, 70 bp, Homo sapiens
ggtacaggtgctaagaaagtttaagactgatcttttggcaatgacagtttaggttaactctgtttggaat

SEQ ID NO: 39817 - DNA, 70 bp, Homo sapiens
gtgctaagaaagtttaagactgatcttttggcaatgacagtttaggttaactctgtttggaattcctaaa

SEQ ID NO: 39818 - DNA, 67 bp, Homo sapiens
agtttaagactgatcttttggcaatgacagtttaggttaactctgtttggaattcctaaaaataaaa

SEQ ID NO: 39819 - DNA, 66 bp, Homo sapiens
aataaaaagaaatcccttaaaaaaggctgacaaactgaccacttggccttgaatcgactgttaggg

SEQ ID NO: 39820 - DNA, 68 bp, Homo sapiens
aaagaaatcccttaaaaaaggctgacaaactgaccacttggccttgaatcgactgttagggtcacacc

SEQ ID NO: 39821 - DNA, 72 bp, Homo sapiens
cttaaaaaaggctgacaaactgaccacttggccttgaatcgactgttagggtcacacctgccaatgccaggg

SEQ ID NO: 39822 - DNA, 75 bp, Homo sapiens
ctgacaaactgaccacttggccttgaatcgactgttagggtcacacctgccaatgccaggggacatcacaaaaaa

SEQ ID NO: 39823 - DNA, 75 bp, Homo sapiens
acttggccttgaatcgactgttagggtcacacctgccaatgccaggggacatcacaaaaaaatagagaatgccaa

SEQ ID NO: 39824 - DNA, 75 bp, Homo sapiens
ttgaatcgactgttagggtcacacctgccaatgccaggggacatcacaaaaaaatagagaatgccaagataaaaa

SEQ ID NO: 39825 - DNA, 77 bp, Homo sapiens
gtcacacctgccaatgccaggggacatcacaaaaaaatagagaatgccaagataaaaagttcactgcattcaatttg

SEQ ID NO: 39826 - DNA, 73 bp, Homo sapiens
aatgccaggggacatcacaaaaaaatagagaatgccaagataaaaagttcactgcattcaatttggcctaatt

SEQ ID NO: 39827 - DNA, 74 bp, Homo sapiens
gggacatcacaaaaaaatagagaatgccaagataaaaagttcactgcattcaatttggcctaatttcttgataa

SEQ ID NO: 39828 - DNA, 74 bp, Homo sapiens
aatagagaatgccaagataaaaagttcactgcattcaatttggcctaatttcttgataatagtttcctattaga

SEQ ID NO: 39829 - DNA, 72 bp, Homo sapiens
gccaagataaaaagttcactgcattcaatttggcctaatttcttgataatagtttcctattagattttccga

SEQ ID NO: 39830 - DNA, 72 bp, Homo sapiens
aaagttcactgcattcaatttggcctaatttcttgataatagtttcctattagattttccgattaatactga

SEQ ID NO: 39831 - DNA, 75 bp, Homo sapiens
gttcactgcattcaatttggcctaatttcttgataatagtttcctattagattttccgattaatactgatggctc

SEQ ID NO: 39832 - DNA, 73 bp, Homo sapiens
gcattcaatttggcctaatttcttgataatagtttcctattagattttccgattaatactgatggctcttacc

SEQ ID NO: 39833 - DNA, 75 bp, Homo sapiens
tggcctaatttcttgataatagtttcctattagattttccgattaatactgatggctcttacctaggctgtgata

SEQ ID NO: 39834 - DNA, 73 bp, Homo sapiens
tcttgataatagtttcctattagattttccgattaatactgatggctcttacctaggctgtgataattaggtt

SEQ ID NO: 39835 - DNA, 72 bp, Homo sapiens
cttgataatagtttcctattagattttccgattaatactgatggctcttacctaggctgtgataattaggtt

SEQ ID NO: 39836 - DNA, 73 bp, Homo sapiens
tagtttcctattagattttccgattaatactgatggctcttacctaggctgtgataattaggttttgatctat

SEQ ID NO: 39837 - DNA, 75 bp, Homo sapiens
cctattagattttccgattaatactgatggctcttacctaggctgtgataattaggttttgatctattgtgacat

SEQ ID NO: 39838 - DNA, 78 bp, Homo sapiens
agattttccgattaatactgatggctcttacctaggctgtgataattaggttttgatctattgtgacattaatgatca

SEQ ID NO: 39839 - DNA, 80 bp, Homo sapiens
attaatactgatggctcttacctaggctgtgataattaggttttgatctattgtgacattaatgatcacaatcagttgac

SEQ ID NO: 39840 - DNA, 78 bp, Homo sapiens
atggctcttacctaggctgtgataattaggttttgatctattgtgacattaatgatcacaatcagttgactttgaaat

SEQ ID NO: 39841 - DNA, 76 bp, Homo sapiens
attaggttttgatctattgtgacattaatgatcacaatcagttgactttgaaattgtcttaattaatggctctttc

SEQ ID NO: 39842 - DNA, 79 bp, Homo sapiens
ttttgatctattgtgacattaatgatcacaatcagttgactttgaaattgtcttaattaatggctctttccttgtcagc

SEQ ID NO: 39843 - DNA, 77 bp, Homo sapiens
attgtgacattaatgatcacaatcagttgactttgaaattgtcttaattaatggctctttccttgtcagcttttgcc

SEQ ID NO: 39844 - DNA, 79 bp, Homo sapiens
taatgatcacaatcagttgactttgaaattgtcttaattaatggctctttccttgtcagcttttgcctccagtgcagga

SEQ ID NO: 39845 - DNA, 76 bp, Homo sapiens
aatcagttgactttgaaattgtcttaattaatggctctttccttgtcagcttttgcctccagtgcaggattcattc

SEQ ID NO: 39846 - DNA, 73 bp, Homo sapiens
ctttgaaattgtcttaattaatggctctttccttgtcagcttttgcctccagtgcaggattcattcccttccc

SEQ ID NO: 39847 - DNA, 74 bp, Homo sapiens
taattaatggctctttccttgtcagcttttgcctccagtgcaggattcattcccttccccactgccttgtttta

SEQ ID NO: 39848 - DNA, 74 bp, Homo sapiens
ttgtcagcttttgcctccagtgcaggattcattcccttccccactgccttgttttaactccttctcttactgac

SEQ ID NO: 39849 - DNA, 71 bp, Homo sapiens
aggattcattcccttccccactgccttgttttaactccttctcttactgacctcagaaacaaatagcattg

SEQ ID NO: 39850 - DNA, 72 bp, Homo sapiens
attcccttccccactgccttgttttaactccttctcttactgacctcagaaacaaatagcattggaggatca

SEQ ID NO: 39851 - DNA, 73 bp, Homo sapiens
ctgccttgttttaactccttctcttactgacctcagaaacaaatagcattggaggatcactttcttcccataa

SEQ ID NO: 39852 - DNA, 72 bp, Homo sapiens
tgttttaactccttctcttactgacctcagaaacaaatagcattggaggatcactttcttcccataaaacaa

SEQ ID NO: 39853 - DNA, 71 bp, Homo sapiens
ctcttactgacctcagaaacaaatagcattggaggatcactttcttcccataaaacaagactttaaactat

SEQ ID NO: 39854 - DNA, 70 bp, Homo sapiens
actgacctcagaaacaaatagcattggaggatcactttcttcccataaaacaagactttaaactatttta

SEQ ID NO: 39855 - DNA, 67 bp, Homo sapiens
gaaacaaatagcattggaggatcactttcttcccataaaacaagactttaaactattttaaaacatt

SEQ ID NO: 39856 - DNA, 75 bp, Homo sapiens
cccataaaacaagactttaaactattttaaaacatttctcttgacagaggagcaatatgagatgatgttagatga

SEQ ID NO: 39857 - DNA, 79 bp, Homo sapiens
caagactttaaactattttaaaacatttctcttgacagaggagcaatatgagatgatgttagatgaaatgaggatcaga

SEQ ID NO: 39858 - DNA, 81 bp, Homo sapiens
ttttaaaacatttctcttgacagaggagcaatatgagatgatgttagatgaaatgaggatcagaatgaaaaggcaagagaa

SEQ ID NO: 39859 - DNA, 86 bp, Homo sapiens
tttctcttgacagaggagcaatatgagatgatgttagatgaaatgaggatcagaatgaaaaggcaagagaacaagctgtcaatgaa

SEQ ID NO: 39860 - DNA, 84 bp, Homo sapiens
acagaggagcaatatgagatgatgttagatgaaatgaggatcagaatgaaaaggcaagagaacaagctgtcaatgaacaggaaa

SEQ ID NO: 39861 - DNA, 81 bp, Homo sapiens
aatatgagatgatgttagatgaaatgaggatcagaatgaaaaggcaagagaacaagctgtcaatgaacaggaaaaattcca

SEQ ID NO: 39862 - DNA, 76 bp, Homo sapiens
atgaaatgaggatcagaatgaaaaggcaagagaacaagctgtcaatgaacaggaaaaattccatcttagaaaacaa

SEQ ID NO: 39863 - DNA, 74 bp, Homo sapiens
gaacaagctgtcaatgaacaggaaaaattccatcttagaaaacaaccaaagtcaagcacaatgttaaagtgaca

SEQ ID NO: 39864 - DNA, 73 bp, Homo sapiens
ctgtcaatgaacaggaaaaattccatcttagaaaacaaccaaagtcaagcacaatgttaaagtgacaagttga

SEQ ID NO: 39865 - DNA, 70 bp, Homo sapiens
caggaaaaattccatcttagaaaacaaccaaagtcaagcacaatgttaaagtgacaagttgaagtaactc

SEQ ID NO: 39866 - DNA, 70 bp, Homo sapiens
ccatcttagaaaacaaccaaagtcaagcacaatgttaaagtgacaagttgaagtaactctaaaaagacaa

SEQ ID NO: 39867 - DNA, 71 bp, Homo sapiens
aacaaccaaagtcaagcacaatgttaaagtgacaagttgaagtaactctaaaaagacaagatgaggtagat

SEQ ID NO: 39868 - DNA, 73 bp, Homo sapiens
gtcaagcacaatgttaaagtgacaagttgaagtaactctaaaaagacaagatgaggtagattaaaatccaaga

SEQ ID NO: 39869 - DNA, 73 bp, Homo sapiens
tgttaaagtgacaagttgaagtaactctaaaaagacaagatgaggtagattaaaatccaagaaagtcagcaca

SEQ ID NO: 39870 - DNA, 71 bp, Homo sapiens
gaagtaactctaaaaagacaagatgaggtagattaaaatccaagaaagtcagcacaagcaaaaagaaacca

SEQ ID NO: 39871 - DNA, 70 bp, Homo sapiens
ctaaaaagacaagatgaggtagattaaaatccaagaaagtcagcacaagcaaaaagaaaccagaattgtt

SEQ ID NO: 39872 - DNA, 69 bp, Homo sapiens
gattaaaatccaagaaagtcagcacaagcaaaaagaaaccagaattgtttttatgaaactatctaaaaa

SEQ ID NO: 39873 - DNA, 69 bp, Homo sapiens
ccaagaaagtcagcacaagcaaaaagaaaccagaattgtttttatgaaactatctaaaaaacttcacac

SEQ ID NO: 39874 - DNA, 66 bp, Homo sapiens
caagcaaaaagaaaccagaattgtttttatgaaactatctaaaaaacttcacactttaactttcca

SEQ ID NO: 39875 - DNA, 68 bp, Homo sapiens
gaaaccagaattgtttttatgaaactatctaaaaaacttcacactttaactttccagagcagttactc

SEQ ID NO: 39876 - DNA, 69 bp, Homo sapiens
gaaactatctaaaaaacttcacactttaactttccagagcagttactctaattcctgggaattctgact

SEQ ID NO: 39877 - DNA, 71 bp, Homo sapiens
acactttaactttccagagcagttactctaattcctgggaattctgacttccaaagttagtcaactctcaa

SEQ ID NO: 39878 - DNA, 73 bp, Homo sapiens
ttaactttccagagcagttactctaattcctgggaattctgacttccaaagttagtcaactctcaattatcca

SEQ ID NO: 39879 - DNA, 73 bp, Homo sapiens
agcagttactctaattcctgggaattctgacttccaaagttagtcaactctcaattatccaggcagaaataaa

SEQ ID NO: 39880 - DNA, 72 bp, Homo sapiens
ctctaattcctgggaattctgacttccaaagttagtcaactctcaattatccaggcagaaataaatatcttt

SEQ ID NO: 39881 - DNA, 75 bp, Homo sapiens
attctgacttccaaagttagtcaactctcaattatccaggcagaaataaatatctttttcttgtggtcatccatg

SEQ ID NO: 39882 - DNA, 75 bp, Homo sapiens
ttccaaagttagtcaactctcaattatccaggcagaaataaatatctttttcttgtggtcatccatgggtcagaa

SEQ ID NO: 39883 - DNA, 78 bp, Homo sapiens
tcaactctcaattatccaggcagaaataaatatctttttcttgtggtcatccatgggtcagaatcgacaacatcctta

SEQ ID NO: 39884 - DNA, 77 bp, Homo sapiens
aattatccaggcagaaataaatatctttttcttgtggtcatccatgggtcagaatcgacaacatccttacgatcaga

SEQ ID NO: 39885 - DNA, 76 bp, Homo sapiens
cagaaataaatatctttttcttgtggtcatccatgggtcagaatcgacaacatccttacgatcagactgtttctta

SEQ ID NO: 39886 - DNA, 76 bp, Homo sapiens
atatctttttcttgtggtcatccatgggtcagaatcgacaacatccttacgatcagactgtttcttaacccagcta

SEQ ID NO: 39887 - DNA, 77 bp, Homo sapiens
agaatcgacaacatccttacgatcagactgtttcttaacccagctacgcttcgatgattaaatctgagactcagatt

SEQ ID NO: 39888 - DNA, 77 bp, Homo sapiens
acaacatccttacgatcagactgtttcttaacccagctacgcttcgatgattaaatctgagactcagatttaatata

SEQ ID NO: 39889 - DNA, 77 bp, Homo sapiens
ttacgatcagactgtttcttaacccagctacgcttcgatgattaaatctgagactcagatttaatatacaaggtata

SEQ ID NO: 39890 - DNA, 76 bp, Homo sapiens
ctgtttcttaacccagctacgcttcgatgattaaatctgagactcagatttaatatacaaggtatatgtatttctg

SEQ ID NO: 39891 - DNA, 77 bp, Homo sapiens
agctacgcttcgatgattaaatctgagactcagatttaatatacaaggtatatgtatttctggcaaaggtttccaca

SEQ ID NO: 39892 - DNA, 76 bp, Homo sapiens
cgcttcgatgattaaatctgagactcagatttaatatacaaggtatatgtatttctggcaaaggtttccacataac

SEQ ID NO: 39893 - DNA, 78 bp, Homo sapiens
atctgagactcagatttaatatacaaggtatatgtatttctggcaaaggtttccacataactgatacaattctctgct

SEQ ID NO: 39894 - DNA, 77 bp, Homo sapiens
gactcagatttaatatacaaggtatatgtatttctggcaaaggtttccacataactgatacaattctctgcttagaa

SEQ ID NO: 39895 - DNA, 76 bp, Homo sapiens
taatatacaaggtatatgtatttctggcaaaggtttccacataactgatacaattctctgcttagaaatcaccctc

SEQ ID NO: 39896 - DNA, 74 bp, Homo sapiens
aggtatatgtatttctggcaaaggtttccacataactgatacaattctctgcttagaaatcaccctctcggccc

SEQ ID NO: 39897 - DNA, 73 bp, Homo sapiens
atttctggcaaaggtttccacataactgatacaattctctgcttagaaatcaccctctcggcccggcggtggc

SEQ ID NO: 39898 - DNA, 77 bp, Homo sapiens
aaaaaaagaaatcaccctctctccagtattgaataaaactgcactgctcagagtagatgctcaggtattaacagatg

SEQ ID NO: 39899 - DNA, 82 bp, Homo sapiens
aagaaatcaccctctctccagtattgaataaaactgcactgctcagagtagatgctcaggtattaacagatgtgctccaaga

SEQ ID NO: 39900 - DNA, 82 bp, Homo sapiens
tctccagtattgaataaaactgcactgctcagagtagatgctcaggtattaacagatgtgctccaagacttctctttagaaa

SEQ ID NO: 39901 - DNA, 81 bp, Homo sapiens
tattgaataaaactgcactgctcagagtagatgctcaggtattaacagatgtgctccaagacttctctttagaaaatctct

SEQ ID NO: 39902 - DNA, 82 bp, Homo sapiens
aactgcactgctcagagtagatgctcaggtattaacagatgtgctccaagacttctctttagaaaatctcttgtcattggaa

SEQ ID NO: 39903 - DNA, 79 bp, Homo sapiens
gagtagatgctcaggtattaacagatgtgctccaagacttctctttagaaaatctcttgtcattggaaagcatgtccgt

SEQ ID NO: 39904 - DNA, 77 bp, Homo sapiens
atgctcaggtattaacagatgtgctccaagacttctctttagaaaatctcttgtcattggaaagcatgtccgtttta

SEQ ID NO: 39905 - DNA, 74 bp, Homo sapiens
ttaacagatgtgctccaagacttctctttagaaaatctcttgtcattggaaagcatgtccgttttaggcttaaa

SEQ ID NO: 39906 - DNA, 71 bp, Homo sapiens
ctccaagacttctctttagaaaatctcttgtcattggaaagcatgtccgttttaggcttaaaggcagttaa

SEQ ID NO: 39907 - DNA, 70 bp, Homo sapiens
aagacttctctttagaaaatctcttgtcattggaaagcatgtccgttttaggcttaaaggcagttaagtc

SEQ ID NO: 39908 - DNA, 73 bp, Homo sapiens
ctctttagaaaatctcttgtcattggaaagcatgtccgttttaggcttaaaggcagttaagtctcatgttcat

SEQ ID NO: 39909 - DNA, 73 bp, Homo sapiens
tttagaaaatctcttgtcattggaaagcatgtccgttttaggcttaaaggcagttaagtctcatgttcattcc

SEQ ID NO: 39910 - DNA, 73 bp, Homo sapiens
aatctcttgtcattggaaagcatgtccgttttaggcttaaaggcagttaagtctcatgttcattcctccaaaa

SEQ ID NO: 39911 - DNA, 74 bp, Homo sapiens
ttgtcattggaaagcatgtccgttttaggcttaaaggcagttaagtctcatgttcattcctccaaaagggatga

SEQ ID NO: 39912 - DNA, 72 bp, Homo sapiens
attggaaagcatgtccgttttaggcttaaaggcagttaagtctcatgttcattcctccaaaagggatgagaa

SEQ ID NO: 39913 - DNA, 70 bp, Homo sapiens
atgtccgttttaggcttaaaggcagttaagtctcatgttcattcctccaaaagggatgagaaattgaaaa

SEQ ID NO: 39914 - DNA, 71 bp, Homo sapiens
ttttaggcttaaaggcagttaagtctcatgttcattcctccaaaagggatgagaaattgaaaaaggtgtga

SEQ ID NO: 39915 - DNA, 72 bp, Homo sapiens
agttaagtctcatgttcattcctccaaaagggatgagaaattgaaaaaggtgtgagcaactctggtaaagtg

SEQ ID NO: 39916 - DNA, 74 bp, Homo sapiens
ctccaaaagggatgagaaattgaaaaaggtgtgagcaactctggtaaagtgtccatgaggaatatgttgttata

SEQ ID NO: 39917 - DNA, 76 bp, Homo sapiens
gatgagaaattgaaaaaggtgtgagcaactctggtaaagtgtccatgaggaatatgttgttatagaacccacaata

SEQ ID NO: 39918 - DNA, 74 bp, Homo sapiens
attgaaaaaggtgtgagcaactctggtaaagtgtccatgaggaatatgttgttatagaacccacaataatgtaa

SEQ ID NO: 39919 - DNA, 76 bp, Homo sapiens
aaggtgtgagcaactctggtaaagtgtccatgaggaatatgttgttatagaacccacaataatgtaacacaactga

SEQ ID NO: 39920 - DNA, 77 bp, Homo sapiens
ggaatatgttgttatagaacccacaataatgtaacacaactgaatctgcaacatagttaatgctttccacaagcaaa

SEQ ID NO: 39921 - DNA, 76 bp, Homo sapiens
gttatagaacccacaataatgtaacacaactgaatctgcaacatagttaatgctttccacaagcaaagattaactc

SEQ ID NO: 39922 - DNA, 76 bp, Homo sapiens
taacacaactgaatctgcaacatagttaatgctttccacaagcaaagattaactctaccactactttggccaagaa

SEQ ID NO: 39923 - DNA, 74 bp, Homo sapiens
aatctgcaacatagttaatgctttccacaagcaaagattaactctaccactactttggccaagaatctaaacca

SEQ ID NO: 39924 - DNA, 72 bp, Homo sapiens
atagttaatgctttccacaagcaaagattaactctaccactactttggccaagaatctaaaccagggatgaa

SEQ ID NO: 39925 - DNA, 73 bp, Homo sapiens
taatgctttccacaagcaaagattaactctaccactactttggccaagaatctaaaccagggatgaaaatcag

SEQ ID NO: 39926 - DNA, 72 bp, Homo sapiens
acaagcaaagattaactctaccactactttggccaagaatctaaaccagggatgaaaatcaggagttctcaa

SEQ ID NO: 39927 - DNA, 72 bp, Homo sapiens
attaactctaccactactttggccaagaatctaaaccagggatgaaaatcaggagttctcaatcccaactca

SEQ ID NO: 39928 - DNA, 70 bp, Homo sapiens
accactactttggccaagaatctaaaccagggatgaaaatcaggagttctcaatcccaactcacctgttt

SEQ ID NO: 39929 - DNA, 73 bp, Homo sapiens
aagaatctaaaccagggatgaaaatcaggagttctcaatcccaactcacctgttttctctctcagtaataaca

SEQ ID NO: 39930 - DNA, 75 bp, Homo sapiens
tctaaaccagggatgaaaatcaggagttctcaatcccaactcacctgttttctctctcagtaataacagcatttc

SEQ ID NO: 39931 - DNA, 74 bp, Homo sapiens
aaaatcaggagttctcaatcccaactcacctgttttctctctcagtaataacagcatttccaaccctccagcta

SEQ ID NO: 39932 - DNA, 73 bp, Homo sapiens
aatcccaactcacctgttttctctctcagtaataacagcatttccaaccctccagctatatttatttcctgga

SEQ ID NO: 39933 - DNA, 78 bp, Homo sapiens
tctctctcagtaataacagcatttccaaccctccagctatatttatttcctggaatatgttcttgtgttctatggcca

SEQ ID NO: 39934 - DNA, 78 bp, Homo sapiens
taataacagcatttccaaccctccagctatatttatttcctggaatatgttcttgtgttctatggccagctggctcag

SEQ ID NO: 39935 - DNA, 76 bp, Homo sapiens
gctatatttatttcctggaatatgttcttgtgttctatggccagctggctcagttcacccaatgttataggtcttt

SEQ ID NO: 39936 - DNA, 77 bp, Homo sapiens
tatgttcttgtgttctatggccagctggctcagttcacccaatgttataggtcttttccacatataggccgaaatta

SEQ ID NO: 39937 - DNA, 77 bp, Homo sapiens
ttgtgttctatggccagctggctcagttcacccaatgttataggtcttttccacatataggccgaaattaatgtcaa

SEQ ID NO: 39938 - DNA, 76 bp, Homo sapiens
tatggccagctggctcagttcacccaatgttataggtcttttccacatataggccgaaattaatgtcaacttctta

SEQ ID NO: 39939 - DNA, 73 bp, Homo sapiens
tcagttcacccaatgttataggtcttttccacatataggccgaaattaatgtcaacttcttactccagggcta

SEQ ID NO: 39940 - DNA, 71 bp, Homo sapiens
aatgttataggtcttttccacatataggccgaaattaatgtcaacttcttactccagggctacaaactata

SEQ ID NO: 39941 - DNA, 74 bp, Homo sapiens
tataggtcttttccacatataggccgaaattaatgtcaacttcttactccagggctacaaactatacaacatca

SEQ ID NO: 39942 - DNA, 77 bp, Homo sapiens
ttccacatataggccgaaattaatgtcaacttcttactccagggctacaaactatacaacatcagccagtctgtctc

SEQ ID NO: 39943 - DNA, 77 bp, Homo sapiens
gaaattaatgtcaacttcttactccagggctacaaactatacaacatcagccagtctgtctctgcccccaagtcaga

SEQ ID NO: 39944 - DNA, 77 bp, Homo sapiens
ttactccagggctacaaactatacaacatcagccagtctgtctctgcccccaagtcagaaatgtgtattggtttata

SEQ ID NO: 39945 - DNA, 78 bp, Homo sapiens
ctacaaactatacaacatcagccagtctgtctctgcccccaagtcagaaatgtgtattggtttatagcatttattata

SEQ ID NO: 39946 - DNA, 72 bp, Homo sapiens
agccagtctgtctctgcccccaagtcagaaatgtgtattggtttatagcatttattataccaaactattttt

SEQ ID NO: 39947 - DNA, 69 bp, Homo sapiens
ctgtctctgcccccaagtcagaaatgtgtattggtttatagcatttattataccaaactattttttttt

SEQ ID NO: 39948 - DNA, 70 bp, Homo sapiens
agtcagaaatgtgtattggtttatagcatttattataccaaactattttttttttgaacagaaacatagc

SEQ ID NO: 39949 - DNA, 70 bp, Homo sapiens
gtgtattggtttatagcatttattataccaaactattttttttttgaacagaaacatagcttgtaagcac

SEQ ID NO: 39950 - DNA, 69 bp, Homo sapiens
tggtttatagcatttattataccaaactattttttttttgaacagaaacatagcttgtaagcacttaaa

SEQ ID NO: 39951 - DNA, 69 bp, Homo sapiens
tattataccaaactattttttttttgaacagaaacatagcttgtaagcacttaaactattaatggtcag

SEQ ID NO: 39952 - DNA, 75 bp, Homo sapiens
tttttgaacagaaacatagcttgtaagcacttaaactattaatggtcagttcatcatacaccagtatgaaagtta

SEQ ID NO: 39953 - DNA, 76 bp, Homo sapiens
agaaacatagcttgtaagcacttaaactattaatggtcagttcatcatacaccagtatgaaagttatttgagggca

SEQ ID NO: 39954 - DNA, 76 bp, Homo sapiens
atagcttgtaagcacttaaactattaatggtcagttcatcatacaccagtatgaaagttatttgagggcagggatg

SEQ ID NO: 39955 - DNA, 75 bp, Homo sapiens
acttaaactattaatggtcagttcatcatacaccagtatgaaagttatttgagggcagggatggcctctttctga

SEQ ID NO: 39956 - DNA, 77 bp, Homo sapiens
tattaatggtcagttcatcatacaccagtatgaaagttatttgagggcagggatggcctctttctgaaccttgtatc

SEQ ID NO: 39957 - DNA, 76 bp, Homo sapiens
ttcatcatacaccagtatgaaagttatttgagggcagggatggcctctttctgaaccttgtatcttcaggccaaaa

SEQ ID NO: 39958 - DNA, 72 bp, Homo sapiens
atacaccagtatgaaagttatttgagggcagggatggcctctttctgaaccttgtatcttcaggccaaaaaa

SEQ ID NO: 39959 - DNA, 71 bp, Homo sapiens
aaagttatttgagggcagggatggcctctttctgaaccttgtatcttcaggccaaaaaaatgtctgttgaa

SEQ ID NO: 39960 - DNA, 72 bp, Homo sapiens
agggcagggatggcctctttctgaaccttgtatcttcaggccaaaaaaatgtctgttgaatgaaaccaatgt

SEQ ID NO: 39961 - DNA, 76 bp, Homo sapiens
atggcctctttctgaaccttgtatcttcaggccaaaaaaatgtctgttgaatgaaaccaatgttgatgtacagcaa

SEQ ID NO: 39962 - DNA, 77 bp, Homo sapiens
tgaaccttgtatcttcaggccaaaaaaatgtctgttgaatgaaaccaatgttgatgtacagcaatgtggctggaatt

SEQ ID NO: 39963 - DNA, 77 bp, Homo sapiens
ttgtatcttcaggccaaaaaaatgtctgttgaatgaaaccaatgttgatgtacagcaatgtggctggaatttagaaa

SEQ ID NO: 39964 - DNA, 76 bp, Homo sapiens
atgtctgttgaatgaaaccaatgttgatgtacagcaatgtggctggaatttagaaagcttaataaaaattgggtga

SEQ ID NO: 39965 - DNA, 75 bp, Homo sapiens
aatgttgatgtacagcaatgtggctggaatttagaaagcttaataaaaattgggtgagggggcatctaattcaga

SEQ ID NO: 39966 - DNA, 71 bp, Homo sapiens
agcaatgtggctggaatttagaaagcttaataaaaattgggtgagggggcatctaattcagaacatgtttt

SEQ ID NO: 39967 - DNA, 69 bp, Homo sapiens
ctggaatttagaaagcttaataaaaattgggtgagggggcatctaattcagaacatgtttttgggtgta

SEQ ID NO: 39968 - DNA, 70 bp, Homo sapiens
aaagcttaataaaaattgggtgagggggcatctaattcagaacatgtttttgggtgtaaggctagtatca

SEQ ID NO: 39969 - DNA, 73 bp, Homo sapiens
ttgggtgagggggcatctaattcagaacatgtttttgggtgtaaggctagtatcatctacttttgaaaacata

SEQ ID NO: 39970 - DNA, 73 bp, Homo sapiens
gggcatctaattcagaacatgtttttgggtgtaaggctagtatcatctacttttgaaaacataatttttatga

SEQ ID NO: 39971 - DNA, 72 bp, Homo sapiens
cagaacatgtttttgggtgtaaggctagtatcatctacttttgaaaacataatttttatgattagcaggtaa

SEQ ID NO: 39972 - DNA, 77 bp, Homo sapiens
gctagtatcatctacttttgaaaacataatttttatgattagcaggtaaaggtagcatgaaactgcaatacactggc

SEQ ID NO: 39973 - DNA, 78 bp, Homo sapiens
tatcatctacttttgaaaacataatttttatgattagcaggtaaaggtagcatgaaactgcaatacactggctccaga

SEQ ID NO: 39974 - DNA, 74 bp, Homo sapiens
aaaacataatttttatgattagcaggtaaaggtagcatgaaactgcaatacactggctccagacctttcctctc

SEQ ID NO: 39975 - DNA, 77 bp, Homo sapiens
ataatttttatgattagcaggtaaaggtagcatgaaactgcaatacactggctccagacctttcctctctgccttgc

SEQ ID NO: 39976 - DNA, 80 bp, Homo sapiens
attagcaggtaaaggtagcatgaaactgcaatacactggctccagacctttcctctctgccttgccacaggcatgcttgg

SEQ ID NO: 39977 - DNA, 82 bp, Homo sapiens
taaaggtagcatgaaactgcaatacactggctccagacctttcctctctgccttgccacaggcatgcttggtggtctgatta

SEQ ID NO: 39978 - DNA, 80 bp, Homo sapiens
atgaaactgcaatacactggctccagacctttcctctctgccttgccacaggcatgcttggtggtctgattacaaaagta

SEQ ID NO: 39979 - DNA, 76 bp, Homo sapiens
agacctttcctctctgccttgccacaggcatgcttggtggtctgattacaaaagtacggatctcaacactatattt

SEQ ID NO: 39980 - DNA, 76 bp, Homo sapiens
tttcctctctgccttgccacaggcatgcttggtggtctgattacaaaagtacggatctcaacactatattttttat

SEQ ID NO: 39981 - DNA, 76 bp, Homo sapiens
ttgccacaggcatgcttggtggtctgattacaaaagtacggatctcaacactatattttttattctaaaatctcaa

SEQ ID NO: 39982 - DNA, 73 bp, Homo sapiens
aggcatgcttggtggtctgattacaaaagtacggatctcaacactatattttttattctaaaatctcaaccaa

SEQ ID NO: 39983 - DNA, 72 bp, Homo sapiens
gtggtctgattacaaaagtacggatctcaacactatattttttattctaaaatctcaaccaaaatgatggga

SEQ ID NO: 39984 - DNA, 73 bp, Homo sapiens
acaaaagtacggatctcaacactatattttttattctaaaatctcaaccaaaatgatgggatcatgggtgcaa

SEQ ID NO: 39985 - DNA, 70 bp, Homo sapiens
ttctaaaatctcaaccaaaatgatgggatcatgggtgcaaagtgggtttttcctttaaattgtgagaaac

SEQ ID NO: 39986 - DNA, 71 bp, Homo sapiens
aaaatgatgggatcatgggtgcaaagtgggtttttcctttaaattgtgagaaaccatttccacatttcaga

SEQ ID NO: 39987 - DNA, 68 bp, Homo sapiens
atgggtgcaaagtgggtttttcctttaaattgtgagaaaccatttccacatttcagatctaacggtgt

SEQ ID NO: 39988 - DNA, 70 bp, Homo sapiens
aaagtgggtttttcctttaaattgtgagaaaccatttccacatttcagatctaacggtgttctcatgaca

SEQ ID NO: 39989 - DNA, 74 bp, Homo sapiens
tcctttaaattgtgagaaaccatttccacatttcagatctaacggtgttctcatgacattgcaaagtagtattt

SEQ ID NO: 39990 - DNA, 76 bp, Homo sapiens
taaattgtgagaaaccatttccacatttcagatctaacggtgttctcatgacattgcaaagtagtattttatgccc

SEQ ID NO: 39991 - DNA, 75 bp, Homo sapiens
aaccatttccacatttcagatctaacggtgttctcatgacattgcaaagtagtattttatgccctcaaaactgaa

SEQ ID NO: 39992 - DNA, 73 bp, Homo sapiens
atttcagatctaacggtgttctcatgacattgcaaagtagtattttatgccctcaaaactgaaccttaaggta

SEQ ID NO: 39993 - DNA, 73 bp, Homo sapiens
atctaacggtgttctcatgacattgcaaagtagtattttatgccctcaaaactgaaccttaaggtagagacaa

SEQ ID NO: 39994 - DNA, 73 bp, Homo sapiens
ttctcatgacattgcaaagtagtattttatgccctcaaaactgaaccttaaggtagagacaattgctccccgg

SEQ ID NO: 39995 - DNA, 69 bp, Homo sapiens
attgcaaagtagtattttatgccctcaaaactgaaccttaaggtagagacaattgctccccgggccaaa

SEQ ID NO: 39996 - DNA, 70 bp, Homo sapiens
tagtattttatgccctcaaaactgaaccttaaggtagagacaattgctccccgggccaaacacagatccc

SEQ ID NO: 39997 - DNA, 69 bp, Homo sapiens
atgccctcaaaactgaaccttaaggtagagacaattgctccccgggccaaacacagatccctccaaccc

SEQ ID NO: 39998 - DNA, 68 bp, Homo sapiens
aaccttaaggtagagacaattgctccccgggccaaacacagatccctccaacccctcactgtacctta

SEQ ID NO: 39999 - DNA, 70 bp, Homo sapiens
agatccctccaacccctcactgtaccttaggaaagctggggtaaactacagattcaacaaaatctcaata

SEQ ID NO: 40000 - DNA, 68 bp, Homo sapiens
aacccctcactgtaccttaggaaagctggggtaaactacagattcaacaaaatctcaataagaaaatc

SEQ ID NO: 40001 - DNA, 69 bp, Homo sapiens
tcactgtaccttaggaaagctggggtaaactacagattcaacaaaatctcaataagaaaatcccaaaaa

SEQ ID NO: 40002 - DNA, 66 bp, Homo sapiens
ttaggaaagctggggtaaactacagattcaacaaaatctcaataagaaaatcccaaaaaccttccc

SEQ ID NO: 40003 - DNA, 69 bp, Homo sapiens
attcaacaaaatctcaataagaaaatcccaaaaaccttccccaatgccctgtggtttggcctgaacata

SEQ ID NO: 40004 - DNA, 67 bp, Homo sapiens
aatctcaataagaaaatcccaaaaaccttccccaatgccctgtggtttggcctgaacatagggaaaa

SEQ ID NO: 40005 - DNA, 66 bp, Homo sapiens
aataagaaaatcccaaaaaccttccccaatgccctgtggtttggcctgaacatagggaaaatggac

SEQ ID NO: 40006 - DNA, 70 bp, Homo sapiens
aaaaaccttccccaatgccctgtggtttggcctgaacatagggaaaatggactgctgggtggctacagaa

SEQ ID NO: 40007 - DNA, 75 bp, Homo sapiens
ccaatgccctgtggtttggcctgaacatagggaaaatggactgctgggtggctacagaacaggaatgaagagtta

SEQ ID NO: 40008 - DNA, 75 bp, Homo sapiens
tgtggtttggcctgaacatagggaaaatggactgctgggtggctacagaacaggaatgaagagttaagaataata

SEQ ID NO: 40009 - DNA, 74 bp, Homo sapiens
cctgaacatagggaaaatggactgctgggtggctacagaacaggaatgaagagttaagaataataaatgcctaa

SEQ ID NO: 40010 - DNA, 73 bp, Homo sapiens
atagggaaaatggactgctgggtggctacagaacaggaatgaagagttaagaataataaatgcctaagttaca

SEQ ID NO: 40011 - DNA, 73 bp, Homo sapiens
actgctgggtggctacagaacaggaatgaagagttaagaataataaatgcctaagttacagggacagaaccaa

SEQ ID NO: 40012 - DNA, 74 bp, Homo sapiens
gaacaggaatgaagagttaagaataataaatgcctaagttacagggacagaaccaatctttcattaatgacaca

SEQ ID NO: 40013 - DNA, 75 bp, Homo sapiens
gagttaagaataataaatgcctaagttacagggacagaaccaatctttcattaatgacacaaagtagaatgcaca

SEQ ID NO: 40014 - DNA, 76 bp, Homo sapiens
aataaatgcctaagttacagggacagaaccaatctttcattaatgacacaaagtagaatgcacaaagtagtatgca

SEQ ID NO: 40015 - DNA, 78 bp, Homo sapiens
atgcctaagttacagggacagaaccaatctttcattaatgacacaaagtagaatgcacaaagtagtatgcagtatggc

SEQ ID NO: 40016 - DNA, 78 bp, Homo sapiens
tacagggacagaaccaatctttcattaatgacacaaagtagaatgcacaaagtagtatgcagtatggctgggggacag

SEQ ID NO: 40017 - DNA, 79 bp, Homo sapiens
aatctttcattaatgacacaaagtagaatgcacaaagtagtatgcagtatggctgggggacagtcaaggaccatctaga

SEQ ID NO: 40018 - DNA, 75 bp, Homo sapiens
acaaagtagaatgcacaaagtagtatgcagtatggctgggggacagtcaaggaccatctagacttttaattgtta

SEQ ID NO: 40019 - DNA, 73 bp, Homo sapiens
agtatggctgggggacagtcaaggaccatctagacttttaattgttagaagcaccacaggtccaaatgctccc

SEQ ID NO: 40020 - DNA, 73 bp, Homo sapiens
acagtcaaggaccatctagacttttaattgttagaagcaccacaggtccaaatgctccccagagtggaccaaa

SEQ ID NO: 40021 - DNA, 71 bp, Homo sapiens
accatctagacttttaattgttagaagcaccacaggtccaaatgctccccagagtggaccaaaactggatt

SEQ ID NO: 40022 - DNA, 72 bp, Homo sapiens
tagacttttaattgttagaagcaccacaggtccaaatgctccccagagtggaccaaaactggattttgtcca

SEQ ID NO: 40023 - DNA, 74 bp, Homo sapiens
attgttagaagcaccacaggtccaaatgctccccagagtggaccaaaactggattttgtccatggcaacactgt

SEQ ID NO: 40024 - DNA, 75 bp, Homo sapiens
acaggtccaaatgctccccagagtggaccaaaactggattttgtccatggcaacactgttctccactattctgtc

SEQ ID NO: 40025 - DNA, 78 bp, Homo sapiens
atgctccccagagtggaccaaaactggattttgtccatggcaacactgttctccactattctgtctataatgagaata

SEQ ID NO: 40026 - DNA, 80 bp, Homo sapiens
agagtggaccaaaactggattttgtccatggcaacactgttctccactattctgtctataatgagaatatatcaatagca

SEQ ID NO: 40027 - DNA, 79 bp, Homo sapiens
aaaactggattttgtccatggcaacactgttctccactattctgtctataatgagaatatatcaatagcaggaaatcta

SEQ ID NO: 40028 - DNA, 81 bp, Homo sapiens
attttgtccatggcaacactgttctccactattctgtctataatgagaatatatcaatagcaggaaatctactttcacaca

SEQ ID NO: 40029 - DNA, 81 bp, Homo sapiens
atggcaacactgttctccactattctgtctataatgagaatatatcaatagcaggaaatctactttcacacatggcaaacc

SEQ ID NO: 40030 - DNA, 79 bp, Homo sapiens
tctccactattctgtctataatgagaatatatcaatagcaggaaatctactttcacacatggcaaaccgcgaagaaaaa

SEQ ID NO: 40031 - DNA, 77 bp, Homo sapiens
ctattctgtctataatgagaatatatcaatagcaggaaatctactttcacacatggcaaaccgcgaagaaaaacaag

SEQ ID NO: 40032 - DNA, 74 bp, Homo sapiens
tatatcaatagcaggaaatctactttcacacatggcaaaccgcgaagaaaaacaaggataacctcagaccactt

SEQ ID NO: 40033 - DNA, 72 bp, Homo sapiens
gaaatctactttcacacatggcaaaccgcgaagaaaaacaaggataacctcagaccacttttacttgctgta

SEQ ID NO: 40034 - DNA, 71 bp, Homo sapiens
tttcacacatggcaaaccgcgaagaaaaacaaggataacctcagaccacttttacttgctgtaagtgggaa

SEQ ID NO: 40035 - DNA, 68 bp, Homo sapiens
acatggcaaaccgcgaagaaaaacaaggataacctcagaccacttttacttgctgtaagtgggaaaaa

SEQ ID NO: 40036 - DNA, 66 bp, Homo sapiens
ccgcgaagaaaaacaaggataacctcagaccacttttacttgctgtaagtgggaaaaacaaacaaa

SEQ ID NO: 40037 - DNA, 71 bp, Homo sapiens
caaaaaaccccagcaaataaaggattttccatgaacagaaaagcaaatataaatgcagttgataaactaga

SEQ ID NO: 40038 - DNA, 76 bp, Homo sapiens
cccagcaaataaaggattttccatgaacagaaaagcaaatataaatgcagttgataaactagaaagcaatcatcaa

SEQ ID NO: 40039 - DNA, 77 bp, Homo sapiens
aaggattttccatgaacagaaaagcaaatataaatgcagttgataaactagaaagcaatcatcaactaattgcagac

SEQ ID NO: 40040 - DNA, 79 bp, Homo sapiens
catgaacagaaaagcaaatataaatgcagttgataaactagaaagcaatcatcaactaattgcagactataaagatacc

SEQ ID NO: 40041 - DNA, 77 bp, Homo sapiens
cagaaaagcaaatataaatgcagttgataaactagaaagcaatcatcaactaattgcagactataaagatacccaaa

SEQ ID NO: 40042 - DNA, 77 bp, Homo sapiens
atataaatgcagttgataaactagaaagcaatcatcaactaattgcagactataaagatacccaaaaatccttctca

SEQ ID NO: 40043 - DNA, 75 bp, Homo sapiens
tgataaactagaaagcaatcatcaactaattgcagactataaagatacccaaaaatccttctcaaaatagcaccc

SEQ ID NO: 40044 - DNA, 74 bp, Homo sapiens
actagaaagcaatcatcaactaattgcagactataaagatacccaaaaatccttctcaaaatagcaccccagtg

SEQ ID NO: 40045 - DNA, 75 bp, Homo sapiens
atcatcaactaattgcagactataaagatacccaaaaatccttctcaaaatagcaccccagtggatggtagtcaa

SEQ ID NO: 40046 - DNA, 74 bp, Homo sapiens
taattgcagactataaagatacccaaaaatccttctcaaaatagcaccccagtggatggtagtcaagctttcca

SEQ ID NO: 40047 - DNA, 81 bp, Homo sapiens
tcaaaatagcaccccagtggatggtagtcaagctttccagcaaccagttattgatgattcatggcctacatcaaatgaata

SEQ ID NO: 40048 - DNA, 80 bp, Homo sapiens
atagcaccccagtggatggtagtcaagctttccagcaaccagttattgatgattcatggcctacatcaaatgaataagac

SEQ ID NO: 40049 - DNA, 79 bp, Homo sapiens
atggtagtcaagctttccagcaaccagttattgatgattcatggcctacatcaaatgaataagacttcgatttttgata

SEQ ID NO: 40050 - DNA, 77 bp, Homo sapiens
aagctttccagcaaccagttattgatgattcatggcctacatcaaatgaataagacttcgatttttgataccaacaa

SEQ ID NO: 40051 - DNA, 76 bp, Homo sapiens
caaccagttattgatgattcatggcctacatcaaatgaataagacttcgatttttgataccaacaatgtccccaaa

SEQ ID NO: 40052 - DNA, 75 bp, Homo sapiens
agttattgatgattcatggcctacatcaaatgaataagacttcgatttttgataccaacaatgtccccaaaccaa

SEQ ID NO: 40053 - DNA, 72 bp, Homo sapiens
attcatggcctacatcaaatgaataagacttcgatttttgataccaacaatgtccccaaaccaaacttaaca

SEQ ID NO: 40054 - DNA, 71 bp, Homo sapiens
gcctacatcaaatgaataagacttcgatttttgataccaacaatgtccccaaaccaaacttaacaaagcta

SEQ ID NO: 40055 - DNA, 72 bp, Homo sapiens
tcaaatgaataagacttcgatttttgataccaacaatgtccccaaaccaaacttaacaaagctaatgactgc

SEQ ID NO: 40056 - DNA, 71 bp, Homo sapiens
atgaataagacttcgatttttgataccaacaatgtccccaaaccaaacttaacaaagctaatgactgcttc

SEQ ID NO: 40057 - DNA, 71 bp, Homo sapiens
atttttgataccaacaatgtccccaaaccaaacttaacaaagctaatgactgcttctcagtaattcaggaa

SEQ ID NO: 40058 - DNA, 71 bp, Homo sapiens
tttttgataccaacaatgtccccaaaccaaacttaacaaagctaatgactgcttctcagtaattcaggaaa

SEQ ID NO: 40059 - DNA, 70 bp, Homo sapiens
gataccaacaatgtccccaaaccaaacttaacaaagctaatgactgcttctcagtaattcaggaaaaatt

SEQ ID NO: 40060 - DNA, 70 bp, Homo sapiens
caacaatgtccccaaaccaaacttaacaaagctaatgactgcttctcagtaattcaggaaaaatttagaa

SEQ ID NO: 40061 - DNA, 75 bp, Homo sapiens
caaaccaaacttaacaaagctaatgactgcttctcagtaattcaggaaaaatttagaaatatagcattgtgagca

SEQ ID NO: 40062 - DNA, 75 bp, Homo sapiens
aacaaagctaatgactgcttctcagtaattcaggaaaaatttagaaatatagcattgtgagcaaaaaacagaagc

SEQ ID NO: 40063 - DNA, 74 bp, Homo sapiens
tgactgcttctcagtaattcaggaaaaatttagaaatatagcattgtgagcaaaaaacagaagcttgttttggg

SEQ ID NO: 40064 - DNA, 73 bp, Homo sapiens
gcttctcagtaattcaggaaaaatttagaaatatagcattgtgagcaaaaaacagaagcttgttttggggaca

SEQ ID NO: 40065 - DNA, 71 bp, Homo sapiens
caggaaaaatttagaaatatagcattgtgagcaaaaaacagaagcttgttttggggacaggaattccaaga

SEQ ID NO: 40066 - DNA, 76 bp, Homo sapiens
atatagcattgtgagcaaaaaacagaagcttgttttggggacaggaattccaagagtctgagtgaagatgtggttg

SEQ ID NO: 40067 - DNA, 73 bp, Homo sapiens
caaaaaacagaagcttgttttggggacaggaattccaagagtctgagtgaagatgtggttggaagccttctca

SEQ ID NO: 40068 - DNA, 76 bp, Homo sapiens
acagaagcttgttttggggacaggaattccaagagtctgagtgaagatgtggttggaagccttctcaaacatgcaa

SEQ ID NO: 40069 - DNA, 75 bp, Homo sapiens
ttggggacaggaattccaagagtctgagtgaagatgtggttggaagccttctcaaacatgcaagtccagggcttt

SEQ ID NO: 40070 - DNA, 77 bp, Homo sapiens
acaggaattccaagagtctgagtgaagatgtggttggaagccttctcaaacatgcaagtccagggcttttctcatcc

SEQ ID NO: 40071 - DNA, 79 bp, Homo sapiens
aagagtctgagtgaagatgtggttggaagccttctcaaacatgcaagtccagggcttttctcatcctgccttcccatca

SEQ ID NO: 40072 - DNA, 77 bp, Homo sapiens
agtgaagatgtggttggaagccttctcaaacatgcaagtccagggcttttctcatcctgccttcccatcacctgacc

SEQ ID NO: 40073 - DNA, 76 bp, Homo sapiens
gttggaagccttctcaaacatgcaagtccagggcttttctcatcctgccttcccatcacctgaccctcctctgaaa

SEQ ID NO: 40074 - DNA, 74 bp, Homo sapiens
ccttctcaaacatgcaagtccagggcttttctcatcctgccttcccatcacctgaccctcctctgaaaccaccc

SEQ ID NO: 40075 - DNA, 71 bp, Homo sapiens
aagtccagggcttttctcatcctgccttcccatcacctgaccctcctctgaaaccacccctcaagtcttta

SEQ ID NO: 40076 - DNA, 72 bp, Homo sapiens
cttttctcatcctgccttcccatcacctgaccctcctctgaaaccacccctcaagtctttagcaaagtcagg

SEQ ID NO: 40077 - DNA, 73 bp, Homo sapiens
atcctgccttcccatcacctgaccctcctctgaaaccacccctcaagtctttagcaaagtcaggtattacaga

SEQ ID NO: 40078 - DNA, 73 bp, Homo sapiens
cttcccatcacctgaccctcctctgaaaccacccctcaagtctttagcaaagtcaggtattacagaggacaga

SEQ ID NO: 40079 - DNA, 71 bp, Homo sapiens
accctcctctgaaaccacccctcaagtctttagcaaagtcaggtattacagaggacagagcaacaaagagg

SEQ ID NO: 40080 - DNA, 71 bp, Homo sapiens
aaaccacccctcaagtctttagcaaagtcaggtattacagaggacagagcaacaaagagggcaactggaat

SEQ ID NO: 40081 - DNA, 71 bp, Homo sapiens
ccctcaagtctttagcaaagtcaggtattacagaggacagagcaacaaagagggcaactggaatttaaaaa

SEQ ID NO: 40082 - DNA, 70 bp, Homo sapiens
ctttagcaaagtcaggtattacagaggacagagcaacaaagagggcaactggaatttaaaaaaaattgta

SEQ ID NO: 40083 - DNA, 70 bp, Homo sapiens
gtcaggtattacagaggacagagcaacaaagagggcaactggaatttaaaaaaaattgtattactgaaag

SEQ ID NO: 40084 - DNA, 72 bp, Homo sapiens
agagcaacaaagagggcaactggaatttaaaaaaaattgtattactgaaagtgctccatgagagcaaacaaa

SEQ ID NO: 40085 - DNA, 72 bp, Homo sapiens
agagggcaactggaatttaaaaaaaattgtattactgaaagtgctccatgagagcaaacaaataatgacaat

SEQ ID NO: 40086 - DNA, 71 bp, Homo sapiens
tttaaaaaaaattgtattactgaaagtgctccatgagagcaaacaaataatgacaattttatttttgtcca

SEQ ID NO: 40087 - DNA, 73 bp, Homo sapiens
ctgaaagtgctccatgagagcaaacaaataatgacaattttatttttgtccacaaaaatttaatagaggtggc

SEQ ID NO: 40088 - DNA, 72 bp, Homo sapiens
ctccatgagagcaaacaaataatgacaattttatttttgtccacaaaaatttaatagaggtggccaggcacg

SEQ ID NO: 40089 - DNA, 79 bp, Homo sapiens
taaataaataatagaggtgaatgtctgcattaggatcaagacaagaagaagacagacaatcactttggaattctgagac

SEQ ID NO: 40090 - DNA, 78 bp, Homo sapiens
aaataatagaggtgaatgtctgcattaggatcaagacaagaagaagacagacaatcactttggaattctgagactacc

SEQ ID NO: 40091 - DNA, 80 bp, Homo sapiens
aatgtctgcattaggatcaagacaagaagaagacagacaatcactttggaattctgagactacctccaagaatcatccac

SEQ ID NO: 40092 - DNA, 76 bp, Homo sapiens
attaggatcaagacaagaagaagacagacaatcactttggaattctgagactacctccaagaatcatccacggaag

SEQ ID NO: 40093 - DNA, 76 bp, Homo sapiens
aagaagacagacaatcactttggaattctgagactacctccaagaatcatccacggaaggatgtcagccatttaac

SEQ ID NO: 40094 - DNA, 74 bp, Homo sapiens
aatcactttggaattctgagactacctccaagaatcatccacggaaggatgtcagccatttaaccagggctacg

SEQ ID NO: 40095 - DNA, 73 bp, Homo sapiens
aattctgagactacctccaagaatcatccacggaaggatgtcagccatttaaccagggctacggatcaaaaag

SEQ ID NO: 40096 - DNA, 71 bp, Homo sapiens
agactacctccaagaatcatccacggaaggatgtcagccatttaaccagggctacggatcaaaaaggaaaa

SEQ ID NO: 40097 - DNA, 71 bp, Homo sapiens
aagaatcatccacggaaggatgtcagccatttaaccagggctacggatcaaaaaggaaaaaatacagtcag

SEQ ID NO: 40098 - DNA, 72 bp, Homo sapiens
gaaggatgtcagccatttaaccagggctacggatcaaaaaggaaaaaatacagtcagtggacaagtagaaga

SEQ ID NO: 40099 - DNA, 71 bp, Homo sapiens
aaggatgtcagccatttaaccagggctacggatcaaaaaggaaaaaatacagtcagtggacaagtagaaga

SEQ ID NO: 40100 - DNA, 72 bp, Homo sapiens
atgtcagccatttaaccagggctacggatcaaaaaggaaaaaatacagtcagtggacaagtagaagagtctc

SEQ ID NO: 40101 - DNA, 69 bp, Homo sapiens
atttaaccagggctacggatcaaaaaggaaaaaatacagtcagtggacaagtagaagagtctcctgaaa

SEQ ID NO: 40102 - DNA, 70 bp, Homo sapiens
taaccagggctacggatcaaaaaggaaaaaatacagtcagtggacaagtagaagagtctcctgaaaaata

SEQ ID NO: 40103 - DNA, 70 bp, Homo sapiens
gctacggatcaaaaaggaaaaaatacagtcagtggacaagtagaagagtctcctgaaaaatatccgtatt

SEQ ID NO: 40104 - DNA, 70 bp, Homo sapiens
acggatcaaaaaggaaaaaatacagtcagtggacaagtagaagagtctcctgaaaaatatccgtatttga

SEQ ID NO: 40105 - DNA, 74 bp, Homo sapiens
aaaatacagtcagtggacaagtagaagagtctcctgaaaaatatccgtatttgaaaaggcagcaggagttgata

SEQ ID NO: 40106 - DNA, 73 bp, Homo sapiens
agtggacaagtagaagagtctcctgaaaaatatccgtatttgaaaaggcagcaggagttgatagaaaacataa

SEQ ID NO: 40107 - DNA, 71 bp, Homo sapiens
gagtctcctgaaaaatatccgtatttgaaaaggcagcaggagttgatagaaaacataactaaaaaagtaga

SEQ ID NO: 40108 - DNA, 69 bp, Homo sapiens
aaaaatatccgtatttgaaaaggcagcaggagttgatagaaaacataactaaaaaagtagaagacactg

SEQ ID NO: 40109 - DNA, 75 bp, Homo sapiens
gcagcaggagttgatagaaaacataactaaaaaagtagaagacactgttaaatttgaatctggatcctatatagc

SEQ ID NO: 40110 - DNA, 73 bp, Homo sapiens
gatagaaaacataactaaaaaagtagaagacactgttaaatttgaatctggatcctatatagcttcttctctg

SEQ ID NO: 40111 - DNA, 75 bp, Homo sapiens
aaaagtagaagacactgttaaatttgaatctggatcctatatagcttcttctctgggatctactgaggagtgaaa

SEQ ID NO: 40112 - DNA, 77 bp, Homo sapiens
aaatttgaatctggatcctatatagcttcttctctgggatctactgaggagtgaaatctaaatgaagatttagctta

SEQ ID NO: 40113 - DNA, 79 bp, Homo sapiens
atcctatatagcttcttctctgggatctactgaggagtgaaatctaaatgaagatttagcttagaaagcatgaagatag

SEQ ID NO: 40114 - DNA, 77 bp, Homo sapiens
ttctctgggatctactgaggagtgaaatctaaatgaagatttagcttagaaagcatgaagatagtatgttccaattt

SEQ ID NO: 40115 - DNA, 75 bp, Homo sapiens
tctactgaggagtgaaatctaaatgaagatttagcttagaaagcatgaagatagtatgttccaattttaaataaa

SEQ ID NO: 40116 - DNA, 72 bp, Homo sapiens
agtgaaatctaaatgaagatttagcttagaaagcatgaagatagtatgttccaattttaaataaaaattata

SEQ ID NO: 40117 - DNA, 74 bp, Homo sapiens
atgaagatttagcttagaaagcatgaagatagtatgttccaattttaaataaaaattatattgtctgaaagaca

SEQ ID NO: 40118 - DNA, 73 bp, Homo sapiens
ttagcttagaaagcatgaagatagtatgttccaattttaaataaaaattatattgtctgaaagacaatacaat

SEQ ID NO: 40119 - DNA, 72 bp, Homo sapiens
gcatgaagatagtatgttccaattttaaataaaaattatattgtctgaaagacaatacaattttagtactgg

SEQ ID NO: 40120 - DNA, 67 bp, Homo sapiens
caatacaattttagtactgggggaaaaaaaactagattgttatttgaagaagaaaacatcatggttc

SEQ ID NO: 40121 - DNA, 67 bp, Homo sapiens
ttttagtactgggggaaaaaaaactagattgttatttgaagaagaaaacatcatggttctctccagg

SEQ ID NO: 40122 - DNA, 68 bp, Homo sapiens
ggaaaaaaaactagattgttatttgaagaagaaaacatcatggttctctccaggtttaaaatgggtgc

SEQ ID NO: 40123 - DNA, 70 bp, Homo sapiens
aaaaactagattgttatttgaagaagaaaacatcatggttctctccaggtttaaaatgggtgctcccatg

SEQ ID NO: 40124 - DNA, 73 bp, Homo sapiens
ttgttatttgaagaagaaaacatcatggttctctccaggtttaaaatgggtgctcccatgtaggctgattttc

SEQ ID NO: 40125 - DNA, 72 bp, Homo sapiens
atggttctctccaggtttaaaatgggtgctcccatgtaggctgattttcccggcatttgatcttaacttgaa

SEQ ID NO: 40126 - DNA, 73 bp, Homo sapiens
ctctccaggtttaaaatgggtgctcccatgtaggctgattttcccggcatttgatcttaacttgaaggccatc

SEQ ID NO: 40127 - DNA, 78 bp, Homo sapiens
ccatgtaggctgattttcccggcatttgatcttaacttgaaggccatctgcccagcccagcaatcaaagggctgctaa

SEQ ID NO: 40128 - DNA, 79 bp, Homo sapiens
cggcatttgatcttaacttgaaggccatctgcccagcccagcaatcaaagggctgctaagctgtccttggtagcctcta

SEQ ID NO: 40129 - DNA, 78 bp, Homo sapiens
tcttaacttgaaggccatctgcccagcccagcaatcaaagggctgctaagctgtccttggtagcctctactgggcaaa

SEQ ID NO: 40130 - DNA, 80 bp, Homo sapiens
aaggccatctgcccagcccagcaatcaaagggctgctaagctgtccttggtagcctctactgggcaaagctgtgctataa

SEQ ID NO: 40131 - DNA, 79 bp, Homo sapiens
cccagcccagcaatcaaagggctgctaagctgtccttggtagcctctactgggcaaagctgtgctataactctgaagaa

SEQ ID NO: 40132 - DNA, 78 bp, Homo sapiens
agcaatcaaagggctgctaagctgtccttggtagcctctactgggcaaagctgtgctataactctgaagaaagggaga

SEQ ID NO: 40133 - DNA, 77 bp, Homo sapiens
gctgctaagctgtccttggtagcctctactgggcaaagctgtgctataactctgaagaaagggagatcttttaatgt

SEQ ID NO: 40134 - DNA, 76 bp, Homo sapiens
taagctgtccttggtagcctctactgggcaaagctgtgctataactctgaagaaagggagatcttttaatgttgat

SEQ ID NO: 40135 - DNA, 75 bp, Homo sapiens
tactgggcaaagctgtgctataactctgaagaaagggagatcttttaatgttgattactgaaaggcttagaaaga

SEQ ID NO: 40136 - DNA, 75 bp, Homo sapiens
aagctgtgctataactctgaagaaagggagatcttttaatgttgattactgaaaggcttagaaagatgtcttgaa

SEQ ID NO: 40137 - DNA, 73 bp, Homo sapiens
tctgaagaaagggagatcttttaatgttgattactgaaaggcttagaaagatgtcttgaaagaggactaaaca

SEQ ID NO: 40138 - DNA, 72 bp, Homo sapiens
gaaagggagatcttttaatgttgattactgaaaggcttagaaagatgtcttgaaagaggactaaacacaaga

SEQ ID NO: 40139 - DNA, 70 bp, Homo sapiens
atcttttaatgttgattactgaaaggcttagaaagatgtcttgaaagaggactaaacacaagaaaaataa

SEQ ID NO: 40140 - DNA, 70 bp, Homo sapiens
gttgattactgaaaggcttagaaagatgtcttgaaagaggactaaacacaagaaaaataaatttttagca

SEQ ID NO: 40141 - DNA, 69 bp, Homo sapiens
aagaggactaaacacaagaaaaataaatttttagcatttgagacttaggtgtttaagagtgcttagctc

SEQ ID NO: 40142 - DNA, 70 bp, Homo sapiens
aataaatttttagcatttgagacttaggtgtttaagagtgcttagctcttaactattaactcttctgagg

SEQ ID NO: 40143 - DNA, 71 bp, Homo sapiens
tttttagcatttgagacttaggtgtttaagagtgcttagctcttaactattaactcttctgaggggagaaa

SEQ ID NO: 40144 - DNA, 73 bp, Homo sapiens
tttgagacttaggtgtttaagagtgcttagctcttaactattaactcttctgaggggagaaagctccatgaaa

SEQ ID NO: 40145 - DNA, 72 bp, Homo sapiens
tgtttaagagtgcttagctcttaactattaactcttctgaggggagaaagctccatgaaacaggtttctgtt

SEQ ID NO: 40146 - DNA, 72 bp, Homo sapiens
cttagctcttaactattaactcttctgaggggagaaagctccatgaaacaggtttctgtttgaggctgtaat

SEQ ID NO: 40147 - DNA, 73 bp, Homo sapiens
tcttaactattaactcttctgaggggagaaagctccatgaaacaggtttctgtttgaggctgtaattcttcta

SEQ ID NO: 40148 - DNA, 73 bp, Homo sapiens
ttaactcttctgaggggagaaagctccatgaaacaggtttctgtttgaggctgtaattcttctagggcaagaa

SEQ ID NO: 40149 - DNA, 75 bp, Homo sapiens
ggagaaagctccatgaaacaggtttctgtttgaggctgtaattcttctagggcaagaacatctactcaacactaa

SEQ ID NO: 40150 - DNA, 74 bp, Homo sapiens
aagctccatgaaacaggtttctgtttgaggctgtaattcttctagggcaagaacatctactcaacactaacaaa

SEQ ID NO: 40151 - DNA, 75 bp, Homo sapiens
aaacaggtttctgtttgaggctgtaattcttctagggcaagaacatctactcaacactaacaaatgctggaagca

SEQ ID NO: 40152 - DNA, 78 bp, Homo sapiens
tttgaggctgtaattcttctagggcaagaacatctactcaacactaacaaatgctggaagcaggcatctgatttcctt

SEQ ID NO: 40153 - DNA, 79 bp, Homo sapiens
actaacaaatgctggaagcaggcatctgatttcctttgtgctaagggctgaaatcaatactggcctctggctccctaca

SEQ ID NO: 40154 - DNA, 80 bp, Homo sapiens
aatgctggaagcaggcatctgatttcctttgtgctaagggctgaaatcaatactggcctctggctccctacattcctata

SEQ ID NO: 40155 - DNA, 78 bp, Homo sapiens
aagcaggcatctgatttcctttgtgctaagggctgaaatcaatactggcctctggctccctacattcctatagaacca

SEQ ID NO: 40156 - DNA, 76 bp, Homo sapiens
atttcctttgtgctaagggctgaaatcaatactggcctctggctccctacattcctatagaaccagctgcaggtag

SEQ ID NO: 40157 - DNA, 78 bp, Homo sapiens
ctaagggctgaaatcaatactggcctctggctccctacattcctatagaaccagctgcaggtaggcaggaagagaaca

SEQ ID NO: 40158 - DNA, 75 bp, Homo sapiens
aaatcaatactggcctctggctccctacattcctatagaaccagctgcaggtaggcaggaagagaacaaaagttg

SEQ ID NO: 40159 - DNA, 73 bp, Homo sapiens
aatactggcctctggctccctacattcctatagaaccagctgcaggtaggcaggaagagaacaaaagttgttt

SEQ ID NO: 40160 - DNA, 75 bp, Homo sapiens
tacattcctatagaaccagctgcaggtaggcaggaagagaacaaaagttgttttggcggcactcagtacaataaa

SEQ ID NO: 40161 - DNA, 72 bp, Homo sapiens
aaccagctgcaggtaggcaggaagagaacaaaagttgttttggcggcactcagtacaataaaccgaagacaa

SEQ ID NO: 40162 - DNA, 68 bp, Homo sapiens
aggtaggcaggaagagaacaaaagttgttttggcggcactcagtacaataaaccgaagacaaaaaaga

SEQ ID NO: 40163 - DNA, 67 bp, Homo sapiens
aagagaacaaaagttgttttggcggcactcagtacaataaaccgaagacaaaaaagacagagtaaag

SEQ ID NO: 40164 - DNA, 71 bp, Homo sapiens
tttggcggcactcagtacaataaaccgaagacaaaaaagacagagtaaagtctattaacagatggtaagta

SEQ ID NO: 40165 - DNA, 71 bp, Homo sapiens
gtacaataaaccgaagacaaaaaagacagagtaaagtctattaacagatggtaagtagtagatgatactgg

SEQ ID NO: 40166 - DNA, 70 bp, Homo sapiens
ccgaagacaaaaaagacagagtaaagtctattaacagatggtaagtagtagatgatactggggttatttc

SEQ ID NO: 40167 - DNA, 69 bp, Homo sapiens
aaaagacagagtaaagtctattaacagatggtaagtagtagatgatactggggttatttcggtaaaaga

SEQ ID NO: 40168 - DNA, 72 bp, Homo sapiens
gtctattaacagatggtaagtagtagatgatactggggttatttcggtaaaagaatatcagatttttatgaa

SEQ ID NO: 40169 - DNA, 71 bp, Homo sapiens
agatggtaagtagtagatgatactggggttatttcggtaaaagaatatcagatttttatgaatgtcttaaa

SEQ ID NO: 40170 - DNA, 71 bp, Homo sapiens
gatgatactggggttatttcggtaaaagaatatcagatttttatgaatgtcttaaatattacctataacca

SEQ ID NO: 40171 - DNA, 72 bp, Homo sapiens
gggttatttcggtaaaagaatatcagatttttatgaatgtcttaaatattacctataaccacagcagccaca

SEQ ID NO: 40172 - DNA, 74 bp, Homo sapiens
tttcggtaaaagaatatcagatttttatgaatgtcttaaatattacctataaccacagcagccacatgccccag

SEQ ID NO: 40173 - DNA, 76 bp, Homo sapiens
tttttatgaatgtcttaaatattacctataaccacagcagccacatgccccaggtttctcagaaccaatctcagta

SEQ ID NO: 40174 - DNA, 75 bp, Homo sapiens
atgtcttaaatattacctataaccacagcagccacatgccccaggtttctcagaaccaatctcagtaccaaatat

SEQ ID NO: 40175 - DNA, 77 bp, Homo sapiens
atattacctataaccacagcagccacatgccccaggtttctcagaaccaatctcagtaccaaatattgtcatgttct

SEQ ID NO: 40176 - DNA, 78 bp, Homo sapiens
acagcagccacatgccccaggtttctcagaaccaatctcagtaccaaatattgtcatgttctttgtccacatactagg

SEQ ID NO: 40177 - DNA, 73 bp, Homo sapiens
acatgccccaggtttctcagaaccaatctcagtaccaaatattgtcatgttctttgtccacatactaggtttt

SEQ ID NO: 40178 - DNA, 70 bp, Homo sapiens
aggtttctcagaaccaatctcagtaccaaatattgtcatgttctttgtccacatactaggtttttggttt

SEQ ID NO: 40179 - DNA, 70 bp, Homo sapiens
cagtaccaaatattgtcatgttctttgtccacatactaggtttttggttttaaaaataaggtcgctgcag

SEQ ID NO: 40180 - DNA, 71 bp, Homo sapiens
atattgtcatgttctttgtccacatactaggtttttggttttaaaaataaggtcgctgcagtttacatgcc

SEQ ID NO: 40181 - DNA, 71 bp, Homo sapiens
atgttctttgtccacatactaggtttttggttttaaaaataaggtcgctgcagtttacatgcccactgcta

SEQ ID NO: 40182 - DNA, 72 bp, Homo sapiens
acatactaggtttttggttttaaaaataaggtcgctgcagtttacatgcccactgctactgggaggcataca

SEQ ID NO: 40183 - DNA, 74 bp, Homo sapiens
tttggttttaaaaataaggtcgctgcagtttacatgcccactgctactgggaggcatacactgggccacttgga

SEQ ID NO: 40184 - DNA, 78 bp, Homo sapiens
ttaaaaataaggtcgctgcagtttacatgcccactgctactgggaggcatacactgggccacttggataggctgtcat

SEQ ID NO: 40185 - DNA, 80 bp, Homo sapiens
aaggtcgctgcagtttacatgcccactgctactgggaggcatacactgggccacttggataggctgtcattttctgcaaa

SEQ ID NO: 40186 - DNA, 81 bp, Homo sapiens
actgctactgggaggcatacactgggccacttggataggctgtcattttctgcaaatcaagagacccatatcacctcctca

SEQ ID NO: 40187 - DNA, 78 bp, Homo sapiens
acttggataggctgtcattttctgcaaatcaagagacccatatcacctcctcaggagctctggcctatttttgtccta

SEQ ID NO: 40188 - DNA, 78 bp, Homo sapiens
tgtcattttctgcaaatcaagagacccatatcacctcctcaggagctctggcctatttttgtcctattcttgtctacc

SEQ ID NO: 40189 - DNA, 78 bp, Homo sapiens
tgcaaatcaagagacccatatcacctcctcaggagctctggcctatttttgtcctattcttgtctaccctaattgata

SEQ ID NO: 40190 - DNA, 74 bp, Homo sapiens
aagagacccatatcacctcctcaggagctctggcctatttttgtcctattcttgtctaccctaattgatatcct

SEQ ID NO: 40191 - DNA, 76 bp, Homo sapiens
tatcacctcctcaggagctctggcctatttttgtcctattcttgtctaccctaattgatatccttggctacattta

SEQ ID NO: 40192 - DNA, 74 bp, Homo sapiens
aggagctctggcctatttttgtcctattcttgtctaccctaattgatatccttggctacatttatgataaatgt

SEQ ID NO: 40193 - DNA, 74 bp, Homo sapiens
tggcctatttttgtcctattcttgtctaccctaattgatatccttggctacatttatgataaatgtttcctgac

SEQ ID NO: 40194 - DNA, 74 bp, Homo sapiens
tttgtcctattcttgtctaccctaattgatatccttggctacatttatgataaatgtttcctgaccatcctttc

SEQ ID NO: 40195 - DNA, 72 bp, Homo sapiens
ttcttgtctaccctaattgatatccttggctacatttatgataaatgtttcctgaccatcctttccttcttt

SEQ ID NO: 40196 - DNA, 75 bp, Homo sapiens
ttggctacatttatgataaatgtttcctgaccatcctttccttcttttagataccgatcagattaagtacaagca

SEQ ID NO: 40197 - DNA, 75 bp, Homo sapiens
catttatgataaatgtttcctgaccatcctttccttcttttagataccgatcagattaagtacaagcaattgtca

SEQ ID NO: 40198 - DNA, 78 bp, Homo sapiens
tttagataccgatcagattaagtacaagcaattgtcaattatccagcacttgatctaggcctttaattccttcagaga

SEQ ID NO: 40199 - DNA, 77 bp, Homo sapiens
agattaagtacaagcaattgtcaattatccagcacttgatctaggcctttaattccttcagagagagaaggaatata

SEQ ID NO: 40200 - DNA, 78 bp, Homo sapiens
tacaagcaattgtcaattatccagcacttgatctaggcctttaattccttcagagagagaaggaatatagagataaaa

SEQ ID NO: 40201 - DNA, 76 bp, Homo sapiens
attgtcaattatccagcacttgatctaggcctttaattccttcagagagagaaggaatatagagataaaactccca

SEQ ID NO: 40202 - DNA, 71 bp, Homo sapiens
taggcctttaattccttcagagagagaaggaatatagagataaaactcccacccacttgaggtatggttta

SEQ ID NO: 40203 - DNA, 73 bp, Homo sapiens
tttaattccttcagagagagaaggaatatagagataaaactcccacccacttgaggtatggtttatgagctct

SEQ ID NO: 40204 - DNA, 75 bp, Homo sapiens
agagagaaggaatatagagataaaactcccacccacttgaggtatggtttatgagctcttgcccaatcacattac

SEQ ID NO: 40205 - DNA, 75 bp, Homo sapiens
aatatagagataaaactcccacccacttgaggtatggtttatgagctcttgcccaatcacattaccattcagaag

SEQ ID NO: 40206 - DNA, 75 bp, Homo sapiens
acccacttgaggtatggtttatgagctcttgcccaatcacattaccattcagaaggattttcctggctgacttaa

SEQ ID NO: 40207 - DNA, 73 bp, Homo sapiens
aggtatggtttatgagctcttgcccaatcacattaccattcagaaggattttcctggctgacttaaaccaaaa

SEQ ID NO: 40208 - DNA, 75 bp, Homo sapiens
tttatgagctcttgcccaatcacattaccattcagaaggattttcctggctgacttaaaccaaaagcttcattgt

SEQ ID NO: 40209 - DNA, 75 bp, Homo sapiens
tcttgcccaatcacattaccattcagaaggattttcctggctgacttaaaccaaaagcttcattgttccagtctg

SEQ ID NO: 40210 - DNA, 78 bp, Homo sapiens
attaccattcagaaggattttcctggctgacttaaaccaaaagcttcattgttccagtctgtcatgtcactgcagcaa

SEQ ID NO: 40211 - DNA, 80 bp, Homo sapiens
attttcctggctgacttaaaccaaaagcttcattgttccagtctgtcatgtcactgcagcaacagctgtcacctcaatta

SEQ ID NO: 40212 - DNA, 80 bp, Homo sapiens
acttaaaccaaaagcttcattgttccagtctgtcatgtcactgcagcaacagctgtcacctcaattatgcagtataattt

SEQ ID NO: 40213 - DNA, 82 bp, Homo sapiens
aaaagcttcattgttccagtctgtcatgtcactgcagcaacagctgtcacctcaattatgcagtataatttttgacataatt

SEQ ID NO: 40214 - DNA, 85 bp, Homo sapiens
attgttccagtctgtcatgtcactgcagcaacagctgtcacctcaattatgcagtataatttttgacataatttatataagcaca

SEQ ID NO: 40215 - DNA, 88 bp, Homo sapiens
tctgtcatgtcactgcagcaacagctgtcacctcaattatgcagtataatttttgacataatttatataagcacacagaattcaatca

SEQ ID NO: 40216 - DNA, 88 bp, Homo sapiens
actgcagcaacagctgtcacctcaattatgcagtataatttttgacataatttatataagcacacagaattcaatcagcagctgagca

SEQ ID NO: 40217 - DNA, 84 bp, Homo sapiens
aacagctgtcacctcaattatgcagtataatttttgacataatttatataagcacacagaattcaatcagcagctgagcaggga

SEQ ID NO: 40218 - DNA, 83 bp, Homo sapiens
ctcaattatgcagtataatttttgacataatttatataagcacacagaattcaatcagcagctgagcagggaagcaatgttaa

SEQ ID NO: 40219 - DNA, 86 bp, Homo sapiens
atttatataagcacacagaattcaatcagcagctgagcagggaagcaatgttaacaaatgctatgaatgggtatatgatttgcata

SEQ ID NO: 40220 - DNA, 88 bp, Homo sapiens
acacagaattcaatcagcagctgagcagggaagcaatgttaacaaatgctatgaatgggtatatgatttgcatattatgtggctcatc

SEQ ID NO: 40221 - DNA, 88 bp, Homo sapiens
aattcaatcagcagctgagcagggaagcaatgttaacaaatgctatgaatgggtatatgatttgcatattatgtggctcatctgtgga

SEQ ID NO: 40222 - DNA, 88 bp, Homo sapiens
tgagcagggaagcaatgttaacaaatgctatgaatgggtatatgatttgcatattatgtggctcatctgtggactggagcaatccatc

SEQ ID NO: 40223 - DNA, 85 bp, Homo sapiens
aagcaatgttaacaaatgctatgaatgggtatatgatttgcatattatgtggctcatctgtggactggagcaatccatccattcc

SEQ ID NO: 40224 - DNA, 85 bp, Homo sapiens
ttaacaaatgctatgaatgggtatatgatttgcatattatgtggctcatctgtggactggagcaatccatccattcccctcatta

SEQ ID NO: 40225 - DNA, 86 bp, Homo sapiens
tgaatgggtatatgatttgcatattatgtggctcatctgtggactggagcaatccatccattcccctcattactctgaataatcta

SEQ ID NO: 40226 - DNA, 85 bp, Homo sapiens
tatgatttgcatattatgtggctcatctgtggactggagcaatccatccattcccctcattactctgaataatctagaaatggta

SEQ ID NO: 40227 - DNA, 85 bp, Homo sapiens
tttgcatattatgtggctcatctgtggactggagcaatccatccattcccctcattactctgaataatctagaaatggtagatgc

SEQ ID NO: 40228 - DNA, 84 bp, Homo sapiens
atgtggctcatctgtggactggagcaatccatccattcccctcattactctgaataatctagaaatggtagatgctcctggcca

SEQ ID NO: 40229 - DNA, 83 bp, Homo sapiens
tggactggagcaatccatccattcccctcattactctgaataatctagaaatggtagatgctcctggccagacagctgtatgt

SEQ ID NO: 40230 - DNA, 76 bp, Homo sapiens
attcccctcattactctgaataatctagaaatggtagatgctcctggccagacagctgtatgttttaaaaatcaaa

SEQ ID NO: 40231 - DNA, 76 bp, Homo sapiens
cattactctgaataatctagaaatggtagatgctcctggccagacagctgtatgttttaaaaatcaaaaacaacaa

SEQ ID NO: 40232 - DNA, 76 bp, Homo sapiens
agaaatggtagatgctcctggccagacagctgtatgttttaaaaatcaaaaacaacaagaaaagcagcctcatggc

SEQ ID NO: 40233 - DNA, 77 bp, Homo sapiens
tcctggccagacagctgtatgttttaaaaatcaaaaacaacaagaaaagcagcctcatggctggtgcgctctagaat

SEQ ID NO: 40234 - DNA, 76 bp, Homo sapiens
atcaaaaacaacaagaaaagcagcctcatggctggtgcgctctagaattaaggctatattaagcatttattcttat

SEQ ID NO: 40235 - DNA, 77 bp, Homo sapiens
aaagcagcctcatggctggtgcgctctagaattaaggctatattaagcatttattcttatttcctcagctttggggc

SEQ ID NO: 40236 - DNA, 73 bp, Homo sapiens
tctagaattaaggctatattaagcatttattcttatttcctcagctttggggctgggacaaggatcctcaaaa

SEQ ID NO: 40237 - DNA, 70 bp, Homo sapiens
attaaggctatattaagcatttattcttatttcctcagctttggggctgggacaaggatcctcaaaaccc

SEQ ID NO: 40238 - DNA, 71 bp, Homo sapiens
ttaagcatttattcttatttcctcagctttggggctgggacaaggatcctcaaaaccctgctatttcctta

SEQ ID NO: 40239 - DNA, 69 bp, Homo sapiens
tattcttatttcctcagctttggggctgggacaaggatcctcaaaaccctgctatttccttacttttaa

SEQ ID NO: 40240 - DNA, 72 bp, Homo sapiens
tcctcagctttggggctgggacaaggatcctcaaaaccctgctatttccttacttttaattgtgattctcta

SEQ ID NO: 40241 - DNA, 72 bp, Homo sapiens
gctgggacaaggatcctcaaaaccctgctatttccttacttttaattgtgattctctagccctcctcaacta

SEQ ID NO: 40242 - DNA, 69 bp, Homo sapiens
aaggatcctcaaaaccctgctatttccttacttttaattgtgattctctagccctcctcaactacaaaa

SEQ ID NO: 40243 - DNA, 68 bp, Homo sapiens
ctcaaaaccctgctatttccttacttttaattgtgattctctagccctcctcaactacaaaaagaaaa

SEQ ID NO: 40244 - DNA, 68 bp, Homo sapiens
tttccttacttttaattgtgattctctagccctcctcaactacaaaaagaaaaggataaagtagggca

SEQ ID NO: 40245 - DNA, 69 bp, Homo sapiens
ttgtgattctctagccctcctcaactacaaaaagaaaaggataaagtagggcatttcttgggggacaaa

SEQ ID NO: 40246 - DNA, 70 bp, Homo sapiens
tacaaaaagaaaaggataaagtagggcatttcttgggggacaaaggcagaaggatatgatcagacaaatt

SEQ ID NO: 40247 - DNA, 72 bp, Homo sapiens
aagaaaaggataaagtagggcatttcttgggggacaaaggcagaaggatatgatcagacaaatttctcaata

SEQ ID NO: 40248 - DNA, 75 bp, Homo sapiens
ataaagtagggcatttcttgggggacaaaggcagaaggatatgatcagacaaatttctcaatagcaacacaagaa

SEQ ID NO: 40249 - DNA, 73 bp, Homo sapiens
atttcttgggggacaaaggcagaaggatatgatcagacaaatttctcaatagcaacacaagaagaaaccaaaa

SEQ ID NO: 40250 - DNA, 74 bp, Homo sapiens
acaaaggcagaaggatatgatcagacaaatttctcaatagcaacacaagaagaaaccaaaacgaagtattttgc

SEQ ID NO: 40251 - DNA, 70 bp, Homo sapiens
cagacaaatttctcaatagcaacacaagaagaaaccaaaacgaagtattttgctgagtaagaagaaaagg

SEQ ID NO: 40252 - DNA, 72 bp, Homo sapiens
aacacaagaagaaaccaaaacgaagtattttgctgagtaagaagaaaagggtgtgtcaacatgctaatgcca

SEQ ID NO: 40253 - DNA, 71 bp, Homo sapiens
aagaaaccaaaacgaagtattttgctgagtaagaagaaaagggtgtgtcaacatgctaatgccagggcctg

SEQ ID NO: 40254 - DNA, 73 bp, Homo sapiens
aaaacgaagtattttgctgagtaagaagaaaagggtgtgtcaacatgctaatgccagggcctgtcactttcca

SEQ ID NO: 40255 - DNA, 76 bp, Homo sapiens
tattttgctgagtaagaagaaaagggtgtgtcaacatgctaatgccagggcctgtcactttccaaggtgacagtct

SEQ ID NO: 40256 - DNA, 74 bp, Homo sapiens
agtaagaagaaaagggtgtgtcaacatgctaatgccagggcctgtcactttccaaggtgacagtctttcaggaa

SEQ ID NO: 40257 - DNA, 75 bp, Homo sapiens
aaagggtgtgtcaacatgctaatgccagggcctgtcactttccaaggtgacagtctttcaggaacatgcctttat

SEQ ID NO: 40258 - DNA, 66 bp, Homo sapiens
aaattcattttaaaaaataagatacaactataagtttgagggtagaaaaagggaagagcattaata

SEQ ID NO: 40259 - DNA, 65 bp, Homo sapiens
tttaaaaaataagatacaactataagtttgagggtagaaaaagggaagagcattaatattttggg

SEQ ID NO: 40260 - DNA, 68 bp, Homo sapiens
taagatacaactataagtttgagggtagaaaaagggaagagcattaatattttggggactcttggtgg

SEQ ID NO: 40261 - DNA, 69 bp, Homo sapiens
ttgagggtagaaaaagggaagagcattaatattttggggactcttggtggtaaatccaggagccaagaa

SEQ ID NO: 40262 - DNA, 72 bp, Homo sapiens
aaaagggaagagcattaatattttggggactcttggtggtaaatccaggagccaagaatgcaggagacataa

SEQ ID NO: 40263 - DNA, 75 bp, Homo sapiens
ttaatattttggggactcttggtggtaaatccaggagccaagaatgcaggagacataactgctatgaacacttaa

SEQ ID NO: 40264 - DNA, 73 bp, Homo sapiens
attttggggactcttggtggtaaatccaggagccaagaatgcaggagacataactgctatgaacacttaaaat

SEQ ID NO: 40265 - DNA, 79 bp, Homo sapiens
tcttggtggtaaatccaggagccaagaatgcaggagacataactgctatgaacacttaaaattgatattgtggccaaca

SEQ ID NO: 40266 - DNA, 80 bp, Homo sapiens
tccaggagccaagaatgcaggagacataactgctatgaacacttaaaattgatattgtggccaacagctcacctctaaaa

SEQ ID NO: 40267 - DNA, 76 bp, Homo sapiens
aagaatgcaggagacataactgctatgaacacttaaaattgatattgtggccaacagctcacctctaaaacttccc

SEQ ID NO: 40268 - DNA, 74 bp, Homo sapiens
agacataactgctatgaacacttaaaattgatattgtggccaacagctcacctctaaaacttccccactgaaaa

SEQ ID NO: 40269 - DNA, 74 bp, Homo sapiens
taactgctatgaacacttaaaattgatattgtggccaacagctcacctctaaaacttccccactgaaaataatg

SEQ ID NO: 40270 - DNA, 72 bp, Homo sapiens
aacacttaaaattgatattgtggccaacagctcacctctaaaacttccccactgaaaataatggcatggaag

SEQ ID NO: 40271 - DNA, 72 bp, Homo sapiens
aattgatattgtggccaacagctcacctctaaaacttccccactgaaaataatggcatggaagggaaactcg

SEQ ID NO: 40272 - DNA, 71 bp, Homo sapiens
caacagctcacctctaaaacttccccactgaaaataatggcatggaagggaaactcgggtccactgagaag

SEQ ID NO: 40273 - DNA, 68 bp, Homo sapiens
acctctaaaacttccccactgaaaataatggcatggaagggaaactcgggtccactgagaagtgaggg

SEQ ID NO: 40274 - DNA, 68 bp, Homo sapiens
aaacttccccactgaaaataatggcatggaagggaaactcgggtccactgagaagtgagggtcaggtt

SEQ ID NO: 40275 - DNA, 70 bp, Homo sapiens
aaaataatggcatggaagggaaactcgggtccactgagaagtgagggtcaggtttgaagcctctttggta

SEQ ID NO: 40276 - DNA, 71 bp, Homo sapiens
aatggcatggaagggaaactcgggtccactgagaagtgagggtcaggtttgaagcctctttggtaacagga

SEQ ID NO: 40277 - DNA, 69 bp, Homo sapiens
aagggaaactcgggtccactgagaagtgagggtcaggtttgaagcctctttggtaacaggaatgctttg

SEQ ID NO: 40278 - DNA, 72 bp, Homo sapiens
tccactgagaagtgagggtcaggtttgaagcctctttggtaacaggaatgctttgggaggccacaaaagttg

SEQ ID NO: 40279 - DNA, 70 bp, Homo sapiens
agaagtgagggtcaggtttgaagcctctttggtaacaggaatgctttgggaggccacaaaagttggcagg

SEQ ID NO: 40280 - DNA, 69 bp, Homo sapiens
ggtcaggtttgaagcctctttggtaacaggaatgctttgggaggccacaaaagttggcagggttggagg

SEQ ID NO: 40281 - DNA, 70 bp, Homo sapiens
cctctttggtaacaggaatgctttgggaggccacaaaagttggcagggttggagggtgcctagcaccttg

SEQ ID NO: 40282 - DNA, 74 bp, Homo sapiens
tggtaacaggaatgctttgggaggccacaaaagttggcagggttggagggtgcctagcaccttggcacaagcaa

SEQ ID NO: 40283 - DNA, 78 bp, Homo sapiens
aagttggcagggttggagggtgcctagcaccttggcacaagcaagcaccaggcaatcactcacacctacataaatata

SEQ ID NO: 40284 - DNA, 81 bp, Homo sapiens
gttggagggtgcctagcaccttggcacaagcaagcaccaggcaatcactcacacctacataaatatacagtctaaatatga

SEQ ID NO: 40285 - DNA, 81 bp, Homo sapiens
tagcaccttggcacaagcaagcaccaggcaatcactcacacctacataaatatacagtctaaatatgaggaatggaaagaa

SEQ ID NO: 40286 - DNA, 82 bp, Homo sapiens
cacaagcaagcaccaggcaatcactcacacctacataaatatacagtctaaatatgaggaatggaaagaaatcatacataca

SEQ ID NO: 40287 - DNA, 81 bp, Homo sapiens
caccaggcaatcactcacacctacataaatatacagtctaaatatgaggaatggaaagaaatcatacatacataccatata

SEQ ID NO: 40288 - DNA, 80 bp, Homo sapiens
cacacctacataaatatacagtctaaatatgaggaatggaaagaaatcatacatacataccatatatgataataaagaca

SEQ ID NO: 40289 - DNA, 78 bp, Homo sapiens
tatacagtctaaatatgaggaatggaaagaaatcatacatacataccatatatgataataaagacaattgtaccctac

SEQ ID NO: 40290 - DNA, 77 bp, Homo sapiens
aatatgaggaatggaaagaaatcatacatacataccatatatgataataaagacaattgtaccctaccccatcatcc

SEQ ID NO: 40291 - DNA, 79 bp, Homo sapiens
gaatggaaagaaatcatacatacataccatatatgataataaagacaattgtaccctaccccatcatcctcatgtacta

SEQ ID NO: 40292 - DNA, 80 bp, Homo sapiens
aatcatacatacataccatatatgataataaagacaattgtaccctaccccatcatcctcatgtactatagctacaaatc

SEQ ID NO: 40293 - DNA, 80 bp, Homo sapiens
cataccatatatgataataaagacaattgtaccctaccccatcatcctcatgtactatagctacaaatctgcacagttaa

SEQ ID NO: 40294 - DNA, 78 bp, Homo sapiens
atatgataataaagacaattgtaccctaccccatcatcctcatgtactatagctacaaatctgcacagttaataatct

SEQ ID NO: 40295 - DNA, 77 bp, Homo sapiens
ataaagacaattgtaccctaccccatcatcctcatgtactatagctacaaatctgcacagttaataatcttgtcatt

SEQ ID NO: 40296 - DNA, 78 bp, Homo sapiens
attgtaccctaccccatcatcctcatgtactatagctacaaatctgcacagttaataatcttgtcattttatcacaaa

SEQ ID NO: 40297 - DNA, 82 bp, Homo sapiens
cccatcatcctcatgtactatagctacaaatctgcacagttaataatcttgtcattttatcacaaattgatatcactttaca

SEQ ID NO: 40298 - DNA, 82 bp, Homo sapiens
cctcatgtactatagctacaaatctgcacagttaataatcttgtcattttatcacaaattgatatcactttacagaagcaga

SEQ ID NO: 40299 - DNA, 79 bp, Homo sapiens
atagctacaaatctgcacagttaataatcttgtcattttatcacaaattgatatcactttacagaagcagaagtgggga

SEQ ID NO: 40300 - DNA, 78 bp, Homo sapiens
atctgcacagttaataatcttgtcattttatcacaaattgatatcactttacagaagcagaagtggggagtgctaaaa

SEQ ID NO: 40301 - DNA, 76 bp, Homo sapiens
taatcttgtcattttatcacaaattgatatcactttacagaagcagaagtggggagtgctaaaagcaataccgaaa

SEQ ID NO: 40302 - DNA, 73 bp, Homo sapiens
attttatcacaaattgatatcactttacagaagcagaagtggggagtgctaaaagcaataccgaaagtcctgg

SEQ ID NO: 40303 - DNA, 71 bp, Homo sapiens
aaattgatatcactttacagaagcagaagtggggagtgctaaaagcaataccgaaagtcctggggctaaaa

SEQ ID NO: 40304 - DNA, 71 bp, Homo sapiens
atatcactttacagaagcagaagtggggagtgctaaaagcaataccgaaagtcctggggctaaaaagagtg

SEQ ID NO: 40305 - DNA, 72 bp, Homo sapiens
aagcagaagtggggagtgctaaaagcaataccgaaagtcctggggctaaaaagagtgtcttgacagatttca

SEQ ID NO: 40306 - DNA, 71 bp, Homo sapiens
tggggagtgctaaaagcaataccgaaagtcctggggctaaaaagagtgtcttgacagatttcagtgtaaaa

SEQ ID NO: 40307 - DNA, 69 bp, Homo sapiens
aataccgaaagtcctggggctaaaaagagtgtcttgacagatttcagtgtaaaatttcaaatcttccaa

SEQ ID NO: 40308 - DNA, 72 bp, Homo sapiens
tggggctaaaaagagtgtcttgacagatttcagtgtaaaatttcaaatcttccaaaggatggagtaattctg

SEQ ID NO: 40309 - DNA, 71 bp, Homo sapiens
aaaaagagtgtcttgacagatttcagtgtaaaatttcaaatcttccaaaggatggagtaattctgggagga

SEQ ID NO: 40310 - DNA, 76 bp, Homo sapiens
ttgacagatttcagtgtaaaatttcaaatcttccaaaggatggagtaattctgggaggatgagtgaggatgaacaa

SEQ ID NO: 40311 - DNA, 74 bp, Homo sapiens
atttcagtgtaaaatttcaaatcttccaaaggatggagtaattctgggaggatgagtgaggatgaacaacagag

SEQ ID NO: 40312 - DNA, 74 bp, Homo sapiens
taaaatttcaaatcttccaaaggatggagtaattctgggaggatgagtgaggatgaacaacagagggtggccca

SEQ ID NO: 40313 - DNA, 75 bp, Homo sapiens
aatcttccaaaggatggagtaattctgggaggatgagtgaggatgaacaacagagggtggcccagaagaccacac

SEQ ID NO: 40314 - DNA, 75 bp, Homo sapiens
atggagtaattctgggaggatgagtgaggatgaacaacagagggtggcccagaagaccacaccagaaaccctgta

SEQ ID NO: 40315 - DNA, 76 bp, Homo sapiens
atgagtgaggatgaacaacagagggtggcccagaagaccacaccagaaaccctgtattctcctgggtagagctgaa

SEQ ID NO: 40316 - DNA, 72 bp, Homo sapiens
atgaacaacagagggtggcccagaagaccacaccagaaaccctgtattctcctgggtagagctgaacaaggt

SEQ ID NO: 40317 - DNA, 69 bp, Homo sapiens
aagaccacaccagaaaccctgtattctcctgggtagagctgaacaaggttgggaaagccccaacaggta

SEQ ID NO: 40318 - DNA, 72 bp, Homo sapiens
tgtattctcctgggtagagctgaacaaggttgggaaagccccaacaggtaggcagttgctattggcttttta

SEQ ID NO: 40319 - DNA, 72 bp, Homo sapiens
tcctgggtagagctgaacaaggttgggaaagccccaacaggtaggcagttgctattggctttttaacagatg

SEQ ID NO: 40320 - DNA, 71 bp, Homo sapiens
aggttgggaaagccccaacaggtaggcagttgctattggctttttaacagatgggcaacatcctttccatc

SEQ ID NO: 40321 - DNA, 76 bp, Homo sapiens
cccaacaggtaggcagttgctattggctttttaacagatgggcaacatcctttccatctcaacatgtcagaacaaa

SEQ ID NO: 40322 - DNA, 80 bp, Homo sapiens
ttggctttttaacagatgggcaacatcctttccatctcaacatgtcagaacaaaggccagctagtcagcaacatgttcta

SEQ ID NO: 40323 - DNA, 79 bp, Homo sapiens
tttttaacagatgggcaacatcctttccatctcaacatgtcagaacaaaggccagctagtcagcaacatgttctaagaa

SEQ ID NO: 40324 - DNA, 78 bp, Homo sapiens
caacatcctttccatctcaacatgtcagaacaaaggccagctagtcagcaacatgttctaagaaccaaagcaagaaac

SEQ ID NO: 40325 - DNA, 76 bp, Homo sapiens
tttccatctcaacatgtcagaacaaaggccagctagtcagcaacatgttctaagaaccaaagcaagaaaccaaaat

SEQ ID NO: 40326 - DNA, 76 bp, Homo sapiens
aacatgtcagaacaaaggccagctagtcagcaacatgttctaagaaccaaagcaagaaaccaaaattcaacatcat

SEQ ID NO: 40327 - DNA, 74 bp, Homo sapiens
aacaaaggccagctagtcagcaacatgttctaagaaccaaagcaagaaaccaaaattcaacatcattgtaacaa

SEQ ID NO: 40328 - DNA, 73 bp, Homo sapiens
ccagctagtcagcaacatgttctaagaaccaaagcaagaaaccaaaattcaacatcattgtaacaaaatcccc

SEQ ID NO: 40329 - DNA, 70 bp, Homo sapiens
gcaacatgttctaagaaccaaagcaagaaaccaaaattcaacatcattgtaacaaaatcccccaacctaa

SEQ ID NO: 40330 - DNA, 66 bp, Homo sapiens
caagaaaccaaaattcaacatcattgtaacaaaatcccccaacctaaaaagcgaccaaccctgaaa

SEQ ID NO: 40331 - DNA, 67 bp, Homo sapiens
aaaattcaacatcattgtaacaaaatcccccaacctaaaaagcgaccaaccctgaaaagatcaagac

SEQ ID NO: 40332 - DNA, 69 bp, Homo sapiens
tcattgtaacaaaatcccccaacctaaaaagcgaccaaccctgaaaagatcaagactctaaggtgatta

SEQ ID NO: 40333 - DNA, 65 bp, Homo sapiens
acaaaatcccccaacctaaaaagcgaccaaccctgaaaagatcaagactctaaggtgattaaaaa

SEQ ID NO: 40334 - DNA, 68 bp, Homo sapiens
caacctaaaaagcgaccaaccctgaaaagatcaagactctaaggtgattaaaaagttgaaactcatct

SEQ ID NO: 40335 - DNA, 70 bp, Homo sapiens
aaaaagcgaccaaccctgaaaagatcaagactctaaggtgattaaaaagttgaaactcatcttgaggtca

SEQ ID NO: 40336 - DNA, 75 bp, Homo sapiens
aagatcaagactctaaggtgattaaaaagttgaaactcatcttgaggtcacagggaagcagaaggaagagatcag

SEQ ID NO: 40337 - DNA, 73 bp, Homo sapiens
taaggtgattaaaaagttgaaactcatcttgaggtcacagggaagcagaaggaagagatcagggcaaaggaaa

SEQ ID NO: 40338 - DNA, 70 bp, Homo sapiens
attaaaaagttgaaactcatcttgaggtcacagggaagcagaaggaagagatcagggcaaaggaaaaaaa

SEQ ID NO: 40339 - DNA, 73 bp, Homo sapiens
aggaaaaaaaaattgtgggtattacactcagtatgtaaatgcctggtcttcacagagagacacttatcattaa

SEQ ID NO: 40340 - DNA, 79 bp, Homo sapiens
aaattgtgggtattacactcagtatgtaaatgcctggtcttcacagagagacacttatcattaatcagaccatcagtta

SEQ ID NO: 40341 - DNA, 82 bp, Homo sapiens
tattacactcagtatgtaaatgcctggtcttcacagagagacacttatcattaatcagaccatcagttatgttacaagagaa

SEQ ID NO: 40342 - DNA, 79 bp, Homo sapiens
agtatgtaaatgcctggtcttcacagagagacacttatcattaatcagaccatcagttatgttacaagagaaccaatac

SEQ ID NO: 40343 - DNA, 78 bp, Homo sapiens
aatgcctggtcttcacagagagacacttatcattaatcagaccatcagttatgttacaagagaaccaataccaacatt

SEQ ID NO: 40344 - DNA, 79 bp, Homo sapiens
gtcttcacagagagacacttatcattaatcagaccatcagttatgttacaagagaaccaataccaacatttctcctgtg

SEQ ID NO: 40345 - DNA, 78 bp, Homo sapiens
attaatcagaccatcagttatgttacaagagaaccaataccaacatttctcctgtggagcacagtgataagcacattt

SEQ ID NO: 40346 - DNA, 77 bp, Homo sapiens
ttatgttacaagagaaccaataccaacatttctcctgtggagcacagtgataagcacattttttatggatgtgttta

SEQ ID NO: 40347 - DNA, 74 bp, Homo sapiens
aaccaataccaacatttctcctgtggagcacagtgataagcacattttttatggatgtgtttaggatagaaagg

SEQ ID NO: 40348 - DNA, 75 bp, Homo sapiens
tctcctgtggagcacagtgataagcacattttttatggatgtgtttaggatagaaaggggtgggtagaaaggaga

SEQ ID NO: 40349 - DNA, 71 bp, Homo sapiens
acagtgataagcacattttttatggatgtgtttaggatagaaaggggtgggtagaaaggagaggaggcagg

SEQ ID NO: 40350 - DNA, 72 bp, Homo sapiens
tttatggatgtgtttaggatagaaaggggtgggtagaaaggagaggaggcagggaggtgaatgtattatgta

SEQ ID NO: 40351 - DNA, 70 bp, Homo sapiens
tttaggatagaaaggggtgggtagaaaggagaggaggcagggaggtgaatgtattatgtacaaagagaaa

SEQ ID NO: 40352 - DNA, 73 bp, Homo sapiens
tagaaaggggtgggtagaaaggagaggaggcagggaggtgaatgtattatgtacaaagagaaatgacagagac

SEQ ID NO: 40353 - DNA, 74 bp, Homo sapiens
gtagaaaggagaggaggcagggaggtgaatgtattatgtacaaagagaaatgacagagaccatcccctccttta

SEQ ID NO: 40354 - DNA, 75 bp, Homo sapiens
ggaggcagggaggtgaatgtattatgtacaaagagaaatgacagagaccatcccctcctttagctctttgctgtt

SEQ ID NO: 40355 - DNA, 73 bp, Homo sapiens
agggaggtgaatgtattatgtacaaagagaaatgacagagaccatcccctcctttagctctttgctgtttctt

SEQ ID NO: 40356 - DNA, 73 bp, Homo sapiens
aatgtattatgtacaaagagaaatgacagagaccatcccctcctttagctctttgctgtttctttctctttgt

SEQ ID NO: 40357 - DNA, 73 bp, Homo sapiens
aaagagaaatgacagagaccatcccctcctttagctctttgctgtttctttctctttgttttccgcatcctca

SEQ ID NO: 40358 - DNA, 76 bp, Homo sapiens
aaatgacagagaccatcccctcctttagctctttgctgtttctttctctttgttttccgcatcctcaggatatgca

SEQ ID NO: 40359 - DNA, 79 bp, Homo sapiens
atcccctcctttagctctttgctgtttctttctctttgttttccgcatcctcaggatatgcatgccatgtcagtctctc

SEQ ID NO: 40360 - DNA, 80 bp, Homo sapiens
ctttagctctttgctgtttctttctctttgttttccgcatcctcaggatatgcatgccatgtcagtctctcttcataaaa

SEQ ID NO: 40361 - DNA, 82 bp, Homo sapiens
ctgtttctttctctttgttttccgcatcctcaggatatgcatgccatgtcagtctctcttcataaaatgctatcacaatttg

SEQ ID NO: 40362 - DNA, 86 bp, Homo sapiens
tgttttccgcatcctcaggatatgcatgccatgtcagtctctcttcataaaatgctatcacaatttgtggacatttcacattagct

SEQ ID NO: 40363 - DNA, 86 bp, Homo sapiens
atcctcaggatatgcatgccatgtcagtctctcttcataaaatgctatcacaatttgtggacatttcacattagcttcttttgcaa

SEQ ID NO: 40364 - DNA, 82 bp, Homo sapiens
atgccatgtcagtctctcttcataaaatgctatcacaatttgtggacatttcacattagcttcttttgcaagaaccaggtca

SEQ ID NO: 40365 - DNA, 80 bp, Homo sapiens
agtctctcttcataaaatgctatcacaatttgtggacatttcacattagcttcttttgcaagaaccaggtcagcttcatc

SEQ ID NO: 40366 - DNA, 80 bp, Homo sapiens
ttcataaaatgctatcacaatttgtggacatttcacattagcttcttttgcaagaaccaggtcagcttcatctgtgtctt

SEQ ID NO: 40367 - DNA, 80 bp, Homo sapiens
aatgctatcacaatttgtggacatttcacattagcttcttttgcaagaaccaggtcagcttcatctgtgtctttcctgga

SEQ ID NO: 40368 - DNA, 78 bp, Homo sapiens
tttcacattagcttcttttgcaagaaccaggtcagcttcatctgtgtctttcctggagagaaagaatatgagacttaa

SEQ ID NO: 40369 - DNA, 76 bp, Homo sapiens
ttagcttcttttgcaagaaccaggtcagcttcatctgtgtctttcctggagagaaagaatatgagacttaaaagga

SEQ ID NO: 40370 - DNA, 75 bp, Homo sapiens
aagtcactggcaaagaaacacaattgtaaagcgaagccaaatctctctcaccatttcattaggaacattaaatca

SEQ ID NO: 40371 - DNA, 73 bp, Homo sapiens
aaagaaacacaattgtaaagcgaagccaaatctctctcaccatttcattaggaacattaaatcaccacaggaa

SEQ ID NO: 40372 - DNA, 75 bp, Homo sapiens
aattgtaaagcgaagccaaatctctctcaccatttcattaggaacattaaatcaccacaggaatctgttgcccca

SEQ ID NO: 40373 - DNA, 76 bp, Homo sapiens
aagccaaatctctctcaccatttcattaggaacattaaatcaccacaggaatctgttgccccaatgatcttttctg

SEQ ID NO: 40374 - DNA, 76 bp, Homo sapiens
atctctctcaccatttcattaggaacattaaatcaccacaggaatctgttgccccaatgatcttttctggttccag

SEQ ID NO: 40375 - DNA, 75 bp, Homo sapiens
atttcattaggaacattaaatcaccacaggaatctgttgccccaatgatcttttctggttccagtcctctctcaa

SEQ ID NO: 40376 - DNA, 73 bp, Homo sapiens
aggaacattaaatcaccacaggaatctgttgccccaatgatcttttctggttccagtcctctctcaaagcccc

SEQ ID NO: 40377 - DNA, 78 bp, Homo sapiens
aatcaccacaggaatctgttgccccaatgatcttttctggttccagtcctctctcaaagccccgagcgatatcattgc

SEQ ID NO: 40378 - DNA, 79 bp, Homo sapiens
aatctgttgccccaatgatcttttctggttccagtcctctctcaaagccccgagcgatatcattgctctgctataaata

SEQ ID NO: 40379 - DNA, 78 bp, Homo sapiens
aatgatcttttctggttccagtcctctctcaaagccccgagcgatatcattgctctgctataaatagaagataaagaa

SEQ ID NO: 40380 - DNA, 76 bp, Homo sapiens
tttctggttccagtcctctctcaaagccccgagcgatatcattgctctgctataaatagaagataaagaaaggtta

SEQ ID NO: 40381 - DNA, 62 bp, Homo sapiens
attttggtggcaaaagaatagtttttggggaaaagggaaaggaagcttacctctctcttttt

SEQ ID NO: 40382 - DNA, 72 bp, Homo sapiens
ctcttttttttagatttgatgtcatcggcactgtttgagaaattggatttcctcttgttactttctgacttc

SEQ ID NO: 40383 - DNA, 73 bp, Homo sapiens
tttttagatttgatgtcatcggcactgtttgagaaattggatttcctcttgttactttctgacttctccctgg

SEQ ID NO: 40384 - DNA, 71 bp, Homo sapiens
atgtcatcggcactgtttgagaaattggatttcctcttgttactttctgacttctccctgggtttattatt

SEQ ID NO: 40385 - DNA, 67 bp, Homo sapiens
actgtttgagaaattggatttcctcttgttactttctgacttctccctgggtttattattttcaccc

SEQ ID NO: 40386 - DNA, 67 bp, Homo sapiens
aaattggatttcctcttgttactttctgacttctccctgggtttattattttcaccctccttcatct

SEQ ID NO: 40387 - DNA, 68 bp, Homo sapiens
tcctcttgttactttctgacttctccctgggtttattattttcaccctccttcatcttcttatacttt

SEQ ID NO: 40388 - DNA, 69 bp, Homo sapiens
tgttactttctgacttctccctgggtttattattttcaccctccttcatcttcttatactttttcataa

SEQ ID NO: 40389 - DNA, 71 bp, Homo sapiens
tctccctgggtttattattttcaccctccttcatcttcttatactttttcataaattcagaaattagctca

SEQ ID NO: 40390 - DNA, 71 bp, Homo sapiens
ctgggtttattattttcaccctccttcatcttcttatactttttcataaattcagaaattagctcagggca

SEQ ID NO: 40391 - DNA, 73 bp, Homo sapiens
ttcaccctccttcatcttcttatactttttcataaattcagaaattagctcagggcaatccaagtttttctca

SEQ ID NO: 40392 - DNA, 71 bp, Homo sapiens
ccttcatcttcttatactttttcataaattcagaaattagctcagggcaatccaagtttttctcaggttcc

SEQ ID NO: 40393 - DNA, 72 bp, Homo sapiens
ttatactttttcataaattcagaaattagctcagggcaatccaagtttttctcaggttcccaagtattgtgc

SEQ ID NO: 40394 - DNA, 71 bp, Homo sapiens
ataaattcagaaattagctcagggcaatccaagtttttctcaggttcccaagtattgtgctccctgggtaa

SEQ ID NO: 40395 - DNA, 69 bp, Homo sapiens
agaaattagctcagggcaatccaagtttttctcaggttcccaagtattgtgctccctgggtaagaaaaa

SEQ ID NO: 40396 - DNA, 66 bp, Homo sapiens
agggcaatccaagtttttctcaggttcccaagtattgtgctccctgggtaagaaaaatgggaaaat

SEQ ID NO: 40397 - DNA, 65 bp, Homo sapiens
aatccaagtttttctcaggttcccaagtattgtgctccctgggtaagaaaaatgggaaaattaaa

SEQ ID NO: 40398 - DNA, 70 bp, Homo sapiens
tatctatctctacagagtcccaacgcctgggggaaaaaaggaacttactcagaaaagcctttccacttca

SEQ ID NO: 40399 - DNA, 68 bp, Homo sapiens
tacagagtcccaacgcctgggggaaaaaaggaacttactcagaaaagcctttccacttcagtagatat

SEQ ID NO: 40400 - DNA, 67 bp, Homo sapiens
aacgcctgggggaaaaaaggaacttactcagaaaagcctttccacttcagtagatattccacttgtc

SEQ ID NO: 40401 - DNA, 67 bp, Homo sapiens
ggaaaaaaggaacttactcagaaaagcctttccacttcagtagatattccacttgtcccttaaccac

SEQ ID NO: 40402 - DNA, 71 bp, Homo sapiens
aggaacttactcagaaaagcctttccacttcagtagatattccacttgtcccttaaccacgcgcctgtcta

SEQ ID NO: 40403 - DNA, 72 bp, Homo sapiens
aaaagcctttccacttcagtagatattccacttgtcccttaaccacgcgcctgtctagcaccttctccacaa

SEQ ID NO: 40404 - DNA, 75 bp, Homo sapiens
tttccacttcagtagatattccacttgtcccttaaccacgcgcctgtctagcaccttctccacaacatactcctc

SEQ ID NO: 40405 - DNA, 78 bp, Homo sapiens
tagatattccacttgtcccttaaccacgcgcctgtctagcaccttctccacaacatactcctcctcatcctctgaaga

SEQ ID NO: 40406 - DNA, 76 bp, Homo sapiens
ttccacttgtcccttaaccacgcgcctgtctagcaccttctccacaacatactcctcctcatcctctgaagaagaa

SEQ ID NO: 40407 - DNA, 79 bp, Homo sapiens
ttaaccacgcgcctgtctagcaccttctccacaacatactcctcctcatcctctgaagaagaactgtcagctgtccgct

SEQ ID NO: 40408 - DNA, 77 bp, Homo sapiens
ctgtctagcaccttctccacaacatactcctcctcatcctctgaagaagaactgtcagctgtccgcttggttttctt

SEQ ID NO: 40409 - DNA, 75 bp, Homo sapiens
accttctccacaacatactcctcctcatcctctgaagaagaactgtcagctgtccgcttggttttctttcccatg

SEQ ID NO: 40410 - DNA, 75 bp, Homo sapiens
aacatactcctcctcatcctctgaagaagaactgtcagctgtccgcttggttttctttcccatgtcgcacaccgt

SEQ ID NO: 40411 - DNA, 76 bp, Homo sapiens
tcctcatcctctgaagaagaactgtcagctgtccgcttggttttctttcccatgtcgcacaccgttccacctgaaa

SEQ ID NO: 40412 - DNA, 74 bp, Homo sapiens
tctgaagaagaactgtcagctgtccgcttggttttctttcccatgtcgcacaccgttccacctgaaagactaag

SEQ ID NO: 40413 - DNA, 72 bp, Homo sapiens
aagaactgtcagctgtccgcttggttttctttcccatgtcgcacaccgttccacctgaaagactaaggccac

SEQ ID NO: 40414 - DNA, 70 bp, Homo sapiens
agctgtccgcttggttttctttcccatgtcgcacaccgttccacctgaaagactaaggccaccaggtccc

SEQ ID NO: 40415 - DNA, 71 bp, Homo sapiens
ttttctttcccatgtcgcacaccgttccacctgaaagactaaggccaccaggtccctgcaaaggcaaagga

SEQ ID NO: 40416 - DNA, 71 bp, Homo sapiens
tttcccatgtcgcacaccgttccacctgaaagactaaggccaccaggtccctgcaaaggcaaaggacaaaa

SEQ ID NO: 40417 - DNA, 69 bp, Homo sapiens
acaccgttccacctgaaagactaaggccaccaggtccctgcaaaggcaaaggacaaaatggttagaatc

SEQ ID NO: 40418 - DNA, 70 bp, Homo sapiens
aggaaatgtcatattccagggagagtaccccacccccaccaccactcaccttggaatttccgggagctga

SEQ ID NO: 40419 - DNA, 69 bp, Homo sapiens
atattccagggagagtaccccacccccaccaccactcaccttggaatttccgggagctgagcagtttag

SEQ ID NO: 40420 - DNA, 71 bp, Homo sapiens
agagtaccccacccccaccaccactcaccttggaatttccgggagctgagcagtttaggtcagagcgctgg

SEQ ID NO: 40421 - DNA, 70 bp, Homo sapiens
ccccaccaccactcaccttggaatttccgggagctgagcagtttaggtcagagcgctggggttaaaacca

SEQ ID NO: 40422 - DNA, 71 bp, Homo sapiens
actcaccttggaatttccgggagctgagcagtttaggtcagagcgctggggttaaaaccagccccatgtta

SEQ ID NO: 40423 - DNA, 76 bp, Homo sapiens
gaatttccgggagctgagcagtttaggtcagagcgctggggttaaaaccagccccatgttagatgcatgcagttaa

SEQ ID NO: 40424 - DNA, 81 bp, Homo sapiens
ggagctgagcagtttaggtcagagcgctggggttaaaaccagccccatgttagatgcatgcagttaagcattgtggctatg

SEQ ID NO: 40425 - DNA, 77 bp, Homo sapiens
agtttaggtcagagcgctggggttaaaaccagccccatgttagatgcatgcagttaagcattgtggctatggcctcc

SEQ ID NO: 40426 - DNA, 80 bp, Homo sapiens
ggtcagagcgctggggttaaaaccagccccatgttagatgcatgcagttaagcattgtggctatggcctcccctgcctca

SEQ ID NO: 40427 - DNA, 77 bp, Homo sapiens
gttaaaaccagccccatgttagatgcatgcagttaagcattgtggctatggcctcccctgcctcaccaggaaaaaca

SEQ ID NO: 40428 - DNA, 78 bp, Homo sapiens
agccccatgttagatgcatgcagttaagcattgtggctatggcctcccctgcctcaccaggaaaaacaaggatttaca

SEQ ID NO: 40429 - DNA, 80 bp, Homo sapiens
ttagatgcatgcagttaagcattgtggctatggcctcccctgcctcaccaggaaaaacaaggatttacatgtgttcttca

SEQ ID NO: 40430 - DNA, 75 bp, Homo sapiens
atgcagttaagcattgtggctatggcctcccctgcctcaccaggaaaaacaaggatttacatgtgttcttcattt

SEQ ID NO: 40431 - DNA, 74 bp, Homo sapiens
attgtggctatggcctcccctgcctcaccaggaaaaacaaggatttacatgtgttcttcattttgagggagaga

SEQ ID NO: 40432 - DNA, 71 bp, Homo sapiens
gcctcccctgcctcaccaggaaaaacaaggatttacatgtgttcttcattttgagggagagacaaggaaaa

SEQ ID NO: 40433 - DNA, 69 bp, Homo sapiens
cctcaccaggaaaaacaaggatttacatgtgttcttcattttgagggagagacaaggaaaatctccctt

SEQ ID NO: 40434 - DNA, 70 bp, Homo sapiens
gaaaaacaaggatttacatgtgttcttcattttgagggagagacaaggaaaatctccctttataccttca

SEQ ID NO: 40435 - DNA, 73 bp, Homo sapiens
aaggatttacatgtgttcttcattttgagggagagacaaggaaaatctccctttataccttcatgcagaagag

SEQ ID NO: 40436 - DNA, 73 bp, Homo sapiens
atgtgttcttcattttgagggagagacaaggaaaatctccctttataccttcatgcagaagaggagccccaaa

SEQ ID NO: 40437 - DNA, 70 bp, Homo sapiens
ttttgagggagagacaaggaaaatctccctttataccttcatgcagaagaggagccccaaaggtagaaaa

SEQ ID NO: 40438 - DNA, 71 bp, Homo sapiens
ggagagacaaggaaaatctccctttataccttcatgcagaagaggagccccaaaggtagaaaatgaatggg

SEQ ID NO: 40439 - DNA, 68 bp, Homo sapiens
aaaatctccctttataccttcatgcagaagaggagccccaaaggtagaaaatgaatgggggttccctc

SEQ ID NO: 40440 - DNA, 68 bp, Homo sapiens
tttataccttcatgcagaagaggagccccaaaggtagaaaatgaatgggggttccctcctttacctac

SEQ ID NO: 40441 - DNA, 69 bp, Homo sapiens
ttcatgcagaagaggagccccaaaggtagaaaatgaatgggggttccctcctttacctaccggatcgcc

SEQ ID NO: 40442 - DNA, 63 bp, Homo sapiens
aaaggtagaaaatgaatgggggttccctcctttacctaccggatcgccccagttctttctttc

SEQ ID NO: 40443 - DNA, 65 bp, Homo sapiens
aatgaatgggggttccctcctttacctaccggatcgccccagttctttctttccctctgggctaa

SEQ ID NO: 40444 - DNA, 64 bp, Homo sapiens
gggttccctcctttacctaccggatcgccccagttctttctttccctctgggctaacaggaggg

SEQ ID NO: 40445 - DNA, 66 bp, Homo sapiens
tttacctaccggatcgccccagttctttctttccctctgggctaacaggaggggcctcccctccca

SEQ ID NO: 40446 - DNA, 67 bp, Homo sapiens
atcgccccagttctttctttccctctgggctaacaggaggggcctcccctcccaggtctgggtcttg

SEQ ID NO: 40447 - DNA, 70 bp, Homo sapiens
ctttctttccctctgggctaacaggaggggcctcccctcccaggtctgggtcttggcgggctggcagctc

SEQ ID NO: 40448 - DNA, 70 bp, Homo sapiens
ggctaacaggaggggcctcccctcccaggtctgggtcttggcgggctggcagctcccctgcccccaccca

SEQ ID NO: 40449 - DNA, 77 bp, Homo sapiens
agtcagttcaagacctactatgggtagataagactgtctgccacttacccgggattgagagtgatcactcacgctaa

SEQ ID NO: 40450 - DNA, 76 bp, Homo sapiens
aagacctactatgggtagataagactgtctgccacttacccgggattgagagtgatcactcacgctaacgtctgcc

SEQ ID NO: 40451 - DNA, 78 bp, Homo sapiens
tatgggtagataagactgtctgccacttacccgggattgagagtgatcactcacgctaacgtctgccctgttcctgta

SEQ ID NO: 40452 - DNA, 78 bp, Homo sapiens
ataagactgtctgccacttacccgggattgagagtgatcactcacgctaacgtctgccctgttcctgtatggtgaggc

SEQ ID NO: 40453 - DNA, 77 bp, Homo sapiens
acttacccgggattgagagtgatcactcacgctaacgtctgccctgttcctgtatggtgaggccgcaccacaagcca

SEQ ID NO: 40454 - DNA, 77 bp, Homo sapiens
cccgggattgagagtgatcactcacgctaacgtctgccctgttcctgtatggtgaggccgcaccacaagccaccacc

SEQ ID NO: 40455 - DNA, 77 bp, Homo sapiens
agtgatcactcacgctaacgtctgccctgttcctgtatggtgaggccgcaccacaagccaccaccgccgccgccttc

SEQ ID NO: 40456 - DNA, 77 bp, Homo sapiens
gctaacgtctgccctgttcctgtatggtgaggccgcaccacaagccaccaccgccgccgccttctgcgcaacgccaa

SEQ ID NO: 40457 - DNA, 76 bp, Homo sapiens
tctgccctgttcctgtatggtgaggccgcaccacaagccaccaccgccgccgccttctgcgcaacgccaaccgccc

SEQ ID NO: 40458 - DNA, 74 bp, Homo sapiens
ttcctgtatggtgaggccgcaccacaagccaccaccgccgccgccttctgcgcaacgccaaccgcccgccaaaa

SEQ ID NO: 40459 - DNA, 71 bp, Homo sapiens
aggccgcaccacaagccaccaccgccgccgccttctgcgcaacgccaaccgcccgccaaaacggatccttc

SEQ ID NO: 40460 - DNA, 71 bp, Homo sapiens
accacaagccaccaccgccgccgccttctgcgcaacgccaaccgcccgccaaaacggatccttccctgcgc

SEQ ID NO: 40461 - DNA, 72 bp, Homo sapiens
accgccgccgccttctgcgcaacgccaaccgcccgccaaaacggatccttccctgcgcctgcgcaaccaatc

SEQ ID NO: 40462 - DNA, 72 bp, Homo sapiens
cttctgcgcaacgccaaccgcccgccaaaacggatccttccctgcgcctgcgcaaccaatcctgggaccgga

SEQ ID NO: 40463 - DNA, 67 bp, Homo sapiens
aggttgggggggtgggggtggcatcgaggctgcgctgccgtggccctctccgccccccctccccacc

SEQ ID NO: 40464 - DNA, 71 bp, Homo sapiens
gtgggggtggcatcgaggctgcgctgccgtggccctctccgccccccctccccaccgcacaccccccagcc

SEQ ID NO: 40465 - DNA, 73 bp, Homo sapiens
ggtggcatcgaggctgcgctgccgtggccctctccgccccccctccccaccgcacaccccccagcccagactc

SEQ ID NO: 40466 - DNA, 71 bp, Homo sapiens
aggctgcgctgccgtggccctctccgccccccctccccaccgcacaccccccagcccagactccagccctg

SEQ ID NO: 40467 - DNA, 70 bp, Homo sapiens
tggccctctccgccccccctccccaccgcacaccccccagcccagactccagccctggaccgcgcatccc

SEQ ID NO: 40468 - DNA, 71 bp, Homo sapiens
tctccgccccccctccccaccgcacaccccccagcccagactccagccctggaccgcgcatcccgagccca

SEQ ID NO: 40469 - DNA, 76 bp, Homo sapiens
cccaccgcacaccccccagcccagactccagccctggaccgcgcatcccgagcccagcgcccagacagaggtgaga

SEQ ID NO: 40470 - DNA, 75 bp, Homo sapiens
cgcacaccccccagcccagactccagccctggaccgcgcatcccgagcccagcgcccagacagaggtgagaaggg

SEQ ID NO: 40471 - DNA, 74 bp, Homo sapiens
agcccagactccagccctggaccgcgcatcccgagcccagcgcccagacagaggtgagaagggggggcaggcgg

SEQ ID NO: 40472 - DNA, 73 bp, Homo sapiens
tccagccctggaccgcgcatcccgagcccagcgcccagacagaggtgagaagggggggcaggcgggggaccac

SEQ ID NO: 40473 - DNA, 72 bp, Homo sapiens
accgcgcatcccgagcccagcgcccagacagaggtgagaagggggggcaggcgggggaccacctgggagcag

SEQ ID NO: 40474 - DNA, 71 bp, Homo sapiens
tcccgagcccagcgcccagacagaggtgagaagggggggcaggcgggggaccacctgggagcagtggggga

SEQ ID NO: 40475 - DNA, 73 bp, Homo sapiens
tgggtctttgtctccgcctctcccatatattagaaatatcttactttcatgcggttaagtttaagaggctgga

SEQ ID NO: 40476 - DNA, 74 bp, Homo sapiens
gtctccgcctctcccatatattagaaatatcttactttcatgcggttaagtttaagaggctggagggatggcta

SEQ ID NO: 40477 - DNA, 74 bp, Homo sapiens
atatattagaaatatcttactttcatgcggttaagtttaagaggctggagggatggctagctggaggtctgcgt

SEQ ID NO: 40478 - DNA, 75 bp, Homo sapiens
ttagaaatatcttactttcatgcggttaagtttaagaggctggagggatggctagctggaggtctgcgttgtaga

SEQ ID NO: 40479 - DNA, 73 bp, Homo sapiens
cttactttcatgcggttaagtttaagaggctggagggatggctagctggaggtctgcgttgtagagaggtaac

SEQ ID NO: 40480 - DNA, 73 bp, Homo sapiens
gttaagtttaagaggctggagggatggctagctggaggtctgcgttgtagagaggtaaccccaggtgtgtgtc

SEQ ID NO: 40481 - DNA, 76 bp, Homo sapiens
tttaagaggctggagggatggctagctggaggtctgcgttgtagagaggtaaccccaggtgtgtgtctgcgcgtgg

SEQ ID NO: 40482 - DNA, 76 bp, Homo sapiens
tggagggatggctagctggaggtctgcgttgtagagaggtaaccccaggtgtgtgtctgcgcgtggggtaggaaga

SEQ ID NO: 40483 - DNA, 75 bp, Homo sapiens
ctagctggaggtctgcgttgtagagaggtaaccccaggtgtgtgtctgcgcgtggggtaggaagatgtcagtgtt

SEQ ID NO: 40484 - DNA, 74 bp, Homo sapiens
ggtctgcgttgtagagaggtaaccccaggtgtgtgtctgcgcgtggggtaggaagatgtcagtgtttctgaaag

SEQ ID NO: 40485 - DNA, 73 bp, Homo sapiens
agaggtaaccccaggtgtgtgtctgcgcgtggggtaggaagatgtcagtgtttctgaaaggtggggactgcaa

SEQ ID NO: 40486 - DNA, 71 bp, Homo sapiens
acagtctctatttcctccacctttatacctaccttccctttctgcagtgtccccacaccctcctctgagac

SEQ ID NO: 40487 - DNA, 72 bp, Homo sapiens
tttcctccacctttatacctaccttccctttctgcagtgtccccacaccctcctctgagacgccatgttcaa

SEQ ID NO: 40488 - DNA, 73 bp, Homo sapiens
acctttatacctaccttccctttctgcagtgtccccacaccctcctctgagacgccatgttcaactcgatgac

SEQ ID NO: 40489 - DNA, 76 bp, Homo sapiens
taccttccctttctgcagtgtccccacaccctcctctgagacgccatgttcaactcgatgaccccaccaccaatca

SEQ ID NO: 40490 - DNA, 80 bp, Homo sapiens
tttctgcagtgtccccacaccctcctctgagacgccatgttcaactcgatgaccccaccaccaatcagtagctatggcga

SEQ ID NO: 40491 - DNA, 80 bp, Homo sapiens
cccacaccctcctctgagacgccatgttcaactcgatgaccccaccaccaatcagtagctatggcgagccctgctgtctc

SEQ ID NO: 40492 - DNA, 79 bp, Homo sapiens
accctcctctgagacgccatgttcaactcgatgaccccaccaccaatcagtagctatggcgagccctgctgtctccggc

SEQ ID NO: 40493 - DNA, 77 bp, Homo sapiens
agacgccatgttcaactcgatgaccccaccaccaatcagtagctatggcgagccctgctgtctccggcccctcccca

SEQ ID NO: 40494 - DNA, 75 bp, Homo sapiens
gttcaactcgatgaccccaccaccaatcagtagctatggcgagccctgctgtctccggcccctccccagtcaggg

SEQ ID NO: 40495 - DNA, 73 bp, Homo sapiens
cccaccaccaatcagtagctatggcgagccctgctgtctccggcccctccccagtcagggggcccccagtgtg

SEQ ID NO: 40496 - DNA, 73 bp, Homo sapiens
aatcagtagctatggcgagccctgctgtctccggcccctccccagtcagggggcccccagtgtggggacagaa

SEQ ID NO: 40497 - DNA, 73 bp, Homo sapiens
tatggcgagccctgctgtctccggcccctccccagtcagggggcccccagtgtggggacagaaggtcagtgta

SEQ ID NO: 40498 - DNA, 72 bp, Homo sapiens
ctgctgtctccggcccctccccagtcagggggcccccagtgtggggacagaaggtcagtgtatataccaatc

SEQ ID NO: 40499 - DNA, 70 bp, Homo sapiens
tctccggcccctccccagtcagggggcccccagtgtggggacagaaggtcagtgtatataccaatccctg

SEQ ID NO: 40500 - DNA, 72 bp, Homo sapiens
taaggtgaggtttatgtatcctccattcccattccagctgtctcttttttctaggactgtctggcccgccct

SEQ ID NO: 40501 - DNA, 74 bp, Homo sapiens
gtttatgtatcctccattcccattccagctgtctcttttttctaggactgtctggcccgcccttctgccaccaa

SEQ ID NO: 40502 - DNA, 74 bp, Homo sapiens
attcccattccagctgtctcttttttctaggactgtctggcccgcccttctgccaccaagctaacctcatgtcc

SEQ ID NO: 40503 - DNA, 73 bp, Homo sapiens
attccagctgtctcttttttctaggactgtctggcccgcccttctgccaccaagctaacctcatgtccggccc

SEQ ID NO: 40504 - DNA, 71 bp, Homo sapiens
ttttttctaggactgtctggcccgcccttctgccaccaagctaacctcatgtccggcccccacagttatgg

SEQ ID NO: 40505 - DNA, 76 bp, Homo sapiens
tctaggactgtctggcccgcccttctgccaccaagctaacctcatgtccggcccccacagttatgggccagccaga

SEQ ID NO: 40506 - DNA, 76 bp, Homo sapiens
tctggcccgcccttctgccaccaagctaacctcatgtccggcccccacagttatgggccagccagagagaccaaca

SEQ ID NO: 40507 - DNA, 79 bp, Homo sapiens
tctgccaccaagctaacctcatgtccggcccccacagttatgggccagccagagagaccaacagctgcaccgagggtga

SEQ ID NO: 40508 - DNA, 77 bp, Homo sapiens
aagctaacctcatgtccggcccccacagttatgggccagccagagagaccaacagctgcaccgagggtgagggctca

SEQ ID NO: 40509 - DNA, 77 bp, Homo sapiens
atgtccggcccccacagttatgggccagccagagagaccaacagctgcaccgagggtgagggctcaggcaacacctc

SEQ ID NO: 40510 - DNA, 76 bp, Homo sapiens
cccacagttatgggccagccagagagaccaacagctgcaccgagggtgagggctcaggcaacacctcttccctttc

SEQ ID NO: 40511 - DNA, 77 bp, Homo sapiens
ttatgggccagccagagagaccaacagctgcaccgagggtgagggctcaggcaacacctcttccctttctgcccctc

SEQ ID NO: 40512 - DNA, 72 bp, Homo sapiens
agagacatgcccctttaccatatccgtctccgctgtctcctgccccaggcccactcttttcttctccccgga

SEQ ID NO: 40513 - DNA, 72 bp, Homo sapiens
ctttaccatatccgtctccgctgtctcctgccccaggcccactcttttcttctccccggagtgcagtcaagt

SEQ ID NO: 40514 - DNA, 74 bp, Homo sapiens
atatccgtctccgctgtctcctgccccaggcccactcttttcttctccccggagtgcagtcaagttgaccaaga

SEQ ID NO: 40515 - DNA, 74 bp, Homo sapiens
ctgtctcctgccccaggcccactcttttcttctccccggagtgcagtcaagttgaccaagaagcgggcactgtc

SEQ ID NO: 40516 - DNA, 73 bp, Homo sapiens
ccccaggcccactcttttcttctccccggagtgcagtcaagttgaccaagaagcgggcactgtccatctcacc

SEQ ID NO: 40517 - DNA, 77 bp, Homo sapiens
actcttttcttctccccggagtgcagtcaagttgaccaagaagcgggcactgtccatctcacctctgtcggatgcca

SEQ ID NO: 40518 - DNA, 79 bp, Homo sapiens
tttcttctccccggagtgcagtcaagttgaccaagaagcgggcactgtccatctcacctctgtcggatgccagcctgga

SEQ ID NO: 40519 - DNA, 81 bp, Homo sapiens
agtgcagtcaagttgaccaagaagcgggcactgtccatctcacctctgtcggatgccagcctggacctgcagacggttatc

SEQ ID NO: 40520 - DNA, 80 bp, Homo sapiens
agttgaccaagaagcgggcactgtccatctcacctctgtcggatgccagcctggacctgcagacggttatccgcacctca

SEQ ID NO: 40521 - DNA, 80 bp, Homo sapiens
aagaagcgggcactgtccatctcacctctgtcggatgccagcctggacctgcagacggttatccgcacctcacccagctc

SEQ ID NO: 40522 - DNA, 81 bp, Homo sapiens
tgtccatctcacctctgtcggatgccagcctggacctgcagacggttatccgcacctcacccagctccctcgtagctttca

SEQ ID NO: 40523 - DNA, 80 bp, Homo sapiens
atctcacctctgtcggatgccagcctggacctgcagacggttatccgcacctcacccagctccctcgtagctttcatcaa

SEQ ID NO: 40524 - DNA, 84 bp, Homo sapiens
gatgccagcctggacctgcagacggttatccgcacctcacccagctccctcgtagctttcatcaactcgcgatgcacatctcca

SEQ ID NO: 40525 - DNA, 81 bp, Homo sapiens
agcctggacctgcagacggttatccgcacctcacccagctccctcgtagctttcatcaactcgcgatgcacatctccagga

SEQ ID NO: 40526 - DNA, 78 bp, Homo sapiens
agacggttatccgcacctcacccagctccctcgtagctttcatcaactcgcgatgcacatctccaggaggctcctacg

SEQ ID NO: 40527 - DNA, 82 bp, Homo sapiens
ttatccgcacctcacccagctccctcgtagctttcatcaactcgcgatgcacatctccaggaggctcctacggtcatctctc

SEQ ID NO: 40528 - DNA, 83 bp, Homo sapiens
acccagctccctcgtagctttcatcaactcgcgatgcacatctccaggaggctcctacggtcatctctccattggcaccatga

SEQ ID NO: 40529 - DNA, 86 bp, Homo sapiens
tccctcgtagctttcatcaactcgcgatgcacatctccaggaggctcctacggtcatctctccattggcaccatgaggtgcagtca

SEQ ID NO: 40530 - DNA, 83 bp, Homo sapiens
ctttcatcaactcgcgatgcacatctccaggaggctcctacggtcatctctccattggcaccatgaggtgcagtcagccccgg

SEQ ID NO: 40531 - DNA, 81 bp, Homo sapiens
cgatgcacatctccaggaggctcctacggtcatctctccattggcaccatgaggtgcagtcagccccgggccaagaggccc

SEQ ID NO: 40532 - DNA, 77 bp, Homo sapiens
tctccaggaggctcctacggtcatctctccattggcaccatgaggtgcagtcagccccgggccaagaggcccctaaa

SEQ ID NO: 40533 - DNA, 79 bp, Homo sapiens
tgagacttcctaattgtcttaagtaactgcctcctctcctcctcagcccatctctgggattcccagcccagatgaatca

SEQ ID NO: 40534 - DNA, 76 bp, Homo sapiens
taattgtcttaagtaactgcctcctctcctcctcagcccatctctgggattcccagcccagatgaatcaccaaaaa

SEQ ID NO: 40535 - DNA, 75 bp, Homo sapiens
gtcttaagtaactgcctcctctcctcctcagcccatctctgggattcccagcccagatgaatcaccaaaaagggc

SEQ ID NO: 40536 - DNA, 73 bp, Homo sapiens
ctcctctcctcctcagcccatctctgggattcccagcccagatgaatcaccaaaaagggccctcgccttcctt

SEQ ID NO: 40537 - DNA, 72 bp, Homo sapiens
ctcctcctcagcccatctctgggattcccagcccagatgaatcaccaaaaagggccctcgccttcctttggg

SEQ ID NO: 40538 - DNA, 71 bp, Homo sapiens
atctctgggattcccagcccagatgaatcaccaaaaagggccctcgccttcctttggggtccagccttgtg

SEQ ID NO: 40539 - DNA, 69 bp, Homo sapiens
ggattcccagcccagatgaatcaccaaaaagggccctcgccttcctttggggtccagccttgtggtccc

SEQ ID NO: 40540 - DNA, 70 bp, Homo sapiens
agatgaatcaccaaaaagggccctcgccttcctttggggtccagccttgtggtccccatgactctgcccg

SEQ ID NO: 40541 - DNA, 67 bp, Homo sapiens
atcaccaaaaagggccctcgccttcctttggggtccagccttgtggtccccatgactctgcccgggg

SEQ ID NO: 40542 - DNA, 73 bp, Homo sapiens
cctcgccttcctttggggtccagccttgtggtccccatgactctgcccggggtgggatgatcccacatcctca

SEQ ID NO: 40543 - DNA, 72 bp, Homo sapiens
ttcctttggggtccagccttgtggtccccatgactctgcccggggtgggatgatcccacatcctcagtcccg

SEQ ID NO: 40544 - DNA, 72 bp, Homo sapiens
cagccttgtggtccccatgactctgcccggggtgggatgatcccacatcctcagtcccggggacccttccca

SEQ ID NO: 40545 - DNA, 70 bp, Homo sapiens
ttgtggtccccatgactctgcccggggtgggatgatcccacatcctcagtcccggggacccttcccaact

SEQ ID NO: 40546 - DNA, 72 bp, Homo sapiens
atgactctgcccggggtgggatgatcccacatcctcagtcccggggacccttcccaacttgccaggtgagag

SEQ ID NO: 40547 - DNA, 73 bp, Homo sapiens
ggtgggatgatcccacatcctcagtcccggggacccttcccaacttgccaggtgagagtccccatattgctac

SEQ ID NO: 40548 - DNA, 73 bp, Homo sapiens
atgatcccacatcctcagtcccggggacccttcccaacttgccaggtgagagtccccatattgctacctgatt

SEQ ID NO: 40549 - DNA, 78 bp, Homo sapiens
tcttccttctgcttacttccaccctcatcaccgtcacctcttcccctggggaagctgaagtctgagctggacatgctg

SEQ ID NO: 40550 - DNA, 76 bp, Homo sapiens
cttacttccaccctcatcaccgtcacctcttcccctggggaagctgaagtctgagctggacatgctggttggcaag

SEQ ID NO: 40551 - DNA, 77 bp, Homo sapiens
cctcatcaccgtcacctcttcccctggggaagctgaagtctgagctggacatgctggttggcaagtgccgggaggaa

SEQ ID NO: 40552 - DNA, 75 bp, Homo sapiens
tcacctcttcccctggggaagctgaagtctgagctggacatgctggttggcaagtgccgggaggaacccttggaa

SEQ ID NO: 40553 - DNA, 76 bp, Homo sapiens
ccctggggaagctgaagtctgagctggacatgctggttggcaagtgccgggaggaacccttggaaggtgatatgtc

SEQ ID NO: 40554 - DNA, 77 bp, Homo sapiens
gggaagctgaagtctgagctggacatgctggttggcaagtgccgggaggaacccttggaaggtgatatgtccagccc

SEQ ID NO: 40555 - DNA, 77 bp, Homo sapiens
agtctgagctggacatgctggttggcaagtgccgggaggaacccttggaaggtgatatgtccagccccaactccaca

SEQ ID NO: 40556 - DNA, 75 bp, Homo sapiens
tgctggttggcaagtgccgggaggaacccttggaaggtgatatgtccagccccaactccacaggcatacaggtaa

SEQ ID NO: 40557 - DNA, 72 bp, Homo sapiens
gttggcaagtgccgggaggaacccttggaaggtgatatgtccagccccaactccacaggcatacaggtaagg

SEQ ID NO: 40558 - DNA, 73 bp, Homo sapiens
gaggaacccttggaaggtgatatgtccagccccaactccacaggcatacaggtaaggggatgggcaggagctt

SEQ ID NO: 40559 - DNA, 75 bp, Homo sapiens
ttggaaggtgatatgtccagccccaactccacaggcatacaggtaaggggatgggcaggagctttacctctggga

SEQ ID NO: 40560 - DNA, 74 bp, Homo sapiens
aaaactaaagctgtcacccaagtgaccctgagattgcctctcttgccctaggatcccctgttggggatgctgga

SEQ ID NO: 40561 - DNA, 76 bp, Homo sapiens
tgtcacccaagtgaccctgagattgcctctcttgccctaggatcccctgttggggatgctggatgggcgggaggac

SEQ ID NO: 40562 - DNA, 76 bp, Homo sapiens
agtgaccctgagattgcctctcttgccctaggatcccctgttggggatgctggatgggcgggaggacctcgagaga

SEQ ID NO: 40563 - DNA, 76 bp, Homo sapiens
agattgcctctcttgccctaggatcccctgttggggatgctggatgggcgggaggacctcgagagagaggagaagc

SEQ ID NO: 40564 - DNA, 77 bp, Homo sapiens
ttgccctaggatcccctgttggggatgctggatgggcgggaggacctcgagagagaggagaagcgtgagcctgaatc

SEQ ID NO: 40565 - DNA, 79 bp, Homo sapiens
ccctgttggggatgctggatgggcgggaggacctcgagagagaggagaagcgtgagcctgaatctgtgtatgaaactga

SEQ ID NO: 40566 - DNA, 81 bp, Homo sapiens
gatgctggatgggcgggaggacctcgagagagaggagaagcgtgagcctgaatctgtgtatgaaactgactgccgttggga

SEQ ID NO: 40567 - DNA, 81 bp, Homo sapiens
atgggcgggaggacctcgagagagaggagaagcgtgagcctgaatctgtgtatgaaactgactgccgttgggatggctgca

SEQ ID NO: 40568 - DNA, 82 bp, Homo sapiens
acctcgagagagaggagaagcgtgagcctgaatctgtgtatgaaactgactgccgttgggatggctgcagccaggaatttga

SEQ ID NO: 40569 - DNA, 81 bp, Homo sapiens
agagaggagaagcgtgagcctgaatctgtgtatgaaactgactgccgttgggatggctgcagccaggaatttgactcccaa

SEQ ID NO: 40570 - DNA, 83 bp, Homo sapiens
agaagcgtgagcctgaatctgtgtatgaaactgactgccgttgggatggctgcagccaggaatttgactcccaagagcagctg

SEQ ID NO: 40571 - DNA, 82 bp, Homo sapiens
aatctgtgtatgaaactgactgccgttgggatggctgcagccaggaatttgactcccaagagcagctggtgcacgtgagccc

SEQ ID NO: 40572 - DNA, 81 bp, Homo sapiens
gtgtatgaaactgactgccgttgggatggctgcagccaggaatttgactcccaagagcagctggtgcacgtgagccccagg

SEQ ID NO: 40573 - DNA, 78 bp, Homo sapiens
tgccgttgggatggctgcagccaggaatttgactcccaagagcagctggtgcacgtgagccccagggggtaacaggaa

SEQ ID NO: 40574 - DNA, 80 bp, Homo sapiens
atggctgcagccaggaatttgactcccaagagcagctggtgcacgtgagccccagggggtaacaggaatggctagccaga

SEQ ID NO: 40575 - DNA, 80 bp, Homo sapiens
acctcagggtcatgggagagccttggagagcctttgtatcttctccctcagcacatcaacagcgagcacatccacgggga

SEQ ID NO: 40576 - DNA, 79 bp, Homo sapiens
gagagccttggagagcctttgtatcttctccctcagcacatcaacagcgagcacatccacggggagcggaaggagttcg

SEQ ID NO: 40577 - DNA, 80 bp, Homo sapiens
ttggagagcctttgtatcttctccctcagcacatcaacagcgagcacatccacggggagcggaaggagttcgtgtgccac

SEQ ID NO: 40578 - DNA, 77 bp, Homo sapiens
cctttgtatcttctccctcagcacatcaacagcgagcacatccacggggagcggaaggagttcgtgtgccactgggg

SEQ ID NO: 40579 - DNA, 79 bp, Homo sapiens
ttctccctcagcacatcaacagcgagcacatccacggggagcggaaggagttcgtgtgccactgggggggctgctccag

SEQ ID NO: 40580 - DNA, 78 bp, Homo sapiens
acatcaacagcgagcacatccacggggagcggaaggagttcgtgtgccactgggggggctgctccagggagctgaggc

SEQ ID NO: 40581 - DNA, 74 bp, Homo sapiens
agcacatccacggggagcggaaggagttcgtgtgccactgggggggctgctccagggagctgaggcccttcaaa

SEQ ID NO: 40582 - DNA, 73 bp, Homo sapiens
ggggagcggaaggagttcgtgtgccactgggggggctgctccagggagctgaggcccttcaaagcccagtaca

SEQ ID NO: 40583 - DNA, 74 bp, Homo sapiens
aaggagttcgtgtgccactgggggggctgctccagggagctgaggcccttcaaagcccagtacatgctggtggt

SEQ ID NO: 40584 - DNA, 81 bp, Homo sapiens
ttcgtgtgccactgggggggctgctccagggagctgaggcccttcaaagcccagtacatgctggtggttcacatgcgcaga

SEQ ID NO: 40585 - DNA, 82 bp, Homo sapiens
gggggctgctccagggagctgaggcccttcaaagcccagtacatgctggtggttcacatgcgcagacacactggcgagaagc

SEQ ID NO: 40586 - DNA, 85 bp, Homo sapiens
tccagggagctgaggcccttcaaagcccagtacatgctggtggttcacatgcgcagacacactggcgagaagccacacaagtgca

SEQ ID NO: 40587 - DNA, 84 bp, Homo sapiens
agctgaggcccttcaaagcccagtacatgctggtggttcacatgcgcagacacactggcgagaagccacacaagtgcacggtga

SEQ ID NO: 40588 - DNA, 85 bp, Homo sapiens
ttcaaagcccagtacatgctggtggttcacatgcgcagacacactggcgagaagccacacaagtgcacggtgaggcaccagtgtc

SEQ ID NO: 40589 - DNA, 84 bp, Homo sapiens
agtacatgctggtggttcacatgcgcagacacactggcgagaagccacacaagtgcacggtgaggcaccagtgtcccaagtcca

SEQ ID NO: 40590 - DNA, 82 bp, Homo sapiens
tggttcacatgcgcagacacactggcgagaagccacacaagtgcacggtgaggcaccagtgtcccaagtccagggtctcttc

SEQ ID NO: 40591 - DNA, 75 bp, Homo sapiens
atgtcctctgtctgagaactatcctttgacccctgcatgtcccccagtttgaagggtgccggaagtcatactcac

SEQ ID NO: 40592 - DNA, 74 bp, Homo sapiens
tctgagaactatcctttgacccctgcatgtcccccagtttgaagggtgccggaagtcatactcacgcctcgaaa

SEQ ID NO: 40593 - DNA, 72 bp, Homo sapiens
tatcctttgacccctgcatgtcccccagtttgaagggtgccggaagtcatactcacgcctcgaaaacctgaa

SEQ ID NO: 40594 - DNA, 73 bp, Homo sapiens
cctgcatgtcccccagtttgaagggtgccggaagtcatactcacgcctcgaaaacctgaagacgcacctgcgg

SEQ ID NO: 40595 - DNA, 72 bp, Homo sapiens
ccccagtttgaagggtgccggaagtcatactcacgcctcgaaaacctgaagacgcacctgcggtcacacacg

SEQ ID NO: 40596 - DNA, 74 bp, Homo sapiens
tttgaagggtgccggaagtcatactcacgcctcgaaaacctgaagacgcacctgcggtcacacacgggtgagaa

SEQ ID NO: 40597 - DNA, 78 bp, Homo sapiens
ccggaagtcatactcacgcctcgaaaacctgaagacgcacctgcggtcacacacgggtgagaagccatacatgtgtga

SEQ ID NO: 40598 - DNA, 79 bp, Homo sapiens
atactcacgcctcgaaaacctgaagacgcacctgcggtcacacacgggtgagaagccatacatgtgtgagcacgagggc

SEQ ID NO: 40599 - DNA, 78 bp, Homo sapiens
aaaacctgaagacgcacctgcggtcacacacgggtgagaagccatacatgtgtgagcacgagggctgcagtaaagcct

SEQ ID NO: 40600 - DNA, 83 bp, Homo sapiens
aagacgcacctgcggtcacacacgggtgagaagccatacatgtgtgagcacgagggctgcagtaaagccttcagcaatgccag

SEQ ID NO: 40601 - DNA, 83 bp, Homo sapiens
acctgcggtcacacacgggtgagaagccatacatgtgtgagcacgagggctgcagtaaagccttcagcaatgccagtgaccga

SEQ ID NO: 40602 - DNA, 83 bp, Homo sapiens
acgggtgagaagccatacatgtgtgagcacgagggctgcagtaaagccttcagcaatgccagtgaccgagccaagcaccagaa

SEQ ID NO: 40603 - DNA, 83 bp, Homo sapiens
agccatacatgtgtgagcacgagggctgcagtaaagccttcagcaatgccagtgaccgagccaagcaccagaatcggacccat

SEQ ID NO: 40604 - DNA, 83 bp, Homo sapiens
atgtgtgagcacgagggctgcagtaaagccttcagcaatgccagtgaccgagccaagcaccagaatcggacccattccaatga

SEQ ID NO: 40605 - DNA, 79 bp, Homo sapiens
acgagggctgcagtaaagccttcagcaatgccagtgaccgagccaagcaccagaatcggacccattccaatgaggtgaa

SEQ ID NO: 40606 - DNA, 78 bp, Homo sapiens
taaagccttcagcaatgccagtgaccgagccaagcaccagaatcggacccattccaatgaggtgaatgccctaactaa

SEQ ID NO: 40607 - DNA, 77 bp, Homo sapiens
agcaatgccagtgaccgagccaagcaccagaatcggacccattccaatgaggtgaatgccctaactaagcgaccctc

SEQ ID NO: 40608 - DNA, 73 bp, Homo sapiens
agtgaccgagccaagcaccagaatcggacccattccaatgaggtgaatgccctaactaagcgaccctcccctc

SEQ ID NO: 40609 - DNA, 76 bp, Homo sapiens
attcttccgctttgatccgtttgccttctgtctccactctccactcaacagaagccgtatgtatgtaagctccctg

SEQ ID NO: 40610 - DNA, 82 bp, Homo sapiens
ttctgtctccactctccactcaacagaagccgtatgtatgtaagctccctggctgcaccaaacgctatacagatcctagctc

SEQ ID NO: 40611 - DNA, 81 bp, Homo sapiens
actctccactcaacagaagccgtatgtatgtaagctccctggctgcaccaaacgctatacagatcctagctcgctgcgaaa

SEQ ID NO: 40612 - DNA, 83 bp, Homo sapiens
tcaacagaagccgtatgtatgtaagctccctggctgcaccaaacgctatacagatcctagctcgctgcgaaaacatgtcaaga

SEQ ID NO: 40613 - DNA, 83 bp, Homo sapiens
aagccgtatgtatgtaagctccctggctgcaccaaacgctatacagatcctagctcgctgcgaaaacatgtcaagacagtgca

SEQ ID NO: 40614 - DNA, 84 bp, Homo sapiens
gtatgtaagctccctggctgcaccaaacgctatacagatcctagctcgctgcgaaaacatgtcaagacagtgcatggtcctgac

SEQ ID NO: 40615 - DNA, 85 bp, Homo sapiens
tggctgcaccaaacgctatacagatcctagctcgctgcgaaaacatgtcaagacagtgcatggtcctgacgcccatgtgaccaaa

SEQ ID NO: 40616 - DNA, 80 bp, Homo sapiens
accaaacgctatacagatcctagctcgctgcgaaaacatgtcaagacagtgcatggtcctgacgcccatgtgaccaaacg

SEQ ID NO: 40617 - DNA, 81 bp, Homo sapiens
tatacagatcctagctcgctgcgaaaacatgtcaagacagtgcatggtcctgacgcccatgtgaccaaacggcaccgtggg

SEQ ID NO: 40618 - DNA, 79 bp, Homo sapiens
ctagctcgctgcgaaaacatgtcaagacagtgcatggtcctgacgcccatgtgaccaaacggcaccgtggggatggccc

SEQ ID NO: 40619 - DNA, 75 bp, Homo sapiens
aaaacatgtcaagacagtgcatggtcctgacgcccatgtgaccaaacggcaccgtggggatggccccctgcctcg

SEQ ID NO: 40620 - DNA, 76 bp, Homo sapiens
gacagtgcatggtcctgacgcccatgtgaccaaacggcaccgtggggatggccccctgcctcgggcaccatccatt

SEQ ID NO: 40621 - DNA, 74 bp, Homo sapiens
atggtcctgacgcccatgtgaccaaacggcaccgtggggatggccccctgcctcgggcaccatccatttctaca

SEQ ID NO: 40622 - DNA, 73 bp, Homo sapiens
cccatgtgaccaaacggcaccgtggggatggccccctgcctcgggcaccatccatttctacagtggagcccaa

SEQ ID NO: 40623 - DNA, 72 bp, Homo sapiens
gtgaccaaacggcaccgtggggatggccccctgcctcgggcaccatccatttctacagtggagcccaagagg

SEQ ID NO: 40624 - DNA, 71 bp, Homo sapiens
accgtggggatggccccctgcctcgggcaccatccatttctacagtggagcccaagagggagcgggaagga

SEQ ID NO: 40625 - DNA, 73 bp, Homo sapiens
atggccccctgcctcgggcaccatccatttctacagtggagcccaagagggagcgggaaggaggtcccatcag

SEQ ID NO: 40626 - DNA, 73 bp, Homo sapiens
ctgcctcgggcaccatccatttctacagtggagcccaagagggagcgggaaggaggtcccatcagggaggaaa

SEQ ID NO: 40627 - DNA, 76 bp, Homo sapiens
atccatttctacagtggagcccaagagggagcgggaaggaggtcccatcagggaggaaagcagactgactgtgcca

SEQ ID NO: 40628 - DNA, 75 bp, Homo sapiens
ttctacagtggagcccaagagggagcgggaaggaggtcccatcagggaggaaagcagactgactgtgccagaggg

SEQ ID NO: 40629 - DNA, 77 bp, Homo sapiens
agcccaagagggagcgggaaggaggtcccatcagggaggaaagcagactgactgtgccagagggtgccatggtgaga

SEQ ID NO: 40630 - DNA, 78 bp, Homo sapiens
agcgggaaggaggtcccatcagggaggaaagcagactgactgtgccagagggtgccatggtgagagagcccaggcaac

SEQ ID NO: 40631 - DNA, 78 bp, Homo sapiens
aggaggtcccatcagggaggaaagcagactgactgtgccagagggtgccatggtgagagagcccaggcaaccctcacc

SEQ ID NO: 40632 - DNA, 79 bp, Homo sapiens
atcagggaggaaagcagactgactgtgccagagggtgccatggtgagagagcccaggcaaccctcacctccatacccca

SEQ ID NO: 40633 - DNA, 75 bp, Homo sapiens
aaggagctgtggggaagggtgttgccctcagacctcatcttctccacagaagccacagccaagccctggggccca

SEQ ID NO: 40634 - DNA, 81 bp, Homo sapiens
ggaagggtgttgccctcagacctcatcttctccacagaagccacagccaagccctggggcccagtcatcctgcagcagtga

SEQ ID NO: 40635 - DNA, 82 bp, Homo sapiens
gtgttgccctcagacctcatcttctccacagaagccacagccaagccctggggcccagtcatcctgcagcagtgaccactcc

SEQ ID NO: 40636 - DNA, 79 bp, Homo sapiens
acctcatcttctccacagaagccacagccaagccctggggcccagtcatcctgcagcagtgaccactccccggcaggga

SEQ ID NO: 40637 - DNA, 82 bp, Homo sapiens
tccacagaagccacagccaagccctggggcccagtcatcctgcagcagtgaccactccccggcagggagtgcagccaataca

SEQ ID NO: 40638 - DNA, 80 bp, Homo sapiens
aagccacagccaagccctggggcccagtcatcctgcagcagtgaccactccccggcagggagtgcagccaatacagacag

SEQ ID NO: 40639 - DNA, 80 bp, Homo sapiens
ccctggggcccagtcatcctgcagcagtgaccactccccggcagggagtgcagccaatacagacagtggtgtggaaatga

SEQ ID NO: 40640 - DNA, 84 bp, Homo sapiens
ccagtcatcctgcagcagtgaccactccccggcagggagtgcagccaatacagacagtggtgtggaaatgactggcaatgcagg

SEQ ID NO: 40641 - DNA, 83 bp, Homo sapiens
atcctgcagcagtgaccactccccggcagggagtgcagccaatacagacagtggtgtggaaatgactggcaatgcagggggca

SEQ ID NO: 40642 - DNA, 81 bp, Homo sapiens
agtgaccactccccggcagggagtgcagccaatacagacagtggtgtggaaatgactggcaatgcagggggcagcactgaa

SEQ ID NO: 40643 - DNA, 84 bp, Homo sapiens
ggcagggagtgcagccaatacagacagtggtgtggaaatgactggcaatgcagggggcagcactgaagacctctccagcttgga

SEQ ID NO: 40644 - DNA, 82 bp, Homo sapiens
agtgcagccaatacagacagtggtgtggaaatgactggcaatgcagggggcagcactgaagacctctccagcttggacgagg

SEQ ID NO: 40645 - DNA, 78 bp, Homo sapiens
aatacagacagtggtgtggaaatgactggcaatgcagggggcagcactgaagacctctccagcttggacgagggacct

SEQ ID NO: 40646 - DNA, 83 bp, Homo sapiens
tgtggaaatgactggcaatgcagggggcagcactgaagacctctccagcttggacgagggaccttgcattgctggcactggtc

SEQ ID NO: 40647 - DNA, 83 bp, Homo sapiens
aatgactggcaatgcagggggcagcactgaagacctctccagcttggacgagggaccttgcattgctggcactggtctgtcca

SEQ ID NO: 40648 - DNA, 81 bp, Homo sapiens
aatgcagggggcagcactgaagacctctccagcttggacgagggaccttgcattgctggcactggtctgtccactcttcgc

SEQ ID NO: 40649 - DNA, 78 bp, Homo sapiens
actgaagacctctccagcttggacgagggaccttgcattgctggcactggtctgtccactcttcgccgccttgagaac

SEQ ID NO: 40650 - DNA, 78 bp, Homo sapiens
agacctctccagcttggacgagggaccttgcattgctggcactggtctgtccactcttcgccgccttgagaacctcag

SEQ ID NO: 40651 - DNA, 80 bp, Homo sapiens
ttggacgagggaccttgcattgctggcactggtctgtccactcttcgccgccttgagaacctcaggctggaccagctaca

SEQ ID NO: 40652 - DNA, 80 bp, Homo sapiens
agggaccttgcattgctggcactggtctgtccactcttcgccgccttgagaacctcaggctggaccagctacatcaactc

SEQ ID NO: 40653 - DNA, 79 bp, Homo sapiens
attgctggcactggtctgtccactcttcgccgccttgagaacctcaggctggaccagctacatcaactccggccaatag

SEQ ID NO: 40654 - DNA, 75 bp, Homo sapiens
actggtctgtccactcttcgccgccttgagaacctcaggctggaccagctacatcaactccggccaatagggacc

SEQ ID NO: 40655 - DNA, 73 bp, Homo sapiens
tcttcgccgccttgagaacctcaggctggaccagctacatcaactccggccaatagggacccggggtctcaaa

SEQ ID NO: 40656 - DNA, 74 bp, Homo sapiens
ttgagaacctcaggctggaccagctacatcaactccggccaatagggacccggggtctcaaactgcccagcttg

SEQ ID NO: 40657 - DNA, 72 bp, Homo sapiens
aacctcaggctggaccagctacatcaactccggccaatagggacccggggtctcaaactgcccagcttgtcc

SEQ ID NO: 40658 - DNA, 72 bp, Homo sapiens
accagctacatcaactccggccaatagggacccggggtctcaaactgcccagcttgtcccacaccggtgaga

SEQ ID NO: 40659 - DNA, 70 bp, Homo sapiens
acatcaactccggccaatagggacccggggtctcaaactgcccagcttgtcccacaccggtgagacctgg

SEQ ID NO: 40660 - DNA, 69 bp, Homo sapiens
cggccaatagggacccggggtctcaaactgcccagcttgtcccacaccggtgagacctgggtgtgggag

SEQ ID NO: 40661 - DNA, 70 bp, Homo sapiens
ggacccggggtctcaaactgcccagcttgtcccacaccggtgagacctgggtgtgggaggtgtggctggg

SEQ ID NO: 40662 - DNA, 71 bp, Homo sapiens
aaatttaggaagctccttgaccatcctaccttttctccccatcacttgcaggtaccactgtgtcccgccgc

SEQ ID NO: 40663 - DNA, 71 bp, Homo sapiens
agctccttgaccatcctaccttttctccccatcacttgcaggtaccactgtgtcccgccgcgtgggccccc

SEQ ID NO: 40664 - DNA, 72 bp, Homo sapiens
atcctaccttttctccccatcacttgcaggtaccactgtgtcccgccgcgtgggccccccagtctctcttga

SEQ ID NO: 40665 - DNA, 79 bp, Homo sapiens
tccccatcacttgcaggtaccactgtgtcccgccgcgtgggccccccagtctctcttgaacgccgcagcagcagctcca

SEQ ID NO: 40666 - DNA, 83 bp, Homo sapiens
atcacttgcaggtaccactgtgtcccgccgcgtgggccccccagtctctcttgaacgccgcagcagcagctccagcagcatca

SEQ ID NO: 40667 - DNA, 86 bp, Homo sapiens
cactgtgtcccgccgcgtgggccccccagtctctcttgaacgccgcagcagcagctccagcagcatcagctctgcctatactgtca

SEQ ID NO: 40668 - DNA, 86 bp, Homo sapiens
tgtcccgccgcgtgggccccccagtctctcttgaacgccgcagcagcagctccagcagcatcagctctgcctatactgtcagccgc

SEQ ID NO: 40669 - DNA, 86 bp, Homo sapiens
tgggccccccagtctctcttgaacgccgcagcagcagctccagcagcatcagctctgcctatactgtcagccgccgctcctccctg

SEQ ID NO: 40670 - DNA, 86 bp, Homo sapiens
agtctctcttgaacgccgcagcagcagctccagcagcatcagctctgcctatactgtcagccgccgctcctccctggcctctcctt

SEQ ID NO: 40671 - DNA, 84 bp, Homo sapiens
ttgaacgccgcagcagcagctccagcagcatcagctctgcctatactgtcagccgccgctcctccctggcctctcctttccccc

SEQ ID NO: 40672 - DNA, 82 bp, Homo sapiens
agcagcagctccagcagcatcagctctgcctatactgtcagccgccgctcctccctggcctctcctttcccccctggctccc

SEQ ID NO: 40673 - DNA, 78 bp, Homo sapiens
cagcatcagctctgcctatactgtcagccgccgctcctccctggcctctcctttcccccctggctccccaccagagaa

SEQ ID NO: 40674 - DNA, 75 bp, Homo sapiens
agctctgcctatactgtcagccgccgctcctccctggcctctcctttcccccctggctccccaccagagaatgga

SEQ ID NO: 40675 - DNA, 75 bp, Homo sapiens
ctatactgtcagccgccgctcctccctggcctctcctttcccccctggctccccaccagagaatggagcatcctc

SEQ ID NO: 40676 - DNA, 73 bp, Homo sapiens
agccgccgctcctccctggcctctcctttcccccctggctccccaccagagaatggagcatcctccctgcctg

SEQ ID NO: 40677 - DNA, 77 bp, Homo sapiens
ctggcctctcctttcccccctggctccccaccagagaatggagcatcctccctgcctggccttatgcctgcccagca

SEQ ID NO: 40678 - DNA, 76 bp, Homo sapiens
ctttcccccctggctccccaccagagaatggagcatcctccctgcctggccttatgcctgcccagcactacctgct

SEQ ID NO: 40679 - DNA, 82 bp, Homo sapiens
tggctccccaccagagaatggagcatcctccctgcctggccttatgcctgcccagcactacctgcttcgggcaagatatgct

SEQ ID NO: 40680 - DNA, 83 bp, Homo sapiens
accagagaatggagcatcctccctgcctggccttatgcctgcccagcactacctgcttcgggcaagatatgcttcagccagag

SEQ ID NO: 40681 - DNA, 80 bp, Homo sapiens
aatggagcatcctccctgcctggccttatgcctgcccagcactacctgcttcgggcaagatatgcttcagccagaggggg

SEQ ID NO: 40682 - DNA, 78 bp, Homo sapiens
cctgcctggccttatgcctgcccagcactacctgcttcgggcaagatatgcttcagccagagggggtggtacttcgcc

SEQ ID NO: 40683 - DNA, 81 bp, Homo sapiens
ccttatgcctgcccagcactacctgcttcgggcaagatatgcttcagccagagggggtggtacttcgcccactgcagcatc

SEQ ID NO: 40684 - DNA, 81 bp, Homo sapiens
cccagcactacctgcttcgggcaagatatgcttcagccagagggggtggtacttcgcccactgcagcatccagcctggatc

SEQ ID NO: 40685 - DNA, 80 bp, Homo sapiens
actacctgcttcgggcaagatatgcttcagccagagggggtggtacttcgcccactgcagcatccagcctggatcggata

SEQ ID NO: 40686 - DNA, 79 bp, Homo sapiens
ttcgggcaagatatgcttcagccagagggggtggtacttcgcccactgcagcatccagcctggatcggataggtggtct

SEQ ID NO: 40687 - DNA, 80 bp, Homo sapiens
tacttcgcccactgcagcatccagcctggatcggataggtggtcttcccatgcctccttggagaagccgagccgagtatc

SEQ ID NO: 40688 - DNA, 80 bp, Homo sapiens
actgcagcatccagcctggatcggataggtggtcttcccatgcctccttggagaagccgagccgagtatccaggatacaa

SEQ ID NO: 40689 - DNA, 75 bp, Homo sapiens
atccagcctggatcggataggtggtcttcccatgcctccttggagaagccgagccgagtatccaggatacaaccc

SEQ ID NO: 40690 - DNA, 73 bp, Homo sapiens
aggtggtcttcccatgcctccttggagaagccgagccgagtatccaggatacaaccccaatgcaggggtcacc

SEQ ID NO: 40691 - DNA, 73 bp, Homo sapiens
cttggagaagccgagccgagtatccaggatacaaccccaatgcaggggtcacccggagggccagtgacccagc

SEQ ID NO: 40692 - DNA, 77 bp, Homo sapiens
cccaatgcaggggtcacccggagggccagtgacccagcccaggctgctgaccgtcctgctccagctagagtccagag

SEQ ID NO: 40693 - DNA, 77 bp, Homo sapiens
gggtcacccggagggccagtgacccagcccaggctgctgaccgtcctgctccagctagagtccagaggttcaagagc

SEQ ID NO: 40694 - DNA, 76 bp, Homo sapiens
acccggagggccagtgacccagcccaggctgctgaccgtcctgctccagctagagtccagaggttcaagagcctgg

SEQ ID NO: 40695 - DNA, 79 bp, Homo sapiens
agtgacccagcccaggctgctgaccgtcctgctccagctagagtccagaggttcaagagcctgggctgtgtccataccc

SEQ ID NO: 40696 - DNA, 79 bp, Homo sapiens
ccaggctgctgaccgtcctgctccagctagagtccagaggttcaagagcctgggctgtgtccataccccacccactgtg

SEQ ID NO: 40697 - DNA, 77 bp, Homo sapiens
ctgaccgtcctgctccagctagagtccagaggttcaagagcctgggctgtgtccataccccacccactgtggcaggg

SEQ ID NO: 40698 - DNA, 76 bp, Homo sapiens
ctccagctagagtccagaggttcaagagcctgggctgtgtccataccccacccactgtggcagggggaggacagaa

SEQ ID NO: 40699 - DNA, 75 bp, Homo sapiens
tagagtccagaggttcaagagcctgggctgtgtccataccccacccactgtggcagggggaggacagaactttga

SEQ ID NO: 40700 - DNA, 72 bp, Homo sapiens
aggttcaagagcctgggctgtgtccataccccacccactgtggcagggggaggacagaactttgatccttac

SEQ ID NO: 40701 - DNA, 72 bp, Homo sapiens
tgggctgtgtccataccccacccactgtggcagggggaggacagaactttgatccttacctcccaacctctg

SEQ ID NO: 40702 - DNA, 71 bp, Homo sapiens
ataccccacccactgtggcagggggaggacagaactttgatccttacctcccaacctctgtctactcacca

SEQ ID NO: 40703 - DNA, 72 bp, Homo sapiens
ccacccactgtggcagggggaggacagaactttgatccttacctcccaacctctgtctactcaccacagccc

SEQ ID NO: 40704 - DNA, 81 bp, Homo sapiens
agaactttgatccttacctcccaacctctgtctactcaccacagccccccagcatcactgagaatgctgccatggatgcta

SEQ ID NO: 40705 - DNA, 83 bp, Homo sapiens
ttgatccttacctcccaacctctgtctactcaccacagccccccagcatcactgagaatgctgccatggatgctagagggcta

SEQ ID NO: 40706 - DNA, 84 bp, Homo sapiens
ccaacctctgtctactcaccacagccccccagcatcactgagaatgctgccatggatgctagagggctacaggaagagccagaa

SEQ ID NO: 40707 - DNA, 85 bp, Homo sapiens
tctgtctactcaccacagccccccagcatcactgagaatgctgccatggatgctagagggctacaggaagagccagaagttggga

SEQ ID NO: 40708 - DNA, 85 bp, Homo sapiens
agcatcactgagaatgctgccatggatgctagagggctacaggaagagccagaagttgggacctccatggtgggcagtggtctga

SEQ ID NO: 40709 - DNA, 78 bp, Homo sapiens
catggatgctagagggctacaggaagagccagaagttgggacctccatggtgggcagtggtctgaacccctatatgga

SEQ ID NO: 40710 - DNA, 75 bp, Homo sapiens
atgctagagggctacaggaagagccagaagttgggacctccatggtgggcagtggtctgaacccctatatggact

SEQ ID NO: 40711 - DNA, 73 bp, Homo sapiens
aggaagagccagaagttgggacctccatggtgggcagtggtctgaacccctatatggacttcccacctactga

SEQ ID NO: 40712 - DNA, 73 bp, Homo sapiens
agaagttgggacctccatggtgggcagtggtctgaacccctatatggacttcccacctactgatactctggga

SEQ ID NO: 40713 - DNA, 74 bp, Homo sapiens
ttgggacctccatggtgggcagtggtctgaacccctatatggacttcccacctactgatactctgggatatggg

SEQ ID NO: 40714 - DNA, 73 bp, Homo sapiens
atggtgggcagtggtctgaacccctatatggacttcccacctactgatactctgggatatgggggacctgaag

SEQ ID NO: 40715 - DNA, 74 bp, Homo sapiens
agtggtctgaacccctatatggacttcccacctactgatactctgggatatgggggacctgaaggggcagcagc

SEQ ID NO: 40716 - DNA, 78 bp, Homo sapiens
tatatggacttcccacctactgatactctgggatatgggggacctgaaggggcagcagctgagccttatggagcgagg

SEQ ID NO: 40717 - DNA, 75 bp, Homo sapiens
acttcccacctactgatactctgggatatgggggacctgaaggggcagcagctgagccttatggagcgaggggtc

SEQ ID NO: 40718 - DNA, 79 bp, Homo sapiens
cctactgatactctgggatatgggggacctgaaggggcagcagctgagccttatggagcgaggggtccaggctctctgc

SEQ ID NO: 40719 - DNA, 78 bp, Homo sapiens
gacctgaaggggcagcagctgagccttatggagcgaggggtccaggctctctgcctcttgggcctggtccacccacca

SEQ ID NO: 40720 - DNA, 78 bp, Homo sapiens
ggcagcagctgagccttatggagcgaggggtccaggctctctgcctcttgggcctggtccacccaccaactatggccc

SEQ ID NO: 40721 - DNA, 75 bp, Homo sapiens
agctgagccttatggagcgaggggtccaggctctctgcctcttgggcctggtccacccaccaactatggccccaa

SEQ ID NO: 40722 - DNA, 75 bp, Homo sapiens
tccaggctctctgcctcttgggcctggtccacccaccaactatggccccaacccctgtccccagcaggcctcata

SEQ ID NO: 40723 - DNA, 74 bp, Homo sapiens
tctgcctcttgggcctggtccacccaccaactatggccccaacccctgtccccagcaggcctcatatcctgacc

SEQ ID NO: 40724 - DNA, 72 bp, Homo sapiens
tcttgggcctggtccacccaccaactatggccccaacccctgtccccagcaggcctcatatcctgaccccac

SEQ ID NO: 40725 - DNA, 70 bp, Homo sapiens
acccaccaactatggccccaacccctgtccccagcaggcctcatatcctgaccccacccaagaaacatgg

SEQ ID NO: 40726 - DNA, 70 bp, Homo sapiens
aactatggccccaacccctgtccccagcaggcctcatatcctgaccccacccaagaaacatggggtgagt

SEQ ID NO: 40727 - DNA, 73 bp, Homo sapiens
ccagcaggcctcatatcctgaccccacccaagaaacatggggtgagttcccttcccactctgggctgtaccca

SEQ ID NO: 40728 - DNA, 71 bp, Homo sapiens
aggcctcatatcctgaccccacccaagaaacatggggtgagttcccttcccactctgggctgtacccaggc

SEQ ID NO: 40729 - DNA, 68 bp, Homo sapiens
accccacccaagaaacatggggtgagttcccttcccactctgggctgtacccaggccccaaggctcta

SEQ ID NO: 40730 - DNA, 69 bp, Homo sapiens
agaaacatggggtgagttcccttcccactctgggctgtacccaggccccaaggctctaggtggaaccta

SEQ ID NO: 40731 - DNA, 71 bp, Homo sapiens
gggtgagttcccttcccactctgggctgtacccaggccccaaggctctaggtggaacctacagccagtgtc

SEQ ID NO: 40732 - DNA, 73 bp, Homo sapiens
cttcccactctgggctgtacccaggccccaaggctctaggtggaacctacagccagtgtcctcgacttgaaca

SEQ ID NO: 40733 - DNA, 75 bp, Homo sapiens
tctgggctgtacccaggccccaaggctctaggtggaacctacagccagtgtcctcgacttgaacattatggacaa

SEQ ID NO: 40734 - DNA, 76 bp, Homo sapiens
tacccaggccccaaggctctaggtggaacctacagccagtgtcctcgacttgaacattatggacaagtgcaagtca

SEQ ID NO: 40735 - DNA, 76 bp, Homo sapiens
aaggctctaggtggaacctacagccagtgtcctcgacttgaacattatggacaagtgcaagtcaagccagaacagg

SEQ ID NO: 40736 - DNA, 78 bp, Homo sapiens
tgtcctcgacttgaacattatggacaagtgcaagtcaagccagaacaggggtgcccagtggggtctgactccacagga

SEQ ID NO: 40737 - DNA, 75 bp, Homo sapiens
aagtcaagccagaacaggggtgcccagtggggtctgactccacaggactggcaccctgcctcaatgcccacccca

SEQ ID NO: 40738 - DNA, 75 bp, Homo sapiens
cccagtggggtctgactccacaggactggcaccctgcctcaatgcccaccccagtgaggggcccccacatccaca

SEQ ID NO: 40739 - DNA, 77 bp, Homo sapiens
tctgactccacaggactggcaccctgcctcaatgcccaccccagtgaggggcccccacatccacagcctctcttttc

SEQ ID NO: 40740 - DNA, 74 bp, Homo sapiens
acaggactggcaccctgcctcaatgcccaccccagtgaggggcccccacatccacagcctctcttttcccatta

SEQ ID NO: 40741 - DNA, 71 bp, Homo sapiens
cctcaatgcccaccccagtgaggggcccccacatccacagcctctcttttcccattacccccagccctctc

SEQ ID NO: 40742 - DNA, 72 bp, Homo sapiens
cagtgaggggcccccacatccacagcctctcttttcccattacccccagccctctcctccccaatatctcca

SEQ ID NO: 40743 - DNA, 71 bp, Homo sapiens
cccccacatccacagcctctcttttcccattacccccagccctctcctccccaatatctccagtcaggccc

SEQ ID NO: 40744 - DNA, 72 bp, Homo sapiens
acatccacagcctctcttttcccattacccccagccctctcctccccaatatctccagtcaggcccctatac

SEQ ID NO: 40745 - DNA, 70 bp, Homo sapiens
tctcttttcccattacccccagccctctcctccccaatatctccagtcaggcccctatacccagccaccc

SEQ ID NO: 40746 - DNA, 70 bp, Homo sapiens
attacccccagccctctcctccccaatatctccagtcaggcccctatacccagccaccccctgattatct

SEQ ID NO: 40747 - DNA, 72 bp, Homo sapiens
cctctcctccccaatatctccagtcaggcccctatacccagccaccccctgattatcttccttcagaaccca

SEQ ID NO: 40748 - DNA, 72 bp, Homo sapiens
cccaatatctccagtcaggcccctatacccagccaccccctgattatcttccttcagaacccaggccttgcc

SEQ ID NO: 40749 - DNA, 72 bp, Homo sapiens
cagtcaggcccctatacccagccaccccctgattatcttccttcagaacccaggccttgcctggactttgat

SEQ ID NO: 40750 - DNA, 71 bp, Homo sapiens
agccaccccctgattatcttccttcagaacccaggccttgcctggactttgattcccccacccattccaca

SEQ ID NO: 40751 - DNA, 74 bp, Homo sapiens
ctgattatcttccttcagaacccaggccttgcctggactttgattcccccacccattccacagggcagctcaag

SEQ ID NO: 40752 - DNA, 78 bp, Homo sapiens
caggccttgcctggactttgattcccccacccattccacagggcagctcaaggctcagcttgtgtgtaattatgttca

SEQ ID NO: 40753 - DNA, 79 bp, Homo sapiens
ttgcctggactttgattcccccacccattccacagggcagctcaaggctcagcttgtgtgtaattatgttcaatctcaa

SEQ ID NO: 40754 - DNA, 79 bp, Homo sapiens
tttgattcccccacccattccacagggcagctcaaggctcagcttgtgtgtaattatgttcaatctcaacaggagctac

SEQ ID NO: 40755 - DNA, 74 bp, Homo sapiens
ttgtgtgtaattatgttcaatctcaacaggagctactgtgggagggtgggggcagggaagatgcccccgcccag

SEQ ID NO: 40756 - DNA, 72 bp, Homo sapiens
taattatgttcaatctcaacaggagctactgtgggagggtgggggcagggaagatgcccccgcccaggaacc

SEQ ID NO: 40757 - DNA, 68 bp, Homo sapiens
gctactgtgggagggtgggggcagggaagatgcccccgcccaggaaccttcctaccagagtcccaagt

SEQ ID NO: 40758 - DNA, 67 bp, Homo sapiens
tgggagggtgggggcagggaagatgcccccgcccaggaaccttcctaccagagtcccaagtttctgg

SEQ ID NO: 40759 - DNA, 66 bp, Homo sapiens
gcagggaagatgcccccgcccaggaaccttcctaccagagtcccaagtttctggggggttcccagg

SEQ ID NO: 40760 - DNA, 65 bp, Homo sapiens
aagatgcccccgcccaggaaccttcctaccagagtcccaagtttctggggggttcccaggttagc

SEQ ID NO: 40761 - DNA, 66 bp, Homo sapiens
caggaaccttcctaccagagtcccaagtttctggggggttcccaggttagcccaagccgtgctaaa

SEQ ID NO: 40762 - DNA, 69 bp, Homo sapiens
ttcctaccagagtcccaagtttctggggggttcccaggttagcccaagccgtgctaaagctccagtgaa

SEQ ID NO: 40763 - DNA, 71 bp, Homo sapiens
agagtcccaagtttctggggggttcccaggttagcccaagccgtgctaaagctccagtgaacacatatgga

SEQ ID NO: 40764 - DNA, 70 bp, Homo sapiens
agtttctggggggttcccaggttagcccaagccgtgctaaagctccagtgaacacatatggacctggctt

SEQ ID NO: 40765 - DNA, 77 bp, Homo sapiens
ttagcccaagccgtgctaaagctccagtgaacacatatggacctggctttggacccaacttgcccaatcacaagtca

SEQ ID NO: 40766 - DNA, 77 bp, Homo sapiens
tgctaaagctccagtgaacacatatggacctggctttggacccaacttgcccaatcacaagtcaggttcctatccca

SEQ ID NO: 40767 - DNA, 72 bp, Homo sapiens
tggctttggacccaacttgcccaatcacaagtcaggttcctatcccaccccttcaccatgccatgaaaattt

SEQ ID NO: 40768 - DNA, 71 bp, Homo sapiens
acccaacttgcccaatcacaagtcaggttcctatcccaccccttcaccatgccatgaaaattttgtagtgg

SEQ ID NO: 40769 - DNA, 76 bp, Homo sapiens
ttcctatcccaccccttcaccatgccatgaaaattttgtagtgggggcaaatagggcttcacatagggcagcagca

SEQ ID NO: 40770 - DNA, 76 bp, Homo sapiens
ccttcaccatgccatgaaaattttgtagtgggggcaaatagggcttcacatagggcagcagcaccacctcgacttc

SEQ ID NO: 40771 - DNA, 74 bp, Homo sapiens
ccatgaaaattttgtagtgggggcaaatagggcttcacatagggcagcagcaccacctcgacttctgcccccat

SEQ ID NO: 40772 - DNA, 74 bp, Homo sapiens
aaattttgtagtgggggcaaatagggcttcacatagggcagcagcaccacctcgacttctgcccccattgccca

SEQ ID NO: 40773 - DNA, 79 bp, Homo sapiens
ggcaaatagggcttcacatagggcagcagcaccacctcgacttctgcccccattgcccacttgctatgggcctctcaaa

SEQ ID NO: 40774 - DNA, 78 bp, Homo sapiens
atagggcttcacatagggcagcagcaccacctcgacttctgcccccattgcccacttgctatgggcctctcaaagtgg

SEQ ID NO: 40775 - DNA, 78 bp, Homo sapiens
acatagggcagcagcaccacctcgacttctgcccccattgcccacttgctatgggcctctcaaagtgggaggcacaaa

SEQ ID NO: 40776 - DNA, 74 bp, Homo sapiens
accacctcgacttctgcccccattgcccacttgctatgggcctctcaaagtgggaggcacaaaccccagctgtg

SEQ ID NO: 40777 - DNA, 76 bp, Homo sapiens
acttctgcccccattgcccacttgctatgggcctctcaaagtgggaggcacaaaccccagctgtggtcatcctgag

SEQ ID NO: 40778 - DNA, 78 bp, Homo sapiens
ccattgcccacttgctatgggcctctcaaagtgggaggcacaaaccccagctgtggtcatcctgaggtgggcaggcta

SEQ ID NO: 40779 - DNA, 75 bp, Homo sapiens
acttgctatgggcctctcaaagtgggaggcacaaaccccagctgtggtcatcctgaggtgggcaggctaggaggg

SEQ ID NO: 40780 - DNA, 73 bp, Homo sapiens
cctctcaaagtgggaggcacaaaccccagctgtggtcatcctgaggtgggcaggctaggagggggtcctgcct

SEQ ID NO: 40781 - DNA, 72 bp, Homo sapiens
aaagtgggaggcacaaaccccagctgtggtcatcctgaggtgggcaggctaggagggggtcctgccttgtac

SEQ ID NO: 40782 - DNA, 70 bp, Homo sapiens
aaaccccagctgtggtcatcctgaggtgggcaggctaggagggggtcctgccttgtaccctcctcccgaa

SEQ ID NO: 40783 - DNA, 73 bp, Homo sapiens
tgtggtcatcctgaggtgggcaggctaggagggggtcctgccttgtaccctcctcccgaaggacaggtatgta

SEQ ID NO: 40784 - DNA, 68 bp, Homo sapiens
caggctaggagggggtcctgccttgtaccctcctcccgaaggacaggtatgtaaccccctggactctc

SEQ ID NO: 40785 - DNA, 73 bp, Homo sapiens
taccctcctcccgaaggacaggtatgtaaccccctggactctcttgatcttgacaacactcagctggactttg

SEQ ID NO: 40786 - DNA, 78 bp, Homo sapiens
aaggacaggtatgtaaccccctggactctcttgatcttgacaacactcagctggactttgtggctattctggatgagc

SEQ ID NO: 40787 - DNA, 77 bp, Homo sapiens
ggtatgtaaccccctggactctcttgatcttgacaacactcagctggactttgtggctattctggatgagccccagg

SEQ ID NO: 40788 - DNA, 80 bp, Homo sapiens
tggactctcttgatcttgacaacactcagctggactttgtggctattctggatgagccccaggggctgagtcctcctcct

SEQ ID NO: 40789 - DNA, 82 bp, Homo sapiens
ttgatcttgacaacactcagctggactttgtggctattctggatgagccccaggggctgagtcctcctccttcccatgatca

SEQ ID NO: 40790 - DNA, 78 bp, Homo sapiens
acaacactcagctggactttgtggctattctggatgagccccaggggctgagtcctcctccttcccatgatcagcggg

SEQ ID NO: 40791 - DNA, 80 bp, Homo sapiens
ttgtggctattctggatgagccccaggggctgagtcctcctccttcccatgatcagcggggcagctctggacatacccca

SEQ ID NO: 40792 - DNA, 78 bp, Homo sapiens
tctggatgagccccaggggctgagtcctcctccttcccatgatcagcggggcagctctggacataccccacctccctc

SEQ ID NO: 40793 - DNA, 74 bp, Homo sapiens
cccaggggctgagtcctcctccttcccatgatcagcggggcagctctggacataccccacctccctctgggccc

SEQ ID NO: 40794 - DNA, 78 bp, Homo sapiens
cttcccatgatcagcggggcagctctggacataccccacctccctctgggccccccaacatggctgtgggcaacatga

SEQ ID NO: 40795 - DNA, 77 bp, Homo sapiens
atcagcggggcagctctggacataccccacctccctctgggccccccaacatggctgtgggcaacatgagtgtctta

SEQ ID NO: 40796 - DNA, 76 bp, Homo sapiens
ctctggacataccccacctccctctgggccccccaacatggctgtgggcaacatgagtgtcttactgagatcccta

SEQ ID NO: 40797 - DNA, 74 bp, Homo sapiens
acataccccacctccctctgggccccccaacatggctgtgggcaacatgagtgtcttactgagatccctacctg

SEQ ID NO: 40798 - DNA, 74 bp, Homo sapiens
tccctctgggccccccaacatggctgtgggcaacatgagtgtcttactgagatccctacctggggaaacagaat

SEQ ID NO: 40799 - DNA, 77 bp, Homo sapiens
cccaacatggctgtgggcaacatgagtgtcttactgagatccctacctggggaaacagaattcctcaactctagtgc

SEQ ID NO: 40800 - DNA, 76 bp, Homo sapiens
atggctgtgggcaacatgagtgtcttactgagatccctacctggggaaacagaattcctcaactctagtgcctaaa

SEQ ID NO: 40801 - DNA, 73 bp, Homo sapiens
aacatgagtgtcttactgagatccctacctggggaaacagaattcctcaactctagtgcctaaagagtaggga

SEQ ID NO: 40802 - DNA, 76 bp, Homo sapiens
tcttactgagatccctacctggggaaacagaattcctcaactctagtgcctaaagagtagggaatctcatccatca

SEQ ID NO: 40803 - DNA, 76 bp, Homo sapiens
tccctacctggggaaacagaattcctcaactctagtgcctaaagagtagggaatctcatccatcacagatcgcatt

SEQ ID NO: 40804 - DNA, 75 bp, Homo sapiens
gggaaacagaattcctcaactctagtgcctaaagagtagggaatctcatccatcacagatcgcatttcctaaggg

SEQ ID NO: 40805 - DNA, 75 bp, Homo sapiens
aattcctcaactctagtgcctaaagagtagggaatctcatccatcacagatcgcatttcctaaggggtttctatc

SEQ ID NO: 40806 - DNA, 75 bp, Homo sapiens
aactctagtgcctaaagagtagggaatctcatccatcacagatcgcatttcctaaggggtttctatccttccaga

SEQ ID NO: 40807 - DNA, 72 bp, Homo sapiens
cctaaagagtagggaatctcatccatcacagatcgcatttcctaaggggtttctatccttccagaaaaattg

SEQ ID NO: 40808 - DNA, 75 bp, Homo sapiens
tagggaatctcatccatcacagatcgcatttcctaaggggtttctatccttccagaaaaattgggggagctgcag

SEQ ID NO: 40809 - DNA, 76 bp, Homo sapiens
atccatcacagatcgcatttcctaaggggtttctatccttccagaaaaattgggggagctgcagtcccatgcacaa

SEQ ID NO: 40810 - DNA, 74 bp, Homo sapiens
agatcgcatttcctaaggggtttctatccttccagaaaaattgggggagctgcagtcccatgcacaagatgccc

SEQ ID NO: 40811 - DNA, 73 bp, Homo sapiens
tcctaaggggtttctatccttccagaaaaattgggggagctgcagtcccatgcacaagatgccccagggatgg

SEQ ID NO: 40812 - DNA, 76 bp, Homo sapiens
tttctatccttccagaaaaattgggggagctgcagtcccatgcacaagatgccccagggatgggaggtatgggctg

SEQ ID NO: 40813 - DNA, 77 bp, Homo sapiens
tcccatgcacaagatgccccagggatgggaggtatgggctgggggctatgtatagtctgtatacgttttgaggagaa

SEQ ID NO: 40814 - DNA, 72 bp, Homo sapiens
acaagatgccccagggatgggaggtatgggctgggggctatgtatagtctgtatacgttttgaggagaaatt

SEQ ID NO: 40815 - DNA, 74 bp, Homo sapiens
agggatgggaggtatgggctgggggctatgtatagtctgtatacgttttgaggagaaatttgataatgacactg

SEQ ID NO: 40816 - DNA, 74 bp, Homo sapiens
tgggggctatgtatagtctgtatacgttttgaggagaaatttgataatgacactgtttcctgataataaaggaa

SEQ ID NO: 40817 - DNA, 78 bp, Homo sapiens
ctatgtatagtctgtatacgttttgaggagaaatttgataatgacactgtttcctgataataaaggaactgcatcaga

SEQ ID NO: 40818 - DNA, 75 bp, Homo sapiens
tctgtatacgttttgaggagaaatttgataatgacactgtttcctgataataaaggaactgcatcagaaaaaata

SEQ ID NO: 40819 - DNA, 76 bp, Homo sapiens
gaggagaaatttgataatgacactgtttcctgataataaaggaactgcatcagaaaaaataccatgccactttatg

SEQ ID NO: 40820 - DNA, 78 bp, Homo sapiens
tgataatgacactgtttcctgataataaaggaactgcatcagaaaaaataccatgccactttatgtattattatgttg

SEQ ID NO: 40821 - DNA, 75 bp, Homo sapiens
atgacactgtttcctgataataaaggaactgcatcagaaaaaataccatgccactttatgtattattatgttggg

SEQ ID NO: 40822 - DNA, 87 bp, Homo sapiens
gggtgtcagattgagtgctctgtgcgcatgtgcgaaggtgtccaaactgacaatgctggggagatgaagatagtgtgtggctgcttc

SEQ ID NO: 40823 - DNA, 87 bp, Homo sapiens
attgagtgctctgtgcgcatgtgcgaaggtgtccaaactgacaatgctggggagatgaagatagtgtgtggctgcttctggactcaa

SEQ ID NO: 40824 - DNA, 85 bp, Homo sapiens
ctctgtgcgcatgtgcgaaggtgtccaaactgacaatgctggggagatgaagatagtgtgtggctgcttctggactcaaggagga

SEQ ID NO: 40825 - DNA, 82 bp, Homo sapiens
atgtgcgaaggtgtccaaactgacaatgctggggagatgaagatagtgtgtggctgcttctggactcaaggaggaggagaga

SEQ ID NO: 40826 - DNA, 80 bp, Homo sapiens
aggtgtccaaactgacaatgctggggagatgaagatagtgtgtggctgcttctggactcaaggaggaggagagagattcc

SEQ ID NO: 40827 - DNA, 82 bp, Homo sapiens
actgacaatgctggggagatgaagatagtgtgtggctgcttctggactcaaggaggaggagagagattccgcgagccgacac

SEQ ID NO: 40828 - DNA, 84 bp, Homo sapiens
gagatgaagatagtgtgtggctgcttctggactcaaggaggaggagagagattccgcgagccgacaccatgcgatccaaggcga

SEQ ID NO: 40829 - DNA, 80 bp, Homo sapiens
aagatagtgtgtggctgcttctggactcaaggaggaggagagagattccgcgagccgacaccatgcgatccaaggcgagg

SEQ ID NO: 40830 - DNA, 81 bp, Homo sapiens
tggctgcttctggactcaaggaggaggagagagattccgcgagccgacaccatgcgatccaaggcgagggcgaggaagcta

SEQ ID NO: 40831 - DNA, 76 bp, Homo sapiens
actcaaggaggaggagagagattccgcgagccgacaccatgcgatccaaggcgagggcgaggaagctagccaaaag

SEQ ID NO: 40832 - DNA, 76 bp, Homo sapiens
aggaggagagagattccgcgagccgacaccatgcgatccaaggcgagggcgaggaagctagccaaaagtaagtctc

SEQ ID NO: 40833 - DNA, 76 bp, Homo sapiens
agagattccgcgagccgacaccatgcgatccaaggcgagggcgaggaagctagccaaaagtaagtctcccgcgctc

SEQ ID NO: 40834 - DNA, 75 bp, Homo sapiens
agccgacaccatgcgatccaaggcgagggcgaggaagctagccaaaagtaagtctcccgcgctcggccgcgccgc

SEQ ID NO: 40835 - DNA, 74 bp, Homo sapiens
accatgcgatccaaggcgagggcgaggaagctagccaaaagtaagtctcccgcgctcggccgcgccgcgccgcc

SEQ ID NO: 40836 - DNA, 76 bp, Homo sapiens
acgtgctgcagaggttgacgctgcgttgtctcctttaggtgacggtgacgttgtaaataatatgtatgagcccaac

SEQ ID NO: 40837 - DNA, 72 bp, Homo sapiens
agaggttgacgctgcgttgtctcctttaggtgacggtgacgttgtaaataatatgtatgagcccaaccggga

SEQ ID NO: 40838 - DNA, 73 bp, Homo sapiens
acgctgcgttgtctcctttaggtgacggtgacgttgtaaataatatgtatgagcccaaccgggacctgctggc

SEQ ID NO: 40839 - DNA, 75 bp, Homo sapiens
tctcctttaggtgacggtgacgttgtaaataatatgtatgagcccaaccgggacctgctggccagccacagcgcg

SEQ ID NO: 40840 - DNA, 75 bp, Homo sapiens
ggtgacggtgacgttgtaaataatatgtatgagcccaaccgggacctgctggccagccacagcgcggaggacgag

SEQ ID NO: 40841 - DNA, 75 bp, Homo sapiens
acgttgtaaataatatgtatgagcccaaccgggacctgctggccagccacagcgcggaggacgaggccgaggaca

SEQ ID NO: 40842 - DNA, 80 bp, Homo sapiens
taatatgtatgagcccaaccgggacctgctggccagccacagcgcggaggacgaggccgaggacagtgccatgtcgccca

SEQ ID NO: 40843 - DNA, 75 bp, Homo sapiens
caaccgggacctgctggccagccacagcgcggaggacgaggccgaggacagtgccatgtcgcccatccccgtggg

SEQ ID NO: 40844 - DNA, 76 bp, Homo sapiens
acctgctggccagccacagcgcggaggacgaggccgaggacagtgccatgtcgcccatccccgtggggccaccgtc

SEQ ID NO: 40845 - DNA, 72 bp, Homo sapiens
agccacagcgcggaggacgaggccgaggacagtgccatgtcgcccatccccgtggggccaccgtcccccttc

SEQ ID NO: 40846 - DNA, 70 bp, Homo sapiens
agcgcggaggacgaggccgaggacagtgccatgtcgcccatccccgtggggccaccgtcccccttcccca

SEQ ID NO: 40847 - DNA, 71 bp, Homo sapiens
ggccgaggacagtgccatgtcgcccatccccgtggggccaccgtcccccttccccaccagcgaggacttca

SEQ ID NO: 40848 - DNA, 66 bp, Homo sapiens
atgtcgcccatccccgtggggccaccgtcccccttccccaccagcgaggacttcacccccaaggag

SEQ ID NO: 40849 - DNA, 66 bp, Homo sapiens
gtggggccaccgtcccccttccccaccagcgaggacttcacccccaaggagggctcgccgtacgag

SEQ ID NO: 40850 - DNA, 67 bp, Homo sapiens
cgtcccccttccccaccagcgaggacttcacccccaaggagggctcgccgtacgaggcccctgtcta

SEQ ID NO: 40851 - DNA, 71 bp, Homo sapiens
ttccccaccagcgaggacttcacccccaaggagggctcgccgtacgaggcccctgtctacattcctgaaga

SEQ ID NO: 40852 - DNA, 72 bp, Homo sapiens
gaggacttcacccccaaggagggctcgccgtacgaggcccctgtctacattcctgaagacattccgatccca

SEQ ID NO: 40853 - DNA, 72 bp, Homo sapiens
acccccaaggagggctcgccgtacgaggcccctgtctacattcctgaagacattccgatcccagcagacttc

SEQ ID NO: 40854 - DNA, 75 bp, Homo sapiens
aaggagggctcgccgtacgaggcccctgtctacattcctgaagacattccgatcccagcagacttcgagctccga

SEQ ID NO: 40855 - DNA, 76 bp, Homo sapiens
ccgtacgaggcccctgtctacattcctgaagacattccgatcccagcagacttcgagctccgagagtcctccatcc

SEQ ID NO: 40856 - DNA, 77 bp, Homo sapiens
ccctgtctacattcctgaagacattccgatcccagcagacttcgagctccgagagtcctccatcccaggggctggcc

SEQ ID NO: 40857 - DNA, 76 bp, Homo sapiens
tacattcctgaagacattccgatcccagcagacttcgagctccgagagtcctccatcccaggggctggcctggggg

SEQ ID NO: 40858 - DNA, 75 bp, Homo sapiens
aagacattccgatcccagcagacttcgagctccgagagtcctccatcccaggggctggcctgggggtctgggcca

SEQ ID NO: 40859 - DNA, 75 bp, Homo sapiens
atcccagcagacttcgagctccgagagtcctccatcccaggggctggcctgggggtctgggccaagaggaagatg

SEQ ID NO: 40860 - DNA, 72 bp, Homo sapiens
acttcgagctccgagagtcctccatcccaggggctggcctgggggtctgggccaagaggaagatggaagccg

SEQ ID NO: 40861 - DNA, 70 bp, Homo sapiens
ctccatcccaggggctggcctgggggtctgggccaagaggaagatggaagccggggagaggctgggcccc

SEQ ID NO: 40862 - DNA, 71 bp, Homo sapiens
ctggcctgggggtctgggccaagaggaagatggaagccggggagaggctgggcccctgcgtggtggtgccc

SEQ ID NO: 40863 - DNA, 72 bp, Homo sapiens
gtctgggccaagaggaagatggaagccggggagaggctgggcccctgcgtggtggtgccccgggcggcggca

SEQ ID NO: 40864 - DNA, 71 bp, Homo sapiens
agaggaagatggaagccggggagaggctgggcccctgcgtggtggtgccccgggcggcggcaaaggagaca

SEQ ID NO: 40865 - DNA, 70 bp, Homo sapiens
aagatggaagccggggagaggctgggcccctgcgtggtggtgccccgggcggcggcaaaggagacagact

SEQ ID NO: 40866 - DNA, 74 bp, Homo sapiens
gagaggctgggcccctgcgtggtggtgccccgggcggcggcaaaggagacagacttcggatgggaggtgagcga

SEQ ID NO: 40867 - DNA, 79 bp, Homo sapiens
gtggtggtgccccgggcggcggcaaaggagacagacttcggatgggaggtgagcgatcgcgcctgagtatgattgatca

SEQ ID NO: 40868 - DNA, 69 bp, Homo sapiens
aggggcggcgccgcgagggcggctcctggcggcgggactgtggctgtggccccgggagagccgggtggg

SEQ ID NO: 40869 - DNA, 72 bp, Homo sapiens
agggcggctcctggcggcgggactgtggctgtggccccgggagagccgggtggggcctcgggatgcagccgc

SEQ ID NO: 40870 - DNA, 72 bp, Homo sapiens
ctcctggcggcgggactgtggctgtggccccgggagagccgggtggggcctcgggatgcagccgccggtgcc

SEQ ID NO: 40871 - DNA, 69 bp, Homo sapiens
cgggactgtggctgtggccccgggagagccgggtggggcctcgggatgcagccgccggtgcccgggccc

SEQ ID NO: 40872 - DNA, 68 bp, Homo sapiens
cccgggagagccgggtggggcctcgggatgcagccgccggtgcccgggcccctgggcctgctggaccc

SEQ ID NO: 40873 - DNA, 71 bp, Homo sapiens
ggtggggcctcgggatgcagccgccggtgcccgggcccctgggcctgctggaccccgcaggtgagcgcggg

SEQ ID NO: 40874 - DNA, 71 bp, Homo sapiens
cctcgggatgcagccgccggtgcccgggcccctgggcctgctggaccccgcaggtgagcgcggggctgggg

SEQ ID NO: 40875 - DNA, 70 bp, Homo sapiens
agccgccggtgcccgggcccctgggcctgctggaccccgcaggtgagcgcggggctgggggctcgtctcg

SEQ ID NO: 40876 - DNA, 72 bp, Homo sapiens
tgcccgggcccctgggcctgctggaccccgcaggtgagcgcggggctgggggctcgtctcggctcctgcggg

SEQ ID NO: 40877 - DNA, 72 bp, Homo sapiens
cctgggcctgctggaccccgcaggtgagcgcggggctgggggctcgtctcggctcctgcgggggagcgtggg

SEQ ID NO: 40878 - DNA, 69 bp, Homo sapiens
ctggaccccgcaggtgagcgcggggctgggggctcgtctcggctcctgcgggggagcgtggggaccccg

SEQ ID NO: 40879 - DNA, 69 bp, Homo sapiens
ggtgagcgcggggctgggggctcgtctcggctcctgcgggggagcgtggggaccccggggctgggacta

SEQ ID NO: 40880 - DNA, 67 bp, Homo sapiens
ggactacaggtccccggccggcccgggcggaacctgcgcggagacgcggcacggggtctggtccctc

SEQ ID NO: 40881 - DNA, 67 bp, Homo sapiens
tccccggccggcccgggcggaacctgcgcggagacgcggcacggggtctggtccctccgcctccttc

SEQ ID NO: 40882 - DNA, 71 bp, Homo sapiens
gcccgggcggaacctgcgcggagacgcggcacggggtctggtccctccgcctccttcgagctctgtctttg

SEQ ID NO: 40883 - DNA, 73 bp, Homo sapiens
aacctgcgcggagacgcggcacggggtctggtccctccgcctccttcgagctctgtctttggaacactttgca

SEQ ID NO: 40884 - DNA, 74 bp, Homo sapiens
gagacgcggcacggggtctggtccctccgcctccttcgagctctgtctttggaacactttgcatttcgcactgg

SEQ ID NO: 40885 - DNA, 70 bp, Homo sapiens
acggggtctggtccctccgcctccttcgagctctgtctttggaacactttgcatttcgcactggggtcgg

SEQ ID NO: 40886 - DNA, 72 bp, Homo sapiens
gtccctccgcctccttcgagctctgtctttggaacactttgcatttcgcactggggtcgggcgttcgtccta

SEQ ID NO: 40887 - DNA, 70 bp, Homo sapiens
ctccttcgagctctgtctttggaacactttgcatttcgcactggggtcgggcgttcgtcctaccggttcg

SEQ ID NO: 40888 - DNA, 71 bp, Homo sapiens
agctctgtctttggaacactttgcatttcgcactggggtcgggcgttcgtcctaccggttcgttcattcat

SEQ ID NO: 40889 - DNA, 72 bp, Homo sapiens
tctttggaacactttgcatttcgcactggggtcgggcgttcgtcctaccggttcgttcattcattctctctc

SEQ ID NO: 40890 - DNA, 72 bp, Homo sapiens
actttgcatttcgcactggggtcgggcgttcgtcctaccggttcgttcattcattctctctccctgtctctc

SEQ ID NO: 40891 - DNA, 81 bp, Homo sapiens
tctctgtctctctcgctctttctgtctctgcctcctcagtctttgcctttctctgactctgtgtccgttcctcttggcctc

SEQ ID NO: 40892 - DNA, 80 bp, Homo sapiens
tctctcgctctttctgtctctgcctcctcagtctttgcctttctctgactctgtgtccgttcctcttggcctctctctcc

SEQ ID NO: 40893 - DNA, 78 bp, Homo sapiens
tctttctgtctctgcctcctcagtctttgcctttctctgactctgtgtccgttcctcttggcctctctctccctgtta

SEQ ID NO: 40894 - DNA, 73 bp, Homo sapiens
ctcctcagtctttgcctttctctgactctgtgtccgttcctcttggcctctctctccctgttacgttttatta

SEQ ID NO: 40895 - DNA, 73 bp, Homo sapiens
tttgcctttctctgactctgtgtccgttcctcttggcctctctctccctgttacgttttattatgaggaacag

SEQ ID NO: 40896 - DNA, 73 bp, Homo sapiens
tttctctgactctgtgtccgttcctcttggcctctctctccctgttacgttttattatgaggaacaggcgccc

SEQ ID NO: 40897 - DNA, 72 bp, Homo sapiens
ctctgtgtccgttcctcttggcctctctctccctgttacgttttattatgaggaacaggcgccccaaagtgc

SEQ ID NO: 40898 - DNA, 71 bp, Homo sapiens
ttcctcttggcctctctctccctgttacgttttattatgaggaacaggcgccccaaagtgcgctccttccc

SEQ ID NO: 40899 - DNA, 70 bp, Homo sapiens
tctctccctgttacgttttattatgaggaacaggcgccccaaagtgcgctccttccccatctcttccgtt

SEQ ID NO: 40900 - DNA, 68 bp, Homo sapiens
aggaacaggcgccccaaagtgcgctccttccccatctcttccgtttattccaacctacaccattttcc

SEQ ID NO: 40901 - DNA, 65 bp, Homo sapiens
aaagtgcgctccttccccatctcttccgtttattccaacctacaccattttccgggaaaacttcg

SEQ ID NO: 40902 - DNA, 64 bp, Homo sapiens
ccttccccatctcttccgtttattccaacctacaccattttccgggaaaacttcgtttggaaga

SEQ ID NO: 40903 - DNA, 66 bp, Homo sapiens
ccatctcttccgtttattccaacctacaccattttccgggaaaacttcgtttggaagagcgaggta

SEQ ID NO: 40904 - DNA, 64 bp, Homo sapiens
cgtttattccaacctacaccattttccgggaaaacttcgtttggaagagcgaggtagccttttc

SEQ ID NO: 40905 - DNA, 64 bp, Homo sapiens
aacctacaccattttccgggaaaacttcgtttggaagagcgaggtagccttttcctgtttgaac

SEQ ID NO: 40906 - DNA, 69 bp, Homo sapiens
attttccgggaaaacttcgtttggaagagcgaggtagccttttcctgtttgaacgtgcagaggcgctca

SEQ ID NO: 40907 - DNA, 72 bp, Homo sapiens
aaaacttcgtttggaagagcgaggtagccttttcctgtttgaacgtgcagaggcgctcacagaactggacag

SEQ ID NO: 40908 - DNA, 75 bp, Homo sapiens
tttggaagagcgaggtagccttttcctgtttgaacgtgcagaggcgctcacagaactggacagtgttgcttggtt

SEQ ID NO: 40909 - DNA, 74 bp, Homo sapiens
aggtagccttttcctgtttgaacgtgcagaggcgctcacagaactggacagtgttgcttggtttcggctcgccc

SEQ ID NO: 40910 - DNA, 76 bp, Homo sapiens
ttcctgtttgaacgtgcagaggcgctcacagaactggacagtgttgcttggtttcggctcgcccctctctcgtgtt

SEQ ID NO: 40911 - DNA, 74 bp, Homo sapiens
aacgtgcagaggcgctcacagaactggacagtgttgcttggtttcggctcgcccctctctcgtgtttctccccg

SEQ ID NO: 40912 - DNA, 71 bp, Homo sapiens
aactggacagtgttgcttggtttcggctcgcccctctctcgtgtttctccccggtgtgttcacggaatctc

SEQ ID NO: 40913 - DNA, 70 bp, Homo sapiens
agtgttgcttggtttcggctcgcccctctctcgtgtttctccccggtgtgttcacggaatctccaattct

SEQ ID NO: 40914 - DNA, 73 bp, Homo sapiens
cctctctcgtgtttctccccggtgtgttcacggaatctccaattcttccacttcccagaccaagcccgctgca

SEQ ID NO: 40915 - DNA, 73 bp, Homo sapiens
ctcgtgtttctccccggtgtgttcacggaatctccaattcttccacttcccagaccaagcccgctgcagcctc

SEQ ID NO: 40916 - DNA, 74 bp, Homo sapiens
ccggtgtgttcacggaatctccaattcttccacttcccagaccaagcccgctgcagcctcggagccaggcaaag

SEQ ID NO: 40917 - DNA, 75 bp, Homo sapiens
ttcacggaatctccaattcttccacttcccagaccaagcccgctgcagcctcggagccaggcaaaggctgggaaa

SEQ ID NO: 40918 - DNA, 71 bp, Homo sapiens
aattcttccacttcccagaccaagcccgctgcagcctcggagccaggcaaaggctgggaaaacaggaaacc

SEQ ID NO: 40919 - DNA, 72 bp, Homo sapiens
acttcccagaccaagcccgctgcagcctcggagccaggcaaaggctgggaaaacaggaaacctgttgcgtgt

SEQ ID NO: 40920 - DNA, 75 bp, Homo sapiens
caagcccgctgcagcctcggagccaggcaaaggctgggaaaacaggaaacctgttgcgtgttcaccagttcgcaa

SEQ ID NO: 40921 - DNA, 75 bp, Homo sapiens
tgcagcctcggagccaggcaaaggctgggaaaacaggaaacctgttgcgtgttcaccagttcgcaagccgggctc

SEQ ID NO: 40922 - DNA, 71 bp, Homo sapiens
ctcggagccaggcaaaggctgggaaaacaggaaacctgttgcgtgttcaccagttcgcaagccgggctcgg

SEQ ID NO: 40923 - DNA, 69 bp, Homo sapiens
aaaggctgggaaaacaggaaacctgttgcgtgttcaccagttcgcaagccgggctcgggggctctgccg

SEQ ID NO: 40924 - DNA, 70 bp, Homo sapiens
aaaacaggaaacctgttgcgtgttcaccagttcgcaagccgggctcgggggctctgccgggaagtggcca

SEQ ID NO: 40925 - DNA, 71 bp, Homo sapiens
aaacctgttgcgtgttcaccagttcgcaagccgggctcgggggctctgccgggaagtggccaggactggaa

SEQ ID NO: 40926 - DNA, 72 bp, Homo sapiens
agttcgcaagccgggctcgggggctctgccgggaagtggccaggactggaaggatgccgggtgtcttcctga

SEQ ID NO: 40927 - DNA, 70 bp, Homo sapiens
ccgggctcgggggctctgccgggaagtggccaggactggaaggatgccgggtgtcttcctgagggggaga

SEQ ID NO: 40928 - DNA, 75 bp, Homo sapiens
tctgccgggaagtggccaggactggaaggatgccgggtgtcttcctgagggggagagggctgggcagatttcaga

SEQ ID NO: 40929 - DNA, 72 bp, Homo sapiens
aggactggaaggatgccgggtgtcttcctgagggggagagggctgggcagatttcagaacaaaagagaaaca

SEQ ID NO: 40930 - DNA, 72 bp, Homo sapiens
atgccgggtgtcttcctgagggggagagggctgggcagatttcagaacaaaagagaaacagagttccctaga

SEQ ID NO: 40931 - DNA, 72 bp, Homo sapiens
gtgtcttcctgagggggagagggctgggcagatttcagaacaaaagagaaacagagttccctagaaagtgaa

SEQ ID NO: 40932 - DNA, 73 bp, Homo sapiens
gggagagggctgggcagatttcagaacaaaagagaaacagagttccctagaaagtgaagccctgacggctgga

SEQ ID NO: 40933 - DNA, 72 bp, Homo sapiens
agggctgggcagatttcagaacaaaagagaaacagagttccctagaaagtgaagccctgacggctggaggga

SEQ ID NO: 40934 - DNA, 70 bp, Homo sapiens
aaaagagaaacagagttccctagaaagtgaagccctgacggctggagggagggatggagtggtgtctagg

SEQ ID NO: 40935 - DNA, 72 bp, Homo sapiens
aacagagttccctagaaagtgaagccctgacggctggagggagggatggagtggtgtctagggggctctgcc

SEQ ID NO: 40936 - DNA, 73 bp, Homo sapiens
aaagtgaagccctgacggctggagggagggatggagtggtgtctagggggctctgccgctccctcagaaataa

SEQ ID NO: 40937 - DNA, 74 bp, Homo sapiens
cctgacggctggagggagggatggagtggtgtctagggggctctgccgctccctcagaaataatccaacacaaa

SEQ ID NO: 40938 - DNA, 72 bp, Homo sapiens
ggagggagggatggagtggtgtctagggggctctgccgctccctcagaaataatccaacacaaacttctggg

SEQ ID NO: 40939 - DNA, 66 bp, Homo sapiens
gggattaacctcacaacccttttactgcggcatcgttcggaaccggacgaattactgttacttaaa

SEQ ID NO: 40940 - DNA, 68 bp, Homo sapiens
taacctcacaacccttttactgcggcatcgttcggaaccggacgaattactgttacttaaaataatca

SEQ ID NO: 40941 - DNA, 69 bp, Homo sapiens
tgcggcatcgttcggaaccggacgaattactgttacttaaaataatcaaataatttggcttctttctaa

SEQ ID NO: 40942 - DNA, 65 bp, Homo sapiens
tcggaaccggacgaattactgttacttaaaataatcaaataatttggcttctttctaaaagaaac

SEQ ID NO: 40943 - DNA, 69 bp, Homo sapiens
gaattactgttacttaaaataatcaaataatttggcttctttctaaaagaaaccactatatgccttcca

SEQ ID NO: 40944 - DNA, 69 bp, Homo sapiens
cttaaaataatcaaataatttggcttctttctaaaagaaaccactatatgccttccaatctaaagcaaa

SEQ ID NO: 40945 - DNA, 74 bp, Homo sapiens
tcaaataatttggcttctttctaaaagaaaccactatatgccttccaatctaaagcaaaatgctctatggtcaa

SEQ ID NO: 40946 - DNA, 75 bp, Homo sapiens
tggcttctttctaaaagaaaccactatatgccttccaatctaaagcaaaatgctctatggtcaaatgtattaatg

SEQ ID NO: 40947 - DNA, 75 bp, Homo sapiens
ctaaaagaaaccactatatgccttccaatctaaagcaaaatgctctatggtcaaatgtattaatgtggattagtc

SEQ ID NO: 40948 - DNA, 76 bp, Homo sapiens
aaaccactatatgccttccaatctaaagcaaaatgctctatggtcaaatgtattaatgtggattagtctattggtg

SEQ ID NO: 40949 - DNA, 77 bp, Homo sapiens
atgccttccaatctaaagcaaaatgctctatggtcaaatgtattaatgtggattagtctattggtgtttaataatga

SEQ ID NO: 40950 - DNA, 76 bp, Homo sapiens
caatctaaagcaaaatgctctatggtcaaatgtattaatgtggattagtctattggtgtttaataatgataactat

SEQ ID NO: 40951 - DNA, 75 bp, Homo sapiens
caaaatgctctatggtcaaatgtattaatgtggattagtctattggtgtttaataatgataactattattattat

SEQ ID NO: 40952 - DNA, 72 bp, Homo sapiens
ttattattatttattaactagttttatcattattagaatgccttaatgtttaaaaatagcatctgacttaga

SEQ ID NO: 40953 - DNA, 73 bp, Homo sapiens
ttattaactagttttatcattattagaatgccttaatgtttaaaaatagcatctgacttagattttcttctga

SEQ ID NO: 40954 - DNA, 72 bp, Homo sapiens
gttttatcattattagaatgccttaatgtttaaaaatagcatctgacttagattttcttctgacaaagaact

SEQ ID NO: 40955 - DNA, 70 bp, Homo sapiens
tattagaatgccttaatgtttaaaaatagcatctgacttagattttcttctgacaaagaactttaaacct

SEQ ID NO: 40956 - DNA, 69 bp, Homo sapiens
gaatgccttaatgtttaaaaatagcatctgacttagattttcttctgacaaagaactttaaaccttaaa

SEQ ID NO: 40957 - DNA, 70 bp, Homo sapiens
taaaaatagcatctgacttagattttcttctgacaaagaactttaaaccttaaaacaatacttggagctg

SEQ ID NO: 40958 - DNA, 69 bp, Homo sapiens
gcatctgacttagattttcttctgacaaagaactttaaaccttaaaacaatacttggagctggtctttt

SEQ ID NO: 40959 - DNA, 68 bp, Homo sapiens
agattttcttctgacaaagaactttaaaccttaaaacaatacttggagctggtctttttagtatatga

SEQ ID NO: 40960 - DNA, 68 bp, Homo sapiens
ctttaaaccttaaaacaatacttggagctggtctttttagtatatgaaacattggtgtatctgggtag

SEQ ID NO: 40961 - DNA, 71 bp, Homo sapiens
taaaacaatacttggagctggtctttttagtatatgaaacattggtgtatctgggtaggattatgggtctt

SEQ ID NO: 40962 - DNA, 70 bp, Homo sapiens
gtctttttagtatatgaaacattggtgtatctgggtaggattatgggtctttttgtttggagctggtctt

SEQ ID NO: 40963 - DNA, 70 bp, Homo sapiens
gtatatgaaacattggtgtatctgggtaggattatgggtctttttgtttggagctggtcttttactaaaa

SEQ ID NO: 40964 - DNA, 70 bp, Homo sapiens
gaaacattggtgtatctgggtaggattatgggtctttttgtttggagctggtcttttactaaaatgtata

SEQ ID NO: 40965 - DNA, 71 bp, Homo sapiens
tgtatctgggtaggattatgggtctttttgtttggagctggtcttttactaaaatgtataaagcattggtg

SEQ ID NO: 40966 - DNA, 71 bp, Homo sapiens
ttttactaaaatgtataaagcattggtgtgtctggggttggattatggtctttctgctttggtgtgtcggg

SEQ ID NO: 40967 - DNA, 72 bp, Homo sapiens
aaaatgtataaagcattggtgtgtctggggttggattatggtctttctgctttggtgtgtcggggtggatta

SEQ ID NO: 40968 - DNA, 72 bp, Homo sapiens
attggtgtgtctggggttggattatggtctttctgctttggtgtgtcggggtggattatggtctttctgctt

SEQ ID NO: 40969 - DNA, 72 bp, Homo sapiens
tgtctggggttggattatggtctttctgctttggtgtgtcggggtggattatggtctttctgctttggggta

SEQ ID NO: 40970 - DNA, 71 bp, Homo sapiens
ttggattatggtctttctgctttggtgtgtcggggtggattatggtctttctgctttggggtatctggggg

SEQ ID NO: 40971 - DNA, 70 bp, Homo sapiens
tctgctttggtgtgtcggggtggattatggtctttctgctttggggtatctgggggtgggttatggtctt

SEQ ID NO: 40972 - DNA, 69 bp, Homo sapiens
ttctgctttggggtatctgggggtgggttatggtctttctgctttggggtatctgggggtggattatgg

SEQ ID NO: 40973 - DNA, 68 bp, Homo sapiens
gctttggtgtgtctgggggtggattatggtctttctgctttggggtatcgggggtgggttatggtctt

SEQ ID NO: 40974 - DNA, 69 bp, Homo sapiens
gtgtgtctgggggtggattatggtctttctgctttggggtatcgggggtgggttatggtctttctgctt

SEQ ID NO: 40975 - DNA, 69 bp, Homo sapiens
ggtggattatggtctttctgctttggggtatcgggggtgggttatggtctttctgctttggggtatctg

SEQ ID NO: 40976 - DNA, 67 bp, Homo sapiens
gtctttctgctttggggtatcgggggtgggttatggtctttctgctttggggtatctgggggtggat

SEQ ID NO: 40977 - DNA, 66 bp, Homo sapiens
tttggggtatcgggggtgggttatggtctttctgctttggggtatctgggggtggattatggtctt

SEQ ID NO: 40978 - DNA, 72 bp, Homo sapiens
tctgctttggtgtgcctgggggtggattatggtctttctgctttggtgtgtctgggggtgggttatggtctt

SEQ ID NO: 40979 - DNA, 72 bp, Homo sapiens
ttggtgtgcctgggggtggattatggtctttctgctttggtgtgtctgggggtgggttatggtctttctgct

SEQ ID NO: 40980 - DNA, 73 bp, Homo sapiens
gggtggattatggtctttctgctttggtgtgtctgggggtgggttatggtctttctgctttggtgtgtctgga

SEQ ID NO: 40981 - DNA, 73 bp, Homo sapiens
ttatggtctttctgctttggtgtgtctgggggtgggttatggtctttctgctttggtgtgtctggaggtagat

SEQ ID NO: 40982 - DNA, 70 bp, Homo sapiens
tttggtgtgtctgggggtgggttatggtctttctgctttggtgtgtctggaggtagattgtgggtttttc

SEQ ID NO: 40983 - DNA, 72 bp, Homo sapiens
tgtgtctgggggtgggttatggtctttctgctttggtgtgtctggaggtagattgtgggtttttctgctttg

SEQ ID NO: 40984 - DNA, 71 bp, Homo sapiens
ggtgggttatggtctttctgctttggtgtgtctggaggtagattgtgggtttttctgctttggggtatctg

SEQ ID NO: 40985 - DNA, 72 bp, Homo sapiens
tctttctgctttggtgtgtctggaggtagattgtgggtttttctgctttggggtatctgggggtggaccata

SEQ ID NO: 40986 - DNA, 70 bp, Homo sapiens
tttggtgtgtctggaggtagattgtgggtttttctgctttggggtatctgggggtggaccatagtctttc

SEQ ID NO: 40987 - DNA, 67 bp, Homo sapiens
attgtgggtttttctgctttggggtatctgggggtggaccatagtctttctgctttggggtacctgg

SEQ ID NO: 40988 - DNA, 68 bp, Homo sapiens
tatctgggggtggaccatagtctttctgctttggggtacctgggggtaggattatgggtttttctgct

SEQ ID NO: 40989 - DNA, 68 bp, Homo sapiens
tggaccatagtctttctgctttggggtacctgggggtaggattatgggtttttctgctttgcccttct

SEQ ID NO: 40990 - DNA, 66 bp, Homo sapiens
atagtctttctgctttggggtacctgggggtaggattatgggtttttctgctttgcccttctttgt

SEQ ID NO: 40991 - DNA, 65 bp, Homo sapiens
ctttggggtacctgggggtaggattatgggtttttctgctttgcccttctttgttcactaccctg

SEQ ID NO: 40992 - DNA, 70 bp, Homo sapiens
ctgggggtaggattatgggtttttctgctttgcccttctttgttcactaccctgggcatgtgtaaaatca

SEQ ID NO: 40993 - DNA, 70 bp, Homo sapiens
attatgggtttttctgctttgcccttctttgttcactaccctgggcatgtgtaaaatcaggacgaaagag

SEQ ID NO: 40994 - DNA, 71 bp, Homo sapiens
tttttctgctttgcccttctttgttcactaccctgggcatgtgtaaaatcaggacgaaagaggaattgacg

SEQ ID NO: 40995 - DNA, 74 bp, Homo sapiens
tctttgttcactaccctgggcatgtgtaaaatcaggacgaaagaggaattgacggctgagtgattacagtttta

SEQ ID NO: 40996 - DNA, 72 bp, Homo sapiens
atgtgtaaaatcaggacgaaagaggaattgacggctgagtgattacagttttacctgggattgttacttgga

SEQ ID NO: 40997 - DNA, 74 bp, Homo sapiens
atcaggacgaaagaggaattgacggctgagtgattacagttttacctgggattgttacttggacaccatgactg

SEQ ID NO: 40998 - DNA, 76 bp, Homo sapiens
gaattgacggctgagtgattacagttttacctgggattgttacttggacaccatgactggtgtccccacatgatta

SEQ ID NO: 40999 - DNA, 74 bp, Homo sapiens
ctgagtgattacagttttacctgggattgttacttggacaccatgactggtgtccccacatgattaaatggaac

SEQ ID NO: 41000 - DNA, 73 bp, Homo sapiens
ttacagttttacctgggattgttacttggacaccatgactggtgtccccacatgattaaatggaactcactct

SEQ ID NO: 41001 - DNA, 74 bp, Homo sapiens
acaccatgactggtgtccccacatgattaaatggaactcactcttctttttgggcgttccaggtccggctggca

SEQ ID NO: 41002 - DNA, 71 bp, Homo sapiens
actggtgtccccacatgattaaatggaactcactcttctttttgggcgttccaggtccggctggcaggaag

SEQ ID NO: 41003 - DNA, 68 bp, Homo sapiens
aatggaactcactcttctttttgggcgttccaggtccggctggcaggaaggccggatcttagaaccct

SEQ ID NO: 41004 - DNA, 70 bp, Homo sapiens
actcttctttttgggcgttccaggtccggctggcaggaaggccggatcttagaacccttccaagcagtgc

SEQ ID NO: 41005 - DNA, 75 bp, Homo sapiens
gcgttccaggtccggctggcaggaaggccggatcttagaacccttccaagcagtgccacctcccatgctttgtga

SEQ ID NO: 41006 - DNA, 74 bp, Homo sapiens
aggtccggctggcaggaaggccggatcttagaacccttccaagcagtgccacctcccatgctttgtgacattcc

SEQ ID NO: 41007 - DNA, 74 bp, Homo sapiens
ctggcaggaaggccggatcttagaacccttccaagcagtgccacctcccatgctttgtgacattccccttcctg

SEQ ID NO: 41008 - DNA, 77 bp, Homo sapiens
gatcttagaacccttccaagcagtgccacctcccatgctttgtgacattccccttcctggctctgtggagtagagga

SEQ ID NO: 41009 - DNA, 76 bp, Homo sapiens
tagaacccttccaagcagtgccacctcccatgctttgtgacattccccttcctggctctgtggagtagaggaaatg

SEQ ID NO: 41010 - DNA, 76 bp, Homo sapiens
ccaagcagtgccacctcccatgctttgtgacattccccttcctggctctgtggagtagaggaaatgggtctgaggg

SEQ ID NO: 41011 - DNA, 74 bp, Homo sapiens
acctcccatgctttgtgacattccccttcctggctctgtggagtagaggaaatgggtctgaggggcaggaagaa

SEQ ID NO: 41012 - DNA, 74 bp, Homo sapiens
tttgtgacattccccttcctggctctgtggagtagaggaaatgggtctgaggggcaggaagaacctgacctcca

SEQ ID NO: 41013 - DNA, 74 bp, Homo sapiens
cccttcctggctctgtggagtagaggaaatgggtctgaggggcaggaagaacctgacctccagcctcgcgtgtc

SEQ ID NO: 41014 - DNA, 73 bp, Homo sapiens
aaatgggtctgaggggcaggaagaacctgacctccagcctcgcgtgtcttccaggtaggacctggcgtgggca

SEQ ID NO: 41015 - DNA, 78 bp, Homo sapiens
ggcaggaagaacctgacctccagcctcgcgtgtcttccaggtaggacctggcgtgggcacaggctcatgtggttcagc

SEQ ID NO: 41016 - DNA, 77 bp, Homo sapiens
aagaacctgacctccagcctcgcgtgtcttccaggtaggacctggcgtgggcacaggctcatgtggttcagctcctc

SEQ ID NO: 41017 - DNA, 78 bp, Homo sapiens
acctccagcctcgcgtgtcttccaggtaggacctggcgtgggcacaggctcatgtggttcagctcctccagctaaggc

SEQ ID NO: 41018 - DNA, 77 bp, Homo sapiens
tccaggtaggacctggcgtgggcacaggctcatgtggttcagctcctccagctaaggctggggaaggagccaggaag

SEQ ID NO: 41019 - DNA, 77 bp, Homo sapiens
acctggcgtgggcacaggctcatgtggttcagctcctccagctaaggctggggaaggagccaggaaggggagagcag

SEQ ID NO: 41020 - DNA, 76 bp, Homo sapiens
aggctcatgtggttcagctcctccagctaaggctggggaaggagccaggaaggggagagcaggtgggatgggagaa

SEQ ID NO: 41021 - DNA, 74 bp, Homo sapiens
atgtggttcagctcctccagctaaggctggggaaggagccaggaaggggagagcaggtgggatgggagaagtgg

SEQ ID NO: 41022 - DNA, 72 bp, Homo sapiens
agctcctccagctaaggctggggaaggagccaggaaggggagagcaggtgggatgggagaagtgggggctgg

SEQ ID NO: 41023 - DNA, 72 bp, Homo sapiens
taaggctggggaaggagccaggaaggggagagcaggtgggatgggagaagtgggggctggtggggagtgaca

SEQ ID NO: 41024 - DNA, 72 bp, Homo sapiens
aaggagccaggaaggggagagcaggtgggatgggagaagtgggggctggtggggagtgacaaggtgatattc

SEQ ID NO: 41025 - DNA, 75 bp, Homo sapiens
aaggggagagcaggtgggatgggagaagtgggggctggtggggagtgacaaggtgatattctgagatatcctaga

SEQ ID NO: 41026 - DNA, 77 bp, Homo sapiens
aggtgggatgggagaagtgggggctggtggggagtgacaaggtgatattctgagatatcctagatgggctgcacctg

SEQ ID NO: 41027 - DNA, 77 bp, Homo sapiens
ggagaagtgggggctggtggggagtgacaaggtgatattctgagatatcctagatgggctgcacctggggaagacta

SEQ ID NO: 41028 - DNA, 79 bp, Homo sapiens
ggagtgacaaggtgatattctgagatatcctagatgggctgcacctggggaagactagaattagaaaaatcagcgcact

SEQ ID NO: 41029 - DNA, 82 bp, Homo sapiens
tattctgagatatcctagatgggctgcacctggggaagactagaattagaaaaatcagcgcacttgatagcagagaggtagc

SEQ ID NO: 41030 - DNA, 80 bp, Homo sapiens
tatcctagatgggctgcacctggggaagactagaattagaaaaatcagcgcacttgatagcagagaggtagctgttggcc

SEQ ID NO: 41031 - DNA, 80 bp, Homo sapiens
aagactagaattagaaaaatcagcgcacttgatagcagagaggtagctgttggccccttcagcttcacatctcagaactc

SEQ ID NO: 41032 - DNA, 79 bp, Homo sapiens
acttgatagcagagaggtagctgttggccccttcagcttcacatctcagaactcctccttgcaactccagtgggagaaa

SEQ ID NO: 41033 - DNA, 77 bp, Homo sapiens
agaggtagctgttggccccttcagcttcacatctcagaactcctccttgcaactccagtgggagaaatgctggttaa

SEQ ID NO: 41034 - DNA, 78 bp, Homo sapiens
ttggccccttcagcttcacatctcagaactcctccttgcaactccagtgggagaaatgctggttaagaatagccgcta

SEQ ID NO: 41035 - DNA, 77 bp, Homo sapiens
agcttcacatctcagaactcctccttgcaactccagtgggagaaatgctggttaagaatagccgctacgccgtctta

SEQ ID NO: 41036 - DNA, 73 bp, Homo sapiens
atctcagaactcctccttgcaactccagtgggagaaatgctggttaagaatagccgctacgccgtcttaaagt

SEQ ID NO: 41037 - DNA, 72 bp, Homo sapiens
aactcctccttgcaactccagtgggagaaatgctggttaagaatagccgctacgccgtcttaaagttcacac

SEQ ID NO: 41038 - DNA, 73 bp, Homo sapiens
aactccagtgggagaaatgctggttaagaatagccgctacgccgtcttaaagttcacaccaccctgatgatta

SEQ ID NO: 41039 - DNA, 77 bp, Homo sapiens
agaaatgctggttaagaatagccgctacgccgtcttaaagttcacaccaccctgatgattagcatatgcattccatt

SEQ ID NO: 41040 - DNA, 76 bp, Homo sapiens
tggttaagaatagccgctacgccgtcttaaagttcacaccaccctgatgattagcatatgcattccatttacaaaa

SEQ ID NO: 41041 - DNA, 75 bp, Homo sapiens
aatagccgctacgccgtcttaaagttcacaccaccctgatgattagcatatgcattccatttacaaaaacctata

SEQ ID NO: 41042 - DNA, 77 bp, Homo sapiens
cgtcttaaagttcacaccaccctgatgattagcatatgcattccatttacaaaaacctatatgagagcccacgtatc

SEQ ID NO: 41043 - DNA, 80 bp, Homo sapiens
taaagttcacaccaccctgatgattagcatatgcattccatttacaaaaacctatatgagagcccacgtatcgtgtctca

SEQ ID NO: 41044 - DNA, 82 bp, Homo sapiens
cctgatgattagcatatgcattccatttacaaaaacctatatgagagcccacgtatcgtgtctcactggacgcttatcacaa

SEQ ID NO: 41045 - DNA, 81 bp, Homo sapiens
attagcatatgcattccatttacaaaaacctatatgagagcccacgtatcgtgtctcactggacgcttatcacaatctcaa

SEQ ID NO: 41046 - DNA, 78 bp, Homo sapiens
tttacaaaaacctatatgagagcccacgtatcgtgtctcactggacgcttatcacaatctcaagaggtgggtgagcag

SEQ ID NO: 41047 - DNA, 83 bp, Homo sapiens
tatatgagagcccacgtatcgtgtctcactggacgcttatcacaatctcaagaggtgggtgagcaggtggttctcatgatttc

SEQ ID NO: 41048 - DNA, 80 bp, Homo sapiens
acgtatcgtgtctcactggacgcttatcacaatctcaagaggtgggtgagcaggtggttctcatgatttccatcctacag

SEQ ID NO: 41049 - DNA, 80 bp, Homo sapiens
acaatctcaagaggtgggtgagcaggtggttctcatgatttccatcctacaggtcaggagactgaagtgccttcattcat

SEQ ID NO: 41050 - DNA, 78 bp, Homo sapiens
aagaggtgggtgagcaggtggttctcatgatttccatcctacaggtcaggagactgaagtgccttcattcattccgta

SEQ ID NO: 41051 - DNA, 80 bp, Homo sapiens
caggtggttctcatgatttccatcctacaggtcaggagactgaagtgccttcattcattccgtaccaggagatgtgtcta

SEQ ID NO: 41052 - DNA, 83 bp, Homo sapiens
ttctcatgatttccatcctacaggtcaggagactgaagtgccttcattcattccgtaccaggagatgtgtctatgtcctcatc

SEQ ID NO: 41053 - DNA, 81 bp, Homo sapiens
atttccatcctacaggtcaggagactgaagtgccttcattcattccgtaccaggagatgtgtctatgtcctcatctgagcc

SEQ ID NO: 41054 - DNA, 77 bp, Homo sapiens
tgaagtgccttcattcattccgtaccaggagatgtgtctatgtcctcatctgagccccgggaaccggcgacaaacaa

SEQ ID NO: 41055 - DNA, 77 bp, Homo sapiens
cttcattcattccgtaccaggagatgtgtctatgtcctcatctgagccccgggaaccggcgacaaacaagagacaga

SEQ ID NO: 41056 - DNA, 76 bp, Homo sapiens
attccgtaccaggagatgtgtctatgtcctcatctgagccccgggaaccggcgacaaacaagagacagagctcttg

SEQ ID NO: 41057 - DNA, 78 bp, Homo sapiens
agatgtgtctatgtcctcatctgagccccgggaaccggcgacaaacaagagacagagctcttggctctcatagggttc

SEQ ID NO: 41058 - DNA, 77 bp, Homo sapiens
tatgtcctcatctgagccccgggaaccggcgacaaacaagagacagagctcttggctctcatagggttctcttctcc

SEQ ID NO: 41059 - DNA, 76 bp, Homo sapiens
atctgagccccgggaaccggcgacaaacaagagacagagctcttggctctcatagggttctcttctcccaggctca

SEQ ID NO: 41060 - DNA, 76 bp, Homo sapiens
acaaacaagagacagagctcttggctctcatagggttctcttctcccaggctcagggagattaaatggccgcccaa

SEQ ID NO: 41061 - DNA, 77 bp, Homo sapiens
aagagacagagctcttggctctcatagggttctcttctcccaggctcagggagattaaatggccgcccaagaccaca

SEQ ID NO: 41062 - DNA, 76 bp, Homo sapiens
ttggctctcatagggttctcttctcccaggctcagggagattaaatggccgcccaagaccacacaatgggtctgga

SEQ ID NO: 41063 - DNA, 73 bp, Homo sapiens
atagggttctcttctcccaggctcagggagattaaatggccgcccaagaccacacaatgggtctggacagacc

SEQ ID NO: 41064 - DNA, 74 bp, Homo sapiens
ttctcccaggctcagggagattaaatggccgcccaagaccacacaatgggtctggacagacccagaatggtttg

SEQ ID NO: 41065 - DNA, 73 bp, Homo sapiens
tcagggagattaaatggccgcccaagaccacacaatgggtctggacagacccagaatggtttgggtccagtcc

SEQ ID NO: 41066 - DNA, 71 bp, Homo sapiens
attaaatggccgcccaagaccacacaatgggtctggacagacccagaatggtttgggtccagtccctgtaa

SEQ ID NO: 41067 - DNA, 74 bp, Homo sapiens
acacaatgggtctggacagacccagaatggtttgggtccagtccctgtaagctgcctctgcaatagaaacctat

SEQ ID NO: 41068 - DNA, 75 bp, Homo sapiens
tctggacagacccagaatggtttgggtccagtccctgtaagctgcctctgcaatagaaacctattggtagatatt

SEQ ID NO: 41069 - DNA, 71 bp, Homo sapiens
acccagaatggtttgggtccagtccctgtaagctgcctctgcaatagaaacctattggtagatattttaat

SEQ ID NO: 41070 - DNA, 72 bp, Homo sapiens
agtccctgtaagctgcctctgcaatagaaacctattggtagatattttaattaatagttggggcacttagga

SEQ ID NO: 41071 - DNA, 71 bp, Homo sapiens
ctgcctctgcaatagaaacctattggtagatattttaattaatagttggggcacttaggagcactttaatt

SEQ ID NO: 41072 - DNA, 72 bp, Homo sapiens
tctgcaatagaaacctattggtagatattttaattaatagttggggcacttaggagcactttaattttcaca

SEQ ID NO: 41073 - DNA, 69 bp, Homo sapiens
aaacctattggtagatattttaattaatagttggggcacttaggagcactttaattttcacagtgcgtg

SEQ ID NO: 41074 - DNA, 70 bp, Homo sapiens
tattttaattaatagttggggcacttaggagcactttaattttcacagtgcgtgtaataacagtatttcc

SEQ ID NO: 41075 - DNA, 71 bp, Homo sapiens
taattaatagttggggcacttaggagcactttaattttcacagtgcgtgtaataacagtatttccgggaca

SEQ ID NO: 41076 - DNA, 68 bp, Homo sapiens
gggcacttaggagcactttaattttcacagtgcgtgtaataacagtatttccgggacaggaaaaaaaa

SEQ ID NO: 41077 - DNA, 69 bp, Homo sapiens
ggaaattattcaggtgattttaattatctttctcctaagtgaaagcccctttctcttgaaaatctgacc

SEQ ID NO: 41078 - DNA, 70 bp, Homo sapiens
caggtgattttaattatctttctcctaagtgaaagcccctttctcttgaaaatctgaccttataattatc

SEQ ID NO: 41079 - DNA, 72 bp, Homo sapiens
taattatctttctcctaagtgaaagcccctttctcttgaaaatctgaccttataattatctcttatgctaat

SEQ ID NO: 41080 - DNA, 74 bp, Homo sapiens
tctcctaagtgaaagcccctttctcttgaaaatctgaccttataattatctcttatgctaattataaagatatc

SEQ ID NO: 41081 - DNA, 72 bp, Homo sapiens
gtgaaagcccctttctcttgaaaatctgaccttataattatctcttatgctaattataaagatatcccacct

SEQ ID NO: 41082 - DNA, 72 bp, Homo sapiens
ttgaaaatctgaccttataattatctcttatgctaattataaagatatcccaccttcttttcttgagtttat

SEQ ID NO: 41083 - DNA, 68 bp, Homo sapiens
gaccttataattatctcttatgctaattataaagatatcccaccttcttttcttgagtttattttttt

SEQ ID NO: 41084 - DNA, 70 bp, Homo sapiens
tataattatctcttatgctaattataaagatatcccaccttcttttcttgagtttattttttttctcatt

SEQ ID NO: 41085 - DNA, 71 bp, Homo sapiens
gagtttattttttttctcatttttatgctgtgtcatgtatttatagaatgtgtttaaggttgggagtcttc

SEQ ID NO: 41086 - DNA, 76 bp, Homo sapiens
tttatgctgtgtcatgtatttatagaatgtgtttaaggttgggagtcttctttttgttatctctattatatctgga

SEQ ID NO: 41087 - DNA, 76 bp, Homo sapiens
gctgtgtcatgtatttatagaatgtgtttaaggttgggagtcttctttttgttatctctattatatctggagtcaa

SEQ ID NO: 41088 - DNA, 74 bp, Homo sapiens
tatagaatgtgtttaaggttgggagtcttctttttgttatctctattatatctggagtcaaaatatcaccattg

SEQ ID NO: 41089 - DNA, 72 bp, Homo sapiens
gtgtttaaggttgggagtcttctttttgttatctctattatatctggagtcaaaatatcaccattgtgtaat

SEQ ID NO: 41090 - DNA, 81 bp, Homo sapiens
tttttgttatctctattatatctggagtcaaaatatcaccattgtgtaattgaatgagatgatttgcaaccattgctccca

SEQ ID NO: 41091 - DNA, 81 bp, Homo sapiens
ttatatctggagtcaaaatatcaccattgtgtaattgaatgagatgatttgcaaccattgctcccagtgccccatgtaagt

SEQ ID NO: 41092 - DNA, 78 bp, Homo sapiens
aaaatatcaccattgtgtaattgaatgagatgatttgcaaccattgctcccagtgccccatgtaagttctactgtctt

SEQ ID NO: 41093 - DNA, 79 bp, Homo sapiens
attgtgtaattgaatgagatgatttgcaaccattgctcccagtgccccatgtaagttctactgtctttctagacttgta

SEQ ID NO: 41094 - DNA, 80 bp, Homo sapiens
taattgaatgagatgatttgcaaccattgctcccagtgccccatgtaagttctactgtctttctagacttgtataatcta

SEQ ID NO: 41095 - DNA, 80 bp, Homo sapiens
tgatttgcaaccattgctcccagtgccccatgtaagttctactgtctttctagacttgtataatctaggaatctgtgata

SEQ ID NO: 41096 - DNA, 76 bp, Homo sapiens
aaccattgctcccagtgccccatgtaagttctactgtctttctagacttgtataatctaggaatctgtgataggaa

SEQ ID NO: 41097 - DNA, 76 bp, Homo sapiens
agtgccccatgtaagttctactgtctttctagacttgtataatctaggaatctgtgataggaatgctgataaaagg

SEQ ID NO: 41098 - DNA, 76 bp, Homo sapiens
cccatgtaagttctactgtctttctagacttgtataatctaggaatctgtgataggaatgctgataaaagggtggc

SEQ ID NO: 41099 - DNA, 78 bp, Homo sapiens
atgtaagttctactgtctttctagacttgtataatctaggaatctgtgataggaatgctgataaaagggtggctcata

SEQ ID NO: 41100 - DNA, 77 bp, Homo sapiens
gtaagttctactgtctttctagacttgtataatctaggaatctgtgataggaatgctgataaaagggtggctcatac

SEQ ID NO: 41101 - DNA, 76 bp, Homo sapiens
tttctagacttgtataatctaggaatctgtgataggaatgctgataaaagggtggctcataccttctgctttttat

SEQ ID NO: 41102 - DNA, 75 bp, Homo sapiens
acttgtataatctaggaatctgtgataggaatgctgataaaagggtggctcataccttctgctttttattttgta

SEQ ID NO: 41103 - DNA, 79 bp, Homo sapiens
tgtataatctaggaatctgtgataggaatgctgataaaagggtggctcataccttctgctttttattttgtagcagatg

SEQ ID NO: 41104 - DNA, 74 bp, Homo sapiens
tgataggaatgctgataaaagggtggctcataccttctgctttttattttgtagcagatgggggggaagttaga

SEQ ID NO: 41105 - DNA, 72 bp, Homo sapiens
aatgctgataaaagggtggctcataccttctgctttttattttgtagcagatgggggggaagttagactcag

SEQ ID NO: 41106 - DNA, 69 bp, Homo sapiens
aaaagggtggctcataccttctgctttttattttgtagcagatgggggggaagttagactcaggaaaga

SEQ ID NO: 41107 - DNA, 67 bp, Homo sapiens
tttttattttgtagcagatgggggggaagttagactcaggaaagaggggtaaacatagcaaagttag

SEQ ID NO: 41108 - DNA, 68 bp, Homo sapiens
tttgtagcagatgggggggaagttagactcaggaaagaggggtaaacatagcaaagttaggttgaaaa

SEQ ID NO: 41109 - DNA, 67 bp, Homo sapiens
agttagactcaggaaagaggggtaaacatagcaaagttaggttgaaaatggtttgtaggaggattta

SEQ ID NO: 41110 - DNA, 66 bp, Homo sapiens
aaagaggggtaaacatagcaaagttaggttgaaaatggtttgtaggaggatttacgtggtttcaga

SEQ ID NO: 41111 - DNA, 71 bp, Homo sapiens
taaacatagcaaagttaggttgaaaatggtttgtaggaggatttacgtggtttcagaggagatgtgtctaa

SEQ ID NO: 41112 - DNA, 71 bp, Homo sapiens
aaaatggtttgtaggaggatttacgtggtttcagaggagatgtgtctaactcttcgcatagtaattaacaa

SEQ ID NO: 41113 - DNA, 76 bp, Homo sapiens
tttgtaggaggatttacgtggtttcagaggagatgtgtctaactcttcgcatagtaattaacaagtcagcatgtta

SEQ ID NO: 41114 - DNA, 75 bp, Homo sapiens
atttacgtggtttcagaggagatgtgtctaactcttcgcatagtaattaacaagtcagcatgttaccgattgact

SEQ ID NO: 41115 - DNA, 79 bp, Homo sapiens
ttcagaggagatgtgtctaactcttcgcatagtaattaacaagtcagcatgttaccgattgacttgacaaggtcagtta

SEQ ID NO: 41116 - DNA, 77 bp, Homo sapiens
atgtgtctaactcttcgcatagtaattaacaagtcagcatgttaccgattgacttgacaaggtcagttagcccagtg

SEQ ID NO: 41117 - DNA, 75 bp, Homo sapiens
taactcttcgcatagtaattaacaagtcagcatgttaccgattgacttgacaaggtcagttagcccagtgggtct

SEQ ID NO: 41118 - DNA, 74 bp, Homo sapiens
atagtaattaacaagtcagcatgttaccgattgacttgacaaggtcagttagcccagtgggtcttgctgggccc

SEQ ID NO: 41119 - DNA, 76 bp, Homo sapiens
taacaagtcagcatgttaccgattgacttgacaaggtcagttagcccagtgggtcttgctgggcccccactcttca

SEQ ID NO: 41120 - DNA, 74 bp, Homo sapiens
atgttaccgattgacttgacaaggtcagttagcccagtgggtcttgctgggcccccactcttcatgccaaggaa

SEQ ID NO: 41121 - DNA, 75 bp, Homo sapiens
aggtcagttagcccagtgggtcttgctgggcccccactcttcatgccaaggaaccgagcagagcttccagcttta

SEQ ID NO: 41122 - DNA, 75 bp, Homo sapiens
ttagcccagtgggtcttgctgggcccccactcttcatgccaaggaaccgagcagagcttccagctttaagaacca

SEQ ID NO: 41123 - DNA, 77 bp, Homo sapiens
ggtcttgctgggcccccactcttcatgccaaggaaccgagcagagcttccagctttaagaaccagaatccagtcaca

SEQ ID NO: 41124 - DNA, 77 bp, Homo sapiens
tcttcatgccaaggaaccgagcagagcttccagctttaagaaccagaatccagtcacagggttcctgacagacggac

SEQ ID NO: 41125 - DNA, 74 bp, Homo sapiens
aaggaaccgagcagagcttccagctttaagaaccagaatccagtcacagggttcctgacagacggacgcccaca

SEQ ID NO: 41126 - DNA, 73 bp, Homo sapiens
agctttaagaaccagaatccagtcacagggttcctgacagacggacgcccacaggaggctgggacaggagccc

SEQ ID NO: 41127 - DNA, 73 bp, Homo sapiens
ttcctgacagacggacgcccacaggaggctgggacaggagccccacggaaggttctacctgtgggtcgaagca

SEQ ID NO: 41128 - DNA, 75 bp, Homo sapiens
acgcccacaggaggctgggacaggagccccacggaaggttctacctgtgggtcgaagcagacgctgagtcatctg

SEQ ID NO: 41129 - DNA, 74 bp, Homo sapiens
gaggctgggacaggagccccacggaaggttctacctgtgggtcgaagcagacgctgagtcatctggttaactat

SEQ ID NO: 41130 - DNA, 75 bp, Homo sapiens
cccacggaaggttctacctgtgggtcgaagcagacgctgagtcatctggttaactattttgagcataatattata

SEQ ID NO: 41131 - DNA, 84 bp, Homo sapiens
tctacctgtgggtcgaagcagacgctgagtcatctggttaactattttgagcataatattatatgcatgcagtgcatttaatta

SEQ ID NO: 41132 - DNA, 83 bp, Homo sapiens
tgtgggtcgaagcagacgctgagtcatctggttaactattttgagcataatattatatgcatgcagtgcatttaattaagaaa

SEQ ID NO: 41133 - DNA, 82 bp, Homo sapiens
agacgctgagtcatctggttaactattttgagcataatattatatgcatgcagtgcatttaattaagaaaaatcgcacaaca

SEQ ID NO: 41134 - DNA, 79 bp, Homo sapiens
gtcatctggttaactattttgagcataatattatatgcatgcagtgcatttaattaagaaaaatcgcacaacaaaatcc

SEQ ID NO: 41135 - DNA, 78 bp, Homo sapiens
cataatattatatgcatgcagtgcatttaattaagaaaaatcgcacaacaaaatcctttgagaaggacagcgtttgtc

SEQ ID NO: 41136 - DNA, 78 bp, Homo sapiens
ttatatgcatgcagtgcatttaattaagaaaaatcgcacaacaaaatcctttgagaaggacagcgtttgtctgataat

SEQ ID NO: 41137 - DNA, 76 bp, Homo sapiens
tgcagtgcatttaattaagaaaaatcgcacaacaaaatcctttgagaaggacagcgtttgtctgataattttctca

SEQ ID NO: 41138 - DNA, 71 bp, Homo sapiens
ttaagaaaaatcgcacaacaaaatcctttgagaaggacagcgtttgtctgataattttctcaaatacttag

SEQ ID NO: 41139 - DNA, 71 bp, Homo sapiens
aaaaatcgcacaacaaaatcctttgagaaggacagcgtttgtctgataattttctcaaatacttagtccca

SEQ ID NO: 41140 - DNA, 69 bp, Homo sapiens
caaaatcctttgagaaggacagcgtttgtctgataattttctcaaatacttagtcccataaaatttagt

SEQ ID NO: 41141 - DNA, 70 bp, Homo sapiens
tctgataattttctcaaatacttagtcccataaaatttagttttagaaattgtattgctcttaaaataca

SEQ ID NO: 41142 - DNA, 68 bp, Homo sapiens
gtcccataaaatttagttttagaaattgtattgctcttaaaatacatttaaacagtcaaaagattgga

SEQ ID NO: 41143 - DNA, 69 bp, Homo sapiens
atttagttttagaaattgtattgctcttaaaatacatttaaacagtcaaaagattggaatgggagccta

SEQ ID NO: 41144 - DNA, 70 bp, Homo sapiens
agaaattgtattgctcttaaaatacatttaaacagtcaaaagattggaatgggagcctaaggaaaagcag

SEQ ID NO: 41145 - DNA, 72 bp, Homo sapiens
tattgctcttaaaatacatttaaacagtcaaaagattggaatgggagcctaaggaaaagcaggaaaggctga

SEQ ID NO: 41146 - DNA, 69 bp, Homo sapiens
aatacatttaaacagtcaaaagattggaatgggagcctaaggaaaagcaggaaaggctgaagcgggaat

SEQ ID NO: 41147 - DNA, 71 bp, Homo sapiens
atttaaacagtcaaaagattggaatgggagcctaaggaaaagcaggaaaggctgaagcgggaattgtgtga

SEQ ID NO: 41148 - DNA, 72 bp, Homo sapiens
aaagattggaatgggagcctaaggaaaagcaggaaaggctgaagcgggaattgtgtgagttgaaggcaccta

SEQ ID NO: 41149 - DNA, 76 bp, Homo sapiens
aatgggagcctaaggaaaagcaggaaaggctgaagcgggaattgtgtgagttgaaggcacctagcatttggctgca

SEQ ID NO: 41150 - DNA, 77 bp, Homo sapiens
aggaaaagcaggaaaggctgaagcgggaattgtgtgagttgaaggcacctagcatttggctgcattggcaggtgtta

SEQ ID NO: 41151 - DNA, 79 bp, Homo sapiens
aggaaaggctgaagcgggaattgtgtgagttgaaggcacctagcatttggctgcattggcaggtgttacatggaggctg

SEQ ID NO: 41152 - DNA, 84 bp, Homo sapiens
acctagcatttggctgcattggcaggtgttacatggaggctggtgagggtgacctggagcctctggtcatgatcaaatgagata

SEQ ID NO: 41153 - DNA, 81 bp, Homo sapiens
ctgcattggcaggtgttacatggaggctggtgagggtgacctggagcctctggtcatgatcaaatgagataaggaagttag

SEQ ID NO: 41154 - DNA, 81 bp, Homo sapiens
gtgttacatggaggctggtgagggtgacctggagcctctggtcatgatcaaatgagataaggaagttaggctgctctgaaa

SEQ ID NO: 41155 - DNA, 81 bp, Homo sapiens
atggaggctggtgagggtgacctggagcctctggtcatgatcaaatgagataaggaagttaggctgctctgaaaatcgaca

SEQ ID NO: 41156 - DNA, 80 bp, Homo sapiens
agggtgacctggagcctctggtcatgatcaaatgagataaggaagttaggctgctctgaaaatcgacacacagcccaatc

SEQ ID NO: 41157 - DNA, 83 bp, Homo sapiens
tggagcctctggtcatgatcaaatgagataaggaagttaggctgctctgaaaatcgacacacagcccaatccatagatggtgt

SEQ ID NO: 41158 - DNA, 84 bp, Homo sapiens
gtcatgatcaaatgagataaggaagttaggctgctctgaaaatcgacacacagcccaatccatagatggtgttattatcatcaa

SEQ ID NO: 41159 - DNA, 82 bp, Homo sapiens
aatgagataaggaagttaggctgctctgaaaatcgacacacagcccaatccatagatggtgttattatcatcaatatgatta

SEQ ID NO: 41160 - DNA, 79 bp, Homo sapiens
ataaggaagttaggctgctctgaaaatcgacacacagcccaatccatagatggtgttattatcatcaatatgattattt

SEQ ID NO: 41161 - DNA, 82 bp, Homo sapiens
ctgctctgaaaatcgacacacagcccaatccatagatggtgttattatcatcaatatgattattttgtgtaattccacaata

SEQ ID NO: 41162 - DNA, 81 bp, Homo sapiens
tgaaaatcgacacacagcccaatccatagatggtgttattatcatcaatatgattattttgtgtaattccacaatagctgt

SEQ ID NO: 41163 - DNA, 80 bp, Homo sapiens
cacacagcccaatccatagatggtgttattatcatcaatatgattattttgtgtaattccacaatagctgtttcattaac

SEQ ID NO: 41164 - DNA, 78 bp, Homo sapiens
caatccatagatggtgttattatcatcaatatgattattttgtgtaattccacaatagctgtttcattaacttccaaa

SEQ ID NO: 41165 - DNA, 78 bp, Homo sapiens
gtgttattatcatcaatatgattattttgtgtaattccacaatagctgtttcattaacttccaaaatgtggaattgca

SEQ ID NO: 41166 - DNA, 77 bp, Homo sapiens
atcatcaatatgattattttgtgtaattccacaatagctgtttcattaacttccaaaatgtggaattgcatatattt

SEQ ID NO: 41167 - DNA, 73 bp, Homo sapiens
atgattattttgtgtaattccacaatagctgtttcattaacttccaaaatgtggaattgcatatatttttaaa

SEQ ID NO: 41168 - DNA, 62 bp, Homo sapiens
tttttaaattttgtgtccatttttaaaaagtttacctacctttctaaaacgaatcaaccaga

SEQ ID NO: 41169 - DNA, 64 bp, Homo sapiens
ttgtgtccatttttaaaaagtttacctacctttctaaaacgaatcaaccagaacggagtttcac

SEQ ID NO: 41170 - DNA, 63 bp, Homo sapiens
aaaagtttacctacctttctaaaacgaatcaaccagaacggagtttcacccacgggaggtgcc

SEQ ID NO: 41171 - DNA, 68 bp, Homo sapiens
ctacctttctaaaacgaatcaaccagaacggagtttcacccacgggaggtgcctgccttcctcttgcc

SEQ ID NO: 41172 - DNA, 70 bp, Homo sapiens
aaaacgaatcaaccagaacggagtttcacccacgggaggtgcctgccttcctcttgcccacttgctccca

SEQ ID NO: 41173 - DNA, 69 bp, Homo sapiens
aaccagaacggagtttcacccacgggaggtgcctgccttcctcttgcccacttgctcccagcgtgggtt

SEQ ID NO: 41174 - DNA, 71 bp, Homo sapiens
agtttcacccacgggaggtgcctgccttcctcttgcccacttgctcccagcgtgggtttgccgtttctcac

SEQ ID NO: 41175 - DNA, 74 bp, Homo sapiens
gaggtgcctgccttcctcttgcccacttgctcccagcgtgggtttgccgtttctcacctcgacttcccgacaga

SEQ ID NO: 41176 - DNA, 70 bp, Homo sapiens
ccttcctcttgcccacttgctcccagcgtgggtttgccgtttctcacctcgacttcccgacagagacccg

SEQ ID NO: 41177 - DNA, 73 bp, Homo sapiens
tcttgcccacttgctcccagcgtgggtttgccgtttctcacctcgacttcccgacagagacccgggatctgtc

SEQ ID NO: 41178 - DNA, 74 bp, Homo sapiens
tcccagcgtgggtttgccgtttctcacctcgacttcccgacagagacccgggatctgtcgccatcgctcctgtc

SEQ ID NO: 41179 - DNA, 74 bp, Homo sapiens
ggtttgccgtttctcacctcgacttcccgacagagacccgggatctgtcgccatcgctcctgtctctcgggcaa

SEQ ID NO: 41180 - DNA, 75 bp, Homo sapiens
ctcgacttcccgacagagacccgggatctgtcgccatcgctcctgtctctcgggcaaacgaccgtgaacatataa

SEQ ID NO: 41181 - DNA, 73 bp, Homo sapiens
acagagacccgggatctgtcgccatcgctcctgtctctcgggcaaacgaccgtgaacatataacctttcaggt

SEQ ID NO: 41182 - DNA, 70 bp, Homo sapiens
acccgggatctgtcgccatcgctcctgtctctcgggcaaacgaccgtgaacatataacctttcaggtttt

SEQ ID NO: 41183 - DNA, 71 bp, Homo sapiens
ccatcgctcctgtctctcgggcaaacgaccgtgaacatataacctttcaggtttttaacaaattgcaagat

SEQ ID NO: 41184 - DNA, 71 bp, Homo sapiens
tgtctctcgggcaaacgaccgtgaacatataacctttcaggtttttaacaaattgcaagatttcagtgaaa

SEQ ID NO: 41185 - DNA, 68 bp, Homo sapiens
ctcgggcaaacgaccgtgaacatataacctttcaggtttttaacaaattgcaagatttcagtgaaaaa

SEQ ID NO: 41186 - DNA, 68 bp, Homo sapiens
cgaccgtgaacatataacctttcaggtttttaacaaattgcaagatttcagtgaaaaaattactataa

SEQ ID NO: 41187 - DNA, 69 bp, Homo sapiens
taacctttcaggtttttaacaaattgcaagatttcagtgaaaaaattactataaagcattgtggtccta

SEQ ID NO: 41188 - DNA, 70 bp, Homo sapiens
tcaggtttttaacaaattgcaagatttcagtgaaaaaattactataaagcattgtggtcctaatttaaga

SEQ ID NO: 41189 - DNA, 69 bp, Homo sapiens
taacaaattgcaagatttcagtgaaaaaattactataaagcattgtggtcctaatttaagaaaaaaatg

SEQ ID NO: 41190 - DNA, 68 bp, Homo sapiens
aatgttttaaaaagtacatagtgcattgaaaaaagaccataagattttatgcctacttgttaatttag

SEQ ID NO: 41191 - DNA, 70 bp, Homo sapiens
aaagtacatagtgcattgaaaaaagaccataagattttatgcctacttgttaatttaggttaccatgaat

SEQ ID NO: 41192 - DNA, 70 bp, Homo sapiens
acatagtgcattgaaaaaagaccataagattttatgcctacttgttaatttaggttaccatgaattttat

SEQ ID NO: 41193 - DNA, 64 bp, Homo sapiens
aaaaagaccataagattttatgcctacttgttaatttaggttaccatgaattttattttccctt

SEQ ID NO: 41194 - DNA, 66 bp, Homo sapiens
accataagattttatgcctacttgttaatttaggttaccatgaattttattttcccttttgcattt

SEQ ID NO: 41195 - DNA, 67 bp, Homo sapiens
gcctacttgttaatttaggttaccatgaattttattttcccttttgcatttttcagtactttatgag

SEQ ID NO: 41196 - DNA, 69 bp, Homo sapiens
tgttaatttaggttaccatgaattttattttcccttttgcatttttcagtactttatgagtgttctaca

SEQ ID NO: 41197 - DNA, 72 bp, Homo sapiens
taccatgaattttattttcccttttgcatttttcagtactttatgagtgttctacaaaaaatcactctgctc

SEQ ID NO: 41198 - DNA, 76 bp, Homo sapiens
cttttgcatttttcagtactttatgagtgttctacaaaaaatcactctgctcttctgagcagcgtaaaaatcacac

SEQ ID NO: 41199 - DNA, 77 bp, Homo sapiens
tactttatgagtgttctacaaaaaatcactctgctcttctgagcagcgtaaaaatcacactttccaacatataccca

SEQ ID NO: 41200 - DNA, 75 bp, Homo sapiens
tctacaaaaaatcactctgctcttctgagcagcgtaaaaatcacactttccaacatatacccactgtctcccttt

SEQ ID NO: 41201 - DNA, 73 bp, Homo sapiens
aaaaatcactctgctcttctgagcagcgtaaaaatcacactttccaacatatacccactgtctcccttttcct

SEQ ID NO: 41202 - DNA, 73 bp, Homo sapiens
tcttctgagcagcgtaaaaatcacactttccaacatatacccactgtctcccttttccttgtaagaatgtcgt

SEQ ID NO: 41203 - DNA, 71 bp, Homo sapiens
aaaatcacactttccaacatatacccactgtctcccttttccttgtaagaatgtcgttatcatcttcccaa

SEQ ID NO: 41204 - DNA, 70 bp, Homo sapiens
tttccaacatatacccactgtctcccttttccttgtaagaatgtcgttatcatcttcccaaccttttcca

SEQ ID NO: 41205 - DNA, 66 bp, Homo sapiens
ccttttccttgtaagaatgtcgttatcatcttcccaaccttttccagtccaacgagggttggcttt

SEQ ID NO: 41206 - DNA, 69 bp, Homo sapiens
ttgtaagaatgtcgttatcatcttcccaaccttttccagtccaacgagggttggcttttagttcagaaa

SEQ ID NO: 41207 - DNA, 70 bp, Homo sapiens
aatgtcgttatcatcttcccaaccttttccagtccaacgagggttggcttttagttcagaaataccatga

SEQ ID NO: 41208 - DNA, 70 bp, Homo sapiens
atcttcccaaccttttccagtccaacgagggttggcttttagttcagaaataccatgagagacacaggga

SEQ ID NO: 41209 - DNA, 69 bp, Homo sapiens
aaccttttccagtccaacgagggttggcttttagttcagaaataccatgagagacacagggaagaactg

SEQ ID NO: 41210 - DNA, 72 bp, Homo sapiens
gggttggcttttagttcagaaataccatgagagacacagggaagaactgtgcgagttagaggtggggaggag

SEQ ID NO: 41211 - DNA, 75 bp, Homo sapiens
ttagttcagaaataccatgagagacacagggaagaactgtgcgagttagaggtggggaggaggaaggaagcctga

SEQ ID NO: 41212 - DNA, 76 bp, Homo sapiens
aataccatgagagacacagggaagaactgtgcgagttagaggtggggaggaggaaggaagcctgaggctgagaagc

SEQ ID NO: 41213 - DNA, 75 bp, Homo sapiens
acacagggaagaactgtgcgagttagaggtggggaggaggaaggaagcctgaggctgagaagcgagggactgaga

SEQ ID NO: 41214 - DNA, 75 bp, Homo sapiens
aagaactgtgcgagttagaggtggggaggaggaaggaagcctgaggctgagaagcgagggactgagaggcggagc

SEQ ID NO: 41215 - DNA, 75 bp, Homo sapiens
ttagaggtggggaggaggaaggaagcctgaggctgagaagcgagggactgagaggcggagctggaggaggccttg

SEQ ID NO: 41216 - DNA, 75 bp, Homo sapiens
ggaggaggaaggaagcctgaggctgagaagcgagggactgagaggcggagctggaggaggccttgggccgtgtgt

SEQ ID NO: 41217 - DNA, 79 bp, Homo sapiens
cctgaggctgagaagcgagggactgagaggcggagctggaggaggccttgggccgtgtgttccggctggcaggtgcagc

SEQ ID NO: 41218 - DNA, 78 bp, Homo sapiens
ctggaggaggccttgggccgtgtgttccggctggcaggtgcagcgcccatcccctcatgcagggcaggtgtcgggtgc

SEQ ID NO: 41219 - DNA, 77 bp, Homo sapiens
ggaggccttgggccgtgtgttccggctggcaggtgcagcgcccatcccctcatgcagggcaggtgtcgggtgcctgg

SEQ ID NO: 41220 - DNA, 79 bp, Homo sapiens
tgtgttccggctggcaggtgcagcgcccatcccctcatgcagggcaggtgtcgggtgcctgggcctcggtcacttgagg

SEQ ID NO: 41221 - DNA, 78 bp, Homo sapiens
ctggcaggtgcagcgcccatcccctcatgcagggcaggtgtcgggtgcctgggcctcggtcacttgaggggagtgtcc

SEQ ID NO: 41222 - DNA, 76 bp, Homo sapiens
aggtgcagcgcccatcccctcatgcagggcaggtgtcgggtgcctgggcctcggtcacttgaggggagtgtcctcc

SEQ ID NO: 41223 - DNA, 74 bp, Homo sapiens
atcccctcatgcagggcaggtgtcgggtgcctgggcctcggtcacttgaggggagtgtcctccccatccaaaga

SEQ ID NO: 41224 - DNA, 73 bp, Homo sapiens
atgcagggcaggtgtcgggtgcctgggcctcggtcacttgaggggagtgtcctccccatccaaagacaagaaa

SEQ ID NO: 41225 - DNA, 73 bp, Homo sapiens
tgtcgggtgcctgggcctcggtcacttgaggggagtgtcctccccatccaaagacaagaaaggacgtgctcca

SEQ ID NO: 41226 - DNA, 75 bp, Homo sapiens
ctgggcctcggtcacttgaggggagtgtcctccccatccaaagacaagaaaggacgtgctccatgcacacaggaa

SEQ ID NO: 41227 - DNA, 76 bp, Homo sapiens
tcggtcacttgaggggagtgtcctccccatccaaagacaagaaaggacgtgctccatgcacacaggaaggcaggtg

SEQ ID NO: 41228 - DNA, 74 bp, Homo sapiens
aggggagtgtcctccccatccaaagacaagaaaggacgtgctccatgcacacaggaaggcaggtgtggcctggg

SEQ ID NO: 41229 - DNA, 74 bp, Homo sapiens
cccatccaaagacaagaaaggacgtgctccatgcacacaggaaggcaggtgtggcctggggtgggatgggccgg

SEQ ID NO: 41230 - DNA, 73 bp, Homo sapiens
aaaggacgtgctccatgcacacaggaaggcaggtgtggcctggggtgggatgggccggggcgtgggcgtggga

SEQ ID NO: 41231 - DNA, 71 bp, Homo sapiens
atgcacacaggaaggcaggtgtggcctggggtgggatgggccggggcgtgggcgtgggacacggggacacg

SEQ ID NO: 41232 - DNA, 66 bp, Homo sapiens
aggaaggcaggtgtggcctggggtgggatgggccggggcgtgggcgtgggacacggggacacgggt

SEQ ID NO: 41233 - DNA, 66 bp, Homo sapiens
aggtgtggcctggggtgggatgggccggggcgtgggcgtgggacacggggacacgggttggggctg

SEQ ID NO: 41234 - DNA, 68 bp, Homo sapiens
atgggccggggcgtgggcgtgggacacggggacacgggttggggctgggggagcatgactttaacaga

SEQ ID NO: 41235 - DNA, 73 bp, Homo sapiens
ggcgtgggacacggggacacgggttggggctgggggagcatgactttaacagacactgggtgatggatgtgta

SEQ ID NO: 41236 - DNA, 73 bp, Homo sapiens
acacggggacacgggttggggctgggggagcatgactttaacagacactgggtgatggatgtgtaggtgccag

SEQ ID NO: 41237 - DNA, 76 bp, Homo sapiens
atgactttaacagacactgggtgatggatgtgtaggtgccaggtcctgggccgccagtgtggccttggggctcctg

SEQ ID NO: 41238 - DNA, 79 bp, Homo sapiens
ttaacagacactgggtgatggatgtgtaggtgccaggtcctgggccgccagtgtggccttggggctcctggtgctgtgc

SEQ ID NO: 41239 - DNA, 79 bp, Homo sapiens
tgatggatgtgtaggtgccaggtcctgggccgccagtgtggccttggggctcctggtgctgtgcccgcccctgcaccca

SEQ ID NO: 41240 - DNA, 75 bp, Homo sapiens
atgtgtaggtgccaggtcctgggccgccagtgtggccttggggctcctggtgctgtgcccgcccctgcacccacc

SEQ ID NO: 41241 - DNA, 74 bp, Homo sapiens
aggtcctgggccgccagtgtggccttggggctcctggtgctgtgcccgcccctgcacccacctgcttgtcaccc

SEQ ID NO: 41242 - DNA, 74 bp, Homo sapiens
cgccagtgtggccttggggctcctggtgctgtgcccgcccctgcacccacctgcttgtcacccctctaggttta

SEQ ID NO: 41243 - DNA, 76 bp, Homo sapiens
tggccttggggctcctggtgctgtgcccgcccctgcacccacctgcttgtcacccctctaggtttattcagtgtga

SEQ ID NO: 41244 - DNA, 76 bp, Homo sapiens
ctcctggtgctgtgcccgcccctgcacccacctgcttgtcacccctctaggtttattcagtgtgacccctgcagaa

SEQ ID NO: 41245 - DNA, 76 bp, Homo sapiens
ctgtgcccgcccctgcacccacctgcttgtcacccctctaggtttattcagtgtgacccctgcagaagctgccttg

SEQ ID NO: 41246 - DNA, 74 bp, Homo sapiens
ctgcacccacctgcttgtcacccctctaggtttattcagtgtgacccctgcagaagctgccttggggacccgga

SEQ ID NO: 41247 - DNA, 73 bp, Homo sapiens
acctgcttgtcacccctctaggtttattcagtgtgacccctgcagaagctgccttggggacccggagggcgca

SEQ ID NO: 41248 - DNA, 75 bp, Homo sapiens
ctaggtttattcagtgtgacccctgcagaagctgccttggggacccggagggcgcaggtgtggccctggctgcag

SEQ ID NO: 41249 - DNA, 72 bp, Homo sapiens
tgcagaagctgccttggggacccggagggcgcaggtgtggccctggctgcagggaccccgaaccccagggcg

SEQ ID NO: 41250 - DNA, 69 bp, Homo sapiens
cttggggacccggagggcgcaggtgtggccctggctgcagggaccccgaaccccagggcgtgttcctga

SEQ ID NO: 41251 - DNA, 71 bp, Homo sapiens
aggtgtggccctggctgcagggaccccgaaccccagggcgtgttcctgaggctgggtgtggggattgctcc

SEQ ID NO: 41252 - DNA, 72 bp, Homo sapiens
ctggctgcagggaccccgaaccccagggcgtgttcctgaggctgggtgtggggattgctccctggcccgcac

SEQ ID NO: 41253 - DNA, 67 bp, Homo sapiens
agggaccccgaaccccagggcgtgttcctgaggctgggtgtggggattgctccctggcccgcaccgg

SEQ ID NO: 41254 - DNA, 71 bp, Homo sapiens
aaccccagggcgtgttcctgaggctgggtgtggggattgctccctggcccgcaccgggctgcggcctctgg

SEQ ID NO: 41255 - DNA, 75 bp, Homo sapiens
gtgttcctgaggctgggtgtggggattgctccctggcccgcaccgggctgcggcctctggtgtctcaggagggtg

SEQ ID NO: 41256 - DNA, 75 bp, Homo sapiens
gctgggtgtggggattgctccctggcccgcaccgggctgcggcctctggtgtctcaggagggtggctttcagaag

SEQ ID NO: 41257 - DNA, 75 bp, Homo sapiens
gggattgctccctggcccgcaccgggctgcggcctctggtgtctcaggagggtggctttcagaaggagggcctca

SEQ ID NO: 41258 - DNA, 77 bp, Homo sapiens
tgctccctggcccgcaccgggctgcggcctctggtgtctcaggagggtggctttcagaaggagggcctcactccaca

SEQ ID NO: 41259 - DNA, 77 bp, Homo sapiens
ctgcggcctctggtgtctcaggagggtggctttcagaaggagggcctcactccacaccagtggtgctgggctgaggg

SEQ ID NO: 41260 - DNA, 81 bp, Homo sapiens
tgtctcaggagggtggctttcagaaggagggcctcactccacaccagtggtgctgggctgaggggtgcactgtgccatcac

SEQ ID NO: 41261 - DNA, 78 bp, Homo sapiens
aggagggtggctttcagaaggagggcctcactccacaccagtggtgctgggctgaggggtgcactgtgccatcaccag

SEQ ID NO: 41262 - DNA, 79 bp, Homo sapiens
tttcagaaggagggcctcactccacaccagtggtgctgggctgaggggtgcactgtgccatcaccaggcccctcaggga

SEQ ID NO: 41263 - DNA, 81 bp, Homo sapiens
tgaggggtgcactgtgccatcaccaggcccctcagggaaggctctgccctctgcccgctgcctgtgggtgacacatccgga

SEQ ID NO: 41264 - DNA, 79 bp, Homo sapiens
actgtgccatcaccaggcccctcagggaaggctctgccctctgcccgctgcctgtgggtgacacatccggagcgccctg

SEQ ID NO: 41265 - DNA, 77 bp, Homo sapiens
atcaccaggcccctcagggaaggctctgccctctgcccgctgcctgtgggtgacacatccggagcgccctgtcccca

SEQ ID NO: 41266 - DNA, 75 bp, Homo sapiens
agggaaggctctgccctctgcccgctgcctgtgggtgacacatccggagcgccctgtccccagccctgcttaagt

SEQ ID NO: 41267 - DNA, 78 bp, Homo sapiens
tctgccctctgcccgctgcctgtgggtgacacatccggagcgccctgtccccagccctgcttaagttttctccactga

SEQ ID NO: 41268 - DNA, 76 bp, Homo sapiens
tctgcccgctgcctgtgggtgacacatccggagcgccctgtccccagccctgcttaagttttctccactgaacttg

SEQ ID NO: 41269 - DNA, 73 bp, Homo sapiens
tgtgggtgacacatccggagcgccctgtccccagccctgcttaagttttctccactgaacttggccttttcca

SEQ ID NO: 41270 - DNA, 74 bp, Homo sapiens
acacatccggagcgccctgtccccagccctgcttaagttttctccactgaacttggccttttccaatgcctgca

SEQ ID NO: 41271 - DNA, 76 bp, Homo sapiens
gccctgtccccagccctgcttaagttttctccactgaacttggccttttccaatgcctgcagcgtgtgcctctgtc

SEQ ID NO: 41272 - DNA, 78 bp, Homo sapiens
cagccctgcttaagttttctccactgaacttggccttttccaatgcctgcagcgtgtgcctctgtctgtctggtgtcc

SEQ ID NO: 41273 - DNA, 77 bp, Homo sapiens
ttaagttttctccactgaacttggccttttccaatgcctgcagcgtgtgcctctgtctgtctggtgtcccctctgcc

SEQ ID NO: 41274 - DNA, 83 bp, Homo sapiens
tttctccactgaacttggccttttccaatgcctgcagcgtgtgcctctgtctgtctggtgtcccctctgcctctcacatgcga

SEQ ID NO: 41275 - DNA, 85 bp, Homo sapiens
aacttggccttttccaatgcctgcagcgtgtgcctctgtctgtctggtgtcccctctgcctctcacatgcgaggatgctctgcag

SEQ ID NO: 41276 - DNA, 85 bp, Homo sapiens
ttttccaatgcctgcagcgtgtgcctctgtctgtctggtgtcccctctgcctctcacatgcgaggatgctctgcaggggcagggg

SEQ ID NO: 41277 - DNA, 82 bp, Homo sapiens
agcgtgtgcctctgtctgtctggtgtcccctctgcctctcacatgcgaggatgctctgcaggggcaggggtgaaggggcaac

SEQ ID NO: 41278 - DNA, 85 bp, Homo sapiens
tctgtctgtctggtgtcccctctgcctctcacatgcgaggatgctctgcaggggcaggggtgaaggggcaactgtggagagcaca

SEQ ID NO: 41279 - DNA, 82 bp, Homo sapiens
ctgtctggtgtcccctctgcctctcacatgcgaggatgctctgcaggggcaggggtgaaggggcaactgtggagagcacagg

SEQ ID NO: 41280 - DNA, 84 bp, Homo sapiens
tctgcctctcacatgcgaggatgctctgcaggggcaggggtgaaggggcaactgtggagagcacaggggtgagtgtggctacta

SEQ ID NO: 41281 - DNA, 84 bp, Homo sapiens
tctcacatgcgaggatgctctgcaggggcaggggtgaaggggcaactgtggagagcacaggggtgagtgtggctactatactca

SEQ ID NO: 41282 - DNA, 83 bp, Homo sapiens
atgctctgcaggggcaggggtgaaggggcaactgtggagagcacaggggtgagtgtggctactatactcagtgtgtctatgca

SEQ ID NO: 41283 - DNA, 82 bp, Homo sapiens
aactgtggagagcacaggggtgagtgtggctactatactcagtgtgtctatgcagcaacatgtaagagaggccttcagggag

SEQ ID NO: 41284 - DNA, 86 bp, Homo sapiens
gcacaggggtgagtgtggctactatactcagtgtgtctatgcagcaacatgtaagagaggccttcagggagtgctgcgagtgtcta

SEQ ID NO: 41285 - DNA, 87 bp, Homo sapiens
tactatactcagtgtgtctatgcagcaacatgtaagagaggccttcagggagtgctgcgagtgtctagctggagacagcaggtacaa

SEQ ID NO: 41286 - DNA, 85 bp, Homo sapiens
actcagtgtgtctatgcagcaacatgtaagagaggccttcagggagtgctgcgagtgtctagctggagacagcaggtacaaaggc

SEQ ID NO: 41287 - DNA, 86 bp, Homo sapiens
tctatgcagcaacatgtaagagaggccttcagggagtgctgcgagtgtctagctggagacagcaggtacaaaggccctgtggatgc

SEQ ID NO: 41288 - DNA, 83 bp, Homo sapiens
acatgtaagagaggccttcagggagtgctgcgagtgtctagctggagacagcaggtacaaaggccctgtggatgctgcaacaa

SEQ ID NO: 41289 - DNA, 82 bp, Homo sapiens
ccttcagggagtgctgcgagtgtctagctggagacagcaggtacaaaggccctgtggatgctgcaacaagcctgcctctaag

SEQ ID NO: 41290 - DNA, 83 bp, Homo sapiens
agggagtgctgcgagtgtctagctggagacagcaggtacaaaggccctgtggatgctgcaacaagcctgcctctaaggaggca

SEQ ID NO: 41291 - DNA, 81 bp, Homo sapiens
cgagtgtctagctggagacagcaggtacaaaggccctgtggatgctgcaacaagcctgcctctaaggaggcaggagatggg

SEQ ID NO: 41292 - DNA, 80 bp, Homo sapiens
gagacagcaggtacaaaggccctgtggatgctgcaacaagcctgcctctaaggaggcaggagatggggcaaccagggaga

SEQ ID NO: 41293 - DNA, 78 bp, Homo sapiens
gtacaaaggccctgtggatgctgcaacaagcctgcctctaaggaggcaggagatggggcaaccagggagaggctgaaa

SEQ ID NO: 41294 - DNA, 80 bp, Homo sapiens
atgctgcaacaagcctgcctctaaggaggcaggagatggggcaaccagggagaggctgaaaccactgcctgcggcctgga

SEQ ID NO: 41295 - DNA, 76 bp, Homo sapiens
aagcctgcctctaaggaggcaggagatggggcaaccagggagaggctgaaaccactgcctgcggcctggagtataa

SEQ ID NO: 41296 - DNA, 76 bp, Homo sapiens
taaggaggcaggagatggggcaaccagggagaggctgaaaccactgcctgcggcctggagtataacactaaggaca

SEQ ID NO: 41297 - DNA, 74 bp, Homo sapiens
aaccagggagaggctgaaaccactgcctgcggcctggagtataacactaaggacagtgccactggccgcctcgg

SEQ ID NO: 41298 - DNA, 75 bp, Homo sapiens
aaaccactgcctgcggcctggagtataacactaaggacagtgccactggccgcctcggtgcagtgggtccaagac

SEQ ID NO: 41299 - DNA, 76 bp, Homo sapiens
tgcggcctggagtataacactaaggacagtgccactggccgcctcggtgcagtgggtccaagacgggggcagcctg

SEQ ID NO: 41300 - DNA, 75 bp, Homo sapiens
agtataacactaaggacagtgccactggccgcctcggtgcagtgggtccaagacgggggcagcctggctggctgg

SEQ ID NO: 41301 - DNA, 77 bp, Homo sapiens
taaggacagtgccactggccgcctcggtgcagtgggtccaagacgggggcagcctggctggctggtgggagccgatg

SEQ ID NO: 41302 - DNA, 74 bp, Homo sapiens
actggccgcctcggtgcagtgggtccaagacgggggcagcctggctggctggtgggagccgatggtttattaca

SEQ ID NO: 41303 - DNA, 75 bp, Homo sapiens
tggctggctggtgggagccgatggtttattacattggcgaatggagtgatctggtcccctccaaggtggaaggta

SEQ ID NO: 41304 - DNA, 71 bp, Homo sapiens
tggtgggagccgatggtttattacattggcgaatggagtgatctggtcccctccaaggtggaaggtaaaaa

SEQ ID NO: 41305 - DNA, 70 bp, Homo sapiens
atggtttattacattggcgaatggagtgatctggtcccctccaaggtggaaggtaaaaagcgatttagga

SEQ ID NO: 41306 - DNA, 73 bp, Homo sapiens
ttattacattggcgaatggagtgatctggtcccctccaaggtggaaggtaaaaagcgatttaggatgagattc

SEQ ID NO: 41307 - DNA, 72 bp, Homo sapiens
atggagtgatctggtcccctccaaggtggaaggtaaaaagcgatttaggatgagattcttgggacaagtgta

SEQ ID NO: 41308 - DNA, 72 bp, Homo sapiens
tccaaggtggaaggtaaaaagcgatttaggatgagattcttgggacaagtgtatctttgcaagggtcaagag

SEQ ID NO: 41309 - DNA, 76 bp, Homo sapiens
aaaagcgatttaggatgagattcttgggacaagtgtatctttgcaagggtcaagaggcaggcagggtgctgtgccg

SEQ ID NO: 41310 - DNA, 80 bp, Homo sapiens
taggatgagattcttgggacaagtgtatctttgcaagggtcaagaggcaggcagggtgctgtgccgggggctgtgctgag

SEQ ID NO: 41311 - DNA, 78 bp, Homo sapiens
ttcttgggacaagtgtatctttgcaagggtcaagaggcaggcagggtgctgtgccgggggctgtgctgagtccaagag

SEQ ID NO: 41312 - DNA, 77 bp, Homo sapiens
aagtgtatctttgcaagggtcaagaggcaggcagggtgctgtgccgggggctgtgctgagtccaagagggccttgaa

SEQ ID NO: 41313 - DNA, 75 bp, Homo sapiens
aagggtcaagaggcaggcagggtgctgtgccgggggctgtgctgagtccaagagggccttgaaggaaggccgtga

SEQ ID NO: 41314 - DNA, 75 bp, Homo sapiens
aggcaggcagggtgctgtgccgggggctgtgctgagtccaagagggccttgaaggaaggccgtgaccaaggccac

SEQ ID NO: 41315 - DNA, 75 bp, Homo sapiens
gggggctgtgctgagtccaagagggccttgaaggaaggccgtgaccaaggccacgcccttgctgggtcagctgga

SEQ ID NO: 41316 - DNA, 74 bp, Homo sapiens
ctgagtccaagagggccttgaaggaaggccgtgaccaaggccacgcccttgctgggtcagctggataaaaatga

SEQ ID NO: 41317 - DNA, 74 bp, Homo sapiens
aagagggccttgaaggaaggccgtgaccaaggccacgcccttgctgggtcagctggataaaaatgactctctca

SEQ ID NO: 41318 - DNA, 80 bp, Homo sapiens
ttgaaggaaggccgtgaccaaggccacgcccttgctgggtcagctggataaaaatgactctctcagatcagcagagcaat

SEQ ID NO: 41319 - DNA, 87 bp, Homo sapiens
gtgaccaaggccacgcccttgctgggtcagctggataaaaatgactctctcagatcagcagagcaattctgcatctgcacattgatt

SEQ ID NO: 41320 - DNA, 85 bp, Homo sapiens
ccacgcccttgctgggtcagctggataaaaatgactctctcagatcagcagagcaattctgcatctgcacattgatttatagttt

SEQ ID NO: 41321 - DNA, 88 bp, Homo sapiens
ttgctgggtcagctggataaaaatgactctctcagatcagcagagcaattctgcatctgcacattgatttatagttttgtgaaactca

SEQ ID NO: 41322 - DNA, 86 bp, Homo sapiens
ctggataaaaatgactctctcagatcagcagagcaattctgcatctgcacattgatttatagttttgtgaaactcatttctgagga

SEQ ID NO: 41323 - DNA, 86 bp, Homo sapiens
taaaaatgactctctcagatcagcagagcaattctgcatctgcacattgatttatagttttgtgaaactcatttctgaggatgtaa

SEQ ID NO: 41324 - DNA, 84 bp, Homo sapiens
tcagatcagcagagcaattctgcatctgcacattgatttatagttttgtgaaactcatttctgaggatgtaacaatcccttcct

SEQ ID NO: 41325 - DNA, 79 bp, Homo sapiens
ttctgcatctgcacattgatttatagttttgtgaaactcatttctgaggatgtaacaatcccttccttgggtgcgataa

SEQ ID NO: 41326 - DNA, 73 bp, Homo sapiens
acattgatttatagttttgtgaaactcatttctgaggatgtaacaatcccttccttgggtgcgataaccttgc

SEQ ID NO: 41327 - DNA, 73 bp, Homo sapiens
ttatagttttgtgaaactcatttctgaggatgtaacaatcccttccttgggtgcgataaccttgccttgccat

SEQ ID NO: 41328 - DNA, 78 bp, Homo sapiens
aactcatttctgaggatgtaacaatcccttccttgggtgcgataaccttgccttgccattgagctctgctgatgggat

SEQ ID NO: 41329 - DNA, 80 bp, Homo sapiens
atttctgaggatgtaacaatcccttccttgggtgcgataaccttgccttgccattgagctctgctgatgggattgcagaa

SEQ ID NO: 41330 - DNA, 79 bp, Homo sapiens
atgtaacaatcccttccttgggtgcgataaccttgccttgccattgagctctgctgatgggattgcagaagtgtaaatc

SEQ ID NO: 41331 - DNA, 81 bp, Homo sapiens
ttccttgggtgcgataaccttgccttgccattgagctctgctgatgggattgcagaagtgtaaatcttcagatgcggacct

SEQ ID NO: 41332 - DNA, 84 bp, Homo sapiens
ttgagctctgctgatgggattgcagaagtgtaaatcttcagatgcggaccttctagggtgtggacaatgtctgcacggccgtca

SEQ ID NO: 41333 - DNA, 83 bp, Homo sapiens
ctgatgggattgcagaagtgtaaatcttcagatgcggaccttctagggtgtggacaatgtctgcacggccgtcatcgctgcca

SEQ ID NO: 41334 - DNA, 82 bp, Homo sapiens
cagaagtgtaaatcttcagatgcggaccttctagggtgtggacaatgtctgcacggccgtcatcgctgccagcggctctcca

SEQ ID NO: 41335 - DNA, 81 bp, Homo sapiens
aaatcttcagatgcggaccttctagggtgtggacaatgtctgcacggccgtcatcgctgccagcggctctccagtgtgcgg

SEQ ID NO: 41336 - DNA, 84 bp, Homo sapiens
tcagatgcggaccttctagggtgtggacaatgtctgcacggccgtcatcgctgccagcggctctccagtgtgcggtctgctttc

SEQ ID NO: 41337 - DNA, 82 bp, Homo sapiens
accttctagggtgtggacaatgtctgcacggccgtcatcgctgccagcggctctccagtgtgcggtctgctttccctgcaca

SEQ ID NO: 41338 - DNA, 87 bp, Homo sapiens
tgtggacaatgtctgcacggccgtcatcgctgccagcggctctccagtgtgcggtctgctttccctgcacacacgcacttacacatg

SEQ ID NO: 41339 - DNA, 88 bp, Homo sapiens
tgcacggccgtcatcgctgccagcggctctccagtgtgcggtctgctttccctgcacacacgcacttacacatgtgcacacacacaaa

SEQ ID NO: 41340 - DNA, 71 bp, Homo sapiens
atgtgcacacacacaaatgttgattttcaaactcttggagtaggaagaccttaccatggttttttaaatcc

SEQ ID NO: 41341 - DNA, 68 bp, Homo sapiens
cacacacaaatgttgattttcaaactcttggagtaggaagaccttaccatggttttttaaatccccta

SEQ ID NO: 41342 - DNA, 66 bp, Homo sapiens
tgattttcaaactcttggagtaggaagaccttaccatggttttttaaatcccctattttgtttgga

SEQ ID NO: 41343 - DNA, 66 bp, Homo sapiens
aaactcttggagtaggaagaccttaccatggttttttaaatcccctattttgtttggagtcacaca

SEQ ID NO: 41344 - DNA, 71 bp, Homo sapiens
taggaagaccttaccatggttttttaaatcccctattttgtttggagtcacacagggatcaagatgattca

SEQ ID NO: 41345 - DNA, 68 bp, Homo sapiens
accttaccatggttttttaaatcccctattttgtttggagtcacacagggatcaagatgattcagttt

SEQ ID NO: 41346 - DNA, 70 bp, Homo sapiens
tttttaaatcccctattttgtttggagtcacacagggatcaagatgattcagttttcaaaaaataaagca

SEQ ID NO: 41347 - DNA, 74 bp, Homo sapiens
ccctattttgtttggagtcacacagggatcaagatgattcagttttcaaaaaataaagcaaaacagatggcaca

SEQ ID NO: 41348 - DNA, 77 bp, Homo sapiens
ttttgtttggagtcacacagggatcaagatgattcagttttcaaaaaataaagcaaaacagatggcacagctggatg

SEQ ID NO: 41349 - DNA, 81 bp, Homo sapiens
agtcacacagggatcaagatgattcagttttcaaaaaataaagcaaaacagatggcacagctggatggctgctgtgtgcgt

SEQ ID NO: 41350 - DNA, 80 bp, Homo sapiens
atcaagatgattcagttttcaaaaaataaagcaaaacagatggcacagctggatggctgctgtgtgcgttcctctctccc

SEQ ID NO: 41351 - DNA, 77 bp, Homo sapiens
attcagttttcaaaaaataaagcaaaacagatggcacagctggatggctgctgtgtgcgttcctctctccctgcccc

SEQ ID NO: 41352 - DNA, 78 bp, Homo sapiens
aaaaataaagcaaaacagatggcacagctggatggctgctgtgtgcgttcctctctccctgcccctcccctggtggca

SEQ ID NO: 41353 - DNA, 79 bp, Homo sapiens
aagcaaaacagatggcacagctggatggctgctgtgtgcgttcctctctccctgcccctcccctggtggcagccccctc

SEQ ID NO: 41354 - DNA, 76 bp, Homo sapiens
tggatggctgctgtgtgcgttcctctctccctgcccctcccctggtggcagccccctcccccactgggtgtggctg

SEQ ID NO: 41355 - DNA, 72 bp, Homo sapiens
ctgtgtgcgttcctctctccctgcccctcccctggtggcagccccctcccccactgggtgtggctgggatag

SEQ ID NO: 41356 - DNA, 72 bp, Homo sapiens
tctctccctgcccctcccctggtggcagccccctcccccactgggtgtggctgggataggcggatagagagg

SEQ ID NO: 41357 - DNA, 75 bp, Homo sapiens
cctcccccactgggtgtggctgggataggcggatagagagggtgtgtctgtgagcgaatggtaatgataaaacag

SEQ ID NO: 41358 - DNA, 76 bp, Homo sapiens
tgggtgtggctgggataggcggatagagagggtgtgtctgtgagcgaatggtaatgataaaacagtaaacaaaaga

SEQ ID NO: 41359 - DNA, 77 bp, Homo sapiens
ctgggataggcggatagagagggtgtgtctgtgagcgaatggtaatgataaaacagtaaacaaaagatgctcctgtc

SEQ ID NO: 41360 - DNA, 77 bp, Homo sapiens
taggcggatagagagggtgtgtctgtgagcgaatggtaatgataaaacagtaaacaaaagatgctcctgtcctcctg

SEQ ID NO: 41361 - DNA, 74 bp, Homo sapiens
ggtgtgtctgtgagcgaatggtaatgataaaacagtaaacaaaagatgctcctgtcctcctggggacaccaggg

SEQ ID NO: 41362 - DNA, 73 bp, Homo sapiens
tgtgagcgaatggtaatgataaaacagtaaacaaaagatgctcctgtcctcctggggacaccagggggagaaa

SEQ ID NO: 41363 - DNA, 72 bp, Homo sapiens
atggtaatgataaaacagtaaacaaaagatgctcctgtcctcctggggacaccagggggagaaagtcagata

SEQ ID NO: 41364 - DNA, 71 bp, Homo sapiens
ataaaacagtaaacaaaagatgctcctgtcctcctggggacaccagggggagaaagtcagatagaggaaga

SEQ ID NO: 41365 - DNA, 73 bp, Homo sapiens
aaaagatgctcctgtcctcctggggacaccagggggagaaagtcagatagaggaagaggcagccaataggaag

SEQ ID NO: 41366 - DNA, 72 bp, Homo sapiens
tcctgtcctcctggggacaccagggggagaaagtcagatagaggaagaggcagccaataggaaggagtcctt

SEQ ID NO: 41367 - DNA, 72 bp, Homo sapiens
tggggacaccagggggagaaagtcagatagaggaagaggcagccaataggaaggagtcctttctagtttgct

SEQ ID NO: 41368 - DNA, 71 bp, Homo sapiens
agggggagaaagtcagatagaggaagaggcagccaataggaaggagtcctttctagtttgctttcttgagt

SEQ ID NO: 41369 - DNA, 75 bp, Homo sapiens
aagtcagatagaggaagaggcagccaataggaaggagtcctttctagtttgctttcttgagttctgtgacagtta

SEQ ID NO: 41370 - DNA, 74 bp, Homo sapiens
atagaggaagaggcagccaataggaaggagtcctttctagtttgctttcttgagttctgtgacagttagaatta

SEQ ID NO: 41371 - DNA, 72 bp, Homo sapiens
agccaataggaaggagtcctttctagtttgctttcttgagttctgtgacagttagaattaggtttggccgca

SEQ ID NO: 41372 - DNA, 74 bp, Homo sapiens
tttctagtttgctttcttgagttctgtgacagttagaattaggtttggccgcaaataccaggctatccagtata

SEQ ID NO: 41373 - DNA, 75 bp, Homo sapiens
tttgctttcttgagttctgtgacagttagaattaggtttggccgcaaataccaggctatccagtatagtggctta

SEQ ID NO: 41374 - DNA, 73 bp, Homo sapiens
acagttagaattaggtttggccgcaaataccaggctatccagtatagtggcttatggtccagagattttattc

SEQ ID NO: 41375 - DNA, 74 bp, Homo sapiens
ccgcaaataccaggctatccagtatagtggcttatggtccagagattttattctgttatctaatggaggttggg

SEQ ID NO: 41376 - DNA, 73 bp, Homo sapiens
accaggctatccagtatagtggcttatggtccagagattttattctgttatctaatggaggttgggggtggtc

SEQ ID NO: 41377 - DNA, 71 bp, Homo sapiens
agtatagtggcttatggtccagagattttattctgttatctaatggaggttgggggtggtcccctgaggtg

SEQ ID NO: 41378 - DNA, 70 bp, Homo sapiens
cttatggtccagagattttattctgttatctaatggaggttgggggtggtcccctgaggtgggcctggag

SEQ ID NO: 41379 - DNA, 73 bp, Homo sapiens
tattctgttatctaatggaggttgggggtggtcccctgaggtgggcctggaggcaggcggggatagtgcatcc

SEQ ID NO: 41380 - DNA, 71 bp, Homo sapiens
tctaatggaggttgggggtggtcccctgaggtgggcctggaggcaggcggggatagtgcatcccaggaccc

SEQ ID NO: 41381 - DNA, 71 bp, Homo sapiens
gggtggtcccctgaggtgggcctggaggcaggcggggatagtgcatcccaggacccctgggtaacggagca

SEQ ID NO: 41382 - DNA, 72 bp, Homo sapiens
ccctgaggtgggcctggaggcaggcggggatagtgcatcccaggacccctgggtaacggagcacggcccaga

SEQ ID NO: 41383 - DNA, 75 bp, Homo sapiens
cctggaggcaggcggggatagtgcatcccaggacccctgggtaacggagcacggcccagagcctgctggcctgac

SEQ ID NO: 41384 - DNA, 75 bp, Homo sapiens
ggcggggatagtgcatcccaggacccctgggtaacggagcacggcccagagcctgctggcctgacgccctcctga

SEQ ID NO: 41385 - DNA, 77 bp, Homo sapiens
atagtgcatcccaggacccctgggtaacggagcacggcccagagcctgctggcctgacgccctcctgagcctgagcc

SEQ ID NO: 41386 - DNA, 76 bp, Homo sapiens
aggacccctgggtaacggagcacggcccagagcctgctggcctgacgccctcctgagcctgagccctcactgacag

SEQ ID NO: 41387 - DNA, 78 bp, Homo sapiens
tgggtaacggagcacggcccagagcctgctggcctgacgccctcctgagcctgagccctcactgacaggtcctcgcct

SEQ ID NO: 41388 - DNA, 79 bp, Homo sapiens
agcacggcccagagcctgctggcctgacgccctcctgagcctgagccctcactgacaggtcctcgccttcctccccaca

SEQ ID NO: 41389 - DNA, 74 bp, Homo sapiens
cctcctgagcctgagccctcactgacaggtcctcgccttcctccccacagaagggctttcgaggaggaagaaga

SEQ ID NO: 41390 - DNA, 72 bp, Homo sapiens
agccctcactgacaggtcctcgccttcctccccacagaagggctttcgaggaggaagaagacgtcgctctgg

SEQ ID NO: 41391 - DNA, 71 bp, Homo sapiens
actgacaggtcctcgccttcctccccacagaagggctttcgaggaggaagaagacgtcgctctggtttgtg

SEQ ID NO: 41392 - DNA, 75 bp, Homo sapiens
aggaggaagaagacgtcgctctggtttgtggggtctctgctgctggtgtccgtcctcatagtcaccgtcgggctg

SEQ ID NO: 41393 - DNA, 78 bp, Homo sapiens
agaagacgtcgctctggtttgtggggtctctgctgctggtgtccgtcctcatagtcaccgtcgggctggctgccacca

SEQ ID NO: 41394 - DNA, 77 bp, Homo sapiens
tggtttgtggggtctctgctgctggtgtccgtcctcatagtcaccgtcgggctggctgccaccaccaggacggagaa

SEQ ID NO: 41395 - DNA, 78 bp, Homo sapiens
gtctctgctgctggtgtccgtcctcatagtcaccgtcgggctggctgccaccaccaggacggagaatgtgaccgttgg

SEQ ID NO: 41396 - DNA, 74 bp, Homo sapiens
ctggtgtccgtcctcatagtcaccgtcgggctggctgccaccaccaggacggagaatgtgaccgttgggggcta

SEQ ID NO: 41397 - DNA, 73 bp, Homo sapiens
gtccgtcctcatagtcaccgtcgggctggctgccaccaccaggacggagaatgtgaccgttgggggctactac

SEQ ID NO: 41398 - DNA, 73 bp, Homo sapiens
atagtcaccgtcgggctggctgccaccaccaggacggagaatgtgaccgttgggggctactacccagggatca

SEQ ID NO: 41399 - DNA, 75 bp, Homo sapiens
ctggctgccaccaccaggacggagaatgtgaccgttgggggctactacccagggatcattgtgagtgcgccgggc

SEQ ID NO: 41400 - DNA, 71 bp, Homo sapiens
accaccaggacggagaatgtgaccgttgggggctactacccagggatcattgtgagtgcgccgggcgggcg

SEQ ID NO: 41401 - DNA, 71 bp, Homo sapiens
aggacggagaatgtgaccgttgggggctactacccagggatcattgtgagtgcgccgggcgggcggcctgg

SEQ ID NO: 41402 - DNA, 70 bp, Homo sapiens
atgtgaccgttgggggctactacccagggatcattgtgagtgcgccgggcgggcggcctgggccggggag

SEQ ID NO: 41403 - DNA, 72 bp, Homo sapiens
ggctactacccagggatcattgtgagtgcgccgggcgggcggcctgggccggggagggcagggtggtgtgtg

SEQ ID NO: 41404 - DNA, 75 bp, Homo sapiens
tacccagggatcattgtgagtgcgccgggcgggcggcctgggccggggagggcagggtggtgtgtggctctctca

SEQ ID NO: 41405 - DNA, 75 bp, Homo sapiens
tcattgtgagtgcgccgggcgggcggcctgggccggggagggcagggtggtgtgtggctctctcagggtggagtc

SEQ ID NO: 41406 - DNA, 76 bp, Homo sapiens
gggagggcagggtggtgtgtggctctctcagggtggagtccacgccagctcacagggctggggctgaaggtgggga

SEQ ID NO: 41407 - DNA, 78 bp, Homo sapiens
ggtggtgtgtggctctctcagggtggagtccacgccagctcacagggctggggctgaaggtggggaggcttcgatcag

SEQ ID NO: 41408 - DNA, 81 bp, Homo sapiens
tgtgtggctctctcagggtggagtccacgccagctcacagggctggggctgaaggtggggaggcttcgatcagtgcttgtg

SEQ ID NO: 41409 - DNA, 79 bp, Homo sapiens
tctcagggtggagtccacgccagctcacagggctggggctgaaggtggggaggcttcgatcagtgcttgtggtcggcag

SEQ ID NO: 41410 - DNA, 77 bp, Homo sapiens
agtccacgccagctcacagggctggggctgaaggtggggaggcttcgatcagtgcttgtggtcggcagggttatggc

SEQ ID NO: 41411 - DNA, 79 bp, Homo sapiens
tcacagggctggggctgaaggtggggaggcttcgatcagtgcttgtggtcggcagggttatggcccccacagacatgca

SEQ ID NO: 41412 - DNA, 76 bp, Homo sapiens
gggctgaaggtggggaggcttcgatcagtgcttgtggtcggcagggttatggcccccacagacatgcacttcccaa

SEQ ID NO: 41413 - DNA, 74 bp, Homo sapiens
aaggtggggaggcttcgatcagtgcttgtggtcggcagggttatggcccccacagacatgcacttcccaatccc

SEQ ID NO: 41414 - DNA, 75 bp, Homo sapiens
aggcttcgatcagtgcttgtggtcggcagggttatggcccccacagacatgcacttcccaatccccaggacctgg

SEQ ID NO: 41415 - DNA, 75 bp, Homo sapiens
agtgcttgtggtcggcagggttatggcccccacagacatgcacttcccaatccccaggacctgggacagtggcag

SEQ ID NO: 41416 - DNA, 76 bp, Homo sapiens
tcggcagggttatggcccccacagacatgcacttcccaatccccaggacctgggacagtggcaggtccaaggcaga

SEQ ID NO: 41417 - DNA, 74 bp, Homo sapiens
ttatggcccccacagacatgcacttcccaatccccaggacctgggacagtggcaggtccaaggcagaggggaat

SEQ ID NO: 41418 - DNA, 73 bp, Homo sapiens
acagacatgcacttcccaatccccaggacctgggacagtggcaggtccaaggcagaggggaattggggttgag

SEQ ID NO: 41419 - DNA, 71 bp, Homo sapiens
tcccaatccccaggacctgggacagtggcaggtccaaggcagaggggaattggggttgaggtccaagttga

SEQ ID NO: 41420 - DNA, 72 bp, Homo sapiens
caggacctgggacagtggcaggtccaaggcagaggggaattggggttgaggtccaagttgatctcaaaatag

SEQ ID NO: 41421 - DNA, 72 bp, Homo sapiens
tgggacagtggcaggtccaaggcagaggggaattggggttgaggtccaagttgatctcaaaatagggccagg

SEQ ID NO: 41422 - DNA, 70 bp, Homo sapiens
aggtccaaggcagaggggaattggggttgaggtccaagttgatctcaaaatagggccaggtgccctccat

SEQ ID NO: 41423 - DNA, 71 bp, Homo sapiens
aattggggttgaggtccaagttgatctcaaaatagggccaggtgccctccattgtctgggttggcccgatg

SEQ ID NO: 41424 - DNA, 74 bp, Homo sapiens
ttgaggtccaagttgatctcaaaatagggccaggtgccctccattgtctgggttggcccgatgtggtcacaggg

SEQ ID NO: 41425 - DNA, 72 bp, Homo sapiens
aaaatagggccaggtgccctccattgtctgggttggcccgatgtggtcacagggtgaccagagggcaggagg

SEQ ID NO: 41426 - DNA, 73 bp, Homo sapiens
aggtgccctccattgtctgggttggcccgatgtggtcacagggtgaccagagggcaggaggggggccagagcc

SEQ ID NO: 41427 - DNA, 73 bp, Homo sapiens
gttggcccgatgtggtcacagggtgaccagagggcaggaggggggccagagcccggcaacaggaaatgtccaa

SEQ ID NO: 41428 - DNA, 72 bp, Homo sapiens
caggaggggggccagagcccggcaacaggaaatgtccaaggtggaggaggggccaggagcccaggatgtcca

SEQ ID NO: 41429 - DNA, 71 bp, Homo sapiens
gccagagcccggcaacaggaaatgtccaaggtggaggaggggccaggagcccaggatgtccaaaaaggccg

SEQ ID NO: 41430 - DNA, 72 bp, Homo sapiens
ggcaacaggaaatgtccaaggtggaggaggggccaggagcccaggatgtccaaaaaggccggacagagcctc

SEQ ID NO: 41431 - DNA, 71 bp, Homo sapiens
aaatgtccaaggtggaggaggggccaggagcccaggatgtccaaaaaggccggacagagcctccccaagca

SEQ ID NO: 41432 - DNA, 72 bp, Homo sapiens
gtggaggaggggccaggagcccaggatgtccaaaaaggccggacagagcctccccaagcatcctggaaggat

SEQ ID NO: 41433 - DNA, 72 bp, Homo sapiens
ggccaggagcccaggatgtccaaaaaggccggacagagcctccccaagcatcctggaaggattttaccctga

SEQ ID NO: 41434 - DNA, 70 bp, Homo sapiens
atgtccaaaaaggccggacagagcctccccaagcatcctggaaggattttaccctgagggaccaggtcga

SEQ ID NO: 41435 - DNA, 73 bp, Homo sapiens
ggacagagcctccccaagcatcctggaaggattttaccctgagggaccaggtcgaccaccatagcccatggaa

SEQ ID NO: 41436 - DNA, 70 bp, Homo sapiens
agcctccccaagcatcctggaaggattttaccctgagggaccaggtcgaccaccatagcccatggaaggg

SEQ ID NO: 41437 - DNA, 67 bp, Homo sapiens
atcctggaaggattttaccctgagggaccaggtcgaccaccatagcccatggaaggggaaagtaact

SEQ ID NO: 41438 - DNA, 68 bp, Homo sapiens
tgagggaccaggtcgaccaccatagcccatggaaggggaaagtaactttaaacgattcctaccaagaa

SEQ ID NO: 41439 - DNA, 66 bp, Homo sapiens
accaggtcgaccaccatagcccatggaaggggaaagtaactttaaacgattcctaccaagaagccg

SEQ ID NO: 41440 - DNA, 67 bp, Homo sapiens
atagcccatggaaggggaaagtaactttaaacgattcctaccaagaagccgtgggtcaaagatcgta

SEQ ID NO: 41441 - DNA, 67 bp, Homo sapiens
atggaaggggaaagtaactttaaacgattcctaccaagaagccgtgggtcaaagatcgtattagtga

SEQ ID NO: 41442 - DNA, 69 bp, Homo sapiens
aaagtaactttaaacgattcctaccaagaagccgtgggtcaaagatcgtattagtgacgtgatcgcgtg

SEQ ID NO: 41443 - DNA, 71 bp, Homo sapiens
tttaaacgattcctaccaagaagccgtgggtcaaagatcgtattagtgacgtgatcgcgtgggaacggcca

SEQ ID NO: 41444 - DNA, 75 bp, Homo sapiens
aagccgtgggtcaaagatcgtattagtgacgtgatcgcgtgggaacggccagaaggtggtggtgctgacctcatc

SEQ ID NO: 41445 - DNA, 75 bp, Homo sapiens
aaagatcgtattagtgacgtgatcgcgtgggaacggccagaaggtggtggtgctgacctcatccacccgtcaggc

SEQ ID NO: 41446 - DNA, 77 bp, Homo sapiens
tattagtgacgtgatcgcgtgggaacggccagaaggtggtggtgctgacctcatccacccgtcaggccagattttga

SEQ ID NO: 41447 - DNA, 75 bp, Homo sapiens
gtgatcgcgtgggaacggccagaaggtggtggtgctgacctcatccacccgtcaggccagattttgaacagtaag

SEQ ID NO: 41448 - DNA, 73 bp, Homo sapiens
cggccagaaggtggtggtgctgacctcatccacccgtcaggccagattttgaacagtaaggcggcgaggtaaa

SEQ ID NO: 41449 - DNA, 74 bp, Homo sapiens
gtggtggtgctgacctcatccacccgtcaggccagattttgaacagtaaggcggcgaggtaaattgatggtaac

SEQ ID NO: 41450 - DNA, 74 bp, Homo sapiens
tgacctcatccacccgtcaggccagattttgaacagtaaggcggcgaggtaaattgatggtaacctaattggca

SEQ ID NO: 41451 - DNA, 71 bp, Homo sapiens
atccacccgtcaggccagattttgaacagtaaggcggcgaggtaaattgatggtaacctaattggcaagaa

SEQ ID NO: 41452 - DNA, 72 bp, Homo sapiens
gccagattttgaacagtaaggcggcgaggtaaattgatggtaacctaattggcaagaattggtcacccagat

SEQ ID NO: 41453 - DNA, 71 bp, Homo sapiens
attttgaacagtaaggcggcgaggtaaattgatggtaacctaattggcaagaattggtcacccagattcaa

SEQ ID NO: 41454 - DNA, 71 bp, Homo sapiens
gtaaggcggcgaggtaaattgatggtaacctaattggcaagaattggtcacccagattcaaaagtatcaag

SEQ ID NO: 41455 - DNA, 70 bp, Homo sapiens
gaggtaaattgatggtaacctaattggcaagaattggtcacccagattcaaaagtatcaaggttttttga

SEQ ID NO: 41456 - DNA, 70 bp, Homo sapiens
gatggtaacctaattggcaagaattggtcacccagattcaaaagtatcaaggttttttgaactatgaaat

SEQ ID NO: 41457 - DNA, 73 bp, Homo sapiens
tggcaagaattggtcacccagattcaaaagtatcaaggttttttgaactatgaaattacatcctctgtcgtta

SEQ ID NO: 41458 - DNA, 69 bp, Homo sapiens
cccagattcaaaagtatcaaggttttttgaactatgaaattacatcctctgtcgttagtaaaagaattc

SEQ ID NO: 41459 - DNA, 72 bp, Homo sapiens
atcaaggttttttgaactatgaaattacatcctctgtcgttagtaaaagaattctcctaagtgcctgcattc

SEQ ID NO: 41460 - DNA, 76 bp, Homo sapiens
tttttgaactatgaaattacatcctctgtcgttagtaaaagaattctcctaagtgcctgcattctgcacagtgaac

SEQ ID NO: 41461 - DNA, 79 bp, Homo sapiens
tacatcctctgtcgttagtaaaagaattctcctaagtgcctgcattctgcacagtgaacctctgttggaatggcttgga

SEQ ID NO: 41462 - DNA, 81 bp, Homo sapiens
ttagtaaaagaattctcctaagtgcctgcattctgcacagtgaacctctgttggaatggcttggatcagctgcgatgccct

SEQ ID NO: 41463 - DNA, 84 bp, Homo sapiens
aaagaattctcctaagtgcctgcattctgcacagtgaacctctgttggaatggcttggatcagctgcgatgcccttcacatgcc

SEQ ID NO: 41464 - DNA, 85 bp, Homo sapiens
ctaagtgcctgcattctgcacagtgaacctctgttggaatggcttggatcagctgcgatgcccttcacatgccccagagcctggt

SEQ ID NO: 41465 - DNA, 85 bp, Homo sapiens
tctgcacagtgaacctctgttggaatggcttggatcagctgcgatgcccttcacatgccccagagcctggttgctacgtcataaa

SEQ ID NO: 41466 - DNA, 82 bp, Homo sapiens
tggaatggcttggatcagctgcgatgcccttcacatgccccagagcctggttgctacgtcataaagtgctaaagcaagattt

SEQ ID NO: 41467 - DNA, 79 bp, Homo sapiens
cttggatcagctgcgatgcccttcacatgccccagagcctggttgctacgtcataaagtgctaaagcaagattttaaaa

SEQ ID NO: 41468 - DNA, 78 bp, Homo sapiens
tgcgatgcccttcacatgccccagagcctggttgctacgtcataaagtgctaaagcaagattttaaaatgcggcttct

SEQ ID NO: 41469 - DNA, 79 bp, Homo sapiens
tcacatgccccagagcctggttgctacgtcataaagtgctaaagcaagattttaaaatgcggcttcttcaatctcatta

SEQ ID NO: 41470 - DNA, 77 bp, Homo sapiens
cagagcctggttgctacgtcataaagtgctaaagcaagattttaaaatgcggcttcttcaatctcattactctcacc

SEQ ID NO: 41471 - DNA, 75 bp, Homo sapiens
gttgctacgtcataaagtgctaaagcaagattttaaaatgcggcttcttcaatctcattactctcacctaaagta

SEQ ID NO: 41472 - DNA, 75 bp, Homo sapiens
tcataaagtgctaaagcaagattttaaaatgcggcttcttcaatctcattactctcacctaaagtactaccaaga

SEQ ID NO: 41473 - DNA, 74 bp, Homo sapiens
tgctaaagcaagattttaaaatgcggcttcttcaatctcattactctcacctaaagtactaccaagattggtaa

SEQ ID NO: 41474 - DNA, 79 bp, Homo sapiens
ggcttcttcaatctcattactctcacctaaagtactaccaagattggtaataatattgatgacaatcagcaaagatgaa

SEQ ID NO: 41475 - DNA, 77 bp, Homo sapiens
caatctcattactctcacctaaagtactaccaagattggtaataatattgatgacaatcagcaaagatgaaagattt

SEQ ID NO: 41476 - DNA, 75 bp, Homo sapiens
tactctcacctaaagtactaccaagattggtaataatattgatgacaatcagcaaagatgaaagatttttggccc

SEQ ID NO: 41477 - DNA, 73 bp, Homo sapiens
accaagattggtaataatattgatgacaatcagcaaagatgaaagatttttggccctaagtatttagaaatat

SEQ ID NO: 41478 - DNA, 72 bp, Homo sapiens
ttgatgacaatcagcaaagatgaaagatttttggccctaagtatttagaaatattttacaaatactgtttat

SEQ ID NO: 41479 - DNA, 70 bp, Homo sapiens
tcagcaaagatgaaagatttttggccctaagtatttagaaatattttacaaatactgtttatttcaccat

SEQ ID NO: 41480 - DNA, 66 bp, Homo sapiens
agatttttggccctaagtatttagaaatattttacaaatactgtttatttcaccattatattttcc

SEQ ID NO: 41481 - DNA, 66 bp, Homo sapiens
ttggccctaagtatttagaaatattttacaaatactgtttatttcaccattatattttcctttgtt

SEQ ID NO: 41482 - DNA, 69 bp, Homo sapiens
tagaaatattttacaaatactgtttatttcaccattatattttcctttgtttatatcttagggtgtgcc

SEQ ID NO: 41483 - DNA, 72 bp, Homo sapiens
ttacaaatactgtttatttcaccattatattttcctttgtttatatcttagggtgtgccttagacatctaca

SEQ ID NO: 41484 - DNA, 73 bp, Homo sapiens
tgtttatttcaccattatattttcctttgtttatatcttagggtgtgccttagacatctacactatctacctg

SEQ ID NO: 41485 - DNA, 73 bp, Homo sapiens
caccattatattttcctttgtttatatcttagggtgtgccttagacatctacactatctacctgtgtatagtt

SEQ ID NO: 41486 - DNA, 74 bp, Homo sapiens
tttcctttgtttatatcttagggtgtgccttagacatctacactatctacctgtgtatagtttatgaataaaca

SEQ ID NO: 41487 - DNA, 76 bp, Homo sapiens
tttgtttatatcttagggtgtgccttagacatctacactatctacctgtgtatagtttatgaataaacatatacaa

SEQ ID NO: 41488 - DNA, 79 bp, Homo sapiens
cttagggtgtgccttagacatctacactatctacctgtgtatagtttatgaataaacatatacaaatagtatctatgca

SEQ ID NO: 41489 - DNA, 77 bp, Homo sapiens
ctacactatctacctgtgtatagtttatgaataaacatatacaaatagtatctatgcagaaaaagctttatcagtaa

SEQ ID NO: 41490 - DNA, 77 bp, Homo sapiens
ctgtgtatagtttatgaataaacatatacaaatagtatctatgcagaaaaagctttatcagtaaaattgcaagaggc

SEQ ID NO: 41491 - DNA, 77 bp, Homo sapiens
tttatgaataaacatatacaaatagtatctatgcagaaaaagctttatcagtaaaattgcaagaggccaatggtgtg

SEQ ID NO: 41492 - DNA, 74 bp, Homo sapiens
gtaaaattgcaagaggccaatggtgtggggaccttggcctcatgtgaggggcttttctgcttcctgggcagaaa

SEQ ID NO: 41493 - DNA, 74 bp, Homo sapiens
attgcaagaggccaatggtgtggggaccttggcctcatgtgaggggcttttctgcttcctgggcagaaagggga

SEQ ID NO: 41494 - DNA, 75 bp, Homo sapiens
accttggcctcatgtgaggggcttttctgcttcctgggcagaaaggggagcccagagggcaagtggctgtgagga

SEQ ID NO: 41495 - DNA, 76 bp, Homo sapiens
tcatgtgaggggcttttctgcttcctgggcagaaaggggagcccagagggcaagtggctgtgaggagggacctcca

SEQ ID NO: 41496 - DNA, 73 bp, Homo sapiens
ggcttttctgcttcctgggcagaaaggggagcccagagggcaagtggctgtgaggagggacctccaagtgatt

SEQ ID NO: 41497 - DNA, 75 bp, Homo sapiens
ttcctgggcagaaaggggagcccagagggcaagtggctgtgaggagggacctccaagtgatttgcgaaacatcaa

SEQ ID NO: 41498 - DNA, 75 bp, Homo sapiens
agaaaggggagcccagagggcaagtggctgtgaggagggacctccaagtgatttgcgaaacatcaagatcagcct

SEQ ID NO: 41499 - DNA, 76 bp, Homo sapiens
cccagagggcaagtggctgtgaggagggacctccaagtgatttgcgaaacatcaagatcagccttgagtggttgtt

SEQ ID NO: 41500 - DNA, 74 bp, Homo sapiens
agggcaagtggctgtgaggagggacctccaagtgatttgcgaaacatcaagatcagccttgagtggttgttttt

SEQ ID NO: 41501 - DNA, 72 bp, Homo sapiens
ctgtgaggagggacctccaagtgatttgcgaaacatcaagatcagccttgagtggttgttttttttggtttg

SEQ ID NO: 41502 - DNA, 72 bp, Homo sapiens
ctccaagtgatttgcgaaacatcaagatcagccttgagtggttgttttttttggtttgtcctcaagcttatt

SEQ ID NO: 41503 - DNA, 72 bp, Homo sapiens
agtgatttgcgaaacatcaagatcagccttgagtggttgttttttttggtttgtcctcaagcttatttaaga

SEQ ID NO: 41504 - DNA, 74 bp, Homo sapiens
aacatcaagatcagccttgagtggttgttttttttggtttgtcctcaagcttatttaagagctgcctcagaata

SEQ ID NO: 41505 - DNA, 71 bp, Homo sapiens
gagtggttgttttttttggtttgtcctcaagcttatttaagagctgcctcagaataacataatgaaaaaca

SEQ ID NO: 41506 - DNA, 80 bp, Homo sapiens
cttatttaagagctgcctcagaataacataatgaaaaacatcaatggctaatgcccaagctatgctctgtaaagaatcta

SEQ ID NO: 41507 - DNA, 82 bp, Homo sapiens
tgcctcagaataacataatgaaaaacatcaatggctaatgcccaagctatgctctgtaaagaatctaccttctgggcaatga

SEQ ID NO: 41508 - DNA, 78 bp, Homo sapiens
ataacataatgaaaaacatcaatggctaatgcccaagctatgctctgtaaagaatctaccttctgggcaatgaattaa

SEQ ID NO: 41509 - DNA, 81 bp, Homo sapiens
aaaaacatcaatggctaatgcccaagctatgctctgtaaagaatctaccttctgggcaatgaattaatgctgtgctgacca

SEQ ID NO: 41510 - DNA, 83 bp, Homo sapiens
atcaatggctaatgcccaagctatgctctgtaaagaatctaccttctgggcaatgaattaatgctgtgctgaccagattgaaa

SEQ ID NO: 41511 - DNA, 82 bp, Homo sapiens
ccaagctatgctctgtaaagaatctaccttctgggcaatgaattaatgctgtgctgaccagattgaaatggcctgtagtaca

SEQ ID NO: 41512 - DNA, 82 bp, Homo sapiens
tatgctctgtaaagaatctaccttctgggcaatgaattaatgctgtgctgaccagattgaaatggcctgtagtacagacagt

SEQ ID NO: 41513 - DNA, 80 bp, Homo sapiens
taaagaatctaccttctgggcaatgaattaatgctgtgctgaccagattgaaatggcctgtagtacagacagttctgaaa

SEQ ID NO: 41514 - DNA, 79 bp, Homo sapiens
accttctgggcaatgaattaatgctgtgctgaccagattgaaatggcctgtagtacagacagttctgaaagcaaactag

SEQ ID NO: 41515 - DNA, 78 bp, Homo sapiens
aattaatgctgtgctgaccagattgaaatggcctgtagtacagacagttctgaaagcaaactagggagacaacaaata

SEQ ID NO: 41516 - DNA, 79 bp, Homo sapiens
atgctgtgctgaccagattgaaatggcctgtagtacagacagttctgaaagcaaactagggagacaacaaataaaagca

SEQ ID NO: 41517 - DNA, 75 bp, Homo sapiens
agattgaaatggcctgtagtacagacagttctgaaagcaaactagggagacaacaaataaaagcagcttcaagga

SEQ ID NO: 41518 - DNA, 72 bp, Homo sapiens
aaatggcctgtagtacagacagttctgaaagcaaactagggagacaacaaataaaagcagcttcaaggaaac

SEQ ID NO: 41519 - DNA, 73 bp, Homo sapiens
tagtacagacagttctgaaagcaaactagggagacaacaaataaaagcagcttcaaggaaacgtggctaagag

SEQ ID NO: 41520 - DNA, 72 bp, Homo sapiens
agttctgaaagcaaactagggagacaacaaataaaagcagcttcaaggaaacgtggctaagagtcacttctg

SEQ ID NO: 41521 - DNA, 75 bp, Homo sapiens
ataaaagcagcttcaaggaaacgtggctaagagtcacttctgtggagactttctgccaatgtagagacttaagaa

SEQ ID NO: 41522 - DNA, 81 bp, Homo sapiens
gctaagagtcacttctgtggagactttctgccaatgtagagacttaagaagctgatctcagaagaagcggccagaacgtga

SEQ ID NO: 41523 - DNA, 78 bp, Homo sapiens
acttctgtggagactttctgccaatgtagagacttaagaagctgatctcagaagaagcggccagaacgtgaaaacatc

SEQ ID NO: 41524 - DNA, 79 bp, Homo sapiens
ttctgccaatgtagagacttaagaagctgatctcagaagaagcggccagaacgtgaaaacatctccacattttcaagaa

SEQ ID NO: 41525 - DNA, 72 bp, Homo sapiens
aagaagctgatctcagaagaagcggccagaacgtgaaaacatctccacattttcaagaaaggtgtggttttt

SEQ ID NO: 41526 - DNA, 71 bp, Homo sapiens
tctcagaagaagcggccagaacgtgaaaacatctccacattttcaagaaaggtgtggtttttttcaaatcc

SEQ ID NO: 41527 - DNA, 66 bp, Homo sapiens
cggccagaacgtgaaaacatctccacattttcaagaaaggtgtggtttttttcaaatccccaaaaa

SEQ ID NO: 41528 - DNA, 64 bp, Homo sapiens
cgtgaaaacatctccacattttcaagaaaggtgtggtttttttcaaatccccaaaaaataaaac

SEQ ID NO: 41529 - DNA, 65 bp, Homo sapiens
cacattttcaagaaaggtgtggtttttttcaaatccccaaaaaataaaacgtagtgtaacagatg

SEQ ID NO: 41530 - DNA, 64 bp, Homo sapiens
ttcaagaaaggtgtggtttttttcaaatccccaaaaaataaaacgtagtgtaacagatgtattt

SEQ ID NO: 41531 - DNA, 66 bp, Homo sapiens
ggtgtggtttttttcaaatccccaaaaaataaaacgtagtgtaacagatgtattttaatacatgta

SEQ ID NO: 41532 - DNA, 69 bp, Homo sapiens
tcaaatccccaaaaaataaaacgtagtgtaacagatgtattttaatacatgtatatcgaagtgaaattt

SEQ ID NO: 41533 - DNA, 70 bp, Homo sapiens
aaaataaaacgtagtgtaacagatgtattttaatacatgtatatcgaagtgaaattttgatatttttgac

SEQ ID NO: 41534 - DNA, 74 bp, Homo sapiens
acgtagtgtaacagatgtattttaatacatgtatatcgaagtgaaattttgatatttttgacgtgtggagttga

SEQ ID NO: 41535 - DNA, 76 bp, Homo sapiens
gtaacagatgtattttaatacatgtatatcgaagtgaaattttgatatttttgacgtgtggagttgaactgcagta

SEQ ID NO: 41536 - DNA, 81 bp, Homo sapiens
taatacatgtatatcgaagtgaaattttgatatttttgacgtgtggagttgaactgcagtattttgaagctcagcacatga

SEQ ID NO: 41537 - DNA, 79 bp, Homo sapiens
atgtatatcgaagtgaaattttgatatttttgacgtgtggagttgaactgcagtattttgaagctcagcacatgaagaa

SEQ ID NO: 41538 - DNA, 76 bp, Homo sapiens
aagtgaaattttgatatttttgacgtgtggagttgaactgcagtattttgaagctcagcacatgaagaaatattcc

SEQ ID NO: 41539 - DNA, 78 bp, Homo sapiens
tttgatatttttgacgtgtggagttgaactgcagtattttgaagctcagcacatgaagaaatattcctgttatccctg

SEQ ID NO: 41540 - DNA, 78 bp, Homo sapiens
acgtgtggagttgaactgcagtattttgaagctcagcacatgaagaaatattcctgttatccctggagaattctcaaa

SEQ ID NO: 41541 - DNA, 76 bp, Homo sapiens
agttgaactgcagtattttgaagctcagcacatgaagaaatattcctgttatccctggagaattctcaaaccgttg

SEQ ID NO: 41542 - DNA, 75 bp, Homo sapiens
agtattttgaagctcagcacatgaagaaatattcctgttatccctggagaattctcaaaccgttggtgaaagcca

SEQ ID NO: 41543 - DNA, 74 bp, Homo sapiens
aagaaatattcctgttatccctggagaattctcaaaccgttggtgaaagccacatgtgtacgtgtctatcacca

SEQ ID NO: 41544 - DNA, 77 bp, Homo sapiens
atattcctgttatccctggagaattctcaaaccgttggtgaaagccacatgtgtacgtgtctatcaccacagacaca

SEQ ID NO: 41545 - DNA, 78 bp, Homo sapiens
ctggagaattctcaaaccgttggtgaaagccacatgtgtacgtgtctatcaccacagacacacagacaattacagaaa

SEQ ID NO: 41546 - DNA, 70 bp, Homo sapiens
agacacacagacaattacagaaaaggcaaaactatttacataaagaagtccggtttccagtgcattaaac

SEQ ID NO: 41547 - DNA, 70 bp, Homo sapiens
gacaattacagaaaaggcaaaactatttacataaagaagtccggtttccagtgcattaaacttgacacca

SEQ ID NO: 41548 - DNA, 69 bp, Homo sapiens
tacagaaaaggcaaaactatttacataaagaagtccggtttccagtgcattaaacttgacaccacggcc

SEQ ID NO: 41549 - DNA, 69 bp, Homo sapiens
aaactatttacataaagaagtccggtttccagtgcattaaacttgacaccacggccccagcaactccaa

SEQ ID NO: 41550 - DNA, 72 bp, Homo sapiens
ttacataaagaagtccggtttccagtgcattaaacttgacaccacggccccagcaactccaaggctgtgccg

SEQ ID NO: 41551 - DNA, 72 bp, Homo sapiens
agtgcattaaacttgacaccacggccccagcaactccaaggctgtgccgggcgggccaccccttccaacaga

SEQ ID NO: 41552 - DNA, 72 bp, Homo sapiens
taaacttgacaccacggccccagcaactccaaggctgtgccgggcgggccaccccttccaacagacactcac

SEQ ID NO: 41553 - DNA, 70 bp, Homo sapiens
aactccaaggctgtgccgggcgggccaccccttccaacagacactcactgggaagtgcgaccggcccggc

SEQ ID NO: 41554 - DNA, 72 bp, Homo sapiens
aaggctgtgccgggcgggccaccccttccaacagacactcactgggaagtgcgaccggcccggcgcacctgc

SEQ ID NO: 41555 - DNA, 73 bp, Homo sapiens
gggcgggccaccccttccaacagacactcactgggaagtgcgaccggcccggcgcacctgcgtgggagcaaga

SEQ ID NO: 41556 - DNA, 75 bp, Homo sapiens
ttccaacagacactcactgggaagtgcgaccggcccggcgcacctgcgtgggagcaagagccgtcttaggcctcg

SEQ ID NO: 41557 - DNA, 74 bp, Homo sapiens
cactcactgggaagtgcgaccggcccggcgcacctgcgtgggagcaagagccgtcttaggcctcggcacggtcg

SEQ ID NO: 41558 - DNA, 72 bp, Homo sapiens
actgggaagtgcgaccggcccggcgcacctgcgtgggagcaagagccgtcttaggcctcggcacggtcgttg

SEQ ID NO: 41559 - DNA, 73 bp, Homo sapiens
accggcccggcgcacctgcgtgggagcaagagccgtcttaggcctcggcacggtcgttggcaggtccatgttg

SEQ ID NO: 41560 - DNA, 79 bp, Homo sapiens
cacctgcgtgggagcaagagccgtcttaggcctcggcacggtcgttggcaggtccatgttggctgctctgagccagatt

SEQ ID NO: 41561 - DNA, 78 bp, Homo sapiens
tgggagcaagagccgtcttaggcctcggcacggtcgttggcaggtccatgttggctgctctgagccagattttcggtg

SEQ ID NO: 41562 - DNA, 75 bp, Homo sapiens
aagagccgtcttaggcctcggcacggtcgttggcaggtccatgttggctgctctgagccagattttcggtgggtg

SEQ ID NO: 41563 - DNA, 77 bp, Homo sapiens
gtcttaggcctcggcacggtcgttggcaggtccatgttggctgctctgagccagattttcggtgggtgttgctgaaa

SEQ ID NO: 41564 - DNA, 79 bp, Homo sapiens
cctcggcacggtcgttggcaggtccatgttggctgctctgagccagattttcggtgggtgttgctgaaatgcatgttct

SEQ ID NO: 41565 - DNA, 81 bp, Homo sapiens
gtcgttggcaggtccatgttggctgctctgagccagattttcggtgggtgttgctgaaatgcatgttcttcacactgattt

SEQ ID NO: 41566 - DNA, 78 bp, Homo sapiens
aggtccatgttggctgctctgagccagattttcggtgggtgttgctgaaatgcatgttcttcacactgattttaaaaa

SEQ ID NO: 41567 - DNA, 78 bp, Homo sapiens
atgttggctgctctgagccagattttcggtgggtgttgctgaaatgcatgttcttcacactgattttaaaaattcctc

SEQ ID NO: 41568 - DNA, 77 bp, Homo sapiens
ctctgagccagattttcggtgggtgttgctgaaatgcatgttcttcacactgattttaaaaattcctctgccaggtg

SEQ ID NO: 41569 - DNA, 75 bp, Homo sapiens
agattttcggtgggtgttgctgaaatgcatgttcttcacactgattttaaaaattcctctgccaggtgggcgtca

SEQ ID NO: 41570 - DNA, 77 bp, Homo sapiens
tgggtgttgctgaaatgcatgttcttcacactgattttaaaaattcctctgccaggtgggcgtcacctgccaggacg

SEQ ID NO: 41571 - DNA, 76 bp, Homo sapiens
ttgctgaaatgcatgttcttcacactgattttaaaaattcctctgccaggtgggcgtcacctgccaggacgggccc

SEQ ID NO: 41572 - DNA, 72 bp, Homo sapiens
atgttcttcacactgattttaaaaattcctctgccaggtgggcgtcacctgccaggacgggccctgggtgga

SEQ ID NO: 41573 - DNA, 70 bp, Homo sapiens
aaaattcctctgccaggtgggcgtcacctgccaggacgggccctgggtggagggtgcggatgcccggccg

SEQ ID NO: 41574 - DNA, 73 bp, Homo sapiens
tctgccaggtgggcgtcacctgccaggacgggccctgggtggagggtgcggatgcccggccggtggcctctgt

SEQ ID NO: 41575 - DNA, 74 bp, Homo sapiens
cgtcacctgccaggacgggccctgggtggagggtgcggatgcccggccggtggcctctgttctaagacagcaca

SEQ ID NO: 41576 - DNA, 75 bp, Homo sapiens
ctgggtggagggtgcggatgcccggccggtggcctctgttctaagacagcacagtcccatgtctatttcccgaca

SEQ ID NO: 41577 - DNA, 77 bp, Homo sapiens
ggtgcggatgcccggccggtggcctctgttctaagacagcacagtcccatgtctatttcccgacatcccagtatcat

SEQ ID NO: 41578 - DNA, 76 bp, Homo sapiens
ggatgcccggccggtggcctctgttctaagacagcacagtcccatgtctatttcccgacatcccagtatcattttc

SEQ ID NO: 41579 - DNA, 78 bp, Homo sapiens
ccggtggcctctgttctaagacagcacagtcccatgtctatttcccgacatcccagtatcattttctgcccagagctg

SEQ ID NO: 41580 - DNA, 79 bp, Homo sapiens
tgttctaagacagcacagtcccatgtctatttcccgacatcccagtatcattttctgcccagagctggggcttcctgtg

SEQ ID NO: 41581 - DNA, 77 bp, Homo sapiens
acagcacagtcccatgtctatttcccgacatcccagtatcattttctgcccagagctggggcttcctgtggagtaag

SEQ ID NO: 41582 - DNA, 75 bp, Homo sapiens
atgtctatttcccgacatcccagtatcattttctgcccagagctggggcttcctgtggagtaagggggctctgcc

SEQ ID NO: 41583 - DNA, 73 bp, Homo sapiens
tttcccgacatcccagtatcattttctgcccagagctggggcttcctgtggagtaagggggctctgccggacc

SEQ ID NO: 41584 - DNA, 74 bp, Homo sapiens
agtatcattttctgcccagagctggggcttcctgtggagtaagggggctctgccggacccctggtggcctgtgc

SEQ ID NO: 41585 - DNA, 75 bp, Homo sapiens
attttctgcccagagctggggcttcctgtggagtaagggggctctgccggacccctggtggcctgtgctgcagcc

SEQ ID NO: 41586 - DNA, 73 bp, Homo sapiens
ttcctgtggagtaagggggctctgccggacccctggtggcctgtgctgcagcccggggccccctctgtgcctg

SEQ ID NO: 41587 - DNA, 71 bp, Homo sapiens
agtaagggggctctgccggacccctggtggcctgtgctgcagcccggggccccctctgtgcctggcccagg

SEQ ID NO: 41588 - DNA, 75 bp, Homo sapiens
ctctgccggacccctggtggcctgtgctgcagcccggggccccctctgtgcctggcccaggtgccccctctgtgc

SEQ ID NO: 41589 - DNA, 77 bp, Homo sapiens
tggtggcctgtgctgcagcccggggccccctctgtgcctggcccaggtgccccctctgtgcctggctcaggtgccct

SEQ ID NO: 41590 - DNA, 73 bp, Homo sapiens
cggggccccctctgtgcctggcccaggtgccccctctgtgcctggctcaggtgccctttccccacacctggca

SEQ ID NO: 41591 - DNA, 76 bp, Homo sapiens
tctgtgcctggcccaggtgccccctctgtgcctggctcaggtgccctttccccacacctggcacctccctgctaac

SEQ ID NO: 41592 - DNA, 75 bp, Homo sapiens
tggcccaggtgccccctctgtgcctggctcaggtgccctttccccacacctggcacctccctgctaacggtctgc

SEQ ID NO: 41593 - DNA, 76 bp, Homo sapiens
cccctctgtgcctggctcaggtgccctttccccacacctggcacctccctgctaacggtctgccctgctcactctc

SEQ ID NO: 41594 - DNA, 77 bp, Homo sapiens
cctggctcaggtgccctttccccacacctggcacctccctgctaacggtctgccctgctcactctcccgaagcagca

SEQ ID NO: 41595 - DNA, 75 bp, Homo sapiens
gtgccctttccccacacctggcacctccctgctaacggtctgccctgctcactctcccgaagcagcaaccagagt

SEQ ID NO: 41596 - DNA, 77 bp, Homo sapiens
cccacacctggcacctccctgctaacggtctgccctgctcactctcccgaagcagcaaccagagttaggccgtctga

SEQ ID NO: 41597 - DNA, 77 bp, Homo sapiens
acctggcacctccctgctaacggtctgccctgctcactctcccgaagcagcaaccagagttaggccgtctgagcagg

SEQ ID NO: 41598 - DNA, 78 bp, Homo sapiens
tccctgctaacggtctgccctgctcactctcccgaagcagcaaccagagttaggccgtctgagcaggggtcactggtg

SEQ ID NO: 41599 - DNA, 80 bp, Homo sapiens
tgccctgctcactctcccgaagcagcaaccagagttaggccgtctgagcaggggtcactggtggcccttgtgcctggcaa

SEQ ID NO: 41600 - DNA, 74 bp, Homo sapiens
actctcccgaagcagcaaccagagttaggccgtctgagcaggggtcactggtggcccttgtgcctggcaaccct

SEQ ID NO: 41601 - DNA, 74 bp, Homo sapiens
aagcagcaaccagagttaggccgtctgagcaggggtcactggtggcccttgtgcctggcaacccttcttttgaa

SEQ ID NO: 41602 - DNA, 71 bp, Homo sapiens
aaccagagttaggccgtctgagcaggggtcactggtggcccttgtgcctggcaacccttcttttgaaacac

SEQ ID NO: 41603 - DNA, 68 bp, Homo sapiens
ggggtcactggtggcccttgtgcctggcaacccttcttttgaaacacggctgtagttccctaatacct

SEQ ID NO: 41604 - DNA, 71 bp, Homo sapiens
aacccttcttttgaaacacggctgtagttccctaataccttacccaggagccatgctcaggggcatctcag

SEQ ID NO: 41605 - DNA, 74 bp, Homo sapiens
cttttgaaacacggctgtagttccctaataccttacccaggagccatgctcaggggcatctcaggcctggagaa

SEQ ID NO: 41606 - DNA, 76 bp, Homo sapiens
ctgtagttccctaataccttacccaggagccatgctcaggggcatctcaggcctggagaagacgggacagatggtg

SEQ ID NO: 41607 - DNA, 77 bp, Homo sapiens
ttccctaataccttacccaggagccatgctcaggggcatctcaggcctggagaagacgggacagatggtggtgcttg

SEQ ID NO: 41608 - DNA, 77 bp, Homo sapiens
ttacccaggagccatgctcaggggcatctcaggcctggagaagacgggacagatggtggtgcttggtggccctgggt

SEQ ID NO: 41609 - DNA, 75 bp, Homo sapiens
atgctcaggggcatctcaggcctggagaagacgggacagatggtggtgcttggtggccctgggttcccgaaaaga

SEQ ID NO: 41610 - DNA, 76 bp, Homo sapiens
gcatctcaggcctggagaagacgggacagatggtggtgcttggtggccctgggttcccgaaaagatgttgtctctg

SEQ ID NO: 41611 - DNA, 70 bp, Homo sapiens
agaagacgggacagatggtggtgcttggtggccctgggttcccgaaaagatgttgtctctgggggaggag

SEQ ID NO: 41612 - DNA, 70 bp, Homo sapiens
tggtggtgcttggtggccctgggttcccgaaaagatgttgtctctgggggaggagtgggaacttctctta

SEQ ID NO: 41613 - DNA, 68 bp, Homo sapiens
gtgcttggtggccctgggttcccgaaaagatgttgtctctgggggaggagtgggaacttctcttaccc

SEQ ID NO: 41614 - DNA, 70 bp, Homo sapiens
tgggttcccgaaaagatgttgtctctgggggaggagtgggaacttctcttaccccagagtcacaagccaa

SEQ ID NO: 41615 - DNA, 75 bp, Homo sapiens
aaagatgttgtctctgggggaggagtgggaacttctcttaccccagagtcacaagccaaacagatgcatcattaa

SEQ ID NO: 41616 - DNA, 74 bp, Homo sapiens
tgttgtctctgggggaggagtgggaacttctcttaccccagagtcacaagccaaacagatgcatcattaaaaac

SEQ ID NO: 41617 - DNA, 77 bp, Homo sapiens
aggagtgggaacttctcttaccccagagtcacaagccaaacagatgcatcattaaaaacctctgagcagagaagaca

SEQ ID NO: 41618 - DNA, 78 bp, Homo sapiens
aacttctcttaccccagagtcacaagccaaacagatgcatcattaaaaacctctgagcagagaagacaggacaggtga

SEQ ID NO: 41619 - DNA, 83 bp, Homo sapiens
tcttaccccagagtcacaagccaaacagatgcatcattaaaaacctctgagcagagaagacaggacaggtgatgttgcagaga

SEQ ID NO: 41620 - DNA, 87 bp, Homo sapiens
atcattaaaaacctctgagcagagaagacaggacaggtgatgttgcagagatgcctgcccaacgccagcagacgcacctgctgctca

SEQ ID NO: 41621 - DNA, 85 bp, Homo sapiens
gaagacaggacaggtgatgttgcagagatgcctgcccaacgccagcagacgcacctgctgctcagtggttgaggttcttgaggta

SEQ ID NO: 41622 - DNA, 84 bp, Homo sapiens
acaggtgatgttgcagagatgcctgcccaacgccagcagacgcacctgctgctcagtggttgaggttcttgaggtagggatgtc

SEQ ID NO: 41623 - DNA, 83 bp, Homo sapiens
atgttgcagagatgcctgcccaacgccagcagacgcacctgctgctcagtggttgaggttcttgaggtagggatgtctggcct

SEQ ID NO: 41624 - DNA, 77 bp, Homo sapiens
aacgccagcagacgcacctgctgctcagtggttgaggttcttgaggtagggatgtctggccttcgtccctggataaa

SEQ ID NO: 41625 - DNA, 75 bp, Homo sapiens
agacgcacctgctgctcagtggttgaggttcttgaggtagggatgtctggccttcgtccctggataaaatgcctt

SEQ ID NO: 41626 - DNA, 72 bp, Homo sapiens
ctcagtggttgaggttcttgaggtagggatgtctggccttcgtccctggataaaatgcctttgagggcggga

SEQ ID NO: 41627 - DNA, 70 bp, Homo sapiens
gttgaggttcttgaggtagggatgtctggccttcgtccctggataaaatgcctttgagggcgggattatt

SEQ ID NO: 41628 - DNA, 71 bp, Homo sapiens
tcttgaggtagggatgtctggccttcgtccctggataaaatgcctttgagggcgggattatttgctttaaa

SEQ ID NO: 41629 - DNA, 72 bp, Homo sapiens
ggatgtctggccttcgtccctggataaaatgcctttgagggcgggattatttgctttaaatgtcagtgttaa

SEQ ID NO: 41630 - DNA, 70 bp, Homo sapiens
ccttcgtccctggataaaatgcctttgagggcgggattatttgctttaaatgtcagtgttaagcttctag

SEQ ID NO: 41631 - DNA, 72 bp, Homo sapiens
taaaatgcctttgagggcgggattatttgctttaaatgtcagtgttaagcttctaggcacgttaatgagtgt

SEQ ID NO: 41632 - DNA, 72 bp, Homo sapiens
cctttgagggcgggattatttgctttaaatgtcagtgttaagcttctaggcacgttaatgagtgtttctctc

SEQ ID NO: 41633 - DNA, 73 bp, Homo sapiens
gattatttgctttaaatgtcagtgttaagcttctaggcacgttaatgagtgtttctctctcgttcttcctttg

SEQ ID NO: 41634 - DNA, 70 bp, Homo sapiens
agtgttaagcttctaggcacgttaatgagtgtttctctctcgttcttcctttggttttagctcggctttg

SEQ ID NO: 41635 - DNA, 71 bp, Homo sapiens
ttctaggcacgttaatgagtgtttctctctcgttcttcctttggttttagctcggctttggatctttctta

SEQ ID NO: 41636 - DNA, 69 bp, Homo sapiens
gttaatgagtgtttctctctcgttcttcctttggttttagctcggctttggatctttcttaggaattat

SEQ ID NO: 41637 - DNA, 72 bp, Homo sapiens
tttggttttagctcggctttggatctttcttaggaattattggcatcaacttggtggagaatagaaggcaaa

SEQ ID NO: 41638 - DNA, 74 bp, Homo sapiens
tttagctcggctttggatctttcttaggaattattggcatcaacttggtggagaatagaaggcaaatggtaaga

SEQ ID NO: 41639 - DNA, 73 bp, Homo sapiens
tttggatctttcttaggaattattggcatcaacttggtggagaatagaaggcaaatggtaagaaagtacatgg

SEQ ID NO: 41640 - DNA, 72 bp, Homo sapiens
ttcttaggaattattggcatcaacttggtggagaatagaaggcaaatggtaagaaagtacatggggtggtgg

SEQ ID NO: 41641 - DNA, 75 bp, Homo sapiens
ttattggcatcaacttggtggagaatagaaggcaaatggtaagaaagtacatggggtggtggggagcatgagtcc

SEQ ID NO: 41642 - DNA, 73 bp, Homo sapiens
aacttggtggagaatagaaggcaaatggtaagaaagtacatggggtggtggggagcatgagtccctcatcagg

SEQ ID NO: 41643 - DNA, 75 bp, Homo sapiens
agaatagaaggcaaatggtaagaaagtacatggggtggtggggagcatgagtccctcatcaggggatggtacagc

SEQ ID NO: 41644 - DNA, 78 bp, Homo sapiens
aatggtaagaaagtacatggggtggtggggagcatgagtccctcatcaggggatggtacagctgcactggggctctga

SEQ ID NO: 41645 - DNA, 82 bp, Homo sapiens
agtccctcatcaggggatggtacagctgcactggggctctgagaagagtcagccctgcctccccagcacactggtgtctaca

SEQ ID NO: 41646 - DNA, 83 bp, Homo sapiens
gatggtacagctgcactggggctctgagaagagtcagccctgcctccccagcacactggtgtctacaggaccagctctgaggt

SEQ ID NO: 41647 - DNA, 82 bp, Homo sapiens
tacagctgcactggggctctgagaagagtcagccctgcctccccagcacactggtgtctacaggaccagctctgaggttccc

SEQ ID NO: 41648 - DNA, 82 bp, Homo sapiens
gctctgagaagagtcagccctgcctccccagcacactggtgtctacaggaccagctctgaggttcccgggctgtggcctgca

SEQ ID NO: 41649 - DNA, 79 bp, Homo sapiens
agaagagtcagccctgcctccccagcacactggtgtctacaggaccagctctgaggttcccgggctgtggcctgcacag

SEQ ID NO: 41650 - DNA, 79 bp, Homo sapiens
tgcctccccagcacactggtgtctacaggaccagctctgaggttcccgggctgtggcctgcacagtcctggatacaggg

SEQ ID NO: 41651 - DNA, 80 bp, Homo sapiens
gcacactggtgtctacaggaccagctctgaggttcccgggctgtggcctgcacagtcctggatacagggttcagcgagta

SEQ ID NO: 41652 - DNA, 80 bp, Homo sapiens
tgtctacaggaccagctctgaggttcccgggctgtggcctgcacagtcctggatacagggttcagcgagtaccattcaca

SEQ ID NO: 41653 - DNA, 75 bp, Homo sapiens
aggttcccgggctgtggcctgcacagtcctggatacagggttcagcgagtaccattcacaccttagtctaagcga

SEQ ID NO: 41654 - DNA, 78 bp, Homo sapiens
ctgtggcctgcacagtcctggatacagggttcagcgagtaccattcacaccttagtctaagcgagcatggccctgggt

SEQ ID NO: 41655 - DNA, 80 bp, Homo sapiens
ttcagcgagtaccattcacaccttagtctaagcgagcatggccctgggttgctggtgtatcaacctcacgtggtgtgcaa

SEQ ID NO: 41656 - DNA, 77 bp, Homo sapiens
agtaccattcacaccttagtctaagcgagcatggccctgggttgctggtgtatcaacctcacgtggtgtgcaaccac

SEQ ID NO: 41657 - DNA, 79 bp, Homo sapiens
acaccttagtctaagcgagcatggccctgggttgctggtgtatcaacctcacgtggtgtgcaaccaccaatgctgaggc

SEQ ID NO: 41658 - DNA, 83 bp, Homo sapiens
atggccctgggttgctggtgtatcaacctcacgtggtgtgcaaccaccaatgctgaggcctgggaagctcagagaatgcatga

SEQ ID NO: 41659 - DNA, 82 bp, Homo sapiens
gttgctggtgtatcaacctcacgtggtgtgcaaccaccaatgctgaggcctgggaagctcagagaatgcatgaagtttggga

SEQ ID NO: 41660 - DNA, 78 bp, Homo sapiens
gtatcaacctcacgtggtgtgcaaccaccaatgctgaggcctgggaagctcagagaatgcatgaagtttgggacgggg

SEQ ID NO: 41661 - DNA, 77 bp, Homo sapiens
tggtgtgcaaccaccaatgctgaggcctgggaagctcagagaatgcatgaagtttgggacgggggtggcaaattaaa

SEQ ID NO: 41662 - DNA, 73 bp, Homo sapiens
aaccaccaatgctgaggcctgggaagctcagagaatgcatgaagtttgggacgggggtggcaaattaaattaa

SEQ ID NO: 41663 - DNA, 74 bp, Homo sapiens
tgaggcctgggaagctcagagaatgcatgaagtttgggacgggggtggcaaattaaattaagtcctagtgtgta

SEQ ID NO: 41664 - DNA, 71 bp, Homo sapiens
aagctcagagaatgcatgaagtttgggacgggggtggcaaattaaattaagtcctagtgtgtaaagttcag

SEQ ID NO: 41665 - DNA, 68 bp, Homo sapiens
aatgcatgaagtttgggacgggggtggcaaattaaattaagtcctagtgtgtaaagttcaggcaaaaa

SEQ ID NO: 41666 - DNA, 67 bp, Homo sapiens
atgaagtttgggacgggggtggcaaattaaattaagtcctagtgtgtaaagttcaggcaaaaacatg

SEQ ID NO: 41667 - DNA, 71 bp, Homo sapiens
ggggtggcaaattaaattaagtcctagtgtgtaaagttcaggcaaaaacatgtgcataagcctctcttcct

SEQ ID NO: 41668 - DNA, 71 bp, Homo sapiens
aattaaattaagtcctagtgtgtaaagttcaggcaaaaacatgtgcataagcctctcttccttttgaacca

SEQ ID NO: 41669 - DNA, 74 bp, Homo sapiens
attaagtcctagtgtgtaaagttcaggcaaaaacatgtgcataagcctctcttccttttgaaccagtggctcta

SEQ ID NO: 41670 - DNA, 74 bp, Homo sapiens
tgtgtaaagttcaggcaaaaacatgtgcataagcctctcttccttttgaaccagtggctctagagtcttgtttt

SEQ ID NO: 41671 - DNA, 73 bp, Homo sapiens
aggcaaaaacatgtgcataagcctctcttccttttgaaccagtggctctagagtcttgtttttcgtctgagtt

SEQ ID NO: 41672 - DNA, 73 bp, Homo sapiens
aacatgtgcataagcctctcttccttttgaaccagtggctctagagtcttgtttttcgtctgagtttggttaa

SEQ ID NO: 41673 - DNA, 72 bp, Homo sapiens
ttttgaaccagtggctctagagtcttgtttttcgtctgagtttggttaatgtttatcttgcccagactaaga

SEQ ID NO: 41674 - DNA, 68 bp, Homo sapiens
agtttggttaatgtttatcttgcccagactaagaggagaggtaaagacataaaaccaggagggagccc

SEQ ID NO: 41675 - DNA, 69 bp, Homo sapiens
ttaatgtttatcttgcccagactaagaggagaggtaaagacataaaaccaggagggagcccccggttca

SEQ ID NO: 41676 - DNA, 76 bp, Homo sapiens
tcttgcccagactaagaggagaggtaaagacataaaaccaggagggagcccccggttcacatggcagcaatgcaga

SEQ ID NO: 41677 - DNA, 74 bp, Homo sapiens
actaagaggagaggtaaagacataaaaccaggagggagcccccggttcacatggcagcaatgcagagtgaaatc

SEQ ID NO: 41678 - DNA, 80 bp, Homo sapiens
taaagacataaaaccaggagggagcccccggttcacatggcagcaatgcagagtgaaatccagacactgcctgtccatga

SEQ ID NO: 41679 - DNA, 79 bp, Homo sapiens
ataaaaccaggagggagcccccggttcacatggcagcaatgcagagtgaaatccagacactgcctgtccatgatgttcg

SEQ ID NO: 41680 - DNA, 86 bp, Homo sapiens
ggagcccccggttcacatggcagcaatgcagagtgaaatccagacactgcctgtccatgatgttcgtggctgtatgcgcggcaaca

SEQ ID NO: 41681 - DNA, 88 bp, Homo sapiens
agcaatgcagagtgaaatccagacactgcctgtccatgatgttcgtggctgtatgcgcggcaacagcgatcaggttcagctggaagtc

SEQ ID NO: 41682 - DNA, 83 bp, Homo sapiens
agtgaaatccagacactgcctgtccatgatgttcgtggctgtatgcgcggcaacagcgatcaggttcagctggaagtctgttt

SEQ ID NO: 41683 - DNA, 84 bp, Homo sapiens
aatccagacactgcctgtccatgatgttcgtggctgtatgcgcggcaacagcgatcaggttcagctggaagtctgttttgttga

SEQ ID NO: 41684 - DNA, 83 bp, Homo sapiens
cctgtccatgatgttcgtggctgtatgcgcggcaacagcgatcaggttcagctggaagtctgttttgttgatgcactgttttg

SEQ ID NO: 41685 - DNA, 78 bp, Homo sapiens
tgtatgcgcggcaacagcgatcaggttcagctggaagtctgttttgttgatgcactgttttggggactataactttaa

SEQ ID NO: 41686 - DNA, 73 bp, Homo sapiens
caacagcgatcaggttcagctggaagtctgttttgttgatgcactgttttggggactataactttaaaaacaa

SEQ ID NO: 41687 - DNA, 70 bp, Homo sapiens
cgatcaggttcagctggaagtctgttttgttgatgcactgttttggggactataactttaaaaacaaaaa

SEQ ID NO: 41688 - DNA, 70 bp, Homo sapiens
tcagctggaagtctgttttgttgatgcactgttttggggactataactttaaaaacaaaaactggctaat

SEQ ID NO: 41689 - DNA, 68 bp, Homo sapiens
gtctgttttgttgatgcactgttttggggactataactttaaaaacaaaaactggctaattttgtcag

SEQ ID NO: 41690 - DNA, 70 bp, Homo sapiens
ttgatgcactgttttggggactataactttaaaaacaaaaactggctaattttgtcagttcacggtggca

SEQ ID NO: 41691 - DNA, 70 bp, Homo sapiens
taactttaaaaacaaaaactggctaattttgtcagttcacggtggcagccaggattgaattttaagagca

SEQ ID NO: 41692 - DNA, 69 bp, Homo sapiens
aaaacaaaaactggctaattttgtcagttcacggtggcagccaggattgaattttaagagcagggttta

SEQ ID NO: 41693 - DNA, 70 bp, Homo sapiens
ctaattttgtcagttcacggtggcagccaggattgaattttaagagcagggtttagaggggaggtggttg

SEQ ID NO: 41694 - DNA, 71 bp, Homo sapiens
tttgtcagttcacggtggcagccaggattgaattttaagagcagggtttagaggggaggtggttgggccat

SEQ ID NO: 41695 - DNA, 72 bp, Homo sapiens
acggtggcagccaggattgaattttaagagcagggtttagaggggaggtggttgggccatttctgcctcatc

SEQ ID NO: 41696 - DNA, 70 bp, Homo sapiens
aggattgaattttaagagcagggtttagaggggaggtggttgggccatttctgcctcatctcccagttgt

SEQ ID NO: 41697 - DNA, 72 bp, Homo sapiens
aattttaagagcagggtttagaggggaggtggttgggccatttctgcctcatctcccagttgttgcttcaga

SEQ ID NO: 41698 - DNA, 74 bp, Homo sapiens
agggtttagaggggaggtggttgggccatttctgcctcatctcccagttgttgcttcagagcaggctggagttc

SEQ ID NO: 41699 - DNA, 85 bp, Homo sapiens
tttctgcctcatctcccagttgttgcttcagagcaggctggagttctcagctcttccctgcaccggctgtcatgttactgtatca

SEQ ID NO: 41700 - DNA, 87 bp, Homo sapiens
ttgcttcagagcaggctggagttctcagctcttccctgcaccggctgtcatgttactgtatcatccagcgtgcaaatgacctgtgtc

SEQ ID NO: 41701 - DNA, 79 bp, Homo sapiens
agttctcagctcttccctgcaccggctgtcatgttactgtatcatccagcgtgcaaatgacctgtgtcgggcccccaac

SEQ ID NO: 41702 - DNA, 77 bp, Homo sapiens
gctgtcatgttactgtatcatccagcgtgcaaatgacctgtgtcgggcccccaacccctgcctgttcccagttccca

SEQ ID NO: 41703 - DNA, 74 bp, Homo sapiens
atgttactgtatcatccagcgtgcaaatgacctgtgtcgggcccccaacccctgcctgttcccagttcccaggc

SEQ ID NO: 41704 - DNA, 74 bp, Homo sapiens
tatcatccagcgtgcaaatgacctgtgtcgggcccccaacccctgcctgttcccagttcccaggccgagaggga

SEQ ID NO: 41705 - DNA, 69 bp, Homo sapiens
acctgtgtcgggcccccaacccctgcctgttcccagttcccaggccgagagggagggtgagatggctgg

SEQ ID NO: 41706 - DNA, 72 bp, Homo sapiens
ccaacccctgcctgttcccagttcccaggccgagagggagggtgagatggctgggccgcggtgtatgccctc

SEQ ID NO: 41707 - DNA, 71 bp, Homo sapiens
cctgttcccagttcccaggccgagagggagggtgagatggctgggccgcggtgtatgccctcggaaccctg

SEQ ID NO: 41708 - DNA, 72 bp, Homo sapiens
agttcccaggccgagagggagggtgagatggctgggccgcggtgtatgccctcggaaccctgtatgttagtc

SEQ ID NO: 41709 - DNA, 73 bp, Homo sapiens
aggccgagagggagggtgagatggctgggccgcggtgtatgccctcggaaccctgtatgttagtctgttttca

SEQ ID NO: 41710 - DNA, 77 bp, Homo sapiens
ccaaaccatatcaccccgcatgggacccagcaaactcccactgctgcccaggagactgacccttgggcagatggagc

SEQ ID NO: 41711 - DNA, 77 bp, Homo sapiens
atatcaccccgcatgggacccagcaaactcccactgctgcccaggagactgacccttgggcagatggagcctgaccg

SEQ ID NO: 41712 - DNA, 76 bp, Homo sapiens
atgggacccagcaaactcccactgctgcccaggagactgacccttgggcagatggagcctgaccgtgtgagggtgg

SEQ ID NO: 41713 - DNA, 75 bp, Homo sapiens
agcaaactcccactgctgcccaggagactgacccttgggcagatggagcctgaccgtgtgagggtgggaggtccc

SEQ ID NO: 41714 - DNA, 74 bp, Homo sapiens
actgctgcccaggagactgacccttgggcagatggagcctgaccgtgtgagggtgggaggtccctggagggttg

SEQ ID NO: 41715 - DNA, 70 bp, Homo sapiens
cccaggagactgacccttgggcagatggagcctgaccgtgtgagggtgggaggtccctggagggttgggg

SEQ ID NO: 41716 - DNA, 71 bp, Homo sapiens
acccttgggcagatggagcctgaccgtgtgagggtgggaggtccctggagggttgggggtggctgcaaaga

SEQ ID NO: 41717 - DNA, 72 bp, Homo sapiens
agatggagcctgaccgtgtgagggtgggaggtccctggagggttgggggtggctgcaaagacactgggattc

SEQ ID NO: 41718 - DNA, 71 bp, Homo sapiens
accgtgtgagggtgggaggtccctggagggttgggggtggctgcaaagacactgggattctggtggagcaa

SEQ ID NO: 41719 - DNA, 71 bp, Homo sapiens
ggtgggaggtccctggagggttgggggtggctgcaaagacactgggattctggtggagcaaagcgttctgt

SEQ ID NO: 41720 - DNA, 77 bp, Homo sapiens
tccctggagggttgggggtggctgcaaagacactgggattctggtggagcaaagcgttctgttctgcatagtagaga

SEQ ID NO: 41721 - DNA, 79 bp, Homo sapiens
agggttgggggtggctgcaaagacactgggattctggtggagcaaagcgttctgttctgcatagtagagacagtgtgca

SEQ ID NO: 41722 - DNA, 84 bp, Homo sapiens
ctgcaaagacactgggattctggtggagcaaagcgttctgttctgcatagtagagacagtgtgcactgcagggtgagctgccgt

SEQ ID NO: 41723 - DNA, 82 bp, Homo sapiens
aagacactgggattctggtggagcaaagcgttctgttctgcatagtagagacagtgtgcactgcagggtgagctgccgttct

SEQ ID NO: 41724 - DNA, 83 bp, Homo sapiens
aaagcgttctgttctgcatagtagagacagtgtgcactgcagggtgagctgccgttcttggctagcagttgcaaagagacgga

SEQ ID NO: 41725 - DNA, 86 bp, Homo sapiens
ttctgttctgcatagtagagacagtgtgcactgcagggtgagctgccgttcttggctagcagttgcaaagagacggagagataggc

SEQ ID NO: 41726 - DNA, 81 bp, Homo sapiens
agtagagacagtgtgcactgcagggtgagctgccgttcttggctagcagttgcaaagagacggagagataggcccggcatt

SEQ ID NO: 41727 - DNA, 80 bp, Homo sapiens
agtgtgcactgcagggtgagctgccgttcttggctagcagttgcaaagagacggagagataggcccggcatttcctctcc

SEQ ID NO: 41728 - DNA, 75 bp, Homo sapiens
agggtgagctgccgttcttggctagcagttgcaaagagacggagagataggcccggcatttcctctcccacccac

SEQ ID NO: 41729 - DNA, 75 bp, Homo sapiens
gggtgagctgccgttcttggctagcagttgcaaagagacggagagataggcccggcatttcctctcccacccacc

SEQ ID NO: 41730 - DNA, 73 bp, Homo sapiens
agctgccgttcttggctagcagttgcaaagagacggagagataggcccggcatttcctctcccacccaccccc

SEQ ID NO: 41731 - DNA, 73 bp, Homo sapiens
ttcttggctagcagttgcaaagagacggagagataggcccggcatttcctctcccacccaccccctgttgttg

SEQ ID NO: 41732 - DNA, 74 bp, Homo sapiens
ttggctagcagttgcaaagagacggagagataggcccggcatttcctctcccacccaccccctgttgttggctc

SEQ ID NO: 41733 - DNA, 73 bp, Homo sapiens
tagcagttgcaaagagacggagagataggcccggcatttcctctcccacccaccccctgttgttggctcccga

SEQ ID NO: 41734 - DNA, 68 bp, Homo sapiens
aaagagacggagagataggcccggcatttcctctcccacccaccccctgttgttggctcccgagggtg

SEQ ID NO: 41735 - DNA, 73 bp, Homo sapiens
gagagataggcccggcatttcctctcccacccaccccctgttgttggctcccgagggtgggcgtcacagctga

SEQ ID NO: 41736 - DNA, 72 bp, Homo sapiens
agagataggcccggcatttcctctcccacccaccccctgttgttggctcccgagggtgggcgtcacagctga

SEQ ID NO: 41737 - DNA, 76 bp, Homo sapiens
ccctgttgttggctcccgagggtgggcgtcacagctgaccagggtgggcaaaggcctcacacacaccagtcacaga

SEQ ID NO: 41738 - DNA, 76 bp, Homo sapiens
agggtgggcgtcacagctgaccagggtgggcaaaggcctcacacacaccagtcacagaatggtgttggaaacagac

SEQ ID NO: 41739 - DNA, 75 bp, Homo sapiens
acagctgaccagggtgggcaaaggcctcacacacaccagtcacagaatggtgttggaaacagacgccacctttgg

SEQ ID NO: 41740 - DNA, 74 bp, Homo sapiens
accagggtgggcaaaggcctcacacacaccagtcacagaatggtgttggaaacagacgccacctttgggagcca

SEQ ID NO: 41741 - DNA, 78 bp, Homo sapiens
aaaggcctcacacacaccagtcacagaatggtgttggaaacagacgccacctttgggagccagcatgcccccatgatg

SEQ ID NO: 41742 - DNA, 80 bp, Homo sapiens
acacacaccagtcacagaatggtgttggaaacagacgccacctttgggagccagcatgcccccatgatggtctctagaca

SEQ ID NO: 41743 - DNA, 82 bp, Homo sapiens
agtcacagaatggtgttggaaacagacgccacctttgggagccagcatgcccccatgatggtctctagacagcatctcttca

SEQ ID NO: 41744 - DNA, 84 bp, Homo sapiens
tttgggagccagcatgcccccatgatggtctctagacagcatctcttcagagtctggagctgcttggtgcctgtagggagttgg

SEQ ID NO: 41745 - DNA, 84 bp, Homo sapiens
agcatgcccccatgatggtctctagacagcatctcttcagagtctggagctgcttggtgcctgtagggagttgggtgggcctga

SEQ ID NO: 41746 - DNA, 82 bp, Homo sapiens
catgatggtctctagacagcatctcttcagagtctggagctgcttggtgcctgtagggagttgggtgggcctgaggagggaa

SEQ ID NO: 41747 - DNA, 80 bp, Homo sapiens
tggtctctagacagcatctcttcagagtctggagctgcttggtgcctgtagggagttgggtgggcctgaggagggaaggc

SEQ ID NO: 41748 - DNA, 78 bp, Homo sapiens
acagcatctcttcagagtctggagctgcttggtgcctgtagggagttgggtgggcctgaggagggaaggcctcctgaa

SEQ ID NO: 41749 - DNA, 74 bp, Homo sapiens
ttcagagtctggagctgcttggtgcctgtagggagttgggtgggcctgaggagggaaggcctcctgaagacttt

SEQ ID NO: 41750 - DNA, 72 bp, Homo sapiens
tgcttggtgcctgtagggagttgggtgggcctgaggagggaaggcctcctgaagacttttccataagatttc

SEQ ID NO: 41751 - DNA, 69 bp, Homo sapiens
ggtgcctgtagggagttgggtgggcctgaggagggaaggcctcctgaagacttttccataagatttccc

SEQ ID NO: 41752 - DNA, 69 bp, Homo sapiens
agttgggtgggcctgaggagggaaggcctcctgaagacttttccataagatttccccaaagaggcagaa

SEQ ID NO: 41753 - DNA, 73 bp, Homo sapiens
ctgaggagggaaggcctcctgaagacttttccataagatttccccaaagaggcagaagctgggtgtgaagctg

SEQ ID NO: 41754 - DNA, 72 bp, Homo sapiens
aaggcctcctgaagacttttccataagatttccccaaagaggcagaagctgggtgtgaagctgggctttggc

SEQ ID NO: 41755 - DNA, 77 bp, Homo sapiens
tgaagacttttccataagatttccccaaagaggcagaagctgggtgtgaagctgggctttggcgatgcacaggatgg

SEQ ID NO: 41756 - DNA, 77 bp, Homo sapiens
ttttccataagatttccccaaagaggcagaagctgggtgtgaagctgggctttggcgatgcacaggatgggtggaca

SEQ ID NO: 41757 - DNA, 77 bp, Homo sapiens
ttccccaaagaggcagaagctgggtgtgaagctgggctttggcgatgcacaggatgggtggacagtgtgggtctgtt

SEQ ID NO: 41758 - DNA, 73 bp, Homo sapiens
aagctgggtgtgaagctgggctttggcgatgcacaggatgggtggacagtgtgggtctgtttttctttccttt

SEQ ID NO: 41759 - DNA, 69 bp, Homo sapiens
ttttctttccttttaaaaaaatggctttaatgagatatagtccacattccatataactcacccatttaa

SEQ ID NO: 41760 - DNA, 73 bp, Homo sapiens
cttttaaaaaaatggctttaatgagatatagtccacattccatataactcacccatttaaagcacacaattca

SEQ ID NO: 41761 - DNA, 73 bp, Homo sapiens
aaaaatggctttaatgagatatagtccacattccatataactcacccatttaaagcacacaattcaatggttt

SEQ ID NO: 41762 - DNA, 75 bp, Homo sapiens
atggctttaatgagatatagtccacattccatataactcacccatttaaagcacacaattcaatggtttttagtg

SEQ ID NO: 41763 - DNA, 76 bp, Homo sapiens
atgagatatagtccacattccatataactcacccatttaaagcacacaattcaatggtttttagtgtattcccaga

SEQ ID NO: 41764 - DNA, 76 bp, Homo sapiens
atagtccacattccatataactcacccatttaaagcacacaattcaatggtttttagtgtattcccagatatgtga

SEQ ID NO: 41765 - DNA, 78 bp, Homo sapiens
atataactcacccatttaaagcacacaattcaatggtttttagtgtattcccagatatgtgaaccatcagcacagcca

SEQ ID NO: 41766 - DNA, 76 bp, Homo sapiens
cccatttaaagcacacaattcaatggtttttagtgtattcccagatatgtgaaccatcagcacagccagtgttaaa

SEQ ID NO: 41767 - DNA, 76 bp, Homo sapiens
atttaaagcacacaattcaatggtttttagtgtattcccagatatgtgaaccatcagcacagccagtgttaaaaca

SEQ ID NO: 41768 - DNA, 78 bp, Homo sapiens
ttaaagcacacaattcaatggtttttagtgtattcccagatatgtgaaccatcagcacagccagtgttaaaacatgaa

SEQ ID NO: 41769 - DNA, 81 bp, Homo sapiens
acaattcaatggtttttagtgtattcccagatatgtgaaccatcagcacagccagtgttaaaacatgaatcacatcagcaa

SEQ ID NO: 41770 - DNA, 80 bp, Homo sapiens
gtttttagtgtattcccagatatgtgaaccatcagcacagccagtgttaaaacatgaatcacatcagcaagaaacccaca

SEQ ID NO: 41771 - DNA, 80 bp, Homo sapiens
atatgtgaaccatcagcacagccagtgttaaaacatgaatcacatcagcaagaaacccacacccttctcttagcacccta

SEQ ID NO: 41772 - DNA, 73 bp, Homo sapiens
ccagtgttaaaacatgaatcacatcagcaagaaacccacacccttctcttagcaccctacctacccagcctaa

SEQ ID NO: 41773 - DNA, 74 bp, Homo sapiens
ttaaaacatgaatcacatcagcaagaaacccacacccttctcttagcaccctacctacccagcctaagcaacca

SEQ ID NO: 41774 - DNA, 72 bp, Homo sapiens
acatcagcaagaaacccacacccttctcttagcaccctacctacccagcctaagcaaccaggaatcaacttc

SEQ ID NO: 41775 - DNA, 69 bp, Homo sapiens
aagaaacccacacccttctcttagcaccctacctacccagcctaagcaaccaggaatcaacttcctgtc

SEQ ID NO: 41776 - DNA, 72 bp, Homo sapiens
acccttctcttagcaccctacctacccagcctaagcaaccaggaatcaacttcctgtctctgtagattccta

SEQ ID NO: 41777 - DNA, 74 bp, Homo sapiens
ctcttagcaccctacctacccagcctaagcaaccaggaatcaacttcctgtctctgtagattcctactctgggc

SEQ ID NO: 41778 - DNA, 75 bp, Homo sapiens
tacctacccagcctaagcaaccaggaatcaacttcctgtctctgtagattcctactctgggcctgcctgcggagg

SEQ ID NO: 41779 - DNA, 79 bp, Homo sapiens
taagcaaccaggaatcaacttcctgtctctgtagattcctactctgggcctgcctgcggagggagtaatgtgtgatatg

SEQ ID NO: 41780 - DNA, 80 bp, Homo sapiens
ttcctgtctctgtagattcctactctgggcctgcctgcggagggagtaatgtgtgatatgtgttctctgtagattcctac

SEQ ID NO: 41781 - DNA, 80 bp, Homo sapiens
tctgtagattcctactctgggcctgcctgcggagggagtaatgtgtgatatgtgttctctgtagattcctactctgggct

SEQ ID NO: 41782 - DNA, 80 bp, Homo sapiens
ttcctactctgggcctgcctgcggagggagtaatgtgtgatatgtgttctctgtagattcctactctgggcttgtgtgtg

SEQ ID NO: 41783 - DNA, 80 bp, Homo sapiens
tgcctgcggagggagtaatgtgtgatatgtgttctctgtagattcctactctgggcttgtgtgtggaggcagtaacgtgt

SEQ ID NO: 41784 - DNA, 79 bp, Homo sapiens
agggagtaatgtgtgatatgtgttctctgtagattcctactctgggcttgtgtgtggaggcagtaacgtgttatgtgcg

SEQ ID NO: 41785 - DNA, 82 bp, Homo sapiens
taatgtgtgatatgtgttctctgtagattcctactctgggcttgtgtgtggaggcagtaacgtgttatgtgcggtctctgtg

SEQ ID NO: 41786 - DNA, 81 bp, Homo sapiens
tatgtgttctctgtagattcctactctgggcttgtgtgtggaggcagtaacgtgttatgtgcggtctctgtgtctggtgtc

SEQ ID NO: 41787 - DNA, 84 bp, Homo sapiens
tgtagattcctactctgggcttgtgtgtggaggcagtaacgtgttatgtgcggtctctgtgtctggtgtctggcactgcgcatg

SEQ ID NO: 41788 - DNA, 83 bp, Homo sapiens
tactctgggcttgtgtgtggaggcagtaacgtgttatgtgcggtctctgtgtctggtgtctggcactgcgcatggtgtcttta

SEQ ID NO: 41789 - DNA, 82 bp, Homo sapiens
tgtgtggaggcagtaacgtgttatgtgcggtctctgtgtctggtgtctggcactgcgcatggtgtctttaagcttcctccaa

SEQ ID NO: 41790 - DNA, 77 bp, Homo sapiens
agtaacgtgttatgtgcggtctctgtgtctggtgtctggcactgcgcatggtgtctttaagcttcctccaaatttcc

SEQ ID NO: 41791 - DNA, 78 bp, Homo sapiens
cgtgttatgtgcggtctctgtgtctggtgtctggcactgcgcatggtgtctttaagcttcctccaaatttccttgctt

SEQ ID NO: 41792 - DNA, 79 bp, Homo sapiens
cggtctctgtgtctggtgtctggcactgcgcatggtgtctttaagcttcctccaaatttccttgctttctatggctgaa

SEQ ID NO: 41793 - DNA, 79 bp, Homo sapiens
tggtgtctggcactgcgcatggtgtctttaagcttcctccaaatttccttgctttctatggctgaataataatccacta

SEQ ID NO: 41794 - DNA, 76 bp, Homo sapiens
actgcgcatggtgtctttaagcttcctccaaatttccttgctttctatggctgaataataatccactatatgggcc

SEQ ID NO: 41795 - DNA, 74 bp, Homo sapiens
atggtgtctttaagcttcctccaaatttccttgctttctatggctgaataataatccactatatgggccggaca

SEQ ID NO: 41796 - DNA, 73 bp, Homo sapiens
tttaagcttcctccaaatttccttgctttctatggctgaataataatccactatatgggccggacacggtggc

SEQ ID NO: 41797 - DNA, 79 bp, Homo sapiens
taataataataatccactgtatggatgggccacacttatccatacaccagttgatggacattacagctgtttacagact

SEQ ID NO: 41798 - DNA, 79 bp, Homo sapiens
ataataatccactgtatggatgggccacacttatccatacaccagttgatggacattacagctgtttacagactttggc

SEQ ID NO: 41799 - DNA, 80 bp, Homo sapiens
actgtatggatgggccacacttatccatacaccagttgatggacattacagctgtttacagactttggctgttgtgaata

SEQ ID NO: 41800 - DNA, 78 bp, Homo sapiens
atgctgctgtgaacatttgtacataggtttctgtgtgaaaatgcatttacatttcttttgggcatgtacctaggagtg

SEQ ID NO: 41801 - DNA, 75 bp, Homo sapiens
ctgtgaacatttgtacataggtttctgtgtgaaaatgcatttacatttcttttgggcatgtacctaggagtggaa

SEQ ID NO: 41802 - DNA, 78 bp, Homo sapiens
ttccaaagtggctgccccatgttacattcccacagacaggcatgagggctcctgtttctccactccctcaccagcact

SEQ ID NO: 41803 - DNA, 79 bp, Homo sapiens
aagtggctgccccatgttacattcccacagacaggcatgagggctcctgtttctccactccctcaccagcacttgtcac

SEQ ID NO: 41804 - DNA, 81 bp, Homo sapiens
tgttacattcccacagacaggcatgagggctcctgtttctccactccctcaccagcacttgtcactgactgtttgattcta

SEQ ID NO: 41805 - DNA, 83 bp, Homo sapiens
cacagacaggcatgagggctcctgtttctccactccctcaccagcacttgtcactgactgtttgattctagccatctaatgtg

SEQ ID NO: 41806 - DNA, 82 bp, Homo sapiens
catgagggctcctgtttctccactccctcaccagcacttgtcactgactgtttgattctagccatctaatgtgtgataagtg

SEQ ID NO: 41807 - DNA, 82 bp, Homo sapiens
tcctgtttctccactccctcaccagcacttgtcactgactgtttgattctagccatctaatgtgtgataagtggtatctcat

SEQ ID NO: 41808 - DNA, 77 bp, Homo sapiens
aatgtctgttcatttcctttgctcatttttacattgggctgccttttcctgttgagtcatcagagtcatttatgtat

SEQ ID NO: 41809 - DNA, 77 bp, Homo sapiens
atttcctttgctcatttttacattgggctgccttttcctgttgagtcatcagagtcatttatgtattctagatacaa

SEQ ID NO: 41810 - DNA, 81 bp, Homo sapiens
tcatttttacattgggctgccttttcctgttgagtcatcagagtcatttatgtattctagatacaaatcgcttctcagata

SEQ ID NO: 41811 - DNA, 82 bp, Homo sapiens
tttacattgggctgccttttcctgttgagtcatcagagtcatttatgtattctagatacaaatcgcttctcagatatgtgat

SEQ ID NO: 41812 - DNA, 73 bp, Homo sapiens
atttgcaaatatttcctcacattctgtacattgccgtttcactttcttaatggtgtcctttgaggcacaaaag

SEQ ID NO: 41813 - DNA, 72 bp, Homo sapiens
tggtgtcatatctaagaatgttttacaaatctaaggacatgaagatttacccctagatttttctagaagagt

SEQ ID NO: 41814 - DNA, 69 bp, Homo sapiens
tctaagaatgttttacaaatctaaggacatgaagatttacccctagatttttctagaagagttttgtag

SEQ ID NO: 41815 - DNA, 68 bp, Homo sapiens
ctaagaatgttttacaaatctaaggacatgaagatttacccctagatttttctagaagagttttgtag

SEQ ID NO: 41816 - DNA, 67 bp, Homo sapiens
gaatgttttacaaatctaaggacatgaagatttacccctagatttttctagaagagttttgtagttt

SEQ ID NO: 41817 - DNA, 68 bp, Homo sapiens
caaatctaaggacatgaagatttacccctagatttttctagaagagttttgtagttttaactcttcca

SEQ ID NO: 41818 - DNA, 69 bp, Homo sapiens
tctaaggacatgaagatttacccctagatttttctagaagagttttgtagttttaactcttccatctgg

SEQ ID NO: 41819 - DNA, 68 bp, Homo sapiens
aggacatgaagatttacccctagatttttctagaagagttttgtagttttaactcttccatctgggtc

SEQ ID NO: 41820 - DNA, 69 bp, Homo sapiens
aagatttacccctagatttttctagaagagttttgtagttttaactcttccatctgggtctgtgatcca

SEQ ID NO: 41821 - DNA, 70 bp, Homo sapiens
ccctagatttttctagaagagttttgtagttttaactcttccatctgggtctgtgatccactttgagtta

SEQ ID NO: 41822 - DNA, 70 bp, Homo sapiens
cctagatttttctagaagagttttgtagttttaactcttccatctgggtctgtgatccactttgagttaa

SEQ ID NO: 41823 - DNA, 69 bp, Homo sapiens
gatttttctagaagagttttgtagttttaactcttccatctgggtctgtgatccactttgagttaactt

SEQ ID NO: 41824 - DNA, 71 bp, Homo sapiens
ttctagaagagttttgtagttttaactcttccatctgggtctgtgatccactttgagttaacttttgcgta

SEQ ID NO: 41825 - DNA, 74 bp, Homo sapiens
ttaactcttccatctgggtctgtgatccactttgagttaacttttgcgtatggtatgaggtaggagttattata

SEQ ID NO: 41826 - DNA, 71 bp, Homo sapiens
atctgggtctgtgatccactttgagttaacttttgcgtatggtatgaggtaggagttattatagttttaac

SEQ ID NO: 41827 - DNA, 72 bp, Homo sapiens
agttaacttttgcgtatggtatgaggtaggagttattatagttttaactcttccatctggttctgtgatcca

SEQ ID NO: 41828 - DNA, 73 bp, Homo sapiens
acttttgcgtatggtatgaggtaggagttattatagttttaactcttccatctggttctgtgatccaccttga

SEQ ID NO: 41829 - DNA, 73 bp, Homo sapiens
tatgaggtaggagttattatagttttaactcttccatctggttctgtgatccaccttgagttaactttcttca

SEQ ID NO: 41830 - DNA, 74 bp, Homo sapiens
taggagttattatagttttaactcttccatctggttctgtgatccaccttgagttaactttcttcatggtgtga

SEQ ID NO: 41831 - DNA, 77 bp, Homo sapiens
ttctgtgatccaccttgagttaactttcttcatggtgtgaggtagggacccatgttcatgcatttacggacatccag

SEQ ID NO: 41832 - DNA, 75 bp, Homo sapiens
caccttgagttaactttcttcatggtgtgaggtagggacccatgttcatgcatttacggacatccagttgtccaa

SEQ ID NO: 41833 - DNA, 75 bp, Homo sapiens
agttaactttcttcatggtgtgaggtagggacccatgttcatgcatttacggacatccagttgtccaagcaccat

SEQ ID NO: 41834 - DNA, 79 bp, Homo sapiens
ttcttcatggtgtgaggtagggacccatgttcatgcatttacggacatccagttgtccaagcaccatttgctgaaaaga

SEQ ID NO: 41835 - DNA, 74 bp, Homo sapiens
aggtagggacccatgttcatgcatttacggacatccagttgtccaagcaccatttgctgaaaagactgttcttt

SEQ ID NO: 41836 - DNA, 79 bp, Homo sapiens
catgttcatgcatttacggacatccagttgtccaagcaccatttgctgaaaagactgttcttttctcattgaatggtct

SEQ ID NO: 41837 - DNA, 78 bp, Homo sapiens
atgcatttacggacatccagttgtccaagcaccatttgctgaaaagactgttcttttctcattgaatggtcttggcac

SEQ ID NO: 41838 - DNA, 75 bp, Homo sapiens
acggacatccagttgtccaagcaccatttgctgaaaagactgttcttttctcattgaatggtcttggcacccttg

SEQ ID NO: 41839 - DNA, 69 bp, Homo sapiens
ggcacccttgttgaaaattaattggccatacatatatggtttatttgtggacttttaattctattcttt

SEQ ID NO: 41840 - DNA, 69 bp, Homo sapiens
ccttgttgaaaattaattggccatacatatatggtttatttgtggacttttaattctattcttttaatc

SEQ ID NO: 41841 - DNA, 74 bp, Homo sapiens
attggccatacatatatggtttatttgtggacttttaattctattcttttaatctatatgtctttgcttgtgcc

SEQ ID NO: 41842 - DNA, 73 bp, Homo sapiens
catatatggtttatttgtggacttttaattctattcttttaatctatatgtctttgcttgtgccggtaccaca

SEQ ID NO: 41843 - DNA, 70 bp, Homo sapiens
ggtttatttgtggacttttaattctattcttttaatctatatgtctttgcttgtgccggtaccacagtct

SEQ ID NO: 41844 - DNA, 75 bp, Homo sapiens
tgtggacttttaattctattcttttaatctatatgtctttgcttgtgccggtaccacagtcttgattactgtagc

SEQ ID NO: 41845 - DNA, 72 bp, Homo sapiens
ttactgtagctttagagtgagtttgaaataagggcttgtgagtcttccagccttgttctttttcaggattac

SEQ ID NO: 41846 - DNA, 71 bp, Homo sapiens
tttagagtgagtttgaaataagggcttgtgagtcttccagccttgttctttttcaggattacgttggcaat

SEQ ID NO: 41847 - DNA, 72 bp, Homo sapiens
agtgagtttgaaataagggcttgtgagtcttccagccttgttctttttcaggattacgttggcaattctgaa

SEQ ID NO: 41848 - DNA, 72 bp, Homo sapiens
aaataagggcttgtgagtcttccagccttgttctttttcaggattacgttggcaattctgaatcccttgcaa

SEQ ID NO: 41849 - DNA, 75 bp, Homo sapiens
ttgtgagtcttccagccttgttctttttcaggattacgttggcaattctgaatcccttgcaattccatatgaatt

SEQ ID NO: 41850 - DNA, 79 bp, Homo sapiens
gaattttagaatcaactggtcaatttctacaaggaagccagctgggattctggtagggatgtgctgaatctgtagctca

SEQ ID NO: 41851 - DNA, 80 bp, Homo sapiens
ttagaatcaactggtcaatttctacaaggaagccagctgggattctggtagggatgtgctgaatctgtagctcagtgtag

SEQ ID NO: 41852 - DNA, 80 bp, Homo sapiens
tcaatttctacaaggaagccagctgggattctggtagggatgtgctgaatctgtagctcagtgtagggagtgttaccatc

SEQ ID NO: 41853 - DNA, 78 bp, Homo sapiens
aaggaagccagctgggattctggtagggatgtgctgaatctgtagctcagtgtagggagtgttaccatcttaatatta

SEQ ID NO: 41854 - DNA, 78 bp, Homo sapiens
gctgggattctggtagggatgtgctgaatctgtagctcagtgtagggagtgttaccatcttaatattaagtatcccaa

SEQ ID NO: 41855 - DNA, 79 bp, Homo sapiens
attctggtagggatgtgctgaatctgtagctcagtgtagggagtgttaccatcttaatattaagtatcccaatccatga

SEQ ID NO: 41856 - DNA, 64 bp, Homo sapiens
acatggaatgttttcccagttatttagaccttctttagtttttaaaacaatgttttgtagttct

SEQ ID NO: 41857 - DNA, 64 bp, Homo sapiens
gaatgttttcccagttatttagaccttctttagtttttaaaacaatgttttgtagttcttagag

SEQ ID NO: 41858 - DNA, 64 bp, Homo sapiens
cagttatttagaccttctttagtttttaaaacaatgttttgtagttcttagagtataagttttg

SEQ ID NO: 41859 - DNA, 65 bp, Homo sapiens
gaccttctttagtttttaaaacaatgttttgtagttcttagagtataagttttgtatcaaattta

SEQ ID NO: 41860 - DNA, 69 bp, Homo sapiens
tgttttgtagttcttagagtataagttttgtatcaaatttacttatttttcagtatttatcaaatgaag

SEQ ID NO: 41861 - DNA, 68 bp, Homo sapiens
gagtataagttttgtatcaaatttacttatttttcagtatttatcaaatgaagtacttaccaaattaa

SEQ ID NO: 41862 - DNA, 68 bp, Homo sapiens
tgtatcaaatttacttatttttcagtatttatcaaatgaagtacttaccaaattaaatttattcttag

SEQ ID NO: 41863 - DNA, 65 bp, Homo sapiens
acttatttttcagtatttatcaaatgaagtacttaccaaattaaatttattcttaggtactttat

SEQ ID NO: 41864 - DNA, 68 bp, Homo sapiens
tcagtatttatcaaatgaagtacttaccaaattaaatttattcttaggtactttattctttttgaggc

SEQ ID NO: 41865 - DNA, 66 bp, Homo sapiens
caaatgaagtacttaccaaattaaatttattcttaggtactttattctttttgaggctattttgag

SEQ ID NO: 41866 - DNA, 66 bp, Homo sapiens
gaagtacttaccaaattaaatttattcttaggtactttattctttttgaggctattttgagtggaa

SEQ ID NO: 41867 - DNA, 65 bp, Homo sapiens
ccaaattaaatttattcttaggtactttattctttttgaggctattttgagtggaattgttttct

SEQ ID NO: 41868 - DNA, 70 bp, Homo sapiens
ttgaggctattttgagtggaattgttttcttaatttaacttctgggttgtccattgcaagtgtttagaaa

SEQ ID NO: 41869 - DNA, 70 bp, Homo sapiens
gctattttgagtggaattgttttcttaatttaacttctgggttgtccattgcaagtgtttagaaatactg

SEQ ID NO: 41870 - DNA, 69 bp, Homo sapiens
attgttttcttaatttaacttctgggttgtccattgcaagtgtttagaaatactgttgactttgtatgt

SEQ ID NO: 41871 - DNA, 76 bp, Homo sapiens
taatttaacttctgggttgtccattgcaagtgtttagaaatactgttgactttgtatgttgatctaatatctgcaa

SEQ ID NO: 41872 - DNA, 75 bp, Homo sapiens
aacttctgggttgtccattgcaagtgtttagaaatactgttgactttgtatgttgatctaatatctgcaaccctg

SEQ ID NO: 41873 - DNA, 77 bp, Homo sapiens
tccattgcaagtgtttagaaatactgttgactttgtatgttgatctaatatctgcaaccctgtggaactcatttctt

SEQ ID NO: 41874 - DNA, 74 bp, Homo sapiens
tgatctaatatctgcaaccctgtggaactcatttctttgttctagtagttctttaaaaaatggattcctcagga

SEQ ID NO: 41875 - DNA, 67 bp, Homo sapiens
ccctgtggaactcatttctttgttctagtagttctttaaaaaatggattcctcaggattttttaatc

SEQ ID NO: 41876 - DNA, 72 bp, Homo sapiens
ctcatttctttgttctagtagttctttaaaaaatggattcctcaggattttttaatctactggagcatgtca

SEQ ID NO: 41877 - DNA, 71 bp, Homo sapiens
ttctagtagttctttaaaaaatggattcctcaggattttttaatctactggagcatgtcaaatagaaacac

SEQ ID NO: 41878 - DNA, 70 bp, Homo sapiens
ctttaaaaaatggattcctcaggattttttaatctactggagcatgtcaaatagaaacacttttgcttct

SEQ ID NO: 41879 - DNA, 74 bp, Homo sapiens
tggattcctcaggattttttaatctactggagcatgtcaaatagaaacacttttgcttcttcctttacaatctg

SEQ ID NO: 41880 - DNA, 74 bp, Homo sapiens
aggattttttaatctactggagcatgtcaaatagaaacacttttgcttcttcctttacaatctggatgcatggg

SEQ ID NO: 41881 - DNA, 76 bp, Homo sapiens
gcatgtcaaatagaaacacttttgcttcttcctttacaatctggatgcatggggaccatttctatggcttcggtaa

SEQ ID NO: 41882 - DNA, 72 bp, Homo sapiens
atagaaacacttttgcttcttcctttacaatctggatgcatggggaccatttctatggcttcggtaaaaaca

SEQ ID NO: 41883 - DNA, 74 bp, Homo sapiens
tttgcttcttcctttacaatctggatgcatggggaccatttctatggcttcggtaaaaacacatgggtactgga

SEQ ID NO: 41884 - DNA, 75 bp, Homo sapiens
cctttacaatctggatgcatggggaccatttctatggcttcggtaaaaacacatgggtactggaatgacaggata

SEQ ID NO: 41885 - DNA, 75 bp, Homo sapiens
acaatctggatgcatggggaccatttctatggcttcggtaaaaacacatgggtactggaatgacaggataaagac

SEQ ID NO: 41886 - DNA, 72 bp, Homo sapiens
atggggaccatttctatggcttcggtaaaaacacatgggtactggaatgacaggataaagacccaagagtga

SEQ ID NO: 41887 - DNA, 73 bp, Homo sapiens
atttctatggcttcggtaaaaacacatgggtactggaatgacaggataaagacccaagagtgacggccactgc

SEQ ID NO: 41888 - DNA, 74 bp, Homo sapiens
ttcggtaaaaacacatgggtactggaatgacaggataaagacccaagagtgacggccactgccagagccgtgtg

SEQ ID NO: 41889 - DNA, 75 bp, Homo sapiens
aaaacacatgggtactggaatgacaggataaagacccaagagtgacggccactgccagagccgtgtggtgttcac

SEQ ID NO: 41890 - DNA, 76 bp, Homo sapiens
tactggaatgacaggataaagacccaagagtgacggccactgccagagccgtgtggtgttcacctgtccacgggct

SEQ ID NO: 41891 - DNA, 74 bp, Homo sapiens
acaggataaagacccaagagtgacggccactgccagagccgtgtggtgttcacctgtccacgggcttccctcac

SEQ ID NO: 41892 - DNA, 74 bp, Homo sapiens
agtgacggccactgccagagccgtgtggtgttcacctgtccacgggcttccctcactggggtgaggaaggcacc

SEQ ID NO: 41893 - DNA, 73 bp, Homo sapiens
actgccagagccgtgtggtgttcacctgtccacgggcttccctcactggggtgaggaaggcacccggatgccc

SEQ ID NO: 41894 - DNA, 72 bp, Homo sapiens
tggtgttcacctgtccacgggcttccctcactggggtgaggaaggcacccggatgccccagaccagaacctc

SEQ ID NO: 41895 - DNA, 72 bp, Homo sapiens
ttcacctgtccacgggcttccctcactggggtgaggaaggcacccggatgccccagaccagaacctctgagg

SEQ ID NO: 41896 - DNA, 77 bp, Homo sapiens
ctggggtgaggaaggcacccggatgccccagaccagaacctctgaggggttgtctgtgatgcctgtgcaagctcatt

SEQ ID NO: 41897 - DNA, 77 bp, Homo sapiens
aggaaggcacccggatgccccagaccagaacctctgaggggttgtctgtgatgcctgtgcaagctcatttctgcctt

SEQ ID NO: 41898 - DNA, 78 bp, Homo sapiens
acccggatgccccagaccagaacctctgaggggttgtctgtgatgcctgtgcaagctcatttctgccttttcaggaga

SEQ ID NO: 41899 - DNA, 80 bp, Homo sapiens
cccagaccagaacctctgaggggttgtctgtgatgcctgtgcaagctcatttctgccttttcaggagaggcattcttctg

SEQ ID NO: 41900 - DNA, 84 bp, Homo sapiens
tgtctgtgatgcctgtgcaagctcatttctgccttttcaggagaggcattcttctgggctgatgttgtatggtgaacccatatt

SEQ ID NO: 41901 - DNA, 82 bp, Homo sapiens
atgcctgtgcaagctcatttctgccttttcaggagaggcattcttctgggctgatgttgtatggtgaacccatatttcacaa

SEQ ID NO: 41902 - DNA, 81 bp, Homo sapiens
gctcatttctgccttttcaggagaggcattcttctgggctgatgttgtatggtgaacccatatttcacaatctcacattaa

SEQ ID NO: 41903 - DNA, 79 bp, Homo sapiens
ttcaggagaggcattcttctgggctgatgttgtatggtgaacccatatttcacaatctcacattaatttaatacttgtg

SEQ ID NO: 41904 - DNA, 77 bp, Homo sapiens
attcttctgggctgatgttgtatggtgaacccatatttcacaatctcacattaatttaatacttgtggtagctggaa

SEQ ID NO: 41905 - DNA, 77 bp, Homo sapiens
tgatgttgtatggtgaacccatatttcacaatctcacattaatttaatacttgtggtagctggaacctggctgtccg

SEQ ID NO: 41906 - DNA, 78 bp, Homo sapiens
tgtatggtgaacccatatttcacaatctcacattaatttaatacttgtggtagctggaacctggctgtccgtgagtgc

SEQ ID NO: 41907 - DNA, 79 bp, Homo sapiens
tatttcacaatctcacattaatttaatacttgtggtagctggaacctggctgtccgtgagtgctgcgtgatcgtaggaa

SEQ ID NO: 41908 - DNA, 76 bp, Homo sapiens
taatttaatacttgtggtagctggaacctggctgtccgtgagtgctgcgtgatcgtaggaaacttactgaagcatt

SEQ ID NO: 41909 - DNA, 79 bp, Homo sapiens
atacttgtggtagctggaacctggctgtccgtgagtgctgcgtgatcgtaggaaacttactgaagcatttcagcctcag

SEQ ID NO: 41910 - DNA, 83 bp, Homo sapiens
tcagtttcttcatttgcatggtggctgggaacatttgagccaatgcacatgagaatgtcttgttcatgacaggtttcgagaaa

SEQ ID NO: 41911 - DNA, 82 bp, Homo sapiens
ttcttcatttgcatggtggctgggaacatttgagccaatgcacatgagaatgtcttgttcatgacaggtttcgagaaagcgg

SEQ ID NO: 41912 - DNA, 81 bp, Homo sapiens
gtggctgggaacatttgagccaatgcacatgagaatgtcttgttcatgacaggtttcgagaaagcggtggtcattgttata

SEQ ID NO: 41913 - DNA, 79 bp, Homo sapiens
acatttgagccaatgcacatgagaatgtcttgttcatgacaggtttcgagaaagcggtggtcattgttatacactggtt

SEQ ID NO: 41914 - DNA, 80 bp, Homo sapiens
caatgcacatgagaatgtcttgttcatgacaggtttcgagaaagcggtggtcattgttatacactggttttaagtgcata

SEQ ID NO: 41915 - DNA, 79 bp, Homo sapiens
atgagaatgtcttgttcatgacaggtttcgagaaagcggtggtcattgttatacactggttttaagtgcatagatgtca

SEQ ID NO: 41916 - DNA, 78 bp, Homo sapiens
ttgttcatgacaggtttcgagaaagcggtggtcattgttatacactggttttaagtgcatagatgtcagaacattcaa

SEQ ID NO: 41917 - DNA, 73 bp, Homo sapiens
aggtttcgagaaagcggtggtcattgttatacactggttttaagtgcatagatgtcagaacattcaagttatt

SEQ ID NO: 41918 - DNA, 75 bp, Homo sapiens
tcgagaaagcggtggtcattgttatacactggttttaagtgcatagatgtcagaacattcaagttatttcaaaag

SEQ ID NO: 41919 - DNA, 80 bp, Homo sapiens
tcattgttatacactggttttaagtgcatagatgtcagaacattcaagttatttcaaaaggcagcaaggcaggctgtcaa

SEQ ID NO: 41920 - DNA, 79 bp, Homo sapiens
ttatacactggttttaagtgcatagatgtcagaacattcaagttatttcaaaaggcagcaaggcaggctgtcaacgtca

SEQ ID NO: 41921 - DNA, 81 bp, Homo sapiens
ttttaagtgcatagatgtcagaacattcaagttatttcaaaaggcagcaaggcaggctgtcaacgtcagctacagagagaa

SEQ ID NO: 41922 - DNA, 80 bp, Homo sapiens
tagatgtcagaacattcaagttatttcaaaaggcagcaaggcaggctgtcaacgtcagctacagagagaacgagtgtatt

SEQ ID NO: 41923 - DNA, 77 bp, Homo sapiens
agaacattcaagttatttcaaaaggcagcaaggcaggctgtcaacgtcagctacagagagaacgagtgtatttccag

SEQ ID NO: 41924 - DNA, 79 bp, Homo sapiens
agttatttcaaaaggcagcaaggcaggctgtcaacgtcagctacagagagaacgagtgtatttccagtgcttccagata

SEQ ID NO: 41925 - DNA, 80 bp, Homo sapiens
gcagcaaggcaggctgtcaacgtcagctacagagagaacgagtgtatttccagtgcttccagatacacgtgaacactttt

SEQ ID NO: 41926 - DNA, 76 bp, Homo sapiens
aaggcaggctgtcaacgtcagctacagagagaacgagtgtatttccagtgcttccagatacacgtgaacacttttt

SEQ ID NO: 41927 - DNA, 74 bp, Homo sapiens
aacgtcagctacagagagaacgagtgtatttccagtgcttccagatacacgtgaacacttttttctcaatttat

SEQ ID NO: 41928 - DNA, 72 bp, Homo sapiens
ctacagagagaacgagtgtatttccagtgcttccagatacacgtgaacacttttttctcaatttatttttat

SEQ ID NO: 41929 - DNA, 68 bp, Homo sapiens
tattttaaatttttaccatagaaaactttaagcacatacaagggtgaagaaaatcgcaatgaaccctc

SEQ ID NO: 41930 - DNA, 68 bp, Homo sapiens
aaatttttaccatagaaaactttaagcacatacaagggtgaagaaaatcgcaatgaaccctccttgcc

SEQ ID NO: 41931 - DNA, 68 bp, Homo sapiens
atagaaaactttaagcacatacaagggtgaagaaaatcgcaatgaaccctccttgccccccacccaac

SEQ ID NO: 41932 - DNA, 72 bp, Homo sapiens
tttaagcacatacaagggtgaagaaaatcgcaatgaaccctccttgccccccacccaactccatcacttgtc

SEQ ID NO: 41933 - DNA, 71 bp, Homo sapiens
atacaagggtgaagaaaatcgcaatgaaccctccttgccccccacccaactccatcacttgtcctgttcac

SEQ ID NO: 41934 - DNA, 68 bp, Homo sapiens
aagaaaatcgcaatgaaccctccttgccccccacccaactccatcacttgtcctgttcaccccccgcc

SEQ ID NO: 41935 - DNA, 71 bp, Homo sapiens
ttgccccccacccaactccatcacttgtcctgttcaccccccgcctgcttcttctcttcctatgttgttta

SEQ ID NO: 41936 - DNA, 77 bp, Homo sapiens
atcacttgtcctgttcaccccccgcctgcttcttctcttcctatgttgtttagaagcaaatgccagacgtggcatca

SEQ ID NO: 41937 - DNA, 77 bp, Homo sapiens
tgttcaccccccgcctgcttcttctcttcctatgttgtttagaagcaaatgccagacgtggcatcatttcatttata

SEQ ID NO: 41938 - DNA, 78 bp, Homo sapiens
ttctcttcctatgttgtttagaagcaaatgccagacgtggcatcatttcatttataaagatttcactctgttcactta

SEQ ID NO: 41939 - DNA, 78 bp, Homo sapiens
tatgttgtttagaagcaaatgccagacgtggcatcatttcatttataaagatttcactctgttcacttaagggatgaa

SEQ ID NO: 41940 - DNA, 81 bp, Homo sapiens
tagaagcaaatgccagacgtggcatcatttcatttataaagatttcactctgttcacttaagggatgaaatctgatcatta

SEQ ID NO: 41941 - DNA, 78 bp, Homo sapiens
aaatgccagacgtggcatcatttcatttataaagatttcactctgttcacttaagggatgaaatctgatcattaggaa

SEQ ID NO: 41942 - DNA, 79 bp, Homo sapiens
catcatttcatttataaagatttcactctgttcacttaagggatgaaatctgatcattaggaatggcttcgccattatc

SEQ ID NO: 41943 - DNA, 75 bp, Homo sapiens
atttataaagatttcactctgttcacttaagggatgaaatctgatcattaggaatggcttcgccattatccctac

SEQ ID NO: 41944 - DNA, 78 bp, Homo sapiens
tttcactctgttcacttaagggatgaaatctgatcattaggaatggcttcgccattatccctacccattatcatgtta

SEQ ID NO: 41945 - DNA, 78 bp, Homo sapiens
ctctgttcacttaagggatgaaatctgatcattaggaatggcttcgccattatccctacccattatcatgttagtctc

SEQ ID NO: 41946 - DNA, 76 bp, Homo sapiens
acttaagggatgaaatctgatcattaggaatggcttcgccattatccctacccattatcatgttagtctccggtga

SEQ ID NO: 41947 - DNA, 80 bp, Homo sapiens
ggatgaaatctgatcattaggaatggcttcgccattatccctacccattatcatgttagtctccggtgacatctgaagaa

SEQ ID NO: 41948 - DNA, 79 bp, Homo sapiens
aaatctgatcattaggaatggcttcgccattatccctacccattatcatgttagtctccggtgacatctgaagaatgcc

SEQ ID NO: 41949 - DNA, 77 bp, Homo sapiens
atcattaggaatggcttcgccattatccctacccattatcatgttagtctccggtgacatctgaagaatgccccaaa

SEQ ID NO: 41950 - DNA, 77 bp, Homo sapiens
attaggaatggcttcgccattatccctacccattatcatgttagtctccggtgacatctgaagaatgccccaaatca

SEQ ID NO: 41951 - DNA, 80 bp, Homo sapiens
tggcttcgccattatccctacccattatcatgttagtctccggtgacatctgaagaatgccccaaatcacatcagcttta

SEQ ID NO: 41952 - DNA, 76 bp, Homo sapiens
attatccctacccattatcatgttagtctccggtgacatctgaagaatgccccaaatcacatcagctttaggtatt

SEQ ID NO: 41953 - DNA, 76 bp, Homo sapiens
ctacccattatcatgttagtctccggtgacatctgaagaatgccccaaatcacatcagctttaggtatttttccac

SEQ ID NO: 41954 - DNA, 78 bp, Homo sapiens
atgttagtctccggtgacatctgaagaatgccccaaatcacatcagctttaggtatttttccactgctgaatgagtta

SEQ ID NO: 41955 - DNA, 79 bp, Homo sapiens
gtgacatctgaagaatgccccaaatcacatcagctttaggtatttttccactgctgaatgagttactgtttcctcctca

SEQ ID NO: 41956 - DNA, 77 bp, Homo sapiens
caaatcacatcagctttaggtatttttccactgctgaatgagttactgtttcctcctcacccaaacagacatatgaa

SEQ ID NO: 41957 - DNA, 76 bp, Homo sapiens
atcagctttaggtatttttccactgctgaatgagttactgtttcctcctcacccaaacagacatatgaatcattta

SEQ ID NO: 41958 - DNA, 77 bp, Homo sapiens
aatgagttactgtttcctcctcacccaaacagacatatgaatcatttatttcaggaagagctctgtaacctggcaca

SEQ ID NO: 41959 - DNA, 76 bp, Homo sapiens
acccaaacagacatatgaatcatttatttcaggaagagctctgtaacctggcacagtcccataggtcccacaggga

SEQ ID NO: 41960 - DNA, 76 bp, Homo sapiens
agacatatgaatcatttatttcaggaagagctctgtaacctggcacagtcccataggtcccacagggatgggaaag

SEQ ID NO: 41961 - DNA, 72 bp, Homo sapiens
aatcatttatttcaggaagagctctgtaacctggcacagtcccataggtcccacagggatgggaaagggaag

SEQ ID NO: 41962 - DNA, 73 bp, Homo sapiens
ttcaggaagagctctgtaacctggcacagtcccataggtcccacagggatgggaaagggaagggcataaaaca

SEQ ID NO: 41963 - DNA, 71 bp, Homo sapiens
tctgtaacctggcacagtcccataggtcccacagggatgggaaagggaagggcataaaacagtgttaactg

SEQ ID NO: 41964 - DNA, 70 bp, Homo sapiens
acagtcccataggtcccacagggatgggaaagggaagggcataaaacagtgttaactggcaattctcctg

SEQ ID NO: 41965 - DNA, 70 bp, Homo sapiens
cccataggtcccacagggatgggaaagggaagggcataaaacagtgttaactggcaattctcctgtgccc

SEQ ID NO: 41966 - DNA, 76 bp, Homo sapiens
acagggatgggaaagggaagggcataaaacagtgttaactggcaattctcctgtgccccacgtatgtgcacatgca

SEQ ID NO: 41967 - DNA, 78 bp, Homo sapiens
aaagggaagggcataaaacagtgttaactggcaattctcctgtgccccacgtatgtgcacatgcacagacacacacga

SEQ ID NO: 41968 - DNA, 82 bp, Homo sapiens
ataaaacagtgttaactggcaattctcctgtgccccacgtatgtgcacatgcacagacacacacgacacactccacacagta

SEQ ID NO: 41969 - DNA, 82 bp, Homo sapiens
acagtgttaactggcaattctcctgtgccccacgtatgtgcacatgcacagacacacacgacacactccacacagtacaaaa

SEQ ID NO: 41970 - DNA, 87 bp, Homo sapiens
aattctcctgtgccccacgtatgtgcacatgcacagacacacacgacacactccacacagtacaaaacacatgcatgccacacacca

SEQ ID NO: 41971 - DNA, 81 bp, Homo sapiens
acacaccacacacaacacacaatacacaatacacgctccacacaatacactacacacaccacctacaacacacacgacaca

SEQ ID NO: 41972 - DNA, 81 bp, Homo sapiens
acacaacacacaatacacaatacacgctccacacaatacactacacacaccacctacaacacacacgacacacacaacaca

SEQ ID NO: 41973 - DNA, 83 bp, Homo sapiens
acacaatacacaatacacgctccacacaatacactacacacaccacctacaacacacacgacacacacaacacacaatgcaca

SEQ ID NO: 41974 - DNA, 83 bp, Homo sapiens
acaatacacgctccacacaatacactacacacaccacctacaacacacacgacacacacaacacacaatgcacaccacataca

SEQ ID NO: 41975 - DNA, 83 bp, Homo sapiens
acacaatacactacacacaccacctacaacacacacgacacacacaacacacaatgcacaccacatacaccacacaacgcaca

SEQ ID NO: 41976 - DNA, 84 bp, Homo sapiens
tacactacacacaccacctacaacacacacgacacacacaacacacaatgcacaccacatacaccacacaacgcacaccacaca

SEQ ID NO: 41977 - DNA, 83 bp, Homo sapiens
acctacaacacacacgacacacacaacacacaatgcacaccacatacaccacacaacgcacaccacacacaagacacaatata

SEQ ID NO: 41978 - DNA, 84 bp, Homo sapiens
aacacacacgacacacacaacacacaatgcacaccacatacaccacacaacgcacaccacacacaagacacaatatacaacaca

SEQ ID NO: 41979 - DNA, 84 bp, Homo sapiens
acacaacacacaatgcacaccacatacaccacacaacgcacaccacacacaagacacaatatacaacacacactccacacaata

SEQ ID NO: 41980 - DNA, 84 bp, Homo sapiens
acaatgcacaccacatacaccacacaacgcacaccacacacaagacacaatatacaacacacactccacacaatacactactca

SEQ ID NO: 41981 - DNA, 82 bp, Homo sapiens
accacatacaccacacaacgcacaccacacacaagacacaatatacaacacacactccacacaatacactactcacaccaca

SEQ ID NO: 41982 - DNA, 84 bp, Homo sapiens
acaccacacaacgcacaccacacacaagacacaatatacaacacacactccacacaatacactactcacaccacacacactgca

SEQ ID NO: 41983 - DNA, 84 bp, Homo sapiens
acaccacacacaagacacaatatacaacacacactccacacaatacactactcacaccacacacactgcacacaacacacgaca

SEQ ID NO: 41984 - DNA, 84 bp, Homo sapiens
acacaagacacaatatacaacacacactccacacaatacactactcacaccacacacactgcacacaacacacgacacacacca

SEQ ID NO: 41985 - DNA, 87 bp, Homo sapiens
cacaccacatacaccacacacagcacacaacacacactccacacaatacactacacacaccacatatatgacacacacactacacaa

SEQ ID NO: 41986 - DNA, 88 bp, Homo sapiens
atacaccacacacagcacacaacacacactccacacaatacactacacacaccacatatatgacacacacactacacaatgcacacca

SEQ ID NO: 41987 - DNA, 88 bp, Homo sapiens
acagcacacaacacacactccacacaatacactacacacaccacatatatgacacacacactacacaatgcacaccacatacactaca

SEQ ID NO: 41988 - DNA, 85 bp, Homo sapiens
acaacacacactccacacaatacactacacacaccacatatatgacacacacactacacaatgcacaccacatacactacacaaa

SEQ ID NO: 41989 - DNA, 84 bp, Homo sapiens
actccacacaatacactacacacaccacatatatgacacacacactacacaatgcacaccacatacactacacaaaccacacac

SEQ ID NO: 41990 - DNA, 84 bp, Homo sapiens
actacacacaccacatatatgacacacacactacacaatgcacaccacatacactacacaaaccacacaccacacatactacaa

SEQ ID NO: 41991 - DNA, 84 bp, Homo sapiens
accacatatatgacacacacactacacaatgcacaccacatacactacacaaaccacacaccacacatactacaacaccacaca

SEQ ID NO: 41992 - DNA, 84 bp, Homo sapiens
atatgacacacacactacacaatgcacaccacatacactacacaaaccacacaccacacatactacaacaccacacacaccaca

SEQ ID NO: 41993 - DNA, 76 bp, Homo sapiens
cacaccacacatactatacacaccacacacagaagtctttggtctggactgagcccgttttctccattcctctaag

SEQ ID NO: 41994 - DNA, 77 bp, Homo sapiens
acacatactatacacaccacacacagaagtctttggtctggactgagcccgttttctccattcctctaagtgctgga

SEQ ID NO: 41995 - DNA, 74 bp, Homo sapiens
acaccacacacagaagtctttggtctggactgagcccgttttctccattcctctaagtgctggagggtgaggtc

SEQ ID NO: 41996 - DNA, 72 bp, Homo sapiens
tctttggtctggactgagcccgttttctccattcctctaagtgctggagggtgaggtctcggccgccttcct

SEQ ID NO: 41997 - DNA, 73 bp, Homo sapiens
actgagcccgttttctccattcctctaagtgctggagggtgaggtctcggccgccttccttgcgccctgctta

SEQ ID NO: 41998 - DNA, 76 bp, Homo sapiens
ttttctccattcctctaagtgctggagggtgaggtctcggccgccttccttgcgccctgcttagcttctgctcagg

SEQ ID NO: 41999 - DNA, 77 bp, Homo sapiens
attcctctaagtgctggagggtgaggtctcggccgccttccttgcgccctgcttagcttctgctcagggcctcgctg

SEQ ID NO: 42000 - DNA, 79 bp, Homo sapiens
tgaggtctcggccgccttccttgcgccctgcttagcttctgctcagggcctcgctgtcgtgggagccccatcagccttc

SEQ ID NO: 42001 - DNA, 76 bp, Homo sapiens
ccttccttgcgccctgcttagcttctgctcagggcctcgctgtcgtgggagccccatcagccttcctggggcgtcg

SEQ ID NO: 42002 - DNA, 76 bp, Homo sapiens
cttgcgccctgcttagcttctgctcagggcctcgctgtcgtgggagccccatcagccttcctggggcgtcgggccc

SEQ ID NO: 42003 - DNA, 75 bp, Homo sapiens
ttagcttctgctcagggcctcgctgtcgtgggagccccatcagccttcctggggcgtcgggccccgcaccttctc

SEQ ID NO: 42004 - DNA, 75 bp, Homo sapiens
tgctcagggcctcgctgtcgtgggagccccatcagccttcctggggcgtcgggccccgcaccttctcctgtggaa

SEQ ID NO: 42005 - DNA, 74 bp, Homo sapiens
tgtcgtgggagccccatcagccttcctggggcgtcgggccccgcaccttctcctgtggaagctgtgagggtctc

SEQ ID NO: 42006 - DNA, 73 bp, Homo sapiens
tgggagccccatcagccttcctggggcgtcgggccccgcaccttctcctgtggaagctgtgagggtctccgcc

SEQ ID NO: 42007 - DNA, 70 bp, Homo sapiens
atcagccttcctggggcgtcgggccccgcaccttctcctgtggaagctgtgagggtctccgcccctttgg

SEQ ID NO: 42008 - DNA, 69 bp, Homo sapiens
gggcgtcgggccccgcaccttctcctgtggaagctgtgagggtctccgcccctttgggtggggctggtg

SEQ ID NO: 42009 - DNA, 71 bp, Homo sapiens
ccgcaccttctcctgtggaagctgtgagggtctccgcccctttgggtggggctggtggagagtggtttctg

SEQ ID NO: 42010 - DNA, 71 bp, Homo sapiens
ttctcctgtggaagctgtgagggtctccgcccctttgggtggggctggtggagagtggtttctgggatccc

SEQ ID NO: 42011 - DNA, 72 bp, Homo sapiens
aagctgtgagggtctccgcccctttgggtggggctggtggagagtggtttctgggatccctggatggcagtg

SEQ ID NO: 42012 - DNA, 70 bp, Homo sapiens
agggtctccgcccctttgggtggggctggtggagagtggtttctgggatccctggatggcagtgttgggc

SEQ ID NO: 42013 - DNA, 73 bp, Homo sapiens
tttgggtggggctggtggagagtggtttctgggatccctggatggcagtgttgggcggctctgcgggtcaccg

SEQ ID NO: 42014 - DNA, 79 bp, Homo sapiens
cctggatggcagtgttgggcggctctgcgggtcaccggtgaggacactgtgagctgcccagggcaagagcccgtgccaa

SEQ ID NO: 42015 - DNA, 76 bp, Homo sapiens
agtgttgggcggctctgcgggtcaccggtgaggacactgtgagctgcccagggcaagagcccgtgccaaggcccca

SEQ ID NO: 42016 - DNA, 75 bp, Homo sapiens
tctgcgggtcaccggtgaggacactgtgagctgcccagggcaagagcccgtgccaaggccccacggccccgagta

SEQ ID NO: 42017 - DNA, 74 bp, Homo sapiens
tcaccggtgaggacactgtgagctgcccagggcaagagcccgtgccaaggccccacggccccgagtaggtccca

SEQ ID NO: 42018 - DNA, 69 bp, Homo sapiens
tgcccagggcaagagcccgtgccaaggccccacggccccgagtaggtcccacaagggccgggtgttctg

SEQ ID NO: 42019 - DNA, 69 bp, Homo sapiens
ccacggccccgagtaggtcccacaagggccgggtgttctggaggacaggcgttgagtgggccccatcca

SEQ ID NO: 42020 - DNA, 71 bp, Homo sapiens
agtaggtcccacaagggccgggtgttctggaggacaggcgttgagtgggccccatccacttgccatccaac

SEQ ID NO: 42021 - DNA, 72 bp, Homo sapiens
acaagggccgggtgttctggaggacaggcgttgagtgggccccatccacttgccatccaaccctggatccca

SEQ ID NO: 42022 - DNA, 74 bp, Homo sapiens
ggtgttctggaggacaggcgttgagtgggccccatccacttgccatccaaccctggatcccacgacctcaccca

SEQ ID NO: 42023 - DNA, 75 bp, Homo sapiens
tctggaggacaggcgttgagtgggccccatccacttgccatccaaccctggatcccacgacctcacccacagcgg

SEQ ID NO: 42024 - DNA, 73 bp, Homo sapiens
gttgagtgggccccatccacttgccatccaaccctggatcccacgacctcacccacagcgggggaataactga

SEQ ID NO: 42025 - DNA, 74 bp, Homo sapiens
cccatccacttgccatccaaccctggatcccacgacctcacccacagcgggggaataactgagggagtggagca

SEQ ID NO: 42026 - DNA, 73 bp, Homo sapiens
acttgccatccaaccctggatcccacgacctcacccacagcgggggaataactgagggagtggagcacaggcg

SEQ ID NO: 42027 - DNA, 77 bp, Homo sapiens
gggaataactgagggagtggagcacaggcggagcatgggcacaggcggccacactcgctgggcacccagctcggggt

SEQ ID NO: 42028 - DNA, 77 bp, Homo sapiens
agtggagcacaggcggagcatgggcacaggcggccacactcgctgggcacccagctcggggttggtcctgccgggcc

SEQ ID NO: 42029 - DNA, 75 bp, Homo sapiens
tgggcacaggcggccacactcgctgggcacccagctcggggttggtcctgccgggcccacagcctcaccaccgag

SEQ ID NO: 42030 - DNA, 71 bp, Homo sapiens
acactcgctgggcacccagctcggggttggtcctgccgggcccacagcctcaccaccgaggcctctttccc

SEQ ID NO: 42031 - DNA, 74 bp, Homo sapiens
tcggggttggtcctgccgggcccacagcctcaccaccgaggcctctttccctgaagctcctgtggccctgatga

SEQ ID NO: 42032 - DNA, 78 bp, Homo sapiens
cccacagcctcaccaccgaggcctctttccctgaagctcctgtggccctgatgaggccccagctctccgtgcctgtca

SEQ ID NO: 42033 - DNA, 78 bp, Homo sapiens
agcctcaccaccgaggcctctttccctgaagctcctgtggccctgatgaggccccagctctccgtgcctgtcaggcac

SEQ ID NO: 42034 - DNA, 76 bp, Homo sapiens
gcctctttccctgaagctcctgtggccctgatgaggccccagctctccgtgcctgtcaggcactggggggtgtttc

SEQ ID NO: 42035 - DNA, 77 bp, Homo sapiens
tttccctgaagctcctgtggccctgatgaggccccagctctccgtgcctgtcaggcactggggggtgtttctcaggc

SEQ ID NO: 42036 - DNA, 75 bp, Homo sapiens
ctcctgtggccctgatgaggccccagctctccgtgcctgtcaggcactggggggtgtttctcaggccggtggccc

SEQ ID NO: 42037 - DNA, 74 bp, Homo sapiens
ccctgatgaggccccagctctccgtgcctgtcaggcactggggggtgtttctcaggccggtggccccacatccc

SEQ ID NO: 42038 - DNA, 72 bp, Homo sapiens
agctctccgtgcctgtcaggcactggggggtgtttctcaggccggtggccccacatccccgcccagggacca

SEQ ID NO: 42039 - DNA, 72 bp, Homo sapiens
tccgtgcctgtcaggcactggggggtgtttctcaggccggtggccccacatccccgcccagggaccatggga

SEQ ID NO: 42040 - DNA, 70 bp, Homo sapiens
tcaggcactggggggtgtttctcaggccggtggccccacatccccgcccagggaccatgggacccctgcg

SEQ ID NO: 42041 - DNA, 70 bp, Homo sapiens
tgtttctcaggccggtggccccacatccccgcccagggaccatgggacccctgcggccccacaggtggct

SEQ ID NO: 42042 - DNA, 70 bp, Homo sapiens
cccacatccccgcccagggaccatgggacccctgcggccccacaggtggcttgagtcagacttttccagg

SEQ ID NO: 42043 - DNA, 74 bp, Homo sapiens
gcccagggaccatgggacccctgcggccccacaggtggcttgagtcagacttttccaggtgcacgtggcctgtg

SEQ ID NO: 42044 - DNA, 83 bp, Homo sapiens
ctgcggccccacaggtggcttgagtcagacttttccaggtgcacgtggcctgtggcatcggcaggtctctgtgtgcagccatg

SEQ ID NO: 42045 - DNA, 85 bp, Homo sapiens
acaggtggcttgagtcagacttttccaggtgcacgtggcctgtggcatcggcaggtctctgtgtgcagccatgtgcggcctgtga

SEQ ID NO: 42046 - DNA, 88 bp, Homo sapiens
cttgagtcagacttttccaggtgcacgtggcctgtggcatcggcaggtctctgtgtgcagccatgtgcggcctgtgagctgaagctga

SEQ ID NO: 42047 - DNA, 85 bp, Homo sapiens
ttttccaggtgcacgtggcctgtggcatcggcaggtctctgtgtgcagccatgtgcggcctgtgagctgaagctgagtcttccgg

SEQ ID NO: 42048 - DNA, 85 bp, Homo sapiens
aggtgcacgtggcctgtggcatcggcaggtctctgtgtgcagccatgtgcggcctgtgagctgaagctgagtcttccgggccgcc

SEQ ID NO: 42049 - DNA, 83 bp, Homo sapiens
cctgtggcatcggcaggtctctgtgtgcagccatgtgcggcctgtgagctgaagctgagtcttccgggccgcccctcctggac

SEQ ID NO: 42050 - DNA, 81 bp, Homo sapiens
tctctgtgtgcagccatgtgcggcctgtgagctgaagctgagtcttccgggccgcccctcctggaccgtggtgggacctgc

SEQ ID NO: 42051 - DNA, 76 bp, Homo sapiens
agccatgtgcggcctgtgagctgaagctgagtcttccgggccgcccctcctggaccgtggtgggacctgcccagga

SEQ ID NO: 42052 - DNA, 75 bp, Homo sapiens
tgtgagctgaagctgagtcttccgggccgcccctcctggaccgtggtgggacctgcccaggacaccagtccacac

SEQ ID NO: 42053 - DNA, 70 bp, Homo sapiens
aagctgagtcttccgggccgcccctcctggaccgtggtgggacctgcccaggacaccagtccacacctcc

SEQ ID NO: 42054 - DNA, 72 bp, Homo sapiens
tcttccgggccgcccctcctggaccgtggtgggacctgcccaggacaccagtccacacctcctccatgcaaa

SEQ ID NO: 42055 - DNA, 74 bp, Homo sapiens
ccctcctggaccgtggtgggacctgcccaggacaccagtccacacctcctccatgcaaacgcctcaggccacac

SEQ ID NO: 42056 - DNA, 76 bp, Homo sapiens
ctggaccgtggtgggacctgcccaggacaccagtccacacctcctccatgcaaacgcctcaggccacacctgcagg

SEQ ID NO: 42057 - DNA, 75 bp, Homo sapiens
acctgcccaggacaccagtccacacctcctccatgcaaacgcctcaggccacacctgcaggggatggggtgaagt

SEQ ID NO: 42058 - DNA, 75 bp, Homo sapiens
aggacaccagtccacacctcctccatgcaaacgcctcaggccacacctgcaggggatggggtgaagttcaaagag

SEQ ID NO: 42059 - DNA, 74 bp, Homo sapiens
agtccacacctcctccatgcaaacgcctcaggccacacctgcaggggatggggtgaagttcaaagaggaccctg

SEQ ID NO: 42060 - DNA, 69 bp, Homo sapiens
aaacgcctcaggccacacctgcaggggatggggtgaagttcaaagaggaccctgtcccgtcccccactc

SEQ ID NO: 42061 - DNA, 75 bp, Homo sapiens
acacctgcaggggatggggtgaagttcaaagaggaccctgtcccgtcccccactctctgctcaaagatgctgcca

SEQ ID NO: 42062 - DNA, 73 bp, Homo sapiens
gggatggggtgaagttcaaagaggaccctgtcccgtcccccactctctgctcaaagatgctgccacctgaacc

SEQ ID NO: 42063 - DNA, 75 bp, Homo sapiens
tgaagttcaaagaggaccctgtcccgtcccccactctctgctcaaagatgctgccacctgaaccctccagacttg

SEQ ID NO: 42064 - DNA, 72 bp, Homo sapiens
agaggaccctgtcccgtcccccactctctgctcaaagatgctgccacctgaaccctccagacttgggttaat

SEQ ID NO: 42065 - DNA, 73 bp, Homo sapiens
tgtcccgtcccccactctctgctcaaagatgctgccacctgaaccctccagacttgggttaattttgggagaa

SEQ ID NO: 42066 - DNA, 74 bp, Homo sapiens
ccactctctgctcaaagatgctgccacctgaaccctccagacttgggttaattttgggagaagggtgggcactg

SEQ ID NO: 42067 - DNA, 72 bp, Homo sapiens
tcaaagatgctgccacctgaaccctccagacttgggttaattttgggagaagggtgggcactggcacaaggg

SEQ ID NO: 42068 - DNA, 70 bp, Homo sapiens
tgccacctgaaccctccagacttgggttaattttgggagaagggtgggcactggcacaagggtgggtgag

SEQ ID NO: 42069 - DNA, 69 bp, Homo sapiens
cctgaaccctccagacttgggttaattttgggagaagggtgggcactggcacaagggtgggtgagtgga

SEQ ID NO: 42070 - DNA, 69 bp, Homo sapiens
ttaattttgggagaagggtgggcactggcacaagggtgggtgagtggagcgacttgggggccgcccgcc

SEQ ID NO: 42071 - DNA, 69 bp, Homo sapiens
agaagggtgggcactggcacaagggtgggtgagtggagcgacttgggggccgcccgccctgccttcttt

SEQ ID NO: 42072 - DNA, 73 bp, Homo sapiens
actggcacaagggtgggtgagtggagcgacttgggggccgcccgccctgccttcttttctggctgcctgggca

SEQ ID NO: 42073 - DNA, 74 bp, Homo sapiens
ggtgggtgagtggagcgacttgggggccgcccgccctgccttcttttctggctgcctgggcatctgccacggaa

SEQ ID NO: 42074 - DNA, 71 bp, Homo sapiens
acttgggggccgcccgccctgccttcttttctggctgcctgggcatctgccacggaaactaggtctagtta

SEQ ID NO: 42075 - DNA, 73 bp, Homo sapiens
ccgccctgccttcttttctggctgcctgggcatctgccacggaaactaggtctagttacaggaaaatcaacca

SEQ ID NO: 42076 - DNA, 72 bp, Homo sapiens
ttcttttctggctgcctgggcatctgccacggaaactaggtctagttacaggaaaatcaaccaagtcccagg

SEQ ID NO: 42077 - DNA, 72 bp, Homo sapiens
ttctggctgcctgggcatctgccacggaaactaggtctagttacaggaaaatcaaccaagtcccaggtttta

SEQ ID NO: 42078 - DNA, 69 bp, Homo sapiens
catctgccacggaaactaggtctagttacaggaaaatcaaccaagtcccaggttttaggcccctgagct

SEQ ID NO: 42079 - DNA, 66 bp, Homo sapiens
acggaaactaggtctagttacaggaaaatcaaccaagtcccaggttttaggcccctgagcttggag

SEQ ID NO: 42080 - DNA, 70 bp, Homo sapiens
taggtctagttacaggaaaatcaaccaagtcccaggttttaggcccctgagcttggaggcctgtgggatc

SEQ ID NO: 42081 - DNA, 73 bp, Homo sapiens
ttacaggaaaatcaaccaagtcccaggttttaggcccctgagcttggaggcctgtgggatcgtgcacctgcca

SEQ ID NO: 42082 - DNA, 75 bp, Homo sapiens
atcaaccaagtcccaggttttaggcccctgagcttggaggcctgtgggatcgtgcacctgccactcaggggctga

SEQ ID NO: 42083 - DNA, 77 bp, Homo sapiens
ccctgagcttggaggcctgtgggatcgtgcacctgccactcaggggctgactcggcggctctggtttcttaaacgca

SEQ ID NO: 42084 - DNA, 76 bp, Homo sapiens
ttggaggcctgtgggatcgtgcacctgccactcaggggctgactcggcggctctggtttcttaaacgcacctctct

SEQ ID NO: 42085 - DNA, 76 bp, Homo sapiens
cctgtgggatcgtgcacctgccactcaggggctgactcggcggctctggtttcttaaacgcacctctcttctgcgg

SEQ ID NO: 42086 - DNA, 75 bp, Homo sapiens
acctgccactcaggggctgactcggcggctctggtttcttaaacgcacctctcttctgcgggcggcacctgcttc

SEQ ID NO: 42087 - DNA, 75 bp, Homo sapiens
tgactcggcggctctggtttcttaaacgcacctctcttctgcgggcggcacctgcttcctgtcgtcctcccgaca

SEQ ID NO: 42088 - DNA, 75 bp, Homo sapiens
tctggtttcttaaacgcacctctcttctgcgggcggcacctgcttcctgtcgtcctcccgacagctacgtccagc

SEQ ID NO: 42089 - DNA, 76 bp, Homo sapiens
ttcttaaacgcacctctcttctgcgggcggcacctgcttcctgtcgtcctcccgacagctacgtccagcccagaca

SEQ ID NO: 42090 - DNA, 76 bp, Homo sapiens
acctctcttctgcgggcggcacctgcttcctgtcgtcctcccgacagctacgtccagcccagacaggctggagccg

SEQ ID NO: 42091 - DNA, 76 bp, Homo sapiens
gggcggcacctgcttcctgtcgtcctcccgacagctacgtccagcccagacaggctggagccggatccccacctgc

SEQ ID NO: 42092 - DNA, 77 bp, Homo sapiens
acctgcttcctgtcgtcctcccgacagctacgtccagcccagacaggctggagccggatccccacctgctgctgtcc

SEQ ID NO: 42093 - DNA, 81 bp, Homo sapiens
ctgtcgtcctcccgacagctacgtccagcccagacaggctggagccggatccccacctgctgctgtccgagctgtgagctg

SEQ ID NO: 42094 - DNA, 82 bp, Homo sapiens
cccgacagctacgtccagcccagacaggctggagccggatccccacctgctgctgtccgagctgtgagctgtgcacgtgacc

SEQ ID NO: 42095 - DNA, 83 bp, Homo sapiens
cggatccccacctgctgctgtccgagctgtgagctgtgcacgtgaccccacctcagagctgctggctccgtcccacggccaca

SEQ ID NO: 42096 - DNA, 83 bp, Homo sapiens
tgctgtccgagctgtgagctgtgcacgtgaccccacctcagagctgctggctccgtcccacggccacagtgggggcctagcag

SEQ ID NO: 42097 - DNA, 81 bp, Homo sapiens
tgagctgtgcacgtgaccccacctcagagctgctggctccgtcccacggccacagtgggggcctagcaggccctcgcctca

SEQ ID NO: 42098 - DNA, 75 bp, Homo sapiens
acgtgaccccacctcagagctgctggctccgtcccacggccacagtgggggcctagcaggccctcgcctcaggac

SEQ ID NO: 42099 - DNA, 74 bp, Homo sapiens
agctgctggctccgtcccacggccacagtgggggcctagcaggccctcgcctcaggacgcctgtttttttctgc

SEQ ID NO: 42100 - DNA, 75 bp, Homo sapiens
acagtgggggcctagcaggccctcgcctcaggacgcctgtttttttctgctgtctgagcagccttgcctccctgg

SEQ ID NO: 42101 - DNA, 76 bp, Homo sapiens
cctagcaggccctcgcctcaggacgcctgtttttttctgctgtctgagcagccttgcctccctgggcacgcctggt

SEQ ID NO: 42102 - DNA, 76 bp, Homo sapiens
aggccctcgcctcaggacgcctgtttttttctgctgtctgagcagccttgcctccctgggcacgcctggttagcag

SEQ ID NO: 42103 - DNA, 75 bp, Homo sapiens
cctcaggacgcctgtttttttctgctgtctgagcagccttgcctccctgggcacgcctggttagcaggggctggg

SEQ ID NO: 42104 - DNA, 77 bp, Homo sapiens
ttttttctgctgtctgagcagccttgcctccctgggcacgcctggttagcaggggctggggtgcagcctcccggaca

SEQ ID NO: 42105 - DNA, 78 bp, Homo sapiens
tctgctgtctgagcagccttgcctccctgggcacgcctggttagcaggggctggggtgcagcctcccggacacgtggg

SEQ ID NO: 42106 - DNA, 75 bp, Homo sapiens
tccctgggcacgcctggttagcaggggctggggtgcagcctcccggacacgtggggccgagtgtgacactcagag

SEQ ID NO: 42107 - DNA, 76 bp, Homo sapiens
gtgcagcctcccggacacgtggggccgagtgtgacactcagaggggtcgctgacctggagcttcccgacacagtgg

SEQ ID NO: 42108 - DNA, 77 bp, Homo sapiens
tggggccgagtgtgacactcagaggggtcgctgacctggagcttcccgacacagtgggcgcaggcgacctgttccta

SEQ ID NO: 42109 - DNA, 75 bp, Homo sapiens
tgtgacactcagaggggtcgctgacctggagcttcccgacacagtgggcgcaggcgacctgttcctaccttggtt

SEQ ID NO: 42110 - DNA, 71 bp, Homo sapiens
tgacctggagcttcccgacacagtgggcgcaggcgacctgttcctaccttggttttcccttggttgtctcc

SEQ ID NO: 42111 - DNA, 71 bp, Homo sapiens
agcttcccgacacagtgggcgcaggcgacctgttcctaccttggttttcccttggttgtctcccatcctga

SEQ ID NO: 42112 - DNA, 74 bp, Homo sapiens
cagtgggcgcaggcgacctgttcctaccttggttttcccttggttgtctcccatcctgatgcgtgagctggtgg

SEQ ID NO: 42113 - DNA, 74 bp, Homo sapiens
aggcgacctgttcctaccttggttttcccttggttgtctcccatcctgatgcgtgagctggtggtgctgacgcc

SEQ ID NO: 42114 - DNA, 75 bp, Homo sapiens
accttggttttcccttggttgtctcccatcctgatgcgtgagctggtggtgctgacgccctggtgagcaggaaaa

SEQ ID NO: 42115 - DNA, 84 bp, Homo sapiens
ttggttgtctcccatcctgatgcgtgagctggtggtgctgacgccctggtgagcaggaaaagctcctcctcgttctgcagcaga

SEQ ID NO: 42116 - DNA, 85 bp, Homo sapiens
tctcccatcctgatgcgtgagctggtggtgctgacgccctggtgagcaggaaaagctcctcctcgttctgcagcagagctacacc

SEQ ID NO: 42117 - DNA, 87 bp, Homo sapiens
atgcgtgagctggtggtgctgacgccctggtgagcaggaaaagctcctcctcgttctgcagcagagctacaccccatgctgagcatc

SEQ ID NO: 42118 - DNA, 85 bp, Homo sapiens
agctggtggtgctgacgccctggtgagcaggaaaagctcctcctcgttctgcagcagagctacaccccatgctgagcatccctga

SEQ ID NO: 42119 - DNA, 81 bp, Homo sapiens
acgccctggtgagcaggaaaagctcctcctcgttctgcagcagagctacaccccatgctgagcatccctgacgcccaccca

SEQ ID NO: 42120 - DNA, 80 bp, Homo sapiens
agcaggaaaagctcctcctcgttctgcagcagagctacaccccatgctgagcatccctgacgcccacccacaggtcccag

SEQ ID NO: 42121 - DNA, 80 bp, Homo sapiens
aaaagctcctcctcgttctgcagcagagctacaccccatgctgagcatccctgacgcccacccacaggtcccaggagcca

SEQ ID NO: 42122 - DNA, 84 bp, Homo sapiens
tcgttctgcagcagagctacaccccatgctgagcatccctgacgcccacccacaggtcccaggagccaacgcctatggatgcat

SEQ ID NO: 42123 - DNA, 79 bp, Homo sapiens
agagctacaccccatgctgagcatccctgacgcccacccacaggtcccaggagccaacgcctatggatgcattggttac

SEQ ID NO: 42124 - DNA, 79 bp, Homo sapiens
cccatgctgagcatccctgacgcccacccacaggtcccaggagccaacgcctatggatgcattggttacgaggtagagc

SEQ ID NO: 42125 - DNA, 77 bp, Homo sapiens
gcatccctgacgcccacccacaggtcccaggagccaacgcctatggatgcattggttacgaggtagagcttcgccta

SEQ ID NO: 42126 - DNA, 74 bp, Homo sapiens
acgcccacccacaggtcccaggagccaacgcctatggatgcattggttacgaggtagagcttcgcctagggtca

SEQ ID NO: 42127 - DNA, 75 bp, Homo sapiens
acaggtcccaggagccaacgcctatggatgcattggttacgaggtagagcttcgcctagggtcacaggtgcttgg

SEQ ID NO: 42128 - DNA, 78 bp, Homo sapiens
ccaggagccaacgcctatggatgcattggttacgaggtagagcttcgcctagggtcacaggtgcttgggctgtctgct

SEQ ID NO: 42129 - DNA, 75 bp, Homo sapiens
attggttacgaggtagagcttcgcctagggtcacaggtgcttgggctgtctgcttgtaaagtgccctgtctgaaa

SEQ ID NO: 42130 - DNA, 76 bp, Homo sapiens
ttacgaggtagagcttcgcctagggtcacaggtgcttgggctgtctgcttgtaaagtgccctgtctgaaaccaaca

SEQ ID NO: 42131 - DNA, 75 bp, Homo sapiens
ttcgcctagggtcacaggtgcttgggctgtctgcttgtaaagtgccctgtctgaaaccaacacctggaatttcta

SEQ ID NO: 42132 - DNA, 73 bp, Homo sapiens
tagggtcacaggtgcttgggctgtctgcttgtaaagtgccctgtctgaaaccaacacctggaatttctatttt

SEQ ID NO: 42133 - DNA, 76 bp, Homo sapiens
ggtgcttgggctgtctgcttgtaaagtgccctgtctgaaaccaacacctggaatttctatttttgctgccacagaa

SEQ ID NO: 42134 - DNA, 81 bp, Homo sapiens
tctgcttgtaaagtgccctgtctgaaaccaacacctggaatttctatttttgctgccacagaagctgcatccacatctgct

SEQ ID NO: 42135 - DNA, 79 bp, Homo sapiens
taaagtgccctgtctgaaaccaacacctggaatttctatttttgctgccacagaagctgcatccacatctgcttgtttg

SEQ ID NO: 42136 - DNA, 79 bp, Homo sapiens
tgtctgaaaccaacacctggaatttctatttttgctgccacagaagctgcatccacatctgcttgtttggaaaatccaa

SEQ ID NO: 42137 - DNA, 77 bp, Homo sapiens
aacacctggaatttctatttttgctgccacagaagctgcatccacatctgcttgtttggaaaatccaactcattttc

SEQ ID NO: 42138 - DNA, 81 bp, Homo sapiens
ttctatttttgctgccacagaagctgcatccacatctgcttgtttggaaaatccaactcattttctggctgtgtccaaata

SEQ ID NO: 42139 - DNA, 84 bp, Homo sapiens
ttttgctgccacagaagctgcatccacatctgcttgtttggaaaatccaactcattttctggctgtgtccaaatatctgcatat

SEQ ID NO: 42140 - DNA, 81 bp, Homo sapiens
acagaagctgcatccacatctgcttgtttggaaaatccaactcattttctggctgtgtccaaatatctgcatatttttgga

SEQ ID NO: 42141 - DNA, 77 bp, Homo sapiens
atccacatctgcttgtttggaaaatccaactcattttctggctgtgtccaaatatctgcatatttttggacagggcc

SEQ ID NO: 42142 - DNA, 73 bp, Homo sapiens
ttgtttggaaaatccaactcattttctggctgtgtccaaatatctgcatatttttggacagggccctggaatt

SEQ ID NO: 42143 - DNA, 75 bp, Homo sapiens
aaaatccaactcattttctggctgtgtccaaatatctgcatatttttggacagggccctggaatttctcatggaa

SEQ ID NO: 42144 - DNA, 78 bp, Homo sapiens
attttctggctgtgtccaaatatctgcatatttttggacagggccctggaatttctcatggaaagccacagccagatc

SEQ ID NO: 42145 - DNA, 78 bp, Homo sapiens
aaatatctgcatatttttggacagggccctggaatttctcatggaaagccacagccagatctgtttctgtggccactc

SEQ ID NO: 42146 - DNA, 78 bp, Homo sapiens
acagggccctggaatttctcatggaaagccacagccagatctgtttctgtggccactccgcagggagttacatgtcac

SEQ ID NO: 42147 - DNA, 79 bp, Homo sapiens
aaagccacagccagatctgtttctgtggccactccgcagggagttacatgtcaccggagcctcggcatctgttagaaga

SEQ ID NO: 42148 - DNA, 78 bp, Homo sapiens
tgtttctgtggccactccgcagggagttacatgtcaccggagcctcggcatctgttagaagatgtggtgcactttggg

SEQ ID NO: 42149 - DNA, 78 bp, Homo sapiens
actccgcagggagttacatgtcaccggagcctcggcatctgttagaagatgtggtgcactttggggatctctgtctcc

SEQ ID NO: 42150 - DNA, 80 bp, Homo sapiens
agttacatgtcaccggagcctcggcatctgttagaagatgtggtgcactttggggatctctgtctccctctagctctgtc

SEQ ID NO: 42151 - DNA, 80 bp, Homo sapiens
atgtcaccggagcctcggcatctgttagaagatgtggtgcactttggggatctctgtctccctctagctctgtctccctc

SEQ ID NO: 42152 - DNA, 83 bp, Homo sapiens
tcggcatctgttagaagatgtggtgcactttggggatctctgtctccctctagctctgtctccctctcctctatctctctgtc

SEQ ID NO: 42153 - DNA, 82 bp, Homo sapiens
atctgttagaagatgtggtgcactttggggatctctgtctccctctagctctgtctccctctcctctatctctctgtctctg

SEQ ID NO: 42154 - DNA, 80 bp, Homo sapiens
tgtctctgtctccctctctatctctctgcctctctttacacccagcacacctggatttgaacccagacccagcctcttgc

SEQ ID NO: 42155 - DNA, 80 bp, Homo sapiens
tctatctctctgcctctctttacacccagcacacctggatttgaacccagacccagcctcttgccagctatgtgacctgg

SEQ ID NO: 42156 - DNA, 76 bp, Homo sapiens
tctctttacacccagcacacctggatttgaacccagacccagcctcttgccagctatgtgacctgggcggggccaa

SEQ ID NO: 42157 - DNA, 78 bp, Homo sapiens
ccagcacacctggatttgaacccagacccagcctcttgccagctatgtgacctgggcggggccaacagtgcctgtcaa

SEQ ID NO: 42158 - DNA, 78 bp, Homo sapiens
tggatttgaacccagacccagcctcttgccagctatgtgacctgggcggggccaacagtgcctgtcaagcctggtgga

SEQ ID NO: 42159 - DNA, 78 bp, Homo sapiens
ttgaacccagacccagcctcttgccagctatgtgacctgggcggggccaacagtgcctgtcaagcctggtggagtgcc

SEQ ID NO: 42160 - DNA, 78 bp, Homo sapiens
gcctcttgccagctatgtgacctgggcggggccaacagtgcctgtcaagcctggtggagtgcctgcccgttcccagta

SEQ ID NO: 42161 - DNA, 76 bp, Homo sapiens
agctatgtgacctgggcggggccaacagtgcctgtcaagcctggtggagtgcctgcccgttcccagtacagggctg

SEQ ID NO: 42162 - DNA, 78 bp, Homo sapiens
gggccaacagtgcctgtcaagcctggtggagtgcctgcccgttcccagtacagggctggacagtggcggaggctgcca

SEQ ID NO: 42163 - DNA, 78 bp, Homo sapiens
agtgcctgtcaagcctggtggagtgcctgcccgttcccagtacagggctggacagtggcggaggctgccagctctacc

SEQ ID NO: 42164 - DNA, 77 bp, Homo sapiens
aagcctggtggagtgcctgcccgttcccagtacagggctggacagtggcggaggctgccagctctacccgctgactg

SEQ ID NO: 42165 - DNA, 78 bp, Homo sapiens
agtgcctgcccgttcccagtacagggctggacagtggcggaggctgccagctctacccgctgactgtgcaccccagac

SEQ ID NO: 42166 - DNA, 78 bp, Homo sapiens
cccgttcccagtacagggctggacagtggcggaggctgccagctctacccgctgactgtgcaccccagactgctgtgg

SEQ ID NO: 42167 - DNA, 79 bp, Homo sapiens
gtacagggctggacagtggcggaggctgccagctctacccgctgactgtgcaccccagactgctgtggggccgagggga

SEQ ID NO: 42168 - DNA, 77 bp, Homo sapiens
ctgccagctctacccgctgactgtgcaccccagactgctgtggggccgaggggaggcgcggtggccccggctgtgtc

SEQ ID NO: 42169 - DNA, 76 bp, Homo sapiens
agctctacccgctgactgtgcaccccagactgctgtggggccgaggggaggcgcggtggccccggctgtgtctctg

SEQ ID NO: 42170 - DNA, 76 bp, Homo sapiens
ctgactgtgcaccccagactgctgtggggccgaggggaggcgcggtggccccggctgtgtctctgggggcagctcc

SEQ ID NO: 42171 - DNA, 78 bp, Homo sapiens
cagactgctgtggggccgaggggaggcgcggtggccccggctgtgtctctgggggcagctcccccagcgctgtgctga

SEQ ID NO: 42172 - DNA, 77 bp, Homo sapiens
tgtggggccgaggggaggcgcggtggccccggctgtgtctctgggggcagctcccccagcgctgtgctgactctaga

SEQ ID NO: 42173 - DNA, 78 bp, Homo sapiens
gggaggcgcggtggccccggctgtgtctctgggggcagctcccccagcgctgtgctgactctagactcagcccagaag

SEQ ID NO: 42174 - DNA, 78 bp, Homo sapiens
cggtggccccggctgtgtctctgggggcagctcccccagcgctgtgctgactctagactcagcccagaaggcagggac

SEQ ID NO: 42175 - DNA, 84 bp, Homo sapiens
ctgtgtctctgggggcagctcccccagcgctgtgctgactctagactcagcccagaaggcagggactgcggtgtgtgggatgca

SEQ ID NO: 42176 - DNA, 84 bp, Homo sapiens
tgggggcagctcccccagcgctgtgctgactctagactcagcccagaaggcagggactgcggtgtgtgggatgcacgtgcttca

SEQ ID NO: 42177 - DNA, 84 bp, Homo sapiens
tcccccagcgctgtgctgactctagactcagcccagaaggcagggactgcggtgtgtgggatgcacgtgcttcagcacctagaa

SEQ ID NO: 42178 - DNA, 79 bp, Homo sapiens
actctagactcagcccagaaggcagggactgcggtgtgtgggatgcacgtgcttcagcacctagaacagctcccgcccg

SEQ ID NO: 42179 - DNA, 77 bp, Homo sapiens
agcccagaaggcagggactgcggtgtgtgggatgcacgtgcttcagcacctagaacagctcccgcccgggtccacca

SEQ ID NO: 42180 - DNA, 77 bp, Homo sapiens
agggactgcggtgtgtgggatgcacgtgcttcagcacctagaacagctcccgcccgggtccaccaggctttgctcaa

SEQ ID NO: 42181 - DNA, 77 bp, Homo sapiens
gtgtgtgggatgcacgtgcttcagcacctagaacagctcccgcccgggtccaccaggctttgctcaaaggaggatgg

SEQ ID NO: 42182 - DNA, 76 bp, Homo sapiens
atgcacgtgcttcagcacctagaacagctcccgcccgggtccaccaggctttgctcaaaggaggatggtcttggga

SEQ ID NO: 42183 - DNA, 72 bp, Homo sapiens
ttcagcacctagaacagctcccgcccgggtccaccaggctttgctcaaaggaggatggtcttgggaagggaa

SEQ ID NO: 42184 - DNA, 67 bp, Homo sapiens
tcccgcccgggtccaccaggctttgctcaaaggaggatggtcttgggaagggaatccccagggtccc

SEQ ID NO: 42185 - DNA, 68 bp, Homo sapiens
caccaggctttgctcaaaggaggatggtcttgggaagggaatccccagggtccccgcaccaggtccct

SEQ ID NO: 42186 - DNA, 65 bp, Homo sapiens
aaaggaggatggtcttgggaagggaatccccagggtccccgcaccaggtcccttgtcctaaggag

SEQ ID NO: 42187 - DNA, 67 bp, Homo sapiens
ttgggaagggaatccccagggtccccgcaccaggtcccttgtcctaaggagggggatgagccgtctc

SEQ ID NO: 42188 - DNA, 68 bp, Homo sapiens
ggaatccccagggtccccgcaccaggtcccttgtcctaaggagggggatgagccgtctccctaggtca

SEQ ID NO: 42189 - DNA, 67 bp, Homo sapiens
agggtccccgcaccaggtcccttgtcctaaggagggggatgagccgtctccctaggtcatgggggga

SEQ ID NO: 42190 - DNA, 78 bp, Homo sapiens
gggagcgagggcggcgcttcctgccactgcctttgccctgtgcagcctgggcggcctcagacagagccttcctgggtg

SEQ ID NO: 42191 - DNA, 80 bp, Homo sapiens
agggcggcgcttcctgccactgcctttgccctgtgcagcctgggcggcctcagacagagccttcctgggtgggtgctgca

SEQ ID NO: 42192 - DNA, 82 bp, Homo sapiens
cttcctgccactgcctttgccctgtgcagcctgggcggcctcagacagagccttcctgggtgggtgctgcagctctgcctcc

SEQ ID NO: 42193 - DNA, 81 bp, Homo sapiens
tttgccctgtgcagcctgggcggcctcagacagagccttcctgggtgggtgctgcagctctgcctccccctgagtgcctcc

SEQ ID NO: 42194 - DNA, 81 bp, Homo sapiens
ctgtgcagcctgggcggcctcagacagagccttcctgggtgggtgctgcagctctgcctccccctgagtgcctcctccttg

SEQ ID NO: 42195 - DNA, 80 bp, Homo sapiens
cggcctcagacagagccttcctgggtgggtgctgcagctctgcctccccctgagtgcctcctccttggctgaccctgtca

SEQ ID NO: 42196 - DNA, 80 bp, Homo sapiens
agacagagccttcctgggtgggtgctgcagctctgcctccccctgagtgcctcctccttggctgaccctgtcattcacca

SEQ ID NO: 42197 - DNA, 80 bp, Homo sapiens
tcctgggtgggtgctgcagctctgcctccccctgagtgcctcctccttggctgaccctgtcattcaccacctgaagccat

SEQ ID NO: 42198 - DNA, 82 bp, Homo sapiens
tgctgcagctctgcctccccctgagtgcctcctccttggctgaccctgtcattcaccacctgaagccattgctaacaataac

SEQ ID NO: 42199 - DNA, 78 bp, Homo sapiens
tgcctccccctgagtgcctcctccttggctgaccctgtcattcaccacctgaagccattgctaacaataaccaatcca

SEQ ID NO: 42200 - DNA, 77 bp, Homo sapiens
cctcctccttggctgaccctgtcattcaccacctgaagccattgctaacaataaccaatccaggtggtgctgggcag

SEQ ID NO: 42201 - DNA, 81 bp, Homo sapiens
tgaccctgtcattcaccacctgaagccattgctaacaataaccaatccaggtggtgctgggcagtgctgcgtggtctctgg

SEQ ID NO: 42202 - DNA, 76 bp, Homo sapiens
attcaccacctgaagccattgctaacaataaccaatccaggtggtgctgggcagtgctgcgtggtctctgggggtt

SEQ ID NO: 42203 - DNA, 76 bp, Homo sapiens
acctgaagccattgctaacaataaccaatccaggtggtgctgggcagtgctgcgtggtctctgggggtttcctgga

SEQ ID NO: 42204 - DNA, 76 bp, Homo sapiens
attgctaacaataaccaatccaggtggtgctgggcagtgctgcgtggtctctgggggtttcctggacgactgtgga

SEQ ID NO: 42205 - DNA, 76 bp, Homo sapiens
ctgggcagtgctgcgtggtctctgggggtttcctggacgactgtggaccggtcagggctggccagggtcacagaga

SEQ ID NO: 42206 - DNA, 74 bp, Homo sapiens
ctgcgtggtctctgggggtttcctggacgactgtggaccggtcagggctggccagggtcacagagaggagccca

SEQ ID NO: 42207 - DNA, 76 bp, Homo sapiens
gggtttcctggacgactgtggaccggtcagggctggccagggtcacagagaggagcccacagctgcctgtgccagg

SEQ ID NO: 42208 - DNA, 78 bp, Homo sapiens
tcctggacgactgtggaccggtcagggctggccagggtcacagagaggagcccacagctgcctgtgccagggtggagg

SEQ ID NO: 42209 - DNA, 79 bp, Homo sapiens
gggtcacagagaggagcccacagctgcctgtgccagggtggagggcctgagggggtggacagcacaagactagtcctga

SEQ ID NO: 42210 - DNA, 80 bp, Homo sapiens
agagaggagcccacagctgcctgtgccagggtggagggcctgagggggtggacagcacaagactagtcctgagcttgtca

SEQ ID NO: 42211 - DNA, 79 bp, Homo sapiens
agctgcctgtgccagggtggagggcctgagggggtggacagcacaagactagtcctgagcttgtcaggagacgtggatg

SEQ ID NO: 42212 - DNA, 80 bp, Homo sapiens
tgccagggtggagggcctgagggggtggacagcacaagactagtcctgagcttgtcaggagacgtggatgggatgcattc

SEQ ID NO: 42213 - DNA, 79 bp, Homo sapiens
agggcctgagggggtggacagcacaagactagtcctgagcttgtcaggagacgtggatgggatgcattcctgtagagga

SEQ ID NO: 42214 - DNA, 79 bp, Homo sapiens
ggggtggacagcacaagactagtcctgagcttgtcaggagacgtggatgggatgcattcctgtagaggaaggctcggaa

SEQ ID NO: 42215 - DNA, 81 bp, Homo sapiens
acagcacaagactagtcctgagcttgtcaggagacgtggatgggatgcattcctgtagaggaaggctcggaacaagctgcc

SEQ ID NO: 42216 - DNA, 82 bp, Homo sapiens
ttgtcaggagacgtggatgggatgcattcctgtagaggaaggctcggaacaagctgccctccagcaggatcggtgcaggaca

SEQ ID NO: 42217 - DNA, 79 bp, Homo sapiens
acgtggatgggatgcattcctgtagaggaaggctcggaacaagctgccctccagcaggatcggtgcaggacaggcgtgt

SEQ ID NO: 42218 - DNA, 80 bp, Homo sapiens
atgggatgcattcctgtagaggaaggctcggaacaagctgccctccagcaggatcggtgcaggacaggcgtgttcctgtc

SEQ ID NO: 42219 - DNA, 79 bp, Homo sapiens
attcctgtagaggaaggctcggaacaagctgccctccagcaggatcggtgcaggacaggcgtgttcctgtctggcagaa

SEQ ID NO: 42220 - DNA, 79 bp, Homo sapiens
aaggctcggaacaagctgccctccagcaggatcggtgcaggacaggcgtgttcctgtctggcagaaccctgcagtataa

SEQ ID NO: 42221 - DNA, 77 bp, Homo sapiens
aacaagctgccctccagcaggatcggtgcaggacaggcgtgttcctgtctggcagaaccctgcagtataaaaagccg

SEQ ID NO: 42222 - DNA, 77 bp, Homo sapiens
tccagcaggatcggtgcaggacaggcgtgttcctgtctggcagaaccctgcagtataaaaagccggccgaacaggaa

SEQ ID NO: 42223 - DNA, 76 bp, Homo sapiens
tcggtgcaggacaggcgtgttcctgtctggcagaaccctgcagtataaaaagccggccgaacaggaatcacgtgat

SEQ ID NO: 42224 - DNA, 73 bp, Homo sapiens
tgttcctgtctggcagaaccctgcagtataaaaagccggccgaacaggaatcacgtgattttggacaggggtg

SEQ ID NO: 42225 - DNA, 69 bp, Homo sapiens
agtataaaaagccggccgaacaggaatcacgtgattttggacaggggtggagatgtgagggagggaaag

SEQ ID NO: 42226 - DNA, 72 bp, Homo sapiens
aacaggaatcacgtgattttggacaggggtggagatgtgagggagggaaaggggatctttagcttcaatatg

SEQ ID NO: 42227 - DNA, 75 bp, Homo sapiens
atcacgtgattttggacaggggtggagatgtgagggagggaaaggggatctttagcttcaatatgtcatctccca

SEQ ID NO: 42228 - DNA, 78 bp, Homo sapiens
acaggggtggagatgtgagggagggaaaggggatctttagcttcaatatgtcatctcccagcaagatgagagtctgaa

SEQ ID NO: 42229 - DNA, 79 bp, Homo sapiens
agatgtgagggagggaaaggggatctttagcttcaatatgtcatctcccagcaagatgagagtctgaacctgtggtgta

SEQ ID NO: 42230 - DNA, 78 bp, Homo sapiens
ggagggaaaggggatctttagcttcaatatgtcatctcccagcaagatgagagtctgaacctgtggtgtagctgggtc

SEQ ID NO: 42231 - DNA, 84 bp, Homo sapiens
ggatctttagcttcaatatgtcatctcccagcaagatgagagtctgaacctgtggtgtagctgggtctgcgacaagcaatggta

SEQ ID NO: 42232 - DNA, 87 bp, Homo sapiens
tttagcttcaatatgtcatctcccagcaagatgagagtctgaacctgtggtgtagctgggtctgcgacaagcaatggtatcagctgc

SEQ ID NO: 42233 - DNA, 91 bp, Homo sapiens
tcatctcccagcaagatgagagtctgaacctgtggtgtagctgggtctgcgacaagcaatggtatcagctgctgtaacgatgtgatgatga

SEQ ID NO: 42234 - DNA, 89 bp, Homo sapiens
agcaagatgagagtctgaacctgtggtgtagctgggtctgcgacaagcaatggtatcagctgctgtaacgatgtgatgatgatcacctg

SEQ ID NO: 42235 - DNA, 89 bp, Homo sapiens
atgagagtctgaacctgtggtgtagctgggtctgcgacaagcaatggtatcagctgctgtaacgatgtgatgatgatcacctgtggtgc

SEQ ID NO: 42236 - DNA, 82 bp, Homo sapiens
aatggtatcagctgctgtaacgatgtgatgatgatcacctgtggtgccatggcgtcttctcccgggtgagtcccgatttcac

SEQ ID NO: 42237 - DNA, 82 bp, Homo sapiens
agctgctgtaacgatgtgatgatgatcacctgtggtgccatggcgtcttctcccgggtgagtcccgatttcacctgctgtaa

SEQ ID NO: 42238 - DNA, 86 bp, Homo sapiens
atgtgatgatgatcacctgtggtgccatggcgtcttctcccgggtgagtcccgatttcacctgctgtaatgatatgacgatgatca

SEQ ID NO: 42239 - DNA, 82 bp, Homo sapiens
atgatcacctgtggtgccatggcgtcttctcccgggtgagtcccgatttcacctgctgtaatgatatgacgatgatcacctg

SEQ ID NO: 42240 - DNA, 80 bp, Homo sapiens
ctgtggtgccatggcgtcttctcccgggtgagtcccgatttcacctgctgtaatgatatgacgatgatcacctgtggtac

SEQ ID NO: 42241 - DNA, 80 bp, Homo sapiens
atggcgtcttctcccgggtgagtcccgatttcacctgctgtaatgatatgacgatgatcacctgtggtactgtggcatct

SEQ ID NO: 42242 - DNA, 80 bp, Homo sapiens
gggtgagtcccgatttcacctgctgtaatgatatgacgatgatcacctgtggtactgtggcatcttctcccgggtgagtc

SEQ ID NO: 42243 - DNA, 81 bp, Homo sapiens
cgatttcacctgctgtaatgatatgacgatgatcacctgtggtactgtggcatcttctcccgggtgagtcccgatttcatc

SEQ ID NO: 42244 - DNA, 82 bp, Homo sapiens
acctgctgtaatgatatgacgatgatcacctgtggtactgtggcatcttctcccgggtgagtcccgatttcatctgctgtaa

SEQ ID NO: 42245 - DNA, 85 bp, Homo sapiens
taatgatatgacgatgatcacctgtggtactgtggcatcttctcccgggtgagtcccgatttcatctgctgtaatgatatgacga

SEQ ID NO: 42246 - DNA, 84 bp, Homo sapiens
atgatcacctgtggtactgtggcatcttctcccgggtgagtcccgatttcatctgctgtaatgatatgacgatgatcacctgtg

SEQ ID NO: 42247 - DNA, 81 bp, Homo sapiens
cctgtggtactgtggcatcttctcccgggtgagtcccgatttcatctgctgtaatgatatgacgatgatcacctgtggtac

SEQ ID NO: 42248 - DNA, 81 bp, Homo sapiens
catcttctcccgggtgagtcccgatttcatctgctgtaatgatatgacgatgatcacctgtggtactgtggcgtcttctcc

SEQ ID NO: 42249 - DNA, 79 bp, Homo sapiens
tctcccgggtgagtcccgatttcatctgctgtaatgatatgacgatgatcacctgtggtactgtggcgtcttctcccgg

SEQ ID NO: 42250 - DNA, 83 bp, Homo sapiens
atatgacgatgatcacctgtggtactgtggcgtcttctcccgggtgagtctcgatttcacctgctgtaatgatatgacgatga

SEQ ID NO: 42251 - DNA, 79 bp, Homo sapiens
acctgtggtactgtggcgtcttctcccgggtgagtctcgatttcacctgctgtaatgatatgacgatgatcacctgtgg

SEQ ID NO: 42252 - DNA, 81 bp, Homo sapiens
tggtactgtggcgtcttctcccgggtgagtctcgatttcacctgctgtaatgatatgacgatgatcacctgtggtactgtg

SEQ ID NO: 42253 - DNA, 79 bp, Homo sapiens
ccgggtgagtctcgatttcacctgctgtaatgatatgacgatgatcacctgtggtactgtggcgtcttctcccgggtga

SEQ ID NO: 42254 - DNA, 83 bp, Homo sapiens
gtaatgatatgacgatgatcacctgtggtactgtggcgtcttctcccgggtgagtctcgatttcacctgctgtaatgatatga

SEQ ID NO: 42255 - DNA, 82 bp, Homo sapiens
atgatcacctgtggtactgtggcgtcttctcccgggtgagtctcgatttcacctgctgtaatgatatgacgatgatcacctg

SEQ ID NO: 42256 - DNA, 80 bp, Homo sapiens
ctgtggtactgtggcgtcttctcccgggtgagtctcgatttcacctgctgtaatgatatgacgatgatcacctgtggtac

SEQ ID NO: 42257 - DNA, 81 bp, Homo sapiens
tggcgtcttctcccgggtgagtctcgatttcacctgctgtaatgatatgacgatgatcacctgtggtactgtggcgtcttc

SEQ ID NO: 42258 - DNA, 80 bp, Homo sapiens
ttctcccgggtgagtctcgatttcacctgctgtaatgatatgacgatgatcacctgtggtactgtggcgtcttctcctgg

SEQ ID NO: 42259 - DNA, 81 bp, Homo sapiens
agtctcgatttcacctgctgtaatgatatgacgatgatcacctgtggtactgtggcgtcttctcctgggtgagtctcgatt

SEQ ID NO: 42260 - DNA, 82 bp, Homo sapiens
acctgctgtaatgatatgacgatgatcacctgtggtactgtggcgtcttctcctgggtgagtctcgatttcacctgctgtaa

SEQ ID NO: 42261 - DNA, 85 bp, Homo sapiens
taatgatatgacgatgatcacctgtggtactgtggcgtcttctcctgggtgagtctcgatttcacctgctgtaatgatatgacga

SEQ ID NO: 42262 - DNA, 85 bp, Homo sapiens
atgacgatgatcacctgtggtactgtggcgtcttctcctgggtgagtctcgatttcacctgctgtaatgatatgacgatgatcac

SEQ ID NO: 42263 - DNA, 84 bp, Homo sapiens
tactgtggcgtcttctcctgggtgagtctcgatttcacctgctgtaatgatatgacgatgatcacctgtggtactgtggcatct

SEQ ID NO: 42264 - DNA, 84 bp, Homo sapiens
ttctcctgggtgagtctcgatttcacctgctgtaatgatatgacgatgatcacctgtggtactgtggcatcttctgggtgagtc

SEQ ID NO: 42265 - DNA, 82 bp, Homo sapiens
agtctcgatttcacctgctgtaatgatatgacgatgatcacctgtggtactgtggcatcttctgggtgagtccggatttcac

SEQ ID NO: 42266 - DNA, 83 bp, Homo sapiens
atttcacctgctgtaatgatatgacgatgatcacctgtggtactgtggcatcttctgggtgagtccggatttcactcaactgc

SEQ ID NO: 42267 - DNA, 83 bp, Homo sapiens
taatgatatgacgatgatcacctgtggtactgtggcatcttctgggtgagtccggatttcactcaactgcctcactaacctga

SEQ ID NO: 42268 - DNA, 82 bp, Homo sapiens
tatgacgatgatcacctgtggtactgtggcatcttctgggtgagtccggatttcactcaactgcctcactaacctgacatta

SEQ ID NO: 42269 - DNA, 75 bp, Homo sapiens
ctgtggtactgtggcatcttctgggtgagtccggatttcactcaactgcctcactaacctgacattaggtttttg

SEQ ID NO: 42270 - DNA, 76 bp, Homo sapiens
tactgtggcatcttctgggtgagtccggatttcactcaactgcctcactaacctgacattaggtttttgttgatct

SEQ ID NO: 42271 - DNA, 73 bp, Homo sapiens
ttgatctttttctagcctgggcagggcctccactgacccatagagaaactgacccgtagagaaacacccagaa

SEQ ID NO: 42272 - DNA, 71 bp, Homo sapiens
atctttttctagcctgggcagggcctccactgacccatagagaaactgacccgtagagaaacacccagaaa

SEQ ID NO: 42273 - DNA, 74 bp, Homo sapiens
tttttctagcctgggcagggcctccactgacccatagagaaactgacccgtagagaaacacccagaaatgctca

SEQ ID NO: 42274 - DNA, 76 bp, Homo sapiens
tctagcctgggcagggcctccactgacccatagagaaactgacccgtagagaaacacccagaaatgctcactcctg

SEQ ID NO: 42275 - DNA, 76 bp, Homo sapiens
tgggcagggcctccactgacccatagagaaactgacccgtagagaaacacccagaaatgctcactcctggccactg

SEQ ID NO: 42276 - DNA, 77 bp, Homo sapiens
gcctccactgacccatagagaaactgacccgtagagaaacacccagaaatgctcactcctggccactggctgtaaga

SEQ ID NO: 42277 - DNA, 75 bp, Homo sapiens
acccatagagaaactgacccgtagagaaacacccagaaatgctcactcctggccactggctgtaagagttgaaga

SEQ ID NO: 42278 - DNA, 75 bp, Homo sapiens
atagagaaactgacccgtagagaaacacccagaaatgctcactcctggccactggctgtaagagttgaagaaaga

SEQ ID NO: 42279 - DNA, 77 bp, Homo sapiens
aaacacccagaaatgctcactcctggccactggctgtaagagttgaagaaagaagaaacatgaaaagcagctcaata

SEQ ID NO: 42280 - DNA, 75 bp, Homo sapiens
tggccactggctgtaagagttgaagaaagaagaaacatgaaaagcagctcaatagtcaaaaacaggtttatgttg

SEQ ID NO: 42281 - DNA, 75 bp, Homo sapiens
tggctgtaagagttgaagaaagaagaaacatgaaaagcagctcaatagtcaaaaacaggtttatgttggagaata

SEQ ID NO: 42282 - DNA, 70 bp, Homo sapiens
aagaaacatgaaaagcagctcaatagtcaaaaacaggtttatgttggagaataaaccctagaggggcttc

SEQ ID NO: 42283 - DNA, 66 bp, Homo sapiens
aatagtcaaaaacaggtttatgttggagaataaaccctagaggggcttcgggccgatttaggtctg

SEQ ID NO: 42284 - DNA, 65 bp, Homo sapiens
aaaaacaggtttatgttggagaataaaccctagaggggcttcgggccgatttaggtctggagtgt

SEQ ID NO: 42285 - DNA, 70 bp, Homo sapiens
tttatgttggagaataaaccctagaggggcttcgggccgatttaggtctggagtgttctctcttacagac

SEQ ID NO: 42286 - DNA, 68 bp, Homo sapiens
taaaccctagaggggcttcgggccgatttaggtctggagtgttctctcttacagactaaaggtattta

SEQ ID NO: 42287 - DNA, 69 bp, Homo sapiens
tagaggggcttcgggccgatttaggtctggagtgttctctcttacagactaaaggtatttaaggattta

SEQ ID NO: 42288 - DNA, 67 bp, Homo sapiens
ttcgggccgatttaggtctggagtgttctctcttacagactaaaggtatttaaggatttaggaaggg

SEQ ID NO: 42289 - DNA, 70 bp, Homo sapiens
tttaggtctggagtgttctctcttacagactaaaggtatttaaggatttaggaaggggagcttgtcgcag

SEQ ID NO: 42290 - DNA, 69 bp, Homo sapiens
ttctctcttacagactaaaggtatttaaggatttaggaaggggagcttgtcgcaggttcagagtgtttt

SEQ ID NO: 42291 - DNA, 68 bp, Homo sapiens
tcttacagactaaaggtatttaaggatttaggaaggggagcttgtcgcaggttcagagtgtttttggg

SEQ ID NO: 42292 - DNA, 67 bp, Homo sapiens
gtatttaaggatttaggaaggggagcttgtcgcaggttcagagtgtttttgggtggagggagtttta

SEQ ID NO: 42293 - DNA, 69 bp, Homo sapiens
taaggatttaggaaggggagcttgtcgcaggttcagagtgtttttgggtggagggagttttatggcagg

SEQ ID NO: 42294 - DNA, 70 bp, Homo sapiens
cttgtcgcaggttcagagtgtttttgggtggagggagttttatggcagggttggaaggtttcaggtcaga

SEQ ID NO: 42295 - DNA, 66 bp, Homo sapiens
tttttgggtggagggagttttatggcagggttggaaggtttcaggtcagaggggagtttatcttgg

SEQ ID NO: 42296 - DNA, 68 bp, Homo sapiens
agttttatggcagggttggaaggtttcaggtcagaggggagtttatcttggggtcggcatgtttctgg

SEQ ID NO: 42297 - DNA, 70 bp, Homo sapiens
cagggttggaaggtttcaggtcagaggggagtttatcttggggtcggcatgtttctggtcaaaggtgtca

SEQ ID NO: 42298 - DNA, 69 bp, Homo sapiens
aaggtttcaggtcagaggggagtttatcttggggtcggcatgtttctggtcaaaggtgtcatttgtggt

SEQ ID NO: 42299 - DNA, 75 bp, Homo sapiens
gtttatcttggggtcggcatgtttctggtcaaaggtgtcatttgtggtttatggtcacgctgatattagacatta

SEQ ID NO: 42300 - DNA, 75 bp, Homo sapiens
gggtcggcatgtttctggtcaaaggtgtcatttgtggtttatggtcacgctgatattagacattaggttgatgtt

SEQ ID NO: 42301 - DNA, 73 bp, Homo sapiens
aaaggtgtcatttgtggtttatggtcacgctgatattagacattaggttgatgttttgcggctggattttggg

SEQ ID NO: 42302 - DNA, 71 bp, Homo sapiens
tttgtggtttatggtcacgctgatattagacattaggttgatgttttgcggctggattttgggggttttta

SEQ ID NO: 42303 - DNA, 71 bp, Homo sapiens
ggtttatggtcacgctgatattagacattaggttgatgttttgcggctggattttgggggtttttaatcaa

SEQ ID NO: 42304 - DNA, 68 bp, Homo sapiens
tgatattagacattaggttgatgttttgcggctggattttgggggtttttaatcaaggggaacttaaa

SEQ ID NO: 42305 - DNA, 66 bp, Homo sapiens
ttagacattaggttgatgttttgcggctggattttgggggtttttaatcaaggggaacttaaaatg

SEQ ID NO: 42306 - DNA, 64 bp, Homo sapiens
ggttgatgttttgcggctggattttgggggtttttaatcaaggggaacttaaaatggtggtgtt

SEQ ID NO: 42307 - DNA, 72 bp, Homo sapiens
aaggggaacttaaaatggtggtgtttgtccaagatggcgatgttcttgctctgtcaatccagaccctgtagt

SEQ ID NO: 42308 - DNA, 77 bp, Homo sapiens
tgtttgtccaagatggcgatgttcttgctctgtcaatccagaccctgtagttgaaaaggacgaggggtgatgtgttc

SEQ ID NO: 42309 - DNA, 77 bp, Homo sapiens
tccaagatggcgatgttcttgctctgtcaatccagaccctgtagttgaaaaggacgaggggtgatgtgttctttctg

SEQ ID NO: 42310 - DNA, 74 bp, Homo sapiens
atgttcttgctctgtcaatccagaccctgtagttgaaaaggacgaggggtgatgtgttctttctggctacttcc

SEQ ID NO: 42311 - DNA, 77 bp, Homo sapiens
tgtcaatccagaccctgtagttgaaaaggacgaggggtgatgtgttctttctggctacttcctgctgagagagagtg

SEQ ID NO: 42312 - DNA, 74 bp, Homo sapiens
gaccctgtagttgaaaaggacgaggggtgatgtgttctttctggctacttcctgctgagagagagtggtcctta

SEQ ID NO: 42313 - DNA, 73 bp, Homo sapiens
tgtagttgaaaaggacgaggggtgatgtgttctttctggctacttcctgctgagagagagtggtccttacggg

SEQ ID NO: 42314 - DNA, 77 bp, Homo sapiens
atgtgttctttctggctacttcctgctgagagagagtggtccttacggggcactgaatgcagcactggacttttggg

SEQ ID NO: 42315 - DNA, 77 bp, Homo sapiens
tttctggctacttcctgctgagagagagtggtccttacggggcactgaatgcagcactggacttttgggggcttaga

SEQ ID NO: 42316 - DNA, 83 bp, Homo sapiens
ttcctgctgagagagagtggtccttacggggcactgaatgcagcactggacttttgggggcttagaggcagcatctgctgata

SEQ ID NO: 42317 - DNA, 81 bp, Homo sapiens
tggtccttacggggcactgaatgcagcactggacttttgggggcttagaggcagcatctgctgatacatctaggagtggaa

SEQ ID NO: 42318 - DNA, 77 bp, Homo sapiens
gcactggacttttgggggcttagaggcagcatctgctgatacatctaggagtggaagaggtggatttgttcccggaa

SEQ ID NO: 42319 - DNA, 78 bp, Homo sapiens
ttttgggggcttagaggcagcatctgctgatacatctaggagtggaagaggtggatttgttcccggaagcactctctg

SEQ ID NO: 42320 - DNA, 78 bp, Homo sapiens
gggcttagaggcagcatctgctgatacatctaggagtggaagaggtggatttgttcccggaagcactctctgttttgg

SEQ ID NO: 42321 - DNA, 77 bp, Homo sapiens
aggcagcatctgctgatacatctaggagtggaagaggtggatttgttcccggaagcactctctgttttgggggcgta

SEQ ID NO: 42322 - DNA, 74 bp, Homo sapiens
atctgctgatacatctaggagtggaagaggtggatttgttcccggaagcactctctgttttgggggcgtagagg

SEQ ID NO: 42323 - DNA, 71 bp, Homo sapiens
atacatctaggagtggaagaggtggatttgttcccggaagcactctctgttttgggggcgtagagggagcg

SEQ ID NO: 42324 - DNA, 75 bp, Homo sapiens
gtggaagaggtggatttgttcccggaagcactctctgttttgggggcgtagagggagcgtctgctgatacatcta

SEQ ID NO: 42325 - DNA, 73 bp, Homo sapiens
aagaggtggatttgttcccggaagcactctctgttttgggggcgtagagggagcgtctgctgatacatctagg

SEQ ID NO: 42326 - DNA, 73 bp, Homo sapiens
agaggtggatttgttcccggaagcactctctgttttgggggcgtagagggagcgtctgctgatacatctaggg

SEQ ID NO: 42327 - DNA, 73 bp, Homo sapiens
atttgttcccggaagcactctctgttttgggggcgtagagggagcgtctgctgatacatctaggggtggaaga

SEQ ID NO: 42328 - DNA, 75 bp, Homo sapiens
gcgtagagggagcgtctgctgatacatctaggggtggaagaggtggatttgttcccggaagtgctctctgttttg

SEQ ID NO: 42329 - DNA, 75 bp, Homo sapiens
agcgtctgctgatacatctaggggtggaagaggtggatttgttcccggaagtgctctctgttttggggccataga

SEQ ID NO: 42330 - DNA, 75 bp, Homo sapiens
tgatacatctaggggtggaagaggtggatttgttcccggaagtgctctctgttttggggccatagagggagcatc

SEQ ID NO: 42331 - DNA, 77 bp, Homo sapiens
aggtggatttgttcccggaagtgctctctgttttggggccatagagggagcatctgctgatacatctaggagtggaa

SEQ ID NO: 42332 - DNA, 77 bp, Homo sapiens
atttgttcccggaagtgctctctgttttggggccatagagggagcatctgctgatacatctaggagtggaagaggtg

SEQ ID NO: 42333 - DNA, 77 bp, Homo sapiens
aagtgctctctgttttggggccatagagggagcatctgctgatacatctaggagtggaagaggtgggtttgttcctg

SEQ ID NO: 42334 - DNA, 78 bp, Homo sapiens
ggccatagagggagcatctgctgatacatctaggagtggaagaggtgggtttgttcctggaagcgctctctgtttggg

SEQ ID NO: 42335 - DNA, 76 bp, Homo sapiens
catctgctgatacatctaggagtggaagaggtgggtttgttcctggaagcgctctctgtttgggggcgtagaggga

SEQ ID NO: 42336 - DNA, 75 bp, Homo sapiens
agtggaagaggtgggtttgttcctggaagcgctctctgtttgggggcgtagagggagcgtctgctgatacatctc

SEQ ID NO: 42337 - DNA, 77 bp, Homo sapiens
gtgggtttgttcctggaagcgctctctgtttgggggcgtagagggagcgtctgctgatacatctcgtcttcagctta

SEQ ID NO: 42338 - DNA, 78 bp, Homo sapiens
ttcctggaagcgctctctgtttgggggcgtagagggagcgtctgctgatacatctcgtcttcagcttatggggcttta

SEQ ID NO: 42339 - DNA, 76 bp, Homo sapiens
aagcgctctctgtttgggggcgtagagggagcgtctgctgatacatctcgtcttcagcttatggggctttaagaaa

SEQ ID NO: 42340 - DNA, 77 bp, Homo sapiens
ctgtttgggggcgtagagggagcgtctgctgatacatctcgtcttcagcttatggggctttaagaaagcacagctta

SEQ ID NO: 42341 - DNA, 78 bp, Homo sapiens
gtagagggagcgtctgctgatacatctcgtcttcagcttatggggctttaagaaagcacagcttaggtttcagtgatt

SEQ ID NO: 42342 - DNA, 73 bp, Homo sapiens
atacatctcgtcttcagcttatggggctttaagaaagcacagcttaggtttcagtgatttccagttagaaaag

SEQ ID NO: 42343 - DNA, 70 bp, Homo sapiens
ttcagcttatggggctttaagaaagcacagcttaggtttcagtgatttccagttagaaaagtggggaaaa

SEQ ID NO: 42344 - DNA, 66 bp, Homo sapiens
ggctttaagaaagcacagcttaggtttcagtgatttccagttagaaaagtggggaaaaaggaaaaa

SEQ ID NO: 42345 - DNA, 67 bp, Homo sapiens
gaaagcacagcttaggtttcagtgatttccagttagaaaagtggggaaaaaggaaaaattgaaaaca

SEQ ID NO: 42346 - DNA, 65 bp, Homo sapiens
cagcttaggtttcagtgatttccagttagaaaagtggggaaaaaggaaaaattgaaaacattatt

SEQ ID NO: 42347 - DNA, 66 bp, Homo sapiens
gtgatttccagttagaaaagtggggaaaaaggaaaaattgaaaacattattttggagactcgtagc

SEQ ID NO: 42348 - DNA, 69 bp, Homo sapiens
agaatttaatctaaactgtagaaaataataacaattgaaaaacatcagacaagactggaattttaacaa

SEQ ID NO: 42349 - DNA, 71 bp, Homo sapiens
aatctaaactgtagaaaataataacaattgaaaaacatcagacaagactggaattttaacaacaggtgtgc

SEQ ID NO: 42350 - DNA, 71 bp, Homo sapiens
ctgtagaaaataataacaattgaaaaacatcagacaagactggaattttaacaacaggtgtgctatagttt

SEQ ID NO: 42351 - DNA, 71 bp, Homo sapiens
gaaaataataacaattgaaaaacatcagacaagactggaattttaacaacaggtgtgctatagtttttgaa

SEQ ID NO: 42352 - DNA, 70 bp, Homo sapiens
acaattgaaaaacatcagacaagactggaattttaacaacaggtgtgctatagtttttgaaacaattttc

SEQ ID NO: 42353 - DNA, 71 bp, Homo sapiens
caattgaaaaacatcagacaagactggaattttaacaacaggtgtgctatagtttttgaaacaattttctc

SEQ ID NO: 42354 - DNA, 74 bp, Homo sapiens
gaaagtgacattctttacttaccccagatcagaacccctgtgcagggactgtgtacacagaataggaggccagt

SEQ ID NO: 42355 - DNA, 72 bp, Homo sapiens
attctttacttaccccagatcagaacccctgtgcagggactgtgtacacagaataggaggccagtttccaag

SEQ ID NO: 42356 - DNA, 73 bp, Homo sapiens
tacttaccccagatcagaacccctgtgcagggactgtgtacacagaataggaggccagtttccaaggcctttc

SEQ ID NO: 42357 - DNA, 75 bp, Homo sapiens
agatcagaacccctgtgcagggactgtgtacacagaataggaggccagtttccaaggcctttcttggcttcataa

SEQ ID NO: 42358 - DNA, 73 bp, Homo sapiens
ccctgtgcagggactgtgtacacagaataggaggccagtttccaaggcctttcttggcttcataagtcaagtt

SEQ ID NO: 42359 - DNA, 72 bp, Homo sapiens
actgtgtacacagaataggaggccagtttccaaggcctttcttggcttcataagtcaagtttgattccttaa

SEQ ID NO: 42360 - DNA, 71 bp, Homo sapiens
gtgtacacagaataggaggccagtttccaaggcctttcttggcttcataagtcaagtttgattccttaaag

SEQ ID NO: 42361 - DNA, 74 bp, Homo sapiens
acttatgcaaatcactatattgccataacttaagaatagtcacaaatactttccaaattctggagaaaatcagg

SEQ ID NO: 42362 - DNA, 73 bp, Homo sapiens
ttctggagaaaatcaggtagagaggaacaaataagctccaaattttgctcatgggagtatactaaattgttaa

SEQ ID NO: 42363 - DNA, 72 bp, Homo sapiens
ggagtatactaaattgttaaaagctgtcaatagctcgcaagacgtttccttgactctgaaaagcaaaacaaa

SEQ ID NO: 42364 - DNA, 71 bp, Homo sapiens
actaaattgttaaaagctgtcaatagctcgcaagacgtttccttgactctgaaaagcaaaacaaaggatta

SEQ ID NO: 42365 - DNA, 78 bp, Homo sapiens
tctgatgtcacagtcttcaaagttatcagaaacctgtattgaagagcacctggtaaaactttatagctgattatgaaa

SEQ ID NO: 42366 - DNA, 73 bp, Homo sapiens
acagtcttcaaagttatcagaaacctgtattgaagagcacctggtaaaactttatagctgattatgaaaccac

SEQ ID NO: 42367 - DNA, 72 bp, Homo sapiens
agttatcagaaacctgtattgaagagcacctggtaaaactttatagctgattatgaaaccaccttctaaaca

SEQ ID NO: 42368 - DNA, 70 bp, Homo sapiens
aacctgtattgaagagcacctggtaaaactttatagctgattatgaaaccaccttctaaacaggaccaaa

SEQ ID NO: 42369 - DNA, 68 bp, Homo sapiens
ctctaagagaaacccattgtgcttttattttaatgcttaatttgcagaaaaactggaggatacccctt

SEQ ID NO: 42370 - DNA, 67 bp, Homo sapiens
gagaaacccattgtgcttttattttaatgcttaatttgcagaaaaactggaggatacccctttaact

SEQ ID NO: 42371 - DNA, 70 bp, Homo sapiens
ctttagccaatatgtttacaaatagaatttcctttacaatcaaccattcacaacttgcttaaaccttcat

SEQ ID NO: 42372 - DNA, 70 bp, Homo sapiens
gccaatatgtttacaaatagaatttcctttacaatcaaccattcacaacttgcttaaaccttcattttta

SEQ ID NO: 42373 - DNA, 68 bp, Homo sapiens
caaatagaatttcctttacaatcaaccattcacaacttgcttaaaccttcatttttattttatccaac

SEQ ID NO: 42374 - DNA, 66 bp, Homo sapiens
atttcctttacaatcaaccattcacaacttgcttaaaccttcatttttattttatccaacttaaaa

SEQ ID NO: 42375 - DNA, 65 bp, Homo sapiens
cttaaaacaaccctttaaccttttaatctaggcaaaaattcacattcccgtgcctccttataatc

SEQ ID NO: 42376 - DNA, 64 bp, Homo sapiens
aacaaccctttaaccttttaatctaggcaaaaattcacattcccgtgcctccttataatctttt

SEQ ID NO: 42377 - DNA, 69 bp, Homo sapiens
tacatgtaacactgttaactcttagcaaccttcacttttggtgaagaccttggtacgtttgggatttta

SEQ ID NO: 42378 - DNA, 66 bp, Homo sapiens
gtaacactgttaactcttagcaaccttcacttttggtgaagaccttggtacgtttgggattttaaa

SEQ ID NO: 42379 - DNA, 68 bp, Homo sapiens
taactcttagcaaccttcacttttggtgaagaccttggtacgtttgggattttaaatgatgtactagg

SEQ ID NO: 42380 - DNA, 68 bp, Homo sapiens
aaccttcacttttggtgaagaccttggtacgtttgggattttaaatgatgtactaggtgtgaagcctg

SEQ ID NO: 42381 - DNA, 70 bp, Homo sapiens
ttttggtgaagaccttggtacgtttgggattttaaatgatgtactaggtgtgaagcctgggacttagaca

SEQ ID NO: 42382 - DNA, 72 bp, Homo sapiens
accttggtacgtttgggattttaaatgatgtactaggtgtgaagcctgggacttagacagaagtgcacacaa

SEQ ID NO: 42383 - DNA, 77 bp, Homo sapiens
tttgggattttaaatgatgtactaggtgtgaagcctgggacttagacagaagtgcacacaaggtctgattcattcca

SEQ ID NO: 42384 - DNA, 80 bp, Homo sapiens
tttaaatgatgtactaggtgtgaagcctgggacttagacagaagtgcacacaaggtctgattcattccagcatcaaactc

SEQ ID NO: 42385 - DNA, 80 bp, Homo sapiens
tactaggtgtgaagcctgggacttagacagaagtgcacacaaggtctgattcattccagcatcaaactccgtgtgtccca

SEQ ID NO: 42386 - DNA, 77 bp, Homo sapiens
aagcctgggacttagacagaagtgcacacaaggtctgattcattccagcatcaaactccgtgtgtcccaggccttac

SEQ ID NO: 42387 - DNA, 79 bp, Homo sapiens
gacttagacagaagtgcacacaaggtctgattcattccagcatcaaactccgtgtgtcccaggccttacctagatataa

SEQ ID NO: 42388 - DNA, 78 bp, Homo sapiens
acttagacagaagtgcacacaaggtctgattcattccagcatcaaactccgtgtgtcccaggccttacctagatataa

SEQ ID NO: 42389 - DNA, 79 bp, Homo sapiens
agacagaagtgcacacaaggtctgattcattccagcatcaaactccgtgtgtcccaggccttacctagatataaagcag

SEQ ID NO: 42390 - DNA, 78 bp, Homo sapiens
aagtgcacacaaggtctgattcattccagcatcaaactccgtgtgtcccaggccttacctagatataaagcaggcaag

SEQ ID NO: 42391 - DNA, 77 bp, Homo sapiens
acacaaggtctgattcattccagcatcaaactccgtgtgtcccaggccttacctagatataaagcaggcaagttgta

SEQ ID NO: 42392 - DNA, 72 bp, Homo sapiens
ttttataaagcatttaggaggcctaatcacctttaaattctacatcatttcttgcataaattcccttgtata

SEQ ID NO: 42393 - DNA, 71 bp, Homo sapiens
agcatttaggaggcctaatcacctttaaattctacatcatttcttgcataaattcccttgtataaattctt

SEQ ID NO: 42394 - DNA, 74 bp, Homo sapiens
gcctaatcacctttaaattctacatcatttcttgcataaattcccttgtataaattcttttatgactacgcaga

SEQ ID NO: 42395 - DNA, 76 bp, Homo sapiens
aattctacatcatttcttgcataaattcccttgtataaattcttttatgactacgcagacaagctaccacatgcct

SEQ ID NO: 42396 - DNA, 76 bp, Homo sapiens
ttcttgcataaattcccttgtataaattcttttatgactacgcagacaagctaccacatgccttgactttctgact

SEQ ID NO: 42397 - DNA, 74 bp, Homo sapiens
ataaattcccttgtataaattcttttatgactacgcagacaagctaccacatgccttgactttctgacttgtcc

SEQ ID NO: 42398 - DNA, 77 bp, Homo sapiens
tcttttatgactacgcagacaagctaccacatgccttgactttctgacttgtcctaaacatccctgtcttcaaacaa

SEQ ID NO: 42399 - DNA, 77 bp, Homo sapiens
tatgactacgcagacaagctaccacatgccttgactttctgacttgtcctaaacatccctgtcttcaaacaaccagt

SEQ ID NO: 42400 - DNA, 75 bp, Homo sapiens
tacgcagacaagctaccacatgccttgactttctgacttgtcctaaacatccctgtcttcaaacaaccagttatt

SEQ ID NO: 42401 - DNA, 71 bp, Homo sapiens
aagctaccacatgccttgactttctgacttgtcctaaacatccctgtcttcaaacaaccagttattttact

SEQ ID NO: 42402 - DNA, 73 bp, Homo sapiens
taccacatgccttgactttctgacttgtcctaaacatccctgtcttcaaacaaccagttattttacttcagga

SEQ ID NO: 42403 - DNA, 71 bp, Homo sapiens
atgccttgactttctgacttgtcctaaacatccctgtcttcaaacaaccagttattttacttcaggacaaa

SEQ ID NO: 42404 - DNA, 69 bp, Homo sapiens
cttgactttctgacttgtcctaaacatccctgtcttcaaacaaccagttattttacttcaggacaaaaa

SEQ ID NO: 42405 - DNA, 68 bp, Homo sapiens
gactttctgacttgtcctaaacatccctgtcttcaaacaaccagttattttacttcaggacaaaaatt

SEQ ID NO: 42406 - DNA, 71 bp, Homo sapiens
ctgacttgtcctaaacatccctgtcttcaaacaaccagttattttacttcaggacaaaaatttatcataca

SEQ ID NO: 42407 - DNA, 71 bp, Homo sapiens
ttgtcctaaacatccctgtcttcaaacaaccagttattttacttcaggacaaaaatttatcatacaagatc

SEQ ID NO: 42408 - DNA, 69 bp, Homo sapiens
cctaaacatccctgtcttcaaacaaccagttattttacttcaggacaaaaatttatcatacaagatcct

SEQ ID NO: 42409 - DNA, 69 bp, Homo sapiens
aaacatccctgtcttcaaacaaccagttattttacttcaggacaaaaatttatcatacaagatcctttc

SEQ ID NO: 42410 - DNA, 70 bp, Homo sapiens
tcaaacaaccagttattttacttcaggacaaaaatttatcatacaagatcctttcttatataaatattct

SEQ ID NO: 42411 - DNA, 68 bp, Homo sapiens
aaccagttattttacttcaggacaaaaatttatcatacaagatcctttcttatataaatattcttttc

SEQ ID NO: 42412 - DNA, 69 bp, Homo sapiens
aaatttatcatacaagatcctttcttatataaatattcttttctttaatacctttttgcatagctaggg

SEQ ID NO: 42413 - DNA, 67 bp, Homo sapiens
actccaaaataaattgaacaatttttaagtcaaagaaccagtttatgatctaaaagcatttaataaa

SEQ ID NO: 42414 - DNA, 66 bp, Homo sapiens
aaattgaacaatttttaagtcaaagaaccagtttatgatctaaaagcatttaataaacctaatatt

SEQ ID NO: 42415 - DNA, 70 bp, Homo sapiens
gaacaatttttaagtcaaagaaccagtttatgatctaaaagcatttaataaacctaatatttgacctgca

SEQ ID NO: 42416 - DNA, 71 bp, Homo sapiens
caaagaaccagtttatgatctaaaagcatttaataaacctaatatttgacctgcataatttagaccaactg

SEQ ID NO: 42417 - DNA, 71 bp, Homo sapiens
accagtttatgatctaaaagcatttaataaacctaatatttgacctgcataatttagaccaactgtttaca

SEQ ID NO: 42418 - DNA, 66 bp, Homo sapiens
tttagaccaactgtttacatttttgaagatatttttattttagcaacagtctttacaactttttag

SEQ ID NO: 42419 - DNA, 66 bp, Homo sapiens
caactgtttacatttttgaagatatttttattttagcaacagtctttacaactttttagttttgta

SEQ ID NO: 42420 - DNA, 67 bp, Homo sapiens
ttgaagatatttttattttagcaacagtctttacaactttttagttttgtaactttctttatatctc

SEQ ID NO: 42421 - DNA, 66 bp, Homo sapiens
ttttattttagcaacagtctttacaactttttagttttgtaactttctttatatctctcttatttc

SEQ ID NO: 42422 - DNA, 67 bp, Homo sapiens
ttagcaacagtctttacaactttttagttttgtaactttctttatatctctcttatttcctggtttc

SEQ ID NO: 42423 - DNA, 64 bp, Homo sapiens
gtctttacaactttttagttttgtaactttctttatatctctcttatttcctggtttcttttac

SEQ ID NO: 42424 - DNA, 64 bp, Homo sapiens
tttatataaaacctttaaataagctttgaattagacacaaattatttaacctttaaaaaggata

SEQ ID NO: 42425 - DNA, 63 bp, Homo sapiens
acctttaaataagctttgaattagacacaaattatttaacctttaaaaaggatacaagtttta

SEQ ID NO: 42426 - DNA, 65 bp, Homo sapiens
aagctttgaattagacacaaattatttaacctttaaaaaggatacaagttttagaaagaatgctt

SEQ ID NO: 42427 - DNA, 66 bp, Homo sapiens
gaattagacacaaattatttaacctttaaaaaggatacaagttttagaaagaatgctttcctacaa

SEQ ID NO: 42428 - DNA, 65 bp, Homo sapiens
cacaaattatttaacctttaaaaaggatacaagttttagaaagaatgctttcctacaatatattt

SEQ ID NO: 42429 - DNA, 67 bp, Homo sapiens
caatatatttttattggaaaaacctaaataatgaaatagctgtagtttaatttaatataactttaga

SEQ ID NO: 42430 - DNA, 70 bp, Homo sapiens
ttattggaaaaacctaaataatgaaatagctgtagtttaatttaatataactttagattccaaatgatga

SEQ ID NO: 42431 - DNA, 70 bp, Homo sapiens
agctgtagtttaatttaatataactttagattccaaatgatgacaagtttgtttacaaatatttgtccca

SEQ ID NO: 42432 - DNA, 71 bp, Homo sapiens
tttaatataactttagattccaaatgatgacaagtttgtttacaaatatttgtcccattacatttatctaa

SEQ ID NO: 42433 - DNA, 72 bp, Homo sapiens
ccaaatgatgacaagtttgtttacaaatatttgtcccattacatttatctaattattttaatcacttgccta

SEQ ID NO: 42434 - DNA, 73 bp, Homo sapiens
gatgacaagtttgtttacaaatatttgtcccattacatttatctaattattttaatcacttgcctagatcatt

SEQ ID NO: 42435 - DNA, 74 bp, Homo sapiens
tacaaatatttgtcccattacatttatctaattattttaatcacttgcctagatcatttatgaaaactgtggta

SEQ ID NO: 42436 - DNA, 74 bp, Homo sapiens
tatttgtcccattacatttatctaattattttaatcacttgcctagatcatttatgaaaactgtggtaatcatt

SEQ ID NO: 42437 - DNA, 73 bp, Homo sapiens
cattacatttatctaattattttaatcacttgcctagatcatttatgaaaactgtggtaatcatttaaagtta

SEQ ID NO: 42438 - DNA, 73 bp, Homo sapiens
ctaattattttaatcacttgcctagatcatttatgaaaactgtggtaatcatttaaagttatgaaactgccat

SEQ ID NO: 42439 - DNA, 77 bp, Homo sapiens
tgaaaactgtggtaatcatttaaagttatgaaactgccattgcacaattatgactgagacagtgaaaacggtctgaa

SEQ ID NO: 42440 - DNA, 77 bp, Homo sapiens
actgtggtaatcatttaaagttatgaaactgccattgcacaattatgactgagacagtgaaaacggtctgaactgac

SEQ ID NO: 42441 - DNA, 73 bp, Homo sapiens
tgagacagtgaaaacggtctgaactgactccatcttgcttctggcctaccggataccgtcccagttaccctgg

SEQ ID NO: 42442 - DNA, 69 bp, Homo sapiens
agtgaaaacggtctgaactgactccatcttgcttctggcctaccggataccgtcccagttaccctgggt

SEQ ID NO: 42443 - DNA, 73 bp, Homo sapiens
tctgaactgactccatcttgcttctggcctaccggataccgtcccagttaccctgggttccgtggactcactg

SEQ ID NO: 42444 - DNA, 71 bp, Homo sapiens
ctccatcttgcttctggcctaccggataccgtcccagttaccctgggttccgtggactcactggacatggg

SEQ ID NO: 42445 - DNA, 71 bp, Homo sapiens
ttctggcctaccggataccgtcccagttaccctgggttccgtggactcactggacatgggggcgcaggatc

SEQ ID NO: 42446 - DNA, 73 bp, Homo sapiens
accctgggttccgtggactcactggacatgggggcgcaggatccgggcaccctcagtcctccgttgtcagtgc

SEQ ID NO: 42447 - DNA, 78 bp, Homo sapiens
ggggcgcaggatccgggcaccctcagtcctccgttgtcagtgccggcagcgatgagatttcctcctgtgatggtcgga

SEQ ID NO: 42448 - DNA, 77 bp, Homo sapiens
cgcaggatccgggcaccctcagtcctccgttgtcagtgccggcagcgatgagatttcctcctgtgatggtcggaggg

SEQ ID NO: 42449 - DNA, 75 bp, Homo sapiens
aggatccgggcaccctcagtcctccgttgtcagtgccggcagcgatgagatttcctcctgtgatggtcggagggg

SEQ ID NO: 42450 - DNA, 74 bp, Homo sapiens
atccgggcaccctcagtcctccgttgtcagtgccggcagcgatgagatttcctcctgtgatggtcggagggggg

SEQ ID NO: 42451 - DNA, 77 bp, Homo sapiens
cctcagtcctccgttgtcagtgccggcagcgatgagatttcctcctgtgatggtcggaggggggggcttcattatga

SEQ ID NO: 42452 - DNA, 76 bp, Homo sapiens
gtcctccgttgtcagtgccggcagcgatgagatttcctcctgtgatggtcggaggggggggcttcattatgagccc

SEQ ID NO: 42453 - DNA, 77 bp, Homo sapiens
gttgtcagtgccggcagcgatgagatttcctcctgtgatggtcggaggggggggcttcattatgagccccacctgaa

SEQ ID NO: 42454 - DNA, 74 bp, Homo sapiens
agtgccggcagcgatgagatttcctcctgtgatggtcggaggggggggcttcattatgagccccacctgaacgg

SEQ ID NO: 42455 - DNA, 73 bp, Homo sapiens
ggcagcgatgagatttcctcctgtgatggtcggaggggggggcttcattatgagccccacctgaacggggaag

SEQ ID NO: 42456 - DNA, 70 bp, Homo sapiens
tgtgatggtcggaggggggggcttcattatgagccccacctgaacggggaaggtgtccctgttgggagcc

SEQ ID NO: 42457 - DNA, 68 bp, Homo sapiens
ggggggcttcattatgagccccacctgaacggggaaggtgtccctgttgggagccgtccattttccag

SEQ ID NO: 42458 - DNA, 71 bp, Homo sapiens
ttcattatgagccccacctgaacggggaaggtgtccctgttgggagccgtccattttccagtgtccccaga

SEQ ID NO: 42459 - DNA, 69 bp, Homo sapiens
aacggggaaggtgtccctgttgggagccgtccattttccagtgtccccagagaccacaggttgggcaca

SEQ ID NO: 42460 - DNA, 70 bp, Homo sapiens
aggtgtccctgttgggagccgtccattttccagtgtccccagagaccacaggttgggcacagtttggtgg

SEQ ID NO: 42461 - DNA, 68 bp, Homo sapiens
ttttccagtgtccccagagaccacaggttgggcacagtttggtgggggcaggggtttaggacaagctt

SEQ ID NO: 42462 - DNA, 69 bp, Homo sapiens
agaccacaggttgggcacagtttggtgggggcaggggtttaggacaagcttttgcccagtgtccagcgt

SEQ ID NO: 42463 - DNA, 73 bp, Homo sapiens
ttgggcacagtttggtgggggcaggggtttaggacaagcttttgcccagtgtccagcgttgccacatcagaaa

SEQ ID NO: 42464 - DNA, 72 bp, Homo sapiens
agtttggtgggggcaggggtttaggacaagcttttgcccagtgtccagcgttgccacatcagaaacagactc

SEQ ID NO: 42465 - DNA, 73 bp, Homo sapiens
gggcaggggtttaggacaagcttttgcccagtgtccagcgttgccacatcagaaacagactcccagaggtggg

SEQ ID NO: 42466 - DNA, 73 bp, Homo sapiens
ttaggacaagcttttgcccagtgtccagcgttgccacatcagaaacagactcccagaggtgggggacttttct

SEQ ID NO: 42467 - DNA, 73 bp, Homo sapiens
tttgcccagtgtccagcgttgccacatcagaaacagactcccagaggtgggggacttttctttcgggttatca

SEQ ID NO: 42468 - DNA, 70 bp, Homo sapiens
cagcgttgccacatcagaaacagactcccagaggtgggggacttttctttcgggttatcaggaggctttt

SEQ ID NO: 42469 - DNA, 71 bp, Homo sapiens
ttgccacatcagaaacagactcccagaggtgggggacttttctttcgggttatcaggaggctttttgtgga

SEQ ID NO: 42470 - DNA, 67 bp, Homo sapiens
aacagactcccagaggtgggggacttttctttcgggttatcaggaggctttttgtggagctgacttt

SEQ ID NO: 42471 - DNA, 78 bp, Homo sapiens
tctttcgggttatcaggaggctttttgtggagctgacttttggacagcagaggtgagcatctggtatttatatggaga

SEQ ID NO: 42472 - DNA, 79 bp, Homo sapiens
tatcaggaggctttttgtggagctgacttttggacagcagaggtgagcatctggtatttatatggagatgtttgtcttt

SEQ ID NO: 42473 - DNA, 75 bp, Homo sapiens
agcagaggtgagcatctggtatttatatggagatgtttgtctttttgaattctttgttcctcgtttgtgttgtta

SEQ ID NO: 42474 - DNA, 73 bp, Homo sapiens
ggtgagcatctggtatttatatggagatgtttgtctttttgaattctttgttcctcgtttgtgttgttaaaga

SEQ ID NO: 42475 - DNA, 73 bp, Homo sapiens
atttatatggagatgtttgtctttttgaattctttgttcctcgtttgtgttgttaaagacatggaaggctgca

SEQ ID NO: 42476 - DNA, 70 bp, Homo sapiens
tttgtctttttgaattctttgttcctcgtttgtgttgttaaagacatggaaggctgcatttaggaggtcc

SEQ ID NO: 42477 - DNA, 73 bp, Homo sapiens
aattctttgttcctcgtttgtgttgttaaagacatggaaggctgcatttaggaggtcccactgagatgtctgg

SEQ ID NO: 42478 - DNA, 74 bp, Homo sapiens
tcgtttgtgttgttaaagacatggaaggctgcatttaggaggtcccactgagatgtctggggaccctcctctaa

SEQ ID NO: 42479 - DNA, 73 bp, Homo sapiens
tgtgttgttaaagacatggaaggctgcatttaggaggtcccactgagatgtctggggaccctcctctaatttt

SEQ ID NO: 42480 - DNA, 71 bp, Homo sapiens
aagacatggaaggctgcatttaggaggtcccactgagatgtctggggaccctcctctaatttttataattt

SEQ ID NO: 42481 - DNA, 71 bp, Homo sapiens
gcatttaggaggtcccactgagatgtctggggaccctcctctaatttttataattttttctggatatcttg

SEQ ID NO: 42482 - DNA, 70 bp, Homo sapiens
aggtcccactgagatgtctggggaccctcctctaatttttataattttttctggatatcttggtggattg

SEQ ID NO: 42483 - DNA, 68 bp, Homo sapiens
agatgtctggggaccctcctctaatttttataattttttctggatatcttggtggattgggaaacaaa

SEQ ID NO: 42484 - DNA, 66 bp, Homo sapiens
gggaccctcctctaatttttataattttttctggatatcttggtggattgggaaacaaattggagg

SEQ ID NO: 42485 - DNA, 67 bp, Homo sapiens
ctcctctaatttttataattttttctggatatcttggtggattgggaaacaaattggagggggagaa

SEQ ID NO: 42486 - DNA, 68 bp, Homo sapiens
atcttggtggattgggaaacaaattggagggggagaaaagtttgaccttctctagattctgggtccaa

SEQ ID NO: 42487 - DNA, 73 bp, Homo sapiens
tctagattctgggtccaaattggtatattttagcatcgcttcagtgaggtgtggtaagaaaagggcaggattt

SEQ ID NO: 42488 - DNA, 71 bp, Homo sapiens
attctgggtccaaattggtatattttagcatcgcttcagtgaggtgtggtaagaaaagggcaggattttcc

SEQ ID NO: 42489 - DNA, 73 bp, Homo sapiens
tggtatattttagcatcgcttcagtgaggtgtggtaagaaaagggcaggattttcctggggctcttatgtaat

SEQ ID NO: 42490 - DNA, 73 bp, Homo sapiens
tattttagcatcgcttcagtgaggtgtggtaagaaaagggcaggattttcctggggctcttatgtaatttctc

SEQ ID NO: 42491 - DNA, 69 bp, Homo sapiens
aggtgtggtaagaaaagggcaggattttcctggggctcttatgtaatttctctgagtttttcataatta

SEQ ID NO: 42492 - DNA, 69 bp, Homo sapiens
aagaaaagggcaggattttcctggggctcttatgtaatttctctgagtttttcataattaactgcctta

SEQ ID NO: 42493 - DNA, 70 bp, Homo sapiens
aggattttcctggggctcttatgtaatttctctgagtttttcataattaactgccttatgggcatttttg

SEQ ID NO: 42494 - DNA, 74 bp, Homo sapiens
gggctcttatgtaatttctctgagtttttcataattaactgccttatgggcatttttgtccatgcctgcgaggg

SEQ ID NO: 42495 - DNA, 75 bp, Homo sapiens
ctcttatgtaatttctctgagtttttcataattaactgccttatgggcatttttgtccatgcctgcgaggggaca

SEQ ID NO: 42496 - DNA, 76 bp, Homo sapiens
tatgtaatttctctgagtttttcataattaactgccttatgggcatttttgtccatgcctgcgaggggacaggtga

SEQ ID NO: 42497 - DNA, 75 bp, Homo sapiens
aatttctctgagtttttcataattaactgccttatgggcatttttgtccatgcctgcgaggggacaggtgatcac

SEQ ID NO: 42498 - DNA, 73 bp, Homo sapiens
agtttttcataattaactgccttatgggcatttttgtccatgcctgcgaggggacaggtgatcacgtggtttc

SEQ ID NO: 42499 - DNA, 75 bp, Homo sapiens
tttcataattaactgccttatgggcatttttgtccatgcctgcgaggggacaggtgatcacgtggtttctttgcc

SEQ ID NO: 42500 - DNA, 75 bp, Homo sapiens
ataattaactgccttatgggcatttttgtccatgcctgcgaggggacaggtgatcacgtggtttctttgcctgaa

SEQ ID NO: 42501 - DNA, 75 bp, Homo sapiens
aattaactgccttatgggcatttttgtccatgcctgcgaggggacaggtgatcacgtggtttctttgcctgaagc

SEQ ID NO: 42502 - DNA, 77 bp, Homo sapiens
actgccttatgggcatttttgtccatgcctgcgaggggacaggtgatcacgtggtttctttgcctgaagccagtgtc

SEQ ID NO: 42503 - DNA, 77 bp, Homo sapiens
tatgggcatttttgtccatgcctgcgaggggacaggtgatcacgtggtttctttgcctgaagccagtgtctccctgt

SEQ ID NO: 42504 - DNA, 77 bp, Homo sapiens
tgcgaggggacaggtgatcacgtggtttctttgcctgaagccagtgtctccctgttggtaagtccaatctggatctc

SEQ ID NO: 42505 - DNA, 74 bp, Homo sapiens
acaggtgatcacgtggtttctttgcctgaagccagtgtctccctgttggtaagtccaatctggatctctacggg

SEQ ID NO: 42506 - DNA, 75 bp, Homo sapiens
gtggtttctttgcctgaagccagtgtctccctgttggtaagtccaatctggatctctacggggcctgcatcgtta

SEQ ID NO: 42507 - DNA, 77 bp, Homo sapiens
ttctttgcctgaagccagtgtctccctgttggtaagtccaatctggatctctacggggcctgcatcgttagccactg

SEQ ID NO: 42508 - DNA, 75 bp, Homo sapiens
cagtgtctccctgttggtaagtccaatctggatctctacggggcctgcatcgttagccactgggttttatatcag

SEQ ID NO: 42509 - DNA, 73 bp, Homo sapiens
ctgttggtaagtccaatctggatctctacggggcctgcatcgttagccactgggttttatatcagggtttgat

SEQ ID NO: 42510 - DNA, 75 bp, Homo sapiens
atctggatctctacggggcctgcatcgttagccactgggttttatatcagggtttgattatggagtttatctgcg

SEQ ID NO: 42511 - DNA, 79 bp, Homo sapiens
atcgttagccactgggttttatatcagggtttgattatggagtttatctgcgtcggcctcagctgaatgccatatgctc

SEQ ID NO: 42512 - DNA, 79 bp, Homo sapiens
actgggttttatatcagggtttgattatggagtttatctgcgtcggcctcagctgaatgccatatgctccttttcatca

SEQ ID NO: 42513 - DNA, 81 bp, Homo sapiens
tttatatcagggtttgattatggagtttatctgcgtcggcctcagctgaatgccatatgctccttttcatcaggagtgagg

SEQ ID NO: 42514 - DNA, 82 bp, Homo sapiens
tgattatggagtttatctgcgtcggcctcagctgaatgccatatgctccttttcatcaggagtgagggtggagttagaatta

SEQ ID NO: 42515 - DNA, 83 bp, Homo sapiens
tcggcctcagctgaatgccatatgctccttttcatcaggagtgagggtggagttagaattatgtcaatgtcatgccaagttaa

SEQ ID NO: 42516 - DNA, 79 bp, Homo sapiens
ctgaatgccatatgctccttttcatcaggagtgagggtggagttagaattatgtcaatgtcatgccaagttaaagtaaa

SEQ ID NO: 42517 - DNA, 76 bp, Homo sapiens
atatgctccttttcatcaggagtgagggtggagttagaattatgtcaatgtcatgccaagttaaagtaaaggattg

SEQ ID NO: 42518 - DNA, 75 bp, Homo sapiens
cttttcatcaggagtgagggtggagttagaattatgtcaatgtcatgccaagttaaagtaaaggattgggctatg

SEQ ID NO: 42519 - DNA, 75 bp, Homo sapiens
aggagtgagggtggagttagaattatgtcaatgtcatgccaagttaaagtaaaggattgggctatgtgcaggaat

SEQ ID NO: 42520 - DNA, 81 bp, Homo sapiens
tgtgcaggaattccctgtgataatgagagggattttcagagaaagattccaggtgctgttggatctgtgacaagtcagacg

SEQ ID NO: 42521 - DNA, 79 bp, Homo sapiens
ttccctgtgataatgagagggattttcagagaaagattccaggtgctgttggatctgtgacaagtcagacgtggagaaa

SEQ ID NO: 42522 - DNA, 78 bp, Homo sapiens
ataatgagagggattttcagagaaagattccaggtgctgttggatctgtgacaagtcagacgtggagaaaatcagacg

SEQ ID NO: 42523 - DNA, 77 bp, Homo sapiens
gattttcagagaaagattccaggtgctgttggatctgtgacaagtcagacgtggagaaaatcagacgtggagaaagg

SEQ ID NO: 42524 - DNA, 77 bp, Homo sapiens
agaaagattccaggtgctgttggatctgtgacaagtcagacgtggagaaaatcagacgtggagaaagggccatgaac

SEQ ID NO: 42525 - DNA, 79 bp, Homo sapiens
aggtgctgttggatctgtgacaagtcagacgtggagaaaatcagacgtggagaaagggccatgaacgcaagcagtgcct

SEQ ID NO: 42526 - DNA, 75 bp, Homo sapiens
acaagtcagacgtggagaaaatcagacgtggagaaagggccatgaacgcaagcagtgccttcaaccccagctact

SEQ ID NO: 42527 - DNA, 75 bp, Homo sapiens
agacgtggagaaaatcagacgtggagaaagggccatgaacgcaagcagtgccttcaaccccagctacttcctgga

SEQ ID NO: 42528 - DNA, 74 bp, Homo sapiens
aaaatcagacgtggagaaagggccatgaacgcaagcagtgccttcaaccccagctacttcctggagagggagaa

SEQ ID NO: 42529 - DNA, 77 bp, Homo sapiens
agaaagggccatgaacgcaagcagtgccttcaaccccagctacttcctggagagggagaatggcagaggtggcttga

SEQ ID NO: 42530 - DNA, 78 bp, Homo sapiens
ccatgaacgcaagcagtgccttcaaccccagctacttcctggagagggagaatggcagaggtggcttgactggctggg

SEQ ID NO: 42531 - DNA, 74 bp, Homo sapiens
aagcagtgccttcaaccccagctacttcctggagagggagaatggcagaggtggcttgactggctggggtagtt

SEQ ID NO: 42532 - DNA, 74 bp, Homo sapiens
cttcaaccccagctacttcctggagagggagaatggcagaggtggcttgactggctggggtagtttctgaatgg

SEQ ID NO: 42533 - DNA, 76 bp, Homo sapiens
tacttcctggagagggagaatggcagaggtggcttgactggctggggtagtttctgaatgggtgactggtggagaa

SEQ ID NO: 42534 - DNA, 74 bp, Homo sapiens
atggcagaggtggcttgactggctggggtagtttctgaatgggtgactggtggagaaggaggatgggtgaggtt

SEQ ID NO: 42535 - DNA, 71 bp, Homo sapiens
aggtggcttgactggctggggtagtttctgaatgggtgactggtggagaaggaggatgggtgaggtttggg

SEQ ID NO: 42536 - DNA, 71 bp, Homo sapiens
tggctggggtagtttctgaatgggtgactggtggagaaggaggatgggtgaggtttggggctaaaggcttg

SEQ ID NO: 42537 - DNA, 67 bp, Homo sapiens
tggagaaggaggatgggtgaggtttggggctaaaggcttgggggtaggaggggccaacagggtggag

SEQ ID NO: 42538 - DNA, 69 bp, Homo sapiens
ctaaaggcttgggggtaggaggggccaacagggtggagggtttggtcgggtgaggagcagatgcagagg

SEQ ID NO: 42539 - DNA, 72 bp, Homo sapiens
gggtaggaggggccaacagggtggagggtttggtcgggtgaggagcagatgcagagggttgagagtacagag

SEQ ID NO: 42540 - DNA, 76 bp, Homo sapiens
ggccaacagggtggagggtttggtcgggtgaggagcagatgcagagggttgagagtacagagggggttcatctgca

SEQ ID NO: 42541 - DNA, 76 bp, Homo sapiens
ggtggagggtttggtcgggtgaggagcagatgcagagggttgagagtacagagggggttcatctgcagggtcagaa

SEQ ID NO: 42542 - DNA, 75 bp, Homo sapiens
tttggtcgggtgaggagcagatgcagagggttgagagtacagagggggttcatctgcagggtcagaaggggtttc

SEQ ID NO: 42543 - DNA, 74 bp, Homo sapiens
aggagcagatgcagagggttgagagtacagagggggttcatctgcagggtcagaaggggtttcggaggaaggga

SEQ ID NO: 42544 - DNA, 72 bp, Homo sapiens
agatgcagagggttgagagtacagagggggttcatctgcagggtcagaaggggtttcggaggaagggatttc

SEQ ID NO: 42545 - DNA, 69 bp, Homo sapiens
ttgagagtacagagggggttcatctgcagggtcagaaggggtttcggaggaagggatttcggaggaagg

SEQ ID NO: 42546 - DNA, 68 bp, Homo sapiens
tacagagggggttcatctgcagggtcagaaggggtttcggaggaagggatttcggaggaagggaagac

SEQ ID NO: 42547 - DNA, 65 bp, Homo sapiens
tctgcagggtcagaaggggtttcggaggaagggatttcggaggaagggaagacctggggagggtt

SEQ ID NO: 42548 - DNA, 63 bp, Homo sapiens
tcagaaggggtttcggaggaagggatttcggaggaagggaagacctggggagggttttcttta

SEQ ID NO: 42549 - DNA, 62 bp, Homo sapiens
ggtttcggaggaagggatttcggaggaagggaagacctggggagggttttctttaagaagaa

SEQ ID NO: 42550 - DNA, 65 bp, Homo sapiens
aggaagggatttcggaggaagggaagacctggggagggttttctttaagaagaaggatttcatga

SEQ ID NO: 42551 - DNA, 70 bp, Homo sapiens
aggaagggaagacctggggagggttttctttaagaagaaggatttcatgaggggtgcaagcatgacatag

SEQ ID NO: 42552 - DNA, 75 bp, Homo sapiens
gacctggggagggttttctttaagaagaaggatttcatgaggggtgcaagcatgacataggcaggcctgaatata

SEQ ID NO: 42553 - DNA, 73 bp, Homo sapiens
agggttttctttaagaagaaggatttcatgaggggtgcaagcatgacataggcaggcctgaatatagggaacc

SEQ ID NO: 42554 - DNA, 77 bp, Homo sapiens
ttctttaagaagaaggatttcatgaggggtgcaagcatgacataggcaggcctgaatatagggaacctcttgtcatt

SEQ ID NO: 42555 - DNA, 81 bp, Homo sapiens
gatttcatgaggggtgcaagcatgacataggcaggcctgaatatagggaacctcttgtcatttgctgctcctggttataaa

SEQ ID NO: 42556 - DNA, 79 bp, Homo sapiens
atgaggggtgcaagcatgacataggcaggcctgaatatagggaacctcttgtcatttgctgctcctggttataaagttg

SEQ ID NO: 42557 - DNA, 77 bp, Homo sapiens
aagcatgacataggcaggcctgaatatagggaacctcttgtcatttgctgctcctggttataaagttgtcaaggtcc

SEQ ID NO: 42558 - DNA, 74 bp, Homo sapiens
tataaagttgtcaaggtccctgagaatttgaaagtcaaagatgctgtttttgggccattggctgtcgttatcta

SEQ ID NO: 42559 - DNA, 72 bp, Homo sapiens
aaggtccctgagaatttgaaagtcaaagatgctgtttttgggccattggctgtcgttatctagtttgaattg

SEQ ID NO: 42560 - DNA, 74 bp, Homo sapiens
tccctgagaatttgaaagtcaaagatgctgtttttgggccattggctgtcgttatctagtttgaattgggccag

SEQ ID NO: 42561 - DNA, 72 bp, Homo sapiens
atttgaaagtcaaagatgctgtttttgggccattggctgtcgttatctagtttgaattgggccaggccgtgt

SEQ ID NO: 42562 - DNA, 73 bp, Homo sapiens
tcaaagatgctgtttttgggccattggctgtcgttatctagtttgaattgggccaggccgtgttaccataaaa

SEQ ID NO: 42563 - DNA, 71 bp, Homo sapiens
aagatgctgtttttgggccattggctgtcgttatctagtttgaattgggccaggccgtgttaccataaaaa

SEQ ID NO: 42564 - DNA, 69 bp, Homo sapiens
tgtttttgggccattggctgtcgttatctagtttgaattgggccaggccgtgttaccataaaaaactaa

SEQ ID NO: 42565 - DNA, 68 bp, Homo sapiens
tttttgggccattggctgtcgttatctagtttgaattgggccaggccgtgttaccataaaaaactaaa

SEQ ID NO: 42566 - DNA, 67 bp, Homo sapiens
ctgtcgttatctagtttgaattgggccaggccgtgttaccataaaaaactaaacgctttggctttag

SEQ ID NO: 42567 - DNA, 67 bp, Homo sapiens
tagtttgaattgggccaggccgtgttaccataaaaaactaaacgctttggctttaggctcccctgta

SEQ ID NO: 42568 - DNA, 66 bp, Homo sapiens
attgggccaggccgtgttaccataaaaaactaaacgctttggctttaggctcccctgtaagccaag

SEQ ID NO: 42569 - DNA, 68 bp, Homo sapiens
aaaaactaaacgctttggctttaggctcccctgtaagccaagtttggtgaggttgtgaaggagacagc

SEQ ID NO: 42570 - DNA, 70 bp, Homo sapiens
taaacgctttggctttaggctcccctgtaagccaagtttggtgaggttgtgaaggagacagccgagcggg

SEQ ID NO: 42571 - DNA, 70 bp, Homo sapiens
tttaggctcccctgtaagccaagtttggtgaggttgtgaaggagacagccgagcggggagggtgtaggga

SEQ ID NO: 42572 - DNA, 72 bp, Homo sapiens
ctgtaagccaagtttggtgaggttgtgaaggagacagccgagcggggagggtgtagggatgtgggattgttg

SEQ ID NO: 42573 - DNA, 74 bp, Homo sapiens
aggttgtgaaggagacagccgagcggggagggtgtagggatgtgggattgttgggcacccatgtgagctggtaa

SEQ ID NO: 42574 - DNA, 74 bp, Homo sapiens
aaggagacagccgagcggggagggtgtagggatgtgggattgttgggcacccatgtgagctggtaagaggaggc

SEQ ID NO: 42575 - DNA, 72 bp, Homo sapiens
agggtgtagggatgtgggattgttgggcacccatgtgagctggtaagaggaggccgagggtgtctgtttttg

SEQ ID NO: 42576 - DNA, 74 bp, Homo sapiens
ttgttgggcacccatgtgagctggtaagaggaggccgagggtgtctgtttttgttctaggtgtctccagaagaa

SEQ ID NO: 42577 - DNA, 75 bp, Homo sapiens
tgtgagctggtaagaggaggccgagggtgtctgtttttgttctaggtgtctccagaagaaagacagagacccaga

SEQ ID NO: 42578 - DNA, 72 bp, Homo sapiens
taagaggaggccgagggtgtctgtttttgttctaggtgtctccagaagaaagacagagacccagattcctgt

SEQ ID NO: 42579 - DNA, 71 bp, Homo sapiens
ccgagggtgtctgtttttgttctaggtgtctccagaagaaagacagagacccagattcctgtttataaaga

SEQ ID NO: 42580 - DNA, 71 bp, Homo sapiens
tgtttttgttctaggtgtctccagaagaaagacagagacccagattcctgtttataaagaggacaattaac

SEQ ID NO: 42581 - DNA, 73 bp, Homo sapiens
ttgttctaggtgtctccagaagaaagacagagacccagattcctgtttataaagaggacaattaacctgagaa

SEQ ID NO: 42582 - DNA, 73 bp, Homo sapiens
tccagaagaaagacagagacccagattcctgtttataaagaggacaattaacctgagaagagactgggagttc

SEQ ID NO: 42583 - DNA, 71 bp, Homo sapiens
gacagagacccagattcctgtttataaagaggacaattaacctgagaagagactgggagttcccaagattt

SEQ ID NO: 42584 - DNA, 69 bp, Homo sapiens
agacccagattcctgtttataaagaggacaattaacctgagaagagactgggagttcccaagattttcc

SEQ ID NO: 42585 - DNA, 70 bp, Homo sapiens
tgtttataaagaggacaattaacctgagaagagactgggagttcccaagattttccccagcttaatccca

SEQ ID NO: 42586 - DNA, 69 bp, Homo sapiens
aaagaggacaattaacctgagaagagactgggagttcccaagattttccccagcttaatcccactggtc

SEQ ID NO: 42587 - DNA, 71 bp, Homo sapiens
attaacctgagaagagactgggagttcccaagattttccccagcttaatcccactggtcctctgaggacca

SEQ ID NO: 42588 - DNA, 73 bp, Homo sapiens
gactgggagttcccaagattttccccagcttaatcccactggtcctctgaggaccaggacggcagatctgact

SEQ ID NO: 42589 - DNA, 72 bp, Homo sapiens
agttcccaagattttccccagcttaatcccactggtcctctgaggaccaggacggcagatctgactttcctg

SEQ ID NO: 42590 - DNA, 74 bp, Homo sapiens
agcttaatcccactggtcctctgaggaccaggacggcagatctgactttcctgggtaccatgagaaagccaggg

SEQ ID NO: 42591 - DNA, 76 bp, Homo sapiens
ctggtcctctgaggaccaggacggcagatctgactttcctgggtaccatgagaaagccaggggagggcagatctta

SEQ ID NO: 42592 - DNA, 76 bp, Homo sapiens
aggaccaggacggcagatctgactttcctgggtaccatgagaaagccaggggagggcagatcttaccagtcagctg

SEQ ID NO: 42593 - DNA, 76 bp, Homo sapiens
tttcctgggtaccatgagaaagccaggggagggcagatcttaccagtcagctggatttgtgtctggtgttggatgt

SEQ ID NO: 42594 - DNA, 77 bp, Homo sapiens
atgagaaagccaggggagggcagatcttaccagtcagctggatttgtgtctggtgttggatgttccagttggaattg

SEQ ID NO: 42595 - DNA, 77 bp, Homo sapiens
agccaggggagggcagatcttaccagtcagctggatttgtgtctggtgttggatgttccagttggaattggcaaagc

SEQ ID NO: 42596 - DNA, 79 bp, Homo sapiens
gagggcagatcttaccagtcagctggatttgtgtctggtgttggatgttccagttggaattggcaaagcgcctcccaga

SEQ ID NO: 42597 - DNA, 78 bp, Homo sapiens
agatcttaccagtcagctggatttgtgtctggtgttggatgttccagttggaattggcaaagcgcctcccagactgga

SEQ ID NO: 42598 - DNA, 77 bp, Homo sapiens
atttgtgtctggtgttggatgttccagttggaattggcaaagcgcctcccagactggagccacgtgaggaagacaga

SEQ ID NO: 42599 - DNA, 75 bp, Homo sapiens
gagaaggaggagaaggagagaagggttagagagtgaaatgcccattgtgagcggttggaggtggatttctgagac

SEQ ID NO: 42600 - DNA, 74 bp, Homo sapiens
agaaggagagaagggttagagagtgaaatgcccattgtgagcggttggaggtggatttctgagacctgaggatt

SEQ ID NO: 42601 - DNA, 75 bp, Homo sapiens
agaagggttagagagtgaaatgcccattgtgagcggttggaggtggatttctgagacctgaggattttgagagcc

SEQ ID NO: 42602 - DNA, 75 bp, Homo sapiens
aagggttagagagtgaaatgcccattgtgagcggttggaggtggatttctgagacctgaggattttgagagccca

SEQ ID NO: 42603 - DNA, 77 bp, Homo sapiens
ttagagagtgaaatgcccattgtgagcggttggaggtggatttctgagacctgaggattttgagagcccactgggga

SEQ ID NO: 42604 - DNA, 73 bp, Homo sapiens
attgtgagcggttggaggtggatttctgagacctgaggattttgagagcccactggggagtagccccggccca

SEQ ID NO: 42605 - DNA, 74 bp, Homo sapiens
tgtgagcggttggaggtggatttctgagacctgaggattttgagagcccactggggagtagccccggcccaagc

SEQ ID NO: 42606 - DNA, 73 bp, Homo sapiens
ttggaggtggatttctgagacctgaggattttgagagcccactggggagtagccccggcccaagcctcacagt

SEQ ID NO: 42607 - DNA, 72 bp, Homo sapiens
aggtggatttctgagacctgaggattttgagagcccactggggagtagccccggcccaagcctcacagttcc

SEQ ID NO: 42608 - DNA, 71 bp, Homo sapiens
atttctgagacctgaggattttgagagcccactggggagtagccccggcccaagcctcacagttcccttcg

SEQ ID NO: 42609 - DNA, 72 bp, Homo sapiens
tgagacctgaggattttgagagcccactggggagtagccccggcccaagcctcacagttcccttcgggtcag

SEQ ID NO: 42610 - DNA, 71 bp, Homo sapiens
ctgaggattttgagagcccactggggagtagccccggcccaagcctcacagttcccttcgggtcagttgtc

SEQ ID NO: 42611 - DNA, 72 bp, Homo sapiens
actggggagtagccccggcccaagcctcacagttcccttcgggtcagttgtcctccttatgcaaattgctca

SEQ ID NO: 42612 - DNA, 72 bp, Homo sapiens
tagccccggcccaagcctcacagttcccttcgggtcagttgtcctccttatgcaaattgctcagaaagtaaa

SEQ ID NO: 42613 - DNA, 73 bp, Homo sapiens
ccaagcctcacagttcccttcgggtcagttgtcctccttatgcaaattgctcagaaagtaaagtgagagaaaa

SEQ ID NO: 42614 - DNA, 75 bp, Homo sapiens
cttcgggtcagttgtcctccttatgcaaattgctcagaaagtaaagtgagagaaaagacaaggcaggtggctaga

SEQ ID NO: 42615 - DNA, 78 bp, Homo sapiens
tgtcctccttatgcaaattgctcagaaagtaaagtgagagaaaagacaaggcaggtggctagaggccctcaggatcta

SEQ ID NO: 42616 - DNA, 73 bp, Homo sapiens
agaaagtaaagtgagagaaaagacaaggcaggtggctagaggccctcaggatctaggaattagcctgggacga

SEQ ID NO: 42617 - DNA, 75 bp, Homo sapiens
aaaagacaaggcaggtggctagaggccctcaggatctaggaattagcctgggacgagctgccactgcccacggct

SEQ ID NO: 42618 - DNA, 76 bp, Homo sapiens
aggtggctagaggccctcaggatctaggaattagcctgggacgagctgccactgcccacggcttcctgggttgcaa

SEQ ID NO: 42619 - DNA, 78 bp, Homo sapiens
tagaggccctcaggatctaggaattagcctgggacgagctgccactgcccacggcttcctgggttgcaagagagcctc

SEQ ID NO: 42620 - DNA, 76 bp, Homo sapiens
aggatctaggaattagcctgggacgagctgccactgcccacggcttcctgggttgcaagagagcctctggccccaa

SEQ ID NO: 42621 - DNA, 76 bp, Homo sapiens
attagcctgggacgagctgccactgcccacggcttcctgggttgcaagagagcctctggccccaacacctgtccta

SEQ ID NO: 42622 - DNA, 75 bp, Homo sapiens
acgagctgccactgcccacggcttcctgggttgcaagagagcctctggccccaacacctgtcctaggtttcggca

SEQ ID NO: 42623 - DNA, 72 bp, Homo sapiens
actgcccacggcttcctgggttgcaagagagcctctggccccaacacctgtcctaggtttcggcaccaaatg

SEQ ID NO: 42624 - DNA, 71 bp, Homo sapiens
cttcctgggttgcaagagagcctctggccccaacacctgtcctaggtttcggcaccaaatgtaagagttaa

SEQ ID NO: 42625 - DNA, 71 bp, Homo sapiens
gttgcaagagagcctctggccccaacacctgtcctaggtttcggcaccaaatgtaagagttaaagaggaaa

SEQ ID NO: 42626 - DNA, 69 bp, Homo sapiens
agagcctctggccccaacacctgtcctaggtttcggcaccaaatgtaagagttaaagaggaaagaaaca

SEQ ID NO: 42627 - DNA, 68 bp, Homo sapiens
cccaacacctgtcctaggtttcggcaccaaatgtaagagttaaagaggaaagaaacatgaaaagtggc

SEQ ID NO: 42628 - DNA, 70 bp, Homo sapiens
aagaggaaagaaacatgaaaagtggctcaaccatcaaagagaggtttattttggagaataaacctgagag

SEQ ID NO: 42629 - DNA, 71 bp, Homo sapiens
tttattttggagaataaacctgagaggggcttctggtgaatttaggtcaggagtgttctctcttatataag

SEQ ID NO: 42630 - DNA, 70 bp, Homo sapiens
gagaggggcttctggtgaatttaggtcaggagtgttctctcttatataagggtatttaagggtttatgaa

SEQ ID NO: 42631 - DNA, 69 bp, Homo sapiens
ggcttctggtgaatttaggtcaggagtgttctctcttatataagggtatttaagggtttatgaagcggg

SEQ ID NO: 42632 - DNA, 70 bp, Homo sapiens
aatttaggtcaggagtgttctctcttatataagggtatttaagggtttatgaagcggggagcttattgca

SEQ ID NO: 42633 - DNA, 72 bp, Homo sapiens
agtgttctctcttatataagggtatttaagggtttatgaagcggggagcttattgcaggagcagaatgtttc

SEQ ID NO: 42634 - DNA, 73 bp, Homo sapiens
tctctcttatataagggtatttaagggtttatgaagcggggagcttattgcaggagcagaatgtttctgggtg

SEQ ID NO: 42635 - DNA, 71 bp, Homo sapiens
cttatataagggtatttaagggtttatgaagcggggagcttattgcaggagcagaatgtttctgggtggag

SEQ ID NO: 42636 - DNA, 71 bp, Homo sapiens
ggtatttaagggtttatgaagcggggagcttattgcaggagcagaatgtttctgggtggaggagagtttta

SEQ ID NO: 42637 - DNA, 75 bp, Homo sapiens
tttatgaagcggggagcttattgcaggagcagaatgtttctgggtggaggagagttttattgcagggttggaatg

SEQ ID NO: 42638 - DNA, 74 bp, Homo sapiens
atgaagcggggagcttattgcaggagcagaatgtttctgggtggaggagagttttattgcagggttggaatgtt

SEQ ID NO: 42639 - DNA, 75 bp, Homo sapiens
ggagcttattgcaggagcagaatgtttctgggtggaggagagttttattgcagggttggaatgtttctggtcgga

SEQ ID NO: 42640 - DNA, 73 bp, Homo sapiens
caggagcagaatgtttctgggtggaggagagttttattgcagggttggaatgtttctggtcggaggtgtcatt

SEQ ID NO: 42641 - DNA, 71 bp, Homo sapiens
agaatgtttctgggtggaggagagttttattgcagggttggaatgtttctggtcggaggtgtcatttgtgg

SEQ ID NO: 42642 - DNA, 78 bp, Homo sapiens
tctggtcggaggtgtcatttgtggtttatggtcatgctgacattagtcagtaagttgatgtttctggggctggattta

SEQ ID NO: 42643 - DNA, 75 bp, Homo sapiens
tggtttatggtcatgctgacattagtcagtaagttgatgtttctggggctggatttaggcagtttttagtcaaag

SEQ ID NO: 42644 - DNA, 70 bp, Homo sapiens
ctgacattagtcagtaagttgatgtttctggggctggatttaggcagtttttagtcaaagggaacttaaa

SEQ ID NO: 42645 - DNA, 69 bp, Homo sapiens
taagttgatgtttctggggctggatttaggcagtttttagtcaaagggaacttaaaatggcagtgtttg

SEQ ID NO: 42646 - DNA, 69 bp, Homo sapiens
atgtttctggggctggatttaggcagtttttagtcaaagggaacttaaaatggcagtgtttgtccaaga

SEQ ID NO: 42647 - DNA, 80 bp, Homo sapiens
acttaaaatggcagtgtttgtccaagatggtgatgcccctgctctgtcactggcaaagtgcccaggctgagagtcatttc

SEQ ID NO: 42648 - DNA, 83 bp, Homo sapiens
atggcagtgtttgtccaagatggtgatgcccctgctctgtcactggcaaagtgcccaggctgagagtcatttcctgaagttca

SEQ ID NO: 42649 - DNA, 84 bp, Homo sapiens
ttgtccaagatggtgatgcccctgctctgtcactggcaaagtgcccaggctgagagtcatttcctgaagttcactgccctgcac

SEQ ID NO: 42650 - DNA, 83 bp, Homo sapiens
atgcccctgctctgtcactggcaaagtgcccaggctgagagtcatttcctgaagttcactgccctgcacgcaggcactggctt

SEQ ID NO: 42651 - DNA, 84 bp, Homo sapiens
ctctgtcactggcaaagtgcccaggctgagagtcatttcctgaagttcactgccctgcacgcaggcactggctttgccttctga

SEQ ID NO: 42652 - DNA, 81 bp, Homo sapiens
actggcaaagtgcccaggctgagagtcatttcctgaagttcactgccctgcacgcaggcactggctttgccttctgatttc

SEQ ID NO: 42653 - DNA, 81 bp, Homo sapiens
agtcatttcctgaagttcactgccctgcacgcaggcactggctttgccttctgatttccacctgcacttctaataccatga

SEQ ID NO: 42654 - DNA, 77 bp, Homo sapiens
actggctttgccttctgatttccacctgcacttctaataccatgacagaggttgccctccaggcaaaacactgcagg

SEQ ID NO: 42655 - DNA, 78 bp, Homo sapiens
ccttctgatttccacctgcacttctaataccatgacagaggttgccctccaggcaaaacactgcagggcagagaggga

SEQ ID NO: 42656 - DNA, 77 bp, Homo sapiens
acctgcacttctaataccatgacagaggttgccctccaggcaaaacactgcagggcagagagggaggcttgcgggct

SEQ ID NO: 42657 - DNA, 77 bp, Homo sapiens
ttctaataccatgacagaggttgccctccaggcaaaacactgcagggcagagagggaggcttgcgggcttccctcac

SEQ ID NO: 42658 - DNA, 77 bp, Homo sapiens
atgacagaggttgccctccaggcaaaacactgcagggcagagagggaggcttgcgggcttccctcacccccagctgc

SEQ ID NO: 42659 - DNA, 76 bp, Homo sapiens
cctccaggcaaaacactgcagggcagagagggaggcttgcgggcttccctcacccccagctgcggtttctgactca

SEQ ID NO: 42660 - DNA, 77 bp, Homo sapiens
aaaacactgcagggcagagagggaggcttgcgggcttccctcacccccagctgcggtttctgactcagctggcacta

SEQ ID NO: 42661 - DNA, 77 bp, Homo sapiens
agagggaggcttgcgggcttccctcacccccagctgcggtttctgactcagctggcactagggtctcatgtttgctc

SEQ ID NO: 42662 - DNA, 77 bp, Homo sapiens
cttgcgggcttccctcacccccagctgcggtttctgactcagctggcactagggtctcatgtttgctcctcgtccta

SEQ ID NO: 42663 - DNA, 79 bp, Homo sapiens
cccagctgcggtttctgactcagctggcactagggtctcatgtttgctcctcgtcctacctctcttgctgttgtcttta

SEQ ID NO: 42664 - DNA, 82 bp, Homo sapiens
ggtttctgactcagctggcactagggtctcatgtttgctcctcgtcctacctctcttgctgttgtctttagcaaatgcatga

SEQ ID NO: 42665 - DNA, 84 bp, Homo sapiens
tttctgactcagctggcactagggtctcatgtttgctcctcgtcctacctctcttgctgttgtctttagcaaatgcatgagcaa

SEQ ID NO: 42666 - DNA, 83 bp, Homo sapiens
actcagctggcactagggtctcatgtttgctcctcgtcctacctctcttgctgttgtctttagcaaatgcatgagcaaagaga

SEQ ID NO: 42667 - DNA, 79 bp, Homo sapiens
actagggtctcatgtttgctcctcgtcctacctctcttgctgttgtctttagcaaatgcatgagcaaagagaggtctta

SEQ ID NO: 42668 - DNA, 80 bp, Homo sapiens
ctcctcgtcctacctctcttgctgttgtctttagcaaatgcatgagcaaagagaggtcttagaccactgacagagaaata

SEQ ID NO: 42669 - DNA, 79 bp, Homo sapiens
tacctctcttgctgttgtctttagcaaatgcatgagcaaagagaggtcttagaccactgacagagaaatagacccaccg

SEQ ID NO: 42670 - DNA, 78 bp, Homo sapiens
ctgttgtctttagcaaatgcatgagcaaagagaggtcttagaccactgacagagaaatagacccaccggaggagagag

SEQ ID NO: 42671 - DNA, 73 bp, Homo sapiens
agcaaagagaggtcttagaccactgacagagaaatagacccaccggaggagagaggctggaaagctgaaaagt

SEQ ID NO: 42672 - DNA, 71 bp, Homo sapiens
actgacagagaaatagacccaccggaggagagaggctggaaagctgaaaagttcaattaaagaaacttcta

SEQ ID NO: 42673 - DNA, 70 bp, Homo sapiens
agagaaatagacccaccggaggagagaggctggaaagctgaaaagttcaattaaagaaacttctaagtca

SEQ ID NO: 42674 - DNA, 70 bp, Homo sapiens
accggaggagagaggctggaaagctgaaaagttcaattaaagaaacttctaagtcagcagaaatttagaa

SEQ ID NO: 42675 - DNA, 71 bp, Homo sapiens
agaggctggaaagctgaaaagttcaattaaagaaacttctaagtcagcagaaatttagaaattcagtctcc

SEQ ID NO: 42676 - DNA, 72 bp, Homo sapiens
aagctgaaaagttcaattaaagaaacttctaagtcagcagaaatttagaaattcagtctccccaacatgagc

SEQ ID NO: 42677 - DNA, 70 bp, Homo sapiens
aagttcaattaaagaaacttctaagtcagcagaaatttagaaattcagtctccccaacatgagctttccc

SEQ ID NO: 42678 - DNA, 69 bp, Homo sapiens
attaaagaaacttctaagtcagcagaaatttagaaattcagtctccccaacatgagctttccctggttt

SEQ ID NO: 42679 - DNA, 70 bp, Homo sapiens
ttctaagtcagcagaaatttagaaattcagtctccccaacatgagctttccctggttttgaaacccttag

SEQ ID NO: 42680 - DNA, 68 bp, Homo sapiens
aaatttagaaattcagtctccccaacatgagctttccctggttttgaaacccttaggtcattggtcag

SEQ ID NO: 42681 - DNA, 71 bp, Homo sapiens
tagaaattcagtctccccaacatgagctttccctggttttgaaacccttaggtcattggtcagggtcagaa

SEQ ID NO: 42682 - DNA, 67 bp, Homo sapiens
cccaacatgagctttccctggttttgaaacccttaggtcattggtcagggtcagaagtaggaacggt

SEQ ID NO: 42683 - DNA, 69 bp, Homo sapiens
atgagctttccctggttttgaaacccttaggtcattggtcagggtcagaagtaggaacggttgccgctg

SEQ ID NO: 42684 - DNA, 69 bp, Homo sapiens
ctggttttgaaacccttaggtcattggtcagggtcagaagtaggaacggttgccgctgggcttggagac

SEQ ID NO: 42685 - DNA, 69 bp, Homo sapiens
aaacccttaggtcattggtcagggtcagaagtaggaacggttgccgctgggcttggagaccccactctg

SEQ ID NO: 42686 - DNA, 73 bp, Homo sapiens
gtcattggtcagggtcagaagtaggaacggttgccgctgggcttggagaccccactctggacgtgactgtggg

SEQ ID NO: 42687 - DNA, 72 bp, Homo sapiens
agggtcagaagtaggaacggttgccgctgggcttggagaccccactctggacgtgactgtgggtgctggacg

SEQ ID NO: 42688 - DNA, 72 bp, Homo sapiens
agtaggaacggttgccgctgggcttggagaccccactctggacgtgactgtgggtgctggacgtccccaggc

SEQ ID NO: 42689 - DNA, 74 bp, Homo sapiens
ttgccgctgggcttggagaccccactctggacgtgactgtgggtgctggacgtccccaggcctccctgtcctct

SEQ ID NO: 42690 - DNA, 74 bp, Homo sapiens
ttggagaccccactctggacgtgactgtgggtgctggacgtccccaggcctccctgtcctcttctcgatgaagg

SEQ ID NO: 42691 - DNA, 75 bp, Homo sapiens
acgtgactgtgggtgctggacgtccccaggcctccctgtcctcttctcgatgaagggatgatagggttgccctca

SEQ ID NO: 42692 - DNA, 75 bp, Homo sapiens
tgggtgctggacgtccccaggcctccctgtcctcttctcgatgaagggatgatagggttgccctcaggggctcag

SEQ ID NO: 42693 - DNA, 74 bp, Homo sapiens
cctgtcctcttctcgatgaagggatgatagggttgccctcaggggctcaggagaggcaggaaaaacacctggga

SEQ ID NO: 42694 - DNA, 76 bp, Homo sapiens
ttctcgatgaagggatgatagggttgccctcaggggctcaggagaggcaggaaaaacacctgggatagtggcttga

SEQ ID NO: 42695 - DNA, 74 bp, Homo sapiens
atgaagggatgatagggttgccctcaggggctcaggagaggcaggaaaaacacctgggatagtggcttgacgta

SEQ ID NO: 42696 - DNA, 74 bp, Homo sapiens
atagggttgccctcaggggctcaggagaggcaggaaaaacacctgggatagtggcttgacgtactcacacatcc

SEQ ID NO: 42697 - DNA, 75 bp, Homo sapiens
aggggctcaggagaggcaggaaaaacacctgggatagtggcttgacgtactcacacatccctgtgtcttctcgga

SEQ ID NO: 42698 - DNA, 75 bp, Homo sapiens
gagaggcaggaaaaacacctgggatagtggcttgacgtactcacacatccctgtgtcttctcggacactcccgga

SEQ ID NO: 42699 - DNA, 75 bp, Homo sapiens
aaaaacacctgggatagtggcttgacgtactcacacatccctgtgtcttctcggacactcccggagccagatgct

SEQ ID NO: 42700 - DNA, 78 bp, Homo sapiens
tgggatagtggcttgacgtactcacacatccctgtgtcttctcggacactcccggagccagatgcttctcggagtgtt

SEQ ID NO: 42701 - DNA, 75 bp, Homo sapiens
cttgacgtactcacacatccctgtgtcttctcggacactcccggagccagatgcttctcggagtgttttggattt

SEQ ID NO: 42702 - DNA, 71 bp, Homo sapiens
atccctgtgtcttctcggacactcccggagccagatgcttctcggagtgttttggattttaggagggaacg

SEQ ID NO: 42703 - DNA, 71 bp, Homo sapiens
tcttctcggacactcccggagccagatgcttctcggagtgttttggattttaggagggaacgtggggatgg

SEQ ID NO: 42704 - DNA, 70 bp, Homo sapiens
ccggagccagatgcttctcggagtgttttggattttaggagggaacgtggggatgggccagaccgtttga

SEQ ID NO: 42705 - DNA, 71 bp, Homo sapiens
ttttggattttaggagggaacgtggggatgggccagaccgtttgattcctccagtggagtctgaggcagtc

SEQ ID NO: 42706 - DNA, 71 bp, Homo sapiens
agggaacgtggggatgggccagaccgtttgattcctccagtggagtctgaggcagtctcccacttcgtgtt

SEQ ID NO: 42707 - DNA, 76 bp, Homo sapiens
ggatgggccagaccgtttgattcctccagtggagtctgaggcagtctcccacttcgtgtttccaaagcaaagcaca

SEQ ID NO: 42708 - DNA, 77 bp, Homo sapiens
tttgattcctccagtggagtctgaggcagtctcccacttcgtgtttccaaagcaaagcacacgaacattcacacaac

SEQ ID NO: 42709 - DNA, 76 bp, Homo sapiens
ggagtctgaggcagtctcccacttcgtgtttccaaagcaaagcacacgaacattcacacaacgtggggtaaatgca

SEQ ID NO: 42710 - DNA, 76 bp, Homo sapiens
ctgaggcagtctcccacttcgtgtttccaaagcaaagcacacgaacattcacacaacgtggggtaaatgcaggctg

SEQ ID NO: 42711 - DNA, 77 bp, Homo sapiens
acttcgtgtttccaaagcaaagcacacgaacattcacacaacgtggggtaaatgcaggctgtgcatggacttcttca

SEQ ID NO: 42712 - DNA, 77 bp, Homo sapiens
gtttccaaagcaaagcacacgaacattcacacaacgtggggtaaatgcaggctgtgcatggacttcttcagaccagg

SEQ ID NO: 42713 - DNA, 81 bp, Homo sapiens
aaagcacacgaacattcacacaacgtggggtaaatgcaggctgtgcatggacttcttcagaccagggcatgctttgctgta

SEQ ID NO: 42714 - DNA, 79 bp, Homo sapiens
aacattcacacaacgtggggtaaatgcaggctgtgcatggacttcttcagaccagggcatgctttgctgtaaaatgaat

SEQ ID NO: 42715 - DNA, 80 bp, Homo sapiens
aacgtggggtaaatgcaggctgtgcatggacttcttcagaccagggcatgctttgctgtaaaatgaattcaagcatcaaa

SEQ ID NO: 42716 - DNA, 81 bp, Homo sapiens
tgtgcatggacttcttcagaccagggcatgctttgctgtaaaatgaattcaagcatcaaaccgtgagggctctggacttcg

SEQ ID NO: 42717 - DNA, 78 bp, Homo sapiens
ttcttcagaccagggcatgctttgctgtaaaatgaattcaagcatcaaaccgtgagggctctggacttcgggattcta

SEQ ID NO: 42718 - DNA, 78 bp, Homo sapiens
agaccagggcatgctttgctgtaaaatgaattcaagcatcaaaccgtgagggctctggacttcgggattctagccaga

SEQ ID NO: 42719 - DNA, 77 bp, Homo sapiens
atgctttgctgtaaaatgaattcaagcatcaaaccgtgagggctctggacttcgggattctagccagagaaccatgg

SEQ ID NO: 42720 - DNA, 79 bp, Homo sapiens
taaaatgaattcaagcatcaaaccgtgagggctctggacttcgggattctagccagagaaccatgggccaccatcatca

SEQ ID NO: 42721 - DNA, 78 bp, Homo sapiens
attcaagcatcaaaccgtgagggctctggacttcgggattctagccagagaaccatgggccaccatcatcaccatccc

SEQ ID NO: 42722 - DNA, 78 bp, Homo sapiens
aaaccgtgagggctctggacttcgggattctagccagagaaccatgggccaccatcatcaccatccccactgtcatca

SEQ ID NO: 42723 - DNA, 80 bp, Homo sapiens
tctggacttcgggattctagccagagaaccatgggccaccatcatcaccatccccactgtcatcacagtctttactatcc

SEQ ID NO: 42724 - DNA, 79 bp, Homo sapiens
ttcgggattctagccagagaaccatgggccaccatcatcaccatccccactgtcatcacagtctttactatccccgctg

SEQ ID NO: 42725 - DNA, 82 bp, Homo sapiens
ctagccagagaaccatgggccaccatcatcaccatccccactgtcatcacagtctttactatccccgctgtcaccattgtca

SEQ ID NO: 42726 - DNA, 84 bp, Homo sapiens
tcatcaccatccccactgtcatcacagtctttactatccccgctgtcaccattgtcaccatcgtcaccatccctactgtcatca

SEQ ID NO: 42727 - DNA, 82 bp, Homo sapiens
atccccactgtcatcacagtctttactatccccgctgtcaccattgtcaccatcgtcaccatccctactgtcatcactgtca

SEQ ID NO: 42728 - DNA, 87 bp, Homo sapiens
ctgtcatcacagtctttactatccccgctgtcaccattgtcaccatcgtcaccatccctactgtcatcactgtcattgccatcatca

SEQ ID NO: 42729 - DNA, 83 bp, Homo sapiens
agtctttactatccccgctgtcaccattgtcaccatcgtcaccatccctactgtcatcactgtcattgccatcatcaccatcc

SEQ ID NO: 42730 - DNA, 91 bp, Homo sapiens
cgctgtcaccattgtcaccatcgtcaccatccctactgtcatcactgtcattgccatcatcaccatcctgtcatcactgtcatcaccattg

SEQ ID NO: 42731 - DNA, 90 bp, Homo sapiens
accattgtcaccatcgtcaccatccctactgtcatcactgtcattgccatcatcaccatcctgtcatcactgtcatcaccattgtcacca

SEQ ID NO: 42732 - DNA, 91 bp, Homo sapiens
atcgtcaccatccctactgtcatcactgtcattgccatcatcaccatcctgtcatcactgtcatcaccattgtcaccatcctcgctgtcat

SEQ ID NO: 42733 - DNA, 93 bp, Homo sapiens
atccctactgtcatcactgtcattgccatcatcaccatcctgtcatcactgtcatcaccattgtcaccatcctcgctgtcattgccattgtca

SEQ ID NO: 42734 - DNA, 92 bp, Homo sapiens
tgtcatcactgtcattgccatcatcaccatcctgtcatcactgtcatcaccattgtcaccatcctcgctgtcattgccattgtcaccttccc

SEQ ID NO: 42735 - DNA, 90 bp, Homo sapiens
attgccatcatcaccatcctgtcatcactgtcatcaccattgtcaccatcctcgctgtcattgccattgtcaccttccccactgtcatca

SEQ ID NO: 42736 - DNA, 89 bp, Homo sapiens
atcatcaccatcctgtcatcactgtcatcaccattgtcaccatcctcgctgtcattgccattgtcaccttccccactgtcatcaccatc

SEQ ID NO: 42737 - DNA, 89 bp, Homo sapiens
tgtcatcactgtcatcaccattgtcaccatcctcgctgtcattgccattgtcaccttccccactgtcatcaccatccccatcaccatca

SEQ ID NO: 42738 - DNA, 85 bp, Homo sapiens
actgtcatcaccattgtcaccatcctcgctgtcattgccattgtcaccttccccactgtcatcaccatccccatcaccatcactg

SEQ ID NO: 42739 - DNA, 84 bp, Homo sapiens
tgtcaccatcctcgctgtcattgccattgtcaccttccccactgtcatcaccatccccatcaccatcactgtcgtcactgtaat

SEQ ID NO: 42740 - DNA, 81 bp, Homo sapiens
atcctcgctgtcattgccattgtcaccttccccactgtcatcaccatccccatcaccatcactgtcgtcactgtaattacc

SEQ ID NO: 42741 - DNA, 79 bp, Homo sapiens
attgccattgtcaccttccccactgtcatcaccatccccatcaccatcactgtcgtcactgtaattaccgtcttcactg

SEQ ID NO: 42742 - DNA, 80 bp, Homo sapiens
ttgtcaccttccccactgtcatcaccatccccatcaccatcactgtcgtcactgtaattaccgtcttcactgtcatcacc

SEQ ID NO: 42743 - DNA, 82 bp, Homo sapiens
actgtcatcaccatccccatcaccatcactgtcgtcactgtaattaccgtcttcactgtcatcaccgtcaccatcgtcacca

SEQ ID NO: 42744 - DNA, 82 bp, Homo sapiens
atcaccatcactgtcgtcactgtaattaccgtcttcactgtcatcaccgtcaccatcgtcaccatccccactgtcatcactg

SEQ ID NO: 42745 - DNA, 83 bp, Homo sapiens
tgtaattaccgtcttcactgtcatcaccgtcaccatcgtcaccatccccactgtcatcactgtcatcaccctcgtcaccatca

SEQ ID NO: 42746 - DNA, 88 bp, Homo sapiens
ttcactgtcatcaccgtcaccatcgtcaccatccccactgtcatcactgtcatcaccctcgtcaccatcatcactgttgtcatcacca

SEQ ID NO: 42747 - DNA, 89 bp, Homo sapiens
tgtcatcaccgtcaccatcgtcaccatccccactgtcatcactgtcatcaccctcgtcaccatcatcactgttgtcatcaccatcacca

SEQ ID NO: 42748 - DNA, 87 bp, Homo sapiens
accatcatcactgtcatcaccatcaccgtcatcactgtcgtcactagcagcagctgcttcctctctgctggggagtgaatttcctcc

SEQ ID NO: 42749 - DNA, 86 bp, Homo sapiens
actgtcatcaccatcaccgtcatcactgtcgtcactagcagcagctgcttcctctctgctggggagtgaatttcctccctggcatc

SEQ ID NO: 42750 - DNA, 85 bp, Homo sapiens
atcaccgtcatcactgtcgtcactagcagcagctgcttcctctctgctggggagtgaatttcctccctggcatccacgtcagaga

SEQ ID NO: 42751 - DNA, 87 bp, Homo sapiens
cgtcatcactgtcgtcactagcagcagctgcttcctctctgctggggagtgaatttcctccctggcatccacgtcagagagcaggca

SEQ ID NO: 42752 - DNA, 83 bp, Homo sapiens
gtcgtcactagcagcagctgcttcctctctgctggggagtgaatttcctccctggcatccacgtcagagagcaggcaggaaaa

SEQ ID NO: 42753 - DNA, 80 bp, Homo sapiens
agctgcttcctctctgctggggagtgaatttcctccctggcatccacgtcagagagcaggcaggaaaagggattgcagac

SEQ ID NO: 42754 - DNA, 82 bp, Homo sapiens
tctctgctggggagtgaatttcctccctggcatccacgtcagagagcaggcaggaaaagggattgcagacgagtcatcagaa

SEQ ID NO: 42755 - DNA, 79 bp, Homo sapiens
ggagtgaatttcctccctggcatccacgtcagagagcaggcaggaaaagggattgcagacgagtcatcagaagaaacca

SEQ ID NO: 42756 - DNA, 77 bp, Homo sapiens
aatttcctccctggcatccacgtcagagagcaggcaggaaaagggattgcagacgagtcatcagaagaaaccattac

SEQ ID NO: 42757 - DNA, 80 bp, Homo sapiens
catccacgtcagagagcaggcaggaaaagggattgcagacgagtcatcagaagaaaccattacgatggatttctcatttc

SEQ ID NO: 42758 - DNA, 78 bp, Homo sapiens
agagagcaggcaggaaaagggattgcagacgagtcatcagaagaaaccattacgatggatttctcatttctcggtctg

SEQ ID NO: 42759 - DNA, 76 bp, Homo sapiens
caggaaaagggattgcagacgagtcatcagaagaaaccattacgatggatttctcatttctcggtctgggctggtg

SEQ ID NO: 42760 - DNA, 75 bp, Homo sapiens
aaagggattgcagacgagtcatcagaagaaaccattacgatggatttctcatttctcggtctgggctggtggcgt

SEQ ID NO: 42761 - DNA, 79 bp, Homo sapiens
agacgagtcatcagaagaaaccattacgatggatttctcatttctcggtctgggctggtggcgttggagatcatctgta

SEQ ID NO: 42762 - DNA, 78 bp, Homo sapiens
atcagaagaaaccattacgatggatttctcatttctcggtctgggctggtggcgttggagatcatctgtagtggcctc

SEQ ID NO: 42763 - DNA, 77 bp, Homo sapiens
aagaaaccattacgatggatttctcatttctcggtctgggctggtggcgttggagatcatctgtagtggcctctcat

SEQ ID NO: 42764 - DNA, 81 bp, Homo sapiens
tacgatggatttctcatttctcggtctgggctggtggcgttggagatcatctgtagtggcctctcattcactgagaaggag

SEQ ID NO: 42765 - DNA, 79 bp, Homo sapiens
atttctcatttctcggtctgggctggtggcgttggagatcatctgtagtggcctctcattcactgagaaggaggccacg

SEQ ID NO: 42766 - DNA, 79 bp, Homo sapiens
tctgggctggtggcgttggagatcatctgtagtggcctctcattcactgagaaggaggccacgtcttggtttttgagga

SEQ ID NO: 42767 - DNA, 78 bp, Homo sapiens
tgggctggtggcgttggagatcatctgtagtggcctctcattcactgagaaggaggccacgtcttggtttttgaggag

SEQ ID NO: 42768 - DNA, 78 bp, Homo sapiens
agatcatctgtagtggcctctcattcactgagaaggaggccacgtcttggtttttgaggaggagtgagccctgttcca

SEQ ID NO: 42769 - DNA, 77 bp, Homo sapiens
tagtggcctctcattcactgagaaggaggccacgtcttggtttttgaggaggagtgagccctgttccaggctcacta

SEQ ID NO: 42770 - DNA, 75 bp, Homo sapiens
attcactgagaaggaggccacgtcttggtttttgaggaggagtgagccctgttccaggctcactagttacacatg

SEQ ID NO: 42771 - DNA, 84 bp, Homo sapiens
ttttgaggaggagtgagccctgttccaggctcactagttacacatgtgacatgcatggggcatgccttcacacaggagaccaca

SEQ ID NO: 42772 - DNA, 83 bp, Homo sapiens
aggagtgagccctgttccaggctcactagttacacatgtgacatgcatggggcatgccttcacacaggagaccacattactcc

SEQ ID NO: 42773 - DNA, 83 bp, Homo sapiens
ccctgttccaggctcactagttacacatgtgacatgcatggggcatgccttcacacaggagaccacattactcctggcaatgg

SEQ ID NO: 42774 - DNA, 83 bp, Homo sapiens
tcactagttacacatgtgacatgcatggggcatgccttcacacaggagaccacattactcctggcaatgggccccgtaaggca

SEQ ID NO: 42775 - DNA, 83 bp, Homo sapiens
ttacacatgtgacatgcatggggcatgccttcacacaggagaccacattactcctggcaatgggccccgtaaggcacttctga

SEQ ID NO: 42776 - DNA, 79 bp, Homo sapiens
atgcatggggcatgccttcacacaggagaccacattactcctggcaatgggccccgtaaggcacttctgagaggttcta

SEQ ID NO: 42777 - DNA, 75 bp, Homo sapiens
atgccttcacacaggagaccacattactcctggcaatgggccccgtaaggcacttctgagaggttctagttgttc

SEQ ID NO: 42778 - DNA, 72 bp, Homo sapiens
acattactcctggcaatgggccccgtaaggcacttctgagaggttctagttgttcgttgtttcatacctgga

SEQ ID NO: 42779 - DNA, 73 bp, Homo sapiens
tggcaatgggccccgtaaggcacttctgagaggttctagttgttcgttgtttcatacctggactctgacactt

SEQ ID NO: 42780 - DNA, 72 bp, Homo sapiens
ccccgtaaggcacttctgagaggttctagttgttcgttgtttcatacctggactctgacactttaatgaaca

SEQ ID NO: 42781 - DNA, 75 bp, Homo sapiens
cacttctgagaggttctagttgttcgttgtttcatacctggactctgacactttaatgaacagaacatgtgaaaa

SEQ ID NO: 42782 - DNA, 75 bp, Homo sapiens
aggttctagttgttcgttgtttcatacctggactctgacactttaatgaacagaacatgtgaaaatatgtcataa

SEQ ID NO: 42783 - DNA, 75 bp, Homo sapiens
ctagttgttcgttgtttcatacctggactctgacactttaatgaacagaacatgtgaaaatatgtcataattaaa

SEQ ID NO: 42784 - DNA, 74 bp, Homo sapiens
gttgtttcatacctggactctgacactttaatgaacagaacatgtgaaaatatgtcataattaaataattttaa

SEQ ID NO: 42785 - DNA, 73 bp, Homo sapiens
taattttaaaattttgtctctaatagagaaaacttacagtaggccttgtgcaaacctgctagctccacagtca

SEQ ID NO: 42786 - DNA, 74 bp, Homo sapiens
ttaaaattttgtctctaatagagaaaacttacagtaggccttgtgcaaacctgctagctccacagtcagccacg

SEQ ID NO: 42787 - DNA, 77 bp, Homo sapiens
taatagagaaaacttacagtaggccttgtgcaaacctgctagctccacagtcagccacgtgcacgcgcaggggtgtt

SEQ ID NO: 42788 - DNA, 75 bp, Homo sapiens
aaacttacagtaggccttgtgcaaacctgctagctccacagtcagccacgtgcacgcgcaggggtgttttcggaa

SEQ ID NO: 42789 - DNA, 81 bp, Homo sapiens
ttgtgcaaacctgctagctccacagtcagccacgtgcacgcgcaggggtgttttcggaagagctacattgggcatctccca

SEQ ID NO: 42790 - DNA, 79 bp, Homo sapiens
tagctccacagtcagccacgtgcacgcgcaggggtgttttcggaagagctacattgggcatctcccagagccaacggtc

SEQ ID NO: 42791 - DNA, 73 bp, Homo sapiens
acgtgcacgcgcaggggtgttttcggaagagctacattgggcatctcccagagccaacggtctggattttaat

SEQ ID NO: 42792 - DNA, 72 bp, Homo sapiens
gggtgttttcggaagagctacattgggcatctcccagagccaacggtctggattttaatttggttgctctcc

SEQ ID NO: 42793 - DNA, 74 bp, Homo sapiens
ttttcggaagagctacattgggcatctcccagagccaacggtctggattttaatttggttgctctcctttatca

SEQ ID NO: 42794 - DNA, 73 bp, Homo sapiens
ctacattgggcatctcccagagccaacggtctggattttaatttggttgctctcctttatcacttatttatta

SEQ ID NO: 42795 - DNA, 72 bp, Homo sapiens
atctcccagagccaacggtctggattttaatttggttgctctcctttatcacttatttattagcatttgaaa

SEQ ID NO: 42796 - DNA, 71 bp, Homo sapiens
agagccaacggtctggattttaatttggttgctctcctttatcacttatttattagcatttgaaaaacatg

SEQ ID NO: 42797 - DNA, 75 bp, Homo sapiens
tggttgctctcctttatcacttatttattagcatttgaaaaacatgtattctagactaaaataatgcctgattgg

SEQ ID NO: 42798 - DNA, 74 bp, Homo sapiens
gctctcctttatcacttatttattagcatttgaaaaacatgtattctagactaaaataatgcctgattggttta

SEQ ID NO: 42799 - DNA, 67 bp, Homo sapiens
ataatgcctgattggtttaagttggaaaacagtttttaaacgttctaagaatttcttcagtgtgtgg

SEQ ID NO: 42800 - DNA, 66 bp, Homo sapiens
gcctgattggtttaagttggaaaacagtttttaaacgttctaagaatttcttcagtgtgtggggaa

SEQ ID NO: 42801 - DNA, 65 bp, Homo sapiens
gttggaaaacagtttttaaacgttctaagaatttcttcagtgtgtggggaaggcttaaaaggaca

SEQ ID NO: 42802 - DNA, 65 bp, Homo sapiens
aaaacagtttttaaacgttctaagaatttcttcagtgtgtggggaaggcttaaaaggacagaggc

SEQ ID NO: 42803 - DNA, 75 bp, Homo sapiens
aatttcttcagtgtgtggggaaggcttaaaaggacagaggctgcctgttgctgacctgagtggtgcggcttctct

SEQ ID NO: 42804 - DNA, 78 bp, Homo sapiens
tgtgtggggaaggcttaaaaggacagaggctgcctgttgctgacctgagtggtgcggcttctcttctccgtttgctca

SEQ ID NO: 42805 - DNA, 76 bp, Homo sapiens
aaggcttaaaaggacagaggctgcctgttgctgacctgagtggtgcggcttctcttctccgtttgctcacagaaac

SEQ ID NO: 42806 - DNA, 79 bp, Homo sapiens
taaaaggacagaggctgcctgttgctgacctgagtggtgcggcttctcttctccgtttgctcacagaaaccgatgatag

SEQ ID NO: 42807 - DNA, 82 bp, Homo sapiens
tgcctgttgctgacctgagtggtgcggcttctcttctccgtttgctcacagaaaccgatgataggtgaaatgagcaggtcaa

SEQ ID NO: 42808 - DNA, 79 bp, Homo sapiens
ttgctgacctgagtggtgcggcttctcttctccgtttgctcacagaaaccgatgataggtgaaatgagcaggtcaaagt

SEQ ID NO: 42809 - DNA, 76 bp, Homo sapiens
tggtgcggcttctcttctccgtttgctcacagaaaccgatgataggtgaaatgagcaggtcaaagttcagggtctt

SEQ ID NO: 42810 - DNA, 75 bp, Homo sapiens
ctccgtttgctcacagaaaccgatgataggtgaaatgagcaggtcaaagttcagggtctttggagggtgtggatg

SEQ ID NO: 42811 - DNA, 75 bp, Homo sapiens
acagaaaccgatgataggtgaaatgagcaggtcaaagttcagggtctttggagggtgtggatggtgcgagtgtag

SEQ ID NO: 42812 - DNA, 76 bp, Homo sapiens
atgataggtgaaatgagcaggtcaaagttcagggtctttggagggtgtggatggtgcgagtgtagggtgtagacag

SEQ ID NO: 42813 - DNA, 75 bp, Homo sapiens
aaatgagcaggtcaaagttcagggtctttggagggtgtggatggtgcgagtgtagggtgtagacagtggcgacca

SEQ ID NO: 42814 - DNA, 74 bp, Homo sapiens
gtctttggagggtgtggatggtgcgagtgtagggtgtagacagtggcgaccatgtggggagcccctgagttttg

SEQ ID NO: 42815 - DNA, 74 bp, Homo sapiens
agggtgtggatggtgcgagtgtagggtgtagacagtggcgaccatgtggggagcccctgagttttgtggttctg

SEQ ID NO: 42816 - DNA, 73 bp, Homo sapiens
atggtgcgagtgtagggtgtagacagtggcgaccatgtggggagcccctgagttttgtggttctgggacaccc

SEQ ID NO: 42817 - DNA, 74 bp, Homo sapiens
agtgtagggtgtagacagtggcgaccatgtggggagcccctgagttttgtggttctgggacacccgcatggcag

SEQ ID NO: 42818 - DNA, 75 bp, Homo sapiens
accatgtggggagcccctgagttttgtggttctgggacacccgcatggcaggtgtgcaggtcagacgtgaagaag

SEQ ID NO: 42819 - DNA, 76 bp, Homo sapiens
agcccctgagttttgtggttctgggacacccgcatggcaggtgtgcaggtcagacgtgaagaagggaagctggaga

SEQ ID NO: 42820 - DNA, 76 bp, Homo sapiens
tttgtggttctgggacacccgcatggcaggtgtgcaggtcagacgtgaagaagggaagctggagaggaaattgtta

SEQ ID NO: 42821 - DNA, 78 bp, Homo sapiens
tgggacacccgcatggcaggtgtgcaggtcagacgtgaagaagggaagctggagaggaaattgttaatgagctgaaat

SEQ ID NO: 42822 - DNA, 81 bp, Homo sapiens
gcatggcaggtgtgcaggtcagacgtgaagaagggaagctggagaggaaattgttaatgagctgaaattgtacatggctta

SEQ ID NO: 42823 - DNA, 80 bp, Homo sapiens
tgtgcaggtcagacgtgaagaagggaagctggagaggaaattgttaatgagctgaaattgtacatggcttagaactgtga

SEQ ID NO: 42824 - DNA, 78 bp, Homo sapiens
aggtcagacgtgaagaagggaagctggagaggaaattgttaatgagctgaaattgtacatggcttagaactgtgagca

SEQ ID NO: 42825 - DNA, 76 bp, Homo sapiens
aagaagggaagctggagaggaaattgttaatgagctgaaattgtacatggcttagaactgtgagcagggacctgct

SEQ ID NO: 42826 - DNA, 79 bp, Homo sapiens
tggagaggaaattgttaatgagctgaaattgtacatggcttagaactgtgagcagggacctgcttgtgaagtgaattag

SEQ ID NO: 42827 - DNA, 78 bp, Homo sapiens
aaattgttaatgagctgaaattgtacatggcttagaactgtgagcagggacctgcttgtgaagtgaattaggttgtgc

SEQ ID NO: 42828 - DNA, 76 bp, Homo sapiens
aattgtacatggcttagaactgtgagcagggacctgcttgtgaagtgaattaggttgtgcctgggaaagcagtggg

SEQ ID NO: 42829 - DNA, 76 bp, Homo sapiens
ttagaactgtgagcagggacctgcttgtgaagtgaattaggttgtgcctgggaaagcagtggggaggggagtgtga

SEQ ID NO: 42830 - DNA, 75 bp, Homo sapiens
agcagggacctgcttgtgaagtgaattaggttgtgcctgggaaagcagtggggaggggagtgtgagagccgtgaa

SEQ ID NO: 42831 - DNA, 80 bp, Homo sapiens
tgcttgtgaagtgaattaggttgtgcctgggaaagcagtggggaggggagtgtgagagccgtgaatgtgtcaaatgctca

SEQ ID NO: 42832 - DNA, 78 bp, Homo sapiens
aagtgaattaggttgtgcctgggaaagcagtggggaggggagtgtgagagccgtgaatgtgtcaaatgctcatggtga

SEQ ID NO: 42833 - DNA, 81 bp, Homo sapiens
taggttgtgcctgggaaagcagtggggaggggagtgtgagagccgtgaatgtgtcaaatgctcatggtgaatcgcgtcagc

SEQ ID NO: 42834 - DNA, 81 bp, Homo sapiens
aaagcagtggggaggggagtgtgagagccgtgaatgtgtcaaatgctcatggtgaatcgcgtcagctggggctgagggtga

SEQ ID NO: 42835 - DNA, 85 bp, Homo sapiens
agtgtgagagccgtgaatgtgtcaaatgctcatggtgaatcgcgtcagctggggctgagggtgacccctggattgatggcaggca

SEQ ID NO: 42836 - DNA, 84 bp, Homo sapiens
agccgtgaatgtgtcaaatgctcatggtgaatcgcgtcagctggggctgagggtgacccctggattgatggcaggcagggcatg

SEQ ID NO: 42837 - DNA, 81 bp, Homo sapiens
aaatgctcatggtgaatcgcgtcagctggggctgagggtgacccctggattgatggcaggcagggcatggtgaccttggga

SEQ ID NO: 42838 - DNA, 79 bp, Homo sapiens
ctcatggtgaatcgcgtcagctggggctgagggtgacccctggattgatggcaggcagggcatggtgaccttgggaggg

SEQ ID NO: 42839 - DNA, 78 bp, Homo sapiens
atcgcgtcagctggggctgagggtgacccctggattgatggcaggcagggcatggtgaccttgggaggggcagatttg

SEQ ID NO: 42840 - DNA, 77 bp, Homo sapiens
gctgagggtgacccctggattgatggcaggcagggcatggtgaccttgggaggggcagatttgggcttggtgaccca

SEQ ID NO: 42841 - DNA, 76 bp, Homo sapiens
tgacccctggattgatggcaggcagggcatggtgaccttgggaggggcagatttgggcttggtgacccaggaagga

SEQ ID NO: 42842 - DNA, 76 bp, Homo sapiens
tggattgatggcaggcagggcatggtgaccttgggaggggcagatttgggcttggtgacccaggaaggaggaacca

SEQ ID NO: 42843 - DNA, 74 bp, Homo sapiens
cagggcatggtgaccttgggaggggcagatttgggcttggtgacccaggaaggaggaaccagctgcaggtgccg

SEQ ID NO: 42844 - DNA, 75 bp, Homo sapiens
tgaccttgggaggggcagatttgggcttggtgacccaggaaggaggaaccagctgcaggtgccgtccactctctc

SEQ ID NO: 42845 - DNA, 73 bp, Homo sapiens
aggggcagatttgggcttggtgacccaggaaggaggaaccagctgcaggtgccgtccactctctccaggaggt

SEQ ID NO: 42846 - DNA, 73 bp, Homo sapiens
tttgggcttggtgacccaggaaggaggaaccagctgcaggtgccgtccactctctccaggaggtttactctaa

SEQ ID NO: 42847 - DNA, 72 bp, Homo sapiens
cttggtgacccaggaaggaggaaccagctgcaggtgccgtccactctctccaggaggtttactctaaaggaa

SEQ ID NO: 42848 - DNA, 73 bp, Homo sapiens
aaggaggaaccagctgcaggtgccgtccactctctccaggaggtttactctaaaggaagcgaggcggaggaga

SEQ ID NO: 42849 - DNA, 75 bp, Homo sapiens
aaccagctgcaggtgccgtccactctctccaggaggtttactctaaaggaagcgaggcggaggagagggcatgga

SEQ ID NO: 42850 - DNA, 71 bp, Homo sapiens
aggtgccgtccactctctccaggaggtttactctaaaggaagcgaggcggaggagagggcatggacgggga

SEQ ID NO: 42851 - DNA, 72 bp, Homo sapiens
tctctccaggaggtttactctaaaggaagcgaggcggaggagagggcatggacggggaggaggtgttgagaa

SEQ ID NO: 42852 - DNA, 71 bp, Homo sapiens
aggaggtttactctaaaggaagcgaggcggaggagagggcatggacggggaggaggtgttgagaagacatc

SEQ ID NO: 42853 - DNA, 73 bp, Homo sapiens
actctaaaggaagcgaggcggaggagagggcatggacggggaggaggtgttgagaagacatctgtggttaaga

SEQ ID NO: 42854 - DNA, 74 bp, Homo sapiens
aagcgaggcggaggagagggcatggacggggaggaggtgttgagaagacatctgtggttaagacgggatgggca

SEQ ID NO: 42855 - DNA, 75 bp, Homo sapiens
aggagagggcatggacggggaggaggtgttgagaagacatctgtggttaagacgggatgggcagctccaggtgtc

SEQ ID NO: 42856 - DNA, 73 bp, Homo sapiens
atggacggggaggaggtgttgagaagacatctgtggttaagacgggatgggcagctccaggtgtcggccaggg

SEQ ID NO: 42857 - DNA, 78 bp, Homo sapiens
aggaggtgttgagaagacatctgtggttaagacgggatgggcagctccaggtgtcggccaggggcaccatgccgcaga

SEQ ID NO: 42858 - DNA, 76 bp, Homo sapiens
agaagacatctgtggttaagacgggatgggcagctccaggtgtcggccaggggcaccatgccgcagaggggaaggc

SEQ ID NO: 42859 - DNA, 75 bp, Homo sapiens
tctgtggttaagacgggatgggcagctccaggtgtcggccaggggcaccatgccgcagaggggaaggcggaggga

SEQ ID NO: 42860 - DNA, 74 bp, Homo sapiens
agacgggatgggcagctccaggtgtcggccaggggcaccatgccgcagaggggaaggcggagggagtggggatg

SEQ ID NO: 42861 - DNA, 81 bp, Homo sapiens
gcagaggggaaggcggagggggtggggatgggcagcagaggctgcatcaggtgcctctcgcaggtggagctgctggcctgg

SEQ ID NO: 42862 - DNA, 79 bp, Homo sapiens
gggaaggcggagggggtggggatgggcagcagaggctgcatcaggtgcctctcgcaggtggagctgctggcctgggtgg

SEQ ID NO: 42863 - DNA, 82 bp, Homo sapiens
ggtggggatgggcagcagaggctgcatcaggtgcctctcgcaggtggagctgctggcctgggtgggggctcaggggttgcac

SEQ ID NO: 42864 - DNA, 85 bp, Homo sapiens
atgggcagcagaggctgcatcaggtgcctctcgcaggtggagctgctggcctgggtgggggctcaggggttgcactgcctgcgtg

SEQ ID NO: 42865 - DNA, 84 bp, Homo sapiens
agaggctgcatcaggtgcctctcgcaggtggagctgctggcctgggtgggggctcaggggttgcactgcctgcgtggcctggca

SEQ ID NO: 42866 - DNA, 83 bp, Homo sapiens
atcaggtgcctctcgcaggtggagctgctggcctgggtgggggctcaggggttgcactgcctgcgtggcctggcactggcgca

SEQ ID NO: 42867 - DNA, 83 bp, Homo sapiens
caggtggagctgctggcctgggtgggggctcaggggttgcactgcctgcgtggcctggcactggcgcagcagaggctcctctc

SEQ ID NO: 42868 - DNA, 83 bp, Homo sapiens
tgctggcctgggtgggggctcaggggttgcactgcctgcgtggcctggcactggcgcagcagaggctcctctctgccctcggc

SEQ ID NO: 42869 - DNA, 82 bp, Homo sapiens
ggtgggggctcaggggttgcactgcctgcgtggcctggcactggcgcagcagaggctcctctctgccctcggctggtggctc

SEQ ID NO: 42870 - DNA, 84 bp, Homo sapiens
ctcaggggttgcactgcctgcgtggcctggcactggcgcagcagaggctcctctctgccctcggctggtggctccctgtgtctc

SEQ ID NO: 42871 - DNA, 84 bp, Homo sapiens
tggcctggcactggcgcagcagaggctcctctctgccctcggctggtggctccctgtgtctcctcctgccacacgtggccatcc

SEQ ID NO: 42872 - DNA, 83 bp, Homo sapiens
actggcgcagcagaggctcctctctgccctcggctggtggctccctgtgtctcctcctgccacacgtggccatcctagtgctg

SEQ ID NO: 42873 - DNA, 80 bp, Homo sapiens
agaggctcctctctgccctcggctggtggctccctgtgtctcctcctgccacacgtggccatcctagtgctggatttatg

SEQ ID NO: 42874 - DNA, 81 bp, Homo sapiens
ctctctgccctcggctggtggctccctgtgtctcctcctgccacacgtggccatcctagtgctggatttatggcgtacaca

SEQ ID NO: 42875 - DNA, 81 bp, Homo sapiens
ctcggctggtggctccctgtgtctcctcctgccacacgtggccatcctagtgctggatttatggcgtacacagccatctta

SEQ ID NO: 42876 - DNA, 82 bp, Homo sapiens
tccctgtgtctcctcctgccacacgtggccatcctagtgctggatttatggcgtacacagccatcttagccgtcatcgtgtg

SEQ ID NO: 42877 - DNA, 82 bp, Homo sapiens
tcctcctgccacacgtggccatcctagtgctggatttatggcgtacacagccatcttagccgtcatcgtgtgggtgataaca

SEQ ID NO: 42878 - DNA, 81 bp, Homo sapiens
atcctagtgctggatttatggcgtacacagccatcttagccgtcatcgtgtgggtgataacagacctgtgagatggaagtg

SEQ ID NO: 42879 - DNA, 83 bp, Homo sapiens
agtgctggatttatggcgtacacagccatcttagccgtcatcgtgtgggtgataacagacctgtgagatggaagtggctgctc

SEQ ID NO: 42880 - DNA, 83 bp, Homo sapiens
ttatggcgtacacagccatcttagccgtcatcgtgtgggtgataacagacctgtgagatggaagtggctgctcttgcccatcc

SEQ ID NO: 42881 - DNA, 80 bp, Homo sapiens
acagccatcttagccgtcatcgtgtgggtgataacagacctgtgagatggaagtggctgctcttgcccatccgggccctg

SEQ ID NO: 42882 - DNA, 81 bp, Homo sapiens
ttagccgtcatcgtgtgggtgataacagacctgtgagatggaagtggctgctcttgcccatccgggccctggctctgtgcc

SEQ ID NO: 42883 - DNA, 84 bp, Homo sapiens
tgggtgataacagacctgtgagatggaagtggctgctcttgcccatccgggccctggctctgtgccgtcatcagcacggtgtca

SEQ ID NO: 42884 - DNA, 81 bp, Homo sapiens
ataacagacctgtgagatggaagtggctgctcttgcccatccgggccctggctctgtgccgtcatcagcacggtgtcaccg

SEQ ID NO: 42885 - DNA, 80 bp, Homo sapiens
agatggaagtggctgctcttgcccatccgggccctggctctgtgccgtcatcagcacggtgtcaccgtgtggccgccctc

SEQ ID NO: 42886 - DNA, 78 bp, Homo sapiens
aagtggctgctcttgcccatccgggccctggctctgtgccgtcatcagcacggtgtcaccgtgtggccgccctccacc

SEQ ID NO: 42887 - DNA, 76 bp, Homo sapiens
ttgcccatccgggccctggctctgtgccgtcatcagcacggtgtcaccgtgtggccgccctccacccgtttgtctc

SEQ ID NO: 42888 - DNA, 80 bp, Homo sapiens
tctgtgccgtcatcagcacggtgtcaccgtgtggccgccctccacccgtttgtctctgcacactcgacctgtgtactcca

SEQ ID NO: 42889 - DNA, 75 bp, Homo sapiens
acggtgtcaccgtgtggccgccctccacccgtttgtctctgcacactcgacctgtgtactccactcgcgcttctg

SEQ ID NO: 42890 - DNA, 77 bp, Homo sapiens
cgtgtggccgccctccacccgtttgtctctgcacactcgacctgtgtactccactcgcgcttctggccctcaccatc

SEQ ID NO: 42891 - DNA, 79 bp, Homo sapiens
tccacccgtttgtctctgcacactcgacctgtgtactccactcgcgcttctggccctcaccatcgccgtcacctcctgc

SEQ ID NO: 42892 - DNA, 78 bp, Homo sapiens
acactcgacctgtgtactccactcgcgcttctggccctcaccatcgccgtcacctcctgcctgggccctgccgctgcc

SEQ ID NO: 42893 - DNA, 77 bp, Homo sapiens
cctgtgtactccactcgcgcttctggccctcaccatcgccgtcacctcctgcctgggccctgccgctgccctcaccc

SEQ ID NO: 42894 - DNA, 76 bp, Homo sapiens
ttctggccctcaccatcgccgtcacctcctgcctgggccctgccgctgccctcaccccagccagagttctgggaaa

SEQ ID NO: 42895 - DNA, 72 bp, Homo sapiens
atcgccgtcacctcctgcctgggccctgccgctgccctcaccccagccagagttctgggaaaccccagggaa

SEQ ID NO: 42896 - DNA, 72 bp, Homo sapiens
acctcctgcctgggccctgccgctgccctcaccccagccagagttctgggaaaccccagggaagctggctcc

SEQ ID NO: 42897 - DNA, 73 bp, Homo sapiens
tgggccctgccgctgccctcaccccagccagagttctgggaaaccccagggaagctggctcccctcccactga

SEQ ID NO: 42898 - DNA, 72 bp, Homo sapiens
ctgccctcaccccagccagagttctgggaaaccccagggaagctggctcccctcccactgaccactgcaccc

SEQ ID NO: 42899 - DNA, 70 bp, Homo sapiens
ctcaccccagccagagttctgggaaaccccagggaagctggctcccctcccactgaccactgcacccggg

SEQ ID NO: 42900 - DNA, 69 bp, Homo sapiens
agagttctgggaaaccccagggaagctggctcccctcccactgaccactgcacccgggggccgcgccgc

SEQ ID NO: 42901 - DNA, 68 bp, Homo sapiens
aaaccccagggaagctggctcccctcccactgaccactgcacccgggggccgcgccgcgcctccctcc

SEQ ID NO: 42902 - DNA, 73 bp, Homo sapiens
ccctccctccctcctgccccactcatcctgcctcgtggaggccaccgaccgactgccctggtgctccttagac

SEQ ID NO: 42903 - DNA, 80 bp, Homo sapiens
ctcctgccccactcatcctgcctcgtggaggccaccgaccgactgccctggtgctccttagacccacatgccatgctgtg

SEQ ID NO: 42904 - DNA, 77 bp, Homo sapiens
actcatcctgcctcgtggaggccaccgaccgactgccctggtgctccttagacccacatgccatgctgtggggcctt

SEQ ID NO: 42905 - DNA, 78 bp, Homo sapiens
tcctgcctcgtggaggccaccgaccgactgccctggtgctccttagacccacatgccatgctgtggggcctttgcagg

SEQ ID NO: 42906 - DNA, 80 bp, Homo sapiens
tggaggccaccgaccgactgccctggtgctccttagacccacatgccatgctgtggggcctttgcaggtgctgctgggtg

SEQ ID NO: 42907 - DNA, 79 bp, Homo sapiens
gtgctccttagacccacatgccatgctgtggggcctttgcaggtgctgctgggtggcctgggcagggtctccaccttgt

SEQ ID NO: 42908 - DNA, 80 bp, Homo sapiens
ttagacccacatgccatgctgtggggcctttgcaggtgctgctgggtggcctgggcagggtctccaccttgttgagtctc

SEQ ID NO: 42909 - DNA, 82 bp, Homo sapiens
atgccatgctgtggggcctttgcaggtgctgctgggtggcctgggcagggtctccaccttgttgagtctctgctcgaatgtc

SEQ ID NO: 42910 - DNA, 79 bp, Homo sapiens
gggcctttgcaggtgctgctgggtggcctgggcagggtctccaccttgttgagtctctgctcgaatgtcccagaccaca

SEQ ID NO: 42911 - DNA, 80 bp, Homo sapiens
tttgcaggtgctgctgggtggcctgggcagggtctccaccttgttgagtctctgctcgaatgtcccagaccacagagacc

SEQ ID NO: 42912 - DNA, 77 bp, Homo sapiens
tgggtggcctgggcagggtctccaccttgttgagtctctgctcgaatgtcccagaccacagagacccagccgccctc

SEQ ID NO: 42913 - DNA, 78 bp, Homo sapiens
tctccaccttgttgagtctctgctcgaatgtcccagaccacagagacccagccgccctcttgaggtagctgcacccgg

SEQ ID NO: 42914 - DNA, 79 bp, Homo sapiens
ttgttgagtctctgctcgaatgtcccagaccacagagacccagccgccctcttgaggtagctgcacccgggccactctc

SEQ ID NO: 42915 - DNA, 77 bp, Homo sapiens
tctgctcgaatgtcccagaccacagagacccagccgccctcttgaggtagctgcacccgggccactctccctcccca

SEQ ID NO: 42916 - DNA, 74 bp, Homo sapiens
tgtcccagaccacagagacccagccgccctcttgaggtagctgcacccgggccactctccctccccaccttatc

SEQ ID NO: 42917 - DNA, 68 bp, Homo sapiens
agccgccctcttgaggtagctgcacccgggccactctccctccccaccttatccccttccttcttttc

SEQ ID NO: 42918 - DNA, 73 bp, Homo sapiens
ttgaggtagctgcacccgggccactctccctccccaccttatccccttccttcttttcctctgatcaccatga

SEQ ID NO: 42919 - DNA, 71 bp, Homo sapiens
acccgggccactctccctccccaccttatccccttccttcttttcctctgatcaccatgaccttatgctca

SEQ ID NO: 42920 - DNA, 68 bp, Homo sapiens
cccaccttatccccttccttcttttcctctgatcaccatgaccttatgctcagtgtggtttttttttt

SEQ ID NO: 42921 - DNA, 71 bp, Homo sapiens
tttttttttgtaaatctactttcttctgttggaatgtaaactctgagagcagaggcatttgaaggtgacct

SEQ ID NO: 42922 - DNA, 76 bp, Homo sapiens
ttttgtaaatctactttcttctgttggaatgtaaactctgagagcagaggcatttgaaggtgacctttgctcaaga

SEQ ID NO: 42923 - DNA, 78 bp, Homo sapiens
tactttcttctgttggaatgtaaactctgagagcagaggcatttgaaggtgacctttgctcaagagaagatgccccaa

SEQ ID NO: 42924 - DNA, 83 bp, Homo sapiens
tggaatgtaaactctgagagcagaggcatttgaaggtgacctttgctcaagagaagatgccccaacagaatgcaatgagatct

SEQ ID NO: 42925 - DNA, 84 bp, Homo sapiens
gtaaactctgagagcagaggcatttgaaggtgacctttgctcaagagaagatgccccaacagaatgcaatgagatcttcacagc

SEQ ID NO: 42926 - DNA, 83 bp, Homo sapiens
agaggcatttgaaggtgacctttgctcaagagaagatgccccaacagaatgcaatgagatcttcacagccttcagtccagatc

SEQ ID NO: 42927 - DNA, 81 bp, Homo sapiens
atttgaaggtgacctttgctcaagagaagatgccccaacagaatgcaatgagatcttcacagccttcagtccagatccttg

SEQ ID NO: 42928 - DNA, 84 bp, Homo sapiens
acctttgctcaagagaagatgccccaacagaatgcaatgagatcttcacagccttcagtccagatccttgtggctccagtgcag

SEQ ID NO: 42929 - DNA, 84 bp, Homo sapiens
ccaacagaatgcaatgagatcttcacagccttcagtccagatccttgtggctccagtgcagggacagagtttctcctggcagtg

SEQ ID NO: 42930 - DNA, 83 bp, Homo sapiens
aatgcaatgagatcttcacagccttcagtccagatccttgtggctccagtgcagggacagagtttctcctggcagtggccgta

SEQ ID NO: 42931 - DNA, 84 bp, Homo sapiens
ttcagtccagatccttgtggctccagtgcagggacagagtttctcctggcagtggccgtagacatgcgcagtcctcatgggcta

SEQ ID NO: 42932 - DNA, 79 bp, Homo sapiens
agggacagagtttctcctggcagtggccgtagacatgcgcagtcctcatgggctatggagagtgggttgcttgtgtctt

SEQ ID NO: 42933 - DNA, 79 bp, Homo sapiens
agtttctcctggcagtggccgtagacatgcgcagtcctcatgggctatggagagtgggttgcttgtgtctttggagaat

SEQ ID NO: 42934 - DNA, 82 bp, Homo sapiens
ctggcagtggccgtagacatgcgcagtcctcatgggctatggagagtgggttgcttgtgtctttggagaattgatctggttc

SEQ ID NO: 42935 - DNA, 84 bp, Homo sapiens
tagacatgcgcagtcctcatgggctatggagagtgggttgcttgtgtctttggagaattgatctggttcctgctatgcacgttc

SEQ ID NO: 42936 - DNA, 80 bp, Homo sapiens
agtcctcatgggctatggagagtgggttgcttgtgtctttggagaattgatctggttcctgctatgcacgttctaggtca

SEQ ID NO: 42937 - DNA, 78 bp, Homo sapiens
atgggctatggagagtgggttgcttgtgtctttggagaattgatctggttcctgctatgcacgttctaggtcacaaaa

SEQ ID NO: 42938 - DNA, 75 bp, Homo sapiens
agagtgggttgcttgtgtctttggagaattgatctggttcctgctatgcacgttctaggtcacaaaaaatttatc

SEQ ID NO: 42939 - DNA, 76 bp, Homo sapiens
tgtgtctttggagaattgatctggttcctgctatgcacgttctaggtcacaaaaaatttatctgaacaagagttaa

SEQ ID NO: 42940 - DNA, 74 bp, Homo sapiens
ctttggagaattgatctggttcctgctatgcacgttctaggtcacaaaaaatttatctgaacaagagttaacaa

SEQ ID NO: 42941 - DNA, 74 bp, Homo sapiens
atctggttcctgctatgcacgttctaggtcacaaaaaatttatctgaacaagagttaacaatgcctggagaaaa

SEQ ID NO: 42942 - DNA, 76 bp, Homo sapiens
tcctgctatgcacgttctaggtcacaaaaaatttatctgaacaagagttaacaatgcctggagaaaagtcgtgaca

SEQ ID NO: 42943 - DNA, 74 bp, Homo sapiens
gtcacaaaaaatttatctgaacaagagttaacaatgcctggagaaaagtcgtgacagagccaggcagtccaggg

SEQ ID NO: 42944 - DNA, 76 bp, Homo sapiens
atttatctgaacaagagttaacaatgcctggagaaaagtcgtgacagagccaggcagtccagggggatgtgggctg

SEQ ID NO: 42945 - DNA, 75 bp, Homo sapiens
acaagagttaacaatgcctggagaaaagtcgtgacagagccaggcagtccagggggatgtgggctgttccctgag

SEQ ID NO: 42946 - DNA, 79 bp, Homo sapiens
acaatgcctggagaaaagtcgtgacagagccaggcagtccagggggatgtgggctgttccctgaggcagctctcgtgag

SEQ ID NO: 42947 - DNA, 79 bp, Homo sapiens
agagccaggcagtccagggggatgtgggctgttccctgaggcagctctcgtgaggctggttctggcaatgactttcgga

SEQ ID NO: 42948 - DNA, 77 bp, Homo sapiens
agtccagggggatgtgggctgttccctgaggcagctctcgtgaggctggttctggcaatgactttcggacttagcca

SEQ ID NO: 42949 - DNA, 80 bp, Homo sapiens
gggatgtgggctgttccctgaggcagctctcgtgaggctggttctggcaatgactttcggacttagccagaggagctgga

SEQ ID NO: 42950 - DNA, 80 bp, Homo sapiens
tgttccctgaggcagctctcgtgaggctggttctggcaatgactttcggacttagccagaggagctggaggaggccattc

SEQ ID NO: 42951 - DNA, 79 bp, Homo sapiens
gcagctctcgtgaggctggttctggcaatgactttcggacttagccagaggagctggaggaggccattcccaatgtctt

SEQ ID NO: 42952 - DNA, 77 bp, Homo sapiens
tgaggctggttctggcaatgactttcggacttagccagaggagctggaggaggccattcccaatgtctttcccaaca

SEQ ID NO: 42953 - DNA, 75 bp, Homo sapiens
ctggttctggcaatgactttcggacttagccagaggagctggaggaggccattcccaatgtctttcccaacacca

SEQ ID NO: 42954 - DNA, 75 bp, Homo sapiens
acttagccagaggagctggaggaggccattcccaatgtctttcccaacaccactgcctggactcgggttgaagca

SEQ ID NO: 42955 - DNA, 77 bp, Homo sapiens
gagctggaggaggccattcccaatgtctttcccaacaccactgcctggactcgggttgaagcaccatgagaagctct

SEQ ID NO: 42956 - DNA, 75 bp, Homo sapiens
aggccattcccaatgtctttcccaacaccactgcctggactcgggttgaagcaccatgagaagctcttggcattt

SEQ ID NO: 42957 - DNA, 76 bp, Homo sapiens
attcccaatgtctttcccaacaccactgcctggactcgggttgaagcaccatgagaagctcttggcattttcatgt

SEQ ID NO: 42958 - DNA, 81 bp, Homo sapiens
actgcctggactcgggttgaagcaccatgagaagctcttggcattttcatgtttctggctgtcctagtgctgactgaccag

SEQ ID NO: 42959 - DNA, 83 bp, Homo sapiens
actcgggttgaagcaccatgagaagctcttggcattttcatgtttctggctgtcctagtgctgactgaccaggcacatggaca

SEQ ID NO: 42960 - DNA, 85 bp, Homo sapiens
aagcaccatgagaagctcttggcattttcatgtttctggctgtcctagtgctgactgaccaggcacatggacatcctaacactga

SEQ ID NO: 42961 - DNA, 84 bp, Homo sapiens
atgagaagctcttggcattttcatgtttctggctgtcctagtgctgactgaccaggcacatggacatcctaacactgaactgac

SEQ ID NO: 42962 - DNA, 85 bp, Homo sapiens
cattttcatgtttctggctgtcctagtgctgactgaccaggcacatggacatcctaacactgaactgaccatgtacatggacatc

SEQ ID NO: 42963 - DNA, 80 bp, Homo sapiens
acatcctagccctggactgaccgggcatgtggacatcctagccctggactgaccgtgtacatagacatcctaatgctgaa

SEQ ID NO: 42964 - DNA, 80 bp, Homo sapiens
tagccctggactgaccgggcatgtggacatcctagccctggactgaccgtgtacatagacatcctaatgctgaactgacc

SEQ ID NO: 42965 - DNA, 80 bp, Homo sapiens
accgggcatgtggacatcctagccctggactgaccgtgtacatagacatcctaatgctgaactgaccgtgtacatggaca

SEQ ID NO: 42966 - DNA, 81 bp, Homo sapiens
atgtggacatcctagccctggactgaccgtgtacatagacatcctaatgctgaactgaccgtgtacatggacatcctagcc

SEQ ID NO: 42967 - DNA, 81 bp, Homo sapiens
tagccctggactgaccgtgtacatagacatcctaatgctgaactgaccgtgtacatggacatcctagccctggactgactg

SEQ ID NO: 42968 - DNA, 82 bp, Homo sapiens
tgaccgtgtacatagacatcctaatgctgaactgaccgtgtacatggacatcctagccctggactgactgggcacgtgaaca

SEQ ID NO: 42969 - DNA, 84 bp, Homo sapiens
tgtacatagacatcctaatgctgaactgaccgtgtacatggacatcctagccctggactgactgggcacgtgaacatcctagca

SEQ ID NO: 42970 - DNA, 83 bp, Homo sapiens
taatgctgaactgaccgtgtacatggacatcctagccctggactgactgggcacgtgaacatcctagcactggactgaccatg

SEQ ID NO: 42971 - DNA, 82 bp, Homo sapiens
tgtacatggacatcctagccctggactgactgggcacgtgaacatcctagcactggactgaccatgtacgtggatgtcctag

SEQ ID NO: 42972 - DNA, 81 bp, Homo sapiens
acatcctagccctggactgactgggcacgtgaacatcctagcactggactgaccatgtacgtggatgtcctagtgctgaac

SEQ ID NO: 42973 - DNA, 83 bp, Homo sapiens
gcacgtgaacatcctagcactggactgaccatgtacgtggatgtcctagtgctgaactgaacaggcacgtggacatcctaaca

SEQ ID NO: 42974 - DNA, 81 bp, Homo sapiens
aacatcctagcactggactgaccatgtacgtggatgtcctagtgctgaactgaacaggcacgtggacatcctaacactgaa

SEQ ID NO: 42975 - DNA, 80 bp, Homo sapiens
accatgtacgtggatgtcctagtgctgaactgaacaggcacgtggacatcctaacactgaactgaccgggcatgtggaca

SEQ ID NO: 42976 - DNA, 80 bp, Homo sapiens
actgaacaggcacgtggacatcctaacactgaactgaccgggcatgtggacatcctagcgctggactgactgggcacgtg

SEQ ID NO: 42977 - DNA, 81 bp, Homo sapiens
acgtggacatcctaacactgaactgaccgggcatgtggacatcctagcgctggactgactgggcacgtggacatcctagca

SEQ ID NO: 42978 - DNA, 82 bp, Homo sapiens
taacactgaactgaccgggcatgtggacatcctagcgctggactgactgggcacgtggacatcctagcactggactgactgg

SEQ ID NO: 42979 - DNA, 84 bp, Homo sapiens
tgaccgggcatgtggacatcctagcgctggactgactgggcacgtggacatcctagcactggactgactgggcacctgaacatc

SEQ ID NO: 42980 - DNA, 84 bp, Homo sapiens
atgtggacatcctagcgctggactgactgggcacgtggacatcctagcactggactgactgggcacctgaacatcctagcgctg

SEQ ID NO: 42981 - DNA, 83 bp, Homo sapiens
cctagcgctggactgactgggcacgtggacatcctagcactggactgactgggcacctgaacatcctagcgctggactgactg

SEQ ID NO: 42982 - DNA, 82 bp, Homo sapiens
actgactgggcacgtggacatcctagcactggactgactgggcacctgaacatcctagcgctggactgactgggcacgtgga

SEQ ID NO: 42983 - DNA, 82 bp, Homo sapiens
acgtggacatcctagcactggactgactgggcacctgaacatcctagcgctggactgactgggcacgtggacatcctagtgc

SEQ ID NO: 42984 - DNA, 84 bp, Homo sapiens
acatcctagcactggactgactgggcacctgaacatcctagcgctggactgactgggcacgtggacatcctagtgctggattca

SEQ ID NO: 42985 - DNA, 83 bp, Homo sapiens
actggactgactgggcacctgaacatcctagcgctggactgactgggcacgtggacatcctagtgctggattcactgggcaca

SEQ ID NO: 42986 - DNA, 84 bp, Homo sapiens
tgggcacctgaacatcctagcgctggactgactgggcacgtggacatcctagtgctggattcactgggcacatggacatcctag

SEQ ID NO: 42987 - DNA, 85 bp, Homo sapiens
aacatcctagcgctggactgactgggcacgtggacatcctagtgctggattcactgggcacatggacatcctagtgctggactga

SEQ ID NO: 42988 - DNA, 84 bp, Homo sapiens
agcgctggactgactgggcacgtggacatcctagtgctggattcactgggcacatggacatcctagtgctggactgaccgggca

SEQ ID NO: 42989 - DNA, 83 bp, Homo sapiens
atggacatcctagtgctggactgaccgggcacatggacatcctagtgctggactgaccgggcacatggacatcctaacactga

SEQ ID NO: 42990 - DNA, 83 bp, Homo sapiens
tagtgctggactgaccgggcacatggacatcctagtgctggactgaccgggcacatggacatcctaacactgaactgaccaga

SEQ ID NO: 42991 - DNA, 80 bp, Homo sapiens
actgaccgggcacatggacatcctagtgctggactgaccgggcacatggacatcctaacactgaactgaccagacacgtg

SEQ ID NO: 42992 - DNA, 81 bp, Homo sapiens
acatggacatcctagtgctggactgaccgggcacatggacatcctaacactgaactgaccagacacgtggacatcctaaca

SEQ ID NO: 42993 - DNA, 81 bp, Homo sapiens
tcctagtgctggactgaccgggcacatggacatcctaacactgaactgaccagacacgtggacatcctaacactgaactga

SEQ ID NO: 42994 - DNA, 80 bp, Homo sapiens
acatggacatcctaacactgaactgaccagacacgtggacatcctaacactgaactgaccgggcatgtggacatcctagc

SEQ ID NO: 42995 - DNA, 80 bp, Homo sapiens
acatcctaacactgaactgaccagacacgtggacatcctaacactgaactgaccgggcatgtggacatcctagcgctgga

SEQ ID NO: 42996 - DNA, 78 bp, Homo sapiens
actgaactgaccagacacgtggacatcctaacactgaactgaccgggcatgtggacatcctagcgctggactgaccgg

SEQ ID NO: 42997 - DNA, 79 bp, Homo sapiens
agacacgtggacatcctaacactgaactgaccgggcatgtggacatcctagcgctggactgaccgggcacgtgggcatc

SEQ ID NO: 42998 - DNA, 78 bp, Homo sapiens
atcctaacactgaactgaccgggcatgtggacatcctagcgctggactgaccgggcacgtgggcatcctaacactgaa

SEQ ID NO: 42999 - DNA, 78 bp, Homo sapiens
aacactgaactgaccgggcatgtggacatcctagcgctggactgaccgggcacgtgggcatcctaacactgaactgac

SEQ ID NO: 43000 - DNA, 78 bp, Homo sapiens
accgggcatgtggacatcctagcgctggactgaccgggcacgtgggcatcctaacactgaactgaccagacacgtgga

SEQ ID NO: 43001 - DNA, 80 bp, Homo sapiens
acatcctagcgctggactgaccgggcacgtgggcatcctaacactgaactgaccagacacgtggacatcctagcactgaa

SEQ ID NO: 43002 - DNA, 81 bp, Homo sapiens
tagcgctggactgaccgggcacgtgggcatcctaacactgaactgaccagacacgtggacatcctagcactgaactgactg

SEQ ID NO: 43003 - DNA, 80 bp, Homo sapiens
actgaccgggcacgtgggcatcctaacactgaactgaccagacacgtggacatcctagcactgaactgactggacacatg

SEQ ID NO: 43004 - DNA, 80 bp, Homo sapiens
accggacacgtagacatcctagcattgaactgactggacacatggatatcctagctctggactgaccggacacgtagaca

SEQ ID NO: 43005 - DNA, 84 bp, Homo sapiens
gtagacatcctagcattgaactgactggacacatggatatcctagctctggactgaccggacacgtagacatcctagcactgaa

SEQ ID NO: 43006 - DNA, 82 bp, Homo sapiens
acatcctagcattgaactgactggacacatggatatcctagctctggactgaccggacacgtagacatcctagcactgaact

SEQ ID NO: 43007 - DNA, 84 bp, Homo sapiens
cctagcattgaactgactggacacatggatatcctagctctggactgaccggacacgtagacatcctagcactgaacttgctgc

SEQ ID NO: 43008 - DNA, 83 bp, Homo sapiens
attgaactgactggacacatggatatcctagctctggactgaccggacacgtagacatcctagcactgaacttgctgcgcgtg

SEQ ID NO: 43009 - DNA, 83 bp, Homo sapiens
aactgactggacacatggatatcctagctctggactgaccggacacgtagacatcctagcactgaacttgctgcgcgtggcca

SEQ ID NO: 43010 - DNA, 85 bp, Homo sapiens
acacatggatatcctagctctggactgaccggacacgtagacatcctagcactgaacttgctgcgcgtggccacactctcgctga

SEQ ID NO: 43011 - DNA, 82 bp, Homo sapiens
tatcctagctctggactgaccggacacgtagacatcctagcactgaacttgctgcgcgtggccacactctcgctgaatttta

SEQ ID NO: 43012 - DNA, 80 bp, Homo sapiens
tagctctggactgaccggacacgtagacatcctagcactgaacttgctgcgcgtggccacactctcgctgaattttacct

SEQ ID NO: 43013 - DNA, 78 bp, Homo sapiens
ctctggactgaccggacacgtagacatcctagcactgaacttgctgcgcgtggccacactctcgctgaattttacctt

SEQ ID NO: 43014 - DNA, 78 bp, Homo sapiens
actgaccggacacgtagacatcctagcactgaacttgctgcgcgtggccacactctcgctgaattttacctttcacac

SEQ ID NO: 43015 - DNA, 78 bp, Homo sapiens
acatcctagcactgaacttgctgcgcgtggccacactctcgctgaattttacctttcacactgaaagagcgggaggaa

SEQ ID NO: 43016 - DNA, 78 bp, Homo sapiens
acttgctgcgcgtggccacactctcgctgaattttacctttcacactgaaagagcgggaggaaggacagccaggcaga

SEQ ID NO: 43017 - DNA, 79 bp, Homo sapiens
ccacactctcgctgaattttacctttcacactgaaagagcgggaggaaggacagccaggcagagctgggacatctgcga

SEQ ID NO: 43018 - DNA, 77 bp, Homo sapiens
gctgaattttacctttcacactgaaagagcgggaggaaggacagccaggcagagctgggacatctgcgaggacgttc

SEQ ID NO: 43019 - DNA, 76 bp, Homo sapiens
attttacctttcacactgaaagagcgggaggaaggacagccaggcagagctgggacatctgcgaggacgttcgcag

SEQ ID NO: 43020 - DNA, 76 bp, Homo sapiens
actgaaagagcgggaggaaggacagccaggcagagctgggacatctgcgaggacgttcgcagggtgggaagtgtta

SEQ ID NO: 43021 - DNA, 78 bp, Homo sapiens
gggaggaaggacagccaggcagagctgggacatctgcgaggacgttcgcagggtgggaagtgttatgcatgaccaagt

SEQ ID NO: 43022 - DNA, 79 bp, Homo sapiens
acagccaggcagagctgggacatctgcgaggacgttcgcagggtgggaagtgttatgcatgaccaagtttgaatgtgtt

SEQ ID NO: 43023 - DNA, 78 bp, Homo sapiens
agagctgggacatctgcgaggacgttcgcagggtgggaagtgttatgcatgaccaagtttgaatgtgtttatgaaaca

SEQ ID NO: 43024 - DNA, 78 bp, Homo sapiens
acatctgcgaggacgttcgcagggtgggaagtgttatgcatgaccaagtttgaatgtgtttatgaaacatgggtgatg

SEQ ID NO: 43025 - DNA, 76 bp, Homo sapiens
gacgttcgcagggtgggaagtgttatgcatgaccaagtttgaatgtgtttatgaaacatgggtgatggaaggtaga

SEQ ID NO: 43026 - DNA, 75 bp, Homo sapiens
gggtgggaagtgttatgcatgaccaagtttgaatgtgtttatgaaacatgggtgatggaaggtagaccctgcaat

SEQ ID NO: 43027 - DNA, 74 bp, Homo sapiens
aagtgttatgcatgaccaagtttgaatgtgtttatgaaacatgggtgatggaaggtagaccctgcaatttttag

SEQ ID NO: 43028 - DNA, 74 bp, Homo sapiens
atgaccaagtttgaatgtgtttatgaaacatgggtgatggaaggtagaccctgcaatttttagggatgctctaa

SEQ ID NO: 43029 - DNA, 73 bp, Homo sapiens
agtttgaatgtgtttatgaaacatgggtgatggaaggtagaccctgcaatttttagggatgctctaacaattc

SEQ ID NO: 43030 - DNA, 74 bp, Homo sapiens
acatgggtgatggaaggtagaccctgcaatttttagggatgctctaacaattcggtgcttctgtgatgttttgg

SEQ ID NO: 43031 - DNA, 71 bp, Homo sapiens
aaggtagaccctgcaatttttagggatgctctaacaattcggtgcttctgtgatgttttgggtgaaattgg

SEQ ID NO: 43032 - DNA, 70 bp, Homo sapiens
accctgcaatttttagggatgctctaacaattcggtgcttctgtgatgttttgggtgaaattgggtgggg

SEQ ID NO: 43033 - DNA, 72 bp, Homo sapiens
ttttagggatgctctaacaattcggtgcttctgtgatgttttgggtgaaattgggtgggggtgaaatatgaa

SEQ ID NO: 43034 - DNA, 72 bp, Homo sapiens
tctaacaattcggtgcttctgtgatgttttgggtgaaattgggtgggggtgaaatatgaacacctctcaacg

SEQ ID NO: 43035 - DNA, 72 bp, Homo sapiens
ttcggtgcttctgtgatgttttgggtgaaattgggtgggggtgaaatatgaacacctctcaacggtctgggc

SEQ ID NO: 43036 - DNA, 72 bp, Homo sapiens
ttgggtgaaattgggtgggggtgaaatatgaacacctctcaacggtctgggcctgtgtcctgcccagggctg

SEQ ID NO: 43037 - DNA, 75 bp, Homo sapiens
tgggggtgaaatatgaacacctctcaacggtctgggcctgtgtcctgcccagggctgggttgcagcaggttcctg

SEQ ID NO: 43038 - DNA, 78 bp, Homo sapiens
gtgaaatatgaacacctctcaacggtctgggcctgtgtcctgcccagggctgggttgcagcaggttcctggctccatg

SEQ ID NO: 43039 - DNA, 79 bp, Homo sapiens
aacacctctcaacggtctgggcctgtgtcctgcccagggctgggttgcagcaggttcctggctccatggcattcatgag

SEQ ID NO: 43040 - DNA, 78 bp, Homo sapiens
tctgggcctgtgtcctgcccagggctgggttgcagcaggttcctggctccatggcattcatgaggggttactgggttg

SEQ ID NO: 43041 - DNA, 77 bp, Homo sapiens
tgtcctgcccagggctgggttgcagcaggttcctggctccatggcattcatgaggggttactgggttggaaggtgaa

SEQ ID NO: 43042 - DNA, 75 bp, Homo sapiens
agggctgggttgcagcaggttcctggctccatggcattcatgaggggttactgggttggaaggtgaacatctagg

SEQ ID NO: 43043 - DNA, 79 bp, Homo sapiens
ggttgcagcaggttcctggctccatggcattcatgaggggttactgggttggaaggtgaacatctagggccagcacatc

SEQ ID NO: 43044 - DNA, 78 bp, Homo sapiens
aggttcctggctccatggcattcatgaggggttactgggttggaaggtgaacatctagggccagcacatcctggcaga

SEQ ID NO: 43045 - DNA, 80 bp, Homo sapiens
attcatgaggggttactgggttggaaggtgaacatctagggccagcacatcctggcagagtctctgctgcacgcatttac

SEQ ID NO: 43046 - DNA, 81 bp, Homo sapiens
ttactgggttggaaggtgaacatctagggccagcacatcctggcagagtctctgctgcacgcatttacggtgagagaccca

SEQ ID NO: 43047 - DNA, 87 bp, Homo sapiens
aacatctagggccagcacatcctggcagagtctctgctgcacgcatttacggtgagagacccagcagagcctggatgagtcacctgc

SEQ ID NO: 43048 - DNA, 86 bp, Homo sapiens
cacatcctggcagagtctctgctgcacgcatttacggtgagagacccagcagagcctggatgagtcacctgccacccacttctgaa

SEQ ID NO: 43049 - DNA, 84 bp, Homo sapiens
ctggcagagtctctgctgcacgcatttacggtgagagacccagcagagcctggatgagtcacctgccacccacttctgaaagtg

SEQ ID NO: 43050 - DNA, 81 bp, Homo sapiens
tctctgctgcacgcatttacggtgagagacccagcagagcctggatgagtcacctgccacccacttctgaaagtggccggg

SEQ ID NO: 43051 - DNA, 78 bp, Homo sapiens
acgcatttacggtgagagacccagcagagcctggatgagtcacctgccacccacttctgaaagtggccggggcatcta

SEQ ID NO: 43052 - DNA, 75 bp, Homo sapiens
atgagtcacctgccacccacttctgaaagtggccggggcatctagcgggtggcacctgccggccgccgagccgga

SEQ ID NO: 43053 - DNA, 74 bp, Homo sapiens
tgccacccacttctgaaagtggccggggcatctagcgggtggcacctgccggccgccgagccggacagggacgc

SEQ ID NO: 43054 - DNA, 74 bp, Homo sapiens
ttctgaaagtggccggggcatctagcgggtggcacctgccggccgccgagccggacagggacgctggatcctcc

SEQ ID NO: 43055 - DNA, 73 bp, Homo sapiens
aagtggccggggcatctagcgggtggcacctgccggccgccgagccggacagggacgctggatcctcctggga

SEQ ID NO: 43056 - DNA, 76 bp, Homo sapiens
gccgccgagccggacagggacgctggatcctcctgggatggcttcggctcccactaggcagatgtgggcttcctaa

SEQ ID NO: 43057 - DNA, 74 bp, Homo sapiens
agccggacagggacgctggatcctcctgggatggcttcggctcccactaggcagatgtgggcttcctaacgttg

SEQ ID NO: 43058 - DNA, 74 bp, Homo sapiens
agggacgctggatcctcctgggatggcttcggctcccactaggcagatgtgggcttcctaacgttgggcagccc

SEQ ID NO: 43059 - DNA, 74 bp, Homo sapiens
atcctcctgggatggcttcggctcccactaggcagatgtgggcttcctaacgttgggcagccccaacgaatctg

SEQ ID NO: 43060 - DNA, 73 bp, Homo sapiens
atggcttcggctcccactaggcagatgtgggcttcctaacgttgggcagccccaacgaatctgggggaccaca

SEQ ID NO: 43061 - DNA, 74 bp, Homo sapiens
ctcccactaggcagatgtgggcttcctaacgttgggcagccccaacgaatctgggggaccacactggtcacaca

SEQ ID NO: 43062 - DNA, 73 bp, Homo sapiens
aggcagatgtgggcttcctaacgttgggcagccccaacgaatctgggggaccacactggtcacacacccctca

SEQ ID NO: 43063 - DNA, 71 bp, Homo sapiens
gggcttcctaacgttgggcagccccaacgaatctgggggaccacactggtcacacacccctcagggatctg

SEQ ID NO: 43064 - DNA, 74 bp, Homo sapiens
ttgggcagccccaacgaatctgggggaccacactggtcacacacccctcagggatctgtgggagcgacgtcgtg

SEQ ID NO: 43065 - DNA, 75 bp, Homo sapiens
atctgggggaccacactggtcacacacccctcagggatctgtgggagcgacgtcgtgtggacagatgtccccttg

SEQ ID NO: 43066 - DNA, 75 bp, Homo sapiens
acacacccctcagggatctgtgggagcgacgtcgtgtggacagatgtccccttggggacaccagtggctctgagg

SEQ ID NO: 43067 - DNA, 76 bp, Homo sapiens
agggatctgtgggagcgacgtcgtgtggacagatgtccccttggggacaccagtggctctgagggtggtgactcaa

SEQ ID NO: 43068 - DNA, 77 bp, Homo sapiens
gtgggagcgacgtcgtgtggacagatgtccccttggggacaccagtggctctgagggtggtgactcaaccaggagca

SEQ ID NO: 43069 - DNA, 74 bp, Homo sapiens
cgtcgtgtggacagatgtccccttggggacaccagtggctctgagggtggtgactcaaccaggagcagggaagg

SEQ ID NO: 43070 - DNA, 80 bp, Homo sapiens
gggacaccagtggctctgagggtggtgactcaaccaggagcagggaaggggtgcttgtgctcctgagctgaggcgctgtc

SEQ ID NO: 43071 - DNA, 83 bp, Homo sapiens
tggctctgagggtggtgactcaaccaggagcagggaaggggtgcttgtgctcctgagctgaggcgctgtctgagcgaaagatg

SEQ ID NO: 43072 - DNA, 79 bp, Homo sapiens
actcaaccaggagcagggaaggggtgcttgtgctcctgagctgaggcgctgtctgagcgaaagatgtttagagccccaa

SEQ ID NO: 43073 - DNA, 78 bp, Homo sapiens
cagggaaggggtgcttgtgctcctgagctgaggcgctgtctgagcgaaagatgtttagagccccaagtccttagagcc

SEQ ID NO: 43074 - DNA, 84 bp, Homo sapiens
gtgcttgtgctcctgagctgaggcgctgtctgagcgaaagatgtttagagccccaagtccttagagccgcacctgcaaaatgca

SEQ ID NO: 43075 - DNA, 80 bp, Homo sapiens
ctcctgagctgaggcgctgtctgagcgaaagatgtttagagccccaagtccttagagccgcacctgcaaaatgcaaattg

SEQ ID NO: 43076 - DNA, 83 bp, Homo sapiens
agctgaggcgctgtctgagcgaaagatgtttagagccccaagtccttagagccgcacctgcaaaatgcaaattgtgatgatga

SEQ ID NO: 43077 - DNA, 83 bp, Homo sapiens
tgtctgagcgaaagatgtttagagccccaagtccttagagccgcacctgcaaaatgcaaattgtgatgatgatgtcacagttg

SEQ ID NO: 43078 - DNA, 81 bp, Homo sapiens
atgtttagagccccaagtccttagagccgcacctgcaaaatgcaaattgtgatgatgatgtcacagttgtgcggattagaa

SEQ ID NO: 43079 - DNA, 82 bp, Homo sapiens
tagagccccaagtccttagagccgcacctgcaaaatgcaaattgtgatgatgatgtcacagttgtgcggattagaaggatgg

SEQ ID NO: 43080 - DNA, 82 bp, Homo sapiens
ttagagccgcacctgcaaaatgcaaattgtgatgatgatgtcacagttgtgcggattagaaggatgggtcgagcgaaagaac

SEQ ID NO: 43081 - DNA, 79 bp, Homo sapiens
acctgcaaaatgcaaattgtgatgatgatgtcacagttgtgcggattagaaggatgggtcgagcgaaagaactttggaa

SEQ ID NO: 43082 - DNA, 77 bp, Homo sapiens
tgtgatgatgatgtcacagttgtgcggattagaaggatgggtcgagcgaaagaactttggaagctttaaagtgattt

SEQ ID NO: 43083 - DNA, 73 bp, Homo sapiens
atgtcacagttgtgcggattagaaggatgggtcgagcgaaagaactttggaagctttaaagtgattttcttca

SEQ ID NO: 43084 - DNA, 71 bp, Homo sapiens
gttgtgcggattagaaggatgggtcgagcgaaagaactttggaagctttaaagtgattttcttcatcttta

SEQ ID NO: 43085 - DNA, 66 bp, Homo sapiens
gggtcgagcgaaagaactttggaagctttaaagtgattttcttcatctttaagtcttttttccttc

SEQ ID NO: 43086 - DNA, 66 bp, Homo sapiens
actttggaagctttaaagtgattttcttcatctttaagtcttttttccttctgcctctttggttgg

SEQ ID NO: 43087 - DNA, 69 bp, Homo sapiens
ttcatctttaagtcttttttccttctgcctctttggttgggaattgtgcccaacagaaactgtgggagt

SEQ ID NO: 43088 - DNA, 74 bp, Homo sapiens
ttctgcctctttggttgggaattgtgcccaacagaaactgtgggagttcttaaggagcgtgtgcagtggtgacg

SEQ ID NO: 43089 - DNA, 73 bp, Homo sapiens
tctttggttgggaattgtgcccaacagaaactgtgggagttcttaaggagcgtgtgcagtggtgacgggacca

SEQ ID NO: 43090 - DNA, 77 bp, Homo sapiens
agaaactgtgggagttcttaaggagcgtgtgcagtggtgacgggaccacggcccctctgcgtgcttgcatctaatgc

SEQ ID NO: 43091 - DNA, 81 bp, Homo sapiens
tgggagttcttaaggagcgtgtgcagtggtgacgggaccacggcccctctgcgtgcttgcatctaatgctggaagcatgtc

SEQ ID NO: 43092 - DNA, 87 bp, Homo sapiens
tcttaaggagcgtgtgcagtggtgacgggaccacggcccctctgcgtgcttgcatctaatgctggaagcatgtctgcaggcatgatg

SEQ ID NO: 43093 - DNA, 89 bp, Homo sapiens
tgcagtggtgacgggaccacggcccctctgcgtgcttgcatctaatgctggaagcatgtctgcaggcatgatgggatgtgacgccgctc

SEQ ID NO: 43094 - DNA, 89 bp, Homo sapiens
tgacgggaccacggcccctctgcgtgcttgcatctaatgctggaagcatgtctgcaggcatgatgggatgtgacgccgctctccctgca

SEQ ID NO: 43095 - DNA, 91 bp, Homo sapiens
acggcccctctgcgtgcttgcatctaatgctggaagcatgtctgcaggcatgatgggatgtgacgccgctctccctgcaatgctagagcga

SEQ ID NO: 43096 - DNA, 91 bp, Homo sapiens
atctaatgctggaagcatgtctgcaggcatgatgggatgtgacgccgctctccctgcaatgctagagcgaggcacgcagccccctgatcca

SEQ ID NO: 43097 - DNA, 88 bp, Homo sapiens
aagcatgtctgcaggcatgatgggatgtgacgccgctctccctgcaatgctagagcgaggcacgcagccccctgatccaggccggcac

SEQ ID NO: 43098 - DNA, 87 bp, Homo sapiens
tgcaggcatgatgggatgtgacgccgctctccctgcaatgctagagcgaggcacgcagccccctgatccaggccggcacccacgaga

SEQ ID NO: 43099 - DNA, 82 bp, Homo sapiens
atgatgggatgtgacgccgctctccctgcaatgctagagcgaggcacgcagccccctgatccaggccggcacccacgagaag

SEQ ID NO: 43100 - DNA, 83 bp, Homo sapiens
tgtgacgccgctctccctgcaatgctagagcgaggcacgcagccccctgatccaggccggcacccacgagaagggtgcactgc

SEQ ID NO: 43101 - DNA, 80 bp, Homo sapiens
cctgcaatgctagagcgaggcacgcagccccctgatccaggccggcacccacgagaagggtgcactgcgggacaggaaca

SEQ ID NO: 43102 - DNA, 78 bp, Homo sapiens
aatgctagagcgaggcacgcagccccctgatccaggccggcacccacgagaagggtgcactgcgggacaggaacatcc

SEQ ID NO: 43103 - DNA, 73 bp, Homo sapiens
aggcacgcagccccctgatccaggccggcacccacgagaagggtgcactgcgggacaggaacatcccccggaa

SEQ ID NO: 43104 - DNA, 72 bp, Homo sapiens
tccaggccggcacccacgagaagggtgcactgcgggacaggaacatcccccggaactgcgggaggccccaga

SEQ ID NO: 43105 - DNA, 70 bp, Homo sapiens
acccacgagaagggtgcactgcgggacaggaacatcccccggaactgcgggaggccccagagctggggac

SEQ ID NO: 43106 - DNA, 69 bp, Homo sapiens
aagggtgcactgcgggacaggaacatcccccggaactgcgggaggccccagagctggggacgcggcccc

SEQ ID NO: 43107 - DNA, 69 bp, Homo sapiens
gacaggaacatcccccggaactgcgggaggccccagagctggggacgcggccccgctggaggccggctt

SEQ ID NO: 43108 - DNA, 69 bp, Homo sapiens
aacatcccccggaactgcgggaggccccagagctggggacgcggccccgctggaggccggctttcatct

SEQ ID NO: 43109 - DNA, 71 bp, Homo sapiens
cggaactgcgggaggccccagagctggggacgcggccccgctggaggccggctttcatcttcctctgggaa

SEQ ID NO: 43110 - DNA, 70 bp, Homo sapiens
ggaggccccagagctggggacgcggccccgctggaggccggctttcatcttcctctgggaaggtggaggg

SEQ ID NO: 43111 - DNA, 69 bp, Homo sapiens
tggggacgcggccccgctggaggccggctttcatcttcctctgggaaggtggaggggcttggccccgac

SEQ ID NO: 43112 - DNA, 67 bp, Homo sapiens
ccccgctggaggccggctttcatcttcctctgggaaggtggaggggcttggccccgactgggaaacc

SEQ ID NO: 43113 - DNA, 71 bp, Homo sapiens
tttcatcttcctctgggaaggtggaggggcttggccccgactgggaaacctcaaatgttgccctctgagcc

SEQ ID NO: 43114 - DNA, 71 bp, Homo sapiens
tgggaaggtggaggggcttggccccgactgggaaacctcaaatgttgccctctgagccgtctgtgtgtgtt

SEQ ID NO: 43115 - DNA, 72 bp, Homo sapiens
ttggccccgactgggaaacctcaaatgttgccctctgagccgtctgtgtgtgtttttatgtatttgttcaaa

SEQ ID NO: 43116 - DNA, 71 bp, Homo sapiens
ggaaacctcaaatgttgccctctgagccgtctgtgtgtgtttttatgtatttgttcaaacaattacatttt

SEQ ID NO: 43117 - DNA, 73 bp, Homo sapiens
cctcaaatgttgccctctgagccgtctgtgtgtgtttttatgtatttgttcaaacaattacatttttaatgta

SEQ ID NO: 43118 - DNA, 69 bp, Homo sapiens
gccgtctgtgtgtgtttttatgtatttgttcaaacaattacatttttaatgtattttacgtatttatac

SEQ ID NO: 43119 - DNA, 68 bp, Homo sapiens
ttttatgtatttgttcaaacaattacatttttaatgtattttacgtatttatacctaactgaatgtag

SEQ ID NO: 43120 - DNA, 68 bp, Homo sapiens
ttgttcaaacaattacatttttaatgtattttacgtatttatacctaactgaatgtaggaaatttcag

SEQ ID NO: 43121 - DNA, 68 bp, Homo sapiens
caattacatttttaatgtattttacgtatttatacctaactgaatgtaggaaatttcagttaggtgta

SEQ ID NO: 43122 - DNA, 69 bp, Homo sapiens
ttaatgtattttacgtatttatacctaactgaatgtaggaaatttcagttaggtgtaatttctgcccgc

SEQ ID NO: 43123 - DNA, 69 bp, Homo sapiens
ttacgtatttatacctaactgaatgtaggaaatttcagttaggtgtaatttctgcccgctgtttttaca

SEQ ID NO: 43124 - DNA, 74 bp, Homo sapiens
tttatacctaactgaatgtaggaaatttcagttaggtgtaatttctgcccgctgtttttacacagctctgcata

SEQ ID NO: 43125 - DNA, 74 bp, Homo sapiens
actgaatgtaggaaatttcagttaggtgtaatttctgcccgctgtttttacacagctctgcataatagtcattt

SEQ ID NO: 43126 - DNA, 71 bp, Homo sapiens
aggaaatttcagttaggtgtaatttctgcccgctgtttttacacagctctgcataatagtcattttacttt

SEQ ID NO: 43127 - DNA, 76 bp, Homo sapiens
agttaggtgtaatttctgcccgctgtttttacacagctctgcataatagtcattttacttttatgcagcagtttca

SEQ ID NO: 43128 - DNA, 78 bp, Homo sapiens
taatttctgcccgctgtttttacacagctctgcataatagtcattttacttttatgcagcagtttcatcaggaaaata

SEQ ID NO: 43129 - DNA, 77 bp, Homo sapiens
tgtttttacacagctctgcataatagtcattttacttttatgcagcagtttcatcaggaaaataggaaggtgaagga

SEQ ID NO: 43130 - DNA, 78 bp, Homo sapiens
tacacagctctgcataatagtcattttacttttatgcagcagtttcatcaggaaaataggaaggtgaaggaagtctct

SEQ ID NO: 43131 - DNA, 73 bp, Homo sapiens
ataatagtcattttacttttatgcagcagtttcatcaggaaaataggaaggtgaaggaagtctcttgccttcg

SEQ ID NO: 43132 - DNA, 73 bp, Homo sapiens
attttacttttatgcagcagtttcatcaggaaaataggaaggtgaaggaagtctcttgccttcggccacacaa

SEQ ID NO: 43133 - DNA, 75 bp, Homo sapiens
ttcatcaggaaaataggaaggtgaaggaagtctcttgccttcggccacacaaccttggcattgacgaccttctga

SEQ ID NO: 43134 - DNA, 71 bp, Homo sapiens
aaataggaaggtgaaggaagtctcttgccttcggccacacaaccttggcattgacgaccttctgaccgtaa

SEQ ID NO: 43135 - DNA, 77 bp, Homo sapiens
agtctcttgccttcggccacacaaccttggcattgacgaccttctgaccgtaacatggtggctgcagctcaccccta

SEQ ID NO: 43136 - DNA, 79 bp, Homo sapiens
cttcggccacacaaccttggcattgacgaccttctgaccgtaacatggtggctgcagctcacccctagccctgcacatc

SEQ ID NO: 43137 - DNA, 79 bp, Homo sapiens
attgacgaccttctgaccgtaacatggtggctgcagctcacccctagccctgcacatcgtggcctctgccccacctcag

SEQ ID NO: 43138 - DNA, 78 bp, Homo sapiens
ccttctgaccgtaacatggtggctgcagctcacccctagccctgcacatcgtggcctctgccccacctcagtgggccc

SEQ ID NO: 43139 - DNA, 79 bp, Homo sapiens
taacatggtggctgcagctcacccctagccctgcacatcgtggcctctgccccacctcagtgggccccagtcccaccga

SEQ ID NO: 43140 - DNA, 78 bp, Homo sapiens
ctgcagctcacccctagccctgcacatcgtggcctctgccccacctcagtgggccccagtcccaccgacgtgcagccc

SEQ ID NO: 43141 - DNA, 74 bp, Homo sapiens
acatcgtggcctctgccccacctcagtgggccccagtcccaccgacgtgcagcccccagcaccttccctgtctc

SEQ ID NO: 43142 - DNA, 72 bp, Homo sapiens
ctctgccccacctcagtgggccccagtcccaccgacgtgcagcccccagcaccttccctgtctccccttgag

SEQ ID NO: 43143 - DNA, 70 bp, Homo sapiens
acctcagtgggccccagtcccaccgacgtgcagcccccagcaccttccctgtctccccttgaggaaattc

SEQ ID NO: 43144 - DNA, 69 bp, Homo sapiens
ccccagtcccaccgacgtgcagcccccagcaccttccctgtctccccttgaggaaattctgtttattct

SEQ ID NO: 43145 - DNA, 69 bp, Homo sapiens
agcccccagcaccttccctgtctccccttgaggaaattctgtttattcttccaggactcgttcaggcct

SEQ ID NO: 43146 - DNA, 67 bp, Homo sapiens
accttccctgtctccccttgaggaaattctgtttattcttccaggactcgttcaggccttccttctt

SEQ ID NO: 43147 - DNA, 73 bp, Homo sapiens
tctccccttgaggaaattctgtttattcttccaggactcgttcaggccttccttctttctcagggtgcaatga

SEQ ID NO: 43148 - DNA, 73 bp, Homo sapiens
ttgaggaaattctgtttattcttccaggactcgttcaggccttccttctttctcagggtgcaatgaggccttc

SEQ ID NO: 43149 - DNA, 73 bp, Homo sapiens
attctgtttattcttccaggactcgttcaggccttccttctttctcagggtgcaatgaggccttccttgtgtg

SEQ ID NO: 43150 - DNA, 76 bp, Homo sapiens
ttcttccaggactcgttcaggccttccttctttctcagggtgcaatgaggccttccttgtgtgtgcacccagagcc

SEQ ID NO: 43151 - DNA, 79 bp, Homo sapiens
ttcaggccttccttctttctcagggtgcaatgaggccttccttgtgtgtgcacccagagccctggcttatgctttgcta

SEQ ID NO: 43152 - DNA, 79 bp, Homo sapiens
ttccttctttctcagggtgcaatgaggccttccttgtgtgtgcacccagagccctggcttatgctttgctatggtggcc

SEQ ID NO: 43153 - DNA, 80 bp, Homo sapiens
tttctcagggtgcaatgaggccttccttgtgtgtgcacccagagccctggcttatgctttgctatggtggccgtcagacg

SEQ ID NO: 43154 - DNA, 80 bp, Homo sapiens
tgaggccttccttgtgtgtgcacccagagccctggcttatgctttgctatggtggccgtcagacggggtcagctgttcaa

SEQ ID NO: 43155 - DNA, 76 bp, Homo sapiens
cacccagagccctggcttatgctttgctatggtggccgtcagacggggtcagctgttcaagagggaacctccctca

SEQ ID NO: 43156 - DNA, 77 bp, Homo sapiens
cctggcttatgctttgctatggtggccgtcagacggggtcagctgttcaagagggaacctccctcatctgtctgttc

SEQ ID NO: 43157 - DNA, 77 bp, Homo sapiens
cttatgctttgctatggtggccgtcagacggggtcagctgttcaagagggaacctccctcatctgtctgttcctcca

SEQ ID NO: 43158 - DNA, 78 bp, Homo sapiens
ctatggtggccgtcagacggggtcagctgttcaagagggaacctccctcatctgtctgttcctccagcacactgggca

SEQ ID NO: 43159 - DNA, 80 bp, Homo sapiens
agacggggtcagctgttcaagagggaacctccctcatctgtctgttcctccagcacactgggcagctacaccatgcgatg

SEQ ID NO: 43160 - DNA, 81 bp, Homo sapiens
agctgttcaagagggaacctccctcatctgtctgttcctccagcacactgggcagctacaccatgcgatgggctccgtcat

SEQ ID NO: 43161 - DNA, 79 bp, Homo sapiens
aagagggaacctccctcatctgtctgttcctccagcacactgggcagctacaccatgcgatgggctccgtcattattta

SEQ ID NO: 43162 - DNA, 83 bp, Homo sapiens
tccctcatctgtctgttcctccagcacactgggcagctacaccatgcgatgggctccgtcattatttagtcagtcgaaccaga

SEQ ID NO: 43163 - DNA, 83 bp, Homo sapiens
tctgtctgttcctccagcacactgggcagctacaccatgcgatgggctccgtcattatttagtcagtcgaaccagagcaatta

SEQ ID NO: 43164 - DNA, 83 bp, Homo sapiens
tccagcacactgggcagctacaccatgcgatgggctccgtcattatttagtcagtcgaaccagagcaattaggcagaagagga

SEQ ID NO: 43165 - DNA, 79 bp, Homo sapiens
ggcagctacaccatgcgatgggctccgtcattatttagtcagtcgaaccagagcaattaggcagaagaggagattttta

SEQ ID NO: 43166 - DNA, 76 bp, Homo sapiens
tacaccatgcgatgggctccgtcattatttagtcagtcgaaccagagcaattaggcagaagaggagatttttaaat

SEQ ID NO: 43167 - DNA, 76 bp, Homo sapiens
ggctccgtcattatttagtcagtcgaaccagagcaattaggcagaagaggagatttttaaattgccacagcctgta

SEQ ID NO: 43168 - DNA, 74 bp, Homo sapiens
attatttagtcagtcgaaccagagcaattaggcagaagaggagatttttaaattgccacagcctgtagaaagtc

SEQ ID NO: 43169 - DNA, 76 bp, Homo sapiens
tagtcagtcgaaccagagcaattaggcagaagaggagatttttaaattgccacagcctgtagaaagtccaaataga

SEQ ID NO: 43170 - DNA, 72 bp, Homo sapiens
agagcaattaggcagaagaggagatttttaaattgccacagcctgtagaaagtccaaatagaagtaagcttt

SEQ ID NO: 43171 - DNA, 70 bp, Homo sapiens
agatttttaaattgccacagcctgtagaaagtccaaatagaagtaagcttttggttcagacccaggctaa

SEQ ID NO: 43172 - DNA, 75 bp, Homo sapiens
tttaaattgccacagcctgtagaaagtccaaatagaagtaagcttttggttcagacccaggctaatgcagccatg

SEQ ID NO: 43173 - DNA, 74 bp, Homo sapiens
agaaagtccaaatagaagtaagcttttggttcagacccaggctaatgcagccatggttttctgcacagctttct

SEQ ID NO: 43174 - DNA, 79 bp, Homo sapiens
atagaagtaagcttttggttcagacccaggctaatgcagccatggttttctgcacagctttcttctgggagcatctcaa

SEQ ID NO: 43175 - DNA, 80 bp, Homo sapiens
cccaggctaatgcagccatggttttctgcacagctttcttctgggagcatctcaactttcttttaggcaatcgatgataa

SEQ ID NO: 43176 - DNA, 82 bp, Homo sapiens
taatgcagccatggttttctgcacagctttcttctgggagcatctcaactttcttttaggcaatcgatgataaaatgccaga

SEQ ID NO: 43177 - DNA, 76 bp, Homo sapiens
atggttttctgcacagctttcttctgggagcatctcaactttcttttaggcaatcgatgataaaatgccagaaacg

SEQ ID NO: 43178 - DNA, 76 bp, Homo sapiens
cagctttcttctgggagcatctcaactttcttttaggcaatcgatgataaaatgccagaaacgtgagacgcgggaa

SEQ ID NO: 43179 - DNA, 75 bp, Homo sapiens
ttcttctgggagcatctcaactttcttttaggcaatcgatgataaaatgccagaaacgtgagacgcgggaagggc

SEQ ID NO: 43180 - DNA, 72 bp, Homo sapiens
atctcaactttcttttaggcaatcgatgataaaatgccagaaacgtgagacgcgggaagggcggggaggtgc

SEQ ID NO: 43181 - DNA, 78 bp, Homo sapiens
aatcgatgataaaatgccagaaacgtgagacgcgggaagggcggggaggtgcctgttttgctcatgtctgcgcctgca

SEQ ID NO: 43182 - DNA, 77 bp, Homo sapiens
ataaaatgccagaaacgtgagacgcgggaagggcggggaggtgcctgttttgctcatgtctgcgcctgcagcaccag

SEQ ID NO: 43183 - DNA, 78 bp, Homo sapiens
agaaacgtgagacgcgggaagggcggggaggtgcctgttttgctcatgtctgcgcctgcagcaccaggctgcgtatcc

SEQ ID NO: 43184 - DNA, 77 bp, Homo sapiens
agacgcgggaagggcggggaggtgcctgttttgctcatgtctgcgcctgcagcaccaggctgcgtatcccgtgggga

SEQ ID NO: 43185 - DNA, 81 bp, Homo sapiens
ggggaggtgcctgttttgctcatgtctgcgcctgcagcaccaggctgcgtatcccgtggggacgctggagcgtccgtgaca

SEQ ID NO: 43186 - DNA, 83 bp, Homo sapiens
ctgttttgctcatgtctgcgcctgcagcaccaggctgcgtatcccgtggggacgctggagcgtccgtgacactcatgaataag

SEQ ID NO: 43187 - DNA, 86 bp, Homo sapiens
ttgctcatgtctgcgcctgcagcaccaggctgcgtatcccgtggggacgctggagcgtccgtgacactcatgaataagtcagtgaa

SEQ ID NO: 43188 - DNA, 78 bp, Homo sapiens
agcaccaggctgcgtatcccgtggggacgctggagcgtccgtgacactcatgaataagtcagtgaacccagcacctcc

SEQ ID NO: 43189 - DNA, 77 bp, Homo sapiens
tgcgtatcccgtggggacgctggagcgtccgtgacactcatgaataagtcagtgaacccagcacctccctttccaga

SEQ ID NO: 43190 - DNA, 74 bp, Homo sapiens
ggacgctggagcgtccgtgacactcatgaataagtcagtgaacccagcacctccctttccagagggggaaccaa

SEQ ID NO: 43191 - DNA, 71 bp, Homo sapiens
acactcatgaataagtcagtgaacccagcacctccctttccagagggggaaccaaggaccactaggggcaa

SEQ ID NO: 43192 - DNA, 69 bp, Homo sapiens
aataagtcagtgaacccagcacctccctttccagagggggaaccaaggaccactaggggcaagtccagc

SEQ ID NO: 43193 - DNA, 70 bp, Homo sapiens
aacccagcacctccctttccagagggggaaccaaggaccactaggggcaagtccagcccagcagttcaga

SEQ ID NO: 43194 - DNA, 72 bp, Homo sapiens
tccctttccagagggggaaccaaggaccactaggggcaagtccagcccagcagttcagagaacgctctggaa

SEQ ID NO: 43195 - DNA, 74 bp, Homo sapiens
ttccagagggggaaccaaggaccactaggggcaagtccagcccagcagttcagagaacgctctggaaggactca

SEQ ID NO: 43196 - DNA, 79 bp, Homo sapiens
aaccaaggaccactaggggcaagtccagcccagcagttcagagaacgctctggaaggactcagcttgccagctctgctc

SEQ ID NO: 43197 - DNA, 83 bp, Homo sapiens
accactaggggcaagtccagcccagcagttcagagaacgctctggaaggactcagcttgccagctctgctctgctctgcctgg

SEQ ID NO: 43198 - DNA, 82 bp, Homo sapiens
aagtccagcccagcagttcagagaacgctctggaaggactcagcttgccagctctgctctgctctgcctggggaggtggagg

SEQ ID NO: 43199 - DNA, 79 bp, Homo sapiens
agagaacgctctggaaggactcagcttgccagctctgctctgctctgcctggggaggtggaggggggatgcgagggtaa

SEQ ID NO: 43200 - DNA, 78 bp, Homo sapiens
tcagcttgccagctctgctctgctctgcctggggaggtggaggggggatgcgagggtaagggctccggtccaaggcca

SEQ ID NO: 43201 - DNA, 73 bp, Homo sapiens
tctgctctgctctgcctggggaggtggaggggggatgcgagggtaagggctccggtccaaggccaccccgaga

SEQ ID NO: 43202 - DNA, 67 bp, Homo sapiens
aggtggaggggggatgcgagggtaagggctccggtccaaggccaccccgagaacccttgtgctgccc

SEQ ID NO: 43203 - DNA, 69 bp, Homo sapiens
gggatgcgagggtaagggctccggtccaaggccaccccgagaacccttgtgctgcccttgggtctggtg

SEQ ID NO: 43204 - DNA, 70 bp, Homo sapiens
aaggccaccccgagaacccttgtgctgcccttgggtctggtggccacgtccccctctgccccctcgcaca

SEQ ID NO: 43205 - DNA, 74 bp, Homo sapiens
agaacccttgtgctgcccttgggtctggtggccacgtccccctctgccccctcgcacagccactgggagacaga

SEQ ID NO: 43206 - DNA, 75 bp, Homo sapiens
cttgggtctggtggccacgtccccctctgccccctcgcacagccactgggagacagagctcaggggtgtcggcca

SEQ ID NO: 43207 - DNA, 77 bp, Homo sapiens
gtggccacgtccccctctgccccctcgcacagccactgggagacagagctcaggggtgtcggccagcttcctgctaa

SEQ ID NO: 43208 - DNA, 77 bp, Homo sapiens
ctctgccccctcgcacagccactgggagacagagctcaggggtgtcggccagcttcctgctaactgcccggactttg

SEQ ID NO: 43209 - DNA, 78 bp, Homo sapiens
ctcgcacagccactgggagacagagctcaggggtgtcggccagcttcctgctaactgcccggactttgttcagaccta

SEQ ID NO: 43210 - DNA, 74 bp, Homo sapiens
actgggagacagagctcaggggtgtcggccagcttcctgctaactgcccggactttgttcagacctacctcttc

SEQ ID NO: 43211 - DNA, 72 bp, Homo sapiens
agagctcaggggtgtcggccagcttcctgctaactgcccggactttgttcagacctacctcttctcgtaaac

SEQ ID NO: 43212 - DNA, 69 bp, Homo sapiens
ccagcttcctgctaactgcccggactttgttcagacctacctcttctcgtaaacctaaagtatgtattt

SEQ ID NO: 43213 - DNA, 76 bp, Homo sapiens
ttcagacctacctcttctcgtaaacctaaagtatgtattttggaagggcacgtgcttgatgtctgagctctcagaa

SEQ ID NO: 43214 - DNA, 82 bp, Homo sapiens
taaacctaaagtatgtattttggaagggcacgtgcttgatgtctgagctctcagaatgtctcgtctgatctgctgtggagga

SEQ ID NO: 43215 - DNA, 83 bp, Homo sapiens
tgtattttggaagggcacgtgcttgatgtctgagctctcagaatgtctcgtctgatctgctgtggaggaaagttgccttagaa

SEQ ID NO: 43216 - DNA, 82 bp, Homo sapiens
tttggaagggcacgtgcttgatgtctgagctctcagaatgtctcgtctgatctgctgtggaggaaagttgccttagaagaag

SEQ ID NO: 43217 - DNA, 84 bp, Homo sapiens
acgtgcttgatgtctgagctctcagaatgtctcgtctgatctgctgtggaggaaagttgccttagaagaaggtgccagcaggtg

SEQ ID NO: 43218 - DNA, 80 bp, Homo sapiens
agaatgtctcgtctgatctgctgtggaggaaagttgccttagaagaaggtgccagcaggtgggagaaccatctctctgta

SEQ ID NO: 43219 - DNA, 80 bp, Homo sapiens
tctcgtctgatctgctgtggaggaaagttgccttagaagaaggtgccagcaggtgggagaaccatctctctgtaactcac

SEQ ID NO: 43220 - DNA, 75 bp, Homo sapiens
tgtggaggaaagttgccttagaagaaggtgccagcaggtgggagaaccatctctctgtaactcacgcagggaccg

SEQ ID NO: 43221 - DNA, 74 bp, Homo sapiens
aggaaagttgccttagaagaaggtgccagcaggtgggagaaccatctctctgtaactcacgcagggaccgtgcc

SEQ ID NO: 43222 - DNA, 75 bp, Homo sapiens
ttagaagaaggtgccagcaggtgggagaaccatctctctgtaactcacgcagggaccgtgccggtctgggaccca

SEQ ID NO: 43223 - DNA, 74 bp, Homo sapiens
ccagcaggtgggagaaccatctctctgtaactcacgcagggaccgtgccggtctgggacccacctgagaagaaa

SEQ ID NO: 43224 - DNA, 71 bp, Homo sapiens
aggtgggagaaccatctctctgtaactcacgcagggaccgtgccggtctgggacccacctgagaagaaagg

SEQ ID NO: 43225 - DNA, 75 bp, Homo sapiens
atctctctgtaactcacgcagggaccgtgccggtctgggacccacctgagaagaaaggtgccagcaggtgggaga

SEQ ID NO: 43226 - DNA, 74 bp, Homo sapiens
tgtaactcacgcagggaccgtgccggtctgggacccacctgagaagaaaggtgccagcaggtgggagaaccatc

SEQ ID NO: 43227 - DNA, 75 bp, Homo sapiens
agggaccgtgccggtctgggacccacctgagaagaaaggtgccagcaggtgggagaaccatctctctgtgactca

SEQ ID NO: 43228 - DNA, 77 bp, Homo sapiens
gtctgggacccacctgagaagaaaggtgccagcaggtgggagaaccatctctctgtgactcacgcagggaccgtgcc

SEQ ID NO: 43229 - DNA, 75 bp, Homo sapiens
agaagaaaggtgccagcaggtgggagaaccatctctctgtgactcacgcagggaccgtgccggtctgggacccac

SEQ ID NO: 43230 - DNA, 76 bp, Homo sapiens
agcaggtgggagaaccatctctctgtgactcacgcagggaccgtgccggtctgggacccacccaaggacgcactga

SEQ ID NO: 43231 - DNA, 76 bp, Homo sapiens
agaaccatctctctgtgactcacgcagggaccgtgccggtctgggacccacccaaggacgcactgacttctgtgga

SEQ ID NO: 43232 - DNA, 77 bp, Homo sapiens
tctctgtgactcacgcagggaccgtgccggtctgggacccacccaaggacgcactgacttctgtggactcgctctcc

SEQ ID NO: 43233 - DNA, 75 bp, Homo sapiens
tgactcacgcagggaccgtgccggtctgggacccacccaaggacgcactgacttctgtggactcgctctccggcc

SEQ ID NO: 43234 - DNA, 72 bp, Homo sapiens
agggaccgtgccggtctgggacccacccaaggacgcactgacttctgtggactcgctctccggcccgctgcc

SEQ ID NO: 43235 - DNA, 76 bp, Homo sapiens
acccaaggacgcactgacttctgtggactcgctctccggcccgctgccccagccctaccgcctcatcactcacatt

SEQ ID NO: 43236 - DNA, 78 bp, Homo sapiens
acgcactgacttctgtggactcgctctccggcccgctgccccagccctaccgcctcatcactcacatttaatgcaagg

SEQ ID NO: 43237 - DNA, 80 bp, Homo sapiens
ttctgtggactcgctctccggcccgctgccccagccctaccgcctcatcactcacatttaatgcaaggtggcatcggtga

SEQ ID NO: 43238 - DNA, 79 bp, Homo sapiens
actcgctctccggcccgctgccccagccctaccgcctcatcactcacatttaatgcaaggtggcatcggtgactgccaa

SEQ ID NO: 43239 - DNA, 81 bp, Homo sapiens
cgctgccccagccctaccgcctcatcactcacatttaatgcaaggtggcatcggtgactgccaagcgtgggctcaccagga

SEQ ID NO: 43240 - DNA, 79 bp, Homo sapiens
cccagccctaccgcctcatcactcacatttaatgcaaggtggcatcggtgactgccaagcgtgggctcaccaggaagcc

SEQ ID NO: 43241 - DNA, 81 bp, Homo sapiens
ctcatcactcacatttaatgcaaggtggcatcggtgactgccaagcgtgggctcaccaggaagcccccagttgacagctct

SEQ ID NO: 43242 - DNA, 78 bp, Homo sapiens
actcacatttaatgcaaggtggcatcggtgactgccaagcgtgggctcaccaggaagcccccagttgacagctcttcc

SEQ ID NO: 43243 - DNA, 79 bp, Homo sapiens
caaggtggcatcggtgactgccaagcgtgggctcaccaggaagcccccagttgacagctcttcctctgctgaaggataa

SEQ ID NO: 43244 - DNA, 76 bp, Homo sapiens
atcggtgactgccaagcgtgggctcaccaggaagcccccagttgacagctcttcctctgctgaaggataaaaacac

SEQ ID NO: 43245 - DNA, 74 bp, Homo sapiens
ccagttgacagctcttcctctgctgaaggataaaaacacccagactcgcagtgagggtgcccactgtttaaaaa

SEQ ID NO: 43246 - DNA, 71 bp, Homo sapiens
ctgaaggataaaaacacccagactcgcagtgagggtgcccactgtttaaaaaagaagctgcactttcctcc

SEQ ID NO: 43247 - DNA, 70 bp, Homo sapiens
ataaaaacacccagactcgcagtgagggtgcccactgtttaaaaaagaagctgcactttcctccgcaaaa

SEQ ID NO: 43248 - DNA, 74 bp, Homo sapiens
ccagactcgcagtgagggtgcccactgtttaaaaaagaagctgcactttcctccgcaaaagggcttggccagca

SEQ ID NO: 43249 - DNA, 73 bp, Homo sapiens
agtgagggtgcccactgtttaaaaaagaagctgcactttcctccgcaaaagggcttggccagcagcgtggtgc

SEQ ID NO: 43250 - DNA, 73 bp, Homo sapiens
tgtttaaaaaagaagctgcactttcctccgcaaaagggcttggccagcagcgtggtgcgccctggaccggctc

SEQ ID NO: 43251 - DNA, 74 bp, Homo sapiens
aaaaagaagctgcactttcctccgcaaaagggcttggccagcagcgtggtgcgccctggaccggctctgatggg

SEQ ID NO: 43252 - DNA, 73 bp, Homo sapiens
actttcctccgcaaaagggcttggccagcagcgtggtgcgccctggaccggctctgatggggcttccagggag

SEQ ID NO: 43253 - DNA, 73 bp, Homo sapiens
ctccgcaaaagggcttggccagcagcgtggtgcgccctggaccggctctgatggggcttccagggaggacccc

SEQ ID NO: 43254 - DNA, 75 bp, Homo sapiens
ttggccagcagcgtggtgcgccctggaccggctctgatggggcttccagggaggacccccagcgggcctgtggtg

SEQ ID NO: 43255 - DNA, 74 bp, Homo sapiens
agcagcgtggtgcgccctggaccggctctgatggggcttccagggaggacccccagcgggcctgtggtgtggag

SEQ ID NO: 43256 - DNA, 72 bp, Homo sapiens
cctggaccggctctgatggggcttccagggaggacccccagcgggcctgtggtgtggagggtcagaaggaga

SEQ ID NO: 43257 - DNA, 71 bp, Homo sapiens
accggctctgatggggcttccagggaggacccccagcgggcctgtggtgtggagggtcagaaggagaggga

SEQ ID NO: 43258 - DNA, 71 bp, Homo sapiens
gcttccagggaggacccccagcgggcctgtggtgtggagggtcagaaggagagggaggggcaggcggccac

SEQ ID NO: 43259 - DNA, 71 bp, Homo sapiens
aggacccccagcgggcctgtggtgtggagggtcagaaggagagggaggggcaggcggccaccactggtcca

SEQ ID NO: 43260 - DNA, 73 bp, Homo sapiens
agcgggcctgtggtgtggagggtcagaaggagagggaggggcaggcggccaccactggtccatggcctgaaag

SEQ ID NO: 43261 - DNA, 72 bp, Homo sapiens
ctgtggtgtggagggtcagaaggagagggaggggcaggcggccaccactggtccatggcctgaaaggtttgg

SEQ ID NO: 43262 - DNA, 71 bp, Homo sapiens
agggtcagaaggagagggaggggcaggcggccaccactggtccatggcctgaaaggtttgggcccgccagc

SEQ ID NO: 43263 - DNA, 69 bp, Homo sapiens
aaggagagggaggggcaggcggccaccactggtccatggcctgaaaggtttgggcccgccagcccccac

SEQ ID NO: 43264 - DNA, 71 bp, Homo sapiens
caggcggccaccactggtccatggcctgaaaggtttgggcccgccagcccccaccccccgccttctgctgc

SEQ ID NO: 43265 - DNA, 70 bp, Homo sapiens
ccaccactggtccatggcctgaaaggtttgggcccgccagcccccaccccccgccttctgctgctgtggg

SEQ ID NO: 43266 - DNA, 71 bp, Homo sapiens
ggtccatggcctgaaaggtttgggcccgccagcccccaccccccgccttctgctgctgtggggcctgatgg

SEQ ID NO: 43267 - DNA, 72 bp, Homo sapiens
tgaaaggtttgggcccgccagcccccaccccccgccttctgctgctgtggggcctgatgggaatgcgtccca

SEQ ID NO: 43268 - DNA, 75 bp, Homo sapiens
tgggcccgccagcccccaccccccgccttctgctgctgtggggcctgatgggaatgcgtcccacctgcgaatcca

SEQ ID NO: 43269 - DNA, 75 bp, Homo sapiens
ccaccccccgccttctgctgctgtggggcctgatgggaatgcgtcccacctgcgaatccagcgggtagcgttaga

SEQ ID NO: 43270 - DNA, 77 bp, Homo sapiens
ctgtggggcctgatgggaatgcgtcccacctgcgaatccagcgggtagcgttagagccttggcagatgggctggatt

SEQ ID NO: 43271 - DNA, 78 bp, Homo sapiens
tgatgggaatgcgtcccacctgcgaatccagcgggtagcgttagagccttggcagatgggctggatttggcttctctt

SEQ ID NO: 43272 - DNA, 75 bp, Homo sapiens
aatgcgtcccacctgcgaatccagcgggtagcgttagagccttggcagatgggctggatttggcttctctttggg

SEQ ID NO: 43273 - DNA, 77 bp, Homo sapiens
tgcgaatccagcgggtagcgttagagccttggcagatgggctggatttggcttctctttgggttgcgggtgacgata

SEQ ID NO: 43274 - DNA, 74 bp, Homo sapiens
atccagcgggtagcgttagagccttggcagatgggctggatttggcttctctttgggttgcgggtgacgatagg

SEQ ID NO: 43275 - DNA, 77 bp, Homo sapiens
tagcgttagagccttggcagatgggctggatttggcttctctttgggttgcgggtgacgataggtgtgcagcctggg

SEQ ID NO: 43276 - DNA, 81 bp, Homo sapiens
ttggcagatgggctggatttggcttctctttgggttgcgggtgacgataggtgtgcagcctggggcagagatggacacaca

SEQ ID NO: 43277 - DNA, 81 bp, Homo sapiens
ctggatttggcttctctttgggttgcgggtgacgataggtgtgcagcctggggcagagatggacacacagggccatgctga

SEQ ID NO: 43278 - DNA, 81 bp, Homo sapiens
tttggcttctctttgggttgcgggtgacgataggtgtgcagcctggggcagagatggacacacagggccatgctgacatcg

SEQ ID NO: 43279 - DNA, 79 bp, Homo sapiens
ctttgggttgcgggtgacgataggtgtgcagcctggggcagagatggacacacagggccatgctgacatcgggggaaga

SEQ ID NO: 43280 - DNA, 83 bp, Homo sapiens
ggtgacgataggtgtgcagcctggggcagagatggacacacagggccatgctgacatcgggggaagaggccacagcagttcca

SEQ ID NO: 43281 - DNA, 83 bp, Homo sapiens
tgtgcagcctggggcagagatggacacacagggccatgctgacatcgggggaagaggccacagcagttccacgtgagggtcac

SEQ ID NO: 43282 - DNA, 80 bp, Homo sapiens
gggcagagatggacacacagggccatgctgacatcgggggaagaggccacagcagttccacgtgagggtcacggtcgatg

SEQ ID NO: 43283 - DNA, 78 bp, Homo sapiens
atggacacacagggccatgctgacatcgggggaagaggccacagcagttccacgtgagggtcacggtcgatggaactc

SEQ ID NO: 43284 - DNA, 77 bp, Homo sapiens
agggccatgctgacatcgggggaagaggccacagcagttccacgtgagggtcacggtcgatggaactcctctctcca

SEQ ID NO: 43285 - DNA, 75 bp, Homo sapiens
aagaggccacagcagttccacgtgagggtcacggtcgatggaactcctctctccacatacttggctccccaggga

SEQ ID NO: 43286 - DNA, 74 bp, Homo sapiens
acagcagttccacgtgagggtcacggtcgatggaactcctctctccacatacttggctccccagggagaaggaa

SEQ ID NO: 43287 - DNA, 71 bp, Homo sapiens
gggtcacggtcgatggaactcctctctccacatacttggctccccagggagaaggaaggtcggggtgcctc

SEQ ID NO: 43288 - DNA, 73 bp, Homo sapiens
gaactcctctctccacatacttggctccccagggagaaggaaggtcggggtgcctctgccgggcgtctttgca

SEQ ID NO: 43289 - DNA, 73 bp, Homo sapiens
agggagaaggaaggtcggggtgcctctgccgggcgtctttgcaagtgtgaggaggagaccactctgctcggtc

SEQ ID NO: 43290 - DNA, 75 bp, Homo sapiens
aaggaaggtcggggtgcctctgccgggcgtctttgcaagtgtgaggaggagaccactctgctcggtcggctctgc

SEQ ID NO: 43291 - DNA, 83 bp, Homo sapiens
tgcctctgccgggcgtctttgcaagtgtgaggaggagaccactctgctcggtcggctctgctctgagtctggacgagcaccca

SEQ ID NO: 43292 - DNA, 84 bp, Homo sapiens
tctttgcaagtgtgaggaggagaccactctgctcggtcggctctgctctgagtctggacgagcacccacgctcgtgcctggtgc

SEQ ID NO: 43293 - DNA, 82 bp, Homo sapiens
aggaggagaccactctgctcggtcggctctgctctgagtctggacgagcacccacgctcgtgcctggtgcgcaggacaggtc

SEQ ID NO: 43294 - DNA, 83 bp, Homo sapiens
actctgctcggtcggctctgctctgagtctggacgagcacccacgctcgtgcctggtgcgcaggacaggtccgaacagactca

SEQ ID NO: 43295 - DNA, 78 bp, Homo sapiens
ctctgagtctggacgagcacccacgctcgtgcctggtgcgcaggacaggtccgaacagactcaggcttcccctgtccc

SEQ ID NO: 43296 - DNA, 80 bp, Homo sapiens
agcacccacgctcgtgcctggtgcgcaggacaggtccgaacagactcaggcttcccctgtccctgtgtagcaccatgtgc

SEQ ID NO: 43297 - DNA, 80 bp, Homo sapiens
ctcgtgcctggtgcgcaggacaggtccgaacagactcaggcttcccctgtccctgtgtagcaccatgtgcccgagccaca

SEQ ID NO: 43298 - DNA, 76 bp, Homo sapiens
caggacaggtccgaacagactcaggcttcccctgtccctgtgtagcaccatgtgcccgagccacaggccctccctc

SEQ ID NO: 43299 - DNA, 76 bp, Homo sapiens
aggtccgaacagactcaggcttcccctgtccctgtgtagcaccatgtgcccgagccacaggccctccctctgctgt

SEQ ID NO: 43300 - DNA, 75 bp, Homo sapiens
actcaggcttcccctgtccctgtgtagcaccatgtgcccgagccacaggccctccctctgctgttaccgatgggt

SEQ ID NO: 43301 - DNA, 78 bp, Homo sapiens
ccctgtccctgtgtagcaccatgtgcccgagccacaggccctccctctgctgttaccgatgggttctgcttgtcactg

SEQ ID NO: 43302 - DNA, 78 bp, Homo sapiens
tgtgtagcaccatgtgcccgagccacaggccctccctctgctgttaccgatgggttctgcttgtcactgggacctctt

SEQ ID NO: 43303 - DNA, 74 bp, Homo sapiens
ccacaggccctccctctgctgttaccgatgggttctgcttgtcactgggacctctttcccgagccgacaactca

SEQ ID NO: 43304 - DNA, 75 bp, Homo sapiens
tccctctgctgttaccgatgggttctgcttgtcactgggacctctttcccgagccgacaactcatccatcgggac

SEQ ID NO: 43305 - DNA, 73 bp, Homo sapiens
tgttaccgatgggttctgcttgtcactgggacctctttcccgagccgacaactcatccatcgggacggaacca

SEQ ID NO: 43306 - DNA, 75 bp, Homo sapiens
ggttctgcttgtcactgggacctctttcccgagccgacaactcatccatcgggacggaaccaagcgagatgccaa

SEQ ID NO: 43307 - DNA, 73 bp, Homo sapiens
ttgtcactgggacctctttcccgagccgacaactcatccatcgggacggaaccaagcgagatgccaactcggg

SEQ ID NO: 43308 - DNA, 71 bp, Homo sapiens
cctctttcccgagccgacaactcatccatcgggacggaaccaagcgagatgccaactcggggccacagttt

SEQ ID NO: 43309 - DNA, 76 bp, Homo sapiens
cgagccgacaactcatccatcgggacggaaccaagcgagatgccaactcggggccacagttttcagcggccattca

SEQ ID NO: 43310 - DNA, 74 bp, Homo sapiens
acaactcatccatcgggacggaaccaagcgagatgccaactcggggccacagttttcagcggccattcaggagg

SEQ ID NO: 43311 - DNA, 75 bp, Homo sapiens
atcgggacggaaccaagcgagatgccaactcggggccacagttttcagcggccattcaggagggtctgctctgcc

SEQ ID NO: 43312 - DNA, 76 bp, Homo sapiens
aaccaagcgagatgccaactcggggccacagttttcagcggccattcaggagggtctgctctgcccagcgtggtac

SEQ ID NO: 43313 - DNA, 78 bp, Homo sapiens
agatgccaactcggggccacagttttcagcggccattcaggagggtctgctctgcccagcgtggtaccaagccaggca

SEQ ID NO: 43314 - DNA, 78 bp, Homo sapiens
agttttcagcggccattcaggagggtctgctctgcccagcgtggtaccaagccaggcaccgagaaaagaatgacagca

SEQ ID NO: 43315 - DNA, 74 bp, Homo sapiens
tctgcccagcgtggtaccaagccaggcaccgagaaaagaatgacagcacccgccctctggtcaggggtccacgg

SEQ ID NO: 43316 - DNA, 73 bp, Homo sapiens
gtaccaagccaggcaccgagaaaagaatgacagcacccgccctctggtcaggggtccacggggatggagactc

SEQ ID NO: 43317 - DNA, 72 bp, Homo sapiens
ggcaccgagaaaagaatgacagcacccgccctctggtcaggggtccacggggatggagactccctgctagtt

SEQ ID NO: 43318 - DNA, 69 bp, Homo sapiens
atgacagcacccgccctctggtcaggggtccacggggatggagactccctgctagtttttagggttagg

SEQ ID NO: 43319 - DNA, 67 bp, Homo sapiens
ccctctggtcaggggtccacggggatggagactccctgctagtttttagggttagggcaggacaccc

SEQ ID NO: 43320 - DNA, 69 bp, Homo sapiens
gggtccacggggatggagactccctgctagtttttagggttagggcaggacaccccgctttatagcaga

SEQ ID NO: 43321 - DNA, 70 bp, Homo sapiens
gggatggagactccctgctagtttttagggttagggcaggacaccccgctttatagcagagtttgtagtg

SEQ ID NO: 43322 - DNA, 69 bp, Homo sapiens
ctccctgctagtttttagggttagggcaggacaccccgctttatagcagagtttgtagtggcaagaaat

SEQ ID NO: 43323 - DNA, 69 bp, Homo sapiens
tttttagggttagggcaggacaccccgctttatagcagagtttgtagtggcaagaaattgccaactgtt

SEQ ID NO: 43324 - DNA, 75 bp, Homo sapiens
ttagggcaggacaccccgctttatagcagagtttgtagtggcaagaaattgccaactgtttaactatccatcaga

SEQ ID NO: 43325 - DNA, 76 bp, Homo sapiens
caccccgctttatagcagagtttgtagtggcaagaaattgccaactgtttaactatccatcagagtgcactggtta

SEQ ID NO: 43326 - DNA, 75 bp, Homo sapiens
ctttatagcagagtttgtagtggcaagaaattgccaactgtttaactatccatcagagtgcactggttaactaac

SEQ ID NO: 43327 - DNA, 74 bp, Homo sapiens
agtggcaagaaattgccaactgtttaactatccatcagagtgcactggttaactaacgcactataaaccattcc

SEQ ID NO: 43328 - DNA, 75 bp, Homo sapiens
aattgccaactgtttaactatccatcagagtgcactggttaactaacgcactataaaccattcctggctccaagc

SEQ ID NO: 43329 - DNA, 73 bp, Homo sapiens
aactaacgcactataaaccattcctggctccaagctccaagaccattaggtaggaaaagcaggttgtgcgaca

SEQ ID NO: 43330 - DNA, 79 bp, Homo sapiens
tggctccaagctccaagaccattaggtaggaaaagcaggttgtgcgacagtgtgtgaagctgatccgatgactgtaaag

SEQ ID NO: 43331 - DNA, 82 bp, Homo sapiens
accattaggtaggaaaagcaggttgtgcgacagtgtgtgaagctgatccgatgactgtaaaggcctgtgtcaagcatgcaca

SEQ ID NO: 43332 - DNA, 91 bp, Homo sapiens
aggttgtgcgacagtgtgtgaagctgatccgatgactgtaaaggcctgtgtcaagcatgcacatgtgtgtgcgtgtgatgagcacacatta

SEQ ID NO: 43333 - DNA, 88 bp, Homo sapiens
acagtgtgtgaagctgatccgatgactgtaaaggcctgtgtcaagcatgcacatgtgtgtgcgtgtgatgagcacacattagggttgg

SEQ ID NO: 43334 - DNA, 87 bp, Homo sapiens
aagctgatccgatgactgtaaaggcctgtgtcaagcatgcacatgtgtgtgcgtgtgatgagcacacattagggttgggcacacgcc

SEQ ID NO: 43335 - DNA, 86 bp, Homo sapiens
atgactgtaaaggcctgtgtcaagcatgcacatgtgtgtgcgtgtgatgagcacacattagggttgggcacacgccctgccgtctg

SEQ ID NO: 43336 - DNA, 87 bp, Homo sapiens
ctgtgtcaagcatgcacatgtgtgtgcgtgtgatgagcacacattagggttgggcacacgccctgccgtctggggttgcttctcaga

SEQ ID NO: 43337 - DNA, 87 bp, Homo sapiens
tcaagcatgcacatgtgtgtgcgtgtgatgagcacacattagggttgggcacacgccctgccgtctggggttgcttctcagaggcgc

SEQ ID NO: 43338 - DNA, 81 bp, Homo sapiens
tgtgtgcgtgtgatgagcacacattagggttgggcacacgccctgccgtctggggttgcttctcagaggcgcgtgccgagg

SEQ ID NO: 43339 - DNA, 78 bp, Homo sapiens
tgtgatgagcacacattagggttgggcacacgccctgccgtctggggttgcttctcagaggcgcgtgccgagggcccg

SEQ ID NO: 43340 - DNA, 73 bp, Homo sapiens
agcacacattagggttgggcacacgccctgccgtctggggttgcttctcagaggcgcgtgccgagggcccggg

SEQ ID NO: 43341 - DNA, 73 bp, Homo sapiens
tggggttgcttctcagaggcgcgtgccgagggcccggggatggcaacgcccttccgtgcagaaggcgcctggg

SEQ ID NO: 43342 - DNA, 74 bp, Homo sapiens
tgcttctcagaggcgcgtgccgagggcccggggatggcaacgcccttccgtgcagaaggcgcctgggtgggtct

SEQ ID NO: 43343 - DNA, 72 bp, Homo sapiens
gcgtgccgagggcccggggatggcaacgcccttccgtgcagaaggcgcctgggtgggtcttgcggaatagac

SEQ ID NO: 43344 - DNA, 71 bp, Homo sapiens
agggcccggggatggcaacgcccttccgtgcagaaggcgcctgggtgggtcttgcggaatagacgcgtgag

SEQ ID NO: 43345 - DNA, 72 bp, Homo sapiens
acgcccttccgtgcagaaggcgcctgggtgggtcttgcggaatagacgcgtgaggacgacccgcagggtgga

SEQ ID NO: 43346 - DNA, 72 bp, Homo sapiens
agaaggcgcctgggtgggtcttgcggaatagacgcgtgaggacgacccgcagggtggagtccggcctggcca

SEQ ID NO: 43347 - DNA, 74 bp, Homo sapiens
ttgcggaatagacgcgtgaggacgacccgcagggtggagtccggcctggccagggctggaagtcataggacgaa

SEQ ID NO: 43348 - DNA, 72 bp, Homo sapiens
atagacgcgtgaggacgacccgcagggtggagtccggcctggccagggctggaagtcataggacgaaaggta

SEQ ID NO: 43349 - DNA, 73 bp, Homo sapiens
tgaggacgacccgcagggtggagtccggcctggccagggctggaagtcataggacgaaaggtagaggtgagaa

SEQ ID NO: 43350 - DNA, 74 bp, Homo sapiens
agggtggagtccggcctggccagggctggaagtcataggacgaaaggtagaggtgagaagaggcagttctgtga

SEQ ID NO: 43351 - DNA, 73 bp, Homo sapiens
agggctggaagtcataggacgaaaggtagaggtgagaagaggcagttctgtgaaagaagccccgacctcgagc

SEQ ID NO: 43352 - DNA, 72 bp, Homo sapiens
aagtcataggacgaaaggtagaggtgagaagaggcagttctgtgaaagaagccccgacctcgagctgggact

SEQ ID NO: 43353 - DNA, 71 bp, Homo sapiens
gaaaggtagaggtgagaagaggcagttctgtgaaagaagccccgacctcgagctgggactttgaattggtt

SEQ ID NO: 43354 - DNA, 72 bp, Homo sapiens
ggtgagaagaggcagttctgtgaaagaagccccgacctcgagctgggactttgaattggtttgcgtttgaaa

SEQ ID NO: 43355 - DNA, 69 bp, Homo sapiens
aagaggcagttctgtgaaagaagccccgacctcgagctgggactttgaattggtttgcgtttgaaaacc

SEQ ID NO: 43356 - DNA, 66 bp, Homo sapiens
tgaaagaagccccgacctcgagctgggactttgaattggtttgcgtttgaaaaccggggttggtaa

SEQ ID NO: 43357 - DNA, 66 bp, Homo sapiens
cccgacctcgagctgggactttgaattggtttgcgtttgaaaaccggggttggtaaaagctgggca

SEQ ID NO: 43358 - DNA, 66 bp, Homo sapiens
tttgaattggtttgcgtttgaaaaccggggttggtaaaagctgggcacccacacctctccttctgt

SEQ ID NO: 43359 - DNA, 72 bp, Homo sapiens
aaaccggggttggtaaaagctgggcacccacacctctccttctgttgcagctggtggcagcgatcgtgttta

SEQ ID NO: 43360 - DNA, 75 bp, Homo sapiens
gggttggtaaaagctgggcacccacacctctccttctgttgcagctggtggcagcgatcgtgtttatcagttttg

SEQ ID NO: 43361 - DNA, 77 bp, Homo sapiens
aaagctgggcacccacacctctccttctgttgcagctggtggcagcgatcgtgtttatcagttttggcgtggtggcc

SEQ ID NO: 43362 - DNA, 81 bp, Homo sapiens
acacctctccttctgttgcagctggtggcagcgatcgtgtttatcagttttggcgtggtggccgccttctgctgcgccatc

SEQ ID NO: 43363 - DNA, 82 bp, Homo sapiens
tctgttgcagctggtggcagcgatcgtgtttatcagttttggcgtggtggccgccttctgctgcgccatcgtggacggcgta

SEQ ID NO: 43364 - DNA, 80 bp, Homo sapiens
agctggtggcagcgatcgtgtttatcagttttggcgtggtggccgccttctgctgcgccatcgtggacggcgtatttgca

SEQ ID NO: 43365 - DNA, 81 bp, Homo sapiens
agcgatcgtgtttatcagttttggcgtggtggccgccttctgctgcgccatcgtggacggcgtatttgcagcacagcacat

SEQ ID NO: 43366 - DNA, 82 bp, Homo sapiens
tttatcagttttggcgtggtggccgccttctgctgcgccatcgtggacggcgtatttgcagcacagcacattgtgagtacat

SEQ ID NO: 43367 - DNA, 84 bp, Homo sapiens
ttttggcgtggtggccgccttctgctgcgccatcgtggacggcgtatttgcagcacagcacattgtgagtacattgtcattgtg

SEQ ID NO: 43368 - DNA, 86 bp, Homo sapiens
ccgccttctgctgcgccatcgtggacggcgtatttgcagcacagcacattgtgagtacattgtcattgtgtgcacagtcgctttcc

SEQ ID NO: 43369 - DNA, 85 bp, Homo sapiens
ctgcgccatcgtggacggcgtatttgcagcacagcacattgtgagtacattgtcattgtgtgcacagtcgctttccggggctgaa

SEQ ID NO: 43370 - DNA, 82 bp, Homo sapiens
atcgtggacggcgtatttgcagcacagcacattgtgagtacattgtcattgtgtgcacagtcgctttccggggctgaaagag

SEQ ID NO: 43371 - DNA, 82 bp, Homo sapiens
tatttgcagcacagcacattgtgagtacattgtcattgtgtgcacagtcgctttccggggctgaaagagtcgacgtgaaaaa

SEQ ID NO: 43372 - DNA, 78 bp, Homo sapiens
acagcacattgtgagtacattgtcattgtgtgcacagtcgctttccggggctgaaagagtcgacgtgaaaaaagtaca

SEQ ID NO: 43373 - DNA, 75 bp, Homo sapiens
acattgtgagtacattgtcattgtgtgcacagtcgctttccggggctgaaagagtcgacgtgaaaaaagtacaat

SEQ ID NO: 43374 - DNA, 76 bp, Homo sapiens
tacattgtcattgtgtgcacagtcgctttccggggctgaaagagtcgacgtgaaaaaagtacaatttcattttgca

SEQ ID NO: 43375 - DNA, 78 bp, Homo sapiens
ttgtgtgcacagtcgctttccggggctgaaagagtcgacgtgaaaaaagtacaatttcattttgcagatctcagctca

SEQ ID NO: 43376 - DNA, 74 bp, Homo sapiens
ctttccggggctgaaagagtcgacgtgaaaaaagtacaatttcattttgcagatctcagctcagacggcttcac

SEQ ID NO: 43377 - DNA, 77 bp, Homo sapiens
agagtcgacgtgaaaaaagtacaatttcattttgcagatctcagctcagacggcttcaccgtcagtctccacgctgg

SEQ ID NO: 43378 - DNA, 77 bp, Homo sapiens
aaaaagtacaatttcattttgcagatctcagctcagacggcttcaccgtcagtctccacgctgggggttgccagtga

SEQ ID NO: 43379 - DNA, 83 bp, Homo sapiens
ttcattttgcagatctcagctcagacggcttcaccgtcagtctccacgctgggggttgccagtgactgtctctcctctcagta

SEQ ID NO: 43380 - DNA, 81 bp, Homo sapiens
agatctcagctcagacggcttcaccgtcagtctccacgctgggggttgccagtgactgtctctcctctcagtaagtctcat

SEQ ID NO: 43381 - DNA, 79 bp, Homo sapiens
tcagacggcttcaccgtcagtctccacgctgggggttgccagtgactgtctctcctctcagtaagtctcatttcctaca

SEQ ID NO: 43382 - DNA, 77 bp, Homo sapiens
ttcaccgtcagtctccacgctgggggttgccagtgactgtctctcctctcagtaagtctcatttcctacacaacgaa

SEQ ID NO: 43383 - DNA, 74 bp, Homo sapiens
agtctccacgctgggggttgccagtgactgtctctcctctcagtaagtctcatttcctacacaacgaacttccc

SEQ ID NO: 43384 - DNA, 75 bp, Homo sapiens
acgctgggggttgccagtgactgtctctcctctcagtaagtctcatttcctacacaacgaacttccctctccaca

SEQ ID NO: 43385 - DNA, 79 bp, Homo sapiens
ttgccagtgactgtctctcctctcagtaagtctcatttcctacacaacgaacttccctctccacacagactacacacac

SEQ ID NO: 43386 - DNA, 78 bp, Homo sapiens
ctgtctctcctctcagtaagtctcatttcctacacaacgaacttccctctccacacagactacacacaccacacaaca

SEQ ID NO: 43387 - DNA, 81 bp, Homo sapiens
tctcagtaagtctcatttcctacacaacgaacttccctctccacacagactacacacaccacacaacacacagagcacaca

SEQ ID NO: 43388 - DNA, 83 bp, Homo sapiens
tctcatttcctacacaacgaacttccctctccacacagactacacacaccacacaacacacagagcacacagcacacaccaca

SEQ ID NO: 43389 - DNA, 90 bp, Homo sapiens
cagcacacacacaacagagcacatagcacacaccacagagtacacacctcacacaccacacagagcacacgcctcacacaccacacagag

SEQ ID NO: 43390 - DNA, 88 bp, Homo sapiens
acacaacagagcacatagcacacaccacagagtacacacctcacacaccacacagagcacacgcctcacacaccacacagagtacaca

SEQ ID NO: 43391 - DNA, 88 bp, Homo sapiens
agcacatagcacacaccacagagtacacacctcacacaccacacagagcacacgcctcacacaccacacagagtacacacctcacaca

SEQ ID NO: 43392 - DNA, 85 bp, Homo sapiens
acacaccacagagtacacacctcacacaccacacagagcacacgcctcacacaccacacagagtacacacctcacacaccacaca

SEQ ID NO: 43393 - DNA, 86 bp, Homo sapiens
agagtacacacctcacacaccacacagagcacacgcctcacacaccacacagagtacacacctcacacaccacacagagcacatac

SEQ ID NO: 43394 - DNA, 87 bp, Homo sapiens
acacaccacacagagcacacgcctcacacaccacacagagtacacacctcacacaccacacagagcacataccacacagagtacaca

SEQ ID NO: 43395 - DNA, 87 bp, Homo sapiens
ccacacagagcacacgcctcacacaccacacagagtacacacctcacacaccacacagagcacataccacacagagtacacacctca

SEQ ID NO: 43396 - DNA, 85 bp, Homo sapiens
acacgcctcacacaccacacagagtacacacctcacacaccacacagagcacataccacacagagtacacacctcacaccacaca

SEQ ID NO: 43397 - DNA, 83 bp, Homo sapiens
accacacagagtacacacctcacacaccacacagagcacataccacacagagtacacacctcacaccacacagagtacacacc

SEQ ID NO: 43398 - DNA, 84 bp, Homo sapiens
agagtacacacctcacacaccacacagagcacataccacacagagtacacacctcacaccacacagagtacacacctcacacca

SEQ ID NO: 43399 - DNA, 86 bp, Homo sapiens
acaccacacagagcacataccacacagagtacacacctcacaccacacagagtacacacctcacaccacacagagcacacacctca

SEQ ID NO: 43400 - DNA, 86 bp, Homo sapiens
agagcacataccacacagagtacacacctcacaccacacagagtacacacctcacaccacacagagcacacacctcacacaccaca

SEQ ID NO: 43401 - DNA, 73 bp, Homo sapiens
acacatacacaccacaccacgctcttttcacctctaaatgaacaggttttctctaaagtcgcaggccaaggaa

SEQ ID NO: 43402 - DNA, 70 bp, Homo sapiens
accacaccacgctcttttcacctctaaatgaacaggttttctctaaagtcgcaggccaaggaatcgtttc

SEQ ID NO: 43403 - DNA, 71 bp, Homo sapiens
acgctcttttcacctctaaatgaacaggttttctctaaagtcgcaggccaaggaatcgtttctgtgtcctc

SEQ ID NO: 43404 - DNA, 73 bp, Homo sapiens
tttcacctctaaatgaacaggttttctctaaagtcgcaggccaaggaatcgtttctgtgtcctcctgaggtgc

SEQ ID NO: 43405 - DNA, 73 bp, Homo sapiens
aaatgaacaggttttctctaaagtcgcaggccaaggaatcgtttctgtgtcctcctgaggtgcgtcctcagcc

SEQ ID NO: 43406 - DNA, 75 bp, Homo sapiens
ttttctctaaagtcgcaggccaaggaatcgtttctgtgtcctcctgaggtgcgtcctcagcctccggtgggctgc

SEQ ID NO: 43407 - DNA, 75 bp, Homo sapiens
aagtcgcaggccaaggaatcgtttctgtgtcctcctgaggtgcgtcctcagcctccggtgggctgcgccatcccc

SEQ ID NO: 43408 - DNA, 72 bp, Homo sapiens
aaggaatcgtttctgtgtcctcctgaggtgcgtcctcagcctccggtgggctgcgccatcccccctcctccc

SEQ ID NO: 43409 - DNA, 75 bp, Homo sapiens
gtttctgtgtcctcctgaggtgcgtcctcagcctccggtgggctgcgccatcccccctcctccctggctgggctc

SEQ ID NO: 43410 - DNA, 73 bp, Homo sapiens
cctcctgaggtgcgtcctcagcctccggtgggctgcgccatcccccctcctccctggctgggctcctgggtgg

SEQ ID NO: 43411 - DNA, 77 bp, Homo sapiens
tgcgtcctcagcctccggtgggctgcgccatcccccctcctccctggctgggctcctgggtgggctctcgccatctg

SEQ ID NO: 43412 - DNA, 76 bp, Homo sapiens
ctccggtgggctgcgccatcccccctcctccctggctgggctcctgggtgggctctcgccatctgggcgtcagctg

SEQ ID NO: 43413 - DNA, 80 bp, Homo sapiens
tggctgggctcctgggtgggctctcgccatctgggcgtcagctggtccccgggagcagccgaattgcttgtcatgaactc

SEQ ID NO: 43414 - DNA, 80 bp, Homo sapiens
tctcgccatctgggcgtcagctggtccccgggagcagccgaattgcttgtcatgaactctcagaccaaacctgtgattgt

SEQ ID NO: 43415 - DNA, 78 bp, Homo sapiens
atctgggcgtcagctggtccccgggagcagccgaattgcttgtcatgaactctcagaccaaacctgtgattgtttctc

SEQ ID NO: 43416 - DNA, 73 bp, Homo sapiens
ctggtccccgggagcagccgaattgcttgtcatgaactctcagaccaaacctgtgattgtttctccctctttt

SEQ ID NO: 43417 - DNA, 76 bp, Homo sapiens
aattgcttgtcatgaactctcagaccaaacctgtgattgtttctccctctttttccataaatcacactgaaaggca

SEQ ID NO: 43418 - DNA, 76 bp, Homo sapiens
cttgtcatgaactctcagaccaaacctgtgattgtttctccctctttttccataaatcacactgaaaggcactgaa

SEQ ID NO: 43419 - DNA, 73 bp, Homo sapiens
tcagaccaaacctgtgattgtttctccctctttttccataaatcacactgaaaggcactgaaggttggtgtta

SEQ ID NO: 43420 - DNA, 70 bp, Homo sapiens
acctgtgattgtttctccctctttttccataaatcacactgaaaggcactgaaggttggtgttaggcctt

SEQ ID NO: 43421 - DNA, 71 bp, Homo sapiens
ttttccataaatcacactgaaaggcactgaaggttggtgttaggcctttgtctgccccaacggtttcatta

SEQ ID NO: 43422 - DNA, 72 bp, Homo sapiens
ataaatcacactgaaaggcactgaaggttggtgttaggcctttgtctgccccaacggtttcattatatgaag

SEQ ID NO: 43423 - DNA, 72 bp, Homo sapiens
actgaaaggcactgaaggttggtgttaggcctttgtctgccccaacggtttcattatatgaaggcaagtgtg

SEQ ID NO: 43424 - DNA, 73 bp, Homo sapiens
aggttggtgttaggcctttgtctgccccaacggtttcattatatgaaggcaagtgtgggagcacattcacaaa

SEQ ID NO: 43425 - DNA, 74 bp, Homo sapiens
gtgttaggcctttgtctgccccaacggtttcattatatgaaggcaagtgtgggagcacattcacaaaacacacg

SEQ ID NO: 43426 - DNA, 82 bp, Homo sapiens
tttgtctgccccaacggtttcattatatgaaggcaagtgtgggagcacattcacaaaacacacgtgcgtgcgcacgcatgca

SEQ ID NO: 43427 - DNA, 86 bp, Homo sapiens
attatatgaaggcaagtgtgggagcacattcacaaaacacacgtgcgtgcgcacgcatgcacacaccacggcccacatgctcacac

SEQ ID NO: 43428 - DNA, 88 bp, Homo sapiens
aagtgtgggagcacattcacaaaacacacgtgcgtgcgcacgcatgcacacaccacggcccacatgctcacactcgcgcgcacacaca

SEQ ID NO: 43429 - DNA, 80 bp, Homo sapiens
cacacacacactcccacggaggtgcgtcatgggagctttctcagcgggtggctgggtgacttgctattctatggcttcca

SEQ ID NO: 43430 - DNA, 78 bp, Homo sapiens
acacactcccacggaggtgcgtcatgggagctttctcagcgggtggctgggtgacttgctattctatggcttccagac

SEQ ID NO: 43431 - DNA, 76 bp, Homo sapiens
aggtgcgtcatgggagctttctcagcgggtggctgggtgacttgctattctatggcttccagacggtggtttccac

SEQ ID NO: 43432 - DNA, 79 bp, Homo sapiens
gtcatgggagctttctcagcgggtggctgggtgacttgctattctatggcttccagacggtggtttccactgtgctcca

SEQ ID NO: 43433 - DNA, 76 bp, Homo sapiens
ctttctcagcgggtggctgggtgacttgctattctatggcttccagacggtggtttccactgtgctccaggcgccc

SEQ ID NO: 43434 - DNA, 75 bp, Homo sapiens
tgacttgctattctatggcttccagacggtggtttccactgtgctccaggcgcccgtggccgtggccccgccgag

SEQ ID NO: 43435 - DNA, 73 bp, Homo sapiens
attctatggcttccagacggtggtttccactgtgctccaggcgcccgtggccgtggccccgccgaggagcagg

SEQ ID NO: 43436 - DNA, 73 bp, Homo sapiens
ttccagacggtggtttccactgtgctccaggcgcccgtggccgtggccccgccgaggagcagggtccagtctc

SEQ ID NO: 43437 - DNA, 75 bp, Homo sapiens
tggtttccactgtgctccaggcgcccgtggccgtggccccgccgaggagcagggtccagtctctgaccgcagtcg

SEQ ID NO: 43438 - DNA, 74 bp, Homo sapiens
tgtgctccaggcgcccgtggccgtggccccgccgaggagcagggtccagtctctgaccgcagtcgggggtgtcc

SEQ ID NO: 43439 - DNA, 71 bp, Homo sapiens
ggagcagggtccagtctctgaccgcagtcgggggtgtccccaggttccggacctcgggcgcctgtccattc

SEQ ID NO: 43440 - DNA, 70 bp, Homo sapiens
agggtccagtctctgaccgcagtcgggggtgtccccaggttccggacctcgggcgcctgtccattctgga

SEQ ID NO: 43441 - DNA, 73 bp, Homo sapiens
ggggtgtccccaggttccggacctcgggcgcctgtccattctggagggccacgcggggcatgcatctaggcaa

SEQ ID NO: 43442 - DNA, 75 bp, Homo sapiens
cccaggttccggacctcgggcgcctgtccattctggagggccacgcggggcatgcatctaggcaagtgtgggagc

SEQ ID NO: 43443 - DNA, 76 bp, Homo sapiens
acctcgggcgcctgtccattctggagggccacgcggggcatgcatctaggcaagtgtgggagcctcttggttagaa

SEQ ID NO: 43444 - DNA, 76 bp, Homo sapiens
gggcgcctgtccattctggagggccacgcggggcatgcatctaggcaagtgtgggagcctcttggttagaaacaaa

SEQ ID NO: 43445 - DNA, 75 bp, Homo sapiens
ccattctggagggccacgcggggcatgcatctaggcaagtgtgggagcctcttggttagaaacaaagcagggccc

SEQ ID NO: 43446 - DNA, 73 bp, Homo sapiens
gggccacgcggggcatgcatctaggcaagtgtgggagcctcttggttagaaacaaagcagggcccctggccgg

SEQ ID NO: 43447 - DNA, 73 bp, Homo sapiens
gggcatgcatctaggcaagtgtgggagcctcttggttagaaacaaagcagggcccctggccggggcctcccag

SEQ ID NO: 43448 - DNA, 69 bp, Homo sapiens
caagtgtgggagcctcttggttagaaacaaagcagggcccctggccggggcctcccagggctgacttta

SEQ ID NO: 43449 - DNA, 69 bp, Homo sapiens
agcctcttggttagaaacaaagcagggcccctggccggggcctcccagggctgactttaggacggatgc

SEQ ID NO: 43450 - DNA, 74 bp, Homo sapiens
ttagaaacaaagcagggcccctggccggggcctcccagggctgactttaggacggatgcgcagacagcactcac

SEQ ID NO: 43451 - DNA, 75 bp, Homo sapiens
aacaaagcagggcccctggccggggcctcccagggctgactttaggacggatgcgcagacagcactcactggagc

SEQ ID NO: 43452 - DNA, 84 bp, Homo sapiens
cctcccagggctgactttaggacggatgcgcagacagcactcactggagctcagatgccatcgaggaaaatgtggcactgcctc

SEQ ID NO: 43453 - DNA, 89 bp, Homo sapiens
ctgactttaggacggatgcgcagacagcactcactggagctcagatgccatcgaggaaaatgtggcactgcctcgtgtgctgctgagga

SEQ ID NO: 43454 - DNA, 88 bp, Homo sapiens
tttaggacggatgcgcagacagcactcactggagctcagatgccatcgaggaaaatgtggcactgcctcgtgtgctgctgaggaagaa

SEQ ID NO: 43455 - DNA, 88 bp, Homo sapiens
tcactggagctcagatgccatcgaggaaaatgtggcactgcctcgtgtgctgctgaggaagaagacagatggtgaattacagctctaa

SEQ ID NO: 43456 - DNA, 86 bp, Homo sapiens
tcagatgccatcgaggaaaatgtggcactgcctcgtgtgctgctgaggaagaagacagatggtgaattacagctctaagggcgtca

SEQ ID NO: 43457 - DNA, 82 bp, Homo sapiens
atcgaggaaaatgtggcactgcctcgtgtgctgctgaggaagaagacagatggtgaattacagctctaagggcgtcatatgg

SEQ ID NO: 43458 - DNA, 83 bp, Homo sapiens
aaaatgtggcactgcctcgtgtgctgctgaggaagaagacagatggtgaattacagctctaagggcgtcatatggggagatgc

SEQ ID NO: 43459 - DNA, 82 bp, Homo sapiens
tgctgaggaagaagacagatggtgaattacagctctaagggcgtcatatggggagatgcgtgccttccaactgttgagagag

SEQ ID NO: 43460 - DNA, 79 bp, Homo sapiens
aagaagacagatggtgaattacagctctaagggcgtcatatggggagatgcgtgccttccaactgttgagagaggccga

SEQ ID NO: 43461 - DNA, 77 bp, Homo sapiens
atggtgaattacagctctaagggcgtcatatggggagatgcgtgccttccaactgttgagagaggccgaggacaccg

SEQ ID NO: 43462 - DNA, 79 bp, Homo sapiens
attacagctctaagggcgtcatatggggagatgcgtgccttccaactgttgagagaggccgaggacaccgtgctgctag

SEQ ID NO: 43463 - DNA, 79 bp, Homo sapiens
taagggcgtcatatggggagatgcgtgccttccaactgttgagagaggccgaggacaccgtgctgctaggcctctgtcc

SEQ ID NO: 43464 - DNA, 76 bp, Homo sapiens
gggagatgcgtgccttccaactgttgagagaggccgaggacaccgtgctgctaggcctctgtccccatggggttcc

SEQ ID NO: 43465 - DNA, 73 bp, Homo sapiens
aactgttgagagaggccgaggacaccgtgctgctaggcctctgtccccatggggttccggcacaccgccctcc

SEQ ID NO: 43466 - DNA, 74 bp, Homo sapiens
agagaggccgaggacaccgtgctgctaggcctctgtccccatggggttccggcacaccgccctccctcccagca

SEQ ID NO: 43467 - DNA, 72 bp, Homo sapiens
tgctaggcctctgtccccatggggttccggcacaccgccctccctcccagcaggagcctctgtccgtggggt

SEQ ID NO: 43468 - DNA, 69 bp, Homo sapiens
cctctgtccccatggggttccggcacaccgccctccctcccagcaggagcctctgtccgtggggttggg

SEQ ID NO: 43469 - DNA, 73 bp, Homo sapiens
ggttccggcacaccgccctccctcccagcaggagcctctgtccgtggggttggggtgcactgccctctctcca

SEQ ID NO: 43470 - DNA, 72 bp, Homo sapiens
aggagcctctgtccgtggggttggggtgcactgccctctctccaggaaggagcctctgtccccttgggctac

SEQ ID NO: 43471 - DNA, 77 bp, Homo sapiens
ttggggtgcactgccctctctccaggaaggagcctctgtccccttgggctactcattgttacctgtggtctcatgtc

SEQ ID NO: 43472 - DNA, 77 bp, Homo sapiens
tgccctctctccaggaaggagcctctgtccccttgggctactcattgttacctgtggtctcatgtctgtcccctcag

SEQ ID NO: 43473 - DNA, 75 bp, Homo sapiens
tccaggaaggagcctctgtccccttgggctactcattgttacctgtggtctcatgtctgtcccctcaggggaaga

SEQ ID NO: 43474 - DNA, 75 bp, Homo sapiens
cccttgggctactcattgttacctgtggtctcatgtctgtcccctcaggggaagataaacacccagagacagaga

SEQ ID NO: 43475 - DNA, 78 bp, Homo sapiens
tactcattgttacctgtggtctcatgtctgtcccctcaggggaagataaacacccagagacagagacttgtgtctgct

SEQ ID NO: 43476 - DNA, 77 bp, Homo sapiens
ttacctgtggtctcatgtctgtcccctcaggggaagataaacacccagagacagagacttgtgtctgcttcctccat

SEQ ID NO: 43477 - DNA, 81 bp, Homo sapiens
tctcatgtctgtcccctcaggggaagataaacacccagagacagagacttgtgtctgcttcctccattgctgtgtcaccta

SEQ ID NO: 43478 - DNA, 78 bp, Homo sapiens
ccctcaggggaagataaacacccagagacagagacttgtgtctgcttcctccattgctgtgtcacctagaacgcatcc

SEQ ID NO: 43479 - DNA, 79 bp, Homo sapiens
aagataaacacccagagacagagacttgtgtctgcttcctccattgctgtgtcacctagaacgcatccggccataatag

SEQ ID NO: 43480 - DNA, 78 bp, Homo sapiens
aaacacccagagacagagacttgtgtctgcttcctccattgctgtgtcacctagaacgcatccggccataatagtact

SEQ ID NO: 43481 - DNA, 77 bp, Homo sapiens
ttgtgtctgcttcctccattgctgtgtcacctagaacgcatccggccataatagtacttcaccagtgggggcccaaa

SEQ ID NO: 43482 - DNA, 77 bp, Homo sapiens
tccattgctgtgtcacctagaacgcatccggccataatagtacttcaccagtgggggcccaaaggaccgatgagtga

SEQ ID NO: 43483 - DNA, 76 bp, Homo sapiens
tgtgtcacctagaacgcatccggccataatagtacttcaccagtgggggcccaaaggaccgatgagtgattctcat

SEQ ID NO: 43484 - DNA, 77 bp, Homo sapiens
tagaacgcatccggccataatagtacttcaccagtgggggcccaaaggaccgatgagtgattctcattctcatctgt

SEQ ID NO: 43485 - DNA, 77 bp, Homo sapiens
ccataatagtacttcaccagtgggggcccaaaggaccgatgagtgattctcattctcatctgttgcagtgttactag

SEQ ID NO: 43486 - DNA, 77 bp, Homo sapiens
tacttcaccagtgggggcccaaaggaccgatgagtgattctcattctcatctgttgcagtgttactagtggtttcta

SEQ ID NO: 43487 - DNA, 74 bp, Homo sapiens
agtgggggcccaaaggaccgatgagtgattctcattctcatctgttgcagtgttactagtggtttctaatactt

SEQ ID NO: 43488 - DNA, 77 bp, Homo sapiens
tgagtgattctcattctcatctgttgcagtgttactagtggtttctaatacttttcttggttcagaactaggagcct

SEQ ID NO: 43489 - DNA, 75 bp, Homo sapiens
tcattctcatctgttgcagtgttactagtggtttctaatacttttcttggttcagaactaggagcctttgagaaa

SEQ ID NO: 43490 - DNA, 72 bp, Homo sapiens
atctgttgcagtgttactagtggtttctaatacttttcttggttcagaactaggagcctttgagaaatacta

SEQ ID NO: 43491 - DNA, 69 bp, Homo sapiens
cagtgttactagtggtttctaatacttttcttggttcagaactaggagcctttgagaaatactaataaa

SEQ ID NO: 43492 - DNA, 69 bp, Homo sapiens
atacttttcttggttcagaactaggagcctttgagaaatactaataaaactaaacgtgggcaatgtgac

SEQ ID NO: 43493 - DNA, 70 bp, Homo sapiens
tggttcagaactaggagcctttgagaaatactaataaaactaaacgtgggcaatgtgaccctagcttatt

SEQ ID NO: 43494 - DNA, 73 bp, Homo sapiens
gagcctttgagaaatactaataaaactaaacgtgggcaatgtgaccctagcttatttgcaggtgatgcagttt

SEQ ID NO: 43495 - DNA, 73 bp, Homo sapiens
agaaatactaataaaactaaacgtgggcaatgtgaccctagcttatttgcaggtgatgcagttttgtggcatt

SEQ ID NO: 43496 - DNA, 72 bp, Homo sapiens
taataaaactaaacgtgggcaatgtgaccctagcttatttgcaggtgatgcagttttgtggcattttagttt

SEQ ID NO: 43497 - DNA, 73 bp, Homo sapiens
ctaaacgtgggcaatgtgaccctagcttatttgcaggtgatgcagttttgtggcattttagttttggtacttc

SEQ ID NO: 43498 - DNA, 75 bp, Homo sapiens
aatgtgaccctagcttatttgcaggtgatgcagttttgtggcattttagttttggtacttcctgctgtcctctac

SEQ ID NO: 43499 - DNA, 76 bp, Homo sapiens
cttatttgcaggtgatgcagttttgtggcattttagttttggtacttcctgctgtcctctaccatagcaattataa

SEQ ID NO: 43500 - DNA, 77 bp, Homo sapiens
ttgcaggtgatgcagttttgtggcattttagttttggtacttcctgctgtcctctaccatagcaattataagcactt

SEQ ID NO: 43501 - DNA, 75 bp, Homo sapiens
ttttgtggcattttagttttggtacttcctgctgtcctctaccatagcaattataagcactttgcaatggtcagt

SEQ ID NO: 43502 - DNA, 73 bp, Homo sapiens
attttagttttggtacttcctgctgtcctctaccatagcaattataagcactttgcaatggtcagtttatggg

SEQ ID NO: 43503 - DNA, 76 bp, Homo sapiens
ttttggtacttcctgctgtcctctaccatagcaattataagcactttgcaatggtcagtttatgggtctgtcttct

SEQ ID NO: 43504 - DNA, 76 bp, Homo sapiens
taccatagcaattataagcactttgcaatggtcagtttatgggtctgtcttcttcactagtctataaatcccttaa

SEQ ID NO: 43505 - DNA, 73 bp, Homo sapiens
aattataagcactttgcaatggtcagtttatgggtctgtcttcttcactagtctataaatcccttaagggcaa

SEQ ID NO: 43506 - DNA, 73 bp, Homo sapiens
actttgcaatggtcagtttatgggtctgtcttcttcactagtctataaatcccttaagggcaagaactgtgtc

SEQ ID NO: 43507 - DNA, 73 bp, Homo sapiens
tcagtttatgggtctgtcttcttcactagtctataaatcccttaagggcaagaactgtgtctcgttatcctta

SEQ ID NO: 43508 - DNA, 72 bp, Homo sapiens
tatgggtctgtcttcttcactagtctataaatcccttaagggcaagaactgtgtctcgttatccttaccatt

SEQ ID NO: 43509 - DNA, 74 bp, Homo sapiens
tcttcttcactagtctataaatcccttaagggcaagaactgtgtctcgttatccttaccatttggcactgtgtc

SEQ ID NO: 43510 - DNA, 78 bp, Homo sapiens
aatcccttaagggcaagaactgtgtctcgttatccttaccatttggcactgtgtctgctccatgaatgttgcagatgg

SEQ ID NO: 43511 - DNA, 81 bp, Homo sapiens
aagaactgtgtctcgttatccttaccatttggcactgtgtctgctccatgaatgttgcagatggtcggatggattgatagt

SEQ ID NO: 43512 - DNA, 83 bp, Homo sapiens
tgtgtctcgttatccttaccatttggcactgtgtctgctccatgaatgttgcagatggtcggatggattgatagttggatagg

SEQ ID NO: 43513 - DNA, 83 bp, Homo sapiens
tatccttaccatttggcactgtgtctgctccatgaatgttgcagatggtcggatggattgatagttggatagggccacaaatg

SEQ ID NO: 43514 - DNA, 83 bp, Homo sapiens
atttggcactgtgtctgctccatgaatgttgcagatggtcggatggattgatagttggatagggccacaaatgggtgtatggc

SEQ ID NO: 43515 - DNA, 83 bp, Homo sapiens
gtctgctccatgaatgttgcagatggtcggatggattgatagttggatagggccacaaatgggtgtatggctgaatggttgga

SEQ ID NO: 43516 - DNA, 82 bp, Homo sapiens
atgaatgttgcagatggtcggatggattgatagttggatagggccacaaatgggtgtatggctgaatggttggatggatgga

SEQ ID NO: 43517 - DNA, 85 bp, Homo sapiens
gatggatagataggaggatggataacggatgatggatggatggtggacagatggaaggatggaagtatggatgacagatgggtga

SEQ ID NO: 43518 - DNA, 83 bp, Homo sapiens
atagataggaggatggataacggatgatggatggatggtggacagatggaaggatggaagtatggatgacagatgggtgaatg

SEQ ID NO: 43519 - DNA, 86 bp, Homo sapiens
atggataacggatgatggatggatggtggacagatggaaggatggaagtatggatgacagatgggtgaatggatggatgtggatga

SEQ ID NO: 43520 - DNA, 87 bp, Homo sapiens
tgatggatggatggtggacagatggaaggatggaagtatggatgacagatgggtgaatggatggatgtggatgaatagaaggatgga

SEQ ID NO: 43521 - DNA, 84 bp, Homo sapiens
atggatggtggacagatggaaggatggaagtatggatgacagatgggtgaatggatggatgtggatgaatagaaggatggataa

SEQ ID NO: 43522 - DNA, 88 bp, Homo sapiens
aatggatggatgtggatgaatagaaggatggataatggatggatgatggatgatggatggacaaaaggatggatgacagatgaatgga

SEQ ID NO: 43523 - DNA, 88 bp, Homo sapiens
tggatgatggatggacaaaaggatggatgacagatgaatggatgggtggatgtggatgaatcgaaggatggataatggatggatgatg

SEQ ID NO: 43524 - DNA, 88 bp, Homo sapiens
atggatggatgtggatgaatggaaggatggatgatggatgcattatggatgaatgaatagatagatgtagaggatggaaggaagaatg

SEQ ID NO: 43525 - DNA, 86 bp, Homo sapiens
atgtggatgaatggaaggatggatgatggatgcattatggatgaatgaatagatagatgtagaggatggaaggaagaatgggtgga

SEQ ID NO: 43526 - DNA, 89 bp, Homo sapiens
gaaggatggatgatggatgcattatggatgaatgaatagatagatgtagaggatggaaggaagaatgggtggatgcacagatgattgat

SEQ ID NO: 43527 - DNA, 90 bp, Homo sapiens
atgatggatgcattatggatgaatgaatagatagatgtagaggatggaaggaagaatgggtggatgcacagatgattgattggatgattg

SEQ ID NO: 43528 - DNA, 87 bp, Homo sapiens
attatggatgaatgaatagatagatgtagaggatggaaggaagaatgggtggatgcacagatgattgattggatgattggatggatg

SEQ ID NO: 43529 - DNA, 85 bp, Homo sapiens
atgaatgaatagatagatgtagaggatggaaggaagaatgggtggatgcacagatgattgattggatgattggatggatggttgg

SEQ ID NO: 43530 - DNA, 82 bp, Homo sapiens
atagatagatgtagaggatggaaggaagaatgggtggatgcacagatgattgattggatgattggatggatggttgggtggg

SEQ ID NO: 43531 - DNA, 80 bp, Homo sapiens
gtagaggatggaaggaagaatgggtggatgcacagatgattgattggatgattggatggatggttgggtgggtgggtgga

SEQ ID NO: 43532 - DNA, 72 bp, Homo sapiens
gggtgggtgggtggatgattggatggttggagggatgagtttattggtctgaaatccttcttgctaccttcc

SEQ ID NO: 43533 - DNA, 76 bp, Homo sapiens
gtggatgattggatggttggagggatgagtttattggtctgaaatccttcttgctaccttcctagtagaagagaca

SEQ ID NO: 43534 - DNA, 71 bp, Homo sapiens
ttggagggatgagtttattggtctgaaatccttcttgctaccttcctagtagaagagacaatattttcttt

SEQ ID NO: 43535 - DNA, 74 bp, Homo sapiens
ttattggtctgaaatccttcttgctaccttcctagtagaagagacaatattttcttttatgaaacgatgcagga

SEQ ID NO: 43536 - DNA, 76 bp, Homo sapiens
ttcttgctaccttcctagtagaagagacaatattttcttttatgaaacgatgcaggagcctaacacctgtgatgtg

SEQ ID NO: 43537 - DNA, 74 bp, Homo sapiens
ttcctagtagaagagacaatattttcttttatgaaacgatgcaggagcctaacacctgtgatgtggggtggtag

SEQ ID NO: 43538 - DNA, 75 bp, Homo sapiens
tagaagagacaatattttcttttatgaaacgatgcaggagcctaacacctgtgatgtggggtggtagggatgccc

SEQ ID NO: 43539 - DNA, 73 bp, Homo sapiens
tttcttttatgaaacgatgcaggagcctaacacctgtgatgtggggtggtagggatgcccctcaaaaggccaa

SEQ ID NO: 43540 - DNA, 75 bp, Homo sapiens
tttatgaaacgatgcaggagcctaacacctgtgatgtggggtggtagggatgcccctcaaaaggccaagcacctg

SEQ ID NO: 43541 - DNA, 76 bp, Homo sapiens
atgcaggagcctaacacctgtgatgtggggtggtagggatgcccctcaaaaggccaagcacctgtctcccttctgc

SEQ ID NO: 43542 - DNA, 74 bp, Homo sapiens
taacacctgtgatgtggggtggtagggatgcccctcaaaaggccaagcacctgtctcccttctgctgcccttgt

SEQ ID NO: 43543 - DNA, 76 bp, Homo sapiens
atgtggggtggtagggatgcccctcaaaaggccaagcacctgtctcccttctgctgcccttgttgactgatggaga

SEQ ID NO: 43544 - DNA, 80 bp, Homo sapiens
tagggatgcccctcaaaaggccaagcacctgtctcccttctgctgcccttgttgactgatggagaatatgcatggcccga

SEQ ID NO: 43545 - DNA, 78 bp, Homo sapiens
ctcaaaaggccaagcacctgtctcccttctgctgcccttgttgactgatggagaatatgcatggcccgaggtaccctc

SEQ ID NO: 43546 - DNA, 80 bp, Homo sapiens
tctcccttctgctgcccttgttgactgatggagaatatgcatggcccgaggtaccctcccatggggctttctgctgtctg

SEQ ID NO: 43547 - DNA, 80 bp, Homo sapiens
ttctgctgcccttgttgactgatggagaatatgcatggcccgaggtaccctcccatggggctttctgctgtctggcctcc

SEQ ID NO: 43548 - DNA, 82 bp, Homo sapiens
ccttgttgactgatggagaatatgcatggcccgaggtaccctcccatggggctttctgctgtctggcctcctggatgcagca

SEQ ID NO: 43549 - DNA, 86 bp, Homo sapiens
atggagaatatgcatggcccgaggtaccctcccatggggctttctgctgtctggcctcctggatgcagcagcccagctgctctgca

SEQ ID NO: 43550 - DNA, 85 bp, Homo sapiens
tatgcatggcccgaggtaccctcccatggggctttctgctgtctggcctcctggatgcagcagcccagctgctctgcagggagcg

SEQ ID NO: 43551 - DNA, 87 bp, Homo sapiens
ctttctgctgtctggcctcctggatgcagcagcccagctgctctgcagggagcgtggagtctcccatcttgtgttctgtgtctggga

SEQ ID NO: 43552 - DNA, 86 bp, Homo sapiens
tggcctcctggatgcagcagcccagctgctctgcagggagcgtggagtctcccatcttgtgttctgtgtctgggaggctcaagttg

SEQ ID NO: 43553 - DNA, 80 bp, Homo sapiens
cagctgctctgcagggagcgtggagtctcccatcttgtgttctgtgtctgggaggctcaagttggtgttggccttggtcc

SEQ ID NO: 43554 - DNA, 78 bp, Homo sapiens
ctctgcagggagcgtggagtctcccatcttgtgttctgtgtctgggaggctcaagttggtgttggccttggtccttga

SEQ ID NO: 43555 - DNA, 76 bp, Homo sapiens
agcgtggagtctcccatcttgtgttctgtgtctgggaggctcaagttggtgttggccttggtccttgaggccctga

SEQ ID NO: 43556 - DNA, 76 bp, Homo sapiens
ttctgtgtctgggaggctcaagttggtgttggccttggtccttgaggccctgagcctgagacccacaggcctgaaa

SEQ ID NO: 43557 - DNA, 76 bp, Homo sapiens
tctgggaggctcaagttggtgttggccttggtccttgaggccctgagcctgagacccacaggcctgaaattgcctc

SEQ ID NO: 43558 - DNA, 76 bp, Homo sapiens
ctcaagttggtgttggccttggtccttgaggccctgagcctgagacccacaggcctgaaattgcctctggcctctc

SEQ ID NO: 43559 - DNA, 76 bp, Homo sapiens
tgttggccttggtccttgaggccctgagcctgagacccacaggcctgaaattgcctctggcctctcccgcctggag

SEQ ID NO: 43560 - DNA, 77 bp, Homo sapiens
tgagcctgagacccacaggcctgaaattgcctctggcctctcccgcctggaggcacctgttttattccatctgtgtt

SEQ ID NO: 43561 - DNA, 74 bp, Homo sapiens
ttgcctctggcctctcccgcctggaggcacctgttttattccatctgtgtttatctgtttctctaggaaccgag

SEQ ID NO: 43562 - DNA, 73 bp, Homo sapiens
tctcccgcctggaggcacctgttttattccatctgtgtttatctgtttctctaggaaccgaggcccctcacca

SEQ ID NO: 43563 - DNA, 72 bp, Homo sapiens
aggcacctgttttattccatctgtgtttatctgtttctctaggaaccgaggcccctcaccacgggaagatgc

SEQ ID NO: 43564 - DNA, 71 bp, Homo sapiens
atctgtgtttatctgtttctctaggaaccgaggcccctcaccacgggaagatgccagttttactccagtgg

SEQ ID NO: 43565 - DNA, 69 bp, Homo sapiens
ttatctgtttctctaggaaccgaggcccctcaccacgggaagatgccagttttactccagtggggtggg

SEQ ID NO: 43566 - DNA, 68 bp, Homo sapiens
ctctaggaaccgaggcccctcaccacgggaagatgccagttttactccagtggggtggggtacttgta

SEQ ID NO: 43567 - DNA, 77 bp, Homo sapiens
agatgccagttttactccagtggggtggggtacttgtacgatgtctaccagacagaggtgagcaggagcactgagat

SEQ ID NO: 43568 - DNA, 77 bp, Homo sapiens
tttactccagtggggtggggtacttgtacgatgtctaccagacagaggtgagcaggagcactgagattcatgtgggt

SEQ ID NO: 43569 - DNA, 79 bp, Homo sapiens
gggtggggtacttgtacgatgtctaccagacagaggtgagcaggagcactgagattcatgtgggttttgctcagctaac

SEQ ID NO: 43570 - DNA, 80 bp, Homo sapiens
tacttgtacgatgtctaccagacagaggtgagcaggagcactgagattcatgtgggttttgctcagctaaccccgccgac

SEQ ID NO: 43571 - DNA, 75 bp, Homo sapiens
aggtgagcaggagcactgagattcatgtgggttttgctcagctaaccccgccgaccccacgcggttttccctgca

SEQ ID NO: 43572 - DNA, 75 bp, Homo sapiens
gagcactgagattcatgtgggttttgctcagctaaccccgccgaccccacgcggttttccctgcacataggcgtg

SEQ ID NO: 43573 - DNA, 72 bp, Homo sapiens
attcatgtgggttttgctcagctaaccccgccgaccccacgcggttttccctgcacataggcgtggtctgaa

SEQ ID NO: 43574 - DNA, 71 bp, Homo sapiens
tgtgggttttgctcagctaaccccgccgaccccacgcggttttccctgcacataggcgtggtctgaatatt

SEQ ID NO: 43575 - DNA, 70 bp, Homo sapiens
agctaaccccgccgaccccacgcggttttccctgcacataggcgtggtctgaatattttgattctaatag

SEQ ID NO: 43576 - DNA, 70 bp, Homo sapiens
cccgccgaccccacgcggttttccctgcacataggcgtggtctgaatattttgattctaatagttcctgg

SEQ ID NO: 43577 - DNA, 70 bp, Homo sapiens
cccacgcggttttccctgcacataggcgtggtctgaatattttgattctaatagttcctgggggtcaccc

SEQ ID NO: 43578 - DNA, 75 bp, Homo sapiens
tttccctgcacataggcgtggtctgaatattttgattctaatagttcctgggggtcacccctgcagctggtgaac

SEQ ID NO: 43579 - DNA, 74 bp, Homo sapiens
ataggcgtggtctgaatattttgattctaatagttcctgggggtcacccctgcagctggtgaaccgttgatgcc

SEQ ID NO: 43580 - DNA, 71 bp, Homo sapiens
aatattttgattctaatagttcctgggggtcacccctgcagctggtgaaccgttgatgccccctgtgtttg

SEQ ID NO: 43581 - DNA, 71 bp, Homo sapiens
atagttcctgggggtcacccctgcagctggtgaaccgttgatgccccctgtgtttgggaccttgacatttc

SEQ ID NO: 43582 - DNA, 77 bp, Homo sapiens
ccctgtgtttgggaccttgacatttcgatgtgctgtatttcactctggagtcagagttctggacttgcttcattaaa

SEQ ID NO: 43583 - DNA, 80 bp, Homo sapiens
tgtttgggaccttgacatttcgatgtgctgtatttcactctggagtcagagttctggacttgcttcattaaatcacaaca

SEQ ID NO: 43584 - DNA, 84 bp, Homo sapiens
cttgacatttcgatgtgctgtatttcactctggagtcagagttctggacttgcttcattaaatcacaacagtctcagagtgcac

SEQ ID NO: 43585 - DNA, 84 bp, Homo sapiens
tgctgtatttcactctggagtcagagttctggacttgcttcattaaatcacaacagtctcagagtgcacgtgtccagttctgta

SEQ ID NO: 43586 - DNA, 83 bp, Homo sapiens
tatttcactctggagtcagagttctggacttgcttcattaaatcacaacagtctcagagtgcacgtgtccagttctgtatggc

SEQ ID NO: 43587 - DNA, 81 bp, Homo sapiens
agtcagagttctggacttgcttcattaaatcacaacagtctcagagtgcacgtgtccagttctgtatggctcttccaatta

SEQ ID NO: 43588 - DNA, 80 bp, Homo sapiens
ttctggacttgcttcattaaatcacaacagtctcagagtgcacgtgtccagttctgtatggctcttccaattagcatttt

SEQ ID NO: 43589 - DNA, 78 bp, Homo sapiens
ttcattaaatcacaacagtctcagagtgcacgtgtccagttctgtatggctcttccaattagcatttttctaatttaa

SEQ ID NO: 43590 - DNA, 78 bp, Homo sapiens
acaacagtctcagagtgcacgtgtccagttctgtatggctcttccaattagcatttttctaatttaattattgcaata

SEQ ID NO: 43591 - DNA, 76 bp, Homo sapiens
agagtgcacgtgtccagttctgtatggctcttccaattagcatttttctaatttaattattgcaataagaagcaag

SEQ ID NO: 43592 - DNA, 76 bp, Homo sapiens
gcacgtgtccagttctgtatggctcttccaattagcatttttctaatttaattattgcaataagaagcaaggataa

SEQ ID NO: 43593 - DNA, 76 bp, Homo sapiens
tctgtatggctcttccaattagcatttttctaatttaattattgcaataagaagcaaggataatacatttacagtg

SEQ ID NO: 43594 - DNA, 75 bp, Homo sapiens
gctcttccaattagcatttttctaatttaattattgcaataagaagcaaggataatacatttacagtgtccgaga

SEQ ID NO: 43595 - DNA, 73 bp, Homo sapiens
gcatttttctaatttaattattgcaataagaagcaaggataatacatttacagtgtccgagaaacttctggat

SEQ ID NO: 43596 - DNA, 77 bp, Homo sapiens
taagaagcaaggataatacatttacagtgtccgagaaacttctggatttccctgagccaccgacagcggcagtgtga

SEQ ID NO: 43597 - DNA, 76 bp, Homo sapiens
ataatacatttacagtgtccgagaaacttctggatttccctgagccaccgacagcggcagtgtgacctcatttctc

SEQ ID NO: 43598 - DNA, 75 bp, Homo sapiens
tttacagtgtccgagaaacttctggatttccctgagccaccgacagcggcagtgtgacctcatttctctttccag

SEQ ID NO: 43599 - DNA, 77 bp, Homo sapiens
agaaacttctggatttccctgagccaccgacagcggcagtgtgacctcatttctctttccaggtgagtgagatgcgg

SEQ ID NO: 43600 - DNA, 80 bp, Homo sapiens
tctggatttccctgagccaccgacagcggcagtgtgacctcatttctctttccaggtgagtgagatgcggggagtaatga

SEQ ID NO: 43601 - DNA, 77 bp, Homo sapiens
cctgagccaccgacagcggcagtgtgacctcatttctctttccaggtgagtgagatgcggggagtaatgacccgcgg

SEQ ID NO: 43602 - DNA, 76 bp, Homo sapiens
cgacagcggcagtgtgacctcatttctctttccaggtgagtgagatgcggggagtaatgacccgcgggcggccgcc

SEQ ID NO: 43603 - DNA, 75 bp, Homo sapiens
tgacctcatttctctttccaggtgagtgagatgcggggagtaatgacccgcgggcggccgccgccttcgccagga

SEQ ID NO: 43604 - DNA, 71 bp, Homo sapiens
atttctctttccaggtgagtgagatgcggggagtaatgacccgcgggcggccgccgccttcgccaggaccg

SEQ ID NO: 43605 - DNA, 74 bp, Homo sapiens
tccaggtgagtgagatgcggggagtaatgacccgcgggcggccgccgccttcgccaggaccgtcggagggcaca

SEQ ID NO: 43606 - DNA, 75 bp, Homo sapiens
tgagatgcggggagtaatgacccgcgggcggccgccgccttcgccaggaccgtcggagggcacagctctgtgacg

SEQ ID NO: 43607 - DNA, 77 bp, Homo sapiens
taatgacccgcgggcggccgccgccttcgccaggaccgtcggagggcacagctctgtgacggcgctctctgtgtgtc

SEQ ID NO: 43608 - DNA, 78 bp, Homo sapiens
gggcggccgccgccttcgccaggaccgtcggagggcacagctctgtgacggcgctctctgtgtgtctcgcacctgccc

SEQ ID NO: 43609 - DNA, 80 bp, Homo sapiens
ccgccttcgccaggaccgtcggagggcacagctctgtgacggcgctctctgtgtgtctcgcacctgccctgtgtggattc

SEQ ID NO: 43610 - DNA, 79 bp, Homo sapiens
aggaccgtcggagggcacagctctgtgacggcgctctctgtgtgtctcgcacctgccctgtgtggattcctggctttaa

SEQ ID NO: 43611 - DNA, 79 bp, Homo sapiens
cgtcggagggcacagctctgtgacggcgctctctgtgtgtctcgcacctgccctgtgtggattcctggctttaactaaa

SEQ ID NO: 43612 - DNA, 84 bp, Homo sapiens
gcgctctctgtgtgtctcgcacctgccctgtgtggattcctggctttaactaaacgcagcctctcatcctcagcacgcgtgtca

SEQ ID NO: 43613 - DNA, 83 bp, Homo sapiens
tctgtgtgtctcgcacctgccctgtgtggattcctggctttaactaaacgcagcctctcatcctcagcacgcgtgtcagagga

SEQ ID NO: 43614 - DNA, 80 bp, Homo sapiens
ctcgcacctgccctgtgtggattcctggctttaactaaacgcagcctctcatcctcagcacgcgtgtcagaggaggagga

SEQ ID NO: 43615 - DNA, 81 bp, Homo sapiens
tgtggattcctggctttaactaaacgcagcctctcatcctcagcacgcgtgtcagaggaggaggagctggaggccctctca

SEQ ID NO: 43616 - DNA, 79 bp, Homo sapiens
attcctggctttaactaaacgcagcctctcatcctcagcacgcgtgtcagaggaggaggagctggaggccctctcagtg

SEQ ID NO: 43617 - DNA, 85 bp, Homo sapiens
ctctcatcctcagcacgcgtgtcagaggaggaggagctggaggccctctcagtggccagcacctgccagcttgtctgggactctc

SEQ ID NO: 43618 - DNA, 85 bp, Homo sapiens
atcctcagcacgcgtgtcagaggaggaggagctggaggccctctcagtggccagcacctgccagcttgtctgggactctccagca

SEQ ID NO: 43619 - DNA, 83 bp, Homo sapiens
cgtgtcagaggaggaggagctggaggccctctcagtggccagcacctgccagcttgtctgggactctccagcagctgccggga

SEQ ID NO: 43620 - DNA, 85 bp, Homo sapiens
gaggagctggaggccctctcagtggccagcacctgccagcttgtctgggactctccagcagctgccgggaggcatcgtgtgtgtg

SEQ ID NO: 43621 - DNA, 69 bp, Homo sapiens
gtgtgtgtgggggggggtaggcaggaggcgtcccgtgtgtgtttaggggggaggtgtcctgtgtgtgta

SEQ ID NO: 43622 - DNA, 75 bp, Homo sapiens
gtgtgtgtgttggggggtgtcccctggccagggctttcaaggttgtcacacagaggtggcaggtgtctcttctga

SEQ ID NO: 43623 - DNA, 76 bp, Homo sapiens
tgttggggggtgtcccctggccagggctttcaaggttgtcacacagaggtggcaggtgtctcttctgaggctgcca

SEQ ID NO: 43624 - DNA, 80 bp, Homo sapiens
tgtcccctggccagggctttcaaggttgtcacacagaggtggcaggtgtctcttctgaggctgccagtgctcaagcctgg

SEQ ID NO: 43625 - DNA, 79 bp, Homo sapiens
agggctttcaaggttgtcacacagaggtggcaggtgtctcttctgaggctgccagtgctcaagcctggggggagagcgc

SEQ ID NO: 43626 - DNA, 80 bp, Homo sapiens
ttcaaggttgtcacacagaggtggcaggtgtctcttctgaggctgccagtgctcaagcctggggggagagcgccctggga

SEQ ID NO: 43627 - DNA, 76 bp, Homo sapiens
acagaggtggcaggtgtctcttctgaggctgccagtgctcaagcctggggggagagcgccctgggacggggcctgt

SEQ ID NO: 43628 - DNA, 75 bp, Homo sapiens
aggtgtctcttctgaggctgccagtgctcaagcctggggggagagcgccctgggacggggcctgttctgccgccc

SEQ ID NO: 43629 - DNA, 77 bp, Homo sapiens
tctgaggctgccagtgctcaagcctggggggagagcgccctgggacggggcctgttctgccgccctccgggctctca

SEQ ID NO: 43630 - DNA, 73 bp, Homo sapiens
ccagtgctcaagcctggggggagagcgccctgggacggggcctgttctgccgccctccgggctctcaggcttc

SEQ ID NO: 43631 - DNA, 73 bp, Homo sapiens
agtgctcaagcctggggggagagcgccctgggacggggcctgttctgccgccctccgggctctcaggcttctg

SEQ ID NO: 43632 - DNA, 74 bp, Homo sapiens
ctcaagcctggggggagagcgccctgggacggggcctgttctgccgccctccgggctctcaggcttctgtgcac

SEQ ID NO: 43633 - DNA, 73 bp, Homo sapiens
ggagagcgccctgggacggggcctgttctgccgccctccgggctctcaggcttctgtgcaccccacgccgaag

SEQ ID NO: 43634 - DNA, 73 bp, Homo sapiens
agagcgccctgggacggggcctgttctgccgccctccgggctctcaggcttctgtgcaccccacgccgaaggc

SEQ ID NO: 43635 - DNA, 73 bp, Homo sapiens
tgggacggggcctgttctgccgccctccgggctctcaggcttctgtgcaccccacgccgaaggcctcctgggc

SEQ ID NO: 43636 - DNA, 77 bp, Homo sapiens
tgttctgccgccctccgggctctcaggcttctgtgcaccccacgccgaaggcctcctgggctctgtccttctgccca

SEQ ID NO: 43637 - DNA, 77 bp, Homo sapiens
tccgggctctcaggcttctgtgcaccccacgccgaaggcctcctgggctctgtccttctgcccacgcaccctgatat

SEQ ID NO: 43638 - DNA, 77 bp, Homo sapiens
ttctgtgcaccccacgccgaaggcctcctgggctctgtccttctgcccacgcaccctgatatttccctctgctcctg

SEQ ID NO: 43639 - DNA, 77 bp, Homo sapiens
acgccgaaggcctcctgggctctgtccttctgcccacgcaccctgatatttccctctgctcctgggatcatggagaa

SEQ ID NO: 43640 - DNA, 80 bp, Homo sapiens
tcctgggctctgtccttctgcccacgcaccctgatatttccctctgctcctgggatcatggagaagcaaggcctctcctc

SEQ ID NO: 43641 - DNA, 80 bp, Homo sapiens
ctctgtccttctgcccacgcaccctgatatttccctctgctcctgggatcatggagaagcaaggcctctcctctgagccc

SEQ ID NO: 43642 - DNA, 80 bp, Homo sapiens
ttctgcccacgcaccctgatatttccctctgctcctgggatcatggagaagcaaggcctctcctctgagccccgattatc

SEQ ID NO: 43643 - DNA, 77 bp, Homo sapiens
atttccctctgctcctgggatcatggagaagcaaggcctctcctctgagccccgattatccggcctctgggaccagc

SEQ ID NO: 43644 - DNA, 78 bp, Homo sapiens
tcctgggatcatggagaagcaaggcctctcctctgagccccgattatccggcctctgggaccagcctgtgcccctgac

SEQ ID NO: 43645 - DNA, 76 bp, Homo sapiens
tcatggagaagcaaggcctctcctctgagccccgattatccggcctctgggaccagcctgtgcccctgacccctcc

SEQ ID NO: 43646 - DNA, 73 bp, Homo sapiens
aaggcctctcctctgagccccgattatccggcctctgggaccagcctgtgcccctgacccctcctgcaggaag

SEQ ID NO: 43647 - DNA, 74 bp, Homo sapiens
tcctctgagccccgattatccggcctctgggaccagcctgtgcccctgacccctcctgcaggaagggtcctggc

SEQ ID NO: 43648 - DNA, 70 bp, Homo sapiens
cccgattatccggcctctgggaccagcctgtgcccctgacccctcctgcaggaagggtcctggcccccga

SEQ ID NO: 43649 - DNA, 72 bp, Homo sapiens
tctgggaccagcctgtgcccctgacccctcctgcaggaagggtcctggcccccgagcccccaagcctctgtg

SEQ ID NO: 43650 - DNA, 72 bp, Homo sapiens
agcctgtgcccctgacccctcctgcaggaagggtcctggcccccgagcccccaagcctctgtgtctggagtc

SEQ ID NO: 43651 - DNA, 69 bp, Homo sapiens
ctgacccctcctgcaggaagggtcctggcccccgagcccccaagcctctgtgtctggagtcgggggaaa

SEQ ID NO: 43652 - DNA, 68 bp, Homo sapiens
ctcctgcaggaagggtcctggcccccgagcccccaagcctctgtgtctggagtcgggggaaagtcggg

SEQ ID NO: 43653 - DNA, 67 bp, Homo sapiens
aagggtcctggcccccgagcccccaagcctctgtgtctggagtcgggggaaagtcgggggaggcagc

SEQ ID NO: 43654 - DNA, 72 bp, Homo sapiens
cccgagcccccaagcctctgtgtctggagtcgggggaaagtcgggggaggcagctgcttggctgggcctcag

SEQ ID NO: 43655 - DNA, 75 bp, Homo sapiens
ccaagcctctgtgtctggagtcgggggaaagtcgggggaggcagctgcttggctgggcctcagtggccgctccca

SEQ ID NO: 43656 - DNA, 78 bp, Homo sapiens
tctgtgtctggagtcgggggaaagtcgggggaggcagctgcttggctgggcctcagtggccgctcccagctcccatga

SEQ ID NO: 43657 - DNA, 75 bp, Homo sapiens
agtcgggggaaagtcgggggaggcagctgcttggctgggcctcagtggccgctcccagctcccatgaggcagccc

SEQ ID NO: 43658 - DNA, 78 bp, Homo sapiens
aggcagctgcttggctgggcctcagtggccgctcccagctcccatgaggcagccctgcccttggtggggtgggtgagg

SEQ ID NO: 43659 - DNA, 76 bp, Homo sapiens
ctcccagctcccatgaggcagccctgcccttggtggggtgggtgaggtggtgggcaccggcatgtgacctgacaag

SEQ ID NO: 43660 - DNA, 78 bp, Homo sapiens
tcccatgaggcagccctgcccttggtggggtgggtgaggtggtgggcaccggcatgtgacctgacaaggcctctctgc

SEQ ID NO: 43661 - DNA, 74 bp, Homo sapiens
ccctgcccttggtggggtgggtgaggtggtgggcaccggcatgtgacctgacaaggcctctctgccccaggtca

SEQ ID NO: 43662 - DNA, 76 bp, Homo sapiens
ttggtggggtgggtgaggtggtgggcaccggcatgtgacctgacaaggcctctctgccccaggtcacctgtcactc

SEQ ID NO: 43663 - DNA, 79 bp, Homo sapiens
tgaggtggtgggcaccggcatgtgacctgacaaggcctctctgccccaggtcacctgtcactccctggacggcaagtgc

SEQ ID NO: 43664 - DNA, 80 bp, Homo sapiens
gtgggcaccggcatgtgacctgacaaggcctctctgccccaggtcacctgtcactccctggacggcaagtgccagctgaa

SEQ ID NO: 43665 - DNA, 80 bp, Homo sapiens
atgtgacctgacaaggcctctctgccccaggtcacctgtcactccctggacggcaagtgccagctgaaggtgagaagcaa

SEQ ID NO: 43666 - DNA, 78 bp, Homo sapiens
caaggcctctctgccccaggtcacctgtcactccctggacggcaagtgccagctgaaggtgagaagcaacacctgtta

SEQ ID NO: 43667 - DNA, 80 bp, Homo sapiens
tctgccccaggtcacctgtcactccctggacggcaagtgccagctgaaggtgagaagcaacacctgttactgctgtgacc

SEQ ID NO: 43668 - DNA, 80 bp, Homo sapiens
aggtcacctgtcactccctggacggcaagtgccagctgaaggtgagaagcaacacctgttactgctgtgacctctatgcc

SEQ ID NO: 43669 - DNA, 80 bp, Homo sapiens
actccctggacggcaagtgccagctgaaggtgagaagcaacacctgttactgctgtgacctctatgcctgcgggaggtga

SEQ ID NO: 43670 - DNA, 81 bp, Homo sapiens
tggacggcaagtgccagctgaaggtgagaagcaacacctgttactgctgtgacctctatgcctgcgggaggtgaggggcac

SEQ ID NO: 43671 - DNA, 75 bp, Homo sapiens
agctgaaggtgagaagcaacacctgttactgctgtgacctctatgcctgcgggaggtgaggggcaccggggaccc

SEQ ID NO: 43672 - DNA, 74 bp, Homo sapiens
aacacctgttactgctgtgacctctatgcctgcgggaggtgaggggcaccggggacccccatatctacacctgc

SEQ ID NO: 43673 - DNA, 75 bp, Homo sapiens
ttactgctgtgacctctatgcctgcgggaggtgaggggcaccggggacccccatatctacacctgcgggaggtga

SEQ ID NO: 43674 - DNA, 76 bp, Homo sapiens
gaggtgaggggcgctgggaacccccgtatgtgcctgcaggggtgaggcctccatccttctgctcctgacatcaccc

SEQ ID NO: 43675 - DNA, 75 bp, Homo sapiens
ggcgctgggaacccccgtatgtgcctgcaggggtgaggcctccatccttctgctcctgacatcaccccccccaca

SEQ ID NO: 43676 - DNA, 72 bp, Homo sapiens
gggaacccccgtatgtgcctgcaggggtgaggcctccatccttctgctcctgacatcaccccccccacaccc

SEQ ID NO: 43677 - DNA, 74 bp, Homo sapiens
ggtgaggcctccatccttctgctcctgacatcaccccccccacacccctgcacctacatcgtctcctttactcc

SEQ ID NO: 43678 - DNA, 74 bp, Homo sapiens
tccatccttctgctcctgacatcaccccccccacacccctgcacctacatcgtctcctttactccttagatgtt

SEQ ID NO: 43679 - DNA, 75 bp, Homo sapiens
tgctcctgacatcaccccccccacacccctgcacctacatcgtctcctttactccttagatgtttacatgaggaa

SEQ ID NO: 43680 - DNA, 71 bp, Homo sapiens
acatcaccccccccacacccctgcacctacatcgtctcctttactccttagatgtttacatgaggaaagga

SEQ ID NO: 43681 - DNA, 76 bp, Homo sapiens
cacacccctgcacctacatcgtctcctttactccttagatgtttacatgaggaaaggacattgagtccatttcaca

SEQ ID NO: 43682 - DNA, 76 bp, Homo sapiens
acatcgtctcctttactccttagatgtttacatgaggaaaggacattgagtccatttcacagatgaaaagacagag

SEQ ID NO: 43683 - DNA, 77 bp, Homo sapiens
tttactccttagatgtttacatgaggaaaggacattgagtccatttcacagatgaaaagacagaggctctgaaatgt

SEQ ID NO: 43684 - DNA, 82 bp, Homo sapiens
tagatgtttacatgaggaaaggacattgagtccatttcacagatgaaaagacagaggctctgaaatgttgatctgcccaaga

SEQ ID NO: 43685 - DNA, 81 bp, Homo sapiens
atgaggaaaggacattgagtccatttcacagatgaaaagacagaggctctgaaatgttgatctgcccaagaggacacagcc

SEQ ID NO: 43686 - DNA, 81 bp, Homo sapiens
acattgagtccatttcacagatgaaaagacagaggctctgaaatgttgatctgcccaagaggacacagcccgtgtgtgtcg

SEQ ID NO: 43687 - DNA, 80 bp, Homo sapiens
ttcacagatgaaaagacagaggctctgaaatgttgatctgcccaagaggacacagcccgtgtgtgtcgggcgagagttta

SEQ ID NO: 43688 - DNA, 74 bp, Homo sapiens
aaaagacagaggctctgaaatgttgatctgcccaagaggacacagcccgtgtgtgtcgggcgagagtttaaacc

SEQ ID NO: 43689 - DNA, 76 bp, Homo sapiens
acagaggctctgaaatgttgatctgcccaagaggacacagcccgtgtgtgtcgggcgagagtttaaacctggcctg

SEQ ID NO: 43690 - DNA, 76 bp, Homo sapiens
ggctctgaaatgttgatctgcccaagaggacacagcccgtgtgtgtcgggcgagagtttaaacctggcctggcctc

SEQ ID NO: 43691 - DNA, 75 bp, Homo sapiens
aaatgttgatctgcccaagaggacacagcccgtgtgtgtcgggcgagagtttaaacctggcctggcctctgaggc

SEQ ID NO: 43692 - DNA, 76 bp, Homo sapiens
tgttgatctgcccaagaggacacagcccgtgtgtgtcgggcgagagtttaaacctggcctggcctctgaggcccca

SEQ ID NO: 43693 - DNA, 73 bp, Homo sapiens
aagaggacacagcccgtgtgtgtcgggcgagagtttaaacctggcctggcctctgaggccccaggcatggccc

SEQ ID NO: 43694 - DNA, 72 bp, Homo sapiens
acacagcccgtgtgtgtcgggcgagagtttaaacctggcctggcctctgaggccccaggcatggccccctct

SEQ ID NO: 43695 - DNA, 72 bp, Homo sapiens
acagcccgtgtgtgtcgggcgagagtttaaacctggcctggcctctgaggccccaggcatggccccctcttg

SEQ ID NO: 43696 - DNA, 72 bp, Homo sapiens
ccgtgtgtgtcgggcgagagtttaaacctggcctggcctctgaggccccaggcatggccccctcttgggaca

SEQ ID NO: 43697 - DNA, 71 bp, Homo sapiens
gtgtgtcgggcgagagtttaaacctggcctggcctctgaggccccaggcatggccccctcttgggacaggg

SEQ ID NO: 43698 - DNA, 69 bp, Homo sapiens
agagtttaaacctggcctggcctctgaggccccaggcatggccccctcttgggacaggggcccgtgacc

SEQ ID NO: 43699 - DNA, 70 bp, Homo sapiens
tggcctggcctctgaggccccaggcatggccccctcttgggacaggggcccgtgaccccgacggccttcc

SEQ ID NO: 43700 - DNA, 69 bp, Homo sapiens
cctctgaggccccaggcatggccccctcttgggacaggggcccgtgaccccgacggccttcccatcctg

SEQ ID NO: 43701 - DNA, 71 bp, Homo sapiens
aggcatggccccctcttgggacaggggcccgtgaccccgacggccttcccatcctggcgtgaagacagaga

SEQ ID NO: 43702 - DNA, 73 bp, Homo sapiens
acaggggcccgtgaccccgacggccttcccatcctggcgtgaagacagagatggctcagccggggcccagaca

SEQ ID NO: 43703 - DNA, 76 bp, Homo sapiens
acggccttcccatcctggcgtgaagacagagatggctcagccggggcccagacacccgtcctgccaggccatcgag

SEQ ID NO: 43704 - DNA, 76 bp, Homo sapiens
tgaagacagagatggctcagccggggcccagacacccgtcctgccaggccatcgaggcggaggggcgggcccgcca

SEQ ID NO: 43705 - DNA, 73 bp, Homo sapiens
agagatggctcagccggggcccagacacccgtcctgccaggccatcgaggcggaggggcgggcccgccaggcc

SEQ ID NO: 43706 - DNA, 72 bp, Homo sapiens
tcagccggggcccagacacccgtcctgccaggccatcgaggcggaggggcgggcccgccaggcccagttgcc

SEQ ID NO: 43707 - DNA, 73 bp, Homo sapiens
agacacccgtcctgccaggccatcgaggcggaggggcgggcccgccaggcccagttgccgctctttgccactg

SEQ ID NO: 43708 - DNA, 73 bp, Homo sapiens
cgtcctgccaggccatcgaggcggaggggcgggcccgccaggcccagttgccgctctttgccactgtgggccc

SEQ ID NO: 43709 - DNA, 71 bp, Homo sapiens
ggccatcgaggcggaggggcgggcccgccaggcccagttgccgctctttgccactgtgggccccaggtggg

SEQ ID NO: 43710 - DNA, 72 bp, Homo sapiens
aggggcgggcccgccaggcccagttgccgctctttgccactgtgggccccaggtggggagcctcacaggcca

SEQ ID NO: 43711 - DNA, 77 bp, Homo sapiens
ccgccaggcccagttgccgctctttgccactgtgggccccaggtggggagcctcacaggccaatcccatcagacata

SEQ ID NO: 43712 - DNA, 77 bp, Homo sapiens
agttgccgctctttgccactgtgggccccaggtggggagcctcacaggccaatcccatcagacataggtttgatctc

SEQ ID NO: 43713 - DNA, 81 bp, Homo sapiens
tctttgccactgtgggccccaggtggggagcctcacaggccaatcccatcagacataggtttgatctcccagagcagtgca

SEQ ID NO: 43714 - DNA, 79 bp, Homo sapiens
actgtgggccccaggtggggagcctcacaggccaatcccatcagacataggtttgatctcccagagcagtgcagggatg

SEQ ID NO: 43715 - DNA, 79 bp, Homo sapiens
aggtggggagcctcacaggccaatcccatcagacataggtttgatctcccagagcagtgcagggatgggcgttgactgg

SEQ ID NO: 43716 - DNA, 82 bp, Homo sapiens
ctcacaggccaatcccatcagacataggtttgatctcccagagcagtgcagggatgggcgttgactgggctccagccctgat

SEQ ID NO: 43717 - DNA, 77 bp, Homo sapiens
aggtttgatctcccagagcagtgcagggatgggcgttgactgggctccagccctgatttcctcccccagccctgcag

SEQ ID NO: 43718 - DNA, 78 bp, Homo sapiens
agagcagtgcagggatgggcgttgactgggctccagccctgatttcctcccccagccctgcagggctcaggtccagag

SEQ ID NO: 43719 - DNA, 75 bp, Homo sapiens
agggatgggcgttgactgggctccagccctgatttcctcccccagccctgcagggctcaggtccagaggacacaa

SEQ ID NO: 43720 - DNA, 73 bp, Homo sapiens
gttgactgggctccagccctgatttcctcccccagccctgcagggctcaggtccagaggacacaagtttaact

SEQ ID NO: 43721 - DNA, 74 bp, Homo sapiens
tccagccctgatttcctcccccagccctgcagggctcaggtccagaggacacaagtttaacttgcgggtggtca

SEQ ID NO: 43722 - DNA, 72 bp, Homo sapiens
atttcctcccccagccctgcagggctcaggtccagaggacacaagtttaacttgcgggtggtcacttgcctc

SEQ ID NO: 43723 - DNA, 76 bp, Homo sapiens
ccagccctgcagggctcaggtccagaggacacaagtttaacttgcgggtggtcacttgcctcgtgcggtgacgcca

SEQ ID NO: 43724 - DNA, 74 bp, Homo sapiens
agggctcaggtccagaggacacaagtttaacttgcgggtggtcacttgcctcgtgcggtgacgccatggtgccc

SEQ ID NO: 43725 - DNA, 80 bp, Homo sapiens
ttaacttgcgggtggtcacttgcctcgtgcggtgacgccatggtgccctctctgtgcagcgcagagccctcgcccgccta

SEQ ID NO: 43726 - DNA, 83 bp, Homo sapiens
gtggtcacttgcctcgtgcggtgacgccatggtgccctctctgtgcagcgcagagccctcgcccgcctactatgagttcatcg

SEQ ID NO: 43727 - DNA, 84 bp, Homo sapiens
ttgcctcgtgcggtgacgccatggtgccctctctgtgcagcgcagagccctcgcccgcctactatgagttcatcggcgtcagcg

SEQ ID NO: 43728 - DNA, 84 bp, Homo sapiens
cggtgacgccatggtgccctctctgtgcagcgcagagccctcgcccgcctactatgagttcatcggcgtcagcggctgccagga

SEQ ID NO: 43729 - DNA, 85 bp, Homo sapiens
gccctctctgtgcagcgcagagccctcgcccgcctactatgagttcatcggcgtcagcggctgccaggacgtgctgcacctgtac

SEQ ID NO: 43730 - DNA, 86 bp, Homo sapiens
tgcagcgcagagccctcgcccgcctactatgagttcatcggcgtcagcggctgccaggacgtgctgcacctgtaccgcctgctctg

SEQ ID NO: 43731 - DNA, 81 bp, Homo sapiens
agagccctcgcccgcctactatgagttcatcggcgtcagcggctgccaggacgtgctgcacctgtaccgcctgctctgggc

SEQ ID NO: 43732 - DNA, 83 bp, Homo sapiens
actatgagttcatcggcgtcagcggctgccaggacgtgctgcacctgtaccgcctgctctgggcctctgcagttctgaacgtc

SEQ ID NO: 43733 - DNA, 81 bp, Homo sapiens
atcggcgtcagcggctgccaggacgtgctgcacctgtaccgcctgctctgggcctctgcagttctgaacgtcctgggcctg

SEQ ID NO: 43734 - DNA, 83 bp, Homo sapiens
ctgccaggacgtgctgcacctgtaccgcctgctctgggcctctgcagttctgaacgtcctgggcctgttcctgggcatcatca

SEQ ID NO: 43735 - DNA, 77 bp, Homo sapiens
acctgtaccgcctgctctgggcctctgcagttctgaacgtcctgggcctgttcctgggcatcatcaccgccgccgtc

SEQ ID NO: 43736 - DNA, 76 bp, Homo sapiens
tctgcagttctgaacgtcctgggcctgttcctgggcatcatcaccgccgccgtcctgggggccttcaaggacatgg

SEQ ID NO: 43737 - DNA, 74 bp, Homo sapiens
agttctgaacgtcctgggcctgttcctgggcatcatcaccgccgccgtcctgggggccttcaaggacatggtga

SEQ ID NO: 43738 - DNA, 73 bp, Homo sapiens
tgggcctgttcctgggcatcatcaccgccgccgtcctgggggccttcaaggacatggtgaggccccttggtgg

SEQ ID NO: 43739 - DNA, 72 bp, Homo sapiens
tgttcctgggcatcatcaccgccgccgtcctgggggccttcaaggacatggtgaggccccttggtgggaccc

SEQ ID NO: 43740 - DNA, 72 bp, Homo sapiens
atcatcaccgccgccgtcctgggggccttcaaggacatggtgaggccccttggtgggacccccgctgctcac

SEQ ID NO: 43741 - DNA, 69 bp, Homo sapiens
ccgtcctgggggccttcaaggacatggtgaggccccttggtgggacccccgctgctcactgggagccgg

SEQ ID NO: 43742 - DNA, 71 bp, Homo sapiens
gccttcaaggacatggtgaggccccttggtgggacccccgctgctcactgggagccggggctccgggtcca

SEQ ID NO: 43743 - DNA, 69 bp, Homo sapiens
aaggacatggtgaggccccttggtgggacccccgctgctcactgggagccggggctccgggtccatttc

SEQ ID NO: 43744 - DNA, 66 bp, Homo sapiens
gtgaggccccttggtgggacccccgctgctcactgggagccggggctccgggtccatttccccggg

SEQ ID NO: 43745 - DNA, 66 bp, Homo sapiens
ttggtgggacccccgctgctcactgggagccggggctccgggtccatttccccggggtgggctggg

SEQ ID NO: 43746 - DNA, 68 bp, Homo sapiens
ctgctcactgggagccggggctccgggtccatttccccggggtgggctggggggcctccagccctcac

SEQ ID NO: 43747 - DNA, 66 bp, Homo sapiens
tgggagccggggctccgggtccatttccccggggtgggctggggggcctccagccctcactttaca

SEQ ID NO: 43748 - DNA, 68 bp, Homo sapiens
ctccgggtccatttccccggggtgggctggggggcctccagccctcactttacagatggggcactgaa

SEQ ID NO: 43749 - DNA, 71 bp, Homo sapiens
atttccccggggtgggctggggggcctccagccctcactttacagatggggcactgaagcccatgcgtctg

SEQ ID NO: 43750 - DNA, 77 bp, Homo sapiens
ggtgggctggggggcctccagccctcactttacagatggggcactgaagcccatgcgtctgtcagcagggtgtcagg

SEQ ID NO: 43751 - DNA, 83 bp, Homo sapiens
agccctcactttacagatggggcactgaagcccatgcgtctgtcagcagggtgtcagggtgacagctggcgtgcaccgactca

SEQ ID NO: 43752 - DNA, 81 bp, Homo sapiens
tttacagatggggcactgaagcccatgcgtctgtcagcagggtgtcagggtgacagctggcgtgcaccgactcacctcggg

SEQ ID NO: 43753 - DNA, 81 bp, Homo sapiens
gcactgaagcccatgcgtctgtcagcagggtgtcagggtgacagctggcgtgcaccgactcacctcggggccgtcctgtcc

SEQ ID NO: 43754 - DNA, 78 bp, Homo sapiens
aagcccatgcgtctgtcagcagggtgtcagggtgacagctggcgtgcaccgactcacctcggggccgtcctgtcccaa

SEQ ID NO: 43755 - DNA, 79 bp, Homo sapiens
tgtcagcagggtgtcagggtgacagctggcgtgcaccgactcacctcggggccgtcctgtcccaagcctgtcacaagaa

SEQ ID NO: 43756 - DNA, 76 bp, Homo sapiens
agggtgtcagggtgacagctggcgtgcaccgactcacctcggggccgtcctgtcccaagcctgtcacaagaatcac

SEQ ID NO: 43757 - DNA, 75 bp, Homo sapiens
acagctggcgtgcaccgactcacctcggggccgtcctgtcccaagcctgtcacaagaatcacctgatttaatcct

SEQ ID NO: 43758 - DNA, 74 bp, Homo sapiens
ccaagcctgtcacaagaatcacctgatttaatccttgcctccccgctgaggtgggcacagccgtccccaagaaa

SEQ ID NO: 43759 - DNA, 76 bp, Homo sapiens
tgtcacaagaatcacctgatttaatccttgcctccccgctgaggtgggcacagccgtccccaagaaacaatgttca

SEQ ID NO: 43760 - DNA, 74 bp, Homo sapiens
aatcacctgatttaatccttgcctccccgctgaggtgggcacagccgtccccaagaaacaatgttcagctccaa

SEQ ID NO: 43761 - DNA, 72 bp, Homo sapiens
atttaatccttgcctccccgctgaggtgggcacagccgtccccaagaaacaatgttcagctccaagagggag

SEQ ID NO: 43762 - DNA, 77 bp, Homo sapiens
gtgggcacagccgtccccaagaaacaatgttcagctccaagagggaggcccagcccttgtgcactaagctcccatca

SEQ ID NO: 43763 - DNA, 76 bp, Homo sapiens
agccgtccccaagaaacaatgttcagctccaagagggaggcccagcccttgtgcactaagctcccatcattagcaa

SEQ ID NO: 43764 - DNA, 79 bp, Homo sapiens
aatgttcagctccaagagggaggcccagcccttgtgcactaagctcccatcattagcaactgcctggggcttcagatgg

SEQ ID NO: 43765 - DNA, 79 bp, Homo sapiens
tccaagagggaggcccagcccttgtgcactaagctcccatcattagcaactgcctggggcttcagatgggcaggtctgg

SEQ ID NO: 43766 - DNA, 80 bp, Homo sapiens
aggcccagcccttgtgcactaagctcccatcattagcaactgcctggggcttcagatgggcaggtctgggctggggctga

SEQ ID NO: 43767 - DNA, 85 bp, Homo sapiens
ttgtgcactaagctcccatcattagcaactgcctggggcttcagatgggcaggtctgggctggggctgagctgatgccttagcaa

SEQ ID NO: 43768 - DNA, 80 bp, Homo sapiens
attagcaactgcctggggcttcagatgggcaggtctgggctggggctgagctgatgccttagcaaaccccagaggcgaga

SEQ ID NO: 43769 - DNA, 80 bp, Homo sapiens
tggggcttcagatgggcaggtctgggctggggctgagctgatgccttagcaaaccccagaggcgagacccatacagccag

SEQ ID NO: 43770 - DNA, 81 bp, Homo sapiens
ttcagatgggcaggtctgggctggggctgagctgatgccttagcaaaccccagaggcgagacccatacagccaggattggc

SEQ ID NO: 43771 - DNA, 79 bp, Homo sapiens
gtctgggctggggctgagctgatgccttagcaaaccccagaggcgagacccatacagccaggattggcctgggcaggag

SEQ ID NO: 43772 - DNA, 74 bp, Homo sapiens
ctgatgccttagcaaaccccagaggcgagacccatacagccaggattggcctgggcaggaggagggagggaagg

SEQ ID NO: 43773 - DNA, 71 bp, Homo sapiens
tagcaaaccccagaggcgagacccatacagccaggattggcctgggcaggaggagggagggaaggggcccc

SEQ ID NO: 43774 - DNA, 70 bp, Homo sapiens
agaggcgagacccatacagccaggattggcctgggcaggaggagggagggaaggggcccctcgcgggagg

SEQ ID NO: 43775 - DNA, 70 bp, Homo sapiens
acccatacagccaggattggcctgggcaggaggagggagggaaggggcccctcgcgggaggtgggctgga

SEQ ID NO: 43776 - DNA, 68 bp, Homo sapiens
attggcctgggcaggaggagggagggaaggggcccctcgcgggaggtgggctggacccatcctggaaa

SEQ ID NO: 43777 - DNA, 67 bp, Homo sapiens
ctgggcaggaggagggagggaaggggcccctcgcgggaggtgggctggacccatcctggaaaggccg

SEQ ID NO: 43778 - DNA, 65 bp, Homo sapiens
ggagggaaggggcccctcgcgggaggtgggctggacccatcctggaaaggccggccctcgcccgg

SEQ ID NO: 43779 - DNA, 67 bp, Homo sapiens
cgggaggtgggctggacccatcctggaaaggccggccctcgcccgggaaaccacagggaaatcactg

SEQ ID NO: 43780 - DNA, 67 bp, Homo sapiens
gtgggctggacccatcctggaaaggccggccctcgcccgggaaaccacagggaaatcactggcccgg

SEQ ID NO: 43781 - DNA, 67 bp, Homo sapiens
aaaggccggccctcgcccgggaaaccacagggaaatcactggcccgggccggatgtcctctctcttc

SEQ ID NO: 43782 - DNA, 70 bp, Homo sapiens
cctcgcccgggaaaccacagggaaatcactggcccgggccggatgtcctctctcttctccctcctctgcc

SEQ ID NO: 43783 - DNA, 75 bp, Homo sapiens
cacagggaaatcactggcccgggccggatgtcctctctcttctccctcctctgccctctcctggcgcctgtttca

SEQ ID NO: 43784 - DNA, 73 bp, Homo sapiens
aaatcactggcccgggccggatgtcctctctcttctccctcctctgccctctcctggcgcctgtttcaaacca

SEQ ID NO: 43785 - DNA, 75 bp, Homo sapiens
gggccggatgtcctctctcttctccctcctctgccctctcctggcgcctgtttcaaaccagatgttctcgtggtg

SEQ ID NO: 43786 - DNA, 75 bp, Homo sapiens
tcctggcgcctgtttcaaaccagatgttctcgtggtgtgcggccagcaaaccccgccccctgaacttgcagagaa

SEQ ID NO: 43787 - DNA, 74 bp, Homo sapiens
cctgtttcaaaccagatgttctcgtggtgtgcggccagcaaaccccgccccctgaacttgcagagaagctgtaa

SEQ ID NO: 43788 - DNA, 75 bp, Homo sapiens
aaccagatgttctcgtggtgtgcggccagcaaaccccgccccctgaacttgcagagaagctgtaagggatgggca

SEQ ID NO: 43789 - DNA, 77 bp, Homo sapiens
tctcgtggtgtgcggccagcaaaccccgccccctgaacttgcagagaagctgtaagggatgggcagccaggagtgag

SEQ ID NO: 43790 - DNA, 73 bp, Homo sapiens
ccagcaaaccccgccccctgaacttgcagagaagctgtaagggatgggcagccaggagtgagggagccccaac

SEQ ID NO: 43791 - DNA, 70 bp, Homo sapiens
aaaccccgccccctgaacttgcagagaagctgtaagggatgggcagccaggagtgagggagccccaaccc

SEQ ID NO: 43792 - DNA, 74 bp, Homo sapiens
aacttgcagagaagctgtaagggatgggcagccaggagtgagggagccccaacccccagagtatccaaacggca

SEQ ID NO: 43793 - DNA, 73 bp, Homo sapiens
agagaagctgtaagggatgggcagccaggagtgagggagccccaacccccagagtatccaaacggcagcccag

SEQ ID NO: 43794 - DNA, 72 bp, Homo sapiens
tgtaagggatgggcagccaggagtgagggagccccaacccccagagtatccaaacggcagcccagggacgag

SEQ ID NO: 43795 - DNA, 70 bp, Homo sapiens
gggcagccaggagtgagggagccccaacccccagagtatccaaacggcagcccagggacgaggggcgccc

SEQ ID NO: 43796 - DNA, 70 bp, Homo sapiens
cccaacccccagagtatccaaacggcagcccagggacgaggggcgccccctcttgcacccacatgaggag

SEQ ID NO: 43797 - DNA, 75 bp, Homo sapiens
agagtatccaaacggcagcccagggacgaggggcgccccctcttgcacccacatgaggaggcctggcagcaccag

SEQ ID NO: 43798 - DNA, 81 bp, Homo sapiens
agggacgaggggcgccccctcttgcacccacatgaggaggcctggcagcaccaggcagacgcacatcatgcaggccagacc

SEQ ID NO: 43799 - DNA, 86 bp, Homo sapiens
tcttgcacccacatgaggaggcctggcagcaccaggcagacgcacatcatgcaggccagacccggcccagcgaggcagcgaaaaca

SEQ ID NO: 43800 - DNA, 85 bp, Homo sapiens
ccacatgaggaggcctggcagcaccaggcagacgcacatcatgcaggccagacccggcccagcgaggcagcgaaaacactcctga

SEQ ID NO: 43801 - DNA, 80 bp, Homo sapiens
acatcatgcaggccagacccggcccagcgaggcagcgaaaacactcctgagcggcttctccatgccctattcgtcccaga

SEQ ID NO: 43802 - DNA, 76 bp, Homo sapiens
aggccagacccggcccagcgaggcagcgaaaacactcctgagcggcttctccatgccctattcgtcccagaggctg

SEQ ID NO: 43803 - DNA, 78 bp, Homo sapiens
ggcccagcgaggcagcgaaaacactcctgagcggcttctccatgccctattcgtcccagaggctgtccatgactaaaa

SEQ ID NO: 43804 - DNA, 77 bp, Homo sapiens
agcgaggcagcgaaaacactcctgagcggcttctccatgccctattcgtcccagaggctgtccatgactaaaaatta

SEQ ID NO: 43805 - DNA, 77 bp, Homo sapiens
aaacactcctgagcggcttctccatgccctattcgtcccagaggctgtccatgactaaaaattagctcagctgggaa

SEQ ID NO: 43806 - DNA, 77 bp, Homo sapiens
agcggcttctccatgccctattcgtcccagaggctgtccatgactaaaaattagctcagctgggaaccctcctgcca

SEQ ID NO: 43807 - DNA, 79 bp, Homo sapiens
ttctccatgccctattcgtcccagaggctgtccatgactaaaaattagctcagctgggaaccctcctgccatctgcttc

SEQ ID NO: 43808 - DNA, 79 bp, Homo sapiens
agaggctgtccatgactaaaaattagctcagctgggaaccctcctgccatctgcttctcagctcctccttttctcaaca

SEQ ID NO: 43809 - DNA, 77 bp, Homo sapiens
tgactaaaaattagctcagctgggaaccctcctgccatctgcttctcagctcctccttttctcaacacttttgtgct

SEQ ID NO: 43810 - DNA, 77 bp, Homo sapiens
aaaattagctcagctgggaaccctcctgccatctgcttctcagctcctccttttctcaacacttttgtgcttccaga

SEQ ID NO: 43811 - DNA, 76 bp, Homo sapiens
tgggaaccctcctgccatctgcttctcagctcctccttttctcaacacttttgtgcttccagacaaaactggtgaa

SEQ ID NO: 43812 - DNA, 79 bp, Homo sapiens
atctgcttctcagctcctccttttctcaacacttttgtgcttccagacaaaactggtgaagctgagagtgaccctggca

SEQ ID NO: 43813 - DNA, 75 bp, Homo sapiens
tcctccttttctcaacacttttgtgcttccagacaaaactggtgaagctgagagtgaccctggcatcccgaggtc

SEQ ID NO: 43814 - DNA, 75 bp, Homo sapiens
ttttctcaacacttttgtgcttccagacaaaactggtgaagctgagagtgaccctggcatcccgaggtccagccc

SEQ ID NO: 43815 - DNA, 75 bp, Homo sapiens
acttttgtgcttccagacaaaactggtgaagctgagagtgaccctggcatcccgaggtccagccctctggctccc

SEQ ID NO: 43816 - DNA, 76 bp, Homo sapiens
ttccagacaaaactggtgaagctgagagtgaccctggcatcccgaggtccagccctctggctccccacccagtggc

SEQ ID NO: 43817 - DNA, 73 bp, Homo sapiens
aactggtgaagctgagagtgaccctggcatcccgaggtccagccctctggctccccacccagtggccccccaa

SEQ ID NO: 43818 - DNA, 68 bp, Homo sapiens
accctggcatcccgaggtccagccctctggctccccacccagtggccccccaagccccaccctgggcc

SEQ ID NO: 43819 - DNA, 68 bp, Homo sapiens
aggtccagccctctggctccccacccagtggccccccaagccccaccctgggcccccagacgcccgca

SEQ ID NO: 43820 - DNA, 70 bp, Homo sapiens
cacccagtggccccccaagccccaccctgggcccccagacgcccgcacaccaacacaagacaggcacctc

SEQ ID NO: 43821 - DNA, 69 bp, Homo sapiens
agtggccccccaagccccaccctgggcccccagacgcccgcacaccaacacaagacaggcacctcccag

SEQ ID NO: 43822 - DNA, 71 bp, Homo sapiens
cccaccctgggcccccagacgcccgcacaccaacacaagacaggcacctcccaggggtccttgctctgtgg

SEQ ID NO: 43823 - DNA, 74 bp, Homo sapiens
ctgggcccccagacgcccgcacaccaacacaagacaggcacctcccaggggtccttgctctgtggtgacagccg

SEQ ID NO: 43824 - DNA, 73 bp, Homo sapiens
agacgcccgcacaccaacacaagacaggcacctcccaggggtccttgctctgtggtgacagccggccggcccc

SEQ ID NO: 43825 - DNA, 73 bp, Homo sapiens
acaccaacacaagacaggcacctcccaggggtccttgctctgtggtgacagccggccggcccctgcggtggga

SEQ ID NO: 43826 - DNA, 72 bp, Homo sapiens
aagacaggcacctcccaggggtccttgctctgtggtgacagccggccggcccctgcggtgggagcgggagtc

SEQ ID NO: 43827 - DNA, 70 bp, Homo sapiens
ccaggggtccttgctctgtggtgacagccggccggcccctgcggtgggagcgggagtctggggtcgggaa

SEQ ID NO: 43828 - DNA, 71 bp, Homo sapiens
tggtgacagccggccggcccctgcggtgggagcgggagtctggggtcgggaagggtctctgccgggatctc

SEQ ID NO: 43829 - DNA, 68 bp, Homo sapiens
agccggccggcccctgcggtgggagcgggagtctggggtcgggaagggtctctgccgggatctcgcgg

SEQ ID NO: 43830 - DNA, 70 bp, Homo sapiens
tgcggtgggagcgggagtctggggtcgggaagggtctctgccgggatctcgcgggctccgggcgcctttg

SEQ ID NO: 43831 - DNA, 71 bp, Homo sapiens
gggtcgggaagggtctctgccgggatctcgcgggctccgggcgcctttggcgtctcctcggtgcaagcttc

SEQ ID NO: 43832 - DNA, 80 bp, Homo sapiens
tctgccgggatctcgcgggctccgggcgcctttggcgtctcctcggtgcaagcttctctgcctcggcagctcagtgtctc

SEQ ID NO: 43833 - DNA, 81 bp, Homo sapiens
tctcgcgggctccgggcgcctttggcgtctcctcggtgcaagcttctctgcctcggcagctcagtgtctcctctcagcggc

SEQ ID NO: 43834 - DNA, 80 bp, Homo sapiens
gcgcctttggcgtctcctcggtgcaagcttctctgcctcggcagctcagtgtctcctctcagcggccgtcccaggaggaa

SEQ ID NO: 43835 - DNA, 83 bp, Homo sapiens
tcggtgcaagcttctctgcctcggcagctcagtgtctcctctcagcggccgtcccaggaggaactgcagccggattgtagaca

SEQ ID NO: 43836 - DNA, 82 bp, Homo sapiens
ttctctgcctcggcagctcagtgtctcctctcagcggccgtcccaggaggaactgcagccggattgtagacaggacacagaa

SEQ ID NO: 43837 - DNA, 81 bp, Homo sapiens
gcagctcagtgtctcctctcagcggccgtcccaggaggaactgcagccggattgtagacaggacacagaaacgcttgtctg

SEQ ID NO: 43838 - DNA, 82 bp, Homo sapiens
tctcagcggccgtcccaggaggaactgcagccggattgtagacaggacacagaaacgcttgtctggtgcaggcgccatgctc

SEQ ID NO: 43839 - DNA, 81 bp, Homo sapiens
ccgtcccaggaggaactgcagccggattgtagacaggacacagaaacgcttgtctggtgcaggcgccatgctcgccacaca

SEQ ID NO: 43840 - DNA, 74 bp, Homo sapiens
ggacacagaaacgcttgtctggtgcaggcgccatgctcgccacacaggcccggggtgtccagggttttccggaa

SEQ ID NO: 43841 - DNA, 71 bp, Homo sapiens
agaaacgcttgtctggtgcaggcgccatgctcgccacacaggcccggggtgtccagggttttccggaaggg

SEQ ID NO: 43842 - DNA, 70 bp, Homo sapiens
aggcgccatgctcgccacacaggcccggggtgtccagggttttccggaaggggctcgtgtgttcattaaa

SEQ ID NO: 43843 - DNA, 67 bp, Homo sapiens
cacacaggcccggggtgtccagggttttccggaaggggctcgtgtgttcattaaagcccgtgataaa

SEQ ID NO: 43844 - DNA, 75 bp, Homo sapiens
tttccggaaggggctcgtgtgttcattaaagcccgtgataaaatgctggagtgcaggatcaggaacaggtgatac

SEQ ID NO: 43845 - DNA, 78 bp, Homo sapiens
gggctcgtgtgttcattaaagcccgtgataaaatgctggagtgcaggatcaggaacaggtgatacctccagggccagc

SEQ ID NO: 43846 - DNA, 83 bp, Homo sapiens
tgataaaatgctggagtgcaggatcaggaacaggtgatacctccagggccagcccgcaatgcagagccacaccggctccagga

SEQ ID NO: 43847 - DNA, 80 bp, Homo sapiens
aaatgctggagtgcaggatcaggaacaggtgatacctccagggccagcccgcaatgcagagccacaccggctccaggaag

SEQ ID NO: 43848 - DNA, 77 bp, Homo sapiens
aggatcaggaacaggtgatacctccagggccagcccgcaatgcagagccacaccggctccaggaagtcttcctcgaa

SEQ ID NO: 43849 - DNA, 74 bp, Homo sapiens
aacaggtgatacctccagggccagcccgcaatgcagagccacaccggctccaggaagtcttcctcgaacccaaa

SEQ ID NO: 43850 - DNA, 75 bp, Homo sapiens
atacctccagggccagcccgcaatgcagagccacaccggctccaggaagtcttcctcgaacccaaagctcagggc

SEQ ID NO: 43851 - DNA, 79 bp, Homo sapiens
agcccgcaatgcagagccacaccggctccaggaagtcttcctcgaacccaaagctcagggctgcagagcaaggagagga

SEQ ID NO: 43852 - DNA, 79 bp, Homo sapiens
atgcagagccacaccggctccaggaagtcttcctcgaacccaaagctcagggctgcagagcaaggagaggacttgctaa

SEQ ID NO: 43853 - DNA, 75 bp, Homo sapiens
acaccggctccaggaagtcttcctcgaacccaaagctcagggctgcagagcaaggagaggacttgctaaccttca

SEQ ID NO: 43854 - DNA, 74 bp, Homo sapiens
aggaagtcttcctcgaacccaaagctcagggctgcagagcaaggagaggacttgctaaccttcacacccaccaa

SEQ ID NO: 43855 - DNA, 76 bp, Homo sapiens
tcttcctcgaacccaaagctcagggctgcagagcaaggagaggacttgctaaccttcacacccaccaagcaggccc

SEQ ID NO: 43856 - DNA, 76 bp, Homo sapiens
aaagctcagggctgcagagcaaggagaggacttgctaaccttcacacccaccaagcaggccctcttgtgagtttaa

SEQ ID NO: 43857 - DNA, 72 bp, Homo sapiens
aaggagaggacttgctaaccttcacacccaccaagcaggccctcttgtgagtttaactgattttgccattta

SEQ ID NO: 43858 - DNA, 70 bp, Homo sapiens
acttgctaaccttcacacccaccaagcaggccctcttgtgagtttaactgattttgccatttaaacattt

SEQ ID NO: 43859 - DNA, 71 bp, Homo sapiens
aggccctcttgtgagtttaactgattttgccatttaaacattttgttaaggaatgaagatgcttccttcat

SEQ ID NO: 43860 - DNA, 71 bp, Homo sapiens
gtttaactgattttgccatttaaacattttgttaaggaatgaagatgcttccttcattccttaacattcca

SEQ ID NO: 43861 - DNA, 72 bp, Homo sapiens
aaacattttgttaaggaatgaagatgcttccttcattccttaacattccaagctggacgtgcccttcgtaga

SEQ ID NO: 43862 - DNA, 72 bp, Homo sapiens
ttttgttaaggaatgaagatgcttccttcattccttaacattccaagctggacgtgcccttcgtagacgagg

SEQ ID NO: 43863 - DNA, 73 bp, Homo sapiens
aatgaagatgcttccttcattccttaacattccaagctggacgtgcccttcgtagacgagggcaaattacttg

SEQ ID NO: 43864 - DNA, 73 bp, Homo sapiens
ttccttcattccttaacattccaagctggacgtgcccttcgtagacgagggcaaattacttgtgatgggtgcg

SEQ ID NO: 43865 - DNA, 74 bp, Homo sapiens
taacattccaagctggacgtgcccttcgtagacgagggcaaattacttgtgatgggtgcgtgggaggcacttaa

SEQ ID NO: 43866 - DNA, 74 bp, Homo sapiens
ttccaagctggacgtgcccttcgtagacgagggcaaattacttgtgatgggtgcgtgggaggcacttaacgtgc

SEQ ID NO: 43867 - DNA, 71 bp, Homo sapiens
acgtgcccttcgtagacgagggcaaattacttgtgatgggtgcgtgggaggcacttaacgtgccggcaagg

SEQ ID NO: 43868 - DNA, 74 bp, Homo sapiens
tcgtagacgagggcaaattacttgtgatgggtgcgtgggaggcacttaacgtgccggcaagggcgggcggctga

SEQ ID NO: 43869 - DNA, 74 bp, Homo sapiens
aaattacttgtgatgggtgcgtgggaggcacttaacgtgccggcaagggcgggcggctgagccagcctctcagg

SEQ ID NO: 43870 - DNA, 75 bp, Homo sapiens
cttgtgatgggtgcgtgggaggcacttaacgtgccggcaagggcgggcggctgagccagcctctcaggggcctcc

SEQ ID NO: 43871 - DNA, 75 bp, Homo sapiens
tgggaggcacttaacgtgccggcaagggcgggcggctgagccagcctctcaggggcctcctccgcgtgtgactcc

SEQ ID NO: 43872 - DNA, 73 bp, Homo sapiens
acttaacgtgccggcaagggcgggcggctgagccagcctctcaggggcctcctccgcgtgtgactccgtggcc

SEQ ID NO: 43873 - DNA, 75 bp, Homo sapiens
ggcaagggcgggcggctgagccagcctctcaggggcctcctccgcgtgtgactccgtggcccccgtgttctctgc

SEQ ID NO: 43874 - DNA, 77 bp, Homo sapiens
ctgagccagcctctcaggggcctcctccgcgtgtgactccgtggcccccgtgttctctgctttctgtgcactcgccc

SEQ ID NO: 43875 - DNA, 74 bp, Homo sapiens
cctcctccgcgtgtgactccgtggcccccgtgttctctgctttctgtgcactcgccccggccccatcctcaggc

SEQ ID NO: 43876 - DNA, 78 bp, Homo sapiens
tgtgactccgtggcccccgtgttctctgctttctgtgcactcgccccggccccatcctcaggccaccgccagctcaga

SEQ ID NO: 43877 - DNA, 76 bp, Homo sapiens
gtggcccccgtgttctctgctttctgtgcactcgccccggccccatcctcaggccaccgccagctcagaggcctcc

SEQ ID NO: 43878 - DNA, 77 bp, Homo sapiens
tgttctctgctttctgtgcactcgccccggccccatcctcaggccaccgccagctcagaggcctccccacccctcta

SEQ ID NO: 43879 - DNA, 74 bp, Homo sapiens
cccggccccatcctcaggccaccgccagctcagaggcctccccacccctctacctgtcagaactgcaaatctcc

SEQ ID NO: 43880 - DNA, 75 bp, Homo sapiens
atcctcaggccaccgccagctcagaggcctccccacccctctacctgtcagaactgcaaatctcctgcccctccc

SEQ ID NO: 43881 - DNA, 75 bp, Homo sapiens
accgccagctcagaggcctccccacccctctacctgtcagaactgcaaatctcctgcccctccctcacggagcac

SEQ ID NO: 43882 - DNA, 75 bp, Homo sapiens
tcagaggcctccccacccctctacctgtcagaactgcaaatctcctgcccctccctcacggagcacgaccctcca

SEQ ID NO: 43883 - DNA, 75 bp, Homo sapiens
cccacccctctacctgtcagaactgcaaatctcctgcccctccctcacggagcacgaccctccatgcccatccaa

SEQ ID NO: 43884 - DNA, 76 bp, Homo sapiens
ctctacctgtcagaactgcaaatctcctgcccctccctcacggagcacgaccctccatgcccatccaacctcccag

SEQ ID NO: 43885 - DNA, 74 bp, Homo sapiens
agaactgcaaatctcctgcccctccctcacggagcacgaccctccatgcccatccaacctcccaggcccacctc

SEQ ID NO: 43886 - DNA, 73 bp, Homo sapiens
aaatctcctgcccctccctcacggagcacgaccctccatgcccatccaacctcccaggcccacctcggctgcc

SEQ ID NO: 43887 - DNA, 76 bp, Homo sapiens
cctccctcacggagcacgaccctccatgcccatccaacctcccaggcccacctcggctgcccccctgctctctgca

SEQ ID NO: 43888 - DNA, 76 bp, Homo sapiens
acggagcacgaccctccatgcccatccaacctcccaggcccacctcggctgcccccctgctctctgcagggtctga

SEQ ID NO: 43889 - DNA, 80 bp, Homo sapiens
caggcccacctcggctgcccccctgctctctgcagggtctgaggcagaagcacggcctcctgcacatgtggaccaaggac

SEQ ID NO: 43890 - DNA, 78 bp, Homo sapiens
tctgaggcagaagcacggcctcctgcacatgtggaccaaggaccagctgcccagaaggccctgccccttcccaccttc

SEQ ID NO: 43891 - DNA, 76 bp, Homo sapiens
agaagcacggcctcctgcacatgtggaccaaggaccagctgcccagaaggccctgccccttcccaccttccagtgc

SEQ ID NO: 43892 - DNA, 76 bp, Homo sapiens
tcctgcacatgtggaccaaggaccagctgcccagaaggccctgccccttcccaccttccagtgcccgctgggcagg

SEQ ID NO: 43893 - DNA, 72 bp, Homo sapiens
atgtggaccaaggaccagctgcccagaaggccctgccccttcccaccttccagtgcccgctgggcagggggc

SEQ ID NO: 43894 - DNA, 71 bp, Homo sapiens
aggaccagctgcccagaaggccctgccccttcccaccttccagtgcccgctgggcagggggctccctccca

SEQ ID NO: 43895 - DNA, 71 bp, Homo sapiens
tgccccttcccaccttccagtgcccgctgggcagggggctccctcccagccccaggggtgcgggcagcacc

SEQ ID NO: 43896 - DNA, 72 bp, Homo sapiens
accttccagtgcccgctgggcagggggctccctcccagccccaggggtgcgggcagcaccgttgtctgagga

SEQ ID NO: 43897 - DNA, 73 bp, Homo sapiens
agtgcccgctgggcagggggctccctcccagccccaggggtgcgggcagcaccgttgtctgaggacacctcag

SEQ ID NO: 43898 - DNA, 73 bp, Homo sapiens
agggggctccctcccagccccaggggtgcgggcagcaccgttgtctgaggacacctcaggcctggggtcatca

SEQ ID NO: 43899 - DNA, 73 bp, Homo sapiens
ctcccagccccaggggtgcgggcagcaccgttgtctgaggacacctcaggcctggggtcatcaccctgtcccg

SEQ ID NO: 43900 - DNA, 72 bp, Homo sapiens
caggggtgcgggcagcaccgttgtctgaggacacctcaggcctggggtcatcaccctgtcccggggttttca

SEQ ID NO: 43901 - DNA, 72 bp, Homo sapiens
gtgcgggcagcaccgttgtctgaggacacctcaggcctggggtcatcaccctgtcccggggttttcaccgtg

SEQ ID NO: 43902 - DNA, 68 bp, Homo sapiens
ttgtctgaggacacctcaggcctggggtcatcaccctgtcccggggttttcaccgtgtccccgggttg

SEQ ID NO: 43903 - DNA, 66 bp, Homo sapiens
acacctcaggcctggggtcatcaccctgtcccggggttttcaccgtgtccccgggttgtcaccgtg

SEQ ID NO: 43904 - DNA, 66 bp, Homo sapiens
tcaggcctggggtcatcaccctgtcccggggttttcaccgtgtccccgggttgtcaccgtgtcccc

SEQ ID NO: 43905 - DNA, 65 bp, Homo sapiens
tcatcaccctgtcccggggttttcaccgtgtccccgggttgtcaccgtgtccccgggtcgtcacc

SEQ ID NO: 43906 - DNA, 64 bp, Homo sapiens
ctgtcccggggttttcaccgtgtccccgggttgtcaccgtgtccccgggtcgtcaccgtggcca

SEQ ID NO: 43907 - DNA, 70 bp, Homo sapiens
cccgggttgtcaccgtgtccccgggtcgtcaccgtggccagcccctcgcagcggctctggcctggcttcc

SEQ ID NO: 43908 - DNA, 71 bp, Homo sapiens
ttgtcaccgtgtccccgggtcgtcaccgtggccagcccctcgcagcggctctggcctggcttccccgcctt

SEQ ID NO: 43909 - DNA, 72 bp, Homo sapiens
gtccccgggtcgtcaccgtggccagcccctcgcagcggctctggcctggcttccccgcctttgccatcttcc

SEQ ID NO: 43910 - DNA, 75 bp, Homo sapiens
gtcaccgtggccagcccctcgcagcggctctggcctggcttccccgcctttgccatcttcccctggcttcctcca

SEQ ID NO: 43911 - DNA, 76 bp, Homo sapiens
agcccctcgcagcggctctggcctggcttccccgcctttgccatcttcccctggcttcctccagggtgctgctgaa

SEQ ID NO: 43912 - DNA, 71 bp, Homo sapiens
ctggcctggcttccccgcctttgccatcttcccctggcttcctccagggtgctgctgaacctgggggtggg

SEQ ID NO: 43913 - DNA, 70 bp, Homo sapiens
ttgccatcttcccctggcttcctccagggtgctgctgaacctgggggtgggggctggggaaggtggaggg

SEQ ID NO: 43914 - DNA, 71 bp, Homo sapiens
tggcttcctccagggtgctgctgaacctgggggtgggggctggggaaggtggaggggcacctgtgtgaagg

SEQ ID NO: 43915 - DNA, 69 bp, Homo sapiens
cctccagggtgctgctgaacctgggggtgggggctggggaaggtggaggggcacctgtgtgaaggtggg

SEQ ID NO: 43916 - DNA, 69 bp, Homo sapiens
tgctgaacctgggggtgggggctggggaaggtggaggggcacctgtgtgaaggtggggagggaggcgaa

SEQ ID NO: 43917 - DNA, 67 bp, Homo sapiens
ggtgggggctggggaaggtggaggggcacctgtgtgaaggtggggagggaggcgaagcccgggtgcc

SEQ ID NO: 43918 - DNA, 68 bp, Homo sapiens
tggggaaggtggaggggcacctgtgtgaaggtggggagggaggcgaagcccgggtgccctcggcccag

SEQ ID NO: 43919 - DNA, 67 bp, Homo sapiens
gaggggcacctgtgtgaaggtggggagggaggcgaagcccgggtgccctcggcccagtccccgcgtt

SEQ ID NO: 43920 - DNA, 67 bp, Homo sapiens
acctgtgtgaaggtggggagggaggcgaagcccgggtgccctcggcccagtccccgcgtttctggcc

SEQ ID NO: 43921 - DNA, 67 bp, Homo sapiens
aggcgaagcccgggtgccctcggcccagtccccgcgtttctggcccggggaagccctgaagcttgtg

SEQ ID NO: 43922 - DNA, 71 bp, Homo sapiens
ggcccagtccccgcgtttctggcccggggaagccctgaagcttgtgtgagccatgggcccctccctctgta

SEQ ID NO: 43923 - DNA, 69 bp, Homo sapiens
agtccccgcgtttctggcccggggaagccctgaagcttgtgtgagccatgggcccctccctctgtaggg

SEQ ID NO: 43924 - DNA, 72 bp, Homo sapiens
tttctggcccggggaagccctgaagcttgtgtgagccatgggcccctccctctgtaggggatgaggccggcc

SEQ ID NO: 43925 - DNA, 73 bp, Homo sapiens
aagccctgaagcttgtgtgagccatgggcccctccctctgtaggggatgaggccggccggggcctgagttgga

SEQ ID NO: 43926 - DNA, 74 bp, Homo sapiens
tgagccatgggcccctccctctgtaggggatgaggccggccggggcctgagttggagccagcaccttctttgga

SEQ ID NO: 43927 - DNA, 70 bp, Homo sapiens
cctccctctgtaggggatgaggccggccggggcctgagttggagccagcaccttctttggagaattttaa

SEQ ID NO: 43928 - DNA, 74 bp, Homo sapiens
tgtaggggatgaggccggccggggcctgagttggagccagcaccttctttggagaattttaactgcctgagtga

SEQ ID NO: 43929 - DNA, 73 bp, Homo sapiens
aggccggccggggcctgagttggagccagcaccttctttggagaattttaactgcctgagtgagtcagtgaaa

SEQ ID NO: 43930 - DNA, 78 bp, Homo sapiens
gcctgagttggagccagcaccttctttggagaattttaactgcctgagtgagtcagtgaaagtgtggacgggagctca

SEQ ID NO: 43931 - DNA, 76 bp, Homo sapiens
agttggagccagcaccttctttggagaattttaactgcctgagtgagtcagtgaaagtgtggacgggagctcagga

SEQ ID NO: 43932 - DNA, 72 bp, Homo sapiens
cttctttggagaattttaactgcctgagtgagtcagtgaaagtgtggacgggagctcaggagactttggttt

SEQ ID NO: 43933 - DNA, 74 bp, Homo sapiens
agaattttaactgcctgagtgagtcagtgaaagtgtggacgggagctcaggagactttggttttgttcgcattc

SEQ ID NO: 43934 - DNA, 75 bp, Homo sapiens
taactgcctgagtgagtcagtgaaagtgtggacgggagctcaggagactttggttttgttcgcattccccagaaa

SEQ ID NO: 43935 - DNA, 71 bp, Homo sapiens
agtgagtcagtgaaagtgtggacgggagctcaggagactttggttttgttcgcattccccagaaaccccac

SEQ ID NO: 43936 - DNA, 68 bp, Homo sapiens
aaagtgtggacgggagctcaggagactttggttttgttcgcattccccagaaaccccacgctggttgg

SEQ ID NO: 43937 - DNA, 69 bp, Homo sapiens
acgggagctcaggagactttggttttgttcgcattccccagaaaccccacgctggttggggcacaggct

SEQ ID NO: 43938 - DNA, 69 bp, Homo sapiens
agactttggttttgttcgcattccccagaaaccccacgctggttggggcacaggcttggggaagcgaga

SEQ ID NO: 43939 - DNA, 73 bp, Homo sapiens
ttggttttgttcgcattccccagaaaccccacgctggttggggcacaggcttggggaagcgagagccatcagc

SEQ ID NO: 43940 - DNA, 73 bp, Homo sapiens
attccccagaaaccccacgctggttggggcacaggcttggggaagcgagagccatcagcccggtgctgagagg

SEQ ID NO: 43941 - DNA, 75 bp, Homo sapiens
caggcttggggaagcgagagccatcagcccggtgctgagagggccctccccacctgcacccttctgtgccgaaaa

SEQ ID NO: 43942 - DNA, 75 bp, Homo sapiens
ggaagcgagagccatcagcccggtgctgagagggccctccccacctgcacccttctgtgccgaaaaagcagactt

SEQ ID NO: 43943 - DNA, 74 bp, Homo sapiens
agagccatcagcccggtgctgagagggccctccccacctgcacccttctgtgccgaaaaagcagactttggggc

SEQ ID NO: 43944 - DNA, 71 bp, Homo sapiens
ggtgctgagagggccctccccacctgcacccttctgtgccgaaaaagcagactttggggcccggagagaag

SEQ ID NO: 43945 - DNA, 68 bp, Homo sapiens
agagggccctccccacctgcacccttctgtgccgaaaaagcagactttggggcccggagagaaggaaa

SEQ ID NO: 43946 - DNA, 68 bp, Homo sapiens
ccacctgcacccttctgtgccgaaaaagcagactttggggcccggagagaaggaaaccagtgcttttt

SEQ ID NO: 43947 - DNA, 63 bp, Homo sapiens
gaaaaagcagactttggggcccggagagaaggaaaccagtgcttttttctccccccccaaaaa

SEQ ID NO: 43948 - DNA, 61 bp, Homo sapiens
actttggggcccggagagaaggaaaccagtgcttttttctccccccccaaaaaatcaaaaa

SEQ ID NO: 43949 - DNA, 61 bp, Homo sapiens
cccggagagaaggaaaccagtgcttttttctccccccccaaaaaatcaaaaaagtaaaaga

SEQ ID NO: 43950 - DNA, 62 bp, Homo sapiens
agaaggaaaccagtgcttttttctccccccccaaaaaatcaaaaaagtaaaagagagcccga

SEQ ID NO: 43951 - DNA, 64 bp, Homo sapiens
agtgcttttttctccccccccaaaaaatcaaaaaagtaaaagagagcccgagccgagcggtcac

SEQ ID NO: 43952 - DNA, 69 bp, Homo sapiens
ccaaaaaatcaaaaaagtaaaagagagcccgagccgagcggtcacccagtgtgactagcaggtggcggg

SEQ ID NO: 43953 - DNA, 71 bp, Homo sapiens
aaagtaaaagagagcccgagccgagcggtcacccagtgtgactagcaggtggcggggccctgggaccaaga

SEQ ID NO: 43954 - DNA, 74 bp, Homo sapiens
aaagagagcccgagccgagcggtcacccagtgtgactagcaggtggcggggccctgggaccaagatgtagagaa

SEQ ID NO: 43955 - DNA, 75 bp, Homo sapiens
cgagcggtcacccagtgtgactagcaggtggcggggccctgggaccaagatgtagagaacctcagtgtaaagcta

SEQ ID NO: 43956 - DNA, 72 bp, Homo sapiens
acccagtgtgactagcaggtggcggggccctgggaccaagatgtagagaacctcagtgtaaagctacgccgg

SEQ ID NO: 43957 - DNA, 70 bp, Homo sapiens
gtggcggggccctgggaccaagatgtagagaacctcagtgtaaagctacgccgggccggggttagctcca

SEQ ID NO: 43958 - DNA, 71 bp, Homo sapiens
tgggaccaagatgtagagaacctcagtgtaaagctacgccgggccggggttagctccagcctgggtataaa

SEQ ID NO: 43959 - DNA, 71 bp, Homo sapiens
aagatgtagagaacctcagtgtaaagctacgccgggccggggttagctccagcctgggtataaacgcacgc

SEQ ID NO: 43960 - DNA, 68 bp, Homo sapiens
agaacctcagtgtaaagctacgccgggccggggttagctccagcctgggtataaacgcacgccgggcc

SEQ ID NO: 43961 - DNA, 67 bp, Homo sapiens
tgtaaagctacgccgggccggggttagctccagcctgggtataaacgcacgccgggccggggttagc

SEQ ID NO: 43962 - DNA, 66 bp, Homo sapiens
gtataaacgcacgccgggccggggttagctccagcctgggtataaacgcacgccgggccggggtta

SEQ ID NO: 43963 - DNA, 66 bp, Homo sapiens
ataaacgcacgccgggccggggttagctccagcctgggtataaacgcacgccgggccggggttagc

SEQ ID NO: 43964 - DNA, 67 bp, Homo sapiens
acgccgggccggggttagctccagcctgggtataaacgcacgccgggccggggttagctccagcctg

SEQ ID NO: 43965 - DNA, 68 bp, Homo sapiens
gccggggttagctccagcctgggtataaacgcacgccgggccggggttagctccagcctgggtataaa

SEQ ID NO: 43966 - DNA, 67 bp, Homo sapiens
ccggggttagctccagcctgggtataaacgcacgccgggccggggttagctccagcctgggtataaa

SEQ ID NO: 43967 - DNA, 67 bp, Homo sapiens
agcctgggtataaacgcacgccgggccggggttagctccagcctgggtataaacgcacgccgggccg

SEQ ID NO: 43968 - DNA, 67 bp, Homo sapiens; identical to SEQ ID NO: 43964

SEQ ID NO: 43969 - DNA, 67 bp, Homo sapiens; identical to SEQ ID NO: 43966

SEQ ID NO: 43970 - DNA, 67 bp, Homo sapiens; identical to SEQ ID NO: 43967

SEQ ID NO: 43971 - DNA, 69 bp, Homo sapiens
tataaacgcacgccgggccggggttagctccagcctgggtataaacgcacgccgggccggcgttagctc

SEQ ID NO: 43972 - DNA, 71 bp, Homo sapiens
ttagctccagcctgggtataaacgcacgccgggccggcgttagctccagcctgggtataaacgcacgccgg

SEQ ID NO: 43973 - DNA, 67 bp, Homo sapiens
tataaacgcacgccgggccggcgttagctccagcctgggtataaacgcacgccgggccggggttagt

SEQ ID NO: 43974 - DNA, 69 bp, Homo sapiens
cgggccggcgttagctccagcctgggtataaacgcacgccgggccggggttagttccagcctgagagtc

SEQ ID NO: 43975 - DNA, 69 bp, Homo sapiens
ttagctccagcctgggtataaacgcacgccgggccggggttagttccagcctgagagtcgggggtcgag

SEQ ID NO: 43976 - DNA, 68 bp, Homo sapiens
agcctgggtataaacgcacgccgggccggggttagttccagcctgagagtcgggggtcgagggtgctg

SEQ ID NO: 43977 - DNA, 69 bp, Homo sapiens
tataaacgcacgccgggccggggttagttccagcctgagagtcgggggtcgagggtgctgggctttcta

SEQ ID NO: 43978 - DNA, 69 bp, Homo sapiens
cgggccggggttagttccagcctgagagtcgggggtcgagggtgctgggctttctaggaaggctggaca

SEQ ID NO: 43979 - DNA, 70 bp, Homo sapiens
gggttagttccagcctgagagtcgggggtcgagggtgctgggctttctaggaaggctggacagcccttcc

SEQ ID NO: 43980 - DNA, 70 bp, Homo sapiens
agcctgagagtcgggggtcgagggtgctgggctttctaggaaggctggacagcccttccctccactaggg

SEQ ID NO: 43981 - DNA, 69 bp, Homo sapiens
gggtcgagggtgctgggctttctaggaaggctggacagcccttccctccactagggggtacacgccgac

SEQ ID NO: 43982 - DNA, 70 bp, Homo sapiens
tgctgggctttctaggaaggctggacagcccttccctccactagggggtacacgccgaccacccgtctcc

SEQ ID NO: 43983 - DNA, 69 bp, Homo sapiens
ggctttctaggaaggctggacagcccttccctccactagggggtacacgccgaccacccgtctcctctc

SEQ ID NO: 43984 - DNA, 70 bp, Homo sapiens
tttctaggaaggctggacagcccttccctccactagggggtacacgccgaccacccgtctcctctccatg

SEQ ID NO: 43985 - DNA, 72 bp, Homo sapiens
tctaggaaggctggacagcccttccctccactagggggtacacgccgaccacccgtctcctctccatggcag

SEQ ID NO: 43986 - DNA, 71 bp, Homo sapiens
aaggctggacagcccttccctccactagggggtacacgccgaccacccgtctcctctccatggcaggtgcc

SEQ ID NO: 43987 - DNA, 72 bp, Homo sapiens
acagcccttccctccactagggggtacacgccgaccacccgtctcctctccatggcaggtgcctctgtccca

SEQ ID NO: 43988 - DNA, 72 bp, Homo sapiens
agcccttccctccactagggggtacacgccgaccacccgtctcctctccatggcaggtgcctctgtcccagc

SEQ ID NO: 43989 - DNA, 74 bp, Homo sapiens
ttccctccactagggggtacacgccgaccacccgtctcctctccatggcaggtgcctctgtcccagctggccta

SEQ ID NO: 43990 - DNA, 76 bp, Homo sapiens
tccactagggggtacacgccgaccacccgtctcctctccatggcaggtgcctctgtcccagctggcctatggccca

SEQ ID NO: 43991 - DNA, 76 bp, Homo sapiens
gggtacacgccgaccacccgtctcctctccatggcaggtgcctctgtcccagctggcctatggcccagccgtccca

SEQ ID NO: 43992 - DNA, 77 bp, Homo sapiens
acgccgaccacccgtctcctctccatggcaggtgcctctgtcccagctggcctatggcccagccgtcccaccacaga

SEQ ID NO: 43993 - DNA, 77 bp, Homo sapiens
cgtctcctctccatggcaggtgcctctgtcccagctggcctatggcccagccgtcccaccacagaccctctacaacc

SEQ ID NO: 43994 - DNA, 75 bp, Homo sapiens
aggtgcctctgtcccagctggcctatggcccagccgtcccaccacagaccctctacaaccccgcccagcagatcc

SEQ ID NO: 43995 - DNA, 76 bp, Homo sapiens
tatggcccagccgtcccaccacagaccctctacaaccccgcccagcagatcctggcctacgcaggcttccgcctga

SEQ ID NO: 43996 - DNA, 73 bp, Homo sapiens
ccgtcccaccacagaccctctacaaccccgcccagcagatcctggcctacgcaggcttccgcctgacgcccga

SEQ ID NO: 43997 - DNA, 74 bp, Homo sapiens
tctacaaccccgcccagcagatcctggcctacgcaggcttccgcctgacgcccgagcccgtcccgacctgctcg

SEQ ID NO: 43998 - DNA, 71 bp, Homo sapiens
tacgcaggcttccgcctgacgcccgagcccgtcccgacctgctcgtcctaccctctgccccttcaggtagg

SEQ ID NO: 43999 - DNA, 73 bp, Homo sapiens
tccgcctgacgcccgagcccgtcccgacctgctcgtcctaccctctgccccttcaggtagggccagcatcacc

SEQ ID NO: 44000 - DNA, 74 bp, Homo sapiens
ccgagcccgtcccgacctgctcgtcctaccctctgccccttcaggtagggccagcatcacctgctggagttgga

SEQ ID NO: 44001 - DNA, 78 bp, Homo sapiens
tcccgacctgctcgtcctaccctctgccccttcaggtagggccagcatcacctgctggagttggacgcgctggtcaca

SEQ ID NO: 44002 - DNA, 79 bp, Homo sapiens
tcgtcctaccctctgccccttcaggtagggccagcatcacctgctggagttggacgcgctggtcacaggcagtgggatg

SEQ ID NO: 44003 - DNA, 80 bp, Homo sapiens
ctctgccccttcaggtagggccagcatcacctgctggagttggacgcgctggtcacaggcagtgggatggacaggatggg

SEQ ID NO: 44004 - DNA, 80 bp, Homo sapiens
ttcaggtagggccagcatcacctgctggagttggacgcgctggtcacaggcagtgggatggacaggatggggctggggtc

SEQ ID NO: 44005 - DNA, 79 bp, Homo sapiens
agcatcacctgctggagttggacgcgctggtcacaggcagtgggatggacaggatggggctggggtcggaggggatgag

SEQ ID NO: 44006 - DNA, 79 bp, Homo sapiens
ctgctggagttggacgcgctggtcacaggcagtgggatggacaggatggggctggggtcggaggggatgaggtcttgca

SEQ ID NO: 44007 - DNA, 78 bp, Homo sapiens
tcacaggcagtgggatggacaggatggggctggggtcggaggggatgaggtcttgcagccgcctcaccttctggatta

SEQ ID NO: 44008 - DNA, 74 bp, Homo sapiens
agtgggatggacaggatggggctggggtcggaggggatgaggtcttgcagccgcctcaccttctggattaggga

SEQ ID NO: 44009 - DNA, 73 bp, Homo sapiens
acaggatggggctggggtcggaggggatgaggtcttgcagccgcctcaccttctggattagggatgggaggtg

SEQ ID NO: 44010 - DNA, 75 bp, Homo sapiens
gggatgaggtcttgcagccgcctcaccttctggattagggatgggaggtggggggcagtgacaaccctgccgtca

SEQ ID NO: 44011 - DNA, 73 bp, Homo sapiens
cctcaccttctggattagggatgggaggtggggggcagtgacaaccctgccgtcagggcacaacctccctgca

SEQ ID NO: 44012 - DNA, 73 bp, Homo sapiens
cttctggattagggatgggaggtggggggcagtgacaaccctgccgtcagggcacaacctccctgcaagtatg

SEQ ID NO: 44013 - DNA, 72 bp, Homo sapiens
tagggatgggaggtggggggcagtgacaaccctgccgtcagggcacaacctccctgcaagtatggccgggga

SEQ ID NO: 44014 - DNA, 72 bp, Homo sapiens
gggggcagtgacaaccctgccgtcagggcacaacctccctgcaagtatggccggggaccgcgccaggtggcc

SEQ ID NO: 44015 - DNA, 73 bp, Homo sapiens
agtgacaaccctgccgtcagggcacaacctccctgcaagtatggccggggaccgcgccaggtggccctggtga

SEQ ID NO: 44016 - DNA, 73 bp, Homo sapiens
ctgccgtcagggcacaacctccctgcaagtatggccggggaccgcgccaggtggccctggtgacccgccacca

SEQ ID NO: 44017 - DNA, 79 bp, Homo sapiens
ctgcaagtatggccggggaccgcgccaggtggccctggtgacccgccaccatgctctgccggcagctggctcttctgac

SEQ ID NO: 44018 - DNA, 76 bp, Homo sapiens
tatggccggggaccgcgccaggtggccctggtgacccgccaccatgctctgccggcagctggctcttctgaccccg

SEQ ID NO: 44019 - DNA, 75 bp, Homo sapiens
accgcgccaggtggccctggtgacccgccaccatgctctgccggcagctggctcttctgaccccggggctggccc

SEQ ID NO: 44020 - DNA, 77 bp, Homo sapiens
tggccctggtgacccgccaccatgctctgccggcagctggctcttctgaccccggggctggccccgcacaggcctgg

SEQ ID NO: 44021 - DNA, 78 bp, Homo sapiens
gtgacccgccaccatgctctgccggcagctggctcttctgaccccggggctggccccgcacaggcctgggcagctccc

SEQ ID NO: 44022 - DNA, 76 bp, Homo sapiens
tcttctgaccccggggctggccccgcacaggcctgggcagctccccgctgcagtggtggaggctcctgcgtttgtc

SEQ ID NO: 44023 - DNA, 79 bp, Homo sapiens
cggggctggccccgcacaggcctgggcagctccccgctgcagtggtggaggctcctgcgtttgtctgctggtggacatc

SEQ ID NO: 44024 - DNA, 83 bp, Homo sapiens
ccgcacaggcctgggcagctccccgctgcagtggtggaggctcctgcgtttgtctgctggtggacatcctgtgggcatggcca

SEQ ID NO: 44025 - DNA, 79 bp, Homo sapiens
tccccgctgcagtggtggaggctcctgcgtttgtctgctggtggacatcctgtgggcatggccaggttatttaggtgga

SEQ ID NO: 44026 - DNA, 79 bp, Homo sapiens
agtggtggaggctcctgcgtttgtctgctggtggacatcctgtgggcatggccaggttatttaggtggagccatatgga

SEQ ID NO: 44027 - DNA, 80 bp, Homo sapiens
ctcctgcgtttgtctgctggtggacatcctgtgggcatggccaggttatttaggtggagccatatggatctgccaaaatc

SEQ ID NO: 44028 - DNA, 78 bp, Homo sapiens
cgtttgtctgctggtggacatcctgtgggcatggccaggttatttaggtggagccatatggatctgccaaaatccaac

SEQ ID NO: 44029 - DNA, 76 bp, Homo sapiens
tggtggacatcctgtgggcatggccaggttatttaggtggagccatatggatctgccaaaatccaaccccatttta

SEQ ID NO: 44030 - DNA, 74 bp, Homo sapiens
atcctgtgggcatggccaggttatttaggtggagccatatggatctgccaaaatccaaccccattttacccgca

SEQ ID NO: 44031 - DNA, 74 bp, Homo sapiens
ccaggttatttaggtggagccatatggatctgccaaaatccaaccccattttacccgcagacgtggagacatca

SEQ ID NO: 44032 - DNA, 74 bp, Homo sapiens
tatttaggtggagccatatggatctgccaaaatccaaccccattttacccgcagacgtggagacatcatagggt

SEQ ID NO: 44033 - DNA, 80 bp, Homo sapiens
catatggatctgccaaaatccaaccccattttacccgcagacgtggagacatcatagggttcatcctgacatgatgctat

SEQ ID NO: 44034 - DNA, 78 bp, Homo sapiens
tgccaaaatccaaccccattttacccgcagacgtggagacatcatagggttcatcctgacatgatgctattgaccttg

SEQ ID NO: 44035 - DNA, 77 bp, Homo sapiens
aaatccaaccccattttacccgcagacgtggagacatcatagggttcatcctgacatgatgctattgaccttggaga

SEQ ID NO: 44036 - DNA, 79 bp, Homo sapiens
attttacccgcagacgtggagacatcatagggttcatcctgacatgatgctattgaccttggagatgacggagggagag

SEQ ID NO: 44037 - DNA, 82 bp, Homo sapiens
cgcagacgtggagacatcatagggttcatcctgacatgatgctattgaccttggagatgacggagggagaggccatggtggg

SEQ ID NO: 44038 - DNA, 81 bp, Homo sapiens
ctgacatgatgctattgaccttggagatgacggagggagaggccatggtggggggcgagcaggacagtggcccctgcctgc

SEQ ID NO: 44039 - DNA, 77 bp, Homo sapiens
tattgaccttggagatgacggagggagaggccatggtggggggcgagcaggacagtggcccctgcctgcctgtccga

SEQ ID NO: 44040 - DNA, 76 bp, Homo sapiens
ttggagatgacggagggagaggccatggtggggggcgagcaggacagtggcccctgcctgcctgtccgatttccac

SEQ ID NO: 44041 - DNA, 76 bp, Homo sapiens
agggagaggccatggtggggggcgagcaggacagtggcccctgcctgcctgtccgatttccactcctgggcatgac

SEQ ID NO: 44042 - DNA, 77 bp, Homo sapiens
atggtggggggcgagcaggacagtggcccctgcctgcctgtccgatttccactcctgggcatgaccgccttctgtgc

SEQ ID NO: 44043 - DNA, 83 bp, Homo sapiens
cgagcaggacagtggcccctgcctgcctgtccgatttccactcctgggcatgaccgccttctgtgccatgaagctctgtgctg

SEQ ID NO: 44044 - DNA, 83 bp, Homo sapiens
acagtggcccctgcctgcctgtccgatttccactcctgggcatgaccgccttctgtgccatgaagctctgtgctgtggccatg

SEQ ID NO: 44045 - DNA, 84 bp, Homo sapiens
tgcctgcctgtccgatttccactcctgggcatgaccgccttctgtgccatgaagctctgtgctgtggccatgggtgaaacagac

SEQ ID NO: 44046 - DNA, 80 bp, Homo sapiens
cctgtccgatttccactcctgggcatgaccgccttctgtgccatgaagctctgtgctgtggccatgggtgaaacagaccg

SEQ ID NO: 44047 - DNA, 78 bp, Homo sapiens
atgaccgccttctgtgccatgaagctctgtgctgtggccatgggtgaaacagaccgggccacgtttcttacctcggca

SEQ ID NO: 44048 - DNA, 79 bp, Homo sapiens
ttctgtgccatgaagctctgtgctgtggccatgggtgaaacagaccgggccacgtttcttacctcggcactgtaggcat

SEQ ID NO: 44049 - DNA, 77 bp, Homo sapiens
atgaagctctgtgctgtggccatgggtgaaacagaccgggccacgtttcttacctcggcactgtaggcattcagggc

SEQ ID NO: 44050 - DNA, 73 bp, Homo sapiens
ctgtggccatgggtgaaacagaccgggccacgtttcttacctcggcactgtaggcattcagggctggccaacc

SEQ ID NO: 44051 - DNA, 74 bp, Homo sapiens
atgggtgaaacagaccgggccacgtttcttacctcggcactgtaggcattcagggctggccaaccgctgtgctg

SEQ ID NO: 44052 - DNA, 73 bp, Homo sapiens
aaacagaccgggccacgtttcttacctcggcactgtaggcattcagggctggccaaccgctgtgctggggcac

SEQ ID NO: 44053 - DNA, 74 bp, Homo sapiens
acgtttcttacctcggcactgtaggcattcagggctggccaaccgctgtgctggggcaccctaggtgctgaggg

SEQ ID NO: 44054 - DNA, 77 bp, Homo sapiens
cttacctcggcactgtaggcattcagggctggccaaccgctgtgctggggcaccctaggtgctgagggtgctggtgg

SEQ ID NO: 44055 - DNA, 77 bp, Homo sapiens
actgtaggcattcagggctggccaaccgctgtgctggggcaccctaggtgctgagggtgctggtgggccctggcctc

SEQ ID NO: 44056 - DNA, 79 bp, Homo sapiens
aaccgctgtgctggggcaccctaggtgctgagggtgctggtgggccctggcctctgcctgcggcatatcagagccgccg

SEQ ID NO: 44057 - DNA, 82 bp, Homo sapiens
tgtgctggggcaccctaggtgctgagggtgctggtgggccctggcctctgcctgcggcatatcagagccgccggtgtgacaa

SEQ ID NO: 44058 - DNA, 77 bp, Homo sapiens
accctaggtgctgagggtgctggtgggccctggcctctgcctgcggcatatcagagccgccggtgtgacaacccaaa

SEQ ID NO: 44059 - DNA, 78 bp, Homo sapiens
tggcctctgcctgcggcatatcagagccgccggtgtgacaacccaaactctccggacgtgtcccgtgtctcctgcctg

SEQ ID NO: 44060 - DNA, 74 bp, Homo sapiens
atcagagccgccggtgtgacaacccaaactctccggacgtgtcccgtgtctcctgcctggacgtgccgtgtgcc

SEQ ID NO: 44061 - DNA, 69 bp, Homo sapiens
ccggtgtgacaacccaaactctccggacgtgtcccgtgtctcctgcctggacgtgccgtgtgcccccgg

SEQ ID NO: 44062 - DNA, 70 bp, Homo sapiens
aaactctccggacgtgtcccgtgtctcctgcctggacgtgccgtgtgcccccggggacacagttgagaac

SEQ ID NO: 44063 - DNA, 73 bp, Homo sapiens
gacgtgtcccgtgtctcctgcctggacgtgccgtgtgcccccggggacacagttgagaaccctggtcctgata

SEQ ID NO: 44064 - DNA, 71 bp, Homo sapiens
cgtgtctcctgcctggacgtgccgtgtgcccccggggacacagttgagaaccctggtcctgataaacgtgg

SEQ ID NO: 44065 - DNA, 68 bp, Homo sapiens
acgtgccgtgtgcccccggggacacagttgagaaccctggtcctgataaacgtgggcttcctttctgg

SEQ ID NO: 44066 - DNA, 70 bp, Homo sapiens
ccggggacacagttgagaaccctggtcctgataaacgtgggcttcctttctgggtgggaggcactgccca

SEQ ID NO: 44067 - DNA, 72 bp, Homo sapiens
acacagttgagaaccctggtcctgataaacgtgggcttcctttctgggtgggaggcactgcccacatgcccg

SEQ ID NO: 44068 - DNA, 74 bp, Homo sapiens
agaaccctggtcctgataaacgtgggcttcctttctgggtgggaggcactgcccacatgcccggctgactggca

SEQ ID NO: 44069 - DNA, 76 bp, Homo sapiens
tgataaacgtgggcttcctttctgggtgggaggcactgcccacatgcccggctgactggcaggtccttttgcgtga

SEQ ID NO: 44070 - DNA, 77 bp, Homo sapiens
tgggcttcctttctgggtgggaggcactgcccacatgcccggctgactggcaggtccttttgcgtgagttaacagca

SEQ ID NO: 44071 - DNA, 81 bp, Homo sapiens
tttctgggtgggaggcactgcccacatgcccggctgactggcaggtccttttgcgtgagttaacagcagcctctgcagaga

SEQ ID NO: 44072 - DNA, 84 bp, Homo sapiens
aggcactgcccacatgcccggctgactggcaggtccttttgcgtgagttaacagcagcctctgcagagagagctgtgtcaggcc

SEQ ID NO: 44073 - DNA, 84 bp, Homo sapiens
catgcccggctgactggcaggtccttttgcgtgagttaacagcagcctctgcagagagagctgtgtcaggcccagcccgatgaa

SEQ ID NO: 44074 - DNA, 86 bp, Homo sapiens
tgactggcaggtccttttgcgtgagttaacagcagcctctgcagagagagctgtgtcaggcccagcccgatgaagctgcagattaa

SEQ ID NO: 44075 - DNA, 83 bp, Homo sapiens
aggtccttttgcgtgagttaacagcagcctctgcagagagagctgtgtcaggcccagcccgatgaagctgcagattaaagcag

SEQ ID NO: 44076 - DNA, 86 bp, Homo sapiens
gtgagttaacagcagcctctgcagagagagctgtgtcaggcccagcccgatgaagctgcagattaaagcaggcaccgtgatgtgtt

SEQ ID NO: 44077 - DNA, 88 bp, Homo sapiens
ttaacagcagcctctgcagagagagctgtgtcaggcccagcccgatgaagctgcagattaaagcaggcaccgtgatgtgtttctgtgc

SEQ ID NO: 44078 - DNA, 85 bp, Homo sapiens
tgcagagagagctgtgtcaggcccagcccgatgaagctgcagattaaagcaggcaccgtgatgtgtttctgtgcggggaagggca

SEQ ID NO: 44079 - DNA, 80 bp, Homo sapiens
agagctgtgtcaggcccagcccgatgaagctgcagattaaagcaggcaccgtgatgtgtttctgtgcggggaagggcagg

SEQ ID NO: 44080 - DNA, 76 bp, Homo sapiens
aggcccagcccgatgaagctgcagattaaagcaggcaccgtgatgtgtttctgtgcggggaagggcagggtgaacg

SEQ ID NO: 44081 - DNA, 73 bp, Homo sapiens
gattaaagcaggcaccgtgatgtgtttctgtgcggggaagggcagggtgaacgtggggagtcgtgagttttga

SEQ ID NO: 44082 - DNA, 73 bp, Homo sapiens
aagcaggcaccgtgatgtgtttctgtgcggggaagggcagggtgaacgtggggagtcgtgagttttgaagtca

SEQ ID NO: 44083 - DNA, 74 bp, Homo sapiens
atgtgtttctgtgcggggaagggcagggtgaacgtggggagtcgtgagttttgaagtcacacatgacacaggtc

SEQ ID NO: 44084 - DNA, 75 bp, Homo sapiens
aagggcagggtgaacgtggggagtcgtgagttttgaagtcacacatgacacaggtcttcagatattccacaagag

SEQ ID NO: 44085 - DNA, 74 bp, Homo sapiens
aacgtggggagtcgtgagttttgaagtcacacatgacacaggtcttcagatattccacaagaggaccctctccc

SEQ ID NO: 44086 - DNA, 80 bp, Homo sapiens
tcgtgagttttgaagtcacacatgacacaggtcttcagatattccacaagaggaccctctcccgacacatgacgttgtca

SEQ ID NO: 44087 - DNA, 78 bp, Homo sapiens
tttgaagtcacacatgacacaggtcttcagatattccacaagaggaccctctcccgacacatgacgttgtcaggaaaa

SEQ ID NO: 44088 - DNA, 76 bp, Homo sapiens
acatgacacaggtcttcagatattccacaagaggaccctctcccgacacatgacgttgtcaggaaaagatcttcct

SEQ ID NO: 44089 - DNA, 74 bp, Homo sapiens
acaggtcttcagatattccacaagaggaccctctcccgacacatgacgttgtcaggaaaagatcttccttagag

SEQ ID NO: 44090 - DNA, 70 bp, Homo sapiens
acaagaggaccctctcccgacacatgacgttgtcaggaaaagatcttccttagagggacatccgggggag

SEQ ID NO: 44091 - DNA, 74 bp, Homo sapiens
cctctcccgacacatgacgttgtcaggaaaagatcttccttagagggacatccgggggaggcctgtgcacactc

SEQ ID NO: 44092 - DNA, 77 bp, Homo sapiens
tgtcaggaaaagatcttccttagagggacatccgggggaggcctgtgcacactctgccctcacgtccaggacagaga

SEQ ID NO: 44093 - DNA, 76 bp, Homo sapiens
tagagggacatccgggggaggcctgtgcacactctgccctcacgtccaggacagagagggctcaggtttgagcggg

SEQ ID NO: 44094 - DNA, 76 bp, Homo sapiens
actctgccctcacgtccaggacagagagggctcaggtttgagcggggcccgagagccacgaccttctcagctcacc

SEQ ID NO: 44095 - DNA, 74 bp, Homo sapiens
agagagggctcaggtttgagcggggcccgagagccacgaccttctcagctcacctggggacctgcaccagggac

SEQ ID NO: 44096 - DNA, 73 bp, Homo sapiens
tcaggtttgagcggggcccgagagccacgaccttctcagctcacctggggacctgcaccagggaccccgagga

SEQ ID NO: 44097 - DNA, 73 bp, Homo sapiens
ggcccgagagccacgaccttctcagctcacctggggacctgcaccagggaccccgaggagggagcaggaacca

SEQ ID NO: 44098 - DNA, 76 bp, Homo sapiens
agagccacgaccttctcagctcacctggggacctgcaccagggaccccgaggagggagcaggaaccagcactcatg

SEQ ID NO: 44099 - DNA, 79 bp, Homo sapiens
ttctcagctcacctggggacctgcaccagggaccccgaggagggagcaggaaccagcactcatggagatggtgcgtctg

SEQ ID NO: 44100 - DNA, 75 bp, Homo sapiens
ctcacctggggacctgcaccagggaccccgaggagggagcaggaaccagcactcatggagatggtgcgtctgggg

SEQ ID NO: 44101 - DNA, 73 bp, Homo sapiens
acctgcaccagggaccccgaggagggagcaggaaccagcactcatggagatggtgcgtctgggggtccctggg

SEQ ID NO: 44102 - DNA, 71 bp, Homo sapiens
agggaccccgaggagggagcaggaaccagcactcatggagatggtgcgtctgggggtccctggggtccagg

SEQ ID NO: 44103 - DNA, 73 bp, Homo sapiens
aggagggagcaggaaccagcactcatggagatggtgcgtctgggggtccctggggtccaggggcctgtggggc

SEQ ID NO: 44104 - DNA, 73 bp, Homo sapiens
tcatggagatggtgcgtctgggggtccctggggtccaggggcctgtggggctgctgggggtccctcgcgttca

SEQ ID NO: 44105 - DNA, 71 bp, Homo sapiens
gtccctggggtccaggggcctgtggggctgctgggggtccctcgcgttcagggcctgcttgggtcagccac

SEQ ID NO: 44106 - DNA, 75 bp, Homo sapiens
tccaggggcctgtggggctgctgggggtccctcgcgttcagggcctgcttgggtcagccaccttcagccatgccc

SEQ ID NO: 44107 - DNA, 77 bp, Homo sapiens
ctgtggggctgctgggggtccctcgcgttcagggcctgcttgggtcagccaccttcagccatgcccgggacacagca

SEQ ID NO: 44108 - DNA, 82 bp, Homo sapiens
tccctcgcgttcagggcctgcttgggtcagccaccttcagccatgcccgggacacagcagctgttgggctcagtggagatga

SEQ ID NO: 44109 - DNA, 81 bp, Homo sapiens
agggcctgcttgggtcagccaccttcagccatgcccgggacacagcagctgttgggctcagtggagatgaccagggcctga

SEQ ID NO: 44110 - DNA, 84 bp, Homo sapiens
tgcttgggtcagccaccttcagccatgcccgggacacagcagctgttgggctcagtggagatgaccagggcctgacaacatctc

SEQ ID NO: 44111 - DNA, 80 bp, Homo sapiens
accttcagccatgcccgggacacagcagctgttgggctcagtggagatgaccagggcctgacaacatctcctcgtggagg

SEQ ID NO: 44112 - DNA, 81 bp, Homo sapiens
atgcccgggacacagcagctgttgggctcagtggagatgaccagggcctgacaacatctcctcgtggagggatccctgcac

SEQ ID NO: 44113 - DNA, 81 bp, Homo sapiens
agctgttgggctcagtggagatgaccagggcctgacaacatctcctcgtggagggatccctgcacctcatacctcagtctc

SEQ ID NO: 44114 - DNA, 78 bp, Homo sapiens
agtggagatgaccagggcctgacaacatctcctcgtggagggatccctgcacctcatacctcagtctcccctctcact

SEQ ID NO: 44115 - DNA, 77 bp, Homo sapiens
cagggcctgacaacatctcctcgtggagggatccctgcacctcatacctcagtctcccctctcacttcgaatataaa

SEQ ID NO: 44116 - DNA, 77 bp, Homo sapiens
cctgacaacatctcctcgtggagggatccctgcacctcatacctcagtctcccctctcacttcgaatataaagctgg

SEQ ID NO: 44117 - DNA, 77 bp, Homo sapiens
tctcctcgtggagggatccctgcacctcatacctcagtctcccctctcacttcgaatataaagctggggccctgctc

SEQ ID NO: 44118 - DNA, 75 bp, Homo sapiens
atccctgcacctcatacctcagtctcccctctcacttcgaatataaagctggggccctgctccctgggaacacaa

SEQ ID NO: 44119 - DNA, 72 bp, Homo sapiens
acctcatacctcagtctcccctctcacttcgaatataaagctggggccctgctccctgggaacacaaggccc

SEQ ID NO: 44120 - DNA, 74 bp, Homo sapiens
tctcacttcgaatataaagctggggccctgctccctgggaacacaaggcccctgctggaggtctggcctggaaa

SEQ ID NO: 44121 - DNA, 71 bp, Homo sapiens
aagctggggccctgctccctgggaacacaaggcccctgctggaggtctggcctggaaacatcttttccatt

SEQ ID NO: 44122 - DNA, 72 bp, Homo sapiens
cctgctccctgggaacacaaggcccctgctggaggtctggcctggaaacatcttttccatttctgtgacggg

SEQ ID NO: 44123 - DNA, 72 bp, Homo sapiens
aacacaaggcccctgctggaggtctggcctggaaacatcttttccatttctgtgacgggggaagatgtggtc

SEQ ID NO: 44124 - DNA, 74 bp, Homo sapiens
ctgctggaggtctggcctggaaacatcttttccatttctgtgacgggggaagatgtggtccccagggtcagatg

SEQ ID NO: 44125 - DNA, 73 bp, Homo sapiens
tctggcctggaaacatcttttccatttctgtgacgggggaagatgtggtccccagggtcagatggcgggagct

SEQ ID NO: 44126 - DNA, 73 bp, Homo sapiens
tggaaacatcttttccatttctgtgacgggggaagatgtggtccccagggtcagatggcgggagcttttgcca

SEQ ID NO: 44127 - DNA, 75 bp, Homo sapiens
ttccatttctgtgacgggggaagatgtggtccccagggtcagatggcgggagcttttgccagcgaccctgcagtg

SEQ ID NO: 44128 - DNA, 82 bp, Homo sapiens
cccagggtcagatggcgggagcttttgccagcgaccctgcagtggtcactcctgcaggcaggcgcgtctgcttggtgccaca

SEQ ID NO: 44129 - DNA, 87 bp, Homo sapiens
tcagatggcgggagcttttgccagcgaccctgcagtggtcactcctgcaggcaggcgcgtctgcttggtgccacaggcagcttcatc

SEQ ID NO: 44130 - DNA, 83 bp, Homo sapiens
cgggagcttttgccagcgaccctgcagtggtcactcctgcaggcaggcgcgtctgcttggtgccacaggcagcttcatccttc

SEQ ID NO: 44131 - DNA, 83 bp, Homo sapiens
agcgaccctgcagtggtcactcctgcaggcaggcgcgtctgcttggtgccacaggcagcttcatccttccccaagcctcctgc

SEQ ID NO: 44132 - DNA, 76 bp, Homo sapiens
aggcaggcgcgtctgcttggtgccacaggcagcttcatccttccccaagcctcctgcccctgccccagggacgtcc

SEQ ID NO: 44133 - DNA, 78 bp, Homo sapiens
gtctgcttggtgccacaggcagcttcatccttccccaagcctcctgcccctgccccagggacgtccccatcatggcag

SEQ ID NO: 44134 - DNA, 73 bp, Homo sapiens
caagcctcctgcccctgccccagggacgtccccatcatggcagggaccgtgcccccagggccacagccctgtc

SEQ ID NO: 44135 - DNA, 72 bp, Homo sapiens
cccagggacgtccccatcatggcagggaccgtgcccccagggccacagccctgtcctgggggcttctctctg

SEQ ID NO: 44136 - DNA, 74 bp, Homo sapiens
cccatcatggcagggaccgtgcccccagggccacagccctgtcctgggggcttctctctggcctcctggtctcc

SEQ ID NO: 44137 - DNA, 72 bp, Homo sapiens
atggcagggaccgtgcccccagggccacagccctgtcctgggggcttctctctggcctcctggtctcccgtg

SEQ ID NO: 44138 - DNA, 72 bp, Homo sapiens
tgcccccagggccacagccctgtcctgggggcttctctctggcctcctggtctcccgtgggaagtttgccaa

SEQ ID NO: 44139 - DNA, 72 bp, Homo sapiens
ccacagccctgtcctgggggcttctctctggcctcctggtctcccgtgggaagtttgccaagcccagaactg

SEQ ID NO: 44140 - DNA, 73 bp, Homo sapiens
tgtcctgggggcttctctctggcctcctggtctcccgtgggaagtttgccaagcccagaactggaggcccgca

SEQ ID NO: 44141 - DNA, 71 bp, Homo sapiens
cttctctctggcctcctggtctcccgtgggaagtttgccaagcccagaactggaggcccgcaggggtagaa

SEQ ID NO: 44142 - DNA, 71 bp, Homo sapiens
tctggcctcctggtctcccgtgggaagtttgccaagcccagaactggaggcccgcaggggtagaaggagga

SEQ ID NO: 44143 - DNA, 70 bp, Homo sapiens
tggtctcccgtgggaagtttgccaagcccagaactggaggcccgcaggggtagaaggaggaggcccgcag

SEQ ID NO: 44144 - DNA, 71 bp, Homo sapiens
aagtttgccaagcccagaactggaggcccgcaggggtagaaggaggaggcccgcaggggcagaggtatctc

SEQ ID NO: 44145 - DNA, 71 bp, Homo sapiens
aagcccagaactggaggcccgcaggggtagaaggaggaggcccgcaggggcagaggtatctccagggacgc

SEQ ID NO: 44146 - DNA, 71 bp, Homo sapiens
agaactggaggcccgcaggggtagaaggaggaggcccgcaggggcagaggtatctccagggacgctgggcc

SEQ ID NO: 44147 - DNA, 73 bp, Homo sapiens
cccgcaggggtagaaggaggaggcccgcaggggcagaggtatctccagggacgctgggcctgcaggtgctccc

SEQ ID NO: 44148 - DNA, 77 bp, Homo sapiens
tagaaggaggaggcccgcaggggcagaggtatctccagggacgctgggcctgcaggtgctccccaagcggctctaca

SEQ ID NO: 44149 - DNA, 79 bp, Homo sapiens
ccgcaggggcagaggtatctccagggacgctgggcctgcaggtgctccccaagcggctctacacagacacagacttgga

SEQ ID NO: 44150 - DNA, 79 bp, Homo sapiens
agaggtatctccagggacgctgggcctgcaggtgctccccaagcggctctacacagacacagacttggaatcgcatggg

SEQ ID NO: 44151 - DNA, 82 bp, Homo sapiens
tatctccagggacgctgggcctgcaggtgctccccaagcggctctacacagacacagacttggaatcgcatgggtgccaaga

SEQ ID NO: 44152 - DNA, 84 bp, Homo sapiens
tgggcctgcaggtgctccccaagcggctctacacagacacagacttggaatcgcatgggtgccaagaacgtgcagcccagagca

SEQ ID NO: 44153 - DNA, 82 bp, Homo sapiens
aggtgctccccaagcggctctacacagacacagacttggaatcgcatgggtgccaagaacgtgcagcccagagcatagcctc

SEQ ID NO: 44154 - DNA, 83 bp, Homo sapiens
aagcggctctacacagacacagacttggaatcgcatgggtgccaagaacgtgcagcccagagcatagcctcggtggcccatgc

SEQ ID NO: 44155 - DNA, 83 bp, Homo sapiens
acacagacttggaatcgcatgggtgccaagaacgtgcagcccagagcatagcctcggtggcccatgctgtcttccatcctcaa

SEQ ID NO: 44156 - DNA, 83 bp, Homo sapiens
tgggtgccaagaacgtgcagcccagagcatagcctcggtggcccatgctgtcttccatcctcaacctcagccgctgcccctca

SEQ ID NO: 44157 - DNA, 80 bp, Homo sapiens
agagcatagcctcggtggcccatgctgtcttccatcctcaacctcagccgctgcccctcagggccccagaggagagacaa

SEQ ID NO: 44158 - DNA, 77 bp, Homo sapiens
tcggtggcccatgctgtcttccatcctcaacctcagccgctgcccctcagggccccagaggagagacaacacgtggt

SEQ ID NO: 44159 - DNA, 76 bp, Homo sapiens
tcttccatcctcaacctcagccgctgcccctcagggccccagaggagagacaacacgtggttccatcagccccttc

SEQ ID NO: 44160 - DNA, 76 bp, Homo sapiens
tcaacctcagccgctgcccctcagggccccagaggagagacaacacgtggttccatcagccccttcctcttctctg

SEQ ID NO: 44161 - DNA, 75 bp, Homo sapiens
ctgcccctcagggccccagaggagagacaacacgtggttccatcagccccttcctcttctctggctccagggctg

SEQ ID NO: 44162 - DNA, 72 bp, Homo sapiens
agggccccagaggagagacaacacgtggttccatcagccccttcctcttctctggctccagggctggtttgg

SEQ ID NO: 44163 - DNA, 73 bp, Homo sapiens
agaggagagacaacacgtggttccatcagccccttcctcttctctggctccagggctggtttgggccgccctg

SEQ ID NO: 44164 - DNA, 72 bp, Homo sapiens
aacacgtggttccatcagccccttcctcttctctggctccagggctggtttgggccgccctggtgctggggc

SEQ ID NO: 44165 - DNA, 75 bp, Homo sapiens
tctggctccagggctggtttgggccgccctggtgctggggcccggctgtctgaagctctggctgtgaggggcccg

SEQ ID NO: 44166 - DNA, 73 bp, Homo sapiens
ctggtttgggccgccctggtgctggggcccggctgtctgaagctctggctgtgaggggcccggcttctccaag

SEQ ID NO: 44167 - DNA, 75 bp, Homo sapiens
ttgggccgccctggtgctggggcccggctgtctgaagctctggctgtgaggggcccggcttctccaagtttgcat

SEQ ID NO: 44168 - DNA, 76 bp, Homo sapiens
tgctggggcccggctgtctgaagctctggctgtgaggggcccggcttctccaagtttgcattctgacttgggacct

SEQ ID NO: 44169 - DNA, 78 bp, Homo sapiens
cggctgtctgaagctctggctgtgaggggcccggcttctccaagtttgcattctgacttgggaccttggagacagtga

SEQ ID NO: 44170 - DNA, 75 bp, Homo sapiens
aagctctggctgtgaggggcccggcttctccaagtttgcattctgacttgggaccttggagacagtgaggctttg

SEQ ID NO: 44171 - DNA, 74 bp, Homo sapiens
ctgtgaggggcccggcttctccaagtttgcattctgacttgggaccttggagacagtgaggctttgtggaggga

SEQ ID NO: 44172 - DNA, 72 bp, Homo sapiens
gggcccggcttctccaagtttgcattctgacttgggaccttggagacagtgaggctttgtggagggaggggc

SEQ ID NO: 44173 - DNA, 76 bp, Homo sapiens
tctccaagtttgcattctgacttgggaccttggagacagtgaggctttgtggagggaggggctggtgactccctca

SEQ ID NO: 44174 - DNA, 76 bp, Homo sapiens
agacagtgaggctttgtggagggaggggctggtgactccctcaggcaggtgtgtcctccctgcctgtgagccccac

SEQ ID NO: 44175 - DNA, 74 bp, Homo sapiens
tttgtggagggaggggctggtgactccctcaggcaggtgtgtcctccctgcctgtgagccccacggaggtgtaa

SEQ ID NO: 44176 - DNA, 74 bp, Homo sapiens
agggaggggctggtgactccctcaggcaggtgtgtcctccctgcctgtgagccccacggaggtgtaagatgtgg

SEQ ID NO: 44177 - DNA, 74 bp, Homo sapiens
tggtgactccctcaggcaggtgtgtcctccctgcctgtgagccccacggaggtgtaagatgtgggggtggtcct

SEQ ID NO: 44178 - DNA, 74 bp, Homo sapiens
tcaggcaggtgtgtcctccctgcctgtgagccccacggaggtgtaagatgtgggggtggtccttcccgtcacac

SEQ ID NO: 44179 - DNA, 74 bp, Homo sapiens
tgtgtcctccctgcctgtgagccccacggaggtgtaagatgtgggggtggtccttcccgtcacacgcaggctta

SEQ ID NO: 44180 - DNA, 71 bp, Homo sapiens
ccctgcctgtgagccccacggaggtgtaagatgtgggggtggtccttcccgtcacacgcaggcttacggga

SEQ ID NO: 44181 - DNA, 70 bp, Homo sapiens
ccacggaggtgtaagatgtgggggtggtccttcccgtcacacgcaggcttacgggatgtggagggtggtc

SEQ ID NO: 44182 - DNA, 73 bp, Homo sapiens
tgtaagatgtgggggtggtccttcccgtcacacgcaggcttacgggatgtggagggtggtcctccctgtcaca

SEQ ID NO: 44183 - DNA, 69 bp, Homo sapiens
gatgtggggggcggtcctccccgtcacacgagggcttacgggatgtgggggtggtcctccctgtcacac

SEQ ID NO: 44184 - DNA, 68 bp, Homo sapiens
cttacgggatgtgggggtggtcctccccgtcacacgcgggcttatgggatgtggagggtggtcctccc

SEQ ID NO: 44185 - DNA, 72 bp, Homo sapiens
atgtgggggtggtcctccccgtcacacgcgggcttatgggatgtggagggtggtcctccctgtcacacgcag

SEQ ID NO: 44186 - DNA, 73 bp, Homo sapiens
tggtcctccccgtcacacgcgggcttatgggatgtggagggtggtcctccctgtcacacgcaggcttacggga

SEQ ID NO: 44187 - DNA, 70 bp, Homo sapiens
acacgcaggcttacgggatgtgggggtggtcctccctgtcacacgtgggcttatgggatgtggggggtag

SEQ ID NO: 44188 - DNA, 68 bp, Homo sapiens
cttacgggatgtgggggtggtcctccctgtcacacgtgggcttatgggatgtggggggtagtcctccc

SEQ ID NO: 44189 - DNA, 71 bp, Homo sapiens
atgtgggggtggtcctccctgtcacacgtgggcttatgggatgtggggggtagtcctccccgtcacacgca

SEQ ID NO: 44190 - DNA, 71 bp, Homo sapiens
cctccctgtcacacgtgggcttatgggatgtggggggtagtcctccccgtcacacgcaggcttacgggatg

SEQ ID NO: 44191 - DNA, 71 bp, Homo sapiens
ctgtcacacgtgggcttatgggatgtggggggtagtcctccccgtcacacgcaggcttacgggatgtgggg

SEQ ID NO: 44192 - DNA, 69 bp, Homo sapiens
tgggcttatgggatgtggggggtagtcctccccgtcacacgcaggcttacgggatgtggggggcggtcc

SEQ ID NO: 44193 - DNA, 70 bp, Homo sapiens
tcctccccgtcacacgcaggcttacgggatgtggggggcggtcctccctatcacaggagggcttacggga

SEQ ID NO: 44194 - DNA, 70 bp, Homo sapiens
cccgtcacacgcaggcttacgggatgtggggggcggtcctccctatcacaggagggcttacgggatgtgg

SEQ ID NO: 44195 - DNA, 67 bp, Homo sapiens
aggcttacgggatgtggggggcggtcctccctatcacaggagggcttacgggatgtggggggtggtc

SEQ ID NO: 44196 - DNA, 68 bp, Homo sapiens
ggatgtggggggcggtcctccctatcacaggagggcttacgggatgtggggggtggtcctccccgtca

SEQ ID NO: 44197 - DNA, 65 bp, Homo sapiens
ttacgggatgtggggggtggtcctccccgtcacacgcgggcttacgggacgtggggggcacaggg

SEQ ID NO: 44198 - DNA, 69 bp, Homo sapiens
ggggtggtcctccccgtcacacgcgggcttacgggacgtggggggcacaggggcagatccacttcatcc

SEQ ID NO: 44199 - DNA, 74 bp, Homo sapiens
tccccgtcacacgcgggcttacgggacgtggggggcacaggggcagatccacttcatccccatggtgctccatc

SEQ ID NO: 44200 - DNA, 77 bp, Homo sapiens
gtcacacgcgggcttacgggacgtggggggcacaggggcagatccacttcatccccatggtgctccatcctcatcca

SEQ ID NO: 44201 - DNA, 74 bp, Homo sapiens
ggcttacgggacgtggggggcacaggggcagatccacttcatccccatggtgctccatcctcatccaccctggg

SEQ ID NO: 44202 - DNA, 76 bp, Homo sapiens
gggggcacaggggcagatccacttcatccccatggtgctccatcctcatccaccctggggctctgggtttacgcaa

SEQ ID NO: 44203 - DNA, 74 bp, Homo sapiens
atccacttcatccccatggtgctccatcctcatccaccctggggctctgggtttacgcaaagggtggatgttcc

SEQ ID NO: 44204 - DNA, 72 bp, Homo sapiens
cccatggtgctccatcctcatccaccctggggctctgggtttacgcaaagggtggatgttcccctcttcctc

SEQ ID NO: 44205 - DNA, 70 bp, Homo sapiens
ctctgggtttacgcaaagggtggatgttcccctcttcctctggggaggcctggggccctcagatggccca

SEQ ID NO: 44206 - DNA, 71 bp, Homo sapiens
tttacgcaaagggtggatgttcccctcttcctctggggaggcctggggccctcagatggcccagccagcct

SEQ ID NO: 44207 - DNA, 72 bp, Homo sapiens
aagggtggatgttcccctcttcctctggggaggcctggggccctcagatggcccagccagcctttgtgccag

SEQ ID NO: 44208 - DNA, 78 bp, Homo sapiens
cctcttcctctggggaggcctggggccctcagatggcccagccagcctttgtgccaggccagcatgtgtgggagctta

SEQ ID NO: 44209 - DNA, 80 bp, Homo sapiens
tctggggaggcctggggccctcagatggcccagccagcctttgtgccaggccagcatgtgtgggagcttaatatacgcac

SEQ ID NO: 44210 - DNA, 82 bp, Homo sapiens
tggggccctcagatggcccagccagcctttgtgccaggccagcatgtgtgggagcttaatatacgcacgctgataattggat

SEQ ID NO: 44211 - DNA, 84 bp, Homo sapiens
cctcagatggcccagccagcctttgtgccaggccagcatgtgtgggagcttaatatacgcacgctgataattggatttcagaga

SEQ ID NO: 44212 - DNA, 86 bp, Homo sapiens
agccagcctttgtgccaggccagcatgtgtgggagcttaatatacgcacgctgataattggatttcagagatggcaaatcagatga

SEQ ID NO: 44213 - DNA, 87 bp, Homo sapiens
ctttgtgccaggccagcatgtgtgggagcttaatatacgcacgctgataattggatttcagagatggcaaatcagatgaggctcatg

SEQ ID NO: 44214 - DNA, 88 bp, Homo sapiens
agcatgtgtgggagcttaatatacgcacgctgataattggatttcagagatggcaaatcagatgaggctcatgtgctcctcagaagaa

SEQ ID NO: 44215 - DNA, 87 bp, Homo sapiens
tgtgggagcttaatatacgcacgctgataattggatttcagagatggcaaatcagatgaggctcatgtgctcctcagaagaacaatg

SEQ ID NO: 44216 - DNA, 85 bp, Homo sapiens
ttaatatacgcacgctgataattggatttcagagatggcaaatcagatgaggctcatgtgctcctcagaagaacaatggaggagg

SEQ ID NO: 44217 - DNA, 85 bp, Homo sapiens
tgataattggatttcagagatggcaaatcagatgaggctcatgtgctcctcagaagaacaatggaggaggggccctgcttccaca

SEQ ID NO: 44218 - DNA, 84 bp, Homo sapiens
attggatttcagagatggcaaatcagatgaggctcatgtgctcctcagaagaacaatggaggaggggccctgcttccacagaga

SEQ ID NO: 44219 - DNA, 83 bp, Homo sapiens
atggcaaatcagatgaggctcatgtgctcctcagaagaacaatggaggaggggccctgcttccacagagatggagagaaaata

SEQ ID NO: 44220 - DNA, 82 bp, Homo sapiens
aatcagatgaggctcatgtgctcctcagaagaacaatggaggaggggccctgcttccacagagatggagagaaaatattcag

SEQ ID NO: 44221 - DNA, 76 bp, Homo sapiens
tcagaagaacaatggaggaggggccctgcttccacagagatggagagaaaatattcagggtgttccatggaagtcg

SEQ ID NO: 44222 - DNA, 72 bp, Homo sapiens
aaaatattcagggtgttccatggaagtcgttagcagcagaaaatactcccacttgagacagtgggggatggg

SEQ ID NO: 44223 - DNA, 75 bp, Homo sapiens
tgttccatggaagtcgttagcagcagaaaatactcccacttgagacagtgggggatggggaacagtgacttggtg

SEQ ID NO: 44224 - DNA, 72 bp, Homo sapiens
atggaagtcgttagcagcagaaaatactcccacttgagacagtgggggatggggaacagtgacttggtgggg

SEQ ID NO: 44225 - DNA, 72 bp, Homo sapiens
ttagcagcagaaaatactcccacttgagacagtgggggatggggaacagtgacttggtgggggaggttttga

SEQ ID NO: 44226 - DNA, 70 bp, Homo sapiens
aatactcccacttgagacagtgggggatggggaacagtgacttggtgggggaggttttgagcagttaata

SEQ ID NO: 44227 - DNA, 69 bp, Homo sapiens
ttgagacagtgggggatggggaacagtgacttggtgggggaggttttgagcagttaataaaaaggacaa

SEQ ID NO: 44228 - DNA, 67 bp, Homo sapiens
gggatggggaacagtgacttggtgggggaggttttgagcagttaataaaaaggacaatttaaagaga

SEQ ID NO: 44229 - DNA, 67 bp, Homo sapiens
acttggtgggggaggttttgagcagttaataaaaaggacaatttaaagagatcaccttccttgcacc

SEQ ID NO: 44230 - DNA, 74 bp, Homo sapiens
agttaataaaaaggacaatttaaagagatcaccttccttgcacccagcagctttgccaggcatgaagtgcaggg

SEQ ID NO: 44231 - DNA, 81 bp, Homo sapiens
aatttaaagagatcaccttccttgcacccagcagctttgccaggcatgaagtgcaggggaggacgtggcatcacagcagaa

SEQ ID NO: 44232 - DNA, 84 bp, Homo sapiens
atcaccttccttgcacccagcagctttgccaggcatgaagtgcaggggaggacgtggcatcacagcagaagatgagttcctgcc

SEQ ID NO: 44233 - DNA, 80 bp, Homo sapiens
acccagcagctttgccaggcatgaagtgcaggggaggacgtggcatcacagcagaagatgagttcctgccccgttactaa

SEQ ID NO: 44234 - DNA, 79 bp, Homo sapiens
agctttgccaggcatgaagtgcaggggaggacgtggcatcacagcagaagatgagttcctgccccgttactaagaaaca

SEQ ID NO: 44235 - DNA, 76 bp, Homo sapiens
atgaagtgcaggggaggacgtggcatcacagcagaagatgagttcctgccccgttactaagaaacatgccctccct

SEQ ID NO: 44236 - DNA, 75 bp, Homo sapiens
gtgcaggggaggacgtggcatcacagcagaagatgagttcctgccccgttactaagaaacatgccctcccttccc

SEQ ID NO: 44237 - DNA, 75 bp, Homo sapiens
acgtggcatcacagcagaagatgagttcctgccccgttactaagaaacatgccctcccttcccctgtgagattac

SEQ ID NO: 44238 - DNA, 74 bp, Homo sapiens
acagcagaagatgagttcctgccccgttactaagaaacatgccctcccttcccctgtgagattactcgtgggca

SEQ ID NO: 44239 - DNA, 68 bp, Homo sapiens
cccgttactaagaaacatgccctcccttcccctgtgagattactcgtgggcagggcttgtccctaggg

SEQ ID NO: 44240 - DNA, 68 bp, Homo sapiens
agattactcgtgggcagggcttgtccctaggggggccctgtcattcagtggttaaccccgtggtccca

SEQ ID NO: 44241 - DNA, 65 bp, Homo sapiens
agggcttgtccctaggggggccctgtcattcagtggttaaccccgtggtcccagggtttactctg

SEQ ID NO: 44242 - DNA, 66 bp, Homo sapiens
ttgtccctaggggggccctgtcattcagtggttaaccccgtggtcccagggtttactctgtggttc

SEQ ID NO: 44243 - DNA, 65 bp, Homo sapiens
ccctgtcattcagtggttaaccccgtggtcccagggtttactctgtggttcctgggggtttattc

SEQ ID NO: 44244 - DNA, 64 bp, Homo sapiens
attcagtggttaaccccgtggtcccagggtttactctgtggttcctgggggtttattccatggt

SEQ ID NO: 44245 - DNA, 64 bp, Homo sapiens
ccccgtggtcccagggtttactctgtggttcctgggggtttattccatggttcctggcggttta

SEQ ID NO: 44246 - DNA, 67 bp, Homo sapiens
tggtcccagggtttactctgtggttcctgggggtttattccatggttcctggcggtttactccatgt

SEQ ID NO: 44247 - DNA, 67 bp, Homo sapiens
tactctgtggttcctgggggtttattccatggttcctggcggtttactccatgttcctgggggttta

SEQ ID NO: 44248 - DNA, 65 bp, Homo sapiens
ttcctgggggtttattccatggttcctggcggtttactccatgttcctgggggtttactttgtgg

SEQ ID NO: 44249 - DNA, 65 bp, Homo sapiens
gggtttattccatggttcctggcggtttactccatgttcctgggggtttactttgtggtcctggg

SEQ ID NO: 44250 - DNA, 64 bp, Homo sapiens
atggttcctggcggtttactccatgttcctgggggtttactttgtggtcctggggggtttactc

SEQ ID NO: 44251 - DNA, 64 bp, Homo sapiens
cggtttactccatgttcctgggggtttactttgtggtcctggggggtttactccatggttcctg

SEQ ID NO: 44252 - DNA, 64 bp, Homo sapiens
gtttactttgtggtcctggggggtttactccatggttcctggggtgtttactccgtggttcctg

SEQ ID NO: 44253 - DNA, 65 bp, Homo sapiens
ttgtggtcctggggggtttactccatggttcctggggtgtttactccgtggttcctgggagttta

SEQ ID NO: 44254 - DNA, 66 bp, Homo sapiens
gggtttactccatggttcctggggtgtttactccgtggttcctgggagtttactccatggttccag

SEQ ID NO: 44255 - DNA, 66 bp, Homo sapiens
catggttcctggggtgtttactccgtggttcctgggagtttactccatggttccaggggtatttat

SEQ ID NO: 44256 - DNA, 65 bp, Homo sapiens
tggggtgtttactccgtggttcctgggagtttactccatggttccaggggtatttattccgtggt

SEQ ID NO: 44257 - DNA, 65 bp, Homo sapiens
tttactccgtggttcctgggagtttactccatggttccaggggtatttattccgtggttcctggg

SEQ ID NO: 44258 - DNA, 68 bp, Homo sapiens
ttcctgggagtttactccatggttccaggggtatttattccgtggttcctgggtggttactctgtgat

SEQ ID NO: 44259 - DNA, 69 bp, Homo sapiens
tactccatggttccaggggtatttattccgtggttcctgggtggttactctgtgattcctgagggttta

SEQ ID NO: 44260 - DNA, 67 bp, Homo sapiens
atggttccaggggtatttattccgtggttcctgggtggttactctgtgattcctgagggtttaactc

SEQ ID NO: 44261 - DNA, 67 bp, Homo sapiens
tggttcctgggtggttactctgtgattcctgagggtttaactctgtggttactgggggtttacttcg

SEQ ID NO: 44262 - DNA, 69 bp, Homo sapiens
tgggtggttactctgtgattcctgagggtttaactctgtggttactgggggtttacttcgtggctccta

SEQ ID NO: 44263 - DNA, 67 bp, Homo sapiens
tgtgattcctgagggtttaactctgtggttactgggggtttacttcgtggctcctaggggtttgttc

SEQ ID NO: 44264 - DNA, 65 bp, Homo sapiens
tttaactctgtggttactgggggtttacttcgtggctcctaggggtttgttctgtggttcctggg

SEQ ID NO: 44265 - DNA, 64 bp, Homo sapiens
tggttactgggggtttacttcgtggctcctaggggtttgttctgtggttcctgggggtttactc

SEQ ID NO: 44266 - DNA, 64 bp, Homo sapiens
tttacttcgtggctcctaggggtttgttctgtggttcctgggggtttactccgtggttctttgg

SEQ ID NO: 44267 - DNA, 62 bp, Homo sapiens
ctcctaggggtttgttctgtggttcctgggggtttactccgtggttctttggggtttaactc

SEQ ID NO: 44268 - DNA, 64 bp, Homo sapiens
gtttgttctgtggttcctgggggtttactccgtggttctttggggtttaactctgtggtttctg

SEQ ID NO: 44269 - DNA, 64 bp, Homo sapiens
tttggggtttaactctgtggtttctggcggtgtaactctgtggttcctggggggggggttactc

SEQ ID NO: 44270 - DNA, 64 bp, Homo sapiens
gtttctggcggtgtaactctgtggttcctggggggggggttactccatgtttcctgggggttta

SEQ ID NO: 44271 - DNA, 64 bp, Homo sapiens
tgtaactctgtggttcctggggggggggttactccatgtttcctgggggtttactccgtggttc

SEQ ID NO: 44272 - DNA, 62 bp, Homo sapiens
tgtggttcctggggggggggttactccatgtttcctgggggtttactccgtggttcctgggg

SEQ ID NO: 44273 - DNA, 61 bp, Homo sapiens
gggggttactccatgtttcctgggggtttactccgtggttcctgggggtttactccttggt

SEQ ID NO: 44274 - DNA, 63 bp, Homo sapiens
ttactccatgtttcctgggggtttactccgtggttcctgggggtttactccttggttcttggg

SEQ ID NO: 44275 - DNA, 65 bp, Homo sapiens
tgggggtttactccgtggttcctgggggtttactccttggttcttggggatttatgctgtggttc

SEQ ID NO: 44276 - DNA, 65 bp, Homo sapiens
gtttactccgtggttcctgggggtttactccttggttcttggggatttatgctgtggttcctggg

SEQ ID NO: 44277 - DNA, 67 bp, Homo sapiens
ttcctgggggtttactccttggttcttggggatttatgctgtggttcctgggggtttgctccatggt

SEQ ID NO: 44278 - DNA, 67 bp, Homo sapiens
gggtttactccttggttcttggggatttatgctgtggttcctgggggtttgctccatggttcctggg

SEQ ID NO: 44279 - DNA, 69 bp, Homo sapiens
ttcttggggatttatgctgtggttcctgggggtttgctccatggttcctgggggtttactctgtggttc

SEQ ID NO: 44280 - DNA, 68 bp, Homo sapiens
gggatttatgctgtggttcctgggggtttgctccatggttcctgggggtttactctgtggttcttggg

SEQ ID NO: 44281 - DNA, 68 bp, Homo sapiens
ggggtttgctccatggttcctgggggtttactctgtggttcttggggatttatgctgtggtttctggg

SEQ ID NO: 44282 - DNA, 67 bp, Homo sapiens
ggggtttactctgtggttcttggggatttatgctgtggtttctgggggtttacctctgtggttcctg

SEQ ID NO: 44283 - DNA, 70 bp, Homo sapiens
tactctgtggttcttggggatttatgctgtggtttctgggggtttacctctgtggttcctggggagatta

SEQ ID NO: 44284 - DNA, 69 bp, Homo sapiens
ttatgctgtggtttctgggggtttacctctgtggttcctggggagattactctggttcctggggcttta

SEQ ID NO: 44285 - DNA, 67 bp, Homo sapiens
tttctgggggtttacctctgtggttcctggggagattactctggttcctggggctttactccatggt

SEQ ID NO: 44286 - DNA, 67 bp, Homo sapiens
gttcctggggagattactctggttcctggggctttactccatggttcctcggggtttactctgtggt

SEQ ID NO: 44287 - DNA, 66 bp, Homo sapiens
gggagattactctggttcctggggctttactccatggttcctcggggtttactctgtggtttttgg

SEQ ID NO: 44288 - DNA, 63 bp, Homo sapiens
ggttcctggggctttactccatggttcctcggggtttactctgtggtttttggggggaggtta

SEQ ID NO: 44289 - DNA, 66 bp, Homo sapiens
gggctttactccatggttcctcggggtttactctgtggtttttggggggaggttatgctgtgtttc

SEQ ID NO: 44290 - DNA, 65 bp, Homo sapiens
actccatggttcctcggggtttactctgtggtttttggggggaggttatgctgtgtttcctgggg

SEQ ID NO: 44291 - DNA, 66 bp, Homo sapiens
ttactctgtggtttttggggggaggttatgctgtgtttcctgggggtttactctgtggttcctggg

SEQ ID NO: 44292 - DNA, 63 bp, Homo sapiens
gtttttggggggaggttatgctgtgtttcctgggggtttactctgtggttcctgggggtttac

SEQ ID NO: 44293 - DNA, 64 bp, Homo sapiens
tgtgtttcctgggggtttactctgtggttcctgggggtttactccatggttcccgggggcttaa

SEQ ID NO: 44294 - DNA, 65 bp, Homo sapiens
ggtttactctgtggttcctgggggtttactccatggttcccgggggcttaactctgtggttcctg

SEQ ID NO: 44295 - DNA, 64 bp, Homo sapiens
gggtttactccatggttcccgggggcttaactctgtggttcctggggggaggggttactctgtg

SEQ ID NO: 44296 - DNA, 66 bp, Homo sapiens
tactccatggttcccgggggcttaactctgtggttcctggggggaggggttactctgtggttcctg

SEQ ID NO: 44297 - DNA, 64 bp, Homo sapiens
ttcccgggggcttaactctgtggttcctggggggaggggttactctgtggttcctgggagttta

SEQ ID NO: 44298 - DNA, 67 bp, Homo sapiens
ttaactctgtggttcctggggggaggggttactctgtggttcctgggagtttactctgtggttcctg

SEQ ID NO: 44299 - DNA, 69 bp, Homo sapiens
gggaggggttactctgtggttcctgggagtttactctgtggttcctggatgtttactccatggtcctgg

SEQ ID NO: 44300 - DNA, 71 bp, Homo sapiens
tctgtggttcctgggagtttactctgtggttcctggatgtttactccatggtcctgggggtttactccatg

SEQ ID NO: 44301 - DNA, 69 bp, Homo sapiens
ttcctgggagtttactctgtggttcctggatgtttactccatggtcctgggggtttactccatggttct

SEQ ID NO: 44302 - DNA, 69 bp, Homo sapiens
tttactctgtggttcctggatgtttactccatggtcctgggggtttactccatggttcttggggattta

SEQ ID NO: 44303 - DNA, 71 bp, Homo sapiens
ttcctggatgtttactccatggtcctgggggtttactccatggttcttggggatttatgctgtggttcctg

SEQ ID NO: 44304 - DNA, 68 bp, Homo sapiens
atggtcctgggggtttactccatggttcttggggatttatgctgtggttcctgggggtttactctgtg

SEQ ID NO: 44305 - DNA, 67 bp, Homo sapiens
gggtttactccatggttcttggggatttatgctgtggttcctgggggtttactctgtggttcctggg

SEQ ID NO: 44306 - DNA, 66 bp, Homo sapiens
ttcttggggatttatgctgtggttcctgggggtttactctgtggttcctgggggtttaactctggt

SEQ ID NO: 44307 - DNA, 66 bp, Homo sapiens
gggatttatgctgtggttcctgggggtttactctgtggttcctgggggtttaactctggttcctgg

SEQ ID NO: 44308 - DNA, 64 bp, Homo sapiens
gggtttactctgtggttcctgggggtttaactctggttcctgggggtttactctgtggttcctg

SEQ ID NO: 44309 - DNA, 62 bp, Homo sapiens
ttcctgggggtttactctgtggttcctgggggtttactccatggttcccgggggtttaactc

SEQ ID NO: 44310 - DNA, 64 bp, Homo sapiens
gtttactctgtggttcctgggggtttactccatggttcccgggggtttaactctgtggttcctg

SEQ ID NO: 44311 - DNA, 64 bp, Homo sapiens
tctgtggttcctgggggtttactccatggttcccgggggtttaactctgtggttcctgggggga

SEQ ID NO: 44312 - DNA, 63 bp, Homo sapiens
actccatggttcccgggggtttaactctgtggttcctggggggaggggttactctgtggttcc

SEQ ID NO: 44313 - DNA, 65 bp, Homo sapiens
ggggtttaactctgtggttcctggggggaggggttactctgtggttcctgggagtttactctgtg

SEQ ID NO: 44314 - DNA, 67 bp, Homo sapiens; identical to SEQ ID NO: 44298

SEQ ID NO: 44315 - DNA, 68 bp, Homo sapiens
ttcctggggggaggggttactctgtggttcctgggagtttactctgtggttcctggatgtttactcca

SEQ ID NO: 44316 - DNA, 69 bp, Homo sapiens
gggttactctgtggttcctgggagtttactctgtggttcctggatgtttactccatggttcttggggat

SEQ ID NO: 44317 - DNA, 72 bp, Homo sapiens
tgtggttcctgggagtttactctgtggttcctggatgtttactccatggttcttggggatttatgctgtggt

SEQ ID NO: 44318 - DNA, 72 bp, Homo sapiens
tcctgggagtttactctgtggttcctggatgtttactccatggttcttggggatttatgctgtggttcctgg

SEQ ID NO: 44319 - DNA, 72 bp, Homo sapiens
tctgtggttcctggatgtttactccatggttcttggggatttatgctgtggttcctgggggtttactctgtg

SEQ ID NO: 44320 - DNA, 70 bp, Homo sapiens
tggttcctggatgtttactccatggttcttggggatttatgctgtggttcctgggggtttactctgtggt

SEQ ID NO: 44321 - DNA, 70 bp, Homo sapiens
gttcctggatgtttactccatggttcttggggatttatgctgtggttcctgggggtttactctgtggttc

SEQ ID NO: 44322 - DNA, 70 bp, Homo sapiens
tggatgtttactccatggttcttggggatttatgctgtggttcctgggggtttactctgtggttcctggg

SEQ ID NO: 44323 - DNA, 67 bp, Homo sapiens
tttactccatggttcttggggatttatgctgtggttcctgggggtttactctgtggttcctgggggt

SEQ ID NO: 44324 - DNA, 66 bp, Homo sapiens; identical to SEQ ID NO: 44306

SEQ ID NO: 44325 - DNA, 66 bp, Homo sapiens
ggatttatgctgtggttcctgggggtttactctgtggttcctgggggtttaactctggttcctggg

SEQ ID NO: 44326 - DNA, 64 bp, Homo sapiens
tgggggtttactctgtggttcctgggggtttaactctggttcctgggggtttactctgtggttc

SEQ ID NO: 44327 - DNA, 62 bp, Homo sapiens
cctgggggtttactctgtggttcctgggggtttactccatggttcccgggggtttaactctg

SEQ ID NO: 44328 - DNA, 64 bp, Homo sapiens; identical to SEQ ID NO: 44310

SEQ ID NO: 44329 - DNA, 63 bp, Homo sapiens
tgtggttcctgggggtttactccatggttcccgggggtttaactctgtggttcctggggggag

SEQ ID NO: 44330 - DNA, 63 bp, Homo sapiens
tttactccatggttcccgggggtttaactctgtggttcctggggggaggggttactctgtggt

SEQ ID NO: 44331 - DNA, 64 bp, Homo sapiens
tccatggttcccgggggtttaactctgtggttcctggggggaggggttactctgtggttcctgg

SEQ ID NO: 44332 - DNA, 62 bp, Homo sapiens
ggtttaactctgtggttcctggggggaggggttactctgtggttcctggggggaggggttta

SEQ ID NO: 44333 - DNA, 63 bp, Homo sapiens
tgtggttcctggggggaggggttactctgtggttcctggggggaggggtttactccgtggttc

SEQ ID NO: 44334 - DNA, 63 bp, Homo sapiens
tggggggaggggttactctgtggttcctggggggaggggtttactccgtggttcctgagagtt

SEQ ID NO: 44335 - DNA, 65 bp, Homo sapiens
gggttactctgtggttcctggggggaggggtttactccgtggttcctgagagtttactccatggt

SEQ ID NO: 44336 - DNA, 66 bp, Homo sapiens
tctgtggttcctggggggaggggtttactccgtggttcctgagagtttactccatggttcctgggg

SEQ ID NO: 44337 - DNA, 64 bp, Homo sapiens
gggaggggtttactccgtggttcctgagagtttactccatggttcctgggggtttactccgtgg

SEQ ID NO: 44338 - DNA, 66 bp, Homo sapiens
tttactccgtggttcctgagagtttactccatggttcctgggggtttactccgtggttcctgagtt

SEQ ID NO: 44339 - DNA, 66 bp, Homo sapiens
ttcctgagagtttactccatggttcctgggggtttactccgtggttcctgagttttactccgtggt

SEQ ID NO: 44340 - DNA, 65 bp, Homo sapiens
agagtttactccatggttcctgggggtttactccgtggttcctgagttttactccgtggttcctg

SEQ ID NO: 44341 - DNA, 64 bp, Homo sapiens
ggtttactccgtggttcctgagttttactccgtggttcctgggggtttactccgtggttcctga

SEQ ID NO: 44342 - DNA, 63 bp, Homo sapiens
actccgtggttcctgagttttactccgtggttcctgggggtttactccgtggttcctgagttt

SEQ ID NO: 44343 - DNA, 65 bp, Homo sapiens
agttttactccgtggttcctgggggtttactccgtggttcctgagttttactccatggttcactc

SEQ ID NO: 44344 - DNA, 66 bp, Homo sapiens
cgtggttcctgggggtttactccgtggttcctgagttttactccatggttcactcggtggttccta

SEQ ID NO: 44345 - DNA, 68 bp, Homo sapiens
ttactccgtggttcctgagttttactccatggttcactcggtggttcctagggagttactccatgggt

SEQ ID NO: 44346 - DNA, 67 bp, Homo sapiens
ttcactcggtggttcctagggagttactccatgggttcctggggtttatctgtggtcctggggttta

SEQ ID NO: 44347 - DNA, 63 bp, Homo sapiens
agttactccatgggttcctggggtttatctgtggtcctggggtttaccccttagtttccttaa

SEQ ID NO: 44348 - DNA, 68 bp, Homo sapiens
atgggttcctggggtttatctgtggtcctggggtttaccccttagtttccttaactgctcatctgctg

SEQ ID NO: 44349 - DNA, 70 bp, Homo sapiens
gggtttatctgtggtcctggggtttaccccttagtttccttaactgctcatctgctgtgaagaagagtgg

SEQ ID NO: 44350 - DNA, 73 bp, Homo sapiens
tggtcctggggtttaccccttagtttccttaactgctcatctgctgtgaagaagagtgggtgctacagagttg

SEQ ID NO: 44351 - DNA, 72 bp, Homo sapiens
gggtttaccccttagtttccttaactgctcatctgctgtgaagaagagtgggtgctacagagttggaagttg

SEQ ID NO: 44352 - DNA, 78 bp, Homo sapiens
ttagtttccttaactgctcatctgctgtgaagaagagtgggtgctacagagttggaagttgggagctcccagcagact

SEQ ID NO: 44353 - DNA, 82 bp, Homo sapiens
ttaactgctcatctgctgtgaagaagagtgggtgctacagagttggaagttgggagctcccagcagacttgagagaatgttc

SEQ ID NO: 44354 - DNA, 79 bp, Homo sapiens
atctgctgtgaagaagagtgggtgctacagagttggaagttgggagctcccagcagacttgagagaatgttccctagtg

SEQ ID NO: 44355 - DNA, 77 bp, Homo sapiens
aagaagagtgggtgctacagagttggaagttgggagctcccagcagacttgagagaatgttccctagtgtctcactc

SEQ ID NO: 44356 - DNA, 72 bp, Homo sapiens
cactctgtcgcctgtggccagaaacctgtgtgagtttcgggggaagaaagaaatgaggttggcaggtgtccc

SEQ ID NO: 44357 - DNA, 70 bp, Homo sapiens
cctgtggccagaaacctgtgtgagtttcgggggaagaaagaaatgaggttggcaggtgtccctgaaccac

SEQ ID NO: 44358 - DNA, 70 bp, Homo sapiens
agaaacctgtgtgagtttcgggggaagaaagaaatgaggttggcaggtgtccctgaaccactggatccca

SEQ ID NO: 44359 - DNA, 73 bp, Homo sapiens
ctgtgtgagtttcgggggaagaaagaaatgaggttggcaggtgtccctgaaccactggatcccatgagcctgg

SEQ ID NO: 44360 - DNA, 75 bp, Homo sapiens
gggaagaaagaaatgaggttggcaggtgtccctgaaccactggatcccatgagcctgggctgtcaacctcaacat

SEQ ID NO: 44361 - DNA, 78 bp, Homo sapiens
aggttggcaggtgtccctgaaccactggatcccatgagcctgggctgtcaacctcaacattgcagtccctctgaggaa

SEQ ID NO: 44362 - DNA, 79 bp, Homo sapiens
tccctgaaccactggatcccatgagcctgggctgtcaacctcaacattgcagtccctctgaggaagggccccattctca

SEQ ID NO: 44363 - DNA, 79 bp, Homo sapiens
tggatcccatgagcctgggctgtcaacctcaacattgcagtccctctgaggaagggccccattctcagccttacctaca

SEQ ID NO: 44364 - DNA, 79 bp, Homo sapiens
atgagcctgggctgtcaacctcaacattgcagtccctctgaggaagggccccattctcagccttacctacacctgtgca

SEQ ID NO: 44365 - DNA, 77 bp, Homo sapiens
tgggctgtcaacctcaacattgcagtccctctgaggaagggccccattctcagccttacctacacctgtgcagaaat

SEQ ID NO: 44366 - DNA, 78 bp, Homo sapiens
acctcaacattgcagtccctctgaggaagggccccattctcagccttacctacacctgtgcagaaattctgctgtcag

SEQ ID NO: 44367 - DNA, 78 bp, Homo sapiens
aggaagggccccattctcagccttacctacacctgtgcagaaattctgctgtcaggatccagaggtcctgctagctcc

SEQ ID NO: 44368 - DNA, 84 bp, Homo sapiens
attctcagccttacctacacctgtgcagaaattctgctgtcaggatccagaggtcctgctagctcccagggcgtctgcagtgca

SEQ ID NO: 44369 - DNA, 85 bp, Homo sapiens
cttacctacacctgtgcagaaattctgctgtcaggatccagaggtcctgctagctcccagggcgtctgcagtgcagagctctcca

SEQ ID NO: 44370 - DNA, 86 bp, Homo sapiens
tacacctgtgcagaaattctgctgtcaggatccagaggtcctgctagctcccagggcgtctgcagtgcagagctctccagggagag

SEQ ID NO: 44371 - DNA, 85 bp, Homo sapiens
agaaattctgctgtcaggatccagaggtcctgctagctcccagggcgtctgcagtgcagagctctccagggagaggctcagacag

SEQ ID NO: 44372 - DNA, 87 bp, Homo sapiens
aggtcctgctagctcccagggcgtctgcagtgcagagctctccagggagaggctcagacaggcagctggcttctctggggatgctga

SEQ ID NO: 44373 - DNA, 87 bp, Homo sapiens
ctagctcccagggcgtctgcagtgcagagctctccagggagaggctcagacaggcagctggcttctctggggatgctgaacacgcag

SEQ ID NO: 44374 - DNA, 88 bp, Homo sapiens
agggcgtctgcagtgcagagctctccagggagaggctcagacaggcagctggcttctctggggatgctgaacacgcaggctcagacag

SEQ ID NO: 44375 - DNA, 92 bp, Homo sapiens
tgcagagctctccagggagaggctcagacaggcagctggcttctctggggatgctgaacacgcaggctcagacaggcagctggcttctcatg

SEQ ID NO: 44376 - DNA, 88 bp, Homo sapiens
tctccagggagaggctcagacaggcagctggcttctctggggatgctgaacacgcaggctcagacaggcagctggcttctcatgggac

SEQ ID NO: 44377 - DNA, 86 bp, Homo sapiens
acaggcagctggcttctctggggatgctgaacacgcaggctcagacaggcagctggcttctcatgggaccctgcaggctggggcaa

SEQ ID NO: 44378 - DNA, 89 bp, Homo sapiens
ggatgctgaacacgcaggctcagacaggcagctggcttctcatgggaccctgcaggctggggcaagaggagcacagagcacatctggta

SEQ ID NO: 44379 - DNA, 86 bp, Homo sapiens
aacacgcaggctcagacaggcagctggcttctcatgggaccctgcaggctggggcaagaggagcacagagcacatctggtagcttg

SEQ ID NO: 44380 - DNA, 83 bp, Homo sapiens
agacaggcagctggcttctcatgggaccctgcaggctggggcaagaggagcacagagcacatctggtagcttggagtttgaaa

SEQ ID NO: 44381 - DNA, 80 bp, Homo sapiens
tggcttctcatgggaccctgcaggctggggcaagaggagcacagagcacatctggtagcttggagtttgaaaaactcttc

SEQ ID NO: 44382 - DNA, 78 bp, Homo sapiens
tgggaccctgcaggctggggcaagaggagcacagagcacatctggtagcttggagtttgaaaaactcttcctgtgtta

SEQ ID NO: 44383 - DNA, 77 bp, Homo sapiens
caggctggggcaagaggagcacagagcacatctggtagcttggagtttgaaaaactcttcctgtgttatttcttaga

SEQ ID NO: 44384 - DNA, 74 bp, Homo sapiens
caagaggagcacagagcacatctggtagcttggagtttgaaaaactcttcctgtgttatttcttagaaggagtt

SEQ ID NO: 44385 - DNA, 72 bp, Homo sapiens
acagagcacatctggtagcttggagtttgaaaaactcttcctgtgttatttcttagaaggagtttgtttgct

SEQ ID NO: 44386 - DNA, 70 bp, Homo sapiens
cacatctggtagcttggagtttgaaaaactcttcctgtgttatttcttagaaggagtttgtttgctttat

SEQ ID NO: 44387 - DNA, 67 bp, Homo sapiens
agcttggagtttgaaaaactcttcctgtgttatttcttagaaggagtttgtttgctttatttattta

SEQ ID NO: 44388 - DNA, 69 bp, Homo sapiens
aaaaaagaaaagaattaagatgtgtgttagcagttggagaaaaactagaatgtatcaatttaaaatctg

SEQ ID NO: 44389 - DNA, 73 bp, Homo sapiens
agaattaagatgtgtgttagcagttggagaaaaactagaatgtatcaatttaaaatctgtgccgttcttcgct

SEQ ID NO: 44390 - DNA, 74 bp, Homo sapiens
taagatgtgtgttagcagttggagaaaaactagaatgtatcaatttaaaatctgtgccgttcttcgcttttctg

SEQ ID NO: 44391 - DNA, 74 bp, Homo sapiens
tagcagttggagaaaaactagaatgtatcaatttaaaatctgtgccgttcttcgcttttctggtctcagaatta

SEQ ID NO: 44392 - DNA, 70 bp, Homo sapiens
aaaaactagaatgtatcaatttaaaatctgtgccgttcttcgcttttctggtctcagaattacttgggtg

SEQ ID NO: 44393 - DNA, 74 bp, Homo sapiens
tgtatcaatttaaaatctgtgccgttcttcgcttttctggtctcagaattacttgggtgggtctatgtgtgtta

SEQ ID NO: 44394 - DNA, 72 bp, Homo sapiens
aatttaaaatctgtgccgttcttcgcttttctggtctcagaattacttgggtgggtctatgtgtgttagtca

SEQ ID NO: 44395 - DNA, 74 bp, Homo sapiens
tgccgttcttcgcttttctggtctcagaattacttgggtgggtctatgtgtgttagtcagggctctctagggaa

SEQ ID NO: 44396 - DNA, 76 bp, Homo sapiens
ttcgcttttctggtctcagaattacttgggtgggtctatgtgtgttagtcagggctctctagggaagcagagccta

SEQ ID NO: 44397 - DNA, 78 bp, Homo sapiens
tggtctcagaattacttgggtgggtctatgtgtgttagtcagggctctctagggaagcagagcctatgggagaataca

SEQ ID NO: 44398 - DNA, 74 bp, Homo sapiens
aattacttgggtgggtctatgtgtgttagtcagggctctctagggaagcagagcctatgggagaatacaggtac

SEQ ID NO: 44399 - DNA, 82 bp, Homo sapiens
gtctatgtgtgttagtcagggctctctagggaagcagagcctatgggagaatacaggtacctacatatgaagagagagatca

SEQ ID NO: 44400 - DNA, 82 bp, Homo sapiens
tgttagtcagggctctctagggaagcagagcctatgggagaatacaggtacctacatatgaagagagagatcaatccatcga

SEQ ID NO: 44401 - DNA, 86 bp, Homo sapiens
tagggaagcagagcctatgggagaatacaggtacctacatatgaagagagagatcaatccatcgattctgaatgactggctgatga

SEQ ID NO: 44402 - DNA, 85 bp, Homo sapiens
cctatgggagaatacaggtacctacatatgaagagagagatcaatccatcgattctgaatgactggctgatgactgtgggcttca

SEQ ID NO: 44403 - DNA, 86 bp, Homo sapiens
agaatacaggtacctacatatgaagagagagatcaatccatcgattctgaatgactggctgatgactgtgggcttcaggtgcacaa

SEQ ID NO: 44404 - DNA, 86 bp, Homo sapiens
gtacctacatatgaagagagagatcaatccatcgattctgaatgactggctgatgactgtgggcttcaggtgcacaaccacaggga

SEQ ID NO: 44405 - DNA, 85 bp, Homo sapiens
tatgaagagagagatcaatccatcgattctgaatgactggctgatgactgtgggcttcaggtgcacaaccacagggagggggcag

SEQ ID NO: 44406 - DNA, 80 bp, Homo sapiens
atcgattctgaatgactggctgatgactgtgggcttcaggtgcacaaccacagggagggggcaggctggagaccagggag

SEQ ID NO: 44407 - DNA, 78 bp, Homo sapiens
aatgactggctgatgactgtgggcttcaggtgcacaaccacagggagggggcaggctggagaccagggagggtgacgc

SEQ ID NO: 44408 - DNA, 76 bp, Homo sapiens
tgatgactgtgggcttcaggtgcacaaccacagggagggggcaggctggagaccagggagggtgacgctgccccgg

SEQ ID NO: 44409 - DNA, 73 bp, Homo sapiens
cttcaggtgcacaaccacagggagggggcaggctggagaccagggagggtgacgctgccccgggagtgcctag

SEQ ID NO: 44410 - DNA, 71 bp, Homo sapiens
acaaccacagggagggggcaggctggagaccagggagggtgacgctgccccgggagtgcctaggccactgg

SEQ ID NO: 44411 - DNA, 73 bp, Homo sapiens
gagggggcaggctggagaccagggagggtgacgctgccccgggagtgcctaggccactggggcagagtccact

SEQ ID NO: 44412 - DNA, 73 bp, Homo sapiens
aggctggagaccagggagggtgacgctgccccgggagtgcctaggccactggggcagagtccacttctcctgg

SEQ ID NO: 44413 - DNA, 72 bp, Homo sapiens
accagggagggtgacgctgccccgggagtgcctaggccactggggcagagtccacttctcctggggaccaca

SEQ ID NO: 44414 - DNA, 72 bp, Homo sapiens
cgggagtgcctaggccactggggcagagtccacttctcctggggaccacagcctctttccttaacgccttca

SEQ ID NO: 44415 - DNA, 73 bp, Homo sapiens
ctaggccactggggcagagtccacttctcctggggaccacagcctctttccttaacgccttcagtggagagga

SEQ ID NO: 44416 - DNA, 71 bp, Homo sapiens
gggcagagtccacttctcctggggaccacagcctctttccttaacgccttcagtggagaggaggggccgtc

SEQ ID NO: 44417 - DNA, 71 bp, Homo sapiens
gggaccacagcctctttccttaacgccttcagtggagaggaggggccgtccgtgtccaggggctgaggcac

SEQ ID NO: 44418 - DNA, 72 bp, Homo sapiens
agcctctttccttaacgccttcagtggagaggaggggccgtccgtgtccaggggctgaggcactgtacgcaa

SEQ ID NO: 44419 - DNA, 75 bp, Homo sapiens
ttaacgccttcagtggagaggaggggccgtccgtgtccaggggctgaggcactgtacgcaagggtgtcaatcaca

SEQ ID NO: 44420 - DNA, 78 bp, Homo sapiens
cgtccgtgtccaggggctgaggcactgtacgcaagggtgtcaatcacacctgaagatgcctccacggcaacacccaga

SEQ ID NO: 44421 - DNA, 84 bp, Homo sapiens
gggctgaggcactgtacgcaagggtgtcaatcacacctgaagatgcctccacggcaacacccagatgcgtgtgtgagccgctga

SEQ ID NO: 44422 - DNA, 83 bp, Homo sapiens
actgtacgcaagggtgtcaatcacacctgaagatgcctccacggcaacacccagatgcgtgtgtgagccgctgagtcagccac

SEQ ID NO: 44423 - DNA, 84 bp, Homo sapiens
aatcacacctgaagatgcctccacggcaacacccagatgcgtgtgtgagccgctgagtcagccacggtgacactgaaccagcca

SEQ ID NO: 44424 - DNA, 85 bp, Homo sapiens
aagatgcctccacggcaacacccagatgcgtgtgtgagccgctgagtcagccacggtgacactgaaccagccacacgctgctgga

SEQ ID NO: 44425 - DNA, 83 bp, Homo sapiens
acggcaacacccagatgcgtgtgtgagccgctgagtcagccacggtgacactgaaccagccacacgctgctggacgtgtggac

SEQ ID NO: 44426 - DNA, 83 bp, Homo sapiens
acacccagatgcgtgtgtgagccgctgagtcagccacggtgacactgaaccagccacacgctgctggacgtgtggacgtgtgg

SEQ ID NO: 44427 - DNA, 81 bp, Homo sapiens
tgtgagccgctgagtcagccacggtgacactgaaccagccacacgctgctggacgtgtggacgtgtggggttcatacgtgg

SEQ ID NO: 44428 - DNA, 77 bp, Homo sapiens
tgagtcagccacggtgacactgaaccagccacacgctgctggacgtgtggacgtgtggggttcatacgtggggcctt

SEQ ID NO: 44429 - DNA, 73 bp, Homo sapiens
acggtgacactgaaccagccacacgctgctggacgtgtggacgtgtggggttcatacgtggggcctttcccaa

SEQ ID NO: 44430 - DNA, 74 bp, Homo sapiens
acactgaaccagccacacgctgctggacgtgtggacgtgtggggttcatacgtggggcctttcccaaatatgaa

SEQ ID NO: 44431 - DNA, 73 bp, Homo sapiens
ccacacgctgctggacgtgtggacgtgtggggttcatacgtggggcctttcccaaatatgaagagttgggtga

SEQ ID NO: 44432 - DNA, 72 bp, Homo sapiens
ctgctggacgtgtggacgtgtggggttcatacgtggggcctttcccaaatatgaagagttgggtgagcccag

SEQ ID NO: 44433 - DNA, 70 bp, Homo sapiens
tgtggacgtgtggggttcatacgtggggcctttcccaaatatgaagagttgggtgagcccaggggcccca

SEQ ID NO: 44434 - DNA, 69 bp, Homo sapiens
gggttcatacgtggggcctttcccaaatatgaagagttgggtgagcccaggggccccaggcctggtgga

SEQ ID NO: 44435 - DNA, 68 bp, Homo sapiens
gggcctttcccaaatatgaagagttgggtgagcccaggggccccaggcctggtggaccctaactgttg

SEQ ID NO: 44436 - DNA, 67 bp, Homo sapiens
tttcccaaatatgaagagttgggtgagcccaggggccccaggcctggtggaccctaactgttggttt

SEQ ID NO: 44437 - DNA, 73 bp, Homo sapiens
agcccaggggccccaggcctggtggaccctaactgttggttttggagtcaggtcagaggctcgctggctgtga

SEQ ID NO: 44438 - DNA, 73 bp, Homo sapiens
ccccaggcctggtggaccctaactgttggttttggagtcaggtcagaggctcgctggctgtgaggaagtggga

SEQ ID NO: 44439 - DNA, 77 bp, Homo sapiens
ttttggagtcaggtcagaggctcgctggctgtgaggaagtgggatgtggtctgaggacacccttcctggggcgtcca

SEQ ID NO: 44440 - DNA, 75 bp, Homo sapiens
agtcaggtcagaggctcgctggctgtgaggaagtgggatgtggtctgaggacacccttcctggggcgtccacccc

SEQ ID NO: 44441 - DNA, 76 bp, Homo sapiens
aggctcgctggctgtgaggaagtgggatgtggtctgaggacacccttcctggggcgtccaccccctgccccatgca

SEQ ID NO: 44442 - DNA, 73 bp, Homo sapiens
aagtgggatgtggtctgaggacacccttcctggggcgtccaccccctgccccatgcagctgtggaggccaagg

SEQ ID NO: 44443 - DNA, 76 bp, Homo sapiens
tggtctgaggacacccttcctggggcgtccaccccctgccccatgcagctgtggaggccaaggttgtgccagtgag

SEQ ID NO: 44444 - DNA, 72 bp, Homo sapiens
acacccttcctggggcgtccaccccctgccccatgcagctgtggaggccaaggttgtgccagtgaggccccg

SEQ ID NO: 44445 - DNA, 74 bp, Homo sapiens
cgtccaccccctgccccatgcagctgtggaggccaaggttgtgccagtgaggccccggccaccctctcctgttc

SEQ ID NO: 44446 - DNA, 76 bp, Homo sapiens
ctgccccatgcagctgtggaggccaaggttgtgccagtgaggccccggccaccctctcctgttctgccccgggctg

SEQ ID NO: 44447 - DNA, 72 bp, Homo sapiens
aggccaaggttgtgccagtgaggccccggccaccctctcctgttctgccccgggctggggctgctccttctg

SEQ ID NO: 44448 - DNA, 72 bp, Homo sapiens
aggttgtgccagtgaggccccggccaccctctcctgttctgccccgggctggggctgctccttctggtggcc

SEQ ID NO: 44449 - DNA, 71 bp, Homo sapiens
tgttctgccccgggctggggctgctccttctggtggccctgggtctgtggggtgggggcccgtgagagtgg

SEQ ID NO: 44450 - DNA, 69 bp, Homo sapiens
cccgggctggggctgctccttctggtggccctgggtctgtggggtgggggcccgtgagagtggtcctgg

SEQ ID NO: 44451 - DNA, 70 bp, Homo sapiens
ctgctccttctggtggccctgggtctgtggggtgggggcccgtgagagtggtcctgggtctgtggggtgg

SEQ ID NO: 44452 - DNA, 69 bp, Homo sapiens
ttctggtggccctgggtctgtggggtgggggcccgtgagagtggtcctgggtctgtggggtgggggcca

SEQ ID NO: 44453 - DNA, 71 bp, Homo sapiens
gggtgggggcccgtgagagtggtcctgggtctgtggggtgggggccagtgagagaggtcctggatctgtgg

SEQ ID NO: 44454 - DNA, 71 bp, Homo sapiens
agtggtcctgggtctgtggggtgggggccagtgagagaggtcctggatctgtggggggggccggtgagaga

SEQ ID NO: 44455 - DNA, 71 bp, Homo sapiens
gtggggtgggggccagtgagagaggtcctggatctgtggggggggccggtgagagaggtcctgggtctgtg

SEQ ID NO: 44456 - DNA, 71 bp, Homo sapiens
gtgggggccagtgagagaggtcctggatctgtggggggggccggtgagagaggtcctgggtctgtggggtg

SEQ ID NO: 44457 - DNA, 69 bp, Homo sapiens
agaggtcctggatctgtggggggggccggtgagagaggtcctgggtctgtggggtgggggcccgtgaca

SEQ ID NO: 44458 - DNA, 70 bp, Homo sapiens
tggatctgtggggggggccggtgagagaggtcctgggtctgtggggtgggggcccgtgacagtggtcctg

SEQ ID NO: 44459 - DNA, 71 bp, Homo sapiens
tgagagaggtcctgggtctgtggggtgggggcccgtgacagtggtcctgggtctgtgggggcccgtgagag

SEQ ID NO: 44460 - DNA, 68 bp, Homo sapiens
aggtcctgggtctgtggggtgggggcccgtgacagtggtcctgggtctgtgggggcccgtgagagtgg

SEQ ID NO: 44461 - DNA, 69 bp, Homo sapiens
cccgtgacagtggtcctgggtctgtgggggcccgtgagagtgggcctgggcctgtgggggggccggtga

SEQ ID NO: 44462 - DNA, 69 bp, Homo sapiens
agtggtcctgggtctgtgggggcccgtgagagtgggcctgggcctgtgggggggccggtgagagtggtc

SEQ ID NO: 44463 - DNA, 70 bp, Homo sapiens
tgggtctgtgggggcccgtgagagtgggcctgggcctgtgggggggccggtgagagtggtcctgggtctg

SEQ ID NO: 44464 - DNA, 68 bp, Homo sapiens
gggcccgtgagagtgggcctgggcctgtgggggggccggtgagagtggtcctgggtctgtggggtggg

SEQ ID NO: 44465 - DNA, 68 bp, Homo sapiens
agtgggcctgggcctgtgggggggccggtgagagtggtcctgggtctgtggggtgggggccggtgaga

SEQ ID NO: 44466 - DNA, 69 bp, Homo sapiens
tgggcctgtgggggggccggtgagagtggtcctgggtctgtggggtgggggccggtgagagaggtcctg

SEQ ID NO: 44467 - DNA, 67 bp, Homo sapiens
ggtctgtggggtgggggccggtgagagaggtcctgggtctgcggtgggggagggggacgtaagagtg

SEQ ID NO: 44468 - DNA, 67 bp, Homo sapiens
gtgggggccggtgagagaggtcctgggtctgcggtgggggagggggacgtaagagtggccctgggtc

SEQ ID NO: 44469 - DNA, 66 bp, Homo sapiens
tgcggtgggggagggggacgtaagagtggccctgggtctccgggggaggggaggggcgtgagagtg

SEQ ID NO: 44470 - DNA, 65 bp, Homo sapiens
agggggacgtaagagtggccctgggtctccgggggaggggaggggcgtgagagtggccctgggtc

SEQ ID NO: 44471 - DNA, 68 bp, Homo sapiens
acgtaagagtggccctgggtctccgggggaggggaggggcgtgagagtggccctgggtctgtgggagc

SEQ ID NO: 44472 - DNA, 70 bp, Homo sapiens
tggccctgggtctccgggggaggggaggggcgtgagagtggccctgggtctgtgggagcccgtgtgaata

SEQ ID NO: 44473 - DNA, 70 bp, Homo sapiens
gggggaggggaggggcgtgagagtggccctgggtctgtgggagcccgtgtgaatagccctgggtctgtgg

SEQ ID NO: 44474 - DNA, 70 bp, Homo sapiens
aggggcgtgagagtggccctgggtctgtgggagcccgtgtgaatagccctgggtctgtggggggcccgtg

SEQ ID NO: 44475 - DNA, 71 bp, Homo sapiens
agagtggccctgggtctgtgggagcccgtgtgaatagccctgggtctgtggggggcccgtgtgaatagccc

SEQ ID NO: 44476 - DNA, 72 bp, Homo sapiens
tgggtctgtgggagcccgtgtgaatagccctgggtctgtggggggcccgtgtgaatagccctgggtctgcgg

SEQ ID NO: 44477 - DNA, 71 bp, Homo sapiens
tgtgggagcccgtgtgaatagccctgggtctgtggggggcccgtgtgaatagccctgggtctgcggggggc

SEQ ID NO: 44478 - DNA, 72 bp, Homo sapiens
gtgtgaatagccctgggtctgtggggggcccgtgtgaatagccctgggtctgcggggggccctgtgtgagtg

SEQ ID NO: 44479 - DNA, 72 bp, Homo sapiens
tgggtctgtggggggcccgtgtgaatagccctgggtctgcggggggccctgtgtgagtggccctaggtctga

SEQ ID NO: 44480 - DNA, 70 bp, Homo sapiens
ggggcccgtgtgaatagccctgggtctgcggggggccctgtgtgagtggccctaggtctgagggggcctg

SEQ ID NO: 44481 - DNA, 73 bp, Homo sapiens
ccgtgtgaatagccctgggtctgcggggggccctgtgtgagtggccctaggtctgagggggcctgtgtgaata

SEQ ID NO: 44482 - DNA, 71 bp, Homo sapiens
ccctgggtctgcggggggccctgtgtgagtggccctaggtctgagggggcctgtgtgaatagccctgggtc

SEQ ID NO: 44483 - DNA, 71 bp, Homo sapiens
gggggccctgtgtgagtggccctaggtctgagggggcctgtgtgaatagccctgggtctgcggggggccca

SEQ ID NO: 44484 - DNA, 76 bp, Homo sapiens
tgtgagtggccctaggtctgagggggcctgtgtgaatagccctgggtctgcggggggcccatgtgaatggccctga

SEQ ID NO: 44485 - DNA, 74 bp, Homo sapiens
cctaggtctgagggggcctgtgtgaatagccctgggtctgcggggggcccatgtgaatggccctgagtctgcgg

SEQ ID NO: 44486 - DNA, 73 bp, Homo sapiens
agggggcctgtgtgaatagccctgggtctgcggggggcccatgtgaatggccctgagtctgcgggtggccctg

SEQ ID NO: 44487 - DNA, 74 bp, Homo sapiens
tgtgtgaatagccctgggtctgcggggggcccatgtgaatggccctgagtctgcgggtggccctgggttggcgg

SEQ ID NO: 44488 - DNA, 71 bp, Homo sapiens
atagccctgggtctgcggggggcccatgtgaatggccctgagtctgcgggtggccctgggttggcggggtg

SEQ ID NO: 44489 - DNA, 71 bp, Homo sapiens
gtctgcggggggcccatgtgaatggccctgagtctgcgggtggccctgggttggcggggtgggtggggagc

SEQ ID NO: 44490 - DNA, 72 bp, Homo sapiens
atgtgaatggccctgagtctgcgggtggccctgggttggcggggtgggtggggagcgtgtgagtggccctgg

SEQ ID NO: 44491 - DNA, 71 bp, Homo sapiens
aatggccctgagtctgcgggtggccctgggttggcggggtgggtggggagcgtgtgagtggccctggtata

SEQ ID NO: 44492 - DNA, 72 bp, Homo sapiens
agtctgcgggtggccctgggttggcggggtgggtggggagcgtgtgagtggccctggtatatgtcaggcttc

SEQ ID NO: 44493 - DNA, 72 bp, Homo sapiens
ctgggttggcggggtgggtggggagcgtgtgagtggccctggtatatgtcaggcttccctgtggtccggcac

SEQ ID NO: 44494 - DNA, 71 bp, Homo sapiens
ggggtgggtggggagcgtgtgagtggccctggtatatgtcaggcttccctgtggtccggcacggggtggtc

SEQ ID NO: 44495 - DNA, 74 bp, Homo sapiens
gggagcgtgtgagtggccctggtatatgtcaggcttccctgtggtccggcacggggtggtctcacctgctaacc

SEQ ID NO: 44496 - DNA, 73 bp, Homo sapiens
cgtgtgagtggccctggtatatgtcaggcttccctgtggtccggcacggggtggtctcacctgctaacccagg

SEQ ID NO: 44497 - DNA, 74 bp, Homo sapiens
atgtcaggcttccctgtggtccggcacggggtggtctcacctgctaacccagggccctctctgtttattgcagc

SEQ ID NO: 44498 - DNA, 75 bp, Homo sapiens
ctgtggtccggcacggggtggtctcacctgctaacccagggccctctctgtttattgcagccctgcagccgcttc

SEQ ID NO: 44499 - DNA, 78 bp, Homo sapiens
tggtctcacctgctaacccagggccctctctgtttattgcagccctgcagccgcttcccagttgcgccctcctctgcc

SEQ ID NO: 44500 - DNA, 76 bp, Homo sapiens
taacccagggccctctctgtttattgcagccctgcagccgcttcccagttgcgccctcctctgccctggcttcgtc

SEQ ID NO: 44501 - DNA, 77 bp, Homo sapiens
agggccctctctgtttattgcagccctgcagccgcttcccagttgcgccctcctctgccctggcttcgtctgaggac

SEQ ID NO: 44502 - DNA, 78 bp, Homo sapiens
tttattgcagccctgcagccgcttcccagttgcgccctcctctgccctggcttcgtctgaggacctgcagcccccttc

SEQ ID NO: 44503 - DNA, 78 bp, Homo sapiens
agccctgcagccgcttcccagttgcgccctcctctgccctggcttcgtctgaggacctgcagcccccttctccaagca

SEQ ID NO: 44504 - DNA, 78 bp, Homo sapiens
cttcccagttgcgccctcctctgccctggcttcgtctgaggacctgcagcccccttctccaagcagctctggctctgg

SEQ ID NO: 44505 - DNA, 78 bp, Homo sapiens
agttgcgccctcctctgccctggcttcgtctgaggacctgcagcccccttctccaagcagctctggctctgggcttcc

SEQ ID NO: 44506 - DNA, 79 bp, Homo sapiens
tctgccctggcttcgtctgaggacctgcagcccccttctccaagcagctctggctctgggcttcccggccaggctccac

SEQ ID NO: 44507 - DNA, 79 bp, Homo sapiens
ttcgtctgaggacctgcagcccccttctccaagcagctctggctctgggcttcccggccaggctccaccgtgctacgca

SEQ ID NO: 44508 - DNA, 73 bp, Homo sapiens
cccttctccaagcagctctggctctgggcttcccggccaggctccaccgtgctacgcacccacctactttccc

SEQ ID NO: 44509 - DNA, 72 bp, Homo sapiens
tccaagcagctctggctctgggcttcccggccaggctccaccgtgctacgcacccacctactttcccccggg

SEQ ID NO: 44510 - DNA, 69 bp, Homo sapiens
gctctgggcttcccggccaggctccaccgtgctacgcacccacctactttcccccgggggagaagccac

SEQ ID NO: 44511 - DNA, 66 bp, Homo sapiens
gggcttcccggccaggctccaccgtgctacgcacccacctactttcccccgggggagaagccaccc

SEQ ID NO: 44512 - DNA, 68 bp, Homo sapiens
gctccaccgtgctacgcacccacctactttcccccgggggagaagccacccccctacgcaccctgata

SEQ ID NO: 44513 - DNA, 66 bp, Homo sapiens
cacctactttcccccgggggagaagccacccccctacgcaccctgatagaggcgtggagtaaaaga

SEQ ID NO: 44514 - DNA, 65 bp, Homo sapiens
actttcccccgggggagaagccacccccctacgcaccctgatagaggcgtggagtaaaagataac

SEQ ID NO: 44515 - DNA, 73 bp, Homo sapiens
cccggctgtctcggacagagactgagaagcctgccgcgtcccgtgggggcctaggctgcggcgggctccacgg

SEQ ID NO: 44516 - DNA, 72 bp, Homo sapiens
acagagactgagaagcctgccgcgtcccgtgggggcctaggctgcggcgggctccacgggggggcaggagtg

SEQ ID NO: 44517 - DNA, 73 bp, Homo sapiens
gcgtcccgtgggggcctaggctgcggcgggctccacgggggggcaggagtgggccgtgatgtcgctgtgcttg

SEQ ID NO: 44518 - DNA, 74 bp, Homo sapiens
ggggcctaggctgcggcgggctccacgggggggcaggagtgggccgtgatgtcgctgtgcttgtacgccgcctc

SEQ ID NO: 44519 - DNA, 75 bp, Homo sapiens
ctaggctgcggcgggctccacgggggggcaggagtgggccgtgatgtcgctgtgcttgtacgccgcctcgtccag

SEQ ID NO: 44520 - DNA, 75 bp, Homo sapiens
ctccacgggggggcaggagtgggccgtgatgtcgctgtgcttgtacgccgcctcgtccaggtccagcagcctccg

SEQ ID NO: 44521 - DNA, 77 bp, Homo sapiens
gggcaggagtgggccgtgatgtcgctgtgcttgtacgccgcctcgtccaggtccagcagcctccggttgacctccag

SEQ ID NO: 44522 - DNA, 81 bp, Homo sapiens
ggagtgggccgtgatgtcgctgtgcttgtacgccgcctcgtccaggtccagcagcctccggttgacctccagtgtcatgca

SEQ ID NO: 44523 - DNA, 80 bp, Homo sapiens
atgtcgctgtgcttgtacgccgcctcgtccaggtccagcagcctccggttgacctccagtgtcatgcagccgcggtagaa

SEQ ID NO: 44524 - DNA, 77 bp, Homo sapiens
cttgtacgccgcctcgtccaggtccagcagcctccggttgacctccagtgtcatgcagccgcggtagaacgcggtga

SEQ ID NO: 44525 - DNA, 78 bp, Homo sapiens
cctcgtccaggtccagcagcctccggttgacctccagtgtcatgcagccgcggtagaacgcggtgactggcgctgaag

SEQ ID NO: 44526 - DNA, 81 bp, Homo sapiens
gtccagcagcctccggttgacctccagtgtcatgcagccgcggtagaacgcggtgactggcgctgaagtcaccggcacatc

SEQ ID NO: 44527 - DNA, 79 bp, Homo sapiens
agcctccggttgacctccagtgtcatgcagccgcggtagaacgcggtgactggcgctgaagtcaccggcacatctgggc

SEQ ID NO: 44528 - DNA, 80 bp, Homo sapiens
acctccagtgtcatgcagccgcggtagaacgcggtgactggcgctgaagtcaccggcacatctgggccgcagggagagaa

SEQ ID NO: 44529 - DNA, 82 bp, Homo sapiens
tcatgcagccgcggtagaacgcggtgactggcgctgaagtcaccggcacatctgggccgcagggagagaacaacatatctta

SEQ ID NO: 44530 - DNA, 79 bp, Homo sapiens
cggtagaacgcggtgactggcgctgaagtcaccggcacatctgggccgcagggagagaacaacatatcttagctcacca

SEQ ID NO: 44531 - DNA, 77 bp, Homo sapiens
actggcgctgaagtcaccggcacatctgggccgcagggagagaacaacatatcttagctcaccacgtggccggcccc

SEQ ID NO: 44532 - DNA, 75 bp, Homo sapiens
aagtcaccggcacatctgggccgcagggagagaacaacatatcttagctcaccacgtggccggccccgcctggcc

SEQ ID NO: 44533 - DNA, 72 bp, Homo sapiens
acatctgggccgcagggagagaacaacatatcttagctcaccacgtggccggccccgcctggcccccccacc

SEQ ID NO: 44534 - DNA, 70 bp, Homo sapiens
gggagagaacaacatatcttagctcaccacgtggccggccccgcctggcccccccacccccggcagcgct

SEQ ID NO: 44535 - DNA, 71 bp, Homo sapiens
aacaacatatcttagctcaccacgtggccggccccgcctggcccccccacccccggcagcgcttgtggcca

SEQ ID NO: 44536 - DNA, 65 bp, Homo sapiens
accacgtggccggccccgcctggcccccccacccccggcagcgcttgtggccagccccgggttcc

SEQ ID NO: 44537 - DNA, 65 bp, Homo sapiens
ccgcctggcccccccacccccggcagcgcttgtggccagccccgggttccctccgaaagggcagg

SEQ ID NO: 44538 - DNA, 63 bp, Homo sapiens
cccccacccccggcagcgcttgtggccagccccgggttccctccgaaagggcagggtttccct

SEQ ID NO: 44539 - DNA, 65 bp, Homo sapiens
ttgtggccagccccgggttccctccgaaagggcagggtttccctttcttctctaacttctcggtc

SEQ ID NO: 44540 - DNA, 61 bp, Homo sapiens
cccgggttccctccgaaagggcagggtttccctttcttctctaacttctcggtccccgttc

SEQ ID NO: 44541 - DNA, 63 bp, Homo sapiens
aaagggcagggtttccctttcttctctaacttctcggtccccgttcgtttggccgcagacccg

SEQ ID NO: 44542 - DNA, 73 bp, Homo sapiens
cctttcttctctaacttctcggtccccgttcgtttggccgcagacccggcagacaagcaggaggcatctgcca

SEQ ID NO: 44543 - DNA, 82 bp, Homo sapiens
cagacccggcagacaagcaggaggcatctgccagcctgggctctgcagacgccagccctcccttccccgctgggagcacaga

SEQ ID NO: 44544 - DNA, 82 bp, Homo sapiens
agacaagcaggaggcatctgccagcctgggctctgcagacgccagccctcccttccccgctgggagcacagacagtcccatc

SEQ ID NO: 44545 - DNA, 79 bp, Homo sapiens
gaggcatctgccagcctgggctctgcagacgccagccctcccttccccgctgggagcacagacagtcccatcggttaaa

SEQ ID NO: 44546 - DNA, 76 bp, Homo sapiens
ccagcctgggctctgcagacgccagccctcccttccccgctgggagcacagacagtcccatcggttaaacgtgatc

SEQ ID NO: 44547 - DNA, 77 bp, Homo sapiens
ctctgcagacgccagccctcccttccccgctgggagcacagacagtcccatcggttaaacgtgatcttcttctgtgc

SEQ ID NO: 44548 - DNA, 74 bp, Homo sapiens
agacgccagccctcccttccccgctgggagcacagacagtcccatcggttaaacgtgatcttcttctgtgccca

SEQ ID NO: 44549 - DNA, 80 bp, Homo sapiens
cccgctgggagcacagacagtcccatcggttaaacgtgatcttcttctgtgcccagtgagtcattcaggctgcaggcctc

SEQ ID NO: 44550 - DNA, 82 bp, Homo sapiens
agacagtcccatcggttaaacgtgatcttcttctgtgcccagtgagtcattcaggctgcaggcctcctggctcgctctcatc

SEQ ID NO: 44551 - DNA, 81 bp, Homo sapiens
atcggttaaacgtgatcttcttctgtgcccagtgagtcattcaggctgcaggcctcctggctcgctctcatcctcttcaaa

SEQ ID NO: 44552 - DNA, 81 bp, Homo sapiens
ttctgtgcccagtgagtcattcaggctgcaggcctcctggctcgctctcatcctcttcaaagctctgtttattaaaactaa

SEQ ID NO: 44553 - DNA, 79 bp, Homo sapiens
agtgagtcattcaggctgcaggcctcctggctcgctctcatcctcttcaaagctctgtttattaaaactaagtggagtc

SEQ ID NO: 44554 - DNA, 79 bp, Homo sapiens
attcaggctgcaggcctcctggctcgctctcatcctcttcaaagctctgtttattaaaactaagtggagtctgtgtctg

SEQ ID NO: 44555 - DNA, 78 bp, Homo sapiens
aggcctcctggctcgctctcatcctcttcaaagctctgtttattaaaactaagtggagtctgtgtctggcagccaaga

SEQ ID NO: 44556 - DNA, 79 bp, Homo sapiens
ctggctcgctctcatcctcttcaaagctctgtttattaaaactaagtggagtctgtgtctggcagccaagagagaaatc

SEQ ID NO: 44557 - DNA, 74 bp, Homo sapiens
atcctcttcaaagctctgtttattaaaactaagtggagtctgtgtctggcagccaagagagaaatcctgccgtt

SEQ ID NO: 44558 - DNA, 76 bp, Homo sapiens
gctctgtttattaaaactaagtggagtctgtgtctggcagccaagagagaaatcctgccgtttgccgcaagtgaaa

SEQ ID NO: 44559 - DNA, 73 bp, Homo sapiens
tttattaaaactaagtggagtctgtgtctggcagccaagagagaaatcctgccgtttgccgcaagtgaaaacc

SEQ ID NO: 44560 - DNA, 77 bp, Homo sapiens
actaagtggagtctgtgtctggcagccaagagagaaatcctgccgtttgccgcaagtgaaaacctgcgggcagccga

SEQ ID NO: 44561 - DNA, 78 bp, Homo sapiens
tgtgtctggcagccaagagagaaatcctgccgtttgccgcaagtgaaaacctgcgggcagccgaggacttgccggctc

SEQ ID NO: 44562 - DNA, 74 bp, Homo sapiens
ccaagagagaaatcctgccgtttgccgcaagtgaaaacctgcgggcagccgaggacttgccggctcccacgtgc

SEQ ID NO: 44563 - DNA, 72 bp, Homo sapiens
agagaaatcctgccgtttgccgcaagtgaaaacctgcgggcagccgaggacttgccggctcccacgtgcctt

SEQ ID NO: 44564 - DNA, 72 bp, Homo sapiens
cgtttgccgcaagtgaaaacctgcgggcagccgaggacttgccggctcccacgtgcctttccgctgaccctc

SEQ ID NO: 44565 - DNA, 75 bp, Homo sapiens
aagtgaaaacctgcgggcagccgaggacttgccggctcccacgtgcctttccgctgaccctcccagctcatggca

SEQ ID NO: 44566 - DNA, 76 bp, Homo sapiens
aacctgcgggcagccgaggacttgccggctcccacgtgcctttccgctgaccctcccagctcatggcaaggacatc

SEQ ID NO: 44567 - DNA, 76 bp, Homo sapiens
cttgccggctcccacgtgcctttccgctgaccctcccagctcatggcaaggacatccccggtcccagcctctgtgc

SEQ ID NO: 44568 - DNA, 77 bp, Homo sapiens
acgtgcctttccgctgaccctcccagctcatggcaaggacatccccggtcccagcctctgtgctgtgtagcccatgg

SEQ ID NO: 44569 - DNA, 77 bp, Homo sapiens
acatccccggtcccagcctctgtgctgtgtagcccatgggacacggcaggacgccctgctggacatgggaggggctg

SEQ ID NO: 44570 - DNA, 80 bp, Homo sapiens
agcctctgtgctgtgtagcccatgggacacggcaggacgccctgctggacatgggaggggctggcggtcactctgttcgc

SEQ ID NO: 44571 - DNA, 82 bp, Homo sapiens
tgtgctgtgtagcccatgggacacggcaggacgccctgctggacatgggaggggctggcggtcactctgttcgctgctaaca

SEQ ID NO: 44572 - DNA, 81 bp, Homo sapiens
ccatgggacacggcaggacgccctgctggacatgggaggggctggcggtcactctgttcgctgctaacagctgcggtgaca

SEQ ID NO: 44573 - DNA, 80 bp, Homo sapiens
acacggcaggacgccctgctggacatgggaggggctggcggtcactctgttcgctgctaacagctgcggtgacagccgcg

SEQ ID NO: 44574 - DNA, 79 bp, Homo sapiens
acatgggaggggctggcggtcactctgttcgctgctaacagctgcggtgacagccgcgggtcccaactgcagcctggcc

SEQ ID NO: 44575 - DNA, 79 bp, Homo sapiens
ggtcactctgttcgctgctaacagctgcggtgacagccgcgggtcccaactgcagcctggcccgaggtctgcccagccc

SEQ ID NO: 44576 - DNA, 77 bp, Homo sapiens
ttcgctgctaacagctgcggtgacagccgcgggtcccaactgcagcctggcccgaggtctgcccagccctctccccc

SEQ ID NO: 44577 - DNA, 75 bp, Homo sapiens
tgcggtgacagccgcgggtcccaactgcagcctggcccgaggtctgcccagccctctcccccggggctggtctga

SEQ ID NO: 44578 - DNA, 74 bp, Homo sapiens
tgacagccgcgggtcccaactgcagcctggcccgaggtctgcccagccctctcccccggggctggtctgatggg

SEQ ID NO: 44579 - DNA, 76 bp, Homo sapiens
tcccaactgcagcctggcccgaggtctgcccagccctctcccccggggctggtctgatgggtgtggacgaatgctc

SEQ ID NO: 44580 - DNA, 74 bp, Homo sapiens
agcctggcccgaggtctgcccagccctctcccccggggctggtctgatgggtgtggacgaatgctccctgaaga

SEQ ID NO: 44581 - DNA, 75 bp, Homo sapiens
aggtctgcccagccctctcccccggggctggtctgatgggtgtggacgaatgctccctgaagatgcaggttcgtg

SEQ ID NO: 44582 - DNA, 74 bp, Homo sapiens
agccctctcccccggggctggtctgatgggtgtggacgaatgctccctgaagatgcaggttcgtggggcctgac

SEQ ID NO: 44583 - DNA, 77 bp, Homo sapiens
ccggggctggtctgatgggtgtggacgaatgctccctgaagatgcaggttcgtggggcctgactcaggccaatgccg

SEQ ID NO: 44584 - DNA, 77 bp, Homo sapiens
tctgatgggtgtggacgaatgctccctgaagatgcaggttcgtggggcctgactcaggccaatgccggcccccgtac

SEQ ID NO: 44585 - DNA, 75 bp, Homo sapiens
tgtggacgaatgctccctgaagatgcaggttcgtggggcctgactcaggccaatgccggcccccgtacgtgtttc

SEQ ID NO: 44586 - DNA, 76 bp, Homo sapiens
aatgctccctgaagatgcaggttcgtggggcctgactcaggccaatgccggcccccgtacgtgtttctcagtctca

SEQ ID NO: 44587 - DNA, 75 bp, Homo sapiens
aagatgcaggttcgtggggcctgactcaggccaatgccggcccccgtacgtgtttctcagtctcagccaatgacc

SEQ ID NO: 44588 - DNA, 74 bp, Homo sapiens
aggttcgtggggcctgactcaggccaatgccggcccccgtacgtgtttctcagtctcagccaatgacctgacca

SEQ ID NO: 44589 - DNA, 79 bp, Homo sapiens
tgactcaggccaatgccggcccccgtacgtgtttctcagtctcagccaatgacctgaccagcaccgagacaccataata

SEQ ID NO: 44590 - DNA, 76 bp, Homo sapiens
aatgccggcccccgtacgtgtttctcagtctcagccaatgacctgaccagcaccgagacaccataatagccactaa

SEQ ID NO: 44591 - DNA, 77 bp, Homo sapiens
tttctcagtctcagccaatgacctgaccagcaccgagacaccataatagccactaacgacccacctggacttctcct

SEQ ID NO: 44592 - DNA, 72 bp, Homo sapiens
aatgacctgaccagcaccgagacaccataatagccactaacgacccacctggacttctccttcctcttaaaa

SEQ ID NO: 44593 - DNA, 71 bp, Homo sapiens
accataatagccactaacgacccacctggacttctccttcctcttaaaacacaagtcctcttccgcattca

SEQ ID NO: 44594 - DNA, 70 bp, Homo sapiens
cactaacgacccacctggacttctccttcctcttaaaacacaagtcctcttccgcattcactaccagaaa

SEQ ID NO: 44595 - DNA, 68 bp, Homo sapiens
acgacccacctggacttctccttcctcttaaaacacaagtcctcttccgcattcactaccagaaaccc

SEQ ID NO: 44596 - DNA, 71 bp, Homo sapiens
ttctccttcctcttaaaacacaagtcctcttccgcattcactaccagaaaccccagcctgtccaggttaga

SEQ ID NO: 44597 - DNA, 71 bp, Homo sapiens
ttcctcttaaaacacaagtcctcttccgcattcactaccagaaaccccagcctgtccaggttagatctggg

SEQ ID NO: 44598 - DNA, 72 bp, Homo sapiens
aaacacaagtcctcttccgcattcactaccagaaaccccagcctgtccaggttagatctggggtgaccaagc

SEQ ID NO: 44599 - DNA, 73 bp, Homo sapiens
ctcttccgcattcactaccagaaaccccagcctgtccaggttagatctggggtgaccaagctgggcctccctg

SEQ ID NO: 44600 - DNA, 74 bp, Homo sapiens
attcactaccagaaaccccagcctgtccaggttagatctggggtgaccaagctgggcctccctggagctcttca

SEQ ID NO: 44601 - DNA, 71 bp, Homo sapiens
aaccccagcctgtccaggttagatctggggtgaccaagctgggcctccctggagctcttcacccgggttga

SEQ ID NO: 44602 - DNA, 76 bp, Homo sapiens
accaagctgggcctccctggagctcttcacccgggttgagcggagcagggagcacctacctggcaggccgccagca

SEQ ID NO: 44603 - DNA, 77 bp, Homo sapiens
gcctccctggagctcttcacccgggttgagcggagcagggagcacctacctggcaggccgccagcaaaggtgagcac

SEQ ID NO: 44604 - DNA, 75 bp, Homo sapiens
cctggagctcttcacccgggttgagcggagcagggagcacctacctggcaggccgccagcaaaggtgagcacggg

SEQ ID NO: 44605 - DNA, 75 bp, Homo sapiens
ttcacccgggttgagcggagcagggagcacctacctggcaggccgccagcaaaggtgagcacggggctccgcagg

SEQ ID NO: 44606 - DNA, 80 bp, Homo sapiens
ttgagcggagcagggagcacctacctggcaggccgccagcaaaggtgagcacggggctccgcaggtgcctctcgagcacg

SEQ ID NO: 44607 - DNA, 78 bp, Homo sapiens
agggagcacctacctggcaggccgccagcaaaggtgagcacggggctccgcaggtgcctctcgagcacggccagcctc

SEQ ID NO: 44608 - DNA, 83 bp, Homo sapiens
aaaggtgagcacggggctccgcaggtgcctctcgagcacggccagcctctcctgcagctgcgcggcgctcacctcgctctggc

SEQ ID NO: 44609 - DNA, 84 bp, Homo sapiens
gctccgcaggtgcctctcgagcacggccagcctctcctgcagctgcgcggcgctcacctcgctctggcccctggtgccgtccac

SEQ ID NO: 44610 - DNA, 82 bp, Homo sapiens
aggtgcctctcgagcacggccagcctctcctgcagctgcgcggcgctcacctcgctctggcccctggtgccgtccacctcca

SEQ ID NO: 44611 - DNA, 78 bp, Homo sapiens
agcctctcctgcagctgcgcggcgctcacctcgctctggcccctggtgccgtccacctccagggtggcctcaccgtcc

SEQ ID NO: 44612 - DNA, 77 bp, Homo sapiens
agctgcgcggcgctcacctcgctctggcccctggtgccgtccacctccagggtggcctcaccgtccctcagcgagac

SEQ ID NO: 44613 - DNA, 76 bp, Homo sapiens
ctggtgccgtccacctccagggtggcctcaccgtccctcagcgagacggtgaccacgtgctcttggccgtcgcaga

SEQ ID NO: 44614 - DNA, 76 bp, Homo sapiens
ccacctccagggtggcctcaccgtccctcagcgagacggtgaccacgtgctcttggccgtcgcagaccttgatctc

SEQ ID NO: 44615 - DNA, 75 bp, Homo sapiens
agggtggcctcaccgtccctcagcgagacggtgaccacgtgctcttggccgtcgcagaccttgatctccattagg

SEQ ID NO: 44616 - DNA, 75 bp, Homo sapiens
ccgtccctcagcgagacggtgaccacgtgctcttggccgtcgcagaccttgatctccattagggccaaggccgta

SEQ ID NO: 44617 - DNA, 78 bp, Homo sapiens
cctcagcgagacggtgaccacgtgctcttggccgtcgcagaccttgatctccattagggccaaggccgtatgctccac

SEQ ID NO: 44618 - DNA, 76 bp, Homo sapiens
acggtgaccacgtgctcttggccgtcgcagaccttgatctccattagggccaaggccgtatgctccacggccagga

SEQ ID NO: 44619 - DNA, 79 bp, Homo sapiens
cgtgctcttggccgtcgcagaccttgatctccattagggccaaggccgtatgctccacggccaggaccaccagctgcag

SEQ ID NO: 44620 - DNA, 77 bp, Homo sapiens
ccgtcgcagaccttgatctccattagggccaaggccgtatgctccacggccaggaccaccagctgcaggagaccgag

SEQ ID NO: 44621 - DNA, 75 bp, Homo sapiens
attagggccaaggccgtatgctccacggccaggaccaccagctgcaggagaccgaggtgtggtcagggcctgccg

SEQ ID NO: 44622 - DNA, 75 bp, Homo sapiens
accaccagctgcaggagaccgaggtgtggtcagggcctgccggccacccctacgtgagctgttaggtccaagctg

SEQ ID NO: 44623 - DNA, 76 bp, Homo sapiens
agctgcaggagaccgaggtgtggtcagggcctgccggccacccctacgtgagctgttaggtccaagctggtcctca

SEQ ID NO: 44624 - DNA, 76 bp, Homo sapiens
agaccgaggtgtggtcagggcctgccggccacccctacgtgagctgttaggtccaagctggtcctcacagctgctg

SEQ ID NO: 44625 - DNA, 76 bp, Homo sapiens
tggtcagggcctgccggccacccctacgtgagctgttaggtccaagctggtcctcacagctgctggccacccctac

SEQ ID NO: 44626 - DNA, 76 bp, Homo sapiens
cggccacccctacgtgagctgttaggtccaagctggtcctcacagctgctggccacccctacgccgcacgcctgtc

SEQ ID NO: 44627 - DNA, 77 bp, Homo sapiens
ccctacgtgagctgttaggtccaagctggtcctcacagctgctggccacccctacgccgcacgcctgtctccgtcca

SEQ ID NO: 44628 - DNA, 75 bp, Homo sapiens
agctgttaggtccaagctggtcctcacagctgctggccacccctacgccgcacgcctgtctccgtccagggttcc

SEQ ID NO: 44629 - DNA, 77 bp, Homo sapiens
gtccaagctggtcctcacagctgctggccacccctacgccgcacgcctgtctccgtccagggttccctgcagccctg

SEQ ID NO: 44630 - DNA, 81 bp, Homo sapiens
tcacagctgctggccacccctacgccgcacgcctgtctccgtccagggttccctgcagccctgggtctggatgctcgctga

SEQ ID NO: 44631 - DNA, 78 bp, Homo sapiens
ccctacgccgcacgcctgtctccgtccagggttccctgcagccctgggtctggatgctcgctgactgtggatgacacc

SEQ ID NO: 44632 - DNA, 76 bp, Homo sapiens
acgcctgtctccgtccagggttccctgcagccctgggtctggatgctcgctgactgtggatgacacccccacccca

SEQ ID NO: 44633 - DNA, 74 bp, Homo sapiens
ctccgtccagggttccctgcagccctgggtctggatgctcgctgactgtggatgacacccccaccccacctggg

SEQ ID NO: 44634 - DNA, 78 bp, Homo sapiens
atgctcgctgactgtggatgacacccccaccccacctggggctcagcttctctgcacgtaaagccaggggccagcctg

SEQ ID NO: 44635 - DNA, 73 bp, Homo sapiens
atgacacccccaccccacctggggctcagcttctctgcacgtaaagccaggggccagcctgggaggctgtggg

SEQ ID NO: 44636 - DNA, 74 bp, Homo sapiens
ccacctggggctcagcttctctgcacgtaaagccaggggccagcctgggaggctgtgggggaacaagtgtggcc

SEQ ID NO: 44637 - DNA, 71 bp, Homo sapiens
ttctctgcacgtaaagccaggggccagcctgggaggctgtgggggaacaagtgtggcccccaggttgggtg

SEQ ID NO: 44638 - DNA, 69 bp, Homo sapiens
ccagcctgggaggctgtgggggaacaagtgtggcccccaggttgggtgtgagagggtcaaccccagccc

SEQ ID NO: 44639 - DNA, 69 bp, Homo sapiens
aggctgtgggggaacaagtgtggcccccaggttgggtgtgagagggtcaaccccagccccaggcaccag

SEQ ID NO: 44640 - DNA, 72 bp, Homo sapiens
gggaacaagtgtggcccccaggttgggtgtgagagggtcaaccccagccccaggcaccaggcacacacaaga

SEQ ID NO: 44641 - DNA, 74 bp, Homo sapiens
tggcccccaggttgggtgtgagagggtcaaccccagccccaggcaccaggcacacacaagaccgaggctgcact

SEQ ID NO: 44642 - DNA, 76 bp, Homo sapiens
ttgggtgtgagagggtcaaccccagccccaggcaccaggcacacacaagaccgaggctgcacttgaccaggaactg

SEQ ID NO: 44643 - DNA, 76 bp, Homo sapiens
tgtgagagggtcaaccccagccccaggcaccaggcacacacaagaccgaggctgcacttgaccaggaactggggtg

SEQ ID NO: 44644 - DNA, 74 bp, Homo sapiens
aggcaccaggcacacacaagaccgaggctgcacttgaccaggaactggggtggccctgatggggacccaggacc

SEQ ID NO: 44645 - DNA, 70 bp, Homo sapiens
acttgaccaggaactggggtggccctgatggggacccaggacccagccctgcggtggcggcctcccagcc

SEQ ID NO: 44646 - DNA, 68 bp, Homo sapiens
aggaactggggtggccctgatggggacccaggacccagccctgcggtggcggcctcccagcccggtgg

SEQ ID NO: 44647 - DNA, 75 bp, Homo sapiens
tggccctgatggggacccaggacccagccctgcggtggcggcctcccagcccggtgggcactcacgctggcacca

SEQ ID NO: 44648 - DNA, 76 bp, Homo sapiens
gggacccaggacccagccctgcggtggcggcctcccagcccggtgggcactcacgctggcaccacagcccagcagc

SEQ ID NO: 44649 - DNA, 75 bp, Homo sapiens
aggacccagccctgcggtggcggcctcccagcccggtgggcactcacgctggcaccacagcccagcagcccaggg

SEQ ID NO: 44650 - DNA, 81 bp, Homo sapiens
cggtgggcactcacgctggcaccacagcccagcagcccaggggtcggctgttgctacataacagcagctgtttattccaga

SEQ ID NO: 44651 - DNA, 81 bp, Homo sapiens
accacagcccagcagcccaggggtcggctgttgctacataacagcagctgtttattccagatgctgagattgggtctggcc

SEQ ID NO: 44652 - DNA, 79 bp, Homo sapiens
agcagcccaggggtcggctgttgctacataacagcagctgtttattccagatgctgagattgggtctggccctggtaac

SEQ ID NO: 44653 - DNA, 83 bp, Homo sapiens
gggtcggctgttgctacataacagcagctgtttattccagatgctgagattgggtctggccctggtaacgagcatttgcatga

SEQ ID NO: 44654 - DNA, 83 bp, Homo sapiens
ttgctacataacagcagctgtttattccagatgctgagattgggtctggccctggtaacgagcatttgcatgaaccaagcctg

SEQ ID NO: 44655 - DNA, 82 bp, Homo sapiens
acataacagcagctgtttattccagatgctgagattgggtctggccctggtaacgagcatttgcatgaaccaagcctgtctg

SEQ ID NO: 44656 - DNA, 81 bp, Homo sapiens
tttattccagatgctgagattgggtctggccctggtaacgagcatttgcatgaaccaagcctgtctgtcgtatcccagcaa

SEQ ID NO: 44657 - DNA, 79 bp, Homo sapiens
atgctgagattgggtctggccctggtaacgagcatttgcatgaaccaagcctgtctgtcgtatcccagcaagcgggagg

SEQ ID NO: 44658 - DNA, 77 bp, Homo sapiens
attgggtctggccctggtaacgagcatttgcatgaaccaagcctgtctgtcgtatcccagcaagcgggagggctctg

SEQ ID NO: 44659 - DNA, 77 bp, Homo sapiens
taacgagcatttgcatgaaccaagcctgtctgtcgtatcccagcaagcgggagggctctgtggccccggggtgggca

SEQ ID NO: 44660 - DNA, 74 bp, Homo sapiens
aagcctgtctgtcgtatcccagcaagcgggagggctctgtggccccggggtgggcagacttggagaacgtgagc

SEQ ID NO: 44661 - DNA, 74 bp, Homo sapiens
gtatcccagcaagcgggagggctctgtggccccggggtgggcagacttggagaacgtgagcctctctggtttga

SEQ ID NO: 44662 - DNA, 72 bp, Homo sapiens
aagcgggagggctctgtggccccggggtgggcagacttggagaacgtgagcctctctggtttgacccatgtc

SEQ ID NO: 44663 - DNA, 74 bp, Homo sapiens
ctctgtggccccggggtgggcagacttggagaacgtgagcctctctggtttgacccatgtctccctccttagca

SEQ ID NO: 44664 - DNA, 75 bp, Homo sapiens
ccggggtgggcagacttggagaacgtgagcctctctggtttgacccatgtctccctccttagcacacgagcgaga

SEQ ID NO: 44665 - DNA, 76 bp, Homo sapiens
ttggagaacgtgagcctctctggtttgacccatgtctccctccttagcacacgagcgagagaataaaagctgtttc

SEQ ID NO: 44666 - DNA, 77 bp, Homo sapiens
ctctctggtttgacccatgtctccctccttagcacacgagcgagagaataaaagctgtttctgtcacctcttgattg

SEQ ID NO: 44667 - DNA, 77 bp, Homo sapiens
tggtttgacccatgtctccctccttagcacacgagcgagagaataaaagctgtttctgtcacctcttgattgttctg

SEQ ID NO: 44668 - DNA, 75 bp, Homo sapiens
acgagcgagagaataaaagctgtttctgtcacctcttgattgttctgtggggaaaacagcatgagtcccccagcc

SEQ ID NO: 44669 - DNA, 76 bp, Homo sapiens
aataaaagctgtttctgtcacctcttgattgttctgtggggaaaacagcatgagtcccccagcccaggacagctga

SEQ ID NO: 44670 - DNA, 78 bp, Homo sapiens
tttctgtcacctcttgattgttctgtggggaaaacagcatgagtcccccagcccaggacagctgacttattgtgagga

SEQ ID NO: 44671 - DNA, 74 bp, Homo sapiens
acctcttgattgttctgtggggaaaacagcatgagtcccccagcccaggacagctgacttattgtgaggaccgg

SEQ ID NO: 44672 - DNA, 72 bp, Homo sapiens
tgttctgtggggaaaacagcatgagtcccccagcccaggacagctgacttattgtgaggaccgggggtgggg

SEQ ID NO: 44673 - DNA, 70 bp, Homo sapiens
aaaacagcatgagtcccccagcccaggacagctgacttattgtgaggaccgggggtggggggaccttgtc

SEQ ID NO: 44674 - DNA, 68 bp, Homo sapiens
atgagtcccccagcccaggacagctgacttattgtgaggaccgggggtggggggaccttgtccaaggg

SEQ ID NO: 44675 - DNA, 74 bp, Homo sapiens
cccaggacagctgacttattgtgaggaccgggggtggggggaccttgtccaaggggcagctgcactcagctcca

SEQ ID NO: 44676 - DNA, 72 bp, Homo sapiens
tgacttattgtgaggaccgggggtggggggaccttgtccaaggggcagctgcactcagctccacccggtgtc

SEQ ID NO: 44677 - DNA, 69 bp, Homo sapiens
attgtgaggaccgggggtggggggaccttgtccaaggggcagctgcactcagctccacccggtgtcccc

SEQ ID NO: 44678 - DNA, 70 bp, Homo sapiens
ggtggggggaccttgtccaaggggcagctgcactcagctccacccggtgtcccccacggaaagacgctgt

SEQ ID NO: 44679 - DNA, 70 bp, Homo sapiens
accttgtccaaggggcagctgcactcagctccacccggtgtcccccacggaaagacgctgttgggggacc

SEQ ID NO: 44680 - DNA, 70 bp, Homo sapiens
cactcagctccacccggtgtcccccacggaaagacgctgttgggggaccggccaaggtcacagatccgac

SEQ ID NO: 44681 - DNA, 67 bp, Homo sapiens
tgtcccccacggaaagacgctgttgggggaccggccaaggtcacagatccgacttttccagggaaat

SEQ ID NO: 44682 - DNA, 69 bp, Homo sapiens
ttgggggaccggccaaggtcacagatccgacttttccagggaaattggaaaactgagtttgttgctgaa

SEQ ID NO: 44683 - DNA, 73 bp, Homo sapiens
gccaaggtcacagatccgacttttccagggaaattggaaaactgagtttgttgctgaaatcatctgacttaaa

SEQ ID NO: 44684 - DNA, 73 bp, Homo sapiens
acagatccgacttttccagggaaattggaaaactgagtttgttgctgaaatcatctgacttaaacaccagaga

SEQ ID NO: 44685 - DNA, 73 bp, Homo sapiens
ttttccagggaaattggaaaactgagtttgttgctgaaatcatctgacttaaacaccagagactaattcagat

SEQ ID NO: 44686 - DNA, 77 bp, Homo sapiens
agggaaattggaaaactgagtttgttgctgaaatcatctgacttaaacaccagagactaattcagattgctgtgagc

SEQ ID NO: 44687 - DNA, 80 bp, Homo sapiens
aaaactgagtttgttgctgaaatcatctgacttaaacaccagagactaattcagattgctgtgagccaccatctgcccaa

SEQ ID NO: 44688 - DNA, 80 bp, Homo sapiens
tttgttgctgaaatcatctgacttaaacaccagagactaattcagattgctgtgagccaccatctgcccaaccgaacagg

SEQ ID NO: 44689 - DNA, 76 bp, Homo sapiens
aaatcatctgacttaaacaccagagactaattcagattgctgtgagccaccatctgcccaaccgaacaggggaaaa

SEQ ID NO: 44690 - DNA, 75 bp, Homo sapiens
acttaaacaccagagactaattcagattgctgtgagccaccatctgcccaaccgaacaggggaaaagctcccaca

SEQ ID NO: 44691 - DNA, 78 bp, Homo sapiens
agactaattcagattgctgtgagccaccatctgcccaaccgaacaggggaaaagctcccacactgtgagccgagtgtg

SEQ ID NO: 44692 - DNA, 80 bp, Homo sapiens
attcagattgctgtgagccaccatctgcccaaccgaacaggggaaaagctcccacactgtgagccgagtgtggctcgcag

SEQ ID NO: 44693 - DNA, 78 bp, Homo sapiens
tgtgagccaccatctgcccaaccgaacaggggaaaagctcccacactgtgagccgagtgtggctcgcaggcgccggcc

SEQ ID NO: 44694 - DNA, 75 bp, Homo sapiens
aaccgaacaggggaaaagctcccacactgtgagccgagtgtggctcgcaggcgccggccccctcagctgtgtggc

SEQ ID NO: 44695 - DNA, 78 bp, Homo sapiens
aagctcccacactgtgagccgagtgtggctcgcaggcgccggccccctcagctgtgtggcggtgacctggtgtccaaa

SEQ ID NO: 44696 - DNA, 75 bp, Homo sapiens
agccgagtgtggctcgcaggcgccggccccctcagctgtgtggcggtgacctggtgtccaaacaacccccgcagc

SEQ ID NO: 44697 - DNA, 73 bp, Homo sapiens
ctcgcaggcgccggccccctcagctgtgtggcggtgacctggtgtccaaacaacccccgcagcccgaagcgtg

SEQ ID NO: 44698 - DNA, 73 bp, Homo sapiens
gtggcggtgacctggtgtccaaacaacccccgcagcccgaagcgtggcccacgccgggcttggctcatcagac

SEQ ID NO: 44699 - DNA, 74 bp, Homo sapiens
cctggtgtccaaacaacccccgcagcccgaagcgtggcccacgccgggcttggctcatcagacctctggtcaga

SEQ ID NO: 44700 - DNA, 73 bp, Homo sapiens
cgcagcccgaagcgtggcccacgccgggcttggctcatcagacctctggtcagaggctttgggggtccctggg

SEQ ID NO: 44701 - DNA, 72 bp, Homo sapiens
agcgtggcccacgccgggcttggctcatcagacctctggtcagaggctttgggggtccctggggatcccacc

SEQ ID NO: 44702 - DNA, 70 bp, Homo sapiens
acgccgggcttggctcatcagacctctggtcagaggctttgggggtccctggggatcccaccgcgggccc

SEQ ID NO: 44703 - DNA, 70 bp, Homo sapiens
tggctcatcagacctctggtcagaggctttgggggtccctggggatcccaccgcgggcccccttcgtccc

SEQ ID NO: 44704 - DNA, 66 bp, Homo sapiens
acctctggtcagaggctttgggggtccctggggatcccaccgcgggcccccttcgtcccctgccag

SEQ ID NO: 44705 - DNA, 67 bp, Homo sapiens
agaggctttgggggtccctggggatcccaccgcgggcccccttcgtcccctgccagggagtgcagcc

SEQ ID NO: 44706 - DNA, 67 bp, Homo sapiens
tccctggggatcccaccgcgggcccccttcgtcccctgccagggagtgcagcccacgtacccgtggg

SEQ ID NO: 44707 - DNA, 69 bp, Homo sapiens
tcccaccgcgggcccccttcgtcccctgccagggagtgcagcccacgtacccgtgggtcgagccggtca

SEQ ID NO: 44708 - DNA, 69 bp, Homo sapiens
ggcccccttcgtcccctgccagggagtgcagcccacgtacccgtgggtcgagccggtcaggacgccctg

SEQ ID NO: 44709 - DNA, 70 bp, Homo sapiens
agggagtgcagcccacgtacccgtgggtcgagccggtcaggacgccctgggtggcggaggccctacctgc

SEQ ID NO: 44710 - DNA, 69 bp, Homo sapiens
agcccacgtacccgtgggtcgagccggtcaggacgccctgggtggcggaggccctacctgcttcttgag

SEQ ID NO: 44711 - DNA, 72 bp, Homo sapiens
agccggtcaggacgccctgggtggcggaggccctacctgcttcttgagtttcttcgtggagtgatagtctac

SEQ ID NO: 44712 - DNA, 77 bp, Homo sapiens
tgggtggcggaggccctacctgcttcttgagtttcttcgtggagtgatagtctaccagtgccacagagagaggcacg

SEQ ID NO: 44713 - DNA, 76 bp, Homo sapiens
ttcttgagtttcttcgtggagtgatagtctaccagtgccacagagagaggcacggcacggaggtcgggggcccaga

SEQ ID NO: 44714 - DNA, 77 bp, Homo sapiens
tttcttcgtggagtgatagtctaccagtgccacagagagaggcacggcacggaggtcgggggcccagagcgcaaaca

SEQ ID NO: 44715 - DNA, 79 bp, Homo sapiens
agtctaccagtgccacagagagaggcacggcacggaggtcgggggcccagagcgcaaacagcacgcctgtgtctgcggc

SEQ ID NO: 44716 - DNA, 80 bp, Homo sapiens
acagagagaggcacggcacggaggtcgggggcccagagcgcaaacagcacgcctgtgtctgcggctgggcggatgtgagc

SEQ ID NO: 44717 - DNA, 79 bp, Homo sapiens
agaggcacggcacggaggtcgggggcccagagcgcaaacagcacgcctgtgtctgcggctgggcggatgtgagccacga

SEQ ID NO: 44718 - DNA, 77 bp, Homo sapiens
aggtcgggggcccagagcgcaaacagcacgcctgtgtctgcggctgggcggatgtgagccacgacttctacttccca

SEQ ID NO: 44719 - DNA, 76 bp, Homo sapiens
aaacagcacgcctgtgtctgcggctgggcggatgtgagccacgacttctacttcccaggttgattcagtcccgacg

SEQ ID NO: 44720 - DNA, 76 bp, Homo sapiens
acgcctgtgtctgcggctgggcggatgtgagccacgacttctacttcccaggttgattcagtcccgacgtccagag

SEQ ID NO: 44721 - DNA, 74 bp, Homo sapiens
gtctgcggctgggcggatgtgagccacgacttctacttcccaggttgattcagtcccgacgtccagaggggtcc

SEQ ID NO: 44722 - DNA, 75 bp, Homo sapiens
cggatgtgagccacgacttctacttcccaggttgattcagtcccgacgtccagaggggtccgcactgcaatgaaa

SEQ ID NO: 44723 - DNA, 74 bp, Homo sapiens
acgacttctacttcccaggttgattcagtcccgacgtccagaggggtccgcactgcaatgaaagcggtgcatta

SEQ ID NO: 44724 - DNA, 74 bp, Homo sapiens
cttcccaggttgattcagtcccgacgtccagaggggtccgcactgcaatgaaagcggtgcattatagggtggta

SEQ ID NO: 44725 - DNA, 78 bp, Homo sapiens
ttgattcagtcccgacgtccagaggggtccgcactgcaatgaaagcggtgcattatagggtggtatgcacggtggaga

SEQ ID NO: 44726 - DNA, 79 bp, Homo sapiens
tccagaggggtccgcactgcaatgaaagcggtgcattatagggtggtatgcacggtggagaggccacagtgaggtcgga

SEQ ID NO: 44727 - DNA, 81 bp, Homo sapiens
cactgcaatgaaagcggtgcattatagggtggtatgcacggtggagaggccacagtgaggtcggagcagggcctcgagaga

SEQ ID NO: 44728 - DNA, 80 bp, Homo sapiens
aatgaaagcggtgcattatagggtggtatgcacggtggagaggccacagtgaggtcggagcagggcctcgagagatgcag

SEQ ID NO: 44729 - DNA, 77 bp, Homo sapiens
attatagggtggtatgcacggtggagaggccacagtgaggtcggagcagggcctcgagagatgcagtcccagccggg

SEQ ID NO: 44730 - DNA, 77 bp, Homo sapiens
ggtggtatgcacggtggagaggccacagtgaggtcggagcagggcctcgagagatgcagtcccagccggggtgggaa

SEQ ID NO: 44731 - DNA, 79 bp, Homo sapiens
acggtggagaggccacagtgaggtcggagcagggcctcgagagatgcagtcccagccggggtgggaagctgtgcagaca

SEQ ID NO: 44732 - DNA, 79 bp, Homo sapiens
cacagtgaggtcggagcagggcctcgagagatgcagtcccagccggggtgggaagctgtgcagacagccccggatctgg

SEQ ID NO: 44733 - DNA, 80 bp, Homo sapiens
tcggagcagggcctcgagagatgcagtcccagccggggtgggaagctgtgcagacagccccggatctgggacgtgatgga

SEQ ID NO: 44734 - DNA, 78 bp, Homo sapiens
gcctcgagagatgcagtcccagccggggtgggaagctgtgcagacagccccggatctgggacgtgatggaaaactcaa

SEQ ID NO: 44735 - DNA, 77 bp, Homo sapiens
agatgcagtcccagccggggtgggaagctgtgcagacagccccggatctgggacgtgatggaaaactcaacagactg

SEQ ID NO: 44736 - DNA, 75 bp, Homo sapiens
agccggggtgggaagctgtgcagacagccccggatctgggacgtgatggaaaactcaacagactggttcagatct

SEQ ID NO: 44737 - DNA, 77 bp, Homo sapiens
gtgggaagctgtgcagacagccccggatctgggacgtgatggaaaactcaacagactggttcagatcttggcccgga

SEQ ID NO: 44738 - DNA, 79 bp, Homo sapiens
tgtgcagacagccccggatctgggacgtgatggaaaactcaacagactggttcagatcttggcccggagcccagaggca

SEQ ID NO: 44739 - DNA, 72 bp, Homo sapiens
cccggatctgggacgtgatggaaaactcaacagactggttcagatcttggcccggagcccagaggcaccggg

SEQ ID NO: 44740 - DNA, 70 bp, Homo sapiens
aaaactcaacagactggttcagatcttggcccggagcccagaggcaccggggacccccaggctgtttctc

SEQ ID NO: 44741 - DNA, 71 bp, Homo sapiens
aacagactggttcagatcttggcccggagcccagaggcaccggggacccccaggctgtttctccctggcca

SEQ ID NO: 44742 - DNA, 71 bp, Homo sapiens
ttcagatcttggcccggagcccagaggcaccggggacccccaggctgtttctccctggccacaccagtacc

SEQ ID NO: 44743 - DNA, 68 bp, Homo sapiens
cggagcccagaggcaccggggacccccaggctgtttctccctggccacaccagtaccccacttccaaa

SEQ ID NO: 44744 - DNA, 74 bp, Homo sapiens
tctccctggccacaccagtaccccacttccaaatgccctgtaggtgaccaccaggccacacaggcccgtctgag

SEQ ID NO: 44745 - DNA, 72 bp, Homo sapiens
acaccagtaccccacttccaaatgccctgtaggtgaccaccaggccacacaggcccgtctgaggggccacag

SEQ ID NO: 44746 - DNA, 76 bp, Homo sapiens
acttccaaatgccctgtaggtgaccaccaggccacacaggcccgtctgaggggccacaggctgtgcaccatgggac

SEQ ID NO: 44747 - DNA, 77 bp, Homo sapiens
aaatgccctgtaggtgaccaccaggccacacaggcccgtctgaggggccacaggctgtgcaccatgggacgcaggcc

SEQ ID NO: 44748 - DNA, 79 bp, Homo sapiens
taggtgaccaccaggccacacaggcccgtctgaggggccacaggctgtgcaccatgggacgcaggcctgtccctgcctc

SEQ ID NO: 44749 - DNA, 78 bp, Homo sapiens
ccacacaggcccgtctgaggggccacaggctgtgcaccatgggacgcaggcctgtccctgcctccctccgatgtcctc

SEQ ID NO: 44750 - DNA, 77 bp, Homo sapiens
cccgtctgaggggccacaggctgtgcaccatgggacgcaggcctgtccctgcctccctccgatgtcctcttgtttca

SEQ ID NO: 44751 - DNA, 80 bp, Homo sapiens
gggccacaggctgtgcaccatgggacgcaggcctgtccctgcctccctccgatgtcctcttgtttcaggagcgcctgaca

SEQ ID NO: 44752 - DNA, 81 bp, Homo sapiens
tgtgcaccatgggacgcaggcctgtccctgcctccctccgatgtcctcttgtttcaggagcgcctgacagctccttcctca

SEQ ID NO: 44753 - DNA, 78 bp, Homo sapiens
accatgggacgcaggcctgtccctgcctccctccgatgtcctcttgtttcaggagcgcctgacagctccttcctcaga

SEQ ID NO: 44754 - DNA, 78 bp, Homo sapiens
cctgtccctgcctccctccgatgtcctcttgtttcaggagcgcctgacagctccttcctcagagcgtgcgtggcctcg

SEQ ID NO: 44755 - DNA, 84 bp, Homo sapiens
tgcctccctccgatgtcctcttgtttcaggagcgcctgacagctccttcctcagagcgtgcgtggcctcgtgcctcgcatctca

SEQ ID NO: 44756 - DNA, 85 bp, Homo sapiens
atgtcctcttgtttcaggagcgcctgacagctccttcctcagagcgtgcgtggcctcgtgcctcgcatctcacctgcagctttca

SEQ ID NO: 44757 - DNA, 86 bp, Homo sapiens
tcttgtttcaggagcgcctgacagctccttcctcagagcgtgcgtggcctcgtgcctcgcatctcacctgcagctttcaggtagca

SEQ ID NO: 44758 - DNA, 86 bp, Homo sapiens
aggagcgcctgacagctccttcctcagagcgtgcgtggcctcgtgcctcgcatctcacctgcagctttcaggtagcagcacagggc

SEQ ID NO: 44759 - DNA, 83 bp, Homo sapiens
acagctccttcctcagagcgtgcgtggcctcgtgcctcgcatctcacctgcagctttcaggtagcagcacagggcccagtggg

SEQ ID NO: 44760 - DNA, 84 bp, Homo sapiens
tcagagcgtgcgtggcctcgtgcctcgcatctcacctgcagctttcaggtagcagcacagggcccagtgggggctgagagttta

SEQ ID NO: 44761 - DNA, 82 bp, Homo sapiens
gtgcgtggcctcgtgcctcgcatctcacctgcagctttcaggtagcagcacagggcccagtgggggctgagagtttaagata

SEQ ID NO: 44762 - DNA, 84 bp, Homo sapiens
tcgtgcctcgcatctcacctgcagctttcaggtagcagcacagggcccagtgggggctgagagtttaagatagcatgcggacag

SEQ ID NO: 44763 - DNA, 81 bp, Homo sapiens
ggtagcagcacagggcccagtgggggctgagagtttaagatagcatgcggacaggagctgtcatgagcacggtggtctggg

SEQ ID NO: 44764 - DNA, 82 bp, Homo sapiens
cccagtgggggctgagagtttaagatagcatgcggacaggagctgtcatgagcacggtggtctggggtctgagctgtcagga

SEQ ID NO: 44765 - DNA, 85 bp, Homo sapiens
ggctgagagtttaagatagcatgcggacaggagctgtcatgagcacggtggtctggggtctgagctgtcaggagcacgcgcggtc

SEQ ID NO: 44766 - DNA, 82 bp, Homo sapiens
agtttaagatagcatgcggacaggagctgtcatgagcacggtggtctggggtctgagctgtcaggagcacgcgcggtctggg

SEQ ID NO: 44767 - DNA, 83 bp, Homo sapiens
tgtcaggagcacgcgcggtctggggtctgagctgtcaggagcacccgcggtctgagttctgagctgtcaggagcaccgtggtc

SEQ ID NO: 44768 - DNA, 80 bp, Homo sapiens
agcacgcgcggtctggggtctgagctgtcaggagcacccgcggtctgagttctgagctgtcaggagcaccgtggtctggg

SEQ ID NO: 44769 - DNA, 80 bp, Homo sapiens
agctgtcaggagcaccgtggtctggggtctgagctgtcgggagcacgcgtggtctggggtctgagctgtcaggagcaccc

SEQ ID NO: 44770 - DNA, 79 bp, Homo sapiens
tcaggagcaccgtggtctggggtctgagctgtcgggagcacgcgtggtctggggtctgagctgtcaggagcacccgcgg

SEQ ID NO: 44771 - DNA, 80 bp, Homo sapiens
gtcaggagcacccgcggtctggggtctgagctgtcgggagcacctgcggtctggggtctgagctgtcaggagcacgcgcg

SEQ ID NO: 44772 - DNA, 83 bp, Homo sapiens
tgtcaggagcacatgcggtctggggtctgagctgtcgggaacatgtgtggtctcccagggagaatgccacggcatatcctctc

SEQ ID NO: 44773 - DNA, 81 bp, Homo sapiens
acatgcggtctggggtctgagctgtcgggaacatgtgtggtctcccagggagaatgccacggcatatcctctccacgctga

SEQ ID NO: 44774 - DNA, 79 bp, Homo sapiens
tggggtctgagctgtcgggaacatgtgtggtctcccagggagaatgccacggcatatcctctccacgctgagccctccg

SEQ ID NO: 44775 - DNA, 78 bp, Homo sapiens
agctgtcgggaacatgtgtggtctcccagggagaatgccacggcatatcctctccacgctgagccctccgtggactaa

SEQ ID NO: 44776 - DNA, 78 bp, Homo sapiens
tgtcgggaacatgtgtggtctcccagggagaatgccacggcatatcctctccacgctgagccctccgtggactaagaa

SEQ ID NO: 44777 - DNA, 73 bp, Homo sapiens
agggagaatgccacggcatatcctctccacgctgagccctccgtggactaagaagccagaagaaaaaacttcc

SEQ ID NO: 44778 - DNA, 73 bp, Homo sapiens
tgccacggcatatcctctccacgctgagccctccgtggactaagaagccagaagaaaaaacttccgccctgtt

SEQ ID NO: 44779 - DNA, 71 bp, Homo sapiens
atatcctctccacgctgagccctccgtggactaagaagccagaagaaaaaacttccgccctgttttcagtg

SEQ ID NO: 44780 - DNA, 71 bp, Homo sapiens
acgctgagccctccgtggactaagaagccagaagaaaaaacttccgccctgttttcagtgtttctatctca

SEQ ID NO: 44781 - DNA, 70 bp, Homo sapiens
tccgtggactaagaagccagaagaaaaaacttccgccctgttttcagtgtttctatctcacccagaattc

SEQ ID NO: 44782 - DNA, 68 bp, Homo sapiens
actaagaagccagaagaaaaaacttccgccctgttttcagtgtttctatctcacccagaattccaaag

SEQ ID NO: 44783 - DNA, 69 bp, Homo sapiens
aaaacttccgccctgttttcagtgtttctatctcacccagaattccaaagtcctgataaagaagctgtt

SEQ ID NO: 44784 - DNA, 69 bp, Homo sapiens
ttttcagtgtttctatctcacccagaattccaaagtcctgataaagaagctgttttaggaaaaaggacc

SEQ ID NO: 44785 - DNA, 70 bp, Homo sapiens
tgtttctatctcacccagaattccaaagtcctgataaagaagctgttttaggaaaaaggaccccaaatca

SEQ ID NO: 44786 - DNA, 69 bp, Homo sapiens
acccagaattccaaagtcctgataaagaagctgttttaggaaaaaggaccccaaatcactgtgtgtaca

SEQ ID NO: 44787 - DNA, 69 bp, Homo sapiens
aattccaaagtcctgataaagaagctgttttaggaaaaaggaccccaaatcactgtgtgtacacatttg

SEQ ID NO: 44788 - DNA, 73 bp, Homo sapiens
tcctgataaagaagctgttttaggaaaaaggaccccaaatcactgtgtgtacacatttgtgactgggcgcctc

SEQ ID NO: 44789 - DNA, 74 bp, Homo sapiens
tgttttaggaaaaaggaccccaaatcactgtgtgtacacatttgtgactgggcgcctcgcactgcaggccaagg

SEQ ID NO: 44790 - DNA, 80 bp, Homo sapiens
caaatcactgtgtgtacacatttgtgactgggcgcctcgcactgcaggccaaggttggggtcagagtgaattgtgctggt

SEQ ID NO: 44791 - DNA, 79 bp, Homo sapiens
tgtgtacacatttgtgactgggcgcctcgcactgcaggccaaggttggggtcagagtgaattgtgctggtttccctgtc

SEQ ID NO: 44792 - DNA, 76 bp, Homo sapiens
acatttgtgactgggcgcctcgcactgcaggccaaggttggggtcagagtgaattgtgctggtttccctgtctctt

SEQ ID NO: 44793 - DNA, 74 bp, Homo sapiens
actgggcgcctcgcactgcaggccaaggttggggtcagagtgaattgtgctggtttccctgtctctttcccacg

SEQ ID NO: 44794 - DNA, 73 bp, Homo sapiens
actgcaggccaaggttggggtcagagtgaattgtgctggtttccctgtctctttcccacggggctgtgtacgc

SEQ ID NO: 44795 - DNA, 70 bp, Homo sapiens
aaggttggggtcagagtgaattgtgctggtttccctgtctctttcccacggggctgtgtacgcctgaaac

SEQ ID NO: 44796 - DNA, 75 bp, Homo sapiens
tcagagtgaattgtgctggtttccctgtctctttcccacggggctgtgtacgcctgaaacccacatcgcctgtcc

SEQ ID NO: 44797 - DNA, 73 bp, Homo sapiens
aattgtgctggtttccctgtctctttcccacggggctgtgtacgcctgaaacccacatcgcctgtcctgcctg

SEQ ID NO: 44798 - DNA, 74 bp, Homo sapiens
ttccctgtctctttcccacggggctgtgtacgcctgaaacccacatcgcctgtcctgcctgtccctagctggta

SEQ ID NO: 44799 - DNA, 74 bp, Homo sapiens
tctttcccacggggctgtgtacgcctgaaacccacatcgcctgtcctgcctgtccctagctggtacccgccaca

SEQ ID NO: 44800 - DNA, 77 bp, Homo sapiens
gggctgtgtacgcctgaaacccacatcgcctgtcctgcctgtccctagctggtacccgccacatcagttctcaacaa

SEQ ID NO: 44801 - DNA, 75 bp, Homo sapiens
aaacccacatcgcctgtcctgcctgtccctagctggtacccgccacatcagttctcaacaaccatttatggcacc

SEQ ID NO: 44802 - DNA, 77 bp, Homo sapiens
tgtcctgcctgtccctagctggtacccgccacatcagttctcaacaaccatttatggcaccgaaacacacaaaatca

SEQ ID NO: 44803 - DNA, 74 bp, Homo sapiens
ctgtccctagctggtacccgccacatcagttctcaacaaccatttatggcaccgaaacacacaaaatcagaaaa

SEQ ID NO: 44804 - DNA, 72 bp, Homo sapiens
tggtacccgccacatcagttctcaacaaccatttatggcaccgaaacacacaaaatcagaaaaagtaacaaa

SEQ ID NO: 44805 - DNA, 74 bp, Homo sapiens
gccacatcagttctcaacaaccatttatggcaccgaaacacacaaaatcagaaaaagtaacaaaaatattgcaa

SEQ ID NO: 44806 - DNA, 73 bp, Homo sapiens
gttctcaacaaccatttatggcaccgaaacacacaaaatcagaaaaagtaacaaaaatattgcaacagaatca

SEQ ID NO: 44807 - DNA, 69 bp, Homo sapiens
aaccatttatggcaccgaaacacacaaaatcagaaaaagtaacaaaaatattgcaacagaatcaaaaag

SEQ ID NO: 44808 - DNA, 69 bp, Homo sapiens
ggcaccgaaacacacaaaatcagaaaaagtaacaaaaatattgcaacagaatcaaaaagtaacaacaaa

SEQ ID NO: 44809 - DNA, 69 bp, Homo sapiens
cacacaaaatcagaaaaagtaacaaaaatattgcaacagaatcaaaaagtaacaacaaaaagtctcctg

SEQ ID NO: 44810 - DNA, 67 bp, Homo sapiens
aaagtaacaaaaatattgcaacagaatcaaaaagtaacaacaaaaagtctcctgtttgccggtcttc

SEQ ID NO: 44811 - DNA, 68 bp, Homo sapiens
aaaatattgcaacagaatcaaaaagtaacaacaaaaagtctcctgtttgccggtcttcccataacctg

SEQ ID NO: 44812 - DNA, 68 bp, Homo sapiens
aacagaatcaaaaagtaacaacaaaaagtctcctgtttgccggtcttcccataacctgtgaagggaga

SEQ ID NO: 44813 - DNA, 70 bp, Homo sapiens
atcaaaaagtaacaacaaaaagtctcctgtttgccggtcttcccataacctgtgaagggagagatgatgg

SEQ ID NO: 44814 - DNA, 69 bp, Homo sapiens
aacaaaaagtctcctgtttgccggtcttcccataacctgtgaagggagagatgatggtgttctttaaaa

SEQ ID NO: 44815 - DNA, 72 bp, Homo sapiens
agtctcctgtttgccggtcttcccataacctgtgaagggagagatgatggtgttctttaaaatggaagctcc

SEQ ID NO: 44816 - DNA, 72 bp, Homo sapiens
ttgccggtcttcccataacctgtgaagggagagatgatggtgttctttaaaatggaagctcccagtcgggcg

SEQ ID NO: 44817 - DNA, 76 bp, Homo sapiens
aaaaaggaagctcctgacaggaggctaggcacatgttggccatcggggcttcacaagggcaccggcctctgctctc

SEQ ID NO: 44818 - DNA, 76 bp, Homo sapiens
agctcctgacaggaggctaggcacatgttggccatcggggcttcacaagggcaccggcctctgctctccccgggaa

SEQ ID NO: 44819 - DNA, 70 bp, Homo sapiens
acatgttggccatcggggcttcacaagggcaccggcctctgctctccccgggaaggtttcccggctccac

SEQ ID NO: 44820 - DNA, 70 bp, Homo sapiens
ttggccatcggggcttcacaagggcaccggcctctgctctccccgggaaggtttcccggctccacgtggc

SEQ ID NO: 44821 - DNA, 70 bp, Homo sapiens
cttcacaagggcaccggcctctgctctccccgggaaggtttcccggctccacgtggccccttgcatggag

SEQ ID NO: 44822 - DNA, 73 bp, Homo sapiens
agggcaccggcctctgctctccccgggaaggtttcccggctccacgtggccccttgcatggaggctgcacaga

SEQ ID NO: 44823 - DNA, 76 bp, Homo sapiens
tctgctctccccgggaaggtttcccggctccacgtggccccttgcatggaggctgcacagacccggagatctgcaa

SEQ ID NO: 44824 - DNA, 76 bp, Homo sapiens
cgggaaggtttcccggctccacgtggccccttgcatggaggctgcacagacccggagatctgcaagcctgagccca

SEQ ID NO: 44825 - DNA, 84 bp, Homo sapiens
tttcccggctccacgtggccccttgcatggaggctgcacagacccggagatctgcaagcctgagcccagcagagtcgctgcaga

SEQ ID NO: 44826 - DNA, 88 bp, Homo sapiens
ttgcatggaggctgcacagacccggagatctgcaagcctgagcccagcagagtcgctgcagagtgagccaggccagtactaccattcc

SEQ ID NO: 44827 - DNA, 87 bp, Homo sapiens
tgcacagacccggagatctgcaagcctgagcccagcagagtcgctgcagagtgagccaggccagtactaccattcccagcaagtctc

SEQ ID NO: 44828 - DNA, 85 bp, Homo sapiens
cggagatctgcaagcctgagcccagcagagtcgctgcagagtgagccaggccagtactaccattcccagcaagtctcctctgtct

SEQ ID NO: 44829 - DNA, 85 bp, Homo sapiens
atctgcaagcctgagcccagcagagtcgctgcagagtgagccaggccagtactaccattcccagcaagtctcctctgtcttgtaa

SEQ ID NO: 44830 - DNA, 81 bp, Homo sapiens
agcccagcagagtcgctgcagagtgagccaggccagtactaccattcccagcaagtctcctctgtcttgtaagagacgtta

SEQ ID NO: 44831 - DNA, 79 bp, Homo sapiens
agtcgctgcagagtgagccaggccagtactaccattcccagcaagtctcctctgtcttgtaagagacgttactggtata

SEQ ID NO: 44832 - DNA, 79 bp, Homo sapiens
tgcagagtgagccaggccagtactaccattcccagcaagtctcctctgtcttgtaagagacgttactggtatagtttga

SEQ ID NO: 44833 - DNA, 76 bp, Homo sapiens
gtgagccaggccagtactaccattcccagcaagtctcctctgtcttgtaagagacgttactggtatagtttgagat

SEQ ID NO: 44834 - DNA, 76 bp, Homo sapiens
agccaggccagtactaccattcccagcaagtctcctctgtcttgtaagagacgttactggtatagtttgagattca

SEQ ID NO: 44835 - DNA, 75 bp, Homo sapiens
ccagtactaccattcccagcaagtctcctctgtcttgtaagagacgttactggtatagtttgagattcactggaa

SEQ ID NO: 44836 - DNA, 74 bp, Homo sapiens
agtactaccattcccagcaagtctcctctgtcttgtaagagacgttactggtatagtttgagattcactggaaa

SEQ ID NO: 44837 - DNA, 77 bp, Homo sapiens
actaccattcccagcaagtctcctctgtcttgtaagagacgttactggtatagtttgagattcactggaaatgcatg

SEQ ID NO: 44838 - DNA, 79 bp, Homo sapiens
ttcccagcaagtctcctctgtcttgtaagagacgttactggtatagtttgagattcactggaaatgcatggagctgtaa

SEQ ID NO: 44839 - DNA, 78 bp, Homo sapiens
aagtctcctctgtcttgtaagagacgttactggtatagtttgagattcactggaaatgcatggagctgtaactgcttc

SEQ ID NO: 44840 - DNA, 80 bp, Homo sapiens
tgtcttgtaagagacgttactggtatagtttgagattcactggaaatgcatggagctgtaactgcttctgtccggataga

SEQ ID NO: 44841 - DNA, 76 bp, Homo sapiens
agacgttactggtatagtttgagattcactggaaatgcatggagctgtaactgcttctgtccggatagaccaaaaa

SEQ ID NO: 44842 - DNA, 78 bp, Homo sapiens
ttcactggaaatgcatggagctgtaactgcttctgtccggatagaccaaaaagggccggcagacgcggccggcagtca

SEQ ID NO: 44843 - DNA, 73 bp, Homo sapiens
agctgtaactgcttctgtccggatagaccaaaaagggccggcagacgcggccggcagtcactggaaatggccc

SEQ ID NO: 44844 - DNA, 75 bp, Homo sapiens
actgcttctgtccggatagaccaaaaagggccggcagacgcggccggcagtcactggaaatggcccctgtgatgc

SEQ ID NO: 44845 - DNA, 74 bp, Homo sapiens
atagaccaaaaagggccggcagacgcggccggcagtcactggaaatggcccctgtgatgcctgcataaggttac

SEQ ID NO: 44846 - DNA, 73 bp, Homo sapiens
aaaaagggccggcagacgcggccggcagtcactggaaatggcccctgtgatgcctgcataaggttacccctga

SEQ ID NO: 44847 - DNA, 78 bp, Homo sapiens
agacgcggccggcagtcactggaaatggcccctgtgatgcctgcataaggttacccctgagaaatgtgtatgatatta

SEQ ID NO: 44848 - DNA, 74 bp, Homo sapiens
tggaaatggcccctgtgatgcctgcataaggttacccctgagaaatgtgtatgatattaagtggaaaaaggatt

SEQ ID NO: 44849 - DNA, 76 bp, Homo sapiens
cctgtgatgcctgcataaggttacccctgagaaatgtgtatgatattaagtggaaaaaggatttaagcatttcata

SEQ ID NO: 44850 - DNA, 76 bp, Homo sapiens
cctgcataaggttacccctgagaaatgtgtatgatattaagtggaaaaaggatttaagcatttcatatgacatgat

SEQ ID NO: 44851 - DNA, 76 bp, Homo sapiens
ggttacccctgagaaatgtgtatgatattaagtggaaaaaggatttaagcatttcatatgacatgatttcgtgtca

SEQ ID NO: 44852 - DNA, 81 bp, Homo sapiens
gagaaatgtgtatgatattaagtggaaaaaggatttaagcatttcatatgacatgatttcgtgtcaaacattatgatgctc

SEQ ID NO: 44853 - DNA, 80 bp, Homo sapiens
tgatattaagtggaaaaaggatttaagcatttcatatgacatgatttcgtgtcaaacattatgatgctctagatttggaa

SEQ ID NO: 44854 - DNA, 78 bp, Homo sapiens
gtggaaaaaggatttaagcatttcatatgacatgatttcgtgtcaaacattatgatgctctagatttggaagtccaaa

SEQ ID NO: 44855 - DNA, 79 bp, Homo sapiens
aggatttaagcatttcatatgacatgatttcgtgtcaaacattatgatgctctagatttggaagtccaaaaatcaagac

SEQ ID NO: 44856 - DNA, 79 bp, Homo sapiens
atttcatatgacatgatttcgtgtcaaacattatgatgctctagatttggaagtccaaaaatcaagactgagggagaac

SEQ ID NO: 44857 - DNA, 81 bp, Homo sapiens
atgacatgatttcgtgtcaaacattatgatgctctagatttggaagtccaaaaatcaagactgagggagaacgcgtgtgca

SEQ ID NO: 44858 - DNA, 79 bp, Homo sapiens
tagatttggaagtccaaaaatcaagactgagggagaacgcgtgtgcacagtcagtccagccagtggcagatggcgcttt

SEQ ID NO: 44859 - DNA, 81 bp, Homo sapiens
agtccaaaaatcaagactgagggagaacgcgtgtgcacagtcagtccagccagtggcagatggcgcttttctcagatgcct

SEQ ID NO: 44860 - DNA, 82 bp, Homo sapiens
aaaatcaagactgagggagaacgcgtgtgcacagtcagtccagccagtggcagatggcgcttttctcagatgcctttcctga

SEQ ID NO: 44861 - DNA, 77 bp, Homo sapiens
acagtcagtccagccagtggcagatggcgcttttctcagatgcctttcctgacacggtcacgcttttgacacccggg

SEQ ID NO: 44862 - DNA, 73 bp, Homo sapiens
atggcgcttttctcagatgcctttcctgacacggtcacgcttttgacacccggggggagacggtgacactgga

SEQ ID NO: 44863 - DNA, 75 bp, Homo sapiens
ttttctcagatgcctttcctgacacggtcacgcttttgacacccggggggagacggtgacactggatctggctca

SEQ ID NO: 44864 - DNA, 70 bp, Homo sapiens
cctttcctgacacggtcacgcttttgacacccggggggagacggtgacactggatctggctcaggacggg

SEQ ID NO: 44865 - DNA, 70 bp, Homo sapiens
acacggtcacgcttttgacacccggggggagacggtgacactggatctggctcaggacggggcaggaccc

SEQ ID NO: 44866 - DNA, 69 bp, Homo sapiens
cttttgacacccggggggagacggtgacactggatctggctcaggacggggcaggaccctcccctttgc

SEQ ID NO: 44867 - DNA, 71 bp, Homo sapiens
ccggggggagacggtgacactggatctggctcaggacggggcaggaccctcccctttgctccgcgtggatc

SEQ ID NO: 44868 - DNA, 72 bp, Homo sapiens
agacggtgacactggatctggctcaggacggggcaggaccctcccctttgctccgcgtggatccccttgaac

SEQ ID NO: 44869 - DNA, 68 bp, Homo sapiens
aggacggggcaggaccctcccctttgctccgcgtggatccccttgaacctggggttcctgctgggtgc

SEQ ID NO: 44870 - DNA, 68 bp, Homo sapiens
aggaccctcccctttgctccgcgtggatccccttgaacctggggttcctgctgggtgcttgagggccg

SEQ ID NO: 44871 - DNA, 75 bp, Homo sapiens
cctttgctccgcgtggatccccttgaacctggggttcctgctgggtgcttgagggccggcagccctgagatctga

SEQ ID NO: 44872 - DNA, 74 bp, Homo sapiens
tccgcgtggatccccttgaacctggggttcctgctgggtgcttgagggccggcagccctgagatctgacggagg

SEQ ID NO: 44873 - DNA, 79 bp, Homo sapiens
tgggtgcttgagggccggcagccctgagatctgacggagggggcgctgcctgccctctgtgcgtgtgggggcttcacca

SEQ ID NO: 44874 - DNA, 77 bp, Homo sapiens
cttgagggccggcagccctgagatctgacggagggggcgctgcctgccctctgtgcgtgtgggggcttcaccataaa

SEQ ID NO: 44875 - DNA, 76 bp, Homo sapiens
agccctgagatctgacggagggggcgctgcctgccctctgtgcgtgtgggggcttcaccataaacggctcggtgtc

SEQ ID NO: 44876 - DNA, 75 bp, Homo sapiens
atctgacggagggggcgctgcctgccctctgtgcgtgtgggggcttcaccataaacggctcggtgtccaggaata

SEQ ID NO: 44877 - DNA, 76 bp, Homo sapiens
gggcgctgcctgccctctgtgcgtgtgggggcttcaccataaacggctcggtgtccaggaatagggcagggctgtg

SEQ ID NO: 44878 - DNA, 74 bp, Homo sapiens
tctgtgcgtgtgggggcttcaccataaacggctcggtgtccaggaatagggcagggctgtggtgccccagtggg

SEQ ID NO: 44879 - DNA, 71 bp, Homo sapiens
gggcttcaccataaacggctcggtgtccaggaatagggcagggctgtggtgccccagtggggcccacgtgg

SEQ ID NO: 44880 - DNA, 69 bp, Homo sapiens
ataaacggctcggtgtccaggaatagggcagggctgtggtgccccagtggggcccacgtggggtgggaa

SEQ ID NO: 44881 - DNA, 72 bp, Homo sapiens
ctcggtgtccaggaatagggcagggctgtggtgccccagtggggcccacgtggggtgggaatgtgaggcagg

SEQ ID NO: 44882 - DNA, 72 bp, Homo sapiens
aatagggcagggctgtggtgccccagtggggcccacgtggggtgggaatgtgaggcagggtggggccgagca

SEQ ID NO: 44883 - DNA, 73 bp, Homo sapiens
gctgtggtgccccagtggggcccacgtggggtgggaatgtgaggcagggtggggccgagcagtaacactatcc

SEQ ID NO: 44884 - DNA, 75 bp, Homo sapiens
cccagtggggcccacgtggggtgggaatgtgaggcagggtggggccgagcagtaacactatcctcacagcagcac

SEQ ID NO: 44885 - DNA, 74 bp, Homo sapiens
ggcccacgtggggtgggaatgtgaggcagggtggggccgagcagtaacactatcctcacagcagcacccccgga

SEQ ID NO: 44886 - DNA, 76 bp, Homo sapiens
gggtgggaatgtgaggcagggtggggccgagcagtaacactatcctcacagcagcacccccggagcctgcactggg

SEQ ID NO: 44887 - DNA, 76 bp, Homo sapiens
aatgtgaggcagggtggggccgagcagtaacactatcctcacagcagcacccccggagcctgcactggggagggcg

SEQ ID NO: 44888 - DNA, 78 bp, Homo sapiens
agtaacactatcctcacagcagcacccccggagcctgcactggggagggcggcagcgtggcgtcacaggactgggcca

SEQ ID NO: 44889 - DNA, 82 bp, Homo sapiens
actatcctcacagcagcacccccggagcctgcactggggagggcggcagcgtggcgtcacaggactgggccagcagctcaca

SEQ ID NO: 44890 - DNA, 79 bp, Homo sapiens
agcacccccggagcctgcactggggagggcggcagcgtggcgtcacaggactgggccagcagctcacatccaccctgtc

SEQ ID NO: 44891 - DNA, 78 bp, Homo sapiens
ggcagcgtggcgtcacaggactgggccagcagctcacatccaccctgtcctccctttttcaggcctaggttcactgtc

SEQ ID NO: 44892 - DNA, 75 bp, Homo sapiens
cgtggcgtcacaggactgggccagcagctcacatccaccctgtcctccctttttcaggcctaggttcactgtccc

SEQ ID NO: 44893 - DNA, 75 bp, Homo sapiens
actgggccagcagctcacatccaccctgtcctccctttttcaggcctaggttcactgtcccccaggcagcttcac

SEQ ID NO: 44894 - DNA, 72 bp, Homo sapiens
agctcacatccaccctgtcctccctttttcaggcctaggttcactgtcccccaggcagcttcacggctgttt

SEQ ID NO: 44895 - DNA, 70 bp, Homo sapiens
atccaccctgtcctccctttttcaggcctaggttcactgtcccccaggcagcttcacggctgtttttaca

SEQ ID NO: 44896 - DNA, 71 bp, Homo sapiens
tccctttttcaggcctaggttcactgtcccccaggcagcttcacggctgtttttacacacctcccattgta

SEQ ID NO: 44897 - DNA, 75 bp, Homo sapiens
taggttcactgtcccccaggcagcttcacggctgtttttacacacctcccattgtagctgtctcaccgggtcatc

SEQ ID NO: 44898 - DNA, 75 bp, Homo sapiens
ccaggcagcttcacggctgtttttacacacctcccattgtagctgtctcaccgggtcatcggtgaccacggtgtc

SEQ ID NO: 44899 - DNA, 75 bp, Homo sapiens
tcacggctgtttttacacacctcccattgtagctgtctcaccgggtcatcggtgaccacggtgtccaccatgtta

SEQ ID NO: 44900 - DNA, 73 bp, Homo sapiens
gtttttacacacctcccattgtagctgtctcaccgggtcatcggtgaccacggtgtccaccatgttaccgaga

SEQ ID NO: 44901 - DNA, 77 bp, Homo sapiens
acacctcccattgtagctgtctcaccgggtcatcggtgaccacggtgtccaccatgttaccgagagcttctctgtgc

SEQ ID NO: 44902 - DNA, 76 bp, Homo sapiens
attgtagctgtctcaccgggtcatcggtgaccacggtgtccaccatgttaccgagagcttctctgtgcccctggac

SEQ ID NO: 44903 - DNA, 75 bp, Homo sapiens
tctcaccgggtcatcggtgaccacggtgtccaccatgttaccgagagcttctctgtgcccctggacgagtcctaa

SEQ ID NO: 44904 - DNA, 77 bp, Homo sapiens
atcggtgaccacggtgtccaccatgttaccgagagcttctctgtgcccctggacgagtcctaaggctgtgctgtctc

SEQ ID NO: 44905 - DNA, 78 bp, Homo sapiens
gtgtccaccatgttaccgagagcttctctgtgcccctggacgagtcctaaggctgtgctgtctccggactttctgcaa

SEQ ID NO: 44906 - DNA, 76 bp, Homo sapiens
accatgttaccgagagcttctctgtgcccctggacgagtcctaaggctgtgctgtctccggactttctgcaaagga

SEQ ID NO: 44907 - DNA, 75 bp, Homo sapiens
tctgtgcccctggacgagtcctaaggctgtgctgtctccggactttctgcaaaggaccctgtaaggctcccagcc

SEQ ID NO: 44908 - DNA, 72 bp, Homo sapiens
ctggacgagtcctaaggctgtgctgtctccggactttctgcaaaggaccctgtaaggctcccagcctccccg

SEQ ID NO: 44909 - DNA, 74 bp, Homo sapiens
taaggctgtgctgtctccggactttctgcaaaggaccctgtaaggctcccagcctccccggcctcgcaggcacc

SEQ ID NO: 44910 - DNA, 74 bp, Homo sapiens
tgctgtctccggactttctgcaaaggaccctgtaaggctcccagcctccccggcctcgcaggcaccttctctcc

SEQ ID NO: 44911 - DNA, 70 bp, Homo sapiens
actttctgcaaaggaccctgtaaggctcccagcctccccggcctcgcaggcaccttctctccccggcctc

SEQ ID NO: 44912 - DNA, 68 bp, Homo sapiens
aaaggaccctgtaaggctcccagcctccccggcctcgcaggcaccttctctccccggcctcccggcgc

SEQ ID NO: 44913 - DNA, 73 bp, Homo sapiens
ggcctcgcaggcaccttctctccccggcctcctggcgccggcctcgcaggcaccttctctcccccgcctcctg

SEQ ID NO: 44914 - DNA, 71 bp, Homo sapiens
aggcaccttctctccccggcctcctggcgccggcctcgcaggcaccttctctcccccgcctcctggcgccg

SEQ ID NO: 44915 - DNA, 73 bp, Homo sapiens
ttctctccccggcctcctggcgccggcctcgcaggcaccttctctcccccgcctcctggcgccggcctcgcag

SEQ ID NO: 44916 - DNA, 74 bp, Homo sapiens
cctcctggcgccggcctcgcaggcaccttctctcccccgcctcctggcgccggcctcgcaggcaccttctctcc

SEQ ID NO: 44917 - DNA, 72 bp, Homo sapiens
ccggcctcgcaggcaccttctctcccccgcctcctggcgccggcctcgcaggcaccttctctccccggcctc

SEQ ID NO: 44918 - DNA, 79 bp, Homo sapiens
ctggcgccggcctcgcaggcaccttctctccccggcctcctggcactggcttcgcaggcaccttctcggcacatctctc

SEQ ID NO: 44919 - DNA, 79 bp, Homo sapiens
ggcctcgcaggcaccttctctccccggcctcctggcactggcttcgcaggcaccttctcggcacatctctctcatttct

SEQ ID NO: 44920 - DNA, 78 bp, Homo sapiens
aggcaccttctctccccggcctcctggcactggcttcgcaggcaccttctcggcacatctctctcatttcttcttcac

SEQ ID NO: 44921 - DNA, 82 bp, Homo sapiens
cccggcctcctggcactggcttcgcaggcaccttctcggcacatctctctcatttcttcttcactggctgactctgaactga

SEQ ID NO: 44922 - DNA, 87 bp, Homo sapiens
cttcgcaggcaccttctcggcacatctctctcatttcttcttcactggctgactctgaactgagtgacctgcatggccatcctgaga

SEQ ID NO: 44923 - DNA, 85 bp, Homo sapiens
aggcaccttctcggcacatctctctcatttcttcttcactggctgactctgaactgagtgacctgcatggccatcctgagaggtg

SEQ ID NO: 44924 - DNA, 85 bp, Homo sapiens
acatctctctcatttcttcttcactggctgactctgaactgagtgacctgcatggccatcctgagaggtgggcctctgcccgcac

SEQ ID NO: 44925 - DNA, 83 bp, Homo sapiens
tcatttcttcttcactggctgactctgaactgagtgacctgcatggccatcctgagaggtgggcctctgcccgcacctccgcc

SEQ ID NO: 44926 - DNA, 81 bp, Homo sapiens
ttcttcactggctgactctgaactgagtgacctgcatggccatcctgagaggtgggcctctgcccgcacctccgcccaccc

SEQ ID NO: 44927 - DNA, 79 bp, Homo sapiens
tgactctgaactgagtgacctgcatggccatcctgagaggtgggcctctgcccgcacctccgcccaccccgcccaccca

SEQ ID NO: 44928 - DNA, 75 bp, Homo sapiens
aactgagtgacctgcatggccatcctgagaggtgggcctctgcccgcacctccgcccaccccgcccacccatccc

SEQ ID NO: 44929 - DNA, 74 bp, Homo sapiens
tgcatggccatcctgagaggtgggcctctgcccgcacctccgcccaccccgcccacccatccctgccccggaac

SEQ ID NO: 44930 - DNA, 69 bp, Homo sapiens
atcctgagaggtgggcctctgcccgcacctccgcccaccccgcccacccatccctgccccggaaccgga

SEQ ID NO: 44931 - DNA, 70 bp, Homo sapiens
tgggcctctgcccgcacctccgcccaccccgcccacccatccctgccccggaaccggaggagcctcagct

SEQ ID NO: 44932 - DNA, 74 bp, Homo sapiens
tccgcccaccccgcccacccatccctgccccggaaccggaggagcctcagcttgtcctgacgctgccatctgag

SEQ ID NO: 44933 - DNA, 78 bp, Homo sapiens
ccacccatccctgccccggaaccggaggagcctcagcttgtcctgacgctgccatctgaggccgtctgcttgctttca

SEQ ID NO: 44934 - DNA, 80 bp, Homo sapiens
atccctgccccggaaccggaggagcctcagcttgtcctgacgctgccatctgaggccgtctgcttgctttcagcgtatgc

SEQ ID NO: 44935 - DNA, 87 bp, Homo sapiens
aggagcctcagcttgtcctgacgctgccatctgaggccgtctgcttgctttcagcgtatgcctgtctgaaggtgcagccacagccac

SEQ ID NO: 44936 - DNA, 83 bp, Homo sapiens
tcctgacgctgccatctgaggccgtctgcttgctttcagcgtatgcctgtctgaaggtgcagccacagccaccccaacggtaa

SEQ ID NO: 44937 - DNA, 83 bp, Homo sapiens
tgccatctgaggccgtctgcttgctttcagcgtatgcctgtctgaaggtgcagccacagccaccccaacggtaagagccaaga

SEQ ID NO: 44938 - DNA, 80 bp, Homo sapiens
tgcttgctttcagcgtatgcctgtctgaaggtgcagccacagccaccccaacggtaagagccaagacttactgtagtcca

SEQ ID NO: 44939 - DNA, 77 bp, Homo sapiens
cgtatgcctgtctgaaggtgcagccacagccaccccaacggtaagagccaagacttactgtagtccaggctgtagaa

SEQ ID NO: 44940 - DNA, 76 bp, Homo sapiens
ctgtctgaaggtgcagccacagccaccccaacggtaagagccaagacttactgtagtccaggctgtagaaggcgaa

SEQ ID NO: 44941 - DNA, 69 bp, Homo sapiens
accccaacggtaagagccaagacttactgtagtccaggctgtagaaggcgaagccgctcccggggtaga

SEQ ID NO: 44942 - DNA, 70 bp, Homo sapiens
aacggtaagagccaagacttactgtagtccaggctgtagaaggcgaagccgctcccggggtagaaagagc

SEQ ID NO: 44943 - DNA, 71 bp, Homo sapiens
aagacttactgtagtccaggctgtagaaggcgaagccgctcccggggtagaaagagcctctctccgtcacc

SEQ ID NO: 44944 - DNA, 77 bp, Homo sapiens
tgtagtccaggctgtagaaggcgaagccgctcccggggtagaaagagcctctctccgtcaccgagaagcactgcatc

SEQ ID NO: 44945 - DNA, 76 bp, Homo sapiens
tgtagaaggcgaagccgctcccggggtagaaagagcctctctccgtcaccgagaagcactgcatcctcgtgttcac

SEQ ID NO: 44946 - DNA, 75 bp, Homo sapiens
aggcgaagccgctcccggggtagaaagagcctctctccgtcaccgagaagcactgcatcctcgtgttcactttca

SEQ ID NO: 44947 - DNA, 77 bp, Homo sapiens
tctctccgtcaccgagaagcactgcatcctcgtgttcactttcaccgtttcctggatggtggtgtcttctccgttca

SEQ ID NO: 44948 - DNA, 75 bp, Homo sapiens
accgagaagcactgcatcctcgtgttcactttcaccgtttcctggatggtggtgtcttctccgttcagccagttc

SEQ ID NO: 44949 - DNA, 79 bp, Homo sapiens
actgcatcctcgtgttcactttcaccgtttcctggatggtggtgtcttctccgttcagccagttccagctcctcatgca

SEQ ID NO: 44950 - DNA, 76 bp, Homo sapiens
accgtttcctggatggtggtgtcttctccgttcagccagttccagctcctcatgcagccatccagacgagggttta

SEQ ID NO: 44951 - DNA, 80 bp, Homo sapiens
tggtgtcttctccgttcagccagttccagctcctcatgcagccatccagacgagggtttatctggaaaggcagagaaatc

SEQ ID NO: 44952 - DNA, 80 bp, Homo sapiens
tccagctcctcatgcagccatccagacgagggtttatctggaaaggcagagaaatctccgtggcttcctgggagcgagaa

SEQ ID NO: 44953 - DNA, 78 bp, Homo sapiens
tcctcatgcagccatccagacgagggtttatctggaaaggcagagaaatctccgtggcttcctgggagcgagaagccc

SEQ ID NO: 44954 - DNA, 74 bp, Homo sapiens
atccagacgagggtttatctggaaaggcagagaaatctccgtggcttcctgggagcgagaagccccatgccgga

SEQ ID NO: 44955 - DNA, 73 bp, Homo sapiens
agggtttatctggaaaggcagagaaatctccgtggcttcctgggagcgagaagccccatgccggatgccccag

SEQ ID NO: 44956 - DNA, 74 bp, Homo sapiens
aaaggcagagaaatctccgtggcttcctgggagcgagaagccccatgccggatgccccagtcggtgggtggcgc

SEQ ID NO: 44957 - DNA, 74 bp, Homo sapiens
agagaaatctccgtggcttcctgggagcgagaagccccatgccggatgccccagtcggtgggtggcgccttcgc

SEQ ID NO: 44958 - DNA, 76 bp, Homo sapiens
ggcttcctgggagcgagaagccccatgccggatgccccagtcggtgggtggcgccttcgcggccctggtatgtgca

SEQ ID NO: 44959 - DNA, 79 bp, Homo sapiens
gagcgagaagccccatgccggatgccccagtcggtgggtggcgccttcgcggccctggtatgtgcagctctacggcaga

SEQ ID NO: 44960 - DNA, 76 bp, Homo sapiens
agaagccccatgccggatgccccagtcggtgggtggcgccttcgcggccctggtatgtgcagctctacggcagaaa

SEQ ID NO: 44961 - DNA, 76 bp, Homo sapiens
gatgccccagtcggtgggtggcgccttcgcggccctggtatgtgcagctctacggcagaaacgggccagtcccatc

SEQ ID NO: 44962 - DNA, 73 bp, Homo sapiens
agtcggtgggtggcgccttcgcggccctggtatgtgcagctctacggcagaaacgggccagtcccatcggtgg

SEQ ID NO: 44963 - DNA, 74 bp, Homo sapiens
gggtggcgccttcgcggccctggtatgtgcagctctacggcagaaacgggccagtcccatcggtggtggccatt

SEQ ID NO: 44964 - DNA, 74 bp, Homo sapiens
ggccctggtatgtgcagctctacggcagaaacgggccagtcccatcggtggtggccatttcacagaaggtttct

SEQ ID NO: 44965 - DNA, 75 bp, Homo sapiens
gtatgtgcagctctacggcagaaacgggccagtcccatcggtggtggccatttcacagaaggtttcttcacttta

SEQ ID NO: 44966 - DNA, 72 bp, Homo sapiens
agctctacggcagaaacgggccagtcccatcggtggtggccatttcacagaaggtttcttcactttacacaa

SEQ ID NO: 44967 - DNA, 75 bp, Homo sapiens
gtggtggccatttcacagaaggtttcttcactttacacaacgcctcactgcagaatacctatttccactggtgta

SEQ ID NO: 44968 - DNA, 76 bp, Homo sapiens
atttcacagaaggtttcttcactttacacaacgcctcactgcagaatacctatttccactggtgtatgctcaagaa

SEQ ID NO: 44969 - DNA, 75 bp, Homo sapiens
ttcttcactttacacaacgcctcactgcagaatacctatttccactggtgtatgctcaagaactaaaggttcatt

SEQ ID NO: 44970 - DNA, 73 bp, Homo sapiens
aacgcctcactgcagaatacctatttccactggtgtatgctcaagaactaaaggttcattttaaagctaggaa

SEQ ID NO: 44971 - DNA, 71 bp, Homo sapiens
tatgctcaagaactaaaggttcattttaaagctaggaaaggactgaaaaggccatgtgggtctaaggtcaa

SEQ ID NO: 44972 - DNA, 71 bp, Homo sapiens
ttcattttaaagctaggaaaggactgaaaaggccatgtgggtctaaggtcaaagagtatggattgttcaac

SEQ ID NO: 44973 - DNA, 72 bp, Homo sapiens
ttaaagctaggaaaggactgaaaaggccatgtgggtctaaggtcaaagagtatggattgttcaaccatccaa

SEQ ID NO: 44974 - DNA, 75 bp, Homo sapiens
aggactgaaaaggccatgtgggtctaaggtcaaagagtatggattgttcaaccatccaacactcatgtgaattat

SEQ ID NO: 44975 - DNA, 75 bp, Homo sapiens
aaaaggccatgtgggtctaaggtcaaagagtatggattgttcaaccatccaacactcatgtgaattattcaatat

SEQ ID NO: 44976 - DNA, 80 bp, Homo sapiens
tctaaggtcaaagagtatggattgttcaaccatccaacactcatgtgaattattcaatattcaatatggctgtgggcaaa

SEQ ID NO: 44977 - DNA, 80 bp, Homo sapiens
aaagagtatggattgttcaaccatccaacactcatgtgaattattcaatattcaatatggctgtgggcaaatcagggcaa

SEQ ID NO: 44978 - DNA, 77 bp, Homo sapiens
attgttcaaccatccaacactcatgtgaattattcaatattcaatatggctgtgggcaaatcagggcaaccccctta

SEQ ID NO: 44979 - DNA, 78 bp, Homo sapiens
aaccatccaacactcatgtgaattattcaatattcaatatggctgtgggcaaatcagggcaacccccttatctgtgaa

SEQ ID NO: 44980 - DNA, 77 bp, Homo sapiens
aacactcatgtgaattattcaatattcaatatggctgtgggcaaatcagggcaacccccttatctgtgaaacgagga

SEQ ID NO: 44981 - DNA, 74 bp, Homo sapiens
aattattcaatattcaatatggctgtgggcaaatcagggcaacccccttatctgtgaaacgaggagggtccagc

SEQ ID NO: 44982 - DNA, 74 bp, Homo sapiens
aatattcaatatggctgtgggcaaatcagggcaacccccttatctgtgaaacgaggagggtccagccaggcaaa

SEQ ID NO: 44983 - DNA, 72 bp, Homo sapiens
tgtgggcaaatcagggcaacccccttatctgtgaaacgaggagggtccagccaggcaaagtcccggcaccag

SEQ ID NO: 44984 - DNA, 71 bp, Homo sapiens
aaatcagggcaacccccttatctgtgaaacgaggagggtccagccaggcaaagtcccggcaccaggctgtc

SEQ ID NO: 44985 - DNA, 72 bp, Homo sapiens
ccccttatctgtgaaacgaggagggtccagccaggcaaagtcccggcaccaggctgtctgtgggcctgggaa

SEQ ID NO: 44986 - DNA, 76 bp, Homo sapiens
tatctgtgaaacgaggagggtccagccaggcaaagtcccggcaccaggctgtctgtgggcctgggaagcaggtgcc

SEQ ID NO: 44987 - DNA, 74 bp, Homo sapiens
aggagggtccagccaggcaaagtcccggcaccaggctgtctgtgggcctgggaagcaggtgcccctcacaacac

SEQ ID NO: 44988 - DNA, 71 bp, Homo sapiens
aaagtcccggcaccaggctgtctgtgggcctgggaagcaggtgcccctcacaacaccgaaggtcccggcac

SEQ ID NO: 44989 - DNA, 74 bp, Homo sapiens
accaggctgtctgtgggcctgggaagcaggtgcccctcacaacaccgaaggtcccggcaccaggcagtctgtgg

SEQ ID NO: 44990 - DNA, 73 bp, Homo sapiens
gtctgtgggcctgggaagcaggtgcccctcacaacaccgaaggtcccggcaccaggcagtctgtgggcctggg

SEQ ID NO: 44991 - DNA, 74 bp, Homo sapiens
tgggaagcaggtgcccctcacaacaccgaaggtcccggcaccaggcagtctgtgggcctggggagcaggtgccc

SEQ ID NO: 44992 - DNA, 74 bp, Homo sapiens
ccctcacaacaccgaaggtcccggcaccaggcagtctgtgggcctggggagcaggtgcccctcacaacactgaa

SEQ ID NO: 44993 - DNA, 72 bp, Homo sapiens
acaacaccgaaggtcccggcaccaggcagtctgtgggcctggggagcaggtgcccctcacaacactgaaggg

SEQ ID NO: 44994 - DNA, 76 bp, Homo sapiens
aggtcccggcaccaggcagtctgtgggcctggggagcaggtgcccctcacaacactgaaggggtggcttcagcaca

SEQ ID NO: 44995 - DNA, 79 bp, Homo sapiens
ggcctggggagcaggtgcccctcacaacactgaaggggtggcttcagcacaggcactgccgacactcagcacccaaaga

SEQ ID NO: 44996 - DNA, 80 bp, Homo sapiens
agcaggtgcccctcacaacactgaaggggtggcttcagcacaggcactgccgacactcagcacccaaagacgcgaagaca

SEQ ID NO: 44997 - DNA, 81 bp, Homo sapiens
ctcacaacactgaaggggtggcttcagcacaggcactgccgacactcagcacccaaagacgcgaagacatgcgtgcctttc

SEQ ID NO: 44998 - DNA, 79 bp, Homo sapiens
aacactgaaggggtggcttcagcacaggcactgccgacactcagcacccaaagacgcgaagacatgcgtgcctttctcc

SEQ ID NO: 44999 - DNA, 83 bp, Homo sapiens
gcttcagcacaggcactgccgacactcagcacccaaagacgcgaagacatgcgtgcctttctcctgcctggtgtggaagtgaa

SEQ ID NO: 45000 - DNA, 79 bp, Homo sapiens
acaggcactgccgacactcagcacccaaagacgcgaagacatgcgtgcctttctcctgcctggtgtggaagtgaaaata

SEQ ID NO: 45001 - DNA, 78 bp, Homo sapiens
cgacactcagcacccaaagacgcgaagacatgcgtgcctttctcctgcctggtgtggaagtgaaaatacccaggatga

SEQ ID NO: 45002 - DNA, 74 bp, Homo sapiens
acccaaagacgcgaagacatgcgtgcctttctcctgcctggtgtggaagtgaaaatacccaggatgacggctta

SEQ ID NO: 45003 - DNA, 76 bp, Homo sapiens
aagacgcgaagacatgcgtgcctttctcctgcctggtgtggaagtgaaaatacccaggatgacggcttagacgtca

SEQ ID NO: 45004 - DNA, 76 bp, Homo sapiens
tttctcctgcctggtgtggaagtgaaaatacccaggatgacggcttagacgtcagcacgtgggggctggagacaca

SEQ ID NO: 45005 - DNA, 71 bp, Homo sapiens
aagtgaaaatacccaggatgacggcttagacgtcagcacgtgggggctggagacacaggtcgggggcacgg

SEQ ID NO: 45006 - DNA, 75 bp, Homo sapiens
acggcttagacgtcagcacgtgggggctggagacacaggtcgggggcacgggcgtgtgctgtgctgaaggggaga

SEQ ID NO: 45007 - DNA, 74 bp, Homo sapiens
acgtcagcacgtgggggctggagacacaggtcgggggcacgggcgtgtgctgtgctgaaggggagagaaggcgg

SEQ ID NO: 45008 - DNA, 76 bp, Homo sapiens
ggctggagacacaggtcgggggcacgggcgtgtgctgtgctgaaggggagagaaggcgggacctggagcaatggcc

SEQ ID NO: 45009 - DNA, 76 bp, Homo sapiens
acacaggtcgggggcacgggcgtgtgctgtgctgaaggggagagaaggcgggacctggagcaatggcccacactga

SEQ ID NO: 45010 - DNA, 80 bp, Homo sapiens
ggcacgggcgtgtgctgtgctgaaggggagagaaggcgggacctggagcaatggcccacactgaccgcccatcatggctg

SEQ ID NO: 45011 - DNA, 78 bp, Homo sapiens
cgtgtgctgtgctgaaggggagagaaggcgggacctggagcaatggcccacactgaccgcccatcatggctgttttcc

SEQ ID NO: 45012 - DNA, 76 bp, Homo sapiens
tgaaggggagagaaggcgggacctggagcaatggcccacactgaccgcccatcatggctgttttccccttatgaga

SEQ ID NO: 45013 - DNA, 77 bp, Homo sapiens
agaaggcgggacctggagcaatggcccacactgaccgcccatcatggctgttttccccttatgagactcacggcaga

SEQ ID NO: 45014 - DNA, 76 bp, Homo sapiens
acctggagcaatggcccacactgaccgcccatcatggctgttttccccttatgagactcacggcagagttacaaaa

SEQ ID NO: 45015 - DNA, 73 bp, Homo sapiens
aatggcccacactgaccgcccatcatggctgttttccccttatgagactcacggcagagttacaaaacccaaa

SEQ ID NO: 45016 - DNA, 72 bp, Homo sapiens
acactgaccgcccatcatggctgttttccccttatgagactcacggcagagttacaaaacccaaaatgttct

SEQ ID NO: 45017 - DNA, 72 bp, Homo sapiens
atcatggctgttttccccttatgagactcacggcagagttacaaaacccaaaatgttcttggaaattgtcca

SEQ ID NO: 45018 - DNA, 68 bp, Homo sapiens
tgttttccccttatgagactcacggcagagttacaaaacccaaaatgttcttggaaattgtccaaaaa

SEQ ID NO: 45019 - DNA, 68 bp, Homo sapiens
cttatgagactcacggcagagttacaaaacccaaaatgttcttggaaattgtccaaaaaagtttactg

SEQ ID NO: 45020 - DNA, 66 bp, Homo sapiens
actcacggcagagttacaaaacccaaaatgttcttggaaattgtccaaaaaagtttactgttctgt

SEQ ID NO: 45021 - DNA, 65 bp, Homo sapiens
gagttacaaaacccaaaatgttcttggaaattgtccaaaaaagtttactgttctgttaaagaata

SEQ ID NO: 45022 - DNA, 65 bp, Homo sapiens
aaatgttcttggaaattgtccaaaaaagtttactgttctgttaaagaataatttcggccgggcgc

SEQ ID NO: 45023 - DNA, 72 bp, Homo sapiens
ataataatttaattgtgtcttatctccattgaaaaatagacaactttattatcaattcagatgaaaacttag

SEQ ID NO: 45024 - DNA, 74 bp, Homo sapiens
taattgtgtcttatctccattgaaaaatagacaactttattatcaattcagatgaaaacttaggtctcataaaa

SEQ ID NO: 45025 - DNA, 73 bp, Homo sapiens
cttatctccattgaaaaatagacaactttattatcaattcagatgaaaacttaggtctcataaaaagagatgg

SEQ ID NO: 45026 - DNA, 71 bp, Homo sapiens
ccattgaaaaatagacaactttattatcaattcagatgaaaacttaggtctcataaaaagagatggtaaaa

SEQ ID NO: 45027 - DNA, 74 bp, Homo sapiens
caactttattatcaattcagatgaaaacttaggtctcataaaaagagatggtaaaattaatgacatagctgtac

SEQ ID NO: 45028 - DNA, 75 bp, Homo sapiens
tatcaattcagatgaaaacttaggtctcataaaaagagatggtaaaattaatgacatagctgtacggcgactttg

SEQ ID NO: 45029 - DNA, 72 bp, Homo sapiens
atgaaaacttaggtctcataaaaagagatggtaaaattaatgacatagctgtacggcgactttgtcaaactc

SEQ ID NO: 45030 - DNA, 72 bp, Homo sapiens
acttaggtctcataaaaagagatggtaaaattaatgacatagctgtacggcgactttgtcaaactctaggaa

SEQ ID NO: 45031 - DNA, 68 bp, Homo sapiens
aaaaagagatggtaaaattaatgacatagctgtacggcgactttgtcaaactctaggaaacctttcct

SEQ ID NO: 45032 - DNA, 69 bp, Homo sapiens
atggtaaaattaatgacatagctgtacggcgactttgtcaaactctaggaaacctttccttcctctagg

SEQ ID NO: 45033 - DNA, 72 bp, Homo sapiens
attaatgacatagctgtacggcgactttgtcaaactctaggaaacctttccttcctctaggtcctcctcaca

SEQ ID NO: 45034 - DNA, 68 bp, Homo sapiens
ctgtacggcgactttgtcaaactctaggaaacctttccttcctctaggtcctcctcacacctggttaa

SEQ ID NO: 45035 - DNA, 67 bp, Homo sapiens
actttgtcaaactctaggaaacctttccttcctctaggtcctcctcacacctggttaatggtaaaca

SEQ ID NO: 45036 - DNA, 67 bp, Homo sapiens
aaactctaggaaacctttccttcctctaggtcctcctcacacctggttaatggtaaacacagggcag

SEQ ID NO: 45037 - DNA, 69 bp, Homo sapiens
aaacctttccttcctctaggtcctcctcacacctggttaatggtaaacacagggcagggtgtgactgag

SEQ ID NO: 45038 - DNA, 73 bp, Homo sapiens
tttccttcctctaggtcctcctcacacctggttaatggtaaacacagggcagggtgtgactgaggcttcctga

SEQ ID NO: 45039 - DNA, 73 bp, Homo sapiens
tctaggtcctcctcacacctggttaatggtaaacacagggcagggtgtgactgaggcttcctgacaccgttcc

SEQ ID NO: 45040 - DNA, 72 bp, Homo sapiens
acctggttaatggtaaacacagggcagggtgtgactgaggcttcctgacaccgttcccgggatcccagcaca

SEQ ID NO: 45041 - DNA, 72 bp, Homo sapiens
ggttaatggtaaacacagggcagggtgtgactgaggcttcctgacaccgttcccgggatcccagcacacggc

SEQ ID NO: 45042 - DNA, 75 bp, Homo sapiens
taaacacagggcagggtgtgactgaggcttcctgacaccgttcccgggatcccagcacacggcgcgtctacacag

SEQ ID NO: 45043 - DNA, 74 bp, Homo sapiens
aaacacagggcagggtgtgactgaggcttcctgacaccgttcccgggatcccagcacacggcgcgtctacacag

SEQ ID NO: 45044 - DNA, 76 bp, Homo sapiens
gcagggtgtgactgaggcttcctgacaccgttcccgggatcccagcacacggcgcgtctacacagggacaggtaca

SEQ ID NO: 45045 - DNA, 75 bp, Homo sapiens
acaccgttcccgggatcccagcacacggcgcgtctacacagggacaggtacagtactcacaggctgcacgaggtc

SEQ ID NO: 45046 - DNA, 78 bp, Homo sapiens
ccgggatcccagcacacggcgcgtctacacagggacaggtacagtactcacaggctgcacgaggtccttctcatggaa

SEQ ID NO: 45047 - DNA, 76 bp, Homo sapiens
acacggcgcgtctacacagggacaggtacagtactcacaggctgcacgaggtccttctcatggaagggaatacctc

SEQ ID NO: 45048 - DNA, 76 bp, Homo sapiens
gtctacacagggacaggtacagtactcacaggctgcacgaggtccttctcatggaagggaatacctcccacggtca

SEQ ID NO: 45049 - DNA, 78 bp, Homo sapiens
gtacagtactcacaggctgcacgaggtccttctcatggaagggaatacctcccacggtcaggttcagatgatacagtc

SEQ ID NO: 45050 - DNA, 76 bp, Homo sapiens
gctgcacgaggtccttctcatggaagggaatacctcccacggtcaggttcagatgatacagtcctcgctccggttg

SEQ ID NO: 45051 - DNA, 71 bp, Homo sapiens
aatacctcccacggtcaggttcagatgatacagtcctcgctccggttggaacaagtccccggccaccgcga

SEQ ID NO: 45052 - DNA, 74 bp, Homo sapiens
ccacggtcaggttcagatgatacagtcctcgctccggttggaacaagtccccggccaccgcgattttcatgaca

SEQ ID NO: 45053 - DNA, 77 bp, Homo sapiens
gttcagatgatacagtcctcgctccggttggaacaagtccccggccaccgcgattttcatgacagcatccctgttga

SEQ ID NO: 45054 - DNA, 74 bp, Homo sapiens
atacagtcctcgctccggttggaacaagtccccggccaccgcgattttcatgacagcatccctgttgaccttga

SEQ ID NO: 45055 - DNA, 74 bp, Homo sapiens
ctccggttggaacaagtccccggccaccgcgattttcatgacagcatccctgttgaccttgatgaccagattcc

SEQ ID NO: 45056 - DNA, 78 bp, Homo sapiens
aacaagtccccggccaccgcgattttcatgacagcatccctgttgaccttgatgaccagattccgcgccagctcctca

SEQ ID NO: 45057 - DNA, 82 bp, Homo sapiens
ccggccaccgcgattttcatgacagcatccctgttgaccttgatgaccagattccgcgccagctcctcaacagagatctgaa

SEQ ID NO: 45058 - DNA, 87 bp, Homo sapiens
attttcatgacagcatccctgttgaccttgatgaccagattccgcgccagctcctcaacagagatctgaagagaggcagcgccatga

SEQ ID NO: 45059 - DNA, 85 bp, Homo sapiens
acagcatccctgttgaccttgatgaccagattccgcgccagctcctcaacagagatctgaagagaggcagcgccatgagaaaaga

SEQ ID NO: 45060 - DNA, 83 bp, Homo sapiens
cctgttgaccttgatgaccagattccgcgccagctcctcaacagagatctgaagagaggcagcgccatgagaaaagatgggag

SEQ ID NO: 45061 - DNA, 86 bp, Homo sapiens
ttgatgaccagattccgcgccagctcctcaacagagatctgaagagaggcagcgccatgagaaaagatgggagtgcacgttctgaa

SEQ ID NO: 45062 - DNA, 82 bp, Homo sapiens
attccgcgccagctcctcaacagagatctgaagagaggcagcgccatgagaaaagatgggagtgcacgttctgaaggggctc

SEQ ID NO: 45063 - DNA, 81 bp, Homo sapiens
tcctcaacagagatctgaagagaggcagcgccatgagaaaagatgggagtgcacgttctgaaggggctcccaactgagaaa

SEQ ID NO: 45064 - DNA, 78 bp, Homo sapiens
agatctgaagagaggcagcgccatgagaaaagatgggagtgcacgttctgaaggggctcccaactgagaaaaaccaca

SEQ ID NO: 45065 - DNA, 77 bp, Homo sapiens
catgagaaaagatgggagtgcacgttctgaaggggctcccaactgagaaaaaccacactcatcctctcctgagccaa

SEQ ID NO: 45066 - DNA, 74 bp, Homo sapiens
aaaagatgggagtgcacgttctgaaggggctcccaactgagaaaaaccacactcatcctctcctgagccaagag

SEQ ID NO: 45067 - DNA, 72 bp, Homo sapiens
tctgaaggggctcccaactgagaaaaaccacactcatcctctcctgagccaagagggtcccgacctcgggga

SEQ ID NO: 45068 - DNA, 72 bp, Homo sapiens
agaaaaaccacactcatcctctcctgagccaagagggtcccgacctcggggaggccacctgatcctcacctg

SEQ ID NO: 45069 - DNA, 72 bp, Homo sapiens
actcatcctctcctgagccaagagggtcccgacctcggggaggccacctgatcctcacctgggccaagaggg

SEQ ID NO: 45070 - DNA, 71 bp, Homo sapiens
tgagccaagagggtcccgacctcggggaggccacctgatcctcacctgggccaagagggtcccaacctcag

SEQ ID NO: 45071 - DNA, 68 bp, Homo sapiens
aagagggtcccgacctcggggaggccacctgatcctcacctgggccaagagggtcccaacctcaggga

SEQ ID NO: 45072 - DNA, 71 bp, Homo sapiens
cgacctcggggaggccacctgatcctcacctgggccaagagggtcccaacctcagggagaccacctgatcc

SEQ ID NO: 45073 - DNA, 78 bp, Homo sapiens
aagagggtcccgatctcagggagaccacctgatcctcacctgggccaagagggtctcaatctcaggcagaccacatga

SEQ ID NO: 45074 - DNA, 81 bp, Homo sapiens
tcccgatctcagggagaccacctgatcctcacctgggccaagagggtctcaatctcaggcagaccacatgatcctcacctg

SEQ ID NO: 45075 - DNA, 79 bp, Homo sapiens
agggagaccacctgatcctcacctgggccaagagggtctcaatctcaggcagaccacatgatcctcacctgggccaaga

SEQ ID NO: 45076 - DNA, 79 bp, Homo sapiens
atcctcacctgggccaagagggtctcaatctcaggcagaccacatgatcctcacctgggccaagagggtcccgatctca

SEQ ID NO: 45077 - DNA, 77 bp, Homo sapiens
acctgggccaagagggtctcaatctcaggcagaccacatgatcctcacctgggccaagagggtcccgatctcaggga

SEQ ID NO: 45078 - DNA, 78 bp, Homo sapiens
aagagggtctcaatctcaggcagaccacatgatcctcacctgggccaagagggtcccgatctcagggaggccacctga

SEQ ID NO: 45079 - DNA, 78 bp, Homo sapiens; identical to SEQ ID NO: 45073

SEQ ID NO: 45080 - DNA, 81 bp, Homo sapiens
atctcagggagaccacctgatcctcacctgggccaagagggtctcaatctcaggcagaccacatgatcctcacctgggcca

SEQ ID NO: 45081 - DNA, 79 bp, Homo sapiens; identical to SEQ ID NO: 45075

SEQ ID NO: 45082 - DNA, 79 bp, Homo sapiens
atcctcacctgggccaagagggtctcaatctcaggcagaccacatgatcctcacctgggccaagagggtcccaatctca

SEQ ID NO: 45083 - DNA, 76 bp, Homo sapiens
cccaatctcagggaggccacctgatcctcacctgggcgaagagggtcccaatctcagggagaccacctgatcctca

SEQ ID NO: 45084 - DNA, 75 bp, Homo sapiens
agggaggccacctgatcctcacctgggcgaagagggtcccaatctcagggagaccacctgatcctcacctggcca

SEQ ID NO: 45085 - DNA, 77 bp, Homo sapiens
tcctcacctggccaagagggacctgacctcagggagaccacctgatccacacctgagccaagaaggtcccaatctca

SEQ ID NO: 45086 - DNA, 75 bp, Homo sapiens
caagagggacctgacctcagggagaccacctgatccacacctgagccaagaaggtcccaatctcagggacaccac

SEQ ID NO: 45087 - DNA, 77 bp, Homo sapiens
acctgacctcagggagaccacctgatccacacctgagccaagaaggtcccaatctcagggacaccacctgatcctca

SEQ ID NO: 45088 - DNA, 77 bp, Homo sapiens
ggagaccacctgatccacacctgagccaagaaggtcccaatctcagggacaccacctgatcctcacctgggccaaga

SEQ ID NO: 45089 - DNA, 77 bp, Homo sapiens
ctgatccacacctgagccaagaaggtcccaatctcagggacaccacctgatcctcacctgggccaagagggtctcaa

SEQ ID NO: 45090 - DNA, 75 bp, Homo sapiens
tcagggagaccacatgatcctcacctgggccaagagggacctgacccggggagaccacctgatcctcacctgggc

SEQ ID NO: 45091 - DNA, 73 bp, Homo sapiens
accacatgatcctcacctgggccaagagggacctgacccggggagaccacctgatcctcacctgggccaagag

SEQ ID NO: 45092 - DNA, 68 bp, Homo sapiens
acctgggccaagagggacctgacccggggagaccacctgatcctcacctgggccaagagggtcccaac

SEQ ID NO: 45093 - DNA, 70 bp, Homo sapiens
aagagggacctgacccggggagaccacctgatcctcacctgggccaagagggtcccaacttcagagagac

SEQ ID NO: 45094 - DNA, 72 bp, Homo sapiens
acctgacccggggagaccacctgatcctcacctgggccaagagggtcccaacttcagagagaccacctgatc

SEQ ID NO: 45095 - DNA, 76 bp, Homo sapiens
agaccacctgatcctcacctgggccaagagggtcccaacttcagagagaccacctgatccacacctgagccaagag

SEQ ID NO: 45096 - DNA, 75 bp, Homo sapiens
cctgatcctcacctgggccaagagggtcccaacttcagagagaccacctgatccacacctgagccaagagggtcc

SEQ ID NO: 45097 - DNA, 76 bp, Homo sapiens
tgggccaagagggtcccaacttcagagagaccacctgatccacacctgagccaagagggtcccaacctcagagaga

SEQ ID NO: 45098 - DNA, 75 bp, Homo sapiens
agggtcccaacttcagagagaccacctgatccacacctgagccaagagggtcccaacctcagagagaccacctga

SEQ ID NO: 45099 - DNA, 79 bp, Homo sapiens
agaccacctgatccacacctgagccaagagggtcccaacctcagagagaccacctgatcctcacctgagccatgaggga

SEQ ID NO: 45100 - DNA, 79 bp, Homo sapiens
acacctgagccaagagggtcccaacctcagagagaccacctgatcctcacctgagccatgagggacctgatctcaagga

SEQ ID NO: 45101 - DNA, 80 bp, Homo sapiens
aagagggtcccaacctcagagagaccacctgatcctcacctgagccatgagggacctgatctcaaggagaccatctgatc

SEQ ID NO: 45102 - DNA, 82 bp, Homo sapiens
gtcccaacctcagagagaccacctgatcctcacctgagccatgagggacctgatctcaaggagaccatctgatcctcacctg

SEQ ID NO: 45103 - DNA, 81 bp, Homo sapiens
agagagaccacctgatcctcacctgagccatgagggacctgatctcaaggagaccatctgatcctcacctgggccaagagg

SEQ ID NO: 45104 - DNA, 80 bp, Homo sapiens
acctgatcctcacctgagccatgagggacctgatctcaaggagaccatctgatcctcacctgggccaagagggacctgac

SEQ ID NO: 45105 - DNA, 80 bp, Homo sapiens
atcctcacctgagccatgagggacctgatctcaaggagaccatctgatcctcacctgggccaagagggacctgacctcag

SEQ ID NO: 45106 - DNA, 78 bp, Homo sapiens
acctgagccatgagggacctgatctcaaggagaccatctgatcctcacctgggccaagagggacctgacctcagggag

SEQ ID NO: 45107 - DNA, 79 bp, Homo sapiens
catgagggacctgatctcaaggagaccatctgatcctcacctgggccaagagggacctgacctcagggagtccacctga

SEQ ID NO: 45108 - DNA, 78 bp, Homo sapiens
atgagggacctgatctcaaggagaccatctgatcctcacctgggccaagagggacctgacctcagggagtccacctga

SEQ ID NO: 45109 - DNA, 77 bp, Homo sapiens
gggacctgatctcaaggagaccatctgatcctcacctgggccaagagggacctgacctcagggagtccacctgatcc

SEQ ID NO: 45110 - DNA, 76 bp, Homo sapiens
aaggagaccatctgatcctcacctgggccaagagggacctgacctcagggagtccacctgatcctcacctgggcca

SEQ ID NO: 45111 - DNA, 76 bp, Homo sapiens
agaccatctgatcctcacctgggccaagagggacctgacctcagggagtccacctgatcctcacctgggccaagag

SEQ ID NO: 45112 - DNA, 74 bp, Homo sapiens
tcctcacctgggccaagagggacctgacctcagggagtccacctgatcctcacctgggccaagagggacctgac

SEQ ID NO: 45113 - DNA, 73 bp, Homo sapiens
ctcacctgggccaagagggacctgacctcagggagtccacctgatcctcacctgggccaagagggacctgacc

SEQ ID NO: 45114 - DNA, 73 bp, Homo sapiens
acctgatcctcacctgggccaagagggacctgacctcagggagtccacctgatcctcacctgggccaagaggg

SEQ ID NO: 45115 - DNA, 73 bp, Homo sapiens
ctcacctgggccaagagggacctgacctcagggagtccacctgatcctcacctgggccaagagggtcccaatc

SEQ ID NO: 45116 - DNA, 75 bp, Homo sapiens
cagggaggccacctgatcctcacctgggccaagagggacctgacctcggggagaccacctgatcctcacctgagc

SEQ ID NO: 45117 - DNA, 73 bp, Homo sapiens
acctgatcctcacctgggccaagagggacctgacctcggggagaccacctgatcctcacctgagccaagaggg

SEQ ID NO: 45118 - DNA, 76 bp, Homo sapiens
tcacctgagccaagagggtcccaatctcagggagaccccctgatccacacctgagccaagaaggtcccaatctcag

SEQ ID NO: 45119 - DNA, 74 bp, Homo sapiens
agccaagagggtcccaatctcagggagaccccctgatccacacctgagccaagaaggtcccaatctcagggaga

SEQ ID NO: 45120 - DNA, 77 bp, Homo sapiens
tcccaatctcagggagaccccctgatccacacctgagccaagaaggtcccaatctcagggagaccacctgatcctca

SEQ ID NO: 45121 - DNA, 77 bp, Homo sapiens
agggagaccacctgatcctcacctgagccaagagggacctgacctcaaggagaccacctgatccacacctgagccaa

SEQ ID NO: 45122 - DNA, 76 bp, Homo sapiens
acctgatcctcacctgagccaagagggacctgacctcaaggagaccacctgatccacacctgagccaagagggtcc

SEQ ID NO: 45123 - DNA, 75 bp, Homo sapiens
acctgagccaagagggacctgacctcaaggagaccacctgatccacacctgagccaagagggtcccaacctcaga

SEQ ID NO: 45124 - DNA, 73 bp, Homo sapiens
aagagggacctgacctcaaggagaccacctgatccacacctgagccaagagggtcccaacctcagagagtccc

SEQ ID NO: 45125 - DNA, 79 bp, Homo sapiens
acctcaaggagaccacctgatccacacctgagccaagagggtcccaacctcagagagtccctgctcatcatctgggcca

SEQ ID NO: 45126 - DNA, 78 bp, Homo sapiens
agaccacctgatccacacctgagccaagagggtcccaacctcagagagtccctgctcatcatctgggccaggagggcc

SEQ ID NO: 45127 - DNA, 82 bp, Homo sapiens
tccacacctgagccaagagggtcccaacctcagagagtccctgctcatcatctgggccaggagggccctcgatgcatcaatg

SEQ ID NO: 45128 - DNA, 81 bp, Homo sapiens
agccaagagggtcccaacctcagagagtccctgctcatcatctgggccaggagggccctcgatgcatcaatgtggtcacca

SEQ ID NO: 45129 - DNA, 78 bp, Homo sapiens
gtcccaacctcagagagtccctgctcatcatctgggccaggagggccctcgatgcatcaatgtggtcaccaaaacctt

SEQ ID NO: 45130 - DNA, 81 bp, Homo sapiens
tcagagagtccctgctcatcatctgggccaggagggccctcgatgcatcaatgtggtcaccaaaacctttcctcatagaaa

SEQ ID NO: 45131 - DNA, 78 bp, Homo sapiens
agagtccctgctcatcatctgggccaggagggccctcgatgcatcaatgtggtcaccaaaacctttcctcatagaaaa

SEQ ID NO: 45132 - DNA, 78 bp, Homo sapiens
ctgctcatcatctgggccaggagggccctcgatgcatcaatgtggtcaccaaaacctttcctcatagaaaacctgtaa

SEQ ID NO: 45133 - DNA, 74 bp, Homo sapiens
tctgggccaggagggccctcgatgcatcaatgtggtcaccaaaacctttcctcatagaaaacctgtaaagtcta

SEQ ID NO: 45134 - DNA, 76 bp, Homo sapiens
ccctcgatgcatcaatgtggtcaccaaaacctttcctcatagaaaacctgtaaagtctaatgctagatacactata

SEQ ID NO: 45135 - DNA, 77 bp, Homo sapiens
atgcatcaatgtggtcaccaaaacctttcctcatagaaaacctgtaaagtctaatgctagatacactatattcctga

SEQ ID NO: 45136 - DNA, 73 bp, Homo sapiens
aatgtggtcaccaaaacctttcctcatagaaaacctgtaaagtctaatgctagatacactatattcctgagct

SEQ ID NO: 45137 - DNA, 75 bp, Homo sapiens
tcaccaaaacctttcctcatagaaaacctgtaaagtctaatgctagatacactatattcctgagcttcagaagaa

SEQ ID NO: 45138 - DNA, 74 bp, Homo sapiens
aacctttcctcatagaaaacctgtaaagtctaatgctagatacactatattcctgagcttcagaagaatatcct

SEQ ID NO: 45139 - DNA, 77 bp, Homo sapiens
tctaatgctagatacactatattcctgagcttcagaagaatatccttcttcctgtgtgaaaacacctttcaggtatt

SEQ ID NO: 45140 - DNA, 72 bp, Homo sapiens
atacactatattcctgagcttcagaagaatatccttcttcctgtgtgaaaacacctttcaggtatttgggtt

SEQ ID NO: 45141 - DNA, 74 bp, Homo sapiens
tgagcttcagaagaatatccttcttcctgtgtgaaaacacctttcaggtatttgggtttgaactgagtcacaaa

SEQ ID NO: 45142 - DNA, 71 bp, Homo sapiens
ttcagaagaatatccttcttcctgtgtgaaaacacctttcaggtatttgggtttgaactgagtcacaaaaa

SEQ ID NO: 45143 - DNA, 70 bp, Homo sapiens
ttcttcctgtgtgaaaacacctttcaggtatttgggtttgaactgagtcacaaaaacatggtacaaattc

SEQ ID NO: 45144 - DNA, 68 bp, Homo sapiens
aacacctttcaggtatttgggtttgaactgagtcacaaaaacatggtacaaattcgggtcagctgggt

SEQ ID NO: 45145 - DNA, 72 bp, Homo sapiens
aggtatttgggtttgaactgagtcacaaaaacatggtacaaattcgggtcagctgggtttgggcagcagcta

SEQ ID NO: 45146 - DNA, 72 bp, Homo sapiens
agtcacaaaaacatggtacaaattcgggtcagctgggtttgggcagcagctagagagggtggaattggggag

SEQ ID NO: 45147 - DNA, 74 bp, Homo sapiens
acatggtacaaattcgggtcagctgggtttgggcagcagctagagagggtggaattggggaggggtcctcatga

SEQ ID NO: 45148 - DNA, 71 bp, Homo sapiens
aattcgggtcagctgggtttgggcagcagctagagagggtggaattggggaggggtcctcatgaggtaccc

SEQ ID NO: 45149 - DNA, 72 bp, Homo sapiens
agctgggtttgggcagcagctagagagggtggaattggggaggggtcctcatgaggtacccctgctggggaa

SEQ ID NO: 45150 - DNA, 71 bp, Homo sapiens
agcagctagagagggtggaattggggaggggtcctcatgaggtacccctgctggggaagggcctgtcttgg

SEQ ID NO: 45151 - DNA, 69 bp, Homo sapiens
tagagagggtggaattggggaggggtcctcatgaggtacccctgctggggaagggcctgtcttggtggg

SEQ ID NO: 45152 - DNA, 70 bp, Homo sapiens
aattggggaggggtcctcatgaggtacccctgctggggaagggcctgtcttggtggggtgctgcggccgc

SEQ ID NO: 45153 - DNA, 76 bp, Homo sapiens
tcctcatgaggtacccctgctggggaagggcctgtcttggtggggtgctgcggccgctgtgagtcactgggcggga

SEQ ID NO: 45154 - DNA, 74 bp, Homo sapiens
atgaggtacccctgctggggaagggcctgtcttggtggggtgctgcggccgctgtgagtcactgggcgggacta

SEQ ID NO: 45155 - DNA, 76 bp, Homo sapiens
tggggaagggcctgtcttggtggggtgctgcggccgctgtgagtcactgggcgggactacactgcaacaccgctcc

SEQ ID NO: 45156 - DNA, 78 bp, Homo sapiens
tggtggggtgctgcggccgctgtgagtcactgggcgggactacactgcaacaccgctcccccaggtgacctcgcctca

SEQ ID NO: 45157 - DNA, 80 bp, Homo sapiens
tgctgcggccgctgtgagtcactgggcgggactacactgcaacaccgctcccccaggtgacctcgcctcaggccacctgc

SEQ ID NO: 45158 - DNA, 76 bp, Homo sapiens
ctgtgagtcactgggcgggactacactgcaacaccgctcccccaggtgacctcgcctcaggccacctgccctgggc

SEQ ID NO: 45159 - DNA, 72 bp, Homo sapiens
actgggcgggactacactgcaacaccgctcccccaggtgacctcgcctcaggccacctgccctgggcccctc

SEQ ID NO: 45160 - DNA, 71 bp, Homo sapiens
acctgccctgggcccctcctccccgtggctccatcccctgcaacaccgctcccccaggcgacctcgcctca

SEQ ID NO: 45161 - DNA, 72 bp, Homo sapiens
ggcccctcctccccgtggctccatcccctgcaacaccgctcccccaggcgacctcgcctcaggccacctgcc

SEQ ID NO: 45162 - DNA, 72 bp, Homo sapiens
tcctccccgtggctccatcccctgcaacaccgctcccccaggcgacctcgcctcaggccacctgccccgggc

SEQ ID NO: 45163 - DNA, 72 bp, Homo sapiens
ggcccctcctccccgtggctccatcccctgcaacaccactcccccaggtgacctcgcctcaggccacctgcc

SEQ ID NO: 45164 - DNA, 72 bp, Homo sapiens
tcctccccgtggctccatcccctgcaacaccactcccccaggtgacctcgcctcaggccacctgccccgggc

SEQ ID NO: 45165 - DNA, 73 bp, Homo sapiens
ggcccctcctccccatggctccatcccctgcaacaccgctcccccaggcgacctcgcctcaggccacctgccc

SEQ ID NO: 45166 - DNA, 73 bp, Homo sapiens
tcctccccatggctccatcccctgcaacaccgctcccccaggcgacctcgcctcaggccacctgccccgggcc

SEQ ID NO: 45167 - DNA, 72 bp, Homo sapiens
acctgccccgggcccctcctccccatggctccatcccctgcaacaccactccctccaggcgacctcgcctca

SEQ ID NO: 45168 - DNA, 74 bp, Homo sapiens
ggcccctcctccccatggctccatcccctgcaacaccactccctccaggcgacctcgcctcaggccacctgccc

SEQ ID NO: 45169 - DNA, 74 bp, Homo sapiens
tcctccccatggctccatcccctgcaacaccactccctccaggcgacctcgcctcaggccacctgccccgggcc

SEQ ID NO: 45170 - DNA, 72 bp, Homo sapiens
ggctccatcccctgcaacaccactccctccaggcgacctcgcctcaggccacctgccccgggcccctcctcc

SEQ ID NO: 45171 - DNA, 73 bp, Homo sapiens; identical to SEQ ID NO: 45165

SEQ ID NO: 45172 - DNA, 74 bp, Homo sapiens
ctcctccccatggctccatcccctgcaacaccgctcccccaggcgacctcgcctcaggccacctgccctggggc

SEQ ID NO: 45173 - DNA, 73 bp, Homo sapiens
tggctccatcccctgcaacaccgctcccccaggcgacctcgcctcaggccacctgccctggggccctcctccc

SEQ ID NO: 45174 - DNA, 72 bp, Homo sapiens
tgcaacaccgctcccccaggcgacctcgcctcaggccacctgccctggggccctcctccccggggctccatc

SEQ ID NO: 45175 - DNA, 69 bp, Homo sapiens
ctcccccaggcgacctcgcctcaggccacctgccctggggccctcctccccggggctccatccctgaaa

SEQ ID NO: 45176 - DNA, 72 bp, Homo sapiens
aggcgacctcgcctcaggccacctgccctggggccctcctccccggggctccatccctgaaactgcttctgc

SEQ ID NO: 45177 - DNA, 71 bp, Homo sapiens
acctcgcctcaggccacctgccctggggccctcctccccggggctccatccctgaaactgcttctgcttcc

SEQ ID NO: 45178 - DNA, 71 bp, Homo sapiens
ctcgcctcaggccacctgccctggggccctcctccccggggctccatccctgaaactgcttctgcttcctt

SEQ ID NO: 45179 - DNA, 70 bp, Homo sapiens
aggccacctgccctggggccctcctccccggggctccatccctgaaactgcttctgcttcctttgctttc

SEQ ID NO: 45180 - DNA, 71 bp, Homo sapiens
acctgccctggggccctcctccccggggctccatccctgaaactgcttctgcttcctttgctttctgtagc

SEQ ID NO: 45181 - DNA, 71 bp, Homo sapiens
ccctggggccctcctccccggggctccatccctgaaactgcttctgcttcctttgctttctgtagctttgc

SEQ ID NO: 45182 - DNA, 74 bp, Homo sapiens
gggccctcctccccggggctccatccctgaaactgcttctgcttcctttgctttctgtagctttgctgagaaca

SEQ ID NO: 45183 - DNA, 75 bp, Homo sapiens
ctcctccccggggctccatccctgaaactgcttctgcttcctttgctttctgtagctttgctgagaacagcctcc

SEQ ID NO: 45184 - DNA, 77 bp, Homo sapiens
tccccggggctccatccctgaaactgcttctgcttcctttgctttctgtagctttgctgagaacagcctcctgctct

SEQ ID NO: 45185 - DNA, 82 bp, Homo sapiens
tccatccctgaaactgcttctgcttcctttgctttctgtagctttgctgagaacagcctcctgctcttggagatactgctcc

SEQ ID NO: 45186 - DNA, 79 bp, Homo sapiens
aaactgcttctgcttcctttgctttctgtagctttgctgagaacagcctcctgctcttggagatactgctcctttaaga

SEQ ID NO: 45187 - DNA, 77 bp, Homo sapiens
gcttcctttgctttctgtagctttgctgagaacagcctcctgctcttggagatactgctcctttaagaggttgggaa

SEQ ID NO: 45188 - DNA, 76 bp, Homo sapiens
tttgctttctgtagctttgctgagaacagcctcctgctcttggagatactgctcctttaagaggttgggaaaaatg

SEQ ID NO: 45189 - DNA, 77 bp, Homo sapiens
aacagcctcctgctcttggagatactgctcctttaagaggttgggaaaaatggagcgaggcattgctttgcaggatg

SEQ ID NO: 45190 - DNA, 75 bp, Homo sapiens
agatactgctcctttaagaggttgggaaaaatggagcgaggcattgctttgcaggatggaaatacaagtctacaa

SEQ ID NO: 45191 - DNA, 75 bp, Homo sapiens
aggttgggaaaaatggagcgaggcattgctttgcaggatggaaatacaagtctacaatgtttctgaagggcaaga

SEQ ID NO: 45192 - DNA, 70 bp, Homo sapiens
caggatggaaatacaagtctacaatgtttctgaagggcaagacgtgctttccacctttcttcccaacgtt

SEQ ID NO: 45193 - DNA, 68 bp, Homo sapiens
aaatacaagtctacaatgtttctgaagggcaagacgtgctttccacctttcttcccaacgtttccttc

SEQ ID NO: 45194 - DNA, 72 bp, Homo sapiens
tacaatgtttctgaagggcaagacgtgctttccacctttcttcccaacgtttccttctgcaagcccagtatg

SEQ ID NO: 45195 - DNA, 71 bp, Homo sapiens
tttctgaagggcaagacgtgctttccacctttcttcccaacgtttccttctgcaagcccagtatggtgagg

SEQ ID NO: 45196 - DNA, 71 bp, Homo sapiens
aagacgtgctttccacctttcttcccaacgtttccttctgcaagcccagtatggtgagggaggcccagcgc

SEQ ID NO: 45197 - DNA, 71 bp, Homo sapiens
tttccacctttcttcccaacgtttccttctgcaagcccagtatggtgagggaggcccagcgctgtgggcgg

SEQ ID NO: 45198 - DNA, 74 bp, Homo sapiens
ttcccaacgtttccttctgcaagcccagtatggtgagggaggcccagcgctgtgggcgggagcctggttgctta

SEQ ID NO: 45199 - DNA, 76 bp, Homo sapiens
tttccttctgcaagcccagtatggtgagggaggcccagcgctgtgggcgggagcctggttgcttacaggccctctc

SEQ ID NO: 45200 - DNA, 75 bp, Homo sapiens
aagcccagtatggtgagggaggcccagcgctgtgggcgggagcctggttgcttacaggccctctcgctccacgga

SEQ ID NO: 45201 - DNA, 74 bp, Homo sapiens
gggaggcccagcgctgtgggcgggagcctggttgcttacaggccctctcgctccacggatggggatgtggggtg

SEQ ID NO: 45202 - DNA, 72 bp, Homo sapiens
tgtgggcgggagcctggttgcttacaggccctctcgctccacggatggggatgtggggtgggcacgttttac

SEQ ID NO: 45203 - DNA, 73 bp, Homo sapiens
agcctggttgcttacaggccctctcgctccacggatggggatgtggggtgggcacgttttaccgctgcccaca

SEQ ID NO: 45204 - DNA, 75 bp, Homo sapiens
ttgcttacaggccctctcgctccacggatggggatgtggggtgggcacgttttaccgctgcccacagctgcccaa

SEQ ID NO: 45205 - DNA, 77 bp, Homo sapiens
ctctcgctccacggatggggatgtggggtgggcacgttttaccgctgcccacagctgcccaagtgcaggtctgacca

SEQ ID NO: 45206 - DNA, 74 bp, Homo sapiens
ggtgggcacgttttaccgctgcccacagctgcccaagtgcaggtctgaccaggacccctcaggttgcccatggg

SEQ ID NO: 45207 - DNA, 75 bp, Homo sapiens
ttttaccgctgcccacagctgcccaagtgcaggtctgaccaggacccctcaggttgcccatggggctggggtcca

SEQ ID NO: 45208 - DNA, 74 bp, Homo sapiens
acagctgcccaagtgcaggtctgaccaggacccctcaggttgcccatggggctggggtccaggtggtcaggacg

SEQ ID NO: 45209 - DNA, 74 bp, Homo sapiens
aagtgcaggtctgaccaggacccctcaggttgcccatggggctggggtccaggtggtcaggacgtctctggcaa

SEQ ID NO: 45210 - DNA, 74 bp, Homo sapiens
ccctcaggttgcccatggggctggggtccaggtggtcaggacgtctctggcaaggggcagctcccgtgaggtca

SEQ ID NO: 45211 - DNA, 77 bp, Homo sapiens
ctggggtccaggtggtcaggacgtctctggcaaggggcagctcccgtgaggtcacctggacccttggcatgcatggc

SEQ ID NO: 45212 - DNA, 79 bp, Homo sapiens
aggtggtcaggacgtctctggcaaggggcagctcccgtgaggtcacctggacccttggcatgcatggccgcactgacca

SEQ ID NO: 45213 - DNA, 81 bp, Homo sapiens
tcaggacgtctctggcaaggggcagctcccgtgaggtcacctggacccttggcatgcatggccgcactgaccagcaggccc

SEQ ID NO: 45214 - DNA, 81 bp, Homo sapiens
tctggcaaggggcagctcccgtgaggtcacctggacccttggcatgcatggccgcactgaccagcaggccctgggagccag

SEQ ID NO: 45215 - DNA, 79 bp, Homo sapiens
agctcccgtgaggtcacctggacccttggcatgcatggccgcactgaccagcaggccctgggagccagggctcagggac

SEQ ID NO: 45216 - DNA, 82 bp, Homo sapiens
tgaggtcacctggacccttggcatgcatggccgcactgaccagcaggccctgggagccagggctcagggaccgcagcgtcca

SEQ ID NO: 45217 - DNA, 79 bp, Homo sapiens
acccttggcatgcatggccgcactgaccagcaggccctgggagccagggctcagggaccgcagcgtccacgccgtccta

SEQ ID NO: 45218 - DNA, 78 bp, Homo sapiens
atgcatggccgcactgaccagcaggccctgggagccagggctcagggaccgcagcgtccacgccgtcctacagggaag

SEQ ID NO: 45219 - DNA, 73 bp, Homo sapiens
actgaccagcaggccctgggagccagggctcagggaccgcagcgtccacgccgtcctacagggaagggtgggc

SEQ ID NO: 45220 - DNA, 71 bp, Homo sapiens
agcaggccctgggagccagggctcagggaccgcagcgtccacgccgtcctacagggaagggtgggcgggcg

SEQ ID NO: 45221 - DNA, 72 bp, Homo sapiens
agccagggctcagggaccgcagcgtccacgccgtcctacagggaagggtgggcgggcggcgcctggcctggc

SEQ ID NO: 45222 - DNA, 70 bp, Homo sapiens
tacagggaagggtgggcgggcggcgcctggcctggccacggcccgggagacacgtacggcgggagctctg

SEQ ID NO: 45223 - DNA, 71 bp, Homo sapiens
ggcgggcggcgcctggcctggccacggcccgggagacacgtacggcgggagctctgggctgtggtgcgggt

SEQ ID NO: 45224 - DNA, 73 bp, Homo sapiens
gcctggcctggccacggcccgggagacacgtacggcgggagctctgggctgtggtgcgggttcagtggcggcc

SEQ ID NO: 45225 - DNA, 72 bp, Homo sapiens
cctggccacggcccgggagacacgtacggcgggagctctgggctgtggtgcgggttcagtggcggcctcctc

SEQ ID NO: 45226 - DNA, 70 bp, Homo sapiens
cccgggagacacgtacggcgggagctctgggctgtggtgcgggttcagtggcggcctcctcccctggtgg

SEQ ID NO: 45227 - DNA, 73 bp, Homo sapiens
gtacggcgggagctctgggctgtggtgcgggttcagtggcggcctcctcccctggtggggcaccctgcgtgta

SEQ ID NO: 45228 - DNA, 76 bp, Homo sapiens
agctctgggctgtggtgcgggttcagtggcggcctcctcccctggtggggcaccctgcgtgtagcgtcaagcagcc

SEQ ID NO: 45229 - DNA, 75 bp, Homo sapiens
ctgtggtgcgggttcagtggcggcctcctcccctggtggggcaccctgcgtgtagcgtcaagcagccctggcttc

SEQ ID NO: 45230 - DNA, 73 bp, Homo sapiens
cgggttcagtggcggcctcctcccctggtggggcaccctgcgtgtagcgtcaagcagccctggcttctgttcc

SEQ ID NO: 45231 - DNA, 76 bp, Homo sapiens
gcctcctcccctggtggggcaccctgcgtgtagcgtcaagcagccctggcttctgttccccactctgctcgggata

SEQ ID NO: 45232 - DNA, 77 bp, Homo sapiens
ccctggtggggcaccctgcgtgtagcgtcaagcagccctggcttctgttccccactctgctcgggataaacagcatg

SEQ ID NO: 45233 - DNA, 80 bp, Homo sapiens
accctgcgtgtagcgtcaagcagccctggcttctgttccccactctgctcgggataaacagcatggcctccagacacagc

SEQ ID NO: 45234 - DNA, 80 bp, Homo sapiens
tgtagcgtcaagcagccctggcttctgttccccactctgctcgggataaacagcatggcctccagacacagcccagggtc

SEQ ID NO: 45235 - DNA, 78 bp, Homo sapiens
tcaagcagccctggcttctgttccccactctgctcgggataaacagcatggcctccagacacagcccagggtcccctg

SEQ ID NO: 45236 - DNA, 76 bp, Homo sapiens
ttctgttccccactctgctcgggataaacagcatggcctccagacacagcccagggtcccctggggctgagaacca

SEQ ID NO: 45237 - DNA, 75 bp, Homo sapiens
tgctcgggataaacagcatggcctccagacacagcccagggtcccctggggctgagaaccacgggttctacctga

SEQ ID NO: 45238 - DNA, 72 bp, Homo sapiens
tccagacacagcccagggtcccctggggctgagaaccacgggttctacctgagccagggtgaccaaactcag

SEQ ID NO: 45239 - DNA, 69 bp, Homo sapiens
ccagggtcccctggggctgagaaccacgggttctacctgagccagggtgaccaaactcagggagaccaa

SEQ ID NO: 45240 - DNA, 73 bp, Homo sapiens
ctggggctgagaaccacgggttctacctgagccagggtgaccaaactcagggagaccaaactgacaggttgca

SEQ ID NO: 45241 - DNA, 73 bp, Homo sapiens
ctgagaaccacgggttctacctgagccagggtgaccaaactcagggagaccaaactgacaggttgcactcaag

SEQ ID NO: 45242 - DNA, 73 bp, Homo sapiens
ggttctacctgagccagggtgaccaaactcagggagaccaaactgacaggttgcactcaaggcccctttctga

SEQ ID NO: 45243 - DNA, 74 bp, Homo sapiens
ctgagccagggtgaccaaactcagggagaccaaactgacaggttgcactcaaggcccctttctgagggagccag

SEQ ID NO: 45244 - DNA, 73 bp, Homo sapiens
accaaactcagggagaccaaactgacaggttgcactcaaggcccctttctgagggagccaggctgaaacgtga

SEQ ID NO: 45245 - DNA, 76 bp, Homo sapiens
agggagaccaaactgacaggttgcactcaaggcccctttctgagggagccaggctgaaacgtgatgaaatagcaga

SEQ ID NO: 45246 - DNA, 77 bp, Homo sapiens
aaactgacaggttgcactcaaggcccctttctgagggagccaggctgaaacgtgatgaaatagcagagaggcctaga

SEQ ID NO: 45247 - DNA, 78 bp, Homo sapiens
aggttgcactcaaggcccctttctgagggagccaggctgaaacgtgatgaaatagcagagaggcctagagcaccacag

SEQ ID NO: 45248 - DNA, 77 bp, Homo sapiens
aaggcccctttctgagggagccaggctgaaacgtgatgaaatagcagagaggcctagagcaccacagtgagccccca

SEQ ID NO: 45249 - DNA, 82 bp, Homo sapiens
ttctgagggagccaggctgaaacgtgatgaaatagcagagaggcctagagcaccacagtgagcccccagagcatgaactaaa

SEQ ID NO: 45250 - DNA, 78 bp, Homo sapiens
aggctgaaacgtgatgaaatagcagagaggcctagagcaccacagtgagcccccagagcatgaactaaacggggcagg

SEQ ID NO: 45251 - DNA, 76 bp, Homo sapiens
aacgtgatgaaatagcagagaggcctagagcaccacagtgagcccccagagcatgaactaaacggggcaggggtcc

SEQ ID NO: 45252 - DNA, 73 bp, Homo sapiens
aatagcagagaggcctagagcaccacagtgagcccccagagcatgaactaaacggggcaggggtccccgtccc

SEQ ID NO: 45253 - DNA, 78 bp, Homo sapiens
ggagcatgaactaaacggggcaggggtccccgtcctgccggcacgcagcagatgcaggccccagagctcatctcctaa

SEQ ID NO: 45254 - DNA, 75 bp, Homo sapiens
atgaactaaacggggcaggggtccccgtcctgccggcacgcagcagatgcaggccccagagctcatctcctaacg

SEQ ID NO: 45255 - DNA, 81 bp, Homo sapiens
caggggtccccgtcctgccggcacgcagcagatgcaggccccagagctcatctcctaacggttgcataagcgagtgacagc

SEQ ID NO: 45256 - DNA, 86 bp, Homo sapiens
cccgtcctgccggcacgcagcagatgcaggccccagagctcatctcctaacggttgcataagcgagtgacagctgagtctggctca

SEQ ID NO: 45257 - DNA, 85 bp, Homo sapiens
ccggcacgcagcagatgcaggccccagagctcatctcctaacggttgcataagcgagtgacagctgagtctggctcagggagaac

SEQ ID NO: 45258 - DNA, 81 bp, Homo sapiens
agatgcaggccccagagctcatctcctaacggttgcataagcgagtgacagctgagtctggctcagggagaaccccgtgag

SEQ ID NO: 45259 - DNA, 79 bp, Homo sapiens
ccagagctcatctcctaacggttgcataagcgagtgacagctgagtctggctcagggagaaccccgtgaggcctggaag

SEQ ID NO: 45260 - DNA, 76 bp, Homo sapiens
ctcatctcctaacggttgcataagcgagtgacagctgagtctggctcagggagaaccccgtgaggcctggaagggg

SEQ ID NO: 45261 - DNA, 78 bp, Homo sapiens
taacggttgcataagcgagtgacagctgagtctggctcagggagaaccccgtgaggcctggaaggggtggctgccgca

SEQ ID NO: 45262 - DNA, 79 bp, Homo sapiens
ataagcgagtgacagctgagtctggctcagggagaaccccgtgaggcctggaaggggtggctgccgcacactcactgtc

SEQ ID NO: 45263 - DNA, 80 bp, Homo sapiens
ctgagtctggctcagggagaaccccgtgaggcctggaaggggtggctgccgcacactcactgtctgccacatgccatggt

SEQ ID NO: 45264 - DNA, 82 bp, Homo sapiens
tctggctcagggagaaccccgtgaggcctggaaggggtggctgccgcacactcactgtctgccacatgccatggttgatgac

SEQ ID NO: 45265 - DNA, 78 bp, Homo sapiens
ggagaaccccgtgaggcctggaaggggtggctgccgcacactcactgtctgccacatgccatggttgatgaccgggcc

SEQ ID NO: 45266 - DNA, 83 bp, Homo sapiens
ggtggctgccgcacactcactgtctgccacatgccatggttgatgaccgggccgctgctggtgacacggccgacaccgttgta

SEQ ID NO: 45267 - DNA, 86 bp, Homo sapiens
ccgcacactcactgtctgccacatgccatggttgatgaccgggccgctgctggtgacacggccgacaccgttgtagcgcagctgca

SEQ ID NO: 45268 - DNA, 87 bp, Homo sapiens
ctcactgtctgccacatgccatggttgatgaccgggccgctgctggtgacacggccgacaccgttgtagcgcagctgcagctccagc

SEQ ID NO: 45269 - DNA, 82 bp, Homo sapiens
atgccatggttgatgaccgggccgctgctggtgacacggccgacaccgttgtagcgcagctgcagctccagccggccggctc

SEQ ID NO: 45270 - DNA, 81 bp, Homo sapiens
atggttgatgaccgggccgctgctggtgacacggccgacaccgttgtagcgcagctgcagctccagccggccggctctcag

SEQ ID NO: 45271 - DNA, 83 bp, Homo sapiens
gccgctgctggtgacacggccgacaccgttgtagcgcagctgcagctccagccggccggctctcagggccagcacgatccagg

SEQ ID NO: 45272 - DNA, 85 bp, Homo sapiens
tgctggtgacacggccgacaccgttgtagcgcagctgcagctccagccggccggctctcagggccagcacgatccaggtgctgtc

SEQ ID NO: 45273 - DNA, 81 bp, Homo sapiens
acggccgacaccgttgtagcgcagctgcagctccagccggccggctctcagggccagcacgatccaggtgctgtcctggtg

SEQ ID NO: 45274 - DNA, 81 bp, Homo sapiens
tgcagctccagccggccggctctcagggccagcacgatccaggtgctgtcctggtggcctccggcaaagaggaggatgccc

SEQ ID NO: 45275 - DNA, 78 bp, Homo sapiens
ctccagccggccggctctcagggccagcacgatccaggtgctgtcctggtggcctccggcaaagaggaggatgccctc

SEQ ID NO: 45276 - DNA, 76 bp, Homo sapiens
tctcagggccagcacgatccaggtgctgtcctggtggcctccggcaaagaggaggatgccctcggggtcaaaggtc

SEQ ID NO: 45277 - DNA, 72 bp, Homo sapiens
agcacgatccaggtgctgtcctggtggcctccggcaaagaggaggatgccctcggggtcaaaggtccggaag

SEQ ID NO: 45278 - DNA, 71 bp, Homo sapiens
aggtgctgtcctggtggcctccggcaaagaggaggatgccctcggggtcaaaggtccggaagtcaaactca

SEQ ID NO: 45279 - DNA, 72 bp, Homo sapiens
tgtcctggtggcctccggcaaagaggaggatgccctcggggtcaaaggtccggaagtcaaactcagctacca

SEQ ID NO: 45280 - DNA, 71 bp, Homo sapiens
cctccggcaaagaggaggatgccctcggggtcaaaggtccggaagtcaaactcagctaccagcctgggcac

SEQ ID NO: 45281 - DNA, 71 bp, Homo sapiens
aaagaggaggatgccctcggggtcaaaggtccggaagtcaaactcagctaccagcctgggcacccacagga

SEQ ID NO: 45282 - DNA, 75 bp, Homo sapiens
atgccctcggggtcaaaggtccggaagtcaaactcagctaccagcctgggcacccacaggagaaatgagtcagca

SEQ ID NO: 45283 - DNA, 79 bp, Homo sapiens
gtcaaaggtccggaagtcaaactcagctaccagcctgggcacccacaggagaaatgagtcagcactgggcacaggcaga

SEQ ID NO: 45284 - DNA, 79 bp, Homo sapiens
ccggaagtcaaactcagctaccagcctgggcacccacaggagaaatgagtcagcactgggcacaggcagatgcccggcc

SEQ ID NO: 45285 - DNA, 80 bp, Homo sapiens
aactcagctaccagcctgggcacccacaggagaaatgagtcagcactgggcacaggcagatgcccggcccctccctgctg

SEQ ID NO: 45286 - DNA, 77 bp, Homo sapiens
cctgggcacccacaggagaaatgagtcagcactgggcacaggcagatgcccggcccctccctgctggccgaaccctg

SEQ ID NO: 45287 - DNA, 75 bp, Homo sapiens
aaatgagtcagcactgggcacaggcagatgcccggcccctccctgctggccgaaccctggcccgggccctgtgaa

SEQ ID NO: 45288 - DNA, 73 bp, Homo sapiens
actgggcacaggcagatgcccggcccctccctgctggccgaaccctggcccgggccctgtgaagccagtgtct

SEQ ID NO: 45289 - DNA, 74 bp, Homo sapiens
gcagatgcccggcccctccctgctggccgaaccctggcccgggccctgtgaagccagtgtcttggccattctaa

SEQ ID NO: 45290 - DNA, 76 bp, Homo sapiens
tgctggccgaaccctggcccgggccctgtgaagccagtgtcttggccattctaagttgtgttgcctcctgtggaca

SEQ ID NO: 45291 - DNA, 72 bp, Homo sapiens
aaccctggcccgggccctgtgaagccagtgtcttggccattctaagttgtgttgcctcctgtggacacctcc

SEQ ID NO: 45292 - DNA, 74 bp, Homo sapiens
cccgggccctgtgaagccagtgtcttggccattctaagttgtgttgcctcctgtggacacctcctcacctggtg

SEQ ID NO: 45293 - DNA, 78 bp, Homo sapiens
aagccagtgtcttggccattctaagttgtgttgcctcctgtggacacctcctcacctggtgggctgcagcctcttgaa

SEQ ID NO: 45294 - DNA, 79 bp, Homo sapiens
agtgtcttggccattctaagttgtgttgcctcctgtggacacctcctcacctggtgggctgcagcctcttgaagcgcag

SEQ ID NO: 45295 - DNA, 78 bp, Homo sapiens
attctaagttgtgttgcctcctgtggacacctcctcacctggtgggctgcagcctcttgaagcgcagtcggatcacgg

SEQ ID NO: 45296 - DNA, 78 bp, Homo sapiens
ttgcctcctgtggacacctcctcacctggtgggctgcagcctcttgaagcgcagtcggatcacgggggtcccactgaa

SEQ ID NO: 45297 - DNA, 78 bp, Homo sapiens
tcctgtggacacctcctcacctggtgggctgcagcctcttgaagcgcagtcggatcacgggggtcccactgaacatcc

SEQ ID NO: 45298 - DNA, 76 bp, Homo sapiens
ctcacctggtgggctgcagcctcttgaagcgcagtcggatcacgggggtcccactgaacatccggcccaggtacaa

SEQ ID NO: 45299 - DNA, 77 bp, Homo sapiens
tgggctgcagcctcttgaagcgcagtcggatcacgggggtcccactgaacatccggcccaggtacaaggacttcaca

SEQ ID NO: 45300 - DNA, 73 bp, Homo sapiens
agcctcttgaagcgcagtcggatcacgggggtcccactgaacatccggcccaggtacaaggacttcacactct

SEQ ID NO: 45301 - DNA, 74 bp, Homo sapiens
cgcagtcggatcacgggggtcccactgaacatccggcccaggtacaaggacttcacactcttggccacgctgaa

SEQ ID NO: 45302 - DNA, 77 bp, Homo sapiens
tcccactgaacatccggcccaggtacaaggacttcacactcttggccacgctgaagggcacgcacggcaagatgtcc

SEQ ID NO: 45303 - DNA, 76 bp, Homo sapiens
aacatccggcccaggtacaaggacttcacactcttggccacgctgaagggcacgcacggcaagatgtcctgccacg

SEQ ID NO: 45304 - DNA, 74 bp, Homo sapiens
cccaggtacaaggacttcacactcttggccacgctgaagggcacgcacggcaagatgtcctgccacggacgggg

SEQ ID NO: 45305 - DNA, 73 bp, Homo sapiens
actcttggccacgctgaagggcacgcacggcaagatgtcctgccacggacgggggccacgccggtcggggatg

SEQ ID NO: 45306 - DNA, 73 bp, Homo sapiens
acgctgaagggcacgcacggcaagatgtcctgccacggacgggggccacgccggtcggggatgtggccttcac

SEQ ID NO: 45307 - DNA, 72 bp, Homo sapiens
aagatgtcctgccacggacgggggccacgccggtcggggatgtggccttcactcctgctcccctgagcccca

SEQ ID NO: 45308 - DNA, 70 bp, Homo sapiens
tgccacggacgggggccacgccggtcggggatgtggccttcactcctgctcccctgagccccacgccccg

SEQ ID NO: 45309 - DNA, 72 bp, Homo sapiens
ccacgccggtcggggatgtggccttcactcctgctcccctgagccccacgccccggccgcgcagcgggtcca

SEQ ID NO: 45310 - DNA, 73 bp, Homo sapiens
gtcggggatgtggccttcactcctgctcccctgagccccacgccccggccgcgcagcgggtccactgtccctc

SEQ ID NO: 45311 - DNA, 75 bp, Homo sapiens
atgtggccttcactcctgctcccctgagccccacgccccggccgcgcagcgggtccactgtccctcctgtgcctc

SEQ ID NO: 45312 - DNA, 73 bp, Homo sapiens
ctgctcccctgagccccacgccccggccgcgcagcgggtccactgtccctcctgtgcctcgggagtggccacc

SEQ ID NO: 45313 - DNA, 73 bp, Homo sapiens
tgagccccacgccccggccgcgcagcgggtccactgtccctcctgtgcctcgggagtggccaccccgcctcta

SEQ ID NO: 45314 - DNA, 75 bp, Homo sapiens
acgccccggccgcgcagcgggtccactgtccctcctgtgcctcgggagtggccaccccgcctctagctgctgaga

SEQ ID NO: 45315 - DNA, 79 bp, Homo sapiens
gcagcgggtccactgtccctcctgtgcctcgggagtggccaccccgcctctagctgctgagaccccagaggctgtcaca

SEQ ID NO: 45316 - DNA, 78 bp, Homo sapiens
ggtccactgtccctcctgtgcctcgggagtggccaccccgcctctagctgctgagaccccagaggctgtcacacctgc

SEQ ID NO: 45317 - DNA, 78 bp, Homo sapiens
tcctgtgcctcgggagtggccaccccgcctctagctgctgagaccccagaggctgtcacacctgccccactgggactc

SEQ ID NO: 45318 - DNA, 76 bp, Homo sapiens
gggagtggccaccccgcctctagctgctgagaccccagaggctgtcacacctgccccactgggactcccaggtgaa

SEQ ID NO: 45319 - DNA, 74 bp, Homo sapiens
ccaccccgcctctagctgctgagaccccagaggctgtcacacctgccccactgggactcccaggtgaagggcgg

SEQ ID NO: 45320 - DNA, 80 bp, Homo sapiens
tctagctgctgagaccccagaggctgtcacacctgccccactgggactcccaggtgaagggcgggcttgcagcagccgct

SEQ ID NO: 45321 - DNA, 76 bp, Homo sapiens
agaccccagaggctgtcacacctgccccactgggactcccaggtgaagggcgggcttgcagcagccgcttcccaca

SEQ ID NO: 45322 - DNA, 72 bp, Homo sapiens
acacctgccccactgggactcccaggtgaagggcgggcttgcagcagccgcttcccacagggcttctcgggg

SEQ ID NO: 45323 - DNA, 73 bp, Homo sapiens
tgggactcccaggtgaagggcgggcttgcagcagccgcttcccacagggcttctcgggggtccccgtcatctc

SEQ ID NO: 45324 - DNA, 72 bp, Homo sapiens
tcccaggtgaagggcgggcttgcagcagccgcttcccacagggcttctcgggggtccccgtcatctccttcc

SEQ ID NO: 45325 - DNA, 69 bp, Homo sapiens
cagccgcttcccacagggcttctcgggggtccccgtcatctccttccctgctcatttcccttgaccctt

SEQ ID NO: 45326 - DNA, 67 bp, Homo sapiens
ccacagggcttctcgggggtccccgtcatctccttccctgctcatttcccttgaccctttattttta

SEQ ID NO: 45327 - DNA, 65 bp, Homo sapiens
gggcttctcgggggtccccgtcatctccttccctgctcatttcccttgaccctttatttttaaat

SEQ ID NO: 45328 - DNA, 72 bp, Homo sapiens
atttttaaattatgaaatatttcaagcatacaaaaattacagagaatcattaaaaagtatacactattatga

SEQ ID NO: 45329 - DNA, 78 bp, Homo sapiens
tatgaaatatttcaagcatacaaaaattacagagaatcattaaaaagtatacactattatgaaatagatatggatgcc

SEQ ID NO: 45330 - DNA, 79 bp, Homo sapiens
ttcaagcatacaaaaattacagagaatcattaaaaagtatacactattatgaaatagatatggatgccttgaagatggc

SEQ ID NO: 45331 - DNA, 78 bp, Homo sapiens
caaaaattacagagaatcattaaaaagtatacactattatgaaatagatatggatgccttgaagatggctgtcctgga

SEQ ID NO: 45332 - DNA, 78 bp, Homo sapiens
ttacagagaatcattaaaaagtatacactattatgaaatagatatggatgccttgaagatggctgtcctggaaagttc

SEQ ID NO: 45333 - DNA, 75 bp, Homo sapiens
attaaaaagtatacactattatgaaatagatatggatgccttgaagatggctgtcctggaaagttccctgttctg

SEQ ID NO: 45334 - DNA, 77 bp, Homo sapiens
gtatacactattatgaaatagatatggatgccttgaagatggctgtcctggaaagttccctgttctgggctgtggtt

SEQ ID NO: 45335 - DNA, 77 bp, Homo sapiens
attatgaaatagatatggatgccttgaagatggctgtcctggaaagttccctgttctgggctgtggtttctccacgc

SEQ ID NO: 45336 - DNA, 76 bp, Homo sapiens
agatatggatgccttgaagatggctgtcctggaaagttccctgttctgggctgtggtttctccacgctgcccgaag

SEQ ID NO: 45337 - DNA, 73 bp, Homo sapiens
ttgaagatggctgtcctggaaagttccctgttctgggctgtggtttctccacgctgcccgaagggggacagaa

SEQ ID NO: 45338 - DNA, 71 bp, Homo sapiens
tggctgtcctggaaagttccctgttctgggctgtggtttctccacgctgcccgaagggggacagaaccaaa

SEQ ID NO: 45339 - DNA, 69 bp, Homo sapiens
aaagttccctgttctgggctgtggtttctccacgctgcccgaagggggacagaaccaaagccggtgtga

SEQ ID NO: 45340 - DNA, 72 bp, Homo sapiens
tccacgctgcccgaagggggacagaaccaaagccggtgtgagctgacacccctggaagatggaggggctggg

SEQ ID NO: 45341 - DNA, 72 bp, Homo sapiens
ccgaagggggacagaaccaaagccggtgtgagctgacacccctggaagatggaggggctggggctgagccag

SEQ ID NO: 45342 - DNA, 76 bp, Homo sapiens
acagaaccaaagccggtgtgagctgacacccctggaagatggaggggctggggctgagccaggcctgccctgccca

SEQ ID NO: 45343 - DNA, 77 bp, Homo sapiens
agccggtgtgagctgacacccctggaagatggaggggctggggctgagccaggcctgccctgcccaccgtgggcagc

SEQ ID NO: 45344 - DNA, 78 bp, Homo sapiens
tgacacccctggaagatggaggggctggggctgagccaggcctgccctgcccaccgtgggcagccagggtgagctgga

SEQ ID NO: 45345 - DNA, 78 bp, Homo sapiens
aagatggaggggctggggctgagccaggcctgccctgcccaccgtgggcagccagggtgagctggacatctcgcaggg

SEQ ID NO: 45346 - DNA, 78 bp, Homo sapiens
ggctggggctgagccaggcctgccctgcccaccgtgggcagccagggtgagctggacatctcgcaggggtccgacacc

SEQ ID NO: 45347 - DNA, 82 bp, Homo sapiens
tgagccaggcctgccctgcccaccgtgggcagccagggtgagctggacatctcgcaggggtccgacaccctctgcatgagta

SEQ ID NO: 45348 - DNA, 84 bp, Homo sapiens
tgccctgcccaccgtgggcagccagggtgagctggacatctcgcaggggtccgacaccctctgcatgagtacatgaggcagcga

SEQ ID NO: 45349 - DNA, 82 bp, Homo sapiens
accgtgggcagccagggtgagctggacatctcgcaggggtccgacaccctctgcatgagtacatgaggcagcgaggcaaaga

SEQ ID NO: 45350 - DNA, 81 bp, Homo sapiens
agccagggtgagctggacatctcgcaggggtccgacaccctctgcatgagtacatgaggcagcgaggcaaagaacctcaag

SEQ ID NO: 45351 - DNA, 81 bp, Homo sapiens
agctggacatctcgcaggggtccgacaccctctgcatgagtacatgaggcagcgaggcaaagaacctcaaggcgagggctg

SEQ ID NO: 45352 - DNA, 80 bp, Homo sapiens
atctcgcaggggtccgacaccctctgcatgagtacatgaggcagcgaggcaaagaacctcaaggcgagggctggctggaa

SEQ ID NO: 45353 - DNA, 82 bp, Homo sapiens
ctctgcatgagtacatgaggcagcgaggcaaagaacctcaaggcgagggctggctggaagccctgaacgtcgcagcccagac

SEQ ID NO: 45354 - DNA, 77 bp, Homo sapiens
agtacatgaggcagcgaggcaaagaacctcaaggcgagggctggctggaagccctgaacgtcgcagcccagacccaa

SEQ ID NO: 45355 - DNA, 75 bp, Homo sapiens
aaagaacctcaaggcgagggctggctggaagccctgaacgtcgcagcccagacccaagagccccacggctgcatc

SEQ ID NO: 45356 - DNA, 79 bp, Homo sapiens
tcaaggcgagggctggctggaagccctgaacgtcgcagcccagacccaagagccccacggctgcatcccaggtctgcga

SEQ ID NO: 45357 - DNA, 79 bp, Homo sapiens
gctggaagccctgaacgtcgcagcccagacccaagagccccacggctgcatcccaggtctgcgactccgagaagctgtc

SEQ ID NO: 45358 - DNA, 77 bp, Homo sapiens
aagccctgaacgtcgcagcccagacccaagagccccacggctgcatcccaggtctgcgactccgagaagctgtcctg

SEQ ID NO: 45359 - DNA, 79 bp, Homo sapiens
gtcgcagcccagacccaagagccccacggctgcatcccaggtctgcgactccgagaagctgtcctggtgactctttcca

SEQ ID NO: 45360 - DNA, 77 bp, Homo sapiens
tgcgactccgagaagctgtcctggtgactctttccacctgtggttttgctttttaaataaatgctcactctcatcaa

SEQ ID NO: 45361 - DNA, 74 bp, Homo sapiens
tccgagaagctgtcctggtgactctttccacctgtggttttgctttttaaataaatgctcactctcatcaaccc

SEQ ID NO: 45362 - DNA, 74 bp, Homo sapiens
tgtcctggtgactctttccacctgtggttttgctttttaaataaatgctcactctcatcaacccccaggcacag

SEQ ID NO: 45363 - DNA, 74 bp, Homo sapiens
tctttccacctgtggttttgctttttaaataaatgctcactctcatcaacccccaggcacaggcccaggctgaa

SEQ ID NO: 45364 - DNA, 74 bp, Homo sapiens
tggttttgctttttaaataaatgctcactctcatcaacccccaggcacaggcccaggctgaagaggaaagacaa

SEQ ID NO: 45365 - DNA, 74 bp, Homo sapiens
tttttaaataaatgctcactctcatcaacccccaggcacaggcccaggctgaagaggaaagacaagagccgccc

SEQ ID NO: 45366 - DNA, 77 bp, Homo sapiens
ataaatgctcactctcatcaacccccaggcacaggcccaggctgaagaggaaagacaagagccgccctgcccagaaa

SEQ ID NO: 45367 - DNA, 77 bp, Homo sapiens
tctcatcaacccccaggcacaggcccaggctgaagaggaaagacaagagccgccctgcccagaaacgtccacatgtg

SEQ ID NO: 45368 - DNA, 77 bp, Homo sapiens
caggcacaggcccaggctgaagaggaaagacaagagccgccctgcccagaaacgtccacatgtgggtactgcattcc

SEQ ID NO: 45369 - DNA, 73 bp, Homo sapiens
cccaggctgaagaggaaagacaagagccgccctgcccagaaacgtccacatgtgggtactgcattcctaccgg

SEQ ID NO: 45370 - DNA, 75 bp, Homo sapiens
agaggaaagacaagagccgccctgcccagaaacgtccacatgtgggtactgcattcctaccggtgtgacaggtca

SEQ ID NO: 45371 - DNA, 76 bp, Homo sapiens
aaagacaagagccgccctgcccagaaacgtccacatgtgggtactgcattcctaccggtgtgacaggtcagtgtga

SEQ ID NO: 45372 - DNA, 77 bp, Homo sapiens
ccctgcccagaaacgtccacatgtgggtactgcattcctaccggtgtgacaggtcagtgtgacaggtcggtgtgaca

SEQ ID NO: 45373 - DNA, 78 bp, Homo sapiens
acatgtgggtactgcattcctaccggtgtgacaggtcagtgtgacaggtcggtgtgacaggcaccggtgtgacaggtc

SEQ ID NO: 45374 - DNA, 81 bp, Homo sapiens
gtgacaggtcggtgtgacaggcaccagtgtgacaggcaccagtgtgacaggtcggtgtgacagacaccggtgacaagtcag

SEQ ID NO: 45375 - DNA, 81 bp, Homo sapiens
aggtcggtgtgacaggcaccagtgtgacaggcaccagtgtgacaggtcggtgtgacagacaccggtgacaagtcagtgtga

SEQ ID NO: 45376 - DNA, 83 bp, Homo sapiens
ggtgtgacaggcaccagtgtgacaggcaccagtgtgacaggtcggtgtgacagacaccggtgacaagtcagtgtgacaggcag

SEQ ID NO: 45377 - DNA, 83 bp, Homo sapiens
aggcaccagtgtgacaggcaccagtgtgacaggtcggtgtgacagacaccggtgacaagtcagtgtgacaggcagtggtgtga

SEQ ID NO: 45378 - DNA, 82 bp, Homo sapiens
accagtgtgacaggcaccagtgtgacaggtcggtgtgacagacaccggtgacaagtcagtgtgacaggcagtggtgtgacag

SEQ ID NO: 45379 - DNA, 80 bp, Homo sapiens
aggcaccagtgtgacaggtcggtgtgacagacaccggtgacaagtcagtgtgacaggcagtggtgtgacaggcaccggtg

SEQ ID NO: 45380 - DNA, 81 bp, Homo sapiens
accagtgtgacaggtcggtgtgacagacaccggtgacaagtcagtgtgacaggcagtggtgtgacaggcaccggtgtgaca

SEQ ID NO: 45381 - DNA, 80 bp, Homo sapiens
agtgtgacaggtcggtgtgacagacaccggtgacaagtcagtgtgacaggcagtggtgtgacaggcaccggtgtgacagg

SEQ ID NO: 45382 - DNA, 78 bp, Homo sapiens
acaggtcggtgtgacagacaccggtgacaagtcagtgtgacaggcagtggtgtgacaggcaccggtgtgacaggtcgg

SEQ ID NO: 45383 - DNA, 81 bp, Homo sapiens
gtcggtgtgacagacaccggtgacaagtcagtgtgacaggcagtggtgtgacaggcaccggtgtgacaggtcggtgtgaca

SEQ ID NO: 45384 - DNA, 81 bp, Homo sapiens
gtgtgacaggcagtggtgtgacaggcaccggtgtgacaggtcggtgtgacaggtactgttgtgacaggtcggtgtgagaca

SEQ ID NO: 45385 - DNA, 80 bp, Homo sapiens
cagtggtgtgacaggcaccggtgtgacaggtcggtgtgacaggtactgttgtgacaggtcggtgtgagacactggtgtga

SEQ ID NO: 45386 - DNA, 78 bp, Homo sapiens
acaggcaccggtgtgacaggtcggtgtgacaggtactgttgtgacaggtcggtgtgagacactggtgtgacaagtcag

SEQ ID NO: 45387 - DNA, 79 bp, Homo sapiens
accggtgtgacaggtcggtgtgacaggtactgttgtgacaggtcggtgtgagacactggtgtgacaagtcagtgtgaca

SEQ ID NO: 45388 - DNA, 80 bp, Homo sapiens
acaggtcggtgtgacaggtactgttgtgacaggtcggtgtgagacactggtgtgacaagtcagtgtgacaggcagtggtg

SEQ ID NO: 45389 - DNA, 80 bp, Homo sapiens
acaggtactgttgtgacaggtcggtgtgagacactggtgtgacaagtcagtgtgacaggcagtggtgtgacaggcaccgg

SEQ ID NO: 45390 - DNA, 82 bp, Homo sapiens
ctgttgtgacaggtcggtgtgagacactggtgtgacaagtcagtgtgacaggcagtggtgtgacaggcaccggtgtgacagg

SEQ ID NO: 45391 - DNA, 84 bp, Homo sapiens
tcggtgtgagacactggtgtgacaagtcagtgtgacaggcagtggtgtgacaggcaccggtgtgacaggtcagtgtgacaggta

SEQ ID NO: 45392 - DNA, 83 bp, Homo sapiens
actggtgtgacaagtcagtgtgacaggcagtggtgtgacaggcaccggtgtgacaggtcagtgtgacaggtactgttgtgaca

SEQ ID NO: 45393 - DNA, 83 bp, Homo sapiens
tgtgacaagtcagtgtgacaggcagtggtgtgacaggcaccggtgtgacaggtcagtgtgacaggtactgttgtgacaggtcg

SEQ ID NO: 45394 - DNA, 81 bp, Homo sapiens
tggtgtgacaggcaccggtgtgacaggtcagtgtgacaggtactgttgtgacaggtcggtgtgagacactggtgtgacaag

SEQ ID NO: 45395 - DNA, 81 bp, Homo sapiens
aggcaccggtgtgacaggtcagtgtgacaggtactgttgtgacaggtcggtgtgagacactggtgtgacaagtcagtgtga

SEQ ID NO: 45396 - DNA, 80 bp, Homo sapiens
accggtgtgacaggtcagtgtgacaggtactgttgtgacaggtcggtgtgagacactggtgtgacaagtcagtgtgacag

SEQ ID NO: 45397 - DNA, 84 bp, Homo sapiens
tgtgacaggtcagtgtgacaggtactgttgtgacaggtcggtgtgagacactggtgtgacaagtcagtgtgacaggcagtggtg

SEQ ID NO: 45398 - DNA, 83 bp, Homo sapiens
acaggtcagtgtgacaggtactgttgtgacaggtcggtgtgagacactggtgtgacaagtcagtgtgacaggcagtggtgtga

SEQ ID NO: 45399 - DNA, 82 bp, Homo sapiens
agtgtgacaggtactgttgtgacaggtcggtgtgagacactggtgtgacaagtcagtgtgacaggcagtggtgtgacaggtc

SEQ ID NO: 45400 - DNA, 80 bp, Homo sapiens
acaggtactgttgtgacaggtcggtgtgagacactggtgtgacaagtcagtgtgacaggcagtggtgtgacaggtcggtg

SEQ ID NO: 45401 - DNA, 81 bp, Homo sapiens
aggtactgttgtgacaggtcggtgtgagacactggtgtgacaagtcagtgtgacaggcagtggtgtgacaggtcggtgtga

SEQ ID NO: 45402 - DNA, 84 bp, Homo sapiens
tactgttgtgacaggtcggtgtgagacactggtgtgacaagtcagtgtgacaggcagtggtgtgacaggtcggtgtgacaggca

SEQ ID NO: 45403 - DNA, 83 bp, Homo sapiens
ttgtgacaggtcggtgtgagacactggtgtgacaagtcagtgtgacaggcagtggtgtgacaggtcggtgtgacaggcaccag

SEQ ID NO: 45404 - DNA, 83 bp, Homo sapiens
acaggtcggtgtgagacactggtgtgacaagtcagtgtgacaggcagtggtgtgacaggtcggtgtgacaggcaccagtgtga

SEQ ID NO: 45405 - DNA, 79 bp, Homo sapiens
caggccccggtgtgacaggtaggtcatgctgtgataggccccggtgtgacaggtcggtgtgacaggcaccagtgtgaca

SEQ ID NO: 45406 - DNA, 78 bp, Homo sapiens
aggccccggtgtgacaggtaggtcatgctgtgataggccccggtgtgacaggtcggtgtgacaggcaccagtgtgaca

SEQ ID NO: 45407 - DNA, 82 bp, Homo sapiens
tgtgacaggtcggtgtgacaggcaccagtgtgacaggtaggtcatgctgtgataggccccggtgtgacaggtcggtgtgaca

SEQ ID NO: 45408 - DNA, 80 bp, Homo sapiens
aggtcggtgtgacaggcaccagtgtgacaggtaggtcatgctgtgataggccccggtgtgacaggtcggtgtgacaggca

SEQ ID NO: 45409 - DNA, 81 bp, Homo sapiens
acaggcaccagtgtgacaggtaggtcatgctgtgataggccccggtgtgacaggtcggtgtgacaggcaccagtgtgacag

SEQ ID NO: 45410 - DNA, 78 bp, Homo sapiens
agtgtgacaggtaggtcatgctgtgataggccccggtgtgacaggtcggtgtgacaggcaccagtgtgacaggccccg

SEQ ID NO: 45411 - DNA, 73 bp, Homo sapiens
aggccccggtgtgacaggtcggtgtgacaggcaccggtgtgacaggtcggtcacgttggctccctggcacgcg

SEQ ID NO: 45412 - DNA, 76 bp, Homo sapiens
ggtgtgacaggtcggtgtgacaggcaccggtgtgacaggtcggtcacgttggctccctggcacgcggcagagtggg

SEQ ID NO: 45413 - DNA, 73 bp, Homo sapiens
aggtcggtgtgacaggcaccggtgtgacaggtcggtcacgttggctccctggcacgcggcagagtggggaccg

SEQ ID NO: 45414 - DNA, 75 bp, Homo sapiens
gtcggtgtgacaggcaccggtgtgacaggtcggtcacgttggctccctggcacgcggcagagtggggaccgtgcc

SEQ ID NO: 45415 - DNA, 73 bp, Homo sapiens
acaggcaccggtgtgacaggtcggtcacgttggctccctggcacgcggcagagtggggaccgtgcccccgtga

SEQ ID NO: 45416 - DNA, 74 bp, Homo sapiens
caccggtgtgacaggtcggtcacgttggctccctggcacgcggcagagtggggaccgtgcccccgtgagtgtca

SEQ ID NO: 45417 - DNA, 75 bp, Homo sapiens
ggtgtgacaggtcggtcacgttggctccctggcacgcggcagagtggggaccgtgcccccgtgagtgtcacactg

SEQ ID NO: 45418 - DNA, 75 bp, Homo sapiens
gtgtgacaggtcggtcacgttggctccctggcacgcggcagagtggggaccgtgcccccgtgagtgtcacactgg

SEQ ID NO: 45419 - DNA, 72 bp, Homo sapiens
acaggtcggtcacgttggctccctggcacgcggcagagtggggaccgtgcccccgtgagtgtcacactgggg

SEQ ID NO: 45420 - DNA, 74 bp, Homo sapiens
tcggtcacgttggctccctggcacgcggcagagtggggaccgtgcccccgtgagtgtcacactggggtccacac

SEQ ID NO: 45421 - DNA, 77 bp, Homo sapiens
ccctggcacgcggcagagtggggaccgtgcccccgtgagtgtcacactggggtccacaccaggctgatccactgtga

SEQ ID NO: 45422 - DNA, 80 bp, Homo sapiens
cgtgcccccgtgagtgtcacactggggtccacaccaggctgatccactgtgagctgggagttgccatagagactctataa

SEQ ID NO: 45423 - DNA, 81 bp, Homo sapiens
tgagtgtcacactggggtccacaccaggctgatccactgtgagctgggagttgccatagagactctataaatacaaccaaa

SEQ ID NO: 45424 - DNA, 78 bp, Homo sapiens
actggggtccacaccaggctgatccactgtgagctgggagttgccatagagactctataaatacaaccaaacatcttc

SEQ ID NO: 45425 - DNA, 79 bp, Homo sapiens
acaccaggctgatccactgtgagctgggagttgccatagagactctataaatacaaccaaacatcttccagggaacaga

SEQ ID NO: 45426 - DNA, 78 bp, Homo sapiens
tgatccactgtgagctgggagttgccatagagactctataaatacaaccaaacatcttccagggaacagaagcgtttc

SEQ ID NO: 45427 - DNA, 77 bp, Homo sapiens
tgagctgggagttgccatagagactctataaatacaaccaaacatcttccagggaacagaagcgtttctcatcccaa

SEQ ID NO: 45428 - DNA, 73 bp, Homo sapiens
agttgccatagagactctataaatacaaccaaacatcttccagggaacagaagcgtttctcatcccaaacctc

SEQ ID NO: 45429 - DNA, 74 bp, Homo sapiens
atagagactctataaatacaaccaaacatcttccagggaacagaagcgtttctcatcccaaacctccacatggc

SEQ ID NO: 45430 - DNA, 74 bp, Homo sapiens
tataaatacaaccaaacatcttccagggaacagaagcgtttctcatcccaaacctccacatggccctggagatc

SEQ ID NO: 45431 - DNA, 72 bp, Homo sapiens
agggaacagaagcgtttctcatcccaaacctccacatggccctggagatccccaacaccttagcaaaggcca

SEQ ID NO: 45432 - DNA, 73 bp, Homo sapiens
agaagcgtttctcatcccaaacctccacatggccctggagatccccaacaccttagcaaaggccaggtcttca

SEQ ID NO: 45433 - DNA, 70 bp, Homo sapiens
atcccaaacctccacatggccctggagatccccaacaccttagcaaaggccaggtcttcacggaagtgtt

SEQ ID NO: 45434 - DNA, 71 bp, Homo sapiens
ctccacatggccctggagatccccaacaccttagcaaaggccaggtcttcacggaagtgtttctcccgaaa

SEQ ID NO: 45435 - DNA, 69 bp, Homo sapiens
tggccctggagatccccaacaccttagcaaaggccaggtcttcacggaagtgtttctcccgaaagcccc

SEQ ID NO: 45436 - DNA, 66 bp, Homo sapiens
cccaacaccttagcaaaggccaggtcttcacggaagtgtttctcccgaaagcccccaccggcgagg

SEQ ID NO: 45437 - DNA, 65 bp, Homo sapiens
accttagcaaaggccaggtcttcacggaagtgtttctcccgaaagcccccaccggcgagggcccc

SEQ ID NO: 45438 - DNA, 64 bp, Homo sapiens
aggtcttcacggaagtgtttctcccgaaagcccccaccggcgagggcccccggaaccaccgtga

SEQ ID NO: 45439 - DNA, 63 bp, Homo sapiens
tgtttctcccgaaagcccccaccggcgagggcccccggaaccaccgtgaagggcccgcggggc

SEQ ID NO: 45440 - DNA, 64 bp, Homo sapiens
accggcgagggcccccggaaccaccgtgaagggcccgcggggccaggggccgcctacctcacag

SEQ ID NO: 45441 - DNA, 69 bp, Homo sapiens
ccggaaccaccgtgaagggcccgcggggccaggggccgcctacctcacaggtgtccatgtcctgggaca

SEQ ID NO: 45442 - DNA, 72 bp, Homo sapiens
ccaccgtgaagggcccgcggggccaggggccgcctacctcacaggtgtccatgtcctgggacagcttgaggc

SEQ ID NO: 45443 - DNA, 73 bp, Homo sapiens
cgcggggccaggggccgcctacctcacaggtgtccatgtcctgggacagcttgaggcccccacgcccgtcaca

SEQ ID NO: 45444 - DNA, 75 bp, Homo sapiens
ggggccgcctacctcacaggtgtccatgtcctgggacagcttgaggcccccacgcccgtcacagtggcaggtgta

SEQ ID NO: 45445 - DNA, 76 bp, Homo sapiens
ctacctcacaggtgtccatgtcctgggacagcttgaggcccccacgcccgtcacagtggcaggtgtagctccctgg

SEQ ID NO: 45446 - DNA, 78 bp, Homo sapiens
tgtccatgtcctgggacagcttgaggcccccacgcccgtcacagtggcaggtgtagctccctggggagttcacgcaga

SEQ ID NO: 45447 - DNA, 78 bp, Homo sapiens
acagcttgaggcccccacgcccgtcacagtggcaggtgtagctccctggggagttcacgcagacctgctcacagcggc

SEQ ID NO: 45448 - DNA, 81 bp, Homo sapiens
cacgcccgtcacagtggcaggtgtagctccctggggagttcacgcagacctgctcacagcggccctgcagacactcgtcca

SEQ ID NO: 45449 - DNA, 84 bp, Homo sapiens
acagtggcaggtgtagctccctggggagttcacgcagacctgctcacagcggccctgcagacactcgtccacatctgccagcca

SEQ ID NO: 45450 - DNA, 82 bp, Homo sapiens
aggtgtagctccctggggagttcacgcagacctgctcacagcggccctgcagacactcgtccacatctgccagccagaggga

SEQ ID NO: 45451 - DNA, 82 bp, Homo sapiens
cctggggagttcacgcagacctgctcacagcggccctgcagacactcgtccacatctgccagccagagggaagcggcggtga

SEQ ID NO: 45452 - DNA, 81 bp, Homo sapiens
agttcacgcagacctgctcacagcggccctgcagacactcgtccacatctgccagccagagggaagcggcggtgagccggg

SEQ ID NO: 45453 - DNA, 80 bp, Homo sapiens
acctgctcacagcggccctgcagacactcgtccacatctgccagccagagggaagcggcggtgagccggggaggcctcta

SEQ ID NO: 45454 - DNA, 79 bp, Homo sapiens
acagcggccctgcagacactcgtccacatctgccagccagagggaagcggcggtgagccggggaggcctctacgctgtc

SEQ ID NO: 45455 - DNA, 75 bp, Homo sapiens
agacactcgtccacatctgccagccagagggaagcggcggtgagccggggaggcctctacgctgtcccgccgtgg

SEQ ID NO: 45456 - DNA, 76 bp, Homo sapiens
acatctgccagccagagggaagcggcggtgagccggggaggcctctacgctgtcccgccgtgggatcacaccgcga

SEQ ID NO: 45457 - DNA, 73 bp, Homo sapiens
agggaagcggcggtgagccggggaggcctctacgctgtcccgccgtgggatcacaccgcgattgctcaaacca

SEQ ID NO: 45458 - DNA, 76 bp, Homo sapiens
agccggggaggcctctacgctgtcccgccgtgggatcacaccgcgattgctcaaaccacacgcaaggtgcgctcaa

SEQ ID NO: 45459 - DNA, 81 bp, Homo sapiens
tacgctgtcccgccgtgggatcacaccgcgattgctcaaaccacacgcaaggtgcgctcaaggaattacatgcagattcta

SEQ ID NO: 45460 - DNA, 77 bp, Homo sapiens
cgccgtgggatcacaccgcgattgctcaaaccacacgcaaggtgcgctcaaggaattacatgcagattctaacgggg

SEQ ID NO: 45461 - DNA, 74 bp, Homo sapiens
attgctcaaaccacacgcaaggtgcgctcaaggaattacatgcagattctaacgggggcggcttgggggtcgcg

SEQ ID NO: 45462 - DNA, 71 bp, Homo sapiens
ccacacgcaaggtgcgctcaaggaattacatgcagattctaacgggggcggcttgggggtcgcgtcccccc

SEQ ID NO: 45463 - DNA, 70 bp, Homo sapiens
gctcaaggaattacatgcagattctaacgggggcggcttgggggtcgcgtccccccccactggaaagcta

SEQ ID NO: 45464 - DNA, 65 bp, Homo sapiens
agattctaacgggggcggcttgggggtcgcgtccccccccactggaaagctaggttgcaccctcg

SEQ ID NO: 45465 - DNA, 68 bp, Homo sapiens
gggcggcttgggggtcgcgtccccccccactggaaagctaggttgcaccctcggcctgctcctgcccg

SEQ ID NO: 45466 - DNA, 68 bp, Homo sapiens
ggggtcgcgtccccccccactggaaagctaggttgcaccctcggcctgctcctgcccgggctctttct

SEQ ID NO: 45467 - DNA, 70 bp, Homo sapiens
tccccccccactggaaagctaggttgcaccctcggcctgctcctgcccgggctctttcttgagggaataa

SEQ ID NO: 45468 - DNA, 72 bp, Homo sapiens
actggaaagctaggttgcaccctcggcctgctcctgcccgggctctttcttgagggaataaaaatgtcgcag

SEQ ID NO: 45469 - DNA, 73 bp, Homo sapiens
agctaggttgcaccctcggcctgctcctgcccgggctctttcttgagggaataaaaatgtcgcaggtgtccca

SEQ ID NO: 45470 - DNA, 73 bp, Homo sapiens
tcggcctgctcctgcccgggctctttcttgagggaataaaaatgtcgcaggtgtcccaggagggtgctcccaa

SEQ ID NO: 45471 - DNA, 73 bp, Homo sapiens
tcctgcccgggctctttcttgagggaataaaaatgtcgcaggtgtcccaggagggtgctcccaacgagccaga

SEQ ID NO: 45472 - DNA, 71 bp, Homo sapiens
gggctctttcttgagggaataaaaatgtcgcaggtgtcccaggagggtgctcccaacgagccagacccacc

SEQ ID NO: 45473 - DNA, 72 bp, Homo sapiens
tcttgagggaataaaaatgtcgcaggtgtcccaggagggtgctcccaacgagccagacccacccccgctgcc

SEQ ID NO: 45474 - DNA, 69 bp, Homo sapiens
ataaaaatgtcgcaggtgtcccaggagggtgctcccaacgagccagacccacccccgctgccgggccgg

SEQ ID NO: 45475 - DNA, 71 bp, Homo sapiens
aggagggtgctcccaacgagccagacccacccccgctgccgggccggtgtggaaggcaggtctgggaagca

SEQ ID NO: 45476 - DNA, 71 bp, Homo sapiens
ctcccaacgagccagacccacccccgctgccgggccggtgtggaaggcaggtctgggaagcacagggtctg

SEQ ID NO: 45477 - DNA, 75 bp, Homo sapiens
agccagacccacccccgctgccgggccggtgtggaaggcaggtctgggaagcacagggtctgggctgtgcagtga

SEQ ID NO: 45478 - DNA, 73 bp, Homo sapiens
acccccgctgccgggccggtgtggaaggcaggtctgggaagcacagggtctgggctgtgcagtgaggtgtccc

SEQ ID NO: 45479 - DNA, 77 bp, Homo sapiens
aaggcaggtctgggaagcacagggtctgggctgtgcagtgaggtgtcccccggagcacagaggggccgacagctgtg

SEQ ID NO: 45480 - DNA, 76 bp, Homo sapiens
acagggtctgggctgtgcagtgaggtgtcccccggagcacagaggggccgacagctgtggtgggaaatggaggtca

SEQ ID NO: 45481 - DNA, 79 bp, Homo sapiens
ctgtgcagtgaggtgtcccccggagcacagaggggccgacagctgtggtgggaaatggaggtcagtgcaggcagcctgg

SEQ ID NO: 45482 - DNA, 76 bp, Homo sapiens
agtgaggtgtcccccggagcacagaggggccgacagctgtggtgggaaatggaggtcagtgcaggcagcctgggct

SEQ ID NO: 45483 - DNA, 78 bp, Homo sapiens
ggagcacagaggggccgacagctgtggtgggaaatggaggtcagtgcaggcagcctgggcttccccaccctctctgtc

SEQ ID NO: 45484 - DNA, 77 bp, Homo sapiens
agaggggccgacagctgtggtgggaaatggaggtcagtgcaggcagcctgggcttccccaccctctctgtctgccta

SEQ ID NO: 45485 - DNA, 78 bp, Homo sapiens
gctgtggtgggaaatggaggtcagtgcaggcagcctgggcttccccaccctctctgtctgcctactcagccccactgt

SEQ ID NO: 45486 - DNA, 79 bp, Homo sapiens
tgggaaatggaggtcagtgcaggcagcctgggcttccccaccctctctgtctgcctactcagccccactgttcccatca

SEQ ID NO: 45487 - DNA, 77 bp, Homo sapiens
ggaggtcagtgcaggcagcctgggcttccccaccctctctgtctgcctactcagccccactgttcccatcactgggg

SEQ ID NO: 45488 - DNA, 74 bp, Homo sapiens
aggcagcctgggcttccccaccctctctgtctgcctactcagccccactgttcccatcactgggggcacggccc

SEQ ID NO: 45489 - DNA, 74 bp, Homo sapiens
ttccccaccctctctgtctgcctactcagccccactgttcccatcactgggggcacggcccctcttagaggctc

SEQ ID NO: 45490 - DNA, 76 bp, Homo sapiens
tctctgtctgcctactcagccccactgttcccatcactgggggcacggcccctcttagaggctctacggccaacag

SEQ ID NO: 45491 - DNA, 71 bp, Homo sapiens
cccactgttcccatcactgggggcacggcccctcttagaggctctacggccaacagggccctccccatggc

SEQ ID NO: 45492 - DNA, 72 bp, Homo sapiens
gggcacggcccctcttagaggctctacggccaacagggccctccccatggcggctggaaagagagaacagta

SEQ ID NO: 45493 - DNA, 72 bp, Homo sapiens
cctcttagaggctctacggccaacagggccctccccatggcggctggaaagagagaacagtagagggaggct

SEQ ID NO: 45494 - DNA, 76 bp, Homo sapiens
tagaggctctacggccaacagggccctccccatggcggctggaaagagagaacagtagagggaggcttgctgctcc

SEQ ID NO: 45495 - DNA, 72 bp, Homo sapiens
caacagggccctccccatggcggctggaaagagagaacagtagagggaggcttgctgctccccgtccctttg

SEQ ID NO: 45496 - DNA, 72 bp, Homo sapiens
aaagagagaacagtagagggaggcttgctgctccccgtccctttggggagaggccccgtctatgcaggtgga

SEQ ID NO: 45497 - DNA, 72 bp, Homo sapiens
aggcttgctgctccccgtccctttggggagaggccccgtctatgcaggtggagaagggtacacacgtgtgta

SEQ ID NO: 45498 - DNA, 72 bp, Homo sapiens
cccgtccctttggggagaggccccgtctatgcaggtggagaagggtacacacgtgtgtacatgcggtgtata

SEQ ID NO: 45499 - DNA, 78 bp, Homo sapiens
tttggggagaggccccgtctatgcaggtggagaagggtacacacgtgtgtacatgcggtgtatatgcatgtgtgcggt

SEQ ID NO: 45500 - DNA, 82 bp, Homo sapiens
ccccgtctatgcaggtggagaagggtacacacgtgtgtacatgcggtgtatatgcatgtgtgcggttcgttcatgtgcacaa

SEQ ID NO: 45501 - DNA, 85 bp, Homo sapiens
tctatgcaggtggagaagggtacacacgtgtgtacatgcggtgtatatgcatgtgtgcggttcgttcatgtgcacaaggggcatg

SEQ ID NO: 45502 - DNA, 82 bp, Homo sapiens
agaagggtacacacgtgtgtacatgcggtgtatatgcatgtgtgcggttcgttcatgtgcacaaggggcatgggtgcctgtg

SEQ ID NO: 45503 - DNA, 86 bp, Homo sapiens
acacgtgtgtacatgcggtgtatatgcatgtgtgcggttcgttcatgtgcacaaggggcatgggtgcctgtgtgtgctcacgtgtg

SEQ ID NO: 45504 - DNA, 89 bp, Homo sapiens
tgtacatgcggtgtatatgcatgtgtgcggttcgttcatgtgcacaaggggcatgggtgcctgtgtgtgctcacgtgtgtgcgggcatg

SEQ ID NO: 45505 - DNA, 87 bp, Homo sapiens
atatgcatgtgtgcggttcgttcatgtgcacaaggggcatgggtgcctgtgtgtgctcacgtgtgtgcgggcatggtggtagcacag

SEQ ID NO: 45506 - DNA, 85 bp, Homo sapiens
tgtgcggttcgttcatgtgcacaaggggcatgggtgcctgtgtgtgctcacgtgtgtgcgggcatggtggtagcacaggccatta

SEQ ID NO: 45507 - DNA, 87 bp, Homo sapiens
ttcatgtgcacaaggggcatgggtgcctgtgtgtgctcacgtgtgtgcgggcatggtggtagcacaggccattaccaggctgataga

SEQ ID NO: 45508 - DNA, 82 bp, Homo sapiens
acaaggggcatgggtgcctgtgtgtgctcacgtgtgtgcgggcatggtggtagcacaggccattaccaggctgatagaaaca

SEQ ID NO: 45509 - DNA, 81 bp, Homo sapiens
atgggtgcctgtgtgtgctcacgtgtgtgcgggcatggtggtagcacaggccattaccaggctgatagaaacagggagaaa

SEQ ID NO: 45510 - DNA, 79 bp, Homo sapiens
tgtgctcacgtgtgtgcgggcatggtggtagcacaggccattaccaggctgatagaaacagggagaaagagactttctt

SEQ ID NO: 45511 - DNA, 78 bp, Homo sapiens
tgtgtgcgggcatggtggtagcacaggccattaccaggctgatagaaacagggagaaagagactttctttcaccagaa

SEQ ID NO: 45512 - DNA, 75 bp, Homo sapiens
catggtggtagcacaggccattaccaggctgatagaaacagggagaaagagactttctttcaccagaagcacccg

SEQ ID NO: 45513 - DNA, 70 bp, Homo sapiens
attaccaggctgatagaaacagggagaaagagactttctttcaccagaagcacccggttgttagcaaccg

SEQ ID NO: 45514 - DNA, 72 bp, Homo sapiens
aagagactttctttcaccagaagcacccggttgttagcaaccggctcgggcagtgactggcacccgtgtcta

SEQ ID NO: 45515 - DNA, 74 bp, Homo sapiens
tttcaccagaagcacccggttgttagcaaccggctcgggcagtgactggcacccgtgtctagacttgggcgtca

SEQ ID NO: 45516 - DNA, 73 bp, Homo sapiens
aagcacccggttgttagcaaccggctcgggcagtgactggcacccgtgtctagacttgggcgtcagagaaagc

SEQ ID NO: 45517 - DNA, 74 bp, Homo sapiens
gttgttagcaaccggctcgggcagtgactggcacccgtgtctagacttgggcgtcagagaaagcgagggtgacc

SEQ ID NO: 45518 - DNA, 74 bp, Homo sapiens
ctcgggcagtgactggcacccgtgtctagacttgggcgtcagagaaagcgagggtgaccgcgtggcgtgggtac

SEQ ID NO: 45519 - DNA, 74 bp, Homo sapiens
gtgactggcacccgtgtctagacttgggcgtcagagaaagcgagggtgaccgcgtggcgtgggtacctcggcaa

SEQ ID NO: 45520 - DNA, 71 bp, Homo sapiens
acccgtgtctagacttgggcgtcagagaaagcgagggtgaccgcgtggcgtgggtacctcggcaagccttc

SEQ ID NO: 45521 - DNA, 73 bp, Homo sapiens
ctagacttgggcgtcagagaaagcgagggtgaccgcgtggcgtgggtacctcggcaagccttctcctgggagc

SEQ ID NO: 45522 - DNA, 74 bp, Homo sapiens
cgtcagagaaagcgagggtgaccgcgtggcgtgggtacctcggcaagccttctcctgggagctgtacgcaaagc

SEQ ID NO: 45523 - DNA, 73 bp, Homo sapiens
agggtgaccgcgtggcgtgggtacctcggcaagccttctcctgggagctgtacgcaaagccctcgtcacagag

SEQ ID NO: 45524 - DNA, 74 bp, Homo sapiens
accgcgtggcgtgggtacctcggcaagccttctcctgggagctgtacgcaaagccctcgtcacagaggcaggag

SEQ ID NO: 45525 - DNA, 74 bp, Homo sapiens
cgtgggtacctcggcaagccttctcctgggagctgtacgcaaagccctcgtcacagaggcaggagtaggagccg

SEQ ID NO: 45526 - DNA, 78 bp, Homo sapiens
tcggcaagccttctcctgggagctgtacgcaaagccctcgtcacagaggcaggagtaggagccgggcaggttcttgca

SEQ ID NO: 45527 - DNA, 78 bp, Homo sapiens
ttctcctgggagctgtacgcaaagccctcgtcacagaggcaggagtaggagccgggcaggttcttgcagcgcgcctcc

SEQ ID NO: 45528 - DNA, 77 bp, Homo sapiens
agctgtacgcaaagccctcgtcacagaggcaggagtaggagccgggcaggttcttgcagcgcgcctccccgcaggcc

SEQ ID NO: 45529 - DNA, 75 bp, Homo sapiens
aaagccctcgtcacagaggcaggagtaggagccgggcaggttcttgcagcgcgcctccccgcaggcctccgagtc

SEQ ID NO: 45530 - DNA, 80 bp, Homo sapiens
taggagccgggcaggttcttgcagcgcgcctccccgcaggcctccgagtctgcgcactcgtctatgtctgcaagcaaaaa

SEQ ID NO: 45531 - DNA, 77 bp, Homo sapiens
ccgggcaggttcttgcagcgcgcctccccgcaggcctccgagtctgcgcactcgtctatgtctgcaagcaaaaaaaa

SEQ ID NO: 45532 - DNA, 77 bp, Homo sapiens
ttcttgcagcgcgcctccccgcaggcctccgagtctgcgcactcgtctatgtctgcaagcaaaaaaaaaccggccaa

SEQ ID NO: 45533 - DNA, 78 bp, Homo sapiens
tccccgcaggcctccgagtctgcgcactcgtctatgtctgcaagcaaaaaaaaaccggccaaccgcagcacagcggca

SEQ ID NO: 45534 - DNA, 78 bp, Homo sapiens
agtctgcgcactcgtctatgtctgcaagcaaaaaaaaaccggccaaccgcagcacagcggcatctcagacggggctgg

SEQ ID NO: 45535 - DNA, 76 bp, Homo sapiens
actcgtctatgtctgcaagcaaaaaaaaaccggccaaccgcagcacagcggcatctcagacggggctggggcaggc

SEQ ID NO: 45536 - DNA, 75 bp, Homo sapiens
caagcaaaaaaaaaccggccaaccgcagcacagcggcatctcagacggggctggggcaggcggctgcagggactg

SEQ ID NO: 45537 - DNA, 76 bp, Homo sapiens
aaaaaccggccaaccgcagcacagcggcatctcagacggggctggggcaggcggctgcagggactggccagggcac

SEQ ID NO: 45538 - DNA, 80 bp, Homo sapiens
aaccgcagcacagcggcatctcagacggggctggggcaggcggctgcagggactggccagggcaccacccagaggtcgca

SEQ ID NO: 45539 - DNA, 80 bp, Homo sapiens
acagcggcatctcagacggggctggggcaggcggctgcagggactggccagggcaccacccagaggtcgcatccagactc

SEQ ID NO: 45540 - DNA, 78 bp, Homo sapiens
atctcagacggggctggggcaggcggctgcagggactggccagggcaccacccagaggtcgcatccagactctgtggg

SEQ ID NO: 45541 - DNA, 77 bp, Homo sapiens
cggctgcagggactggccagggcaccacccagaggtcgcatccagactctgtggggccagcgcgccctggccccatt

SEQ ID NO: 45542 - DNA, 74 bp, Homo sapiens
agggactggccagggcaccacccagaggtcgcatccagactctgtggggccagcgcgccctggccccatttccc

SEQ ID NO: 45543 - DNA, 75 bp, Homo sapiens
ccagggcaccacccagaggtcgcatccagactctgtggggccagcgcgccctggccccatttccctgccctcctc

SEQ ID NO: 45544 - DNA, 70 bp, Homo sapiens
tgtggggccagcgcgccctggccccatttccctgccctcctcccctgaccgggcagctcccggggtgttg

SEQ ID NO: 45545 - DNA, 70 bp, Homo sapiens
agcgcgccctggccccatttccctgccctcctcccctgaccgggcagctcccggggtgttggtgcacgct

SEQ ID NO: 45546 - DNA, 72 bp, Homo sapiens
ctgccctcctcccctgaccgggcagctcccggggtgttggtgcacgcttctgatcaaggcccggctgggaag

SEQ ID NO: 45547 - DNA, 75 bp, Homo sapiens
accgggcagctcccggggtgttggtgcacgcttctgatcaaggcccggctgggaaggctgacttcagcccagcag

SEQ ID NO: 45548 - DNA, 77 bp, Homo sapiens
gttggtgcacgcttctgatcaaggcccggctgggaaggctgacttcagcccagcaggtggagagctgggaagggccc

SEQ ID NO: 45549 - DNA, 77 bp, Homo sapiens
cttctgatcaaggcccggctgggaaggctgacttcagcccagcaggtggagagctgggaagggccctgcttggtgga

SEQ ID NO: 45550 - DNA, 72 bp, Homo sapiens
aaggcccggctgggaaggctgacttcagcccagcaggtggagagctgggaagggccctgcttggtggagggg

SEQ ID NO: 45551 - DNA, 73 bp, Homo sapiens
tgggaaggctgacttcagcccagcaggtggagagctgggaagggccctgcttggtggaggggtggggggcggc

SEQ ID NO: 45552 - DNA, 76 bp, Homo sapiens
tcagcccagcaggtggagagctgggaagggccctgcttggtggaggggtggggggcggcggtgcacgctgtgctgt

SEQ ID NO: 45553 - DNA, 73 bp, Homo sapiens
ggtggagagctgggaagggccctgcttggtggaggggtggggggcggcggtgcacgctgtgctgttccattta

SEQ ID NO: 45554 - DNA, 74 bp, Homo sapiens
cctgcttggtggaggggtggggggcggcggtgcacgctgtgctgttccatttaaatgacggtgctacaggacac

SEQ ID NO: 45555 - DNA, 72 bp, Homo sapiens
ttggtggaggggtggggggcggcggtgcacgctgtgctgttccatttaaatgacggtgctacaggacacggg

SEQ ID NO: 45556 - DNA, 71 bp, Homo sapiens
ggggcggcggtgcacgctgtgctgttccatttaaatgacggtgctacaggacacggggccgtaaaaagtaa

SEQ ID NO: 45557 - DNA, 70 bp, Homo sapiens
ggcggtgcacgctgtgctgttccatttaaatgacggtgctacaggacacggggccgtaaaaagtaacccc

SEQ ID NO: 45558 - DNA, 63 bp, Homo sapiens
atttaaatgacggtgctacaggacacggggccgtaaaaagtaaccccccgggggcatttgaaa

SEQ ID NO: 45559 - DNA, 60 bp, Homo sapiens
gtaaaaagtaaccccccgggggcatttgaaactaaaaccccaaccccaaagagaagcatt

SEQ ID NO: 45560 - DNA, 63 bp, Homo sapiens
taaccccccgggggcatttgaaactaaaaccccaaccccaaagagaagcatttactggtttca

SEQ ID NO: 45561 - DNA, 67 bp, Homo sapiens
ggcatttgaaactaaaaccccaaccccaaagagaagcatttactggtttcaatcaattttcactacc

SEQ ID NO: 45562 - DNA, 64 bp, Homo sapiens
actaaaaccccaaccccaaagagaagcatttactggtttcaatcaattttcactaccgggttaa

SEQ ID NO: 45563 - DNA, 67 bp, Homo sapiens
caaccccaaagagaagcatttactggtttcaatcaattttcactaccgggttaaaccacaatcctaa

SEQ ID NO: 45564 - DNA, 72 bp, Homo sapiens
gagaagcatttactggtttcaatcaattttcactaccgggttaaaccacaatcctaagacttgagcatctaa

SEQ ID NO: 45565 - DNA, 70 bp, Homo sapiens
atttactggtttcaatcaattttcactaccgggttaaaccacaatcctaagacttgagcatctaatgtgg

SEQ ID NO: 45566 - DNA, 73 bp, Homo sapiens
aatcaattttcactaccgggttaaaccacaatcctaagacttgagcatctaatgtgggacagatgctgtttac

SEQ ID NO: 45567 - DNA, 73 bp, Homo sapiens
attttcactaccgggttaaaccacaatcctaagacttgagcatctaatgtgggacagatgctgtttacggcca

SEQ ID NO: 45568 - DNA, 73 bp, Homo sapiens
ccgggttaaaccacaatcctaagacttgagcatctaatgtgggacagatgctgtttacggccaagcaccctgg

SEQ ID NO: 45569 - DNA, 75 bp, Homo sapiens
acaatcctaagacttgagcatctaatgtgggacagatgctgtttacggccaagcaccctggggtaggaggggcaa

SEQ ID NO: 45570 - DNA, 73 bp, Homo sapiens
atctaatgtgggacagatgctgtttacggccaagcaccctggggtaggaggggcaaccctgaaatgaagagcc

SEQ ID NO: 45571 - DNA, 71 bp, Homo sapiens
agatgctgtttacggccaagcaccctggggtaggaggggcaaccctgaaatgaagagccctttagtcacca

SEQ ID NO: 45572 - DNA, 70 bp, Homo sapiens
tgtttacggccaagcaccctggggtaggaggggcaaccctgaaatgaagagccctttagtcaccagagga

SEQ ID NO: 45573 - DNA, 71 bp, Homo sapiens
aagcaccctggggtaggaggggcaaccctgaaatgaagagccctttagtcaccagaggagagcaaaggcag

SEQ ID NO: 45574 - DNA, 72 bp, Homo sapiens
gtaggaggggcaaccctgaaatgaagagccctttagtcaccagaggagagcaaaggcaggggcacggagaaa

SEQ ID NO: 45575 - DNA, 71 bp, Homo sapiens
gggcaaccctgaaatgaagagccctttagtcaccagaggagagcaaaggcaggggcacggagaaaggtggg

SEQ ID NO: 45576 - DNA, 70 bp, Homo sapiens
aaatgaagagccctttagtcaccagaggagagcaaaggcaggggcacggagaaaggtgggggaggagaag

SEQ ID NO: 45577 - DNA, 67 bp, Homo sapiens
agagcaaaggcaggggcacggagaaaggtgggggaggagaagggggagtaggagtgggaggaggaag

SEQ ID NO: 45578 - DNA, 63 bp, Homo sapiens
gggcacggagaaaggtgggggaggagaagggggagtaggagtgggaggaggaaggggggaggg

SEQ ID NO: 45579 - DNA, 62 bp, Homo sapiens
agaaaggtgggggaggagaagggggagtaggagtgggaggaggaaggggggaggggaaggag

SEQ ID NO: 45580 - DNA, 62 bp, Homo sapiens
ggggagggggaggagaatggggaagggaaggaggaggacggagggggaggaggacggagggg

SEQ ID NO: 45581 - DNA, 65 bp, Homo sapiens
gaggaggagaggggaaataaggatgggggaggaggagggggaaaaagaggagggggaatgaggag

SEQ ID NO: 45582 - DNA, 65 bp, Homo sapiens
ggagaggggaaataaggatgggggaggaggagggggaaaaagaggagggggaatgaggaggaaga

SEQ ID NO: 45583 - DNA, 65 bp, Homo sapiens
aggaggagggggagtggggaaaggaggagggggaatggtggggaggaagaggaagatggggagga

SEQ ID NO: 45584 - DNA, 76 bp, Homo sapiens
aggaagaggaagatggggaggaggaggagaggacgggaatgcctctgtcactgtgggcagtaactgtgagcctaga

SEQ ID NO: 45585 - DNA, 76 bp, Homo sapiens
aggaagatggggaggaggaggagaggacgggaatgcctctgtcactgtgggcagtaactgtgagcctagactttgc

SEQ ID NO: 45586 - DNA, 76 bp, Homo sapiens
gaggaggagaggacgggaatgcctctgtcactgtgggcagtaactgtgagcctagactttgccgggagtgcccgac

SEQ ID NO: 45587 - DNA, 77 bp, Homo sapiens
agaggacgggaatgcctctgtcactgtgggcagtaactgtgagcctagactttgccgggagtgcccgactggtgcag

SEQ ID NO: 45588 - DNA, 76 bp, Homo sapiens
aatgcctctgtcactgtgggcagtaactgtgagcctagactttgccgggagtgcccgactggtgcagggacccacg

SEQ ID NO: 45589 - DNA, 75 bp, Homo sapiens
ctgtgggcagtaactgtgagcctagactttgccgggagtgcccgactggtgcagggacccacgggagatgcttta

SEQ ID NO: 45590 - DNA, 74 bp, Homo sapiens
agtaactgtgagcctagactttgccgggagtgcccgactggtgcagggacccacgggagatgctttagacgtca

SEQ ID NO: 45591 - DNA, 76 bp, Homo sapiens
agcctagactttgccgggagtgcccgactggtgcagggacccacgggagatgctttagacgtcatctctcaggatc

SEQ ID NO: 45592 - DNA, 75 bp, Homo sapiens
actttgccgggagtgcccgactggtgcagggacccacgggagatgctttagacgtcatctctcaggatcggccta

SEQ ID NO: 45593 - DNA, 75 bp, Homo sapiens
cccgactggtgcagggacccacgggagatgctttagacgtcatctctcaggatcggcctagtcttcacctctctt

SEQ ID NO: 45594 - DNA, 75 bp, Homo sapiens
tggtgcagggacccacgggagatgctttagacgtcatctctcaggatcggcctagtcttcacctctctttaaacc

SEQ ID NO: 45595 - DNA, 73 bp, Homo sapiens
acccacgggagatgctttagacgtcatctctcaggatcggcctagtcttcacctctctttaaacctggggtgc

SEQ ID NO: 45596 - DNA, 77 bp, Homo sapiens
agatgctttagacgtcatctctcaggatcggcctagtcttcacctctctttaaacctggggtgctgctgtcttccag

SEQ ID NO: 45597 - DNA, 76 bp, Homo sapiens
acgtcatctctcaggatcggcctagtcttcacctctctttaaacctggggtgctgctgtcttccaggtcagggata

SEQ ID NO: 45598 - DNA, 75 bp, Homo sapiens
acctctctttaaacctggggtgctgctgtcttccaggtcagggatagagcagtgatgggaggggctctgtcctcg

SEQ ID NO: 45599 - DNA, 75 bp, Homo sapiens
taaacctggggtgctgctgtcttccaggtcagggatagagcagtgatgggaggggctctgtcctcggcggggaaa

SEQ ID NO: 45600 - DNA, 76 bp, Homo sapiens
tgctgtcttccaggtcagggatagagcagtgatgggaggggctctgtcctcggcggggaaatgggtttatgtgtta

SEQ ID NO: 45601 - DNA, 74 bp, Homo sapiens
ttccaggtcagggatagagcagtgatgggaggggctctgtcctcggcggggaaatgggtttatgtgttaagatg

SEQ ID NO: 45602 - DNA, 75 bp, Homo sapiens
atagagcagtgatgggaggggctctgtcctcggcggggaaatgggtttatgtgttaagatgggaatcacgtcatc

SEQ ID NO: 45603 - DNA, 75 bp, Homo sapiens
ctctgtcctcggcggggaaatgggtttatgtgttaagatgggaatcacgtcatctgcacacagggctaactcctg

SEQ ID NO: 45604 - DNA, 74 bp, Homo sapiens
ggaaatgggtttatgtgttaagatgggaatcacgtcatctgcacacagggctaactcctgggtggtcagggaag

SEQ ID NO: 45605 - DNA, 74 bp, Homo sapiens
ggaatcacgtcatctgcacacagggctaactcctgggtggtcagggaagggaaccaccaaagtggacagaaata

SEQ ID NO: 45606 - DNA, 76 bp, Homo sapiens
tcatctgcacacagggctaactcctgggtggtcagggaagggaaccaccaaagtggacagaaatagcagctgcctt

SEQ ID NO: 45607 - DNA, 71 bp, Homo sapiens
acagggctaactcctgggtggtcagggaagggaaccaccaaagtggacagaaatagcagctgccttttgaa

SEQ ID NO: 45608 - DNA, 70 bp, Homo sapiens
taactcctgggtggtcagggaagggaaccaccaaagtggacagaaatagcagctgccttttgaaatcggg

SEQ ID NO: 45609 - DNA, 71 bp, Homo sapiens
tggtcagggaagggaaccaccaaagtggacagaaatagcagctgccttttgaaatcgggggatggggtgtg

SEQ ID NO: 45610 - DNA, 69 bp, Homo sapiens
aagggaaccaccaaagtggacagaaatagcagctgccttttgaaatcgggggatggggtgtggcccctc

SEQ ID NO: 45611 - DNA, 74 bp, Homo sapiens
aaagtggacagaaatagcagctgccttttgaaatcgggggatggggtgtggcccctcctgtctggtcagattca

SEQ ID NO: 45612 - DNA, 76 bp, Homo sapiens
agaaatagcagctgccttttgaaatcgggggatggggtgtggcccctcctgtctggtcagattcactctccagatc

SEQ ID NO: 45613 - DNA, 74 bp, Homo sapiens
tgccttttgaaatcgggggatggggtgtggcccctcctgtctggtcagattcactctccagatcctggggctgt

SEQ ID NO: 45614 - DNA, 74 bp, Homo sapiens
ttgaaatcgggggatggggtgtggcccctcctgtctggtcagattcactctccagatcctggggctgtttctcc

SEQ ID NO: 45615 - DNA, 78 bp, Homo sapiens
atggggtgtggcccctcctgtctggtcagattcactctccagatcctggggctgtttctccctgagcaactgtctgtc

SEQ ID NO: 45616 - DNA, 79 bp, Homo sapiens
ccctcctgtctggtcagattcactctccagatcctggggctgtttctccctgagcaactgtctgtcctgtccacgcagt

SEQ ID NO: 45617 - DNA, 81 bp, Homo sapiens
tgtctggtcagattcactctccagatcctggggctgtttctccctgagcaactgtctgtcctgtccacgcagttcggtgtc

SEQ ID NO: 45618 - DNA, 79 bp, Homo sapiens
agattcactctccagatcctggggctgtttctccctgagcaactgtctgtcctgtccacgcagttcggtgtcctggaca

SEQ ID NO: 45619 - DNA, 81 bp, Homo sapiens
atcctggggctgtttctccctgagcaactgtctgtcctgtccacgcagttcggtgtcctggacagtcagcagcagcgctaa

SEQ ID NO: 45620 - DNA, 84 bp, Homo sapiens
tgtttctccctgagcaactgtctgtcctgtccacgcagttcggtgtcctggacagtcagcagcagcgctaagaactatgccaga

SEQ ID NO: 45621 - DNA, 84 bp, Homo sapiens
ctgagcaactgtctgtcctgtccacgcagttcggtgtcctggacagtcagcagcagcgctaagaactatgccagaaactctcag

SEQ ID NO: 45622 - DNA, 83 bp, Homo sapiens
tgtccacgcagttcggtgtcctggacagtcagcagcagcgctaagaactatgccagaaactctcagggacacgcctgggcatg

SEQ ID NO: 45623 - DNA, 83 bp, Homo sapiens
ttcggtgtcctggacagtcagcagcagcgctaagaactatgccagaaactctcagggacacgcctgggcatgtccagatacaa

SEQ ID NO: 45624 - DNA, 79 bp, Homo sapiens
agcagcagcgctaagaactatgccagaaactctcagggacacgcctgggcatgtccagatacaacgtggggagggagga

SEQ ID NO: 45625 - DNA, 75 bp, Homo sapiens
cgctaagaactatgccagaaactctcagggacacgcctgggcatgtccagatacaacgtggggagggaggaggaa

SEQ ID NO: 45626 - DNA, 75 bp, Homo sapiens
tatgccagaaactctcagggacacgcctgggcatgtccagatacaacgtggggagggaggaggaaggtgctcccc

SEQ ID NO: 45627 - DNA, 75 bp, Homo sapiens
tcagggacacgcctgggcatgtccagatacaacgtggggagggaggaggaaggtgctccccctgcaaagtggcaa

SEQ ID NO: 45628 - DNA, 76 bp, Homo sapiens
atgtccagatacaacgtggggagggaggaggaaggtgctccccctgcaaagtggcaaagggccagtggcagcagca

SEQ ID NO: 45629 - DNA, 75 bp, Homo sapiens
atacaacgtggggagggaggaggaaggtgctccccctgcaaagtggcaaagggccagtggcagcagcagcacctg

SEQ ID NO: 45630 - DNA, 75 bp, Homo sapiens
agggaggaggaaggtgctccccctgcaaagtggcaaagggccagtggcagcagcagcacctggaacagcgtcggg

SEQ ID NO: 45631 - DNA, 79 bp, Homo sapiens
aaggtgctccccctgcaaagtggcaaagggccagtggcagcagcagcacctggaacagcgtcgggggcgcgcacattca

SEQ ID NO: 45632 - DNA, 81 bp, Homo sapiens
ctgcaaagtggcaaagggccagtggcagcagcagcacctggaacagcgtcgggggcgcgcacattcacagtgactttctgg

SEQ ID NO: 45633 - DNA, 78 bp, Homo sapiens
agtggcagcagcagcacctggaacagcgtcgggggcgcgcacattcacagtgactttctggggtgtcctggggctccc

SEQ ID NO: 45634 - DNA, 77 bp, Homo sapiens
agcagcacctggaacagcgtcgggggcgcgcacattcacagtgactttctggggtgtcctggggctccccagctctg

SEQ ID NO: 45635 - DNA, 74 bp, Homo sapiens
acctggaacagcgtcgggggcgcgcacattcacagtgactttctggggtgtcctggggctccccagctctggcc

SEQ ID NO: 45636 - DNA, 75 bp, Homo sapiens
tcgggggcgcgcacattcacagtgactttctggggtgtcctggggctccccagctctggccctgggctgagggaa

SEQ ID NO: 45637 - DNA, 74 bp, Homo sapiens
acattcacagtgactttctggggtgtcctggggctccccagctctggccctgggctgagggaaccccagactga

SEQ ID NO: 45638 - DNA, 73 bp, Homo sapiens
tgactttctggggtgtcctggggctccccagctctggccctgggctgagggaaccccagactgaaatatgaaa

SEQ ID NO: 45639 - DNA, 72 bp, Homo sapiens
gaaccccagactgaaatatgaaaggaagtggggagggcagggctatatttagtggacagagggagaccaaca

SEQ ID NO: 45640 - DNA, 70 bp, Homo sapiens
agactgaaatatgaaaggaagtggggagggcagggctatatttagtggacagagggagaccaacaacggg

SEQ ID NO: 45641 - DNA, 71 bp, Homo sapiens
atatgaaaggaagtggggagggcagggctatatttagtggacagagggagaccaacaacggggtgcttctg

SEQ ID NO: 45642 - DNA, 72 bp, Homo sapiens
gggagggcagggctatatttagtggacagagggagaccaacaacggggtgcttctggggatgctggggagag

SEQ ID NO: 45643 - DNA, 72 bp, Homo sapiens
agggctatatttagtggacagagggagaccaacaacggggtgcttctggggatgctggggagagtggacggc

SEQ ID NO: 45644 - DNA, 70 bp, Homo sapiens
tatttagtggacagagggagaccaacaacggggtgcttctggggatgctggggagagtggacggcggggg

SEQ ID NO: 45645 - DNA, 69 bp, Homo sapiens
acagagggagaccaacaacggggtgcttctggggatgctggggagagtggacggcggggggaccctagc

SEQ ID NO: 45646 - DNA, 69 bp, Homo sapiens
aacaacggggtgcttctggggatgctggggagagtggacggcggggggaccctagcctggagccctgac

SEQ ID NO: 45647 - DNA, 73 bp, Homo sapiens
cttctggggatgctggggagagtggacggcggggggaccctagcctggagccctgacccacaagctcactaca

SEQ ID NO: 45648 - DNA, 74 bp, Homo sapiens
atgctggggagagtggacggcggggggaccctagcctggagccctgacccacaagctcactacacaagtgcctg

SEQ ID NO: 45649 - DNA, 74 bp, Homo sapiens
agagtggacggcggggggaccctagcctggagccctgacccacaagctcactacacaagtgcctggagcacttc

SEQ ID NO: 45650 - DNA, 74 bp, Homo sapiens
acggcggggggaccctagcctggagccctgacccacaagctcactacacaagtgcctggagcacttccaggctc

SEQ ID NO: 45651 - DNA, 81 bp, Homo sapiens
ctagcctggagccctgacccacaagctcactacacaagtgcctggagcacttccaggctctgtgaggctctggggaatgga

SEQ ID NO: 45652 - DNA, 79 bp, Homo sapiens
agccctgacccacaagctcactacacaagtgcctggagcacttccaggctctgtgaggctctggggaatggacgaggcc

SEQ ID NO: 45653 - DNA, 79 bp, Homo sapiens
acccacaagctcactacacaagtgcctggagcacttccaggctctgtgaggctctggggaatggacgaggccctacagc

SEQ ID NO: 45654 - DNA, 78 bp, Homo sapiens
acttccaggctctgtgaggctctggggaatggacgaggccctacagccagcagtgtggcctcatgggctgggccggcc

SEQ ID NO: 45655 - DNA, 78 bp, Homo sapiens
tgtgaggctctggggaatggacgaggccctacagccagcagtgtggcctcatgggctgggccggccccctgagtcctg

SEQ ID NO: 45656 - DNA, 77 bp, Homo sapiens
tctggggaatggacgaggccctacagccagcagtgtggcctcatgggctgggccggccccctgagtcctggccctca

SEQ ID NO: 45657 - DNA, 77 bp, Homo sapiens
atggacgaggccctacagccagcagtgtggcctcatgggctgggccggccccctgagtcctggccctcagatgccgg

SEQ ID NO: 45658 - DNA, 77 bp, Homo sapiens
agtgtggcctcatgggctgggccggccccctgagtcctggccctcagatgccgggtgagtcatcctggtgtggtgcc

SEQ ID NO: 45659 - DNA, 79 bp, Homo sapiens
tcatgggctgggccggccccctgagtcctggccctcagatgccgggtgagtcatcctggtgtggtgccgagcagctccc

SEQ ID NO: 45660 - DNA, 80 bp, Homo sapiens
tgggccggccccctgagtcctggccctcagatgccgggtgagtcatcctggtgtggtgccgagcagctccctgtgctgcg

SEQ ID NO: 45661 - DNA, 82 bp, Homo sapiens
agtcctggccctcagatgccgggtgagtcatcctggtgtggtgccgagcagctccctgtgctgcggctggcctgggcttgtg

SEQ ID NO: 45662 - DNA, 86 bp, Homo sapiens
ctcagatgccgggtgagtcatcctggtgtggtgccgagcagctccctgtgctgcggctggcctgggcttgtgtagtctctgcagga

SEQ ID NO: 45663 - DNA, 85 bp, Homo sapiens
atgccgggtgagtcatcctggtgtggtgccgagcagctccctgtgctgcggctggcctgggcttgtgtagtctctgcaggatgcc

SEQ ID NO: 45664 - DNA, 85 bp, Homo sapiens
agtcatcctggtgtggtgccgagcagctccctgtgctgcggctggcctgggcttgtgtagtctctgcaggatgccccatcccatc

SEQ ID NO: 45665 - DNA, 82 bp, Homo sapiens
agcagctccctgtgctgcggctggcctgggcttgtgtagtctctgcaggatgccccatcccatccagaaccacaggaaccca

SEQ ID NO: 45666 - DNA, 85 bp, Homo sapiens
ctgtgctgcggctggcctgggcttgtgtagtctctgcaggatgccccatcccatccagaaccacaggaacccagccagcagcagc

SEQ ID NO: 45667 - DNA, 83 bp, Homo sapiens
cctgggcttgtgtagtctctgcaggatgccccatcccatccagaaccacaggaacccagccagcagcagccgcttgcagaaga

SEQ ID NO: 45668 - DNA, 87 bp, Homo sapiens
cttgtgtagtctctgcaggatgccccatcccatccagaaccacaggaacccagccagcagcagccgcttgcagaagagcagacatga

SEQ ID NO: 45669 - DNA, 85 bp, Homo sapiens
tgcaggatgccccatcccatccagaaccacaggaacccagccagcagcagccgcttgcagaagagcagacatgaccgaaaataga

SEQ ID NO: 45670 - DNA, 80 bp, Homo sapiens
cccatcccatccagaaccacaggaacccagccagcagcagccgcttgcagaagagcagacatgaccgaaaatagaaggtg

SEQ ID NO: 45671 - DNA, 79 bp, Homo sapiens
atccagaaccacaggaacccagccagcagcagccgcttgcagaagagcagacatgaccgaaaatagaaggtggggagag

SEQ ID NO: 45672 - DNA, 80 bp, Homo sapiens
ccacaggaacccagccagcagcagccgcttgcagaagagcagacatgaccgaaaatagaaggtggggagaggagagagga

SEQ ID NO: 45673 - DNA, 81 bp, Homo sapiens
agccagcagcagccgcttgcagaagagcagacatgaccgaaaatagaaggtggggagaggagagaggagagaggcctcacc

SEQ ID NO: 45674 - DNA, 76 bp, Homo sapiens
agccgcttgcagaagagcagacatgaccgaaaatagaaggtggggagaggagagaggagagaggcctcaccccagg

SEQ ID NO: 45675 - DNA, 74 bp, Homo sapiens
cagaagagcagacatgaccgaaaatagaaggtggggagaggagagaggagagaggcctcaccccagggccttac

SEQ ID NO: 45676 - DNA, 74 bp, Homo sapiens
aatagaaggtggggagaggagagaggagagaggcctcaccccagggccttaccttggcaggtcctgccatcaga

SEQ ID NO: 45677 - DNA, 77 bp, Homo sapiens
ggagaggagagaggagagaggcctcaccccagggccttaccttggcaggtcctgccatcagaggagagctcgaagcc

SEQ ID NO: 45678 - DNA, 78 bp, Homo sapiens
agaggagagaggcctcaccccagggccttaccttggcaggtcctgccatcagaggagagctcgaagccgctgtggcag

SEQ ID NO: 45679 - DNA, 78 bp, Homo sapiens
gcctcaccccagggccttaccttggcaggtcctgccatcagaggagagctcgaagccgctgtggcaggaacagtggaa

SEQ ID NO: 45680 - DNA, 76 bp, Homo sapiens
agggccttaccttggcaggtcctgccatcagaggagagctcgaagccgctgtggcaggaacagtggaagctacccg

SEQ ID NO: 45681 - DNA, 78 bp, Homo sapiens
ttaccttggcaggtcctgccatcagaggagagctcgaagccgctgtggcaggaacagtggaagctacccggcttgttg

SEQ ID NO: 45682 - DNA, 81 bp, Homo sapiens
aggtcctgccatcagaggagagctcgaagccgctgtggcaggaacagtggaagctacccggcttgttgtggcagatctgga

SEQ ID NO: 45683 - DNA, 80 bp, Homo sapiens
atcagaggagagctcgaagccgctgtggcaggaacagtggaagctacccggcttgttgtggcagatctggaggcagcccc

SEQ ID NO: 45684 - DNA, 77 bp, Homo sapiens
agctcgaagccgctgtggcaggaacagtggaagctacccggcttgttgtggcagatctggaggcagcccccgttctc

SEQ ID NO: 45685 - DNA, 78 bp, Homo sapiens
tgtggcaggaacagtggaagctacccggcttgttgtggcagatctggaggcagcccccgttctcctggctgcattcgt

SEQ ID NO: 45686 - DNA, 77 bp, Homo sapiens
aagctacccggcttgttgtggcagatctggaggcagcccccgttctcctggctgcattcgttgacatctgggaacaa

SEQ ID NO: 45687 - DNA, 80 bp, Homo sapiens
cttgttgtggcagatctggaggcagcccccgttctcctggctgcattcgttgacatctgggaacaagcacaggcctgaag

SEQ ID NO: 45688 - DNA, 75 bp, Homo sapiens
cattcgttgacatctgggaacaagcacaggcctgaaggggagcccaagggtgcacagcccctggctacggtagga

SEQ ID NO: 45689 - DNA, 76 bp, Homo sapiens
ttgacatctgggaacaagcacaggcctgaaggggagcccaagggtgcacagcccctggctacggtaggaagagatc

SEQ ID NO: 45690 - DNA, 75 bp, Homo sapiens
acaggcctgaaggggagcccaagggtgcacagcccctggctacggtaggaagagatcccagaggtgcacagccca

SEQ ID NO: 45691 - DNA, 76 bp, Homo sapiens
agcccaagggtgcacagcccctggctacggtaggaagagatcccagaggtgcacagcccagccctggagcagggag

SEQ ID NO: 45692 - DNA, 76 bp, Homo sapiens
aagggtgcacagcccctggctacggtaggaagagatcccagaggtgcacagcccagccctggagcagggagggagc

SEQ ID NO: 45693 - DNA, 78 bp, Homo sapiens
ccctggctacggtaggaagagatcccagaggtgcacagcccagccctggagcagggagggagcccagaggtgcacagc

SEQ ID NO: 45694 - DNA, 83 bp, Homo sapiens
agagatcccagaggtgcacagcccagccctggagcagggagggagcccagaggtgcacagcccagccctggagcagagagaga

SEQ ID NO: 45695 - DNA, 84 bp, Homo sapiens
tgcacagcccagccctggagcagggagggagcccagaggtgcacagcccagccctggagcagagagagatcccaaaggtgcaca

SEQ ID NO: 45696 - DNA, 81 bp, Homo sapiens
ggagcagggagggagcccagaggtgcacagcccagccctggagcagagagagatcccaaaggtgcacagcccagccctgga

SEQ ID NO: 45697 - DNA, 80 bp, Homo sapiens
agggagggagcccagaggtgcacagcccagccctggagcagagagagatcccaaaggtgcacagcccagccctggagcag

SEQ ID NO: 45698 - DNA, 80 bp, Homo sapiens
agaggtgcacagcccagccctggagcagagagagatcccaaaggtgcacagcccagccctggagcagggagggagaccag

SEQ ID NO: 45699 - DNA, 78 bp, Homo sapiens
agcccagccctggagcagagagagatcccaaaggtgcacagcccagccctggagcagggagggagaccaggggtcaca

SEQ ID NO: 45700 - DNA, 78 bp, Homo sapiens
ctggagcagagagagatcccaaaggtgcacagcccagccctggagcagggagggagaccaggggtcacagcctagccc

SEQ ID NO: 45701 - DNA, 76 bp, Homo sapiens
agagagatcccaaaggtgcacagcccagccctggagcagggagggagaccaggggtcacagcctagccccggagca

SEQ ID NO: 45702 - DNA, 73 bp, Homo sapiens
aaaggtgcacagcccagccctggagcagggagggagaccaggggtcacagcctagccccggagcaggaggaag

SEQ ID NO: 45703 - DNA, 71 bp, Homo sapiens
acagcccagccctggagcagggagggagaccaggggtcacagcctagccccggagcaggaggaagggaccc

SEQ ID NO: 45704 - DNA, 70 bp, Homo sapiens
ggagggagaccaggggtcacagcctagccccggagcaggaggaagggaccccgggggtgcacagcccagc

SEQ ID NO: 45705 - DNA, 71 bp, Homo sapiens
gggtcacagcctagccccggagcaggaggaagggaccccgggggtgcacagcccagccctggagcagggag

SEQ ID NO: 45706 - DNA, 70 bp, Homo sapiens
agcctagccccggagcaggaggaagggaccccgggggtgcacagcccagccctggagcagggagggagcc

SEQ ID NO: 45707 - DNA, 72 bp, Homo sapiens
caggaggaagggaccccgggggtgcacagcccagccctggagcagggagggagcccaggggtgcacagccca

SEQ ID NO: 45708 - DNA, 71 bp, Homo sapiens
ggaagggaccccgggggtgcacagcccagccctggagcagggagggagcccaggggtgcacagcccagccc

SEQ ID NO: 45709 - DNA, 74 bp, Homo sapiens
ccgggggtgcacagcccagccctggagcagggagggagcccaggggtgcacagcccagccccggagcaggagga

SEQ ID NO: 45710 - DNA, 75 bp, Homo sapiens
ggtgcacagcccagccctggagcagggagggagcccaggggtgcacagcccagccccggagcaggaggaggggac

SEQ ID NO: 45711 - DNA, 72 bp, Homo sapiens
acagcccagccctggagcagggagggagcccaggggtgcacagcccagccccggagcaggaggaggggaccc

SEQ ID NO: 45712 - DNA, 69 bp, Homo sapiens
agccctggagcagggagggagcccaggggtgcacagcccagccccggagcaggaggaggggaccccggg

SEQ ID NO: 45713 - DNA, 71 bp, Homo sapiens
agcccaggggtgcacagcccagccccggagcaggaggaggggaccccgggggtgcacagcccagccctgga

SEQ ID NO: 45714 - DNA, 72 bp, Homo sapiens
gggtgcacagcccagccccggagcaggaggaggggaccccgggggtgcacagcccagccctggagcagggag

SEQ ID NO: 45715 - DNA, 73 bp, Homo sapiens
gtgcacagcccagccccggagcaggaggaggggaccccgggggtgcacagcccagccctggagcagggaggga

SEQ ID NO: 45716 - DNA, 69 bp, Homo sapiens
aggaggaggggaccccgggggtgcacagcccagccctggagcagggagggagcccgggggtgcacagcc

SEQ ID NO: 45717 - DNA, 73 bp, Homo sapiens
gggtgcacagcccagccctggagcagggagggagcccgggggtgcacagcccagccccggagcaggaggaagg

SEQ ID NO: 45718 - DNA, 68 bp, Homo sapiens
agccctggagcagggagggagcccgggggtgcacagcccagccccggagcaggaggaagggaccccgg

SEQ ID NO: 45719 - DNA, 73 bp, Homo sapiens
gtgcacagcccagccccggagcaggaggaagggaccccgggggtgcacagcccagccctggagcagggaggga

SEQ ID NO: 45720 - DNA, 68 bp, Homo sapiens
agccccggagcaggaggaagggaccccgggggtgcacagcccagccctggagcagggagggagcccgg

SEQ ID NO: 45721 - DNA, 69 bp, Homo sapiens
aggaggaagggaccccgggggtgcacagcccagccctggagcagggagggagcccgggggtgcacagcc

SEQ ID NO: 45722 - DNA, 69 bp, Homo sapiens
agggaccccgggggtgcacagcccagccctggagcagggagggagcccgggggtgcacagcccagcccc

SEQ ID NO: 45723 - DNA, 75 bp, Homo sapiens
tgcacagcccagccctggagcagggagggagcccgggggtgcacagcccagccccgcagcaggaggaagggaccc

SEQ ID NO: 45724 - DNA, 69 bp, Homo sapiens
agccctggagcagggagggagcccgggggtgcacagcccagccccgcagcaggaggaagggaccccggg

SEQ ID NO: 45725 - DNA, 69 bp, Homo sapiens
agggagggagcccgggggtgcacagcccagccccgcagcaggaggaagggaccccgggggtgcacagcc

SEQ ID NO: 45726 - DNA, 71 bp, Homo sapiens
agcccgggggtgcacagcccagccccgcagcaggaggaagggaccccgggggtgcacagcccagccctgga

SEQ ID NO: 45727 - DNA, 74 bp, Homo sapiens
ggtgcacagcccagccccgcagcaggaggaagggaccccgggggtgcacagcccagccctggagcagggaggga

SEQ ID NO: 45728 - DNA, 69 bp, Homo sapiens
agccccgcagcaggaggaagggaccccgggggtgcacagcccagccctggagcagggagggagcccggg

SEQ ID NO: 45729 - DNA, 69 bp, Homo sapiens; identical to SEQ ID NO: 45721

SEQ ID NO: 45730 - DNA, 71 bp, Homo sapiens
aagggaccccgggggtgcacagcccagccctggagcagggagggagcccgggggtgcacagcccagcactg

SEQ ID NO: 45731 - DNA, 76 bp, Homo sapiens
gtgcacagcccagccctggagcagggagggagcccgggggtgcacagcccagcactggagcagggaaggagccggg

SEQ ID NO: 45732 - DNA, 72 bp, Homo sapiens
agcccagccctggagcagggagggagcccgggggtgcacagcccagcactggagcagggaaggagccggggg

SEQ ID NO: 45733 - DNA, 75 bp, Homo sapiens
agcagggagggagcccgggggtgcacagcccagcactggagcagggaaggagccgggggggtgcacagcccagca

SEQ ID NO: 45734 - DNA, 77 bp, Homo sapiens
ggtgcacagcccagcactggagcagggaaggagccgggggggtgcacagcccagcactggagcaggaggaagggacc

SEQ ID NO: 45735 - DNA, 76 bp, Homo sapiens
agcactggagcagggaaggagccgggggggtgcacagcccagcactggagcaggaggaagggaccgcgggtgtgca

SEQ ID NO: 45736 - DNA, 75 bp, Homo sapiens
aggagccgggggggtgcacagcccagcactggagcaggaggaagggaccgcgggtgtgcacagcccagccctgga

SEQ ID NO: 45737 - DNA, 81 bp, Homo sapiens
gtgcacagcccagcactggagcaggaggaagggaccgcgggtgtgcacagcccagccctggagcagggagagagcctggga

SEQ ID NO: 45738 - DNA, 80 bp, Homo sapiens
agcactggagcaggaggaagggaccgcgggtgtgcacagcccagccctggagcagggagagagcctgggagtgcacagcc

SEQ ID NO: 45739 - DNA, 82 bp, Homo sapiens
gaccgcgggtgtgcacagcccagccctggagcagggagagagcctgggagtgcacagcccagcccccgagcagagagagatc

SEQ ID NO: 45740 - DNA, 86 bp, Homo sapiens
tgtgcacagcccagccctggagcagggagagagcctgggagtgcacagcccagcccccgagcagagagagatcctagaggtgcaca

SEQ ID NO: 45741 - DNA, 82 bp, Homo sapiens
cccagccctggagcagggagagagcctgggagtgcacagcccagcccccgagcagagagagatcctagaggtgcacagccca

SEQ ID NO: 45742 - DNA, 84 bp, Homo sapiens
agcagggagagagcctgggagtgcacagcccagcccccgagcagagagagatcctagaggtgcacagcccagccctggagcaga

SEQ ID NO: 45743 - DNA, 83 bp, Homo sapiens
agagagcctgggagtgcacagcccagcccccgagcagagagagatcctagaggtgcacagcccagccctggagcagagaggga

SEQ ID NO: 45744 - DNA, 81 bp, Homo sapiens
tgcacagcccagcccccgagcagagagagatcctagaggtgcacagcccagccctggagcagagagggaccccagggcttg

SEQ ID NO: 45745 - DNA, 78 bp, Homo sapiens
agcccccgagcagagagagatcctagaggtgcacagcccagccctggagcagagagggaccccagggcttggacctca

SEQ ID NO: 45746 - DNA, 78 bp, Homo sapiens
ccgagcagagagagatcctagaggtgcacagcccagccctggagcagagagggaccccagggcttggacctcacaccc

SEQ ID NO: 45747 - DNA, 79 bp, Homo sapiens
agagatcctagaggtgcacagcccagccctggagcagagagggaccccagggcttggacctcacaccccactcagcagc

SEQ ID NO: 45748 - DNA, 79 bp, Homo sapiens
tgcacagcccagccctggagcagagagggaccccagggcttggacctcacaccccactcagcagccctagcgtttcatg

SEQ ID NO: 45749 - DNA, 75 bp, Homo sapiens
cccagggcttggacctcacaccccactcagcagccctagcgtttcatggcccctggtcctggccttgcgtgtgga

SEQ ID NO: 45750 - DNA, 76 bp, Homo sapiens
ttggacctcacaccccactcagcagccctagcgtttcatggcccctggtcctggccttgcgtgtggaggtagatgg

SEQ ID NO: 45751 - DNA, 74 bp, Homo sapiens
acaccccactcagcagccctagcgtttcatggcccctggtcctggccttgcgtgtggaggtagatggtgggagg

SEQ ID NO: 45752 - DNA, 75 bp, Homo sapiens
agcagccctagcgtttcatggcccctggtcctggccttgcgtgtggaggtagatggtgggagggcatgggggatc

SEQ ID NO: 45753 - DNA, 74 bp, Homo sapiens
ctagcgtttcatggcccctggtcctggccttgcgtgtggaggtagatggtgggagggcatgggggatccccagc

SEQ ID NO: 45754 - DNA, 78 bp, Homo sapiens
gtcctggccttgcgtgtggaggtagatggtgggagggcatgggggatccccagctgcggtctcagcctggggagctgc

SEQ ID NO: 45755 - DNA, 82 bp, Homo sapiens
tgtggaggtagatggtgggagggcatgggggatccccagctgcggtctcagcctggggagctgctggcagtcacagcccaca

SEQ ID NO: 45756 - DNA, 83 bp, Homo sapiens
agggcatgggggatccccagctgcggtctcagcctggggagctgctggcagtcacagcccacagggctcagctccctggatgc

SEQ ID NO: 45757 - DNA, 87 bp, Homo sapiens
atccccagctgcggtctcagcctggggagctgctggcagtcacagcccacagggctcagctccctggatgcccatgtgcttgcagga

SEQ ID NO: 45758 - DNA, 87 bp, Homo sapiens
agctgcggtctcagcctggggagctgctggcagtcacagcccacagggctcagctccctggatgcccatgtgcttgcaggaggaggc

SEQ ID NO: 45759 - DNA, 89 bp, Homo sapiens
tcagcctggggagctgctggcagtcacagcccacagggctcagctccctggatgcccatgtgcttgcaggaggaggctgcaggccagga

SEQ ID NO: 45760 - DNA, 88 bp, Homo sapiens
agctgctggcagtcacagcccacagggctcagctccctggatgcccatgtgcttgcaggaggaggctgcaggccaggagtgacctctg

SEQ ID NO: 45761 - DNA, 84 bp, Homo sapiens
agtcacagcccacagggctcagctccctggatgcccatgtgcttgcaggaggaggctgcaggccaggagtgacctctgggtgcc

SEQ ID NO: 45762 - DNA, 83 bp, Homo sapiens
agggctcagctccctggatgcccatgtgcttgcaggaggaggctgcaggccaggagtgacctctgggtgccgaggacagacaa

SEQ ID NO: 45763 - DNA, 84 bp, Homo sapiens
tcagctccctggatgcccatgtgcttgcaggaggaggctgcaggccaggagtgacctctgggtgccgaggacagacaaggccag

SEQ ID NO: 45764 - DNA, 81 bp, Homo sapiens
ttgcaggaggaggctgcaggccaggagtgacctctgggtgccgaggacagacaaggccaggccagagctggccactcctta

SEQ ID NO: 45765 - DNA, 73 bp, Homo sapiens
acaaggccaggccagagctggccactccttagcaaagccctcccaggccacctgtggggtaggatttgccaaa

SEQ ID NO: 45766 - DNA, 74 bp, Homo sapiens
ttagcaaagccctcccaggccacctgtggggtaggatttgccaaaggggacaggctggcctgctgggctctcca

SEQ ID NO: 45767 - DNA, 73 bp, Homo sapiens
acctgtggggtaggatttgccaaaggggacaggctggcctgctgggctctccactatgggtctccaccaggcc

SEQ ID NO: 45768 - DNA, 76 bp, Homo sapiens
taggatttgccaaaggggacaggctggcctgctgggctctccactatgggtctccaccaggccctggagctattct

SEQ ID NO: 45769 - DNA, 74 bp, Homo sapiens
aaaggggacaggctggcctgctgggctctccactatgggtctccaccaggccctggagctattcttcctccagg

SEQ ID NO: 45770 - DNA, 78 bp, Homo sapiens
aggctggcctgctgggctctccactatgggtctccaccaggccctggagctattcttcctccagggtcttcactgaca

SEQ ID NO: 45771 - DNA, 77 bp, Homo sapiens
tgggctctccactatgggtctccaccaggccctggagctattcttcctccagggtcttcactgacaccacaggtcta

SEQ ID NO: 45772 - DNA, 75 bp, Homo sapiens
actatgggtctccaccaggccctggagctattcttcctccagggtcttcactgacaccacaggtctacactgaag

SEQ ID NO: 45773 - DNA, 76 bp, Homo sapiens
tccaccaggccctggagctattcttcctccagggtcttcactgacaccacaggtctacactgaaggacggtcagag

SEQ ID NO: 45774 - DNA, 76 bp, Homo sapiens
cctggagctattcttcctccagggtcttcactgacaccacaggtctacactgaaggacggtcagaggtgaaatctc

SEQ ID NO: 45775 - DNA, 74 bp, Homo sapiens
agctattcttcctccagggtcttcactgacaccacaggtctacactgaaggacggtcagaggtgaaatctcccc

SEQ ID NO: 45776 - DNA, 71 bp, Homo sapiens
agggtcttcactgacaccacaggtctacactgaaggacggtcagaggtgaaatctccccccggcctttcaa

SEQ ID NO: 45777 - DNA, 77 bp, Homo sapiens
tcagaggtgaaatctccccccggcctttcaatcagtgggtgccactgacaccacaggtctgcactcaaggacggtca

SEQ ID NO: 45778 - DNA, 75 bp, Homo sapiens
aaatctccccccggcctttcaatcagtgggtgccactgacaccacaggtctgcactcaaggacggtcagaggtga

SEQ ID NO: 45779 - DNA, 74 bp, Homo sapiens
cccggcctttcaatcagtgggtgccactgacaccacaggtctgcactcaaggacggtcagaggtgaaatttccc

SEQ ID NO: 45780 - DNA, 72 bp, Homo sapiens
aatcagtgggtgccactgacaccacaggtctgcactcaaggacggtcagaggtgaaatttcccccccgcctt

SEQ ID NO: 45781 - DNA, 74 bp, Homo sapiens
tgccactgacaccacaggtctgcactcaaggacggtcagaggtgaaatttcccccccgcctttcaatcagtggg

SEQ ID NO: 45782 - DNA, 73 bp, Homo sapiens
accacaggtctgcactcaaggacggtcagaggtgaaatttcccccccgcctttcaatcagtgggtgccactga

SEQ ID NO: 45783 - DNA, 73 bp, Homo sapiens
acggtcagaggtgaaatttcccccccgcctttcaatcagtgggtgccactgacaccacaggtctgcactcaag

SEQ ID NO: 45784 - DNA, 73 bp, Homo sapiens
aggtgaaatttcccccccgcctttcaatcagtgggtgccactgacaccacaggtctgcactcaaggacggtca

SEQ ID NO: 45785 - DNA, 74 bp, Homo sapiens
ccccccgcctttcaatcagtgggtgccactgacaccacaggtctgcactcaaggacggtcagaggtgaaatttc

SEQ ID NO: 45786 - DNA, 74 bp, Homo sapiens
cgcctttcaatcagtgggtgccactgacaccacaggtctgcactcaaggacggtcagaggtgaaatttcccccc

SEQ ID NO: 45787 - DNA, 74 bp, Homo sapiens
tgggtgccactgacaccacaggtctgcactcaaggacggtcagaggtgaaatttccccccccgcccttcaatca

SEQ ID NO: 45788 - DNA, 71 bp, Homo sapiens
actgacaccacaggtctgcactcaaggacggtcagaggtgaaatttccccccccgcccttcaatcagtggg

SEQ ID NO: 45789 - DNA, 75 bp, Homo sapiens
acaggtctgcactcaaggacggtcagaggtgaaatttccccccccgcccttcaatcagtgggtgctgaggcatca

SEQ ID NO: 45790 - DNA, 70 bp, Homo sapiens
aaggacggtcagaggtgaaatttccccccccgcccttcaatcagtgggtgctgaggcatcacttggtgtt

SEQ ID NO: 45791 - DNA, 69 bp, Homo sapiens
agaggtgaaatttccccccccgcccttcaatcagtgggtgctgaggcatcacttggtgtttcctttcct

SEQ ID NO: 45792 - DNA, 69 bp, Homo sapiens
aaatttccccccccgcccttcaatcagtgggtgctgaggcatcacttggtgtttcctttccttccagcc

SEQ ID NO: 45793 - DNA, 74 bp, Homo sapiens
tttcctttccttccagccctgctcccagaaaggagactgcagctcctcccaattctcctggggctccaggatac

SEQ ID NO: 45794 - DNA, 79 bp, Homo sapiens
tccttccagccctgctcccagaaaggagactgcagctcctcccaattctcctggggctccaggatacctcagggctgca

SEQ ID NO: 45795 - DNA, 78 bp, Homo sapiens
cctgctcccagaaaggagactgcagctcctcccaattctcctggggctccaggatacctcagggctgcagcctccttg

SEQ ID NO: 45796 - DNA, 76 bp, Homo sapiens
aaaggagactgcagctcctcccaattctcctggggctccaggatacctcagggctgcagcctccttggggctgtcg

SEQ ID NO: 45797 - DNA, 79 bp, Homo sapiens
aattctcctggggctccaggatacctcagggctgcagcctccttggggctgtcggagagcagcctgaggatggccgtgc

SEQ ID NO: 45798 - DNA, 79 bp, Homo sapiens
gctccaggatacctcagggctgcagcctccttggggctgtcggagagcagcctgaggatggccgtgccccggagtggga

SEQ ID NO: 45799 - DNA, 78 bp, Homo sapiens
aggatacctcagggctgcagcctccttggggctgtcggagagcagcctgaggatggccgtgccccggagtgggagtga

SEQ ID NO: 45800 - DNA, 76 bp, Homo sapiens
agggctgcagcctccttggggctgtcggagagcagcctgaggatggccgtgccccggagtgggagtgaggagcggg

SEQ ID NO: 45801 - DNA, 76 bp, Homo sapiens
ctccttggggctgtcggagagcagcctgaggatggccgtgccccggagtgggagtgaggagcggggatcagggcag

SEQ ID NO: 45802 - DNA, 78 bp, Homo sapiens
tgtcggagagcagcctgaggatggccgtgccccggagtgggagtgaggagcggggatcagggcagggtcggagatgga

SEQ ID NO: 45803 - DNA, 76 bp, Homo sapiens
agcagcctgaggatggccgtgccccggagtgggagtgaggagcggggatcagggcagggtcggagatggagggaga

SEQ ID NO: 45804 - DNA, 70 bp, Homo sapiens
gccgtgccccggagtgggagtgaggagcggggatcagggcagggtcggagatggagggagaccccgcctt

SEQ ID NO: 45805 - DNA, 71 bp, Homo sapiens
cccggagtgggagtgaggagcggggatcagggcagggtcggagatggagggagaccccgcctttgtcttca

SEQ ID NO: 45806 - DNA, 72 bp, Homo sapiens
tgaggagcggggatcagggcagggtcggagatggagggagaccccgcctttgtcttcagcctcacgtacctt

SEQ ID NO: 45807 - DNA, 72 bp, Homo sapiens
agggcagggtcggagatggagggagaccccgcctttgtcttcagcctcacgtacctttgtcgcagagccggc

SEQ ID NO: 45808 - DNA, 71 bp, Homo sapiens
agaccccgcctttgtcttcagcctcacgtacctttgtcgcagagccggcccccccagccagctttacacag

SEQ ID NO: 45809 - DNA, 73 bp, Homo sapiens
ctttgtcttcagcctcacgtacctttgtcgcagagccggcccccccagccagctttacacaggcagaagaagt

SEQ ID NO: 45810 - DNA, 74 bp, Homo sapiens
agcctcacgtacctttgtcgcagagccggcccccccagccagctttacacaggcagaagaagttgcccatgagg

SEQ ID NO: 45811 - DNA, 75 bp, Homo sapiens
gtacctttgtcgcagagccggcccccccagccagctttacacaggcagaagaagttgcccatgaggtcctggcag

SEQ ID NO: 45812 - DNA, 73 bp, Homo sapiens
agagccggcccccccagccagctttacacaggcagaagaagttgcccatgaggtcctggcaggcttgggtccc

SEQ ID NO: 45813 - DNA, 75 bp, Homo sapiens
cccagccagctttacacaggcagaagaagttgcccatgaggtcctggcaggcttgggtccccttcctatcgcagg

SEQ ID NO: 45814 - DNA, 75 bp, Homo sapiens
cagaagaagttgcccatgaggtcctggcaggcttgggtccccttcctatcgcaggggttgggcgtgcactggtca

SEQ ID NO: 45815 - DNA, 74 bp, Homo sapiens
aagttgcccatgaggtcctggcaggcttgggtccccttcctatcgcaggggttgggcgtgcactggtcaggcag

SEQ ID NO: 45816 - DNA, 75 bp, Homo sapiens
atgaggtcctggcaggcttgggtccccttcctatcgcaggggttgggcgtgcactggtcaggcaggtctgattgg

SEQ ID NO: 45817 - DNA, 72 bp, Homo sapiens
aggcttgggtccccttcctatcgcaggggttgggcgtgcactggtcaggcaggtctgattggggacacaaag

SEQ ID NO: 45818 - DNA, 76 bp, Homo sapiens
ccttcctatcgcaggggttgggcgtgcactggtcaggcaggtctgattggggacacaaagtggaaaatcatgttca

SEQ ID NO: 45819 - DNA, 78 bp, Homo sapiens
ctatcgcaggggttgggcgtgcactggtcaggcaggtctgattggggacacaaagtggaaaatcatgttcagctgccc

SEQ ID NO: 45820 - DNA, 77 bp, Homo sapiens
ggttgggcgtgcactggtcaggcaggtctgattggggacacaaagtggaaaatcatgttcagctgccccacccctgc

SEQ ID NO: 45821 - DNA, 79 bp, Homo sapiens
ggtcaggcaggtctgattggggacacaaagtggaaaatcatgttcagctgccccacccctgcgcgcccaacgcagctga

SEQ ID NO: 45822 - DNA, 77 bp, Homo sapiens
aggtctgattggggacacaaagtggaaaatcatgttcagctgccccacccctgcgcgcccaacgcagctgagatcgg

SEQ ID NO: 45823 - DNA, 77 bp, Homo sapiens
gggacacaaagtggaaaatcatgttcagctgccccacccctgcgcgcccaacgcagctgagatcggggcggctgtgg

SEQ ID NO: 45824 - DNA, 76 bp, Homo sapiens
aaagtggaaaatcatgttcagctgccccacccctgcgcgcccaacgcagctgagatcggggcggctgtggggtctc

SEQ ID NO: 45825 - DNA, 73 bp, Homo sapiens
ccccacccctgcgcgcccaacgcagctgagatcggggcggctgtggggtctcgggtccagcccggaggagctc

SEQ ID NO: 45826 - DNA, 74 bp, Homo sapiens
cccctgcgcgcccaacgcagctgagatcggggcggctgtggggtctcgggtccagcccggaggagctctgaggg

SEQ ID NO: 45827 - DNA, 78 bp, Homo sapiens
ccaacgcagctgagatcggggcggctgtggggtctcgggtccagcccggaggagctctgaggggcgcaggctgaggca

SEQ ID NO: 45828 - DNA, 76 bp, Homo sapiens
ctgagatcggggcggctgtggggtctcgggtccagcccggaggagctctgaggggcgcaggctgaggcagcccctg

SEQ ID NO: 45829 - DNA, 74 bp, Homo sapiens
ctgtggggtctcgggtccagcccggaggagctctgaggggcgcaggctgaggcagcccctgggcacccgagccc

SEQ ID NO: 45830 - DNA, 77 bp, Homo sapiens
ggtctcgggtccagcccggaggagctctgaggggcgcaggctgaggcagcccctgggcacccgagccctctgtgctg

SEQ ID NO: 45831 - DNA, 79 bp, Homo sapiens
agcccggaggagctctgaggggcgcaggctgaggcagcccctgggcacccgagccctctgtgctggcctagggctgaca

SEQ ID NO: 45832 - DNA, 80 bp, Homo sapiens
aggagctctgaggggcgcaggctgaggcagcccctgggcacccgagccctctgtgctggcctagggctgacagaataggc

SEQ ID NO: 45833 - DNA, 74 bp, Homo sapiens
aggcagcccctgggcacccgagccctctgtgctggcctagggctgacagaataggctggcgggccctggggccg

SEQ ID NO: 45834 - DNA, 76 bp, Homo sapiens
tgtgctggcctagggctgacagaataggctggcgggccctggggccggctccaggaaaactcagatcaactgggag

SEQ ID NO: 45835 - DNA, 75 bp, Homo sapiens
tagggctgacagaataggctggcgggccctggggccggctccaggaaaactcagatcaactgggagggagtgcca

SEQ ID NO: 45836 - DNA, 74 bp, Homo sapiens
agaataggctggcgggccctggggccggctccaggaaaactcagatcaactgggagggagtgccagcaggcctg

SEQ ID NO: 45837 - DNA, 74 bp, Homo sapiens
ggccctggggccggctccaggaaaactcagatcaactgggagggagtgccagcaggcctggacgcaaggtggga

SEQ ID NO: 45838 - DNA, 75 bp, Homo sapiens
gggccggctccaggaaaactcagatcaactgggagggagtgccagcaggcctggacgcaaggtgggaagggctga

SEQ ID NO: 45839 - DNA, 74 bp, Homo sapiens
aggaaaactcagatcaactgggagggagtgccagcaggcctggacgcaaggtgggaagggctgagggcaaagga

SEQ ID NO: 45840 - DNA, 78 bp, Homo sapiens
ctcagatcaactgggagggagtgccagcaggcctggacgcaaggtgggaagggctgagggcaaaggagcaggaactgc

SEQ ID NO: 45841 - DNA, 77 bp, Homo sapiens
tgggagggagtgccagcaggcctggacgcaaggtgggaagggctgagggcaaaggagcaggaactgcctggcgtgag

SEQ ID NO: 45842 - DNA, 77 bp, Homo sapiens
tgggaagggctgagggcaaaggagcaggaactgcctggcgtgaggcctgggagctcagacctcccagggagtaggca

SEQ ID NO: 45843 - DNA, 77 bp, Homo sapiens
tgagggcaaaggagcaggaactgcctggcgtgaggcctgggagctcagacctcccagggagtaggcacacagaaccc

SEQ ID NO: 45844 - DNA, 75 bp, Homo sapiens
aaaggagcaggaactgcctggcgtgaggcctgggagctcagacctcccagggagtaggcacacagaacccccagc

SEQ ID NO: 45845 - DNA, 75 bp, Homo sapiens
ggaactgcctggcgtgaggcctgggagctcagacctcccagggagtaggcacacagaacccccagctgacctggg

SEQ ID NO: 45846 - DNA, 74 bp, Homo sapiens
ggcgtgaggcctgggagctcagacctcccagggagtaggcacacagaacccccagctgacctgggggcttccag

SEQ ID NO: 45847 - DNA, 74 bp, Homo sapiens
gggagtaggcacacagaacccccagctgacctgggggcttccaggcagactcggaacattctgccttccctggc

SEQ ID NO: 45848 - DNA, 73 bp, Homo sapiens
acacagaacccccagctgacctgggggcttccaggcagactcggaacattctgccttccctggccagccccta

SEQ ID NO: 45849 - DNA, 76 bp, Homo sapiens
agctgacctgggggcttccaggcagactcggaacattctgccttccctggccagcccctagcccatctctggtgaa

SEQ ID NO: 45850 - DNA, 77 bp, Homo sapiens
ggcttccaggcagactcggaacattctgccttccctggccagcccctagcccatctctggtgaactctccctgctgg

SEQ ID NO: 45851 - DNA, 77 bp, Homo sapiens
ccaggcagactcggaacattctgccttccctggccagcccctagcccatctctggtgaactctccctgctgggtgtg

SEQ ID NO: 45852 - DNA, 74 bp, Homo sapiens
aacattctgccttccctggccagcccctagcccatctctggtgaactctccctgctgggtgtggcggggaggac

SEQ ID NO: 45853 - DNA, 73 bp, Homo sapiens
ttccctggccagcccctagcccatctctggtgaactctccctgctgggtgtggcggggaggaccccaggccca

SEQ ID NO: 45854 - DNA, 76 bp, Homo sapiens
tggccagcccctagcccatctctggtgaactctccctgctgggtgtggcggggaggaccccaggcccaggctgcac

SEQ ID NO: 45855 - DNA, 76 bp, Homo sapiens
ctagcccatctctggtgaactctccctgctgggtgtggcggggaggaccccaggcccaggctgcactgccagaggg

SEQ ID NO: 45856 - DNA, 74 bp, Homo sapiens
gtgaactctccctgctgggtgtggcggggaggaccccaggcccaggctgcactgccagaggggtcctccaggaa

SEQ ID NO: 45857 - DNA, 73 bp, Homo sapiens
tctccctgctgggtgtggcggggaggaccccaggcccaggctgcactgccagaggggtcctccaggaagcccc

SEQ ID NO: 45858 - DNA, 72 bp, Homo sapiens
tggcggggaggaccccaggcccaggctgcactgccagaggggtcctccaggaagcccccctctttctgctta

SEQ ID NO: 45859 - DNA, 73 bp, Homo sapiens
ggaggaccccaggcccaggctgcactgccagaggggtcctccaggaagcccccctctttctgcttagctgccc

SEQ ID NO: 45860 - DNA, 74 bp, Homo sapiens
ccaggctgcactgccagaggggtcctccaggaagcccccctctttctgcttagctgccccctctccacgtgtct

SEQ ID NO: 45861 - DNA, 73 bp, Homo sapiens
actgccagaggggtcctccaggaagcccccctctttctgcttagctgccccctctccacgtgtcttgatggct

SEQ ID NO: 45862 - DNA, 72 bp, Homo sapiens
ggtcctccaggaagcccccctctttctgcttagctgccccctctccacgtgtcttgatggctttaggccagg

SEQ ID NO: 45863 - DNA, 76 bp, Homo sapiens
tctttctgcttagctgccccctctccacgtgtcttgatggctttaggccaggtgtgttctgccctttctcagggtg

SEQ ID NO: 45864 - DNA, 77 bp, Homo sapiens
atggctttaggccaggtgtgttctgccctttctcagggtggtcacctgggctcagctcctgcagggccagaggtcag

SEQ ID NO: 45865 - DNA, 76 bp, Homo sapiens
tctgccctttctcagggtggtcacctgggctcagctcctgcagggccagaggtcaggggaacgggtgagggcctga

SEQ ID NO: 45866 - DNA, 74 bp, Homo sapiens
ttctcagggtggtcacctgggctcagctcctgcagggccagaggtcaggggaacgggtgagggcctgagggtgg

SEQ ID NO: 45867 - DNA, 72 bp, Homo sapiens
acctgggctcagctcctgcagggccagaggtcaggggaacgggtgagggcctgagggtgggaacccgtgcca

SEQ ID NO: 45868 - DNA, 75 bp, Homo sapiens
agctcctgcagggccagaggtcaggggaacgggtgagggcctgagggtgggaacccgtgccagtgcagctgcttc

SEQ ID NO: 45869 - DNA, 78 bp, Homo sapiens
ggtgagggcctgagggtgggaacccgtgccagtgcagctgcttcccaagcagtcccccatccgagaagctgctcacaa

SEQ ID NO: 45870 - DNA, 83 bp, Homo sapiens
aacccgtgccagtgcagctgcttcccaagcagtcccccatccgagaagctgctcacaaacacattcatacgaggagctgctca

SEQ ID NO: 45871 - DNA, 80 bp, Homo sapiens
cttcccaagcagtcccccatccgagaagctgctcacaaacacattcatacgaggagctgctcacaaacacgcttccagga

SEQ ID NO: 45872 - DNA, 80 bp, Homo sapiens
aagcagtcccccatccgagaagctgctcacaaacacattcatacgaggagctgctcacaaacacgcttccaggacacgga

SEQ ID NO: 45873 - DNA, 78 bp, Homo sapiens
atccgagaagctgctcacaaacacattcatacgaggagctgctcacaaacacgcttccaggacacggacccaaaccac

SEQ ID NO: 45874 - DNA, 77 bp, Homo sapiens
aagctgctcacaaacacattcatacgaggagctgctcacaaacacgcttccaggacacggacccaaaccacgtccca

SEQ ID NO: 45875 - DNA, 76 bp, Homo sapiens
aaacacattcatacgaggagctgctcacaaacacgcttccaggacacggacccaaaccacgtcccagaggcaggca

SEQ ID NO: 45876 - DNA, 74 bp, Homo sapiens
atacgaggagctgctcacaaacacgcttccaggacacggacccaaaccacgtcccagaggcaggcagggaagcc

SEQ ID NO: 45877 - DNA, 73 bp, Homo sapiens
ctcacaaacacgcttccaggacacggacccaaaccacgtcccagaggcaggcagggaagcccccgacagtgca

SEQ ID NO: 45878 - DNA, 71 bp, Homo sapiens
aacacgcttccaggacacggacccaaaccacgtcccagaggcaggcagggaagcccccgacagtgcagtta

SEQ ID NO: 45879 - DNA, 73 bp, Homo sapiens
aggacacggacccaaaccacgtcccagaggcaggcagggaagcccccgacagtgcagttacgcaagcctgagc

SEQ ID NO: 45880 - DNA, 70 bp, Homo sapiens
aaaccacgtcccagaggcaggcagggaagcccccgacagtgcagttacgcaagcctgagccccgggaagt

SEQ ID NO: 45881 - DNA, 74 bp, Homo sapiens
cagaggcaggcagggaagcccccgacagtgcagttacgcaagcctgagccccgggaagttggcagaaagaacga

SEQ ID NO: 45882 - DNA, 72 bp, Homo sapiens
cagggaagcccccgacagtgcagttacgcaagcctgagccccgggaagttggcagaaagaacgacaattaca

SEQ ID NO: 45883 - DNA, 73 bp, Homo sapiens
cccgacagtgcagttacgcaagcctgagccccgggaagttggcagaaagaacgacaattacacccggagctca

SEQ ID NO: 45884 - DNA, 72 bp, Homo sapiens
agtgcagttacgcaagcctgagccccgggaagttggcagaaagaacgacaattacacccggagctcaaagaa

SEQ ID NO: 45885 - DNA, 71 bp, Homo sapiens
acgcaagcctgagccccgggaagttggcagaaagaacgacaattacacccggagctcaaagaatcctttca

SEQ ID NO: 45886 - DNA, 76 bp, Homo sapiens
ccgggaagttggcagaaagaacgacaattacacccggagctcaaagaatcctttcatggctgctggcagagcagaa

SEQ ID NO: 45887 - DNA, 84 bp, Homo sapiens
aattacacccggagctcaaagaatcctttcatggctgctggcagagcagaagcagctcggggctgagcatggcagtgctcaggg

SEQ ID NO: 45888 - DNA, 90 bp, Homo sapiens
tcaaagaatcctttcatggctgctggcagagcagaagcagctcggggctgagcatggcagtgctcaggggcgcggtccacactcagctca

SEQ ID NO: 45889 - DNA, 88 bp, Homo sapiens
aatcctttcatggctgctggcagagcagaagcagctcggggctgagcatggcagtgctcaggggcgcggtccacactcagctcagccc

SEQ ID NO: 45890 - DNA, 92 bp, Homo sapiens
tgctggcagagcagaagcagctcggggctgagcatggcagtgctcaggggcgcggtccacactcagctcagccccacatgaggactcagcca

SEQ ID NO: 45891 - DNA, 89 bp, Homo sapiens
agcagaagcagctcggggctgagcatggcagtgctcaggggcgcggtccacactcagctcagccccacatgaggactcagccacgctca

SEQ ID NO: 45892 - DNA, 87 bp, Homo sapiens
agcatggcagtgctcaggggcgcggtccacactcagctcagccccacatgaggactcagccacgctcagcttagccacacagggctc

SEQ ID NO: 45893 - DNA, 79 bp, Homo sapiens
cgcggtccacactcagctcagccccacatgaggactcagccacgctcagcttagccacacagggctccgtggggaaccc

SEQ ID NO: 45894 - DNA, 75 bp, Homo sapiens
ctcagccccacatgaggactcagccacgctcagcttagccacacagggctccgtggggaaccctgggtagggccc

SEQ ID NO: 45895 - DNA, 74 bp, Homo sapiens
acatgaggactcagccacgctcagcttagccacacagggctccgtggggaaccctgggtagggcccccctgctg

SEQ ID NO: 45896 - DNA, 75 bp, Homo sapiens
tcagccacgctcagcttagccacacagggctccgtggggaaccctgggtagggcccccctgctggctgagagagg

SEQ ID NO: 45897 - DNA, 71 bp, Homo sapiens
ttagccacacagggctccgtggggaaccctgggtagggcccccctgctggctgagagagggctccggtcca

SEQ ID NO: 45898 - DNA, 70 bp, Homo sapiens
agggctccgtggggaaccctgggtagggcccccctgctggctgagagagggctccggtccattgattcca

SEQ ID NO: 45899 - DNA, 72 bp, Homo sapiens
tggggaaccctgggtagggcccccctgctggctgagagagggctccggtccattgattccacacaagttcaa

SEQ ID NO: 45900 - DNA, 74 bp, Homo sapiens
tgggtagggcccccctgctggctgagagagggctccggtccattgattccacacaagttcaataaggaccagtc

SEQ ID NO: 45901 - DNA, 73 bp, Homo sapiens
cccctgctggctgagagagggctccggtccattgattccacacaagttcaataaggaccagtccctgggaaaa

SEQ ID NO: 45902 - DNA, 71 bp, Homo sapiens
agagggctccggtccattgattccacacaagttcaataaggaccagtccctgggaaaagtgcaggccgggc

SEQ ID NO: 45903 - DNA, 74 bp, Homo sapiens
ttcaataaggaccagtccctgggaaaagtgcaggccgggccagcagggccctagggcactgggccagcatcgtc

SEQ ID NO: 45904 - DNA, 71 bp, Homo sapiens
accagtccctgggaaaagtgcaggccgggccagcagggccctagggcactgggccagcatcgtcctaaggg

SEQ ID NO: 45905 - DNA, 72 bp, Homo sapiens
ccgggccagcagggccctagggcactgggccagcatcgtcctaaggggtcagccctggtgggggcacgtcga

SEQ ID NO: 45906 - DNA, 74 bp, Homo sapiens
agggccctagggcactgggccagcatcgtcctaaggggtcagccctggtgggggcacgtcgagtcttcagtgca

SEQ ID NO: 45907 - DNA, 78 bp, Homo sapiens
tagggcactgggccagcatcgtcctaaggggtcagccctggtgggggcacgtcgagtcttcagtgcatgggctctcac

SEQ ID NO: 45908 - DNA, 80 bp, Homo sapiens
cagcatcgtcctaaggggtcagccctggtgggggcacgtcgagtcttcagtgcatgggctctcactgccagcgtgtcgct

SEQ ID NO: 45909 - DNA, 79 bp, Homo sapiens
tcctaaggggtcagccctggtgggggcacgtcgagtcttcagtgcatgggctctcactgccagcgtgtcgcttctgttc

SEQ ID NO: 45910 - DNA, 80 bp, Homo sapiens
agccctggtgggggcacgtcgagtcttcagtgcatgggctctcactgccagcgtgtcgcttctgttcctgaggctcccaa

SEQ ID NO: 45911 - DNA, 79 bp, Homo sapiens
ggggcacgtcgagtcttcagtgcatgggctctcactgccagcgtgtcgcttctgttcctgaggctcccaaggtgacgtt

SEQ ID NO: 45912 - DNA, 79 bp, Homo sapiens
acgtcgagtcttcagtgcatgggctctcactgccagcgtgtcgcttctgttcctgaggctcccaaggtgacgtttccca

SEQ ID NO: 45913 - DNA, 80 bp, Homo sapiens
ttcagtgcatgggctctcactgccagcgtgtcgcttctgttcctgaggctcccaaggtgacgtttcccaccaggtctgta

SEQ ID NO: 45914 - DNA, 77 bp, Homo sapiens
tctcactgccagcgtgtcgcttctgttcctgaggctcccaaggtgacgtttcccaccaggtctgtagaatgtggcgt

SEQ ID NO: 45915 - DNA, 73 bp, Homo sapiens
agcgtgtcgcttctgttcctgaggctcccaaggtgacgtttcccaccaggtctgtagaatgtggcgtttccac

SEQ ID NO: 45916 - DNA, 72 bp, Homo sapiens
ttctgttcctgaggctcccaaggtgacgtttcccaccaggtctgtagaatgtggcgtttccaccagagggtc

SEQ ID NO: 45917 - DNA, 72 bp, Homo sapiens
ctgaggctcccaaggtgacgtttcccaccaggtctgtagaatgtggcgtttccaccagagggtctgggctcg

SEQ ID NO: 45918 - DNA, 74 bp, Homo sapiens
aaggtgacgtttcccaccaggtctgtagaatgtggcgtttccaccagagggtctgggctcggctgtcagtgcag

SEQ ID NO: 45919 - DNA, 76 bp, Homo sapiens
aggtctgtagaatgtggcgtttccaccagagggtctgggctcggctgtcagtgcaggagccgcttccatccccacc

SEQ ID NO: 45920 - DNA, 74 bp, Homo sapiens
aatgtggcgtttccaccagagggtctgggctcggctgtcagtgcaggagccgcttccatccccacctggccggg

SEQ ID NO: 45921 - DNA, 73 bp, Homo sapiens
tttccaccagagggtctgggctcggctgtcagtgcaggagccgcttccatccccacctggccggggtcagggg

SEQ ID NO: 45922 - DNA, 74 bp, Homo sapiens
ctcggctgtcagtgcaggagccgcttccatccccacctggccggggtcaggggtgcccggtgccagggtgagcg

SEQ ID NO: 45923 - DNA, 70 bp, Homo sapiens
ttccatccccacctggccggggtcaggggtgcccggtgccagggtgagcggcgggcgggtctgtggttca

SEQ ID NO: 45924 - DNA, 70 bp, Homo sapiens
acctggccggggtcaggggtgcccggtgccagggtgagcggcgggcgggtctgtggttcacaaagctgag

SEQ ID NO: 45925 - DNA, 75 bp, Homo sapiens
ggtcaggggtgcccggtgccagggtgagcggcgggcgggtctgtggttcacaaagctgagttcctccagctcatc

SEQ ID NO: 45926 - DNA, 75 bp, Homo sapiens
cccggtgccagggtgagcggcgggcgggtctgtggttcacaaagctgagttcctccagctcatccagggcttaca

SEQ ID NO: 45927 - DNA, 79 bp, Homo sapiens
cgggcgggtctgtggttcacaaagctgagttcctccagctcatccagggcttacagtcactgcctgtggccggcacaga

SEQ ID NO: 45928 - DNA, 81 bp, Homo sapiens
gggtctgtggttcacaaagctgagttcctccagctcatccagggcttacagtcactgcctgtggccggcacagacacagcc

SEQ ID NO: 45929 - DNA, 79 bp, Homo sapiens
ttcctccagctcatccagggcttacagtcactgcctgtggccggcacagacacagcccctgtcctcctaggcgggtcca

SEQ ID NO: 45930 - DNA, 78 bp, Homo sapiens
agctcatccagggcttacagtcactgcctgtggccggcacagacacagcccctgtcctcctaggcgggtccaggcacc

SEQ ID NO: 45931 - DNA, 78 bp, Homo sapiens
cttacagtcactgcctgtggccggcacagacacagcccctgtcctcctaggcgggtccaggcaccgcgctcaccagag

SEQ ID NO: 45932 - DNA, 78 bp, Homo sapiens
gtcactgcctgtggccggcacagacacagcccctgtcctcctaggcgggtccaggcaccgcgctcaccagaggccctg

SEQ ID NO: 45933 - DNA, 73 bp, Homo sapiens
acagcccctgtcctcctaggcgggtccaggcaccgcgctcaccagaggccctggctacgagtcccaggcttct

SEQ ID NO: 45934 - DNA, 72 bp, Homo sapiens
ccctgtcctcctaggcgggtccaggcaccgcgctcaccagaggccctggctacgagtcccaggcttcttggg

SEQ ID NO: 45935 - DNA, 74 bp, Homo sapiens
ctaggcgggtccaggcaccgcgctcaccagaggccctggctacgagtcccaggcttcttggggaagctgcccaa

SEQ ID NO: 45936 - DNA, 74 bp, Homo sapiens
caccgcgctcaccagaggccctggctacgagtcccaggcttcttggggaagctgcccaaccacactggcttctt

SEQ ID NO: 45937 - DNA, 75 bp, Homo sapiens
ctcaccagaggccctggctacgagtcccaggcttcttggggaagctgcccaaccacactggcttctttctgcgac

SEQ ID NO: 45938 - DNA, 78 bp, Homo sapiens
gctgcccaaccacactggcttctttctgcgacgcttcgccgtatgcctcacagcgtttcctccgtatgcctcacagtt

SEQ ID NO: 45939 - DNA, 79 bp, Homo sapiens
cacactggcttctttctgcgacgcttcgccgtatgcctcacagcgtttcctccgtatgcctcacagtttgctccgtaca

SEQ ID NO: 45940 - DNA, 73 bp, Homo sapiens
acgcttcgccgtatgcctcacagcgtttcctccgtatgcctcacagtttgctccgtacacccgcgtttcctcc

SEQ ID NO: 45941 - DNA, 73 bp, Homo sapiens
ccgtatgcctcacagcgtttcctccgtatgcctcacagtttgctccgtacacccgcgtttcctccgtatgccc

SEQ ID NO: 45942 - DNA, 72 bp, Homo sapiens
ctcacagcgtttcctccgtatgcctcacagtttgctccgtacacccgcgtttcctccgtatgccccagtttc

SEQ ID NO: 45943 - DNA, 73 bp, Homo sapiens
tttcctccgtatgcctcacagtttgctccgtacacccgcgtttcctccgtatgccccagtttcctccatatgc

SEQ ID NO: 45944 - DNA, 73 bp, Homo sapiens
atgcctcacagtttgctccgtacacccgcgtttcctccgtatgccccagtttcctccatatgcctcaatttcc

SEQ ID NO: 45945 - DNA, 72 bp, Homo sapiens
gtttgctccgtacacccgcgtttcctccgtatgccccagtttcctccatatgcctcaatttcctccatacgc

SEQ ID NO: 45946 - DNA, 71 bp, Homo sapiens
tacacccgcgtttcctccgtatgccccagtttcctccatatgcctcaatttcctccatacgccccacagtt

SEQ ID NO: 45947 - DNA, 72 bp, Homo sapiens
gtttcctccatatgcctcaatttcctccatacgccccacagtttcctccgtatgccccagtttcctccatac

SEQ ID NO: 45948 - DNA, 69 bp, Homo sapiens
tgcctcaatttcctccatacgccccacagtttcctccgtatgccccagtttcctccatacgccccggtt

SEQ ID NO: 45949 - DNA, 66 bp, Homo sapiens
aatttcctccatacgccccacagtttcctccgtatgccccagtttcctccatacgccccggtttcc

SEQ ID NO: 45950 - DNA, 67 bp, Homo sapiens
atacgccccacagtttcctccgtatgccccagtttcctccatacgccccggtttcctccatacaccc

SEQ ID NO: 45951 - DNA, 67 bp, Homo sapiens
acagtttcctccgtatgccccagtttcctccatacgccccggtttcctccatacaccccacagtttc

SEQ ID NO: 45952 - DNA, 68 bp, Homo sapiens
ccgtatgccccagtttcctccatacgccccggtttcctccatacaccccacagtttcctccatacgcc

SEQ ID NO: 45953 - DNA, 67 bp, Homo sapiens
agtttcctccatacgccccggtttcctccatacaccccacagtttcctccatacgccccacagtttc

SEQ ID NO: 45954 - DNA, 70 bp, Homo sapiens
ccccacagtttcctccatatgcctcaatttcctccatacgccccccagtttcttccatacaccccacagt

SEQ ID NO: 45955 - DNA, 72 bp, Homo sapiens
tttcctccatatgcctcaatttcctccatacgccccccagtttcttccatacaccccacagtttcctccata

SEQ ID NO: 45956 - DNA, 71 bp, Homo sapiens
atgcctcaatttcctccatacgccccccagtttcttccatacaccccacagtttcctccatatgcccagtt

SEQ ID NO: 45957 - DNA, 69 bp, Homo sapiens
aatttcctccatacgccccccagtttcttccatacaccccacagtttcctccatatgcccagtttcctc

SEQ ID NO: 45958 - DNA, 71 bp, Homo sapiens
caccccacagtttcctccatatgcctcaatttcctccatacgccccccagtttcttccatacaccccacag

SEQ ID NO: 45959 - DNA, 72 bp, Homo sapiens; identical to SEQ ID NO: 45955

SEQ ID NO: 45960 - DNA, 71 bp, Homo sapiens
atgcctcaatttcctccatacgccccccagtttcttccatacaccccacagtttcctccatacgcctcaat

SEQ ID NO: 45961 - DNA, 68 bp, Homo sapiens
aatttcctccatacgccccccagtttcttccatacaccccacagtttcctccatacgcctcaattttc

SEQ ID NO: 45962 - DNA, 69 bp, Homo sapiens
atacgccccccagtttcttccatacaccccacagtttcctccatacgcctcaattttctctgtacgccc

SEQ ID NO: 45963 - DNA, 72 bp, Homo sapiens
tttcttccatacaccccacagtttcctccatacgcctcaattttctctgtacgccccacagtttcctccata

SEQ ID NO: 45964 - DNA, 69 bp, Homo sapiens
ctcagtttcctccatacgccccagtttcctccatacgcctcaatttcctttgtacgccccagtttcctc

SEQ ID NO: 45965 - DNA, 70 bp, Homo sapiens
ttcctccatacgccccagtttcctccatacgcctcaatttcctttgtacgccccagtttcctccatacgc

SEQ ID NO: 45966 - DNA, 68 bp, Homo sapiens
ccagtttcctccatacgcctcaatttcctttgtacgccccagtttcctccatacgccccagtttcctc

SEQ ID NO: 45967 - DNA, 70 bp, Homo sapiens
ttcctccatacgcctcaatttcctttgtacgccccagtttcctccatacgccccagtttcctccatacgc

SEQ ID NO: 45968 - DNA, 73 bp, Homo sapiens
agtttcctccatacgccccagtttcctccatacgcctcaatttcctctgtatgcttcagtttcctccatacac

SEQ ID NO: 45969 - DNA, 73 bp, Homo sapiens
atacgccccagtttcctccatacgcctcaatttcctctgtatgcttcagtttcctccatacacctcagtttcc

SEQ ID NO: 45970 - DNA, 77 bp, Homo sapiens
tttcctccatacgcctcaatttcctctgtatgcttcagtttcctccatacacctcagtttcctccgtctgcctcaca

SEQ ID NO: 45971 - DNA, 75 bp, Homo sapiens
atacgcctcaatttcctctgtatgcttcagtttcctccatacacctcagtttcctccgtctgcctcacagtttcc

SEQ ID NO: 45972 - DNA, 75 bp, Homo sapiens
aatttcctctgtatgcttcagtttcctccatacacctcagtttcctccgtctgcctcacagtttcctctataagc

SEQ ID NO: 45973 - DNA, 76 bp, Homo sapiens
ctgtatgcttcagtttcctccatacacctcagtttcctccgtctgcctcacagtttcctctataagcctcagtttc

SEQ ID NO: 45974 - DNA, 71 bp, Homo sapiens
agtttcctcagtacaccccacagtttcctccctacacctccgtttgcttgttttgcacaaatgactgacaa

SEQ ID NO: 45975 - DNA, 71 bp, Homo sapiens
agtacaccccacagtttcctccctacacctccgtttgcttgttttgcacaaatgactgacaacagaacact

SEQ ID NO: 45976 - DNA, 73 bp, Homo sapiens
tacaccccacagtttcctccctacacctccgtttgcttgttttgcacaaatgactgacaacagaacacttgtg

SEQ ID NO: 45977 - DNA, 73 bp, Homo sapiens
acagtttcctccctacacctccgtttgcttgttttgcacaaatgactgacaacagaacacttgtgggtgtgga

SEQ ID NO: 45978 - DNA, 72 bp, Homo sapiens
agtttcctccctacacctccgtttgcttgttttgcacaaatgactgacaacagaacacttgtgggtgtggac

SEQ ID NO: 45979 - DNA, 75 bp, Homo sapiens
cgtttgcttgttttgcacaaatgactgacaacagaacacttgtgggtgtggacggagctcgcgtctcgaagtgtt

SEQ ID NO: 45980 - DNA, 77 bp, Homo sapiens
ttgcttgttttgcacaaatgactgacaacagaacacttgtgggtgtggacggagctcgcgtctcgaagtgtttctaa

SEQ ID NO: 45981 - DNA, 78 bp, Homo sapiens
ttttgcacaaatgactgacaacagaacacttgtgggtgtggacggagctcgcgtctcgaagtgtttctaagatgctat

SEQ ID NO: 45982 - DNA, 77 bp, Homo sapiens
acaaatgactgacaacagaacacttgtgggtgtggacggagctcgcgtctcgaagtgtttctaagatgctattttca

SEQ ID NO: 45983 - DNA, 76 bp, Homo sapiens
agaacacttgtgggtgtggacggagctcgcgtctcgaagtgtttctaagatgctattttcagcaggtcactataaa

SEQ ID NO: 45984 - DNA, 78 bp, Homo sapiens
gtgtggacggagctcgcgtctcgaagtgtttctaagatgctattttcagcaggtcactataaacgctttctactctga

SEQ ID NO: 45985 - DNA, 78 bp, Homo sapiens
acggagctcgcgtctcgaagtgtttctaagatgctattttcagcaggtcactataaacgctttctactctgaagcaca

SEQ ID NO: 45986 - DNA, 77 bp, Homo sapiens
cgtctcgaagtgtttctaagatgctattttcagcaggtcactataaacgctttctactctgaagcacacaggggctg

SEQ ID NO: 45987 - DNA, 77 bp, Homo sapiens
tgtttctaagatgctattttcagcaggtcactataaacgctttctactctgaagcacacaggggctggggctggcct

SEQ ID NO: 45988 - DNA, 76 bp, Homo sapiens
atgctattttcagcaggtcactataaacgctttctactctgaagcacacaggggctggggctggccttcggagtta

SEQ ID NO: 45989 - DNA, 71 bp, Homo sapiens
aggtcactataaacgctttctactctgaagcacacaggggctggggctggccttcggagttacgaggaaac

SEQ ID NO: 45990 - DNA, 71 bp, Homo sapiens
actataaacgctttctactctgaagcacacaggggctggggctggccttcggagttacgaggaaacgagga

SEQ ID NO: 45991 - DNA, 71 bp, Homo sapiens
ctttctactctgaagcacacaggggctggggctggccttcggagttacgaggaaacgaggaccaggaccag

SEQ ID NO: 45992 - DNA, 75 bp, Homo sapiens
aagcacacaggggctggggctggccttcggagttacgaggaaacgaggaccaggaccagggattctgcatcagca

SEQ ID NO: 45993 - DNA, 76 bp, Homo sapiens
ctggggctggccttcggagttacgaggaaacgaggaccaggaccagggattctgcatcagcacagccgccaggagc

SEQ ID NO: 45994 - DNA, 75 bp, Homo sapiens
ctggccttcggagttacgaggaaacgaggaccaggaccagggattctgcatcagcacagccgccaggagccggcc

SEQ ID NO: 45995 - DNA, 73 bp, Homo sapiens
ggagttacgaggaaacgaggaccaggaccagggattctgcatcagcacagccgccaggagccggccggggccc

SEQ ID NO: 45996 - DNA, 76 bp, Homo sapiens
aaacgaggaccaggaccagggattctgcatcagcacagccgccaggagccggccggggccccatccctgacactgc

SEQ ID NO: 45997 - DNA, 79 bp, Homo sapiens
gaccagggattctgcatcagcacagccgccaggagccggccggggccccatccctgacactgctgtcgcccggctgtac

SEQ ID NO: 45998 - DNA, 79 bp, Homo sapiens
attctgcatcagcacagccgccaggagccggccggggccccatccctgacactgctgtcgcccggctgtacctgggtgc

SEQ ID NO: 45999 - DNA, 78 bp, Homo sapiens
atcagcacagccgccaggagccggccggggccccatccctgacactgctgtcgcccggctgtacctgggtgctgtgtc

SEQ ID NO: 46000 - DNA, 73 bp, Homo sapiens
cgccaggagccggccggggccccatccctgacactgctgtcgcccggctgtacctgggtgctgtgtccgcggg

SEQ ID NO: 46001 - DNA, 80 bp, Homo sapiens
atccctgacactgctgtcgcccggctgtacctgggtgctgtgtccgcggggcgtctggagacgtcgatgtggtcatagca

SEQ ID NO: 46002 - DNA, 78 bp, Homo sapiens
acactgctgtcgcccggctgtacctgggtgctgtgtccgcggggcgtctggagacgtcgatgtggtcatagcagggcc

SEQ ID NO: 46003 - DNA, 76 bp, Homo sapiens
tcgcccggctgtacctgggtgctgtgtccgcggggcgtctggagacgtcgatgtggtcatagcagggcctggaacg

SEQ ID NO: 46004 - DNA, 75 bp, Homo sapiens
tacctgggtgctgtgtccgcggggcgtctggagacgtcgatgtggtcatagcagggcctggaacggggaggtctg

SEQ ID NO: 46005 - DNA, 76 bp, Homo sapiens
tgtgtccgcggggcgtctggagacgtcgatgtggtcatagcagggcctggaacggggaggtctggcctgaactaga

SEQ ID NO: 46006 - DNA, 74 bp, Homo sapiens
agacgtcgatgtggtcatagcagggcctggaacggggaggtctggcctgaactagagaaatgaggggcgtatcc

SEQ ID NO: 46007 - DNA, 75 bp, Homo sapiens
atgtggtcatagcagggcctggaacggggaggtctggcctgaactagagaaatgaggggcgtatccgcttctcca

SEQ ID NO: 46008 - DNA, 70 bp, Homo sapiens
agggcctggaacggggaggtctggcctgaactagagaaatgaggggcgtatccgcttctccaccctggcc

SEQ ID NO: 46009 - DNA, 73 bp, Homo sapiens
aacggggaggtctggcctgaactagagaaatgaggggcgtatccgcttctccaccctggcctcagatgaagag

SEQ ID NO: 46010 - DNA, 74 bp, Homo sapiens
aactagagaaatgaggggcgtatccgcttctccaccctggcctcagatgaagaggctctgggggcaggagggag

SEQ ID NO: 46011 - DNA, 78 bp, Homo sapiens
aatgaggggcgtatccgcttctccaccctggcctcagatgaagaggctctgggggcaggagggagtcagacacgtgca

SEQ ID NO: 46012 - DNA, 79 bp, Homo sapiens
gtatccgcttctccaccctggcctcagatgaagaggctctgggggcaggagggagtcagacacgtgcagggcaggcggc

SEQ ID NO: 46013 - DNA, 79 bp, Homo sapiens
ccctggcctcagatgaagaggctctgggggcaggagggagtcagacacgtgcagggcaggcggcctgtgcagggcccaa

SEQ ID NO: 46014 - DNA, 78 bp, Homo sapiens
tcagatgaagaggctctgggggcaggagggagtcagacacgtgcagggcaggcggcctgtgcagggcccaaccctccg

SEQ ID NO: 46015 - DNA, 76 bp, Homo sapiens
gctctgggggcaggagggagtcagacacgtgcagggcaggcggcctgtgcagggcccaaccctccggcaccagaac

SEQ ID NO: 46016 - DNA, 75 bp, Homo sapiens
caggagggagtcagacacgtgcagggcaggcggcctgtgcagggcccaaccctccggcaccagaacctgacctcc

SEQ ID NO: 46017 - DNA, 76 bp, Homo sapiens
gggagtcagacacgtgcagggcaggcggcctgtgcagggcccaaccctccggcaccagaacctgacctcctcagag

SEQ ID NO: 46018 - DNA, 76 bp, Homo sapiens
tgcagggcaggcggcctgtgcagggcccaaccctccggcaccagaacctgacctcctcagaggcccccaccatgga

SEQ ID NO: 46019 - DNA, 73 bp, Homo sapiens
cggcctgtgcagggcccaaccctccggcaccagaacctgacctcctcagaggcccccaccatggagggatgtc

SEQ ID NO: 46020 - DNA, 73 bp, Homo sapiens
tgtgcagggcccaaccctccggcaccagaacctgacctcctcagaggcccccaccatggagggatgtctgggg

SEQ ID NO: 46021 - DNA, 77 bp, Homo sapiens
accagaacctgacctcctcagaggcccccaccatggagggatgtctgggggatgctgtgcgctgccgctacgatgtt

SEQ ID NO: 46022 - DNA, 78 bp, Homo sapiens
cctcctcagaggcccccaccatggagggatgtctgggggatgctgtgcgctgccgctacgatgtttggttagagatta

SEQ ID NO: 46023 - DNA, 76 bp, Homo sapiens
aggcccccaccatggagggatgtctgggggatgctgtgcgctgccgctacgatgtttggttagagattaaagccat

SEQ ID NO: 46024 - DNA, 78 bp, Homo sapiens
accatggagggatgtctgggggatgctgtgcgctgccgctacgatgtttggttagagattaaagccatttcagaagtg

SEQ ID NO: 46025 - DNA, 79 bp, Homo sapiens
atgtctgggggatgctgtgcgctgccgctacgatgtttggttagagattaaagccatttcagaagtggacacctgccca

SEQ ID NO: 46026 - DNA, 81 bp, Homo sapiens
atgctgtgcgctgccgctacgatgtttggttagagattaaagccatttcagaagtggacacctgcccatgtgatgcaaagg

SEQ ID NO: 46027 - DNA, 75 bp, Homo sapiens
ctacgatgtttggttagagattaaagccatttcagaagtggacacctgcccatgtgatgcaaagggctgggaacc

SEQ ID NO: 46028 - DNA, 74 bp, Homo sapiens
ttagagattaaagccatttcagaagtggacacctgcccatgtgatgcaaagggctgggaacccggtcttgactt

SEQ ID NO: 46029 - DNA, 75 bp, Homo sapiens
taaagccatttcagaagtggacacctgcccatgtgatgcaaagggctgggaacccggtcttgactttgcctggaa

SEQ ID NO: 46030 - DNA, 73 bp, Homo sapiens
aagtggacacctgcccatgtgatgcaaagggctgggaacccggtcttgactttgcctggaatgcctttcggaa

SEQ ID NO: 46031 - DNA, 72 bp, Homo sapiens
acctgcccatgtgatgcaaagggctgggaacccggtcttgactttgcctggaatgcctttcggaaagacctc

SEQ ID NO: 46032 - DNA, 73 bp, Homo sapiens
atgtgatgcaaagggctgggaacccggtcttgactttgcctggaatgcctttcggaaagacctctgtccctga

SEQ ID NO: 46033 - DNA, 70 bp, Homo sapiens
aaagggctgggaacccggtcttgactttgcctggaatgcctttcggaaagacctctgtccctgaggctga

SEQ ID NO: 46034 - DNA, 73 bp, Homo sapiens
aacccggtcttgactttgcctggaatgcctttcggaaagacctctgtccctgaggctgagggacagtgcctgc

SEQ ID NO: 46035 - DNA, 78 bp, Homo sapiens
ttgactttgcctggaatgcctttcggaaagacctctgtccctgaggctgagggacagtgcctgctcctgccaggtgcc

SEQ ID NO: 46036 - DNA, 78 bp, Homo sapiens
ctggaatgcctttcggaaagacctctgtccctgaggctgagggacagtgcctgctcctgccaggtgcccagctcttaa

SEQ ID NO: 46037 - DNA, 76 bp, Homo sapiens
tttcggaaagacctctgtccctgaggctgagggacagtgcctgctcctgccaggtgcccagctcttaagcggtccc

SEQ ID NO: 46038 - DNA, 77 bp, Homo sapiens
aggctgagggacagtgcctgctcctgccaggtgcccagctcttaagcggtccccagactcatgccacctgccccggg

SEQ ID NO: 46039 - DNA, 73 bp, Homo sapiens
tcctgccaggtgcccagctcttaagcggtccccagactcatgccacctgccccggggcctcccccaactcatt

SEQ ID NO: 46040 - DNA, 71 bp, Homo sapiens
tgcccagctcttaagcggtccccagactcatgccacctgccccggggcctcccccaactcatttgtttatt

SEQ ID NO: 46041 - DNA, 68 bp, Homo sapiens
ttaagcggtccccagactcatgccacctgccccggggcctcccccaactcatttgtttatttccctgt

SEQ ID NO: 46042 - DNA, 70 bp, Homo sapiens
tgccacctgccccggggcctcccccaactcatttgtttatttccctgttgggaatgtattgatacctcta

SEQ ID NO: 46043 - DNA, 72 bp, Homo sapiens
actcatttgtttatttccctgttgggaatgtattgatacctctaggatgcaaggacggaaccacacctgagg

SEQ ID NO: 46044 - DNA, 74 bp, Homo sapiens
ttatttccctgttgggaatgtattgatacctctaggatgcaaggacggaaccacacctgaggggtggacagtca

SEQ ID NO: 46045 - DNA, 78 bp, Homo sapiens
tattgatacctctaggatgcaaggacggaaccacacctgaggggtggacagtcagccggtgcccagcaaatatctgtg

SEQ ID NO: 46046 - DNA, 76 bp, Homo sapiens
tctaggatgcaaggacggaaccacacctgaggggtggacagtcagccggtgcccagcaaatatctgtggaatttcc

SEQ ID NO: 46047 - DNA, 74 bp, Homo sapiens
aaggacggaaccacacctgaggggtggacagtcagccggtgcccagcaaatatctgtggaatttcctccacaca

SEQ ID NO: 46048 - DNA, 75 bp, Homo sapiens
acctgaggggtggacagtcagccggtgcccagcaaatatctgtggaatttcctccacacaacagggaaagcgatg

SEQ ID NO: 46049 - DNA, 77 bp, Homo sapiens
ggtggacagtcagccggtgcccagcaaatatctgtggaatttcctccacacaacagggaaagcgatggagacagaaa

SEQ ID NO: 46050 - DNA, 78 bp, Homo sapiens
gtcagccggtgcccagcaaatatctgtggaatttcctccacacaacagggaaagcgatggagacagaaacctctgcag

SEQ ID NO: 46051 - DNA, 74 bp, Homo sapiens
agcaaatatctgtggaatttcctccacacaacagggaaagcgatggagacagaaacctctgcaggcccccgagg

SEQ ID NO: 46052 - DNA, 75 bp, Homo sapiens
tatctgtggaatttcctccacacaacagggaaagcgatggagacagaaacctctgcaggcccccgagggcaccca

SEQ ID NO: 46053 - DNA, 70 bp, Homo sapiens
acaacagggaaagcgatggagacagaaacctctgcaggcccccgagggcacccacttccctgaccccgtc

SEQ ID NO: 46054 - DNA, 71 bp, Homo sapiens
aagcgatggagacagaaacctctgcaggcccccgagggcacccacttccctgaccccgtccacctccctga

SEQ ID NO: 46055 - DNA, 67 bp, Homo sapiens
ctctgcaggcccccgagggcacccacttccctgaccccgtccacctccctgacccccgcccacctcc

SEQ ID NO: 46056 - DNA, 66 bp, Homo sapiens
agggcacccacttccctgaccccgtccacctccctgacccccgcccacctccctgatccccatccc

SEQ ID NO: 46057 - DNA, 68 bp, Homo sapiens
acttccctgaccccgtccacctccctgacccccgcccacctccctgatccccatcccgcaagctgggc

SEQ ID NO: 46058 - DNA, 68 bp, Homo sapiens
cccgtccacctccctgacccccgcccacctccctgatccccatcccgcaagctgggcctagggtatcg

SEQ ID NO: 46059 - DNA, 69 bp, Homo sapiens
acctccctgacccccgcccacctccctgatccccatcccgcaagctgggcctagggtatcggtggcctg

SEQ ID NO: 46060 - DNA, 73 bp, Homo sapiens
cccgcccacctccctgatccccatcccgcaagctgggcctagggtatcggtggcctggctggtcatgccctgg

SEQ ID NO: 46061 - DNA, 77 bp, Homo sapiens
tccctgatccccatcccgcaagctgggcctagggtatcggtggcctggctggtcatgccctgggcgccagcgcctgt

SEQ ID NO: 46062 - DNA, 78 bp, Homo sapiens
catcccgcaagctgggcctagggtatcggtggcctggctggtcatgccctgggcgccagcgcctgttcaggaggtgaa

SEQ ID NO: 46063 - DNA, 75 bp, Homo sapiens
gctgggcctagggtatcggtggcctggctggtcatgccctgggcgccagcgcctgttcaggaggtgaagggttta

SEQ ID NO: 46064 - DNA, 77 bp, Homo sapiens
tagggtatcggtggcctggctggtcatgccctgggcgccagcgcctgttcaggaggtgaagggtttatctcagcttg

SEQ ID NO: 46065 - DNA, 80 bp, Homo sapiens
tggcctggctggtcatgccctgggcgccagcgcctgttcaggaggtgaagggtttatctcagcttggcccatgactgcgt

SEQ ID NO: 46066 - DNA, 80 bp, Homo sapiens
tggtcatgccctgggcgccagcgcctgttcaggaggtgaagggtttatctcagcttggcccatgactgcgttgaaggaca

SEQ ID NO: 46067 - DNA, 76 bp, Homo sapiens
ccctgggcgccagcgcctgttcaggaggtgaagggtttatctcagcttggcccatgactgcgttgaaggacaggag

SEQ ID NO: 46068 - DNA, 79 bp, Homo sapiens
aagggtttatctcagcttggcccatgactgcgttgaaggacaggagggagcggctgtggctgtggctggaatctgaagc

SEQ ID NO: 46069 - DNA, 81 bp, Homo sapiens
tctcagcttggcccatgactgcgttgaaggacaggagggagcggctgtggctgtggctggaatctgaagccggtgcgggcg

SEQ ID NO: 46070 - DNA, 77 bp, Homo sapiens
atgactgcgttgaaggacaggagggagcggctgtggctgtggctggaatctgaagccggtgcgggcggccagggcct

SEQ ID NO: 46071 - DNA, 75 bp, Homo sapiens
ttgaaggacaggagggagcggctgtggctgtggctggaatctgaagccggtgcgggcggccagggcctttccctg

SEQ ID NO: 46072 - DNA, 74 bp, Homo sapiens
agggagcggctgtggctgtggctggaatctgaagccggtgcgggcggccagggcctttccctgggtggtgacga

SEQ ID NO: 46073 - DNA, 74 bp, Homo sapiens
gctggaatctgaagccggtgcgggcggccagggcctttccctgggtggtgacgagcgaggaccagagccctgtc

SEQ ID NO: 46074 - DNA, 73 bp, Homo sapiens
aatctgaagccggtgcgggcggccagggcctttccctgggtggtgacgagcgaggaccagagccctgtctgcc

SEQ ID NO: 46075 - DNA, 71 bp, Homo sapiens
ggtgcgggcggccagggcctttccctgggtggtgacgagcgaggaccagagccctgtctgcccgagggaag

SEQ ID NO: 46076 - DNA, 70 bp, Homo sapiens
ggccagggcctttccctgggtggtgacgagcgaggaccagagccctgtctgcccgagggaagggcgaggg

SEQ ID NO: 46077 - DNA, 70 bp, Homo sapiens
gtgacgagcgaggaccagagccctgtctgcccgagggaagggcgaggggacactccccgtggcgggggtg

SEQ ID NO: 46078 - DNA, 67 bp, Homo sapiens
aggaccagagccctgtctgcccgagggaagggcgaggggacactccccgtggcgggggtgggatccc

SEQ ID NO: 46079 - DNA, 66 bp, Homo sapiens
agccctgtctgcccgagggaagggcgaggggacactccccgtggcgggggtgggatcccggtagcc

SEQ ID NO: 46080 - DNA, 65 bp, Homo sapiens
agggaagggcgaggggacactccccgtggcgggggtgggatcccggtagccggggctcagtgacc

SEQ ID NO: 46081 - DNA, 68 bp, Homo sapiens
agggcgaggggacactccccgtggcgggggtgggatcccggtagccggggctcagtgaccgctgcctg

SEQ ID NO: 46082 - DNA, 69 bp, Homo sapiens
acactccccgtggcgggggtgggatcccggtagccggggctcagtgaccgctgcctgggccaccgcctg

SEQ ID NO: 46083 - DNA, 71 bp, Homo sapiens
tgggatcccggtagccggggctcagtgaccgctgcctgggccaccgcctgtggggacctgaccttcctggg

SEQ ID NO: 46084 - DNA, 71 bp, Homo sapiens
gtagccggggctcagtgaccgctgcctgggccaccgcctgtggggacctgaccttcctggggaaacccatg

SEQ ID NO: 46085 - DNA, 71 bp, Homo sapiens
ctcagtgaccgctgcctgggccaccgcctgtggggacctgaccttcctggggaaacccatgggtcaaagga

SEQ ID NO: 46086 - DNA, 69 bp, Homo sapiens
ctgggccaccgcctgtggggacctgaccttcctggggaaacccatgggtcaaaggagccgagaaatcca

SEQ ID NO: 46087 - DNA, 72 bp, Homo sapiens
acctgaccttcctggggaaacccatgggtcaaaggagccgagaaatccaagcaccaagtggccgctatggca

SEQ ID NO: 46088 - DNA, 71 bp, Homo sapiens
accttcctggggaaacccatgggtcaaaggagccgagaaatccaagcaccaagtggccgctatggcaggac

SEQ ID NO: 46089 - DNA, 76 bp, Homo sapiens
cccatgggtcaaaggagccgagaaatccaagcaccaagtggccgctatggcaggacgggcgcgttcgcagtggaga

SEQ ID NO: 46090 - DNA, 76 bp, Homo sapiens
agaaatccaagcaccaagtggccgctatggcaggacgggcgcgttcgcagtggagaagctgggtgtgtccgtggga

SEQ ID NO: 46091 - DNA, 74 bp, Homo sapiens
agcaccaagtggccgctatggcaggacgggcgcgttcgcagtggagaagctgggtgtgtccgtgggaaaggaaa

SEQ ID NO: 46092 - DNA, 72 bp, Homo sapiens
aagtggccgctatggcaggacgggcgcgttcgcagtggagaagctgggtgtgtccgtgggaaaggaaagaaa

SEQ ID NO: 46093 - DNA, 75 bp, Homo sapiens
tatggcaggacgggcgcgttcgcagtggagaagctgggtgtgtccgtgggaaaggaaagaaatggaagcagaggc

SEQ ID NO: 46094 - DNA, 73 bp, Homo sapiens
cgggcgcgttcgcagtggagaagctgggtgtgtccgtgggaaaggaaagaaatggaagcagaggctcttcagg

SEQ ID NO: 46095 - DNA, 72 bp, Homo sapiens
agtggagaagctgggtgtgtccgtgggaaaggaaagaaatggaagcagaggctcttcaggggcacctgggaa

SEQ ID NO: 46096 - DNA, 73 bp, Homo sapiens
tgggtgtgtccgtgggaaaggaaagaaatggaagcagaggctcttcaggggcacctgggaacgcagcctacac

SEQ ID NO: 46097 - DNA, 73 bp, Homo sapiens
tgtccgtgggaaaggaaagaaatggaagcagaggctcttcaggggcacctgggaacgcagcctacactcttcc

SEQ ID NO: 46098 - DNA, 72 bp, Homo sapiens
aaaggaaagaaatggaagcagaggctcttcaggggcacctgggaacgcagcctacactcttcccaggcctcc

SEQ ID NO: 46099 - DNA, 74 bp, Homo sapiens
aatggaagcagaggctcttcaggggcacctgggaacgcagcctacactcttcccaggcctcctccctccgtcca

SEQ ID NO: 46100 - DNA, 73 bp, Homo sapiens
ctcttcaggggcacctgggaacgcagcctacactcttcccaggcctcctccctccgtccactgtgccgcctgg

SEQ ID NO: 46101 - DNA, 73 bp, Homo sapiens
cacctgggaacgcagcctacactcttcccaggcctcctccctccgtccactgtgccgcctgggtcctgggaca

SEQ ID NO: 46102 - DNA, 73 bp, Homo sapiens
aacgcagcctacactcttcccaggcctcctccctccgtccactgtgccgcctgggtcctgggacagcctgagg

SEQ ID NO: 46103 - DNA, 75 bp, Homo sapiens
tacactcttcccaggcctcctccctccgtccactgtgccgcctgggtcctgggacagcctgagggccgcaggctc

SEQ ID NO: 46104 - DNA, 75 bp, Homo sapiens
aggcctcctccctccgtccactgtgccgcctgggtcctgggacagcctgagggccgcaggctcccatgcaaggcc

SEQ ID NO: 46105 - DNA, 77 bp, Homo sapiens
actgtgccgcctgggtcctgggacagcctgagggccgcaggctcccatgcaaggcccgctgggggcctgcttgtctg

SEQ ID NO: 46106 - DNA, 76 bp, Homo sapiens
tgggtcctgggacagcctgagggccgcaggctcccatgcaaggcccgctgggggcctgcttgtctggggctgaatt

SEQ ID NO: 46107 - DNA, 76 bp, Homo sapiens
ggacagcctgagggccgcaggctcccatgcaaggcccgctgggggcctgcttgtctggggctgaatttggacttta

SEQ ID NO: 46108 - DNA, 74 bp, Homo sapiens
agggccgcaggctcccatgcaaggcccgctgggggcctgcttgtctggggctgaatttggactttatggggcta

SEQ ID NO: 46109 - DNA, 73 bp, Homo sapiens
tcccatgcaaggcccgctgggggcctgcttgtctggggctgaatttggactttatggggctatggctttaatt

SEQ ID NO: 46110 - DNA, 71 bp, Homo sapiens
aaggcccgctgggggcctgcttgtctggggctgaatttggactttatggggctatggctttaatttcacaa

SEQ ID NO: 46111 - DNA, 73 bp, Homo sapiens
gggcctgcttgtctggggctgaatttggactttatggggctatggctttaatttcacaatgaccgataaccag

SEQ ID NO: 46112 - DNA, 75 bp, Homo sapiens
ggctgaatttggactttatggggctatggctttaatttcacaatgaccgataaccagtgaactgaagccaggaca

SEQ ID NO: 46113 - DNA, 77 bp, Homo sapiens
tttatggggctatggctttaatttcacaatgaccgataaccagtgaactgaagccaggacagcaccgtgagcaccaa

SEQ ID NO: 46114 - DNA, 78 bp, Homo sapiens
tatggctttaatttcacaatgaccgataaccagtgaactgaagccaggacagcaccgtgagcaccaagtcagagaatt

SEQ ID NO: 46115 - DNA, 77 bp, Homo sapiens
tttaatttcacaatgaccgataaccagtgaactgaagccaggacagcaccgtgagcaccaagtcagagaattttcac

SEQ ID NO: 46116 - DNA, 76 bp, Homo sapiens
atgaccgataaccagtgaactgaagccaggacagcaccgtgagcaccaagtcagagaattttcacgagggaaccaa

SEQ ID NO: 46117 - DNA, 76 bp, Homo sapiens
ataaccagtgaactgaagccaggacagcaccgtgagcaccaagtcagagaattttcacgagggaaccaatgaacag

SEQ ID NO: 46118 - DNA, 76 bp, Homo sapiens
aactgaagccaggacagcaccgtgagcaccaagtcagagaattttcacgagggaaccaatgaacaggaacagagtg

SEQ ID NO: 46119 - DNA, 77 bp, Homo sapiens
aggacagcaccgtgagcaccaagtcagagaattttcacgagggaaccaatgaacaggaacagagtgtgaggctgccc

SEQ ID NO: 46120 - DNA, 76 bp, Homo sapiens
aagtcagagaattttcacgagggaaccaatgaacaggaacagagtgtgaggctgccccagctgcatcctccgggag

SEQ ID NO: 46121 - DNA, 75 bp, Homo sapiens
attttcacgagggaaccaatgaacaggaacagagtgtgaggctgccccagctgcatcctccgggaggcgccttcc

SEQ ID NO: 46122 - DNA, 76 bp, Homo sapiens
aaccaatgaacaggaacagagtgtgaggctgccccagctgcatcctccgggaggcgccttcccaagggagtgcaag

SEQ ID NO: 46123 - DNA, 79 bp, Homo sapiens
aacaggaacagagtgtgaggctgccccagctgcatcctccgggaggcgccttcccaagggagtgcaaggctgcctgctg

SEQ ID NO: 46124 - DNA, 77 bp, Homo sapiens
cccagctgcatcctccgggaggcgccttcccaagggagtgcaaggctgcctgctgtggccaggccaccaaagcacct

SEQ ID NO: 46125 - DNA, 77 bp, Homo sapiens
aggcgccttcccaagggagtgcaaggctgcctgctgtggccaggccaccaaagcaccttcttcaccgccaggcatct

SEQ ID NO: 46126 - DNA, 79 bp, Homo sapiens
ttcccaagggagtgcaaggctgcctgctgtggccaggccaccaaagcaccttcttcaccgccaggcatcttttgaggca

SEQ ID NO: 46127 - DNA, 82 bp, Homo sapiens
agtgcaaggctgcctgctgtggccaggccaccaaagcaccttcttcaccgccaggcatcttttgaggcacgcgaacatcaga

SEQ ID NO: 46128 - DNA, 80 bp, Homo sapiens
tgctgtggccaggccaccaaagcaccttcttcaccgccaggcatcttttgaggcacgcgaacatcagaggccccagccac

SEQ ID NO: 46129 - DNA, 78 bp, Homo sapiens
aggccaccaaagcaccttcttcaccgccaggcatcttttgaggcacgcgaacatcagaggccccagccacgtgctctg

SEQ ID NO: 46130 - DNA, 81 bp, Homo sapiens
agcaccttcttcaccgccaggcatcttttgaggcacgcgaacatcagaggccccagccacgtgctctggaggagaagctga

SEQ ID NO: 46131 - DNA, 81 bp, Homo sapiens
cttcttcaccgccaggcatcttttgaggcacgcgaacatcagaggccccagccacgtgctctggaggagaagctgagagcc

SEQ ID NO: 46132 - DNA, 81 bp, Homo sapiens
ccaggcatcttttgaggcacgcgaacatcagaggccccagccacgtgctctggaggagaagctgagagccccaggccacag

SEQ ID NO: 46133 - DNA, 82 bp, Homo sapiens
ttttgaggcacgcgaacatcagaggccccagccacgtgctctggaggagaagctgagagccccaggccacaggcagggcagc

SEQ ID NO: 46134 - DNA, 80 bp, Homo sapiens
aacatcagaggccccagccacgtgctctggaggagaagctgagagccccaggccacaggcagggcagcctctgagggccg

SEQ ID NO: 46135 - DNA, 80 bp, Homo sapiens
ccccagccacgtgctctggaggagaagctgagagccccaggccacaggcagggcagcctctgagggccggctcagggaga

SEQ ID NO: 46136 - DNA, 79 bp, Homo sapiens
acgtgctctggaggagaagctgagagccccaggccacaggcagggcagcctctgagggccggctcagggagagtggccg

SEQ ID NO: 46137 - DNA, 79 bp, Homo sapiens
aggagaagctgagagccccaggccacaggcagggcagcctctgagggccggctcagggagagtggccggagcttctggc

SEQ ID NO: 46138 - DNA, 78 bp, Homo sapiens
agctgagagccccaggccacaggcagggcagcctctgagggccggctcagggagagtggccggagcttctggcctggg

SEQ ID NO: 46139 - DNA, 76 bp, Homo sapiens
aggccacaggcagggcagcctctgagggccggctcagggagagtggccggagcttctggcctggggcaggtggacc

SEQ ID NO: 46140 - DNA, 75 bp, Homo sapiens
tctgagggccggctcagggagagtggccggagcttctggcctggggcaggtggacccgttagaaactgcatgtgt

SEQ ID NO: 46141 - DNA, 78 bp, Homo sapiens
agtggccggagcttctggcctggggcaggtggacccgttagaaactgcatgtgttgcctctggcaccagccacagcaa

SEQ ID NO: 46142 - DNA, 81 bp, Homo sapiens
tggggcaggtggacccgttagaaactgcatgtgttgcctctggcaccagccacagcaagagattctcttcctatcacacag

SEQ ID NO: 46143 - DNA, 80 bp, Homo sapiens
tggacccgttagaaactgcatgtgttgcctctggcaccagccacagcaagagattctcttcctatcacacagggaacaaa

SEQ ID NO: 46144 - DNA, 82 bp, Homo sapiens
aaactgcatgtgttgcctctggcaccagccacagcaagagattctcttcctatcacacagggaacaaactcaaggatcttga

SEQ ID NO: 46145 - DNA, 80 bp, Homo sapiens
tctggcaccagccacagcaagagattctcttcctatcacacagggaacaaactcaaggatcttgaccttgccctcctctc

SEQ ID NO: 46146 - DNA, 77 bp, Homo sapiens
agccacagcaagagattctcttcctatcacacagggaacaaactcaaggatcttgaccttgccctcctctccccagc

SEQ ID NO: 46147 - DNA, 76 bp, Homo sapiens
aagagattctcttcctatcacacagggaacaaactcaaggatcttgaccttgccctcctctccccagctggccgca

SEQ ID NO: 46148 - DNA, 74 bp, Homo sapiens
ttcctatcacacagggaacaaactcaaggatcttgaccttgccctcctctccccagctggccgcacttggggac

SEQ ID NO: 46149 - DNA, 75 bp, Homo sapiens
gggaacaaactcaaggatcttgaccttgccctcctctccccagctggccgcacttggggacgctgatgccacaaa

SEQ ID NO: 46150 - DNA, 75 bp, Homo sapiens
aactcaaggatcttgaccttgccctcctctccccagctggccgcacttggggacgctgatgccacaaaggaaata

SEQ ID NO: 46151 - DNA, 73 bp, Homo sapiens
atcttgaccttgccctcctctccccagctggccgcacttggggacgctgatgccacaaaggaaataaccaaaa

SEQ ID NO: 46152 - DNA, 74 bp, Homo sapiens
tcctctccccagctggccgcacttggggacgctgatgccacaaaggaaataaccaaaacaagataactctattg

SEQ ID NO: 46153 - DNA, 72 bp, Homo sapiens
agctggccgcacttggggacgctgatgccacaaaggaaataaccaaaacaagataactctattgggcggcgg

SEQ ID NO: 46154 - DNA, 70 bp, Homo sapiens
acaaaggaaataaccaaaacaagataactctattgggcggcgggaacagaaaggaacatgtagcaatcac

SEQ ID NO: 46155 - DNA, 76 bp, Homo sapiens
aaacaagataactctattgggcggcgggaacagaaaggaacatgtagcaatcactcctcttcatccatgcaaggaa

SEQ ID NO: 46156 - DNA, 79 bp, Homo sapiens
tattgggcggcgggaacagaaaggaacatgtagcaatcactcctcttcatccatgcaaggaagcgaggcgacgccttga

SEQ ID NO: 46157 - DNA, 76 bp, Homo sapiens
gggaacagaaaggaacatgtagcaatcactcctcttcatccatgcaaggaagcgaggcgacgccttgaaaaggacg

SEQ ID NO: 46158 - DNA, 75 bp, Homo sapiens
aaggaacatgtagcaatcactcctcttcatccatgcaaggaagcgaggcgacgccttgaaaaggacggccttctt

SEQ ID NO: 46159 - DNA, 78 bp, Homo sapiens
tcctcttcatccatgcaaggaagcgaggcgacgccttgaaaaggacggccttctttgctgcaaatagccagaagtgaa

SEQ ID NO: 46160 - DNA, 78 bp, Homo sapiens
tccatgcaaggaagcgaggcgacgccttgaaaaggacggccttctttgctgcaaatagccagaagtgaactgagcaaa

SEQ ID NO: 46161 - DNA, 74 bp, Homo sapiens
aaggaagcgaggcgacgccttgaaaaggacggccttctttgctgcaaatagccagaagtgaactgagcaaagga

SEQ ID NO: 46162 - DNA, 75 bp, Homo sapiens
acgccttgaaaaggacggccttctttgctgcaaatagccagaagtgaactgagcaaaggaagcacgggacgcaca

SEQ ID NO: 46163 - DNA, 74 bp, Homo sapiens
aaaaggacggccttctttgctgcaaatagccagaagtgaactgagcaaaggaagcacgggacgcacaggaagaa

SEQ ID NO: 46164 - DNA, 77 bp, Homo sapiens
ttctttgctgcaaatagccagaagtgaactgagcaaaggaagcacgggacgcacaggaagaaaagtgctccaaggga

SEQ ID NO: 46165 - DNA, 73 bp, Homo sapiens
aaatagccagaagtgaactgagcaaaggaagcacgggacgcacaggaagaaaagtgctccaagggacggacag

SEQ ID NO: 46166 - DNA, 73 bp, Homo sapiens
agaagtgaactgagcaaaggaagcacgggacgcacaggaagaaaagtgctccaagggacggacaggacggtgc

SEQ ID NO: 46167 - DNA, 70 bp, Homo sapiens
aactgagcaaaggaagcacgggacgcacaggaagaaaagtgctccaagggacggacaggacggtgccggg

SEQ ID NO: 46168 - DNA, 68 bp, Homo sapiens
aggaagcacgggacgcacaggaagaaaagtgctccaagggacggacaggacggtgccggggttaggaa

SEQ ID NO: 46169 - DNA, 71 bp, Homo sapiens
cacaggaagaaaagtgctccaagggacggacaggacggtgccggggttaggaaagcgcaacactgttcaga

SEQ ID NO: 46170 - DNA, 70 bp, Homo sapiens
aagaaaagtgctccaagggacggacaggacggtgccggggttaggaaagcgcaacactgttcagacacag

SEQ ID NO: 46171 - DNA, 73 bp, Homo sapiens
aagggacggacaggacggtgccggggttaggaaagcgcaacactgttcagacacagtctccgatatatgaatg

SEQ ID NO: 46172 - DNA, 76 bp, Homo sapiens
caggacggtgccggggttaggaaagcgcaacactgttcagacacagtctccgatatatgaatggcaagcccagtta

SEQ ID NO: 46173 - DNA, 72 bp, Homo sapiens
aacactgttcagacacagtctccgatatatgaatggcaagcccagttaaaaatatctaaagggcttttttag

SEQ ID NO: 46174 - DNA, 64 bp, Homo sapiens
tgaatggcaagcccagttaaaaatatctaaagggcttttttaggtttttaagaatatttttaag

SEQ ID NO: 46175 - DNA, 60 bp, Homo sapiens
gcccagttaaaaatatctaaagggcttttttaggtttttaagaatatttttaaggtttag

SEQ ID NO: 46176 - DNA, 62 bp, Homo sapiens
taggtttttaagaatatttttaaggtttagttttattaaaaaataagcaagacaaccagaaa

SEQ ID NO: 46177 - DNA, 63 bp, Homo sapiens
atatttttaaggtttagttttattaaaaaataagcaagacaaccagaaaaaagactgaggagg

SEQ ID NO: 46178 - DNA, 67 bp, Homo sapiens
ggtttagttttattaaaaaataagcaagacaaccagaaaaaagactgaggagggcataggagaccca

SEQ ID NO: 46179 - DNA, 72 bp, Homo sapiens
ttattaaaaaataagcaagacaaccagaaaaaagactgaggagggcataggagacccacccgcgtgcatgag

SEQ ID NO: 46180 - DNA, 74 bp, Homo sapiens
ataagcaagacaaccagaaaaaagactgaggagggcataggagacccacccgcgtgcatgaggccgagtctaaa

SEQ ID NO: 46181 - DNA, 74 bp, Homo sapiens
aagacaaccagaaaaaagactgaggagggcataggagacccacccgcgtgcatgaggccgagtctaaagctgtg

SEQ ID NO: 46182 - DNA, 76 bp, Homo sapiens
aagactgaggagggcataggagacccacccgcgtgcatgaggccgagtctaaagctgtggccacggcctgtggaaa

SEQ ID NO: 46183 - DNA, 75 bp, Homo sapiens
agggcataggagacccacccgcgtgcatgaggccgagtctaaagctgtggccacggcctgtggaaacccggcaga

SEQ ID NO: 46184 - DNA, 73 bp, Homo sapiens
acccgcgtgcatgaggccgagtctaaagctgtggccacggcctgtggaaacccggcagaaaatctcccaaata

SEQ ID NO: 46185 - DNA, 75 bp, Homo sapiens
atgaggccgagtctaaagctgtggccacggcctgtggaaacccggcagaaaatctcccaaatacccagcatatga

SEQ ID NO: 46186 - DNA, 74 bp, Homo sapiens
agtctaaagctgtggccacggcctgtggaaacccggcagaaaatctcccaaatacccagcatatgaggacggca

SEQ ID NO: 46187 - DNA, 77 bp, Homo sapiens
tgtggccacggcctgtggaaacccggcagaaaatctcccaaatacccagcatatgaggacggcagcaggtgaggcac

SEQ ID NO: 46188 - DNA, 77 bp, Homo sapiens
ctgtggaaacccggcagaaaatctcccaaatacccagcatatgaggacggcagcaggtgaggcactggggtgagaca

SEQ ID NO: 46189 - DNA, 81 bp, Homo sapiens
gcagaaaatctcccaaatacccagcatatgaggacggcagcaggtgaggcactggggtgagacagactcaaatgtgtggtg

SEQ ID NO: 46190 - DNA, 79 bp, Homo sapiens
aatacccagcatatgaggacggcagcaggtgaggcactggggtgagacagactcaaatgtgtggtgttggggcaggaac

SEQ ID NO: 46191 - DNA, 83 bp, Homo sapiens
tatgaggacggcagcaggtgaggcactggggtgagacagactcaaatgtgtggtgttggggcaggaactgagcctgcagtcta

SEQ ID NO: 46192 - DNA, 80 bp, Homo sapiens
agcaggtgaggcactggggtgagacagactcaaatgtgtggtgttggggcaggaactgagcctgcagtctagatccccac

SEQ ID NO: 46193 - DNA, 80 bp, Homo sapiens
actggggtgagacagactcaaatgtgtggtgttggggcaggaactgagcctgcagtctagatccccacctcatccatcac

SEQ ID NO: 46194 - DNA, 80 bp, Homo sapiens
gacagactcaaatgtgtggtgttggggcaggaactgagcctgcagtctagatccccacctcatccatcacgtcaaaagaa

SEQ ID NO: 46195 - DNA, 76 bp, Homo sapiens
aaatgtgtggtgttggggcaggaactgagcctgcagtctagatccccacctcatccatcacgtcaaaagaaattac

SEQ ID NO: 46196 - DNA, 76 bp, Homo sapiens
tgttggggcaggaactgagcctgcagtctagatccccacctcatccatcacgtcaaaagaaattacgggcgggtca

SEQ ID NO: 46197 - DNA, 76 bp, Homo sapiens
aggaactgagcctgcagtctagatccccacctcatccatcacgtcaaaagaaattacgggcgggtcacagatgaaa

SEQ ID NO: 46198 - DNA, 75 bp, Homo sapiens
ctgcagtctagatccccacctcatccatcacgtcaaaagaaattacgggcgggtcacagatgaaaacacctaaca

SEQ ID NO: 46199 - DNA, 73 bp, Homo sapiens
tcatccatcacgtcaaaagaaattacgggcgggtcacagatgaaaacacctaacagcaggtaactgttttgta

SEQ ID NO: 46200 - DNA, 68 bp, Homo sapiens
acgtcaaaagaaattacgggcgggtcacagatgaaaacacctaacagcaggtaactgttttgtaatct

SEQ ID NO: 46201 - DNA, 69 bp, Homo sapiens
aagaaattacgggcgggtcacagatgaaaacacctaacagcaggtaactgttttgtaatcttggggaga

SEQ ID NO: 46202 - DNA, 69 bp, Homo sapiens
atgaaaacacctaacagcaggtaactgttttgtaatcttggggagaagcctaaagcccaggaactaaga

SEQ ID NO: 46203 - DNA, 70 bp, Homo sapiens
taacagcaggtaactgttttgtaatcttggggagaagcctaaagcccaggaactaagagagtataacaag

SEQ ID NO: 46204 - DNA, 72 bp, Homo sapiens
taactgttttgtaatcttggggagaagcctaaagcccaggaactaagagagtataacaagtgtgaatacaga

SEQ ID NO: 46205 - DNA, 71 bp, Homo sapiens
ttttgtaatcttggggagaagcctaaagcccaggaactaagagagtataacaagtgtgaatacagaattta

SEQ ID NO: 46206 - DNA, 74 bp, Homo sapiens
tataacaagtgtgaatacagaatttaaaagaagagactggtttagcaatcactaagataaaacacgcgtgacag

SEQ ID NO: 46207 - DNA, 75 bp, Homo sapiens
agtgtgaatacagaatttaaaagaagagactggtttagcaatcactaagataaaacacgcgtgacaggatctgct

SEQ ID NO: 46208 - DNA, 79 bp, Homo sapiens
aaaagaagagactggtttagcaatcactaagataaaacacgcgtgacaggatctgcttgtctcctctgagcacgcagga

SEQ ID NO: 46209 - DNA, 81 bp, Homo sapiens
tggtttagcaatcactaagataaaacacgcgtgacaggatctgcttgtctcctctgagcacgcaggagcctctgccccaaa

SEQ ID NO: 46210 - DNA, 83 bp, Homo sapiens
aatcactaagataaaacacgcgtgacaggatctgcttgtctcctctgagcacgcaggagcctctgccccaaatgcagacattg

SEQ ID NO: 46211 - DNA, 81 bp, Homo sapiens
ataaaacacgcgtgacaggatctgcttgtctcctctgagcacgcaggagcctctgccccaaatgcagacattgggccctac

SEQ ID NO: 46212 - DNA, 82 bp, Homo sapiens
acaggatctgcttgtctcctctgagcacgcaggagcctctgccccaaatgcagacattgggccctacgtggcacctggctac

SEQ ID NO: 46213 - DNA, 82 bp, Homo sapiens
cttgtctcctctgagcacgcaggagcctctgccccaaatgcagacattgggccctacgtggcacctggctactgtgcatggt

SEQ ID NO: 46214 - DNA, 85 bp, Homo sapiens
tcctctgagcacgcaggagcctctgccccaaatgcagacattgggccctacgtggcacctggctactgtgcatggttgcaggtca

SEQ ID NO: 46215 - DNA, 81 bp, Homo sapiens
acgcaggagcctctgccccaaatgcagacattgggccctacgtggcacctggctactgtgcatggttgcaggtcagggcag

SEQ ID NO: 46216 - DNA, 81 bp, Homo sapiens
tctgccccaaatgcagacattgggccctacgtggcacctggctactgtgcatggttgcaggtcagggcaggccgggccaca

SEQ ID NO: 46217 - DNA, 79 bp, Homo sapiens
aaatgcagacattgggccctacgtggcacctggctactgtgcatggttgcaggtcagggcaggccgggccacagggcag

SEQ ID NO: 46218 - DNA, 76 bp, Homo sapiens
attgggccctacgtggcacctggctactgtgcatggttgcaggtcagggcaggccgggccacagggcagggccacc

SEQ ID NO: 46219 - DNA, 79 bp, Homo sapiens
tactgtgcatggttgcaggtcagggcaggccgggccacagggcagggccaccctcccattcccatgtttacactgagca

SEQ ID NO: 46220 - DNA, 75 bp, Homo sapiens
atggttgcaggtcagggcaggccgggccacagggcagggccaccctcccattcccatgtttacactgagcatttc

SEQ ID NO: 46221 - DNA, 74 bp, Homo sapiens
aggtcagggcaggccgggccacagggcagggccaccctcccattcccatgtttacactgagcatttcctctgcc

SEQ ID NO: 46222 - DNA, 75 bp, Homo sapiens
aggccgggccacagggcagggccaccctcccattcccatgtttacactgagcatttcctctgcctgtgtctcttg

SEQ ID NO: 46223 - DNA, 79 bp, Homo sapiens
gcagggccaccctcccattcccatgtttacactgagcatttcctctgcctgtgtctcttgggctggggtctgtgataca

SEQ ID NO: 46224 - DNA, 76 bp, Homo sapiens
accctcccattcccatgtttacactgagcatttcctctgcctgtgtctcttgggctggggtctgtgatacaagtcc

SEQ ID NO: 46225 - DNA, 77 bp, Homo sapiens
attcccatgtttacactgagcatttcctctgcctgtgtctcttgggctggggtctgtgatacaagtccgggaggcca

SEQ ID NO: 46226 - DNA, 78 bp, Homo sapiens
tttacactgagcatttcctctgcctgtgtctcttgggctggggtctgtgatacaagtccgggaggccagagacgccca

SEQ ID NO: 46227 - DNA, 76 bp, Homo sapiens
atttcctctgcctgtgtctcttgggctggggtctgtgatacaagtccgggaggccagagacgcccacggacagtgc

SEQ ID NO: 46228 - DNA, 75 bp, Homo sapiens
tgtgtctcttgggctggggtctgtgatacaagtccgggaggccagagacgcccacggacagtgcgtggggcttgg

SEQ ID NO: 46229 - DNA, 74 bp, Homo sapiens
tcttgggctggggtctgtgatacaagtccgggaggccagagacgcccacggacagtgcgtggggcttggggagc

SEQ ID NO: 46230 - DNA, 75 bp, Homo sapiens
tctgtgatacaagtccgggaggccagagacgcccacggacagtgcgtggggcttggggagcgggactgagccacc

SEQ ID NO: 46231 - DNA, 74 bp, Homo sapiens
tacaagtccgggaggccagagacgcccacggacagtgcgtggggcttggggagcgggactgagccacctctgac

SEQ ID NO: 46232 - DNA, 77 bp, Homo sapiens
aggccagagacgcccacggacagtgcgtggggcttggggagcgggactgagccacctctgactccttctgctgactg

SEQ ID NO: 46233 - DNA, 78 bp, Homo sapiens
ccacggacagtgcgtggggcttggggagcgggactgagccacctctgactccttctgctgactgggatccagctccaa

SEQ ID NO: 46234 - DNA, 80 bp, Homo sapiens
ttggggagcgggactgagccacctctgactccttctgctgactgggatccagctccaaagccatgcctgggaagagactc

SEQ ID NO: 46235 - DNA, 81 bp, Homo sapiens
acctctgactccttctgctgactgggatccagctccaaagccatgcctgggaagagactcctgcctctcccaggatgactc

SEQ ID NO: 46236 - DNA, 79 bp, Homo sapiens
actccttctgctgactgggatccagctccaaagccatgcctgggaagagactcctgcctctcccaggatgactccgtcc

SEQ ID NO: 46237 - DNA, 77 bp, Homo sapiens
actgggatccagctccaaagccatgcctgggaagagactcctgcctctcccaggatgactccgtcccgccacgcctc

SEQ ID NO: 46238 - DNA, 81 bp, Homo sapiens
atccagctccaaagccatgcctgggaagagactcctgcctctcccaggatgactccgtcccgccacgcctctgctctcagc

SEQ ID NO: 46239 - DNA, 79 bp, Homo sapiens
aaagccatgcctgggaagagactcctgcctctcccaggatgactccgtcccgccacgcctctgctctcagcgcccacag

SEQ ID NO: 46240 - DNA, 78 bp, Homo sapiens
caggatgactccgtcccgccacgcctctgctctcagcgcccacagggactcaccaagctggactttcatctaaaacta

SEQ ID NO: 46241 - DNA, 77 bp, Homo sapiens
actccgtcccgccacgcctctgctctcagcgcccacagggactcaccaagctggactttcatctaaaactagacaca

SEQ ID NO: 46242 - DNA, 79 bp, Homo sapiens
acgcctctgctctcagcgcccacagggactcaccaagctggactttcatctaaaactagacacacgtgacgccagcgga

SEQ ID NO: 46243 - DNA, 77 bp, Homo sapiens
ccacagggactcaccaagctggactttcatctaaaactagacacacgtgacgccagcggaccacagacccagtgcaa

SEQ ID NO: 46244 - DNA, 78 bp, Homo sapiens
tcaccaagctggactttcatctaaaactagacacacgtgacgccagcggaccacagacccagtgcaaggggagctgtg

SEQ ID NO: 46245 - DNA, 77 bp, Homo sapiens
taaaactagacacacgtgacgccagcggaccacagacccagtgcaaggggagctgtgtgggttgtgctgaaggtatg

SEQ ID NO: 46246 - DNA, 77 bp, Homo sapiens
tagacacacgtgacgccagcggaccacagacccagtgcaaggggagctgtgtgggttgtgctgaaggtatgttaaaa

SEQ ID NO: 46247 - DNA, 76 bp, Homo sapiens
acgccagcggaccacagacccagtgcaaggggagctgtgtgggttgtgctgaaggtatgttaaaattcatacagga

SEQ ID NO: 46248 - DNA, 75 bp, Homo sapiens
cacagacccagtgcaaggggagctgtgtgggttgtgctgaaggtatgttaaaattcatacaggacacccaaaaca

SEQ ID NO: 46249 - DNA, 75 bp, Homo sapiens
gtgcaaggggagctgtgtgggttgtgctgaaggtatgttaaaattcatacaggacacccaaaacaatcaatctta

SEQ ID NO: 46250 - DNA, 77 bp, Homo sapiens
agctgtgtgggttgtgctgaaggtatgttaaaattcatacaggacacccaaaacaatcaatcttattgcatgataat

SEQ ID NO: 46251 - DNA, 75 bp, Homo sapiens
gtgggttgtgctgaaggtatgttaaaattcatacaggacacccaaaacaatcaatcttattgcatgataatttta

SEQ ID NO: 46252 - DNA, 74 bp, Homo sapiens
gctgaaggtatgttaaaattcatacaggacacccaaaacaatcaatcttattgcatgataattttaaaataata

SEQ ID NO: 46253 - DNA, 67 bp, Homo sapiens
aaaataataaaaaagacttgtggcaagctgaaaaaatttttgataactttactaccaatggctaatg

SEQ ID NO: 46254 - DNA, 71 bp, Homo sapiens
aaaagacttgtggcaagctgaaaaaatttttgataactttactaccaatggctaatgtgcaaactcctaca

SEQ ID NO: 46255 - DNA, 73 bp, Homo sapiens
cttgtggcaagctgaaaaaatttttgataactttactaccaatggctaatgtgcaaactcctacaaattgaga

SEQ ID NO: 46256 - DNA, 70 bp, Homo sapiens
gaaaaaatttttgataactttactaccaatggctaatgtgcaaactcctacaaattgagaaaaacaggca

SEQ ID NO: 46257 - DNA, 69 bp, Homo sapiens
atttttgataactttactaccaatggctaatgtgcaaactcctacaaattgagaaaaacaggcaaaaaa

SEQ ID NO: 46258 - DNA, 70 bp, Homo sapiens
ctttactaccaatggctaatgtgcaaactcctacaaattgagaaaaacaggcaaaaaatataaacaacag

SEQ ID NO: 46259 - DNA, 71 bp, Homo sapiens
caatggctaatgtgcaaactcctacaaattgagaaaaacaggcaaaaaatataaacaacagtttataggaa

SEQ ID NO: 46260 - DNA, 69 bp, Homo sapiens
tgtgcaaactcctacaaattgagaaaaacaggcaaaaaatataaacaacagtttataggaaaagaaata

SEQ ID NO: 46261 - DNA, 66 bp, Homo sapiens
cctacaaattgagaaaaacaggcaaaaaatataaacaacagtttataggaaaagaaatacacagtt

SEQ ID NO: 46262 - DNA, 65 bp, Homo sapiens
aaacaggcaaaaaatataaacaacagtttataggaaaagaaatacacagtttttaaacctatgaa

SEQ ID NO: 46263 - DNA, 66 bp, Homo sapiens
gtttataggaaaagaaatacacagtttttaaacctatgaaggacagctttactcattagttaaaaa

SEQ ID NO: 46264 - DNA, 73 bp, Homo sapiens
actgatgtcatttctcgcctgttacattggaagagatcaaaagtttaaaaaaacagttcattcacccctgcag

SEQ ID NO: 46265 - DNA, 69 bp, Homo sapiens
ctgttacattggaagagatcaaaagtttaaaaaaacagttcattcacccctgcaggggcggaggctaag

SEQ ID NO: 46266 - DNA, 70 bp, Homo sapiens
agatcaaaagtttaaaaaaacagttcattcacccctgcaggggcggaggctaaggctggctctgggataa

SEQ ID NO: 46267 - DNA, 68 bp, Homo sapiens
aaagtttaaaaaaacagttcattcacccctgcaggggcggaggctaaggctggctctgggataatttg

SEQ ID NO: 46268 - DNA, 75 bp, Homo sapiens
aaaaacagttcattcacccctgcaggggcggaggctaaggctggctctgggataatttggcagtatctgtatcca

SEQ ID NO: 46269 - DNA, 75 bp, Homo sapiens
aaacagttcattcacccctgcaggggcggaggctaaggctggctctgggataatttggcagtatctgtatccaaa

SEQ ID NO: 46270 - DNA, 76 bp, Homo sapiens
attcacccctgcaggggcggaggctaaggctggctctgggataatttggcagtatctgtatccaaaggaaacatga

SEQ ID NO: 46271 - DNA, 78 bp, Homo sapiens
ctgcaggggcggaggctaaggctggctctgggataatttggcagtatctgtatccaaaggaaacatgaggactgcctc

SEQ ID NO: 46272 - DNA, 78 bp, Homo sapiens
gggcggaggctaaggctggctctgggataatttggcagtatctgtatccaaaggaaacatgaggactgcctctgcgat

SEQ ID NO: 46273 - DNA, 80 bp, Homo sapiens
gaggctaaggctggctctgggataatttggcagtatctgtatccaaaggaaacatgaggactgcctctgcgattccatcc

SEQ ID NO: 46274 - DNA, 79 bp, Homo sapiens
taaggctggctctgggataatttggcagtatctgtatccaaaggaaacatgaggactgcctctgcgattccatccttgg

SEQ ID NO: 46275 - DNA, 78 bp, Homo sapiens
ctggctctgggataatttggcagtatctgtatccaaaggaaacatgaggactgcctctgcgattccatccttgggaac

SEQ ID NO: 46276 - DNA, 79 bp, Homo sapiens
ctctgggataatttggcagtatctgtatccaaaggaaacatgaggactgcctctgcgattccatccttgggaacgcatc

SEQ ID NO: 46277 - DNA, 79 bp, Homo sapiens
tctgggataatttggcagtatctgtatccaaaggaaacatgaggactgcctctgcgattccatccttgggaacgcatcc

SEQ ID NO: 46278 - DNA, 78 bp, Homo sapiens
atccaaaggaaacatgaggactgcctctgcgattccatccttgggaacgcatcccgcagacactcagacgtgtgggag

SEQ ID NO: 46279 - DNA, 79 bp, Homo sapiens
aaggaaacatgaggactgcctctgcgattccatccttgggaacgcatcccgcagacactcagacgtgtgggaggcaaca

SEQ ID NO: 46280 - DNA, 83 bp, Homo sapiens
actgcctctgcgattccatccttgggaacgcatcccgcagacactcagacgtgtgggaggcaacaggtgcatgaggatgtcac

SEQ ID NO: 46281 - DNA, 80 bp, Homo sapiens
gattccatccttgggaacgcatcccgcagacactcagacgtgtgggaggcaacaggtgcatgaggatgtcacgccagttt

SEQ ID NO: 46282 - DNA, 78 bp, Homo sapiens
ttgggaacgcatcccgcagacactcagacgtgtgggaggcaacaggtgcatgaggatgtcacgccagttttgtttaaa

SEQ ID NO: 46283 - DNA, 78 bp, Homo sapiens
atcccgcagacactcagacgtgtgggaggcaacaggtgcatgaggatgtcacgccagttttgtttaaatgatggaaat

SEQ ID NO: 46284 - DNA, 74 bp, Homo sapiens
agacgtgtgggaggcaacaggtgcatgaggatgtcacgccagttttgtttaaatgatggaaattggaaataacc

SEQ ID NO: 46285 - DNA, 79 bp, Homo sapiens
aacaggtgcatgaggatgtcacgccagttttgtttaaatgatggaaattggaaataacctggacatcagccaatatgca

SEQ ID NO: 46286 - DNA, 78 bp, Homo sapiens
atgaggatgtcacgccagttttgtttaaatgatggaaattggaaataacctggacatcagccaatatgcatgggctaa

SEQ ID NO: 46287 - DNA, 77 bp, Homo sapiens
acgccagttttgtttaaatgatggaaattggaaataacctggacatcagccaatatgcatgggctaagttcatatga

SEQ ID NO: 46288 - DNA, 78 bp, Homo sapiens
agttttgtttaaatgatggaaattggaaataacctggacatcagccaatatgcatgggctaagttcatatgatgcacc

SEQ ID NO: 46289 - DNA, 82 bp, Homo sapiens
aaatgatggaaattggaaataacctggacatcagccaatatgcatgggctaagttcatatgatgcaccggctggaaatgcca

SEQ ID NO: 46290 - DNA, 83 bp, Homo sapiens
attggaaataacctggacatcagccaatatgcatgggctaagttcatatgatgcaccggctggaaatgccagcgtgaaggtga

SEQ ID NO: 46291 - DNA, 84 bp, Homo sapiens
aacctggacatcagccaatatgcatgggctaagttcatatgatgcaccggctggaaatgccagcgtgaaggtgagacacgctaa

SEQ ID NO: 46292 - DNA, 83 bp, Homo sapiens
agccaatatgcatgggctaagttcatatgatgcaccggctggaaatgccagcgtgaaggtgagacacgctaagagagggtctc

SEQ ID NO: 46293 - DNA, 84 bp, Homo sapiens
aagttcatatgatgcaccggctggaaatgccagcgtgaaggtgagacacgctaagagagggtctcctgtgcagacagagttgca

SEQ ID NO: 46294 - DNA, 80 bp, Homo sapiens
accggctggaaatgccagcgtgaaggtgagacacgctaagagagggtctcctgtgcagacagagttgcagaggcacggga

SEQ ID NO: 46295 - DNA, 80 bp, Homo sapiens
acacgctaagagagggtctcctgtgcagacagagttgcagaggcacgggacagaccgtgtgtgctaagccgccacgcgtg

SEQ ID NO: 46296 - DNA, 81 bp, Homo sapiens
ctaagagagggtctcctgtgcagacagagttgcagaggcacgggacagaccgtgtgtgctaagccgccacgcgtgtgaaga

SEQ ID NO: 46297 - DNA, 79 bp, Homo sapiens
aggcacgggacagaccgtgtgtgctaagccgccacgcgtgtgaagagcggaaggccgctcacacatgtttacatgtcta

SEQ ID NO: 46298 - DNA, 81 bp, Homo sapiens
gtgtgtgctaagccgccacgcgtgtgaagagcggaaggccgctcacacatgtttacatgtctaagcacaagattcttggaa

SEQ ID NO: 46299 - DNA, 78 bp, Homo sapiens
aagccgccacgcgtgtgaagagcggaaggccgctcacacatgtttacatgtctaagcacaagattcttggaactgtaa

SEQ ID NO: 46300 - DNA, 79 bp, Homo sapiens
tgaagagcggaaggccgctcacacatgtttacatgtctaagcacaagattcttggaactgtaactacggtggtgtctga

SEQ ID NO: 46301 - DNA, 77 bp, Homo sapiens
aaggccgctcacacatgtttacatgtctaagcacaagattcttggaactgtaactacggtggtgtctgactggacga

SEQ ID NO: 46302 - DNA, 77 bp, Homo sapiens
acacatgtttacatgtctaagcacaagattcttggaactgtaactacggtggtgtctgactggacgactcagaggcg

SEQ ID NO: 46303 - DNA, 76 bp, Homo sapiens
tttacatgtctaagcacaagattcttggaactgtaactacggtggtgtctgactggacgactcagaggcggggatg

SEQ ID NO: 46304 - DNA, 76 bp, Homo sapiens
tctaagcacaagattcttggaactgtaactacggtggtgtctgactggacgactcagaggcggggatgggctttca

SEQ ID NO: 46305 - DNA, 76 bp, Homo sapiens
agattcttggaactgtaactacggtggtgtctgactggacgactcagaggcggggatgggctttcacatcacactc

SEQ ID NO: 46306 - DNA, 76 bp, Homo sapiens
aactgtaactacggtggtgtctgactggacgactcagaggcggggatgggctttcacatcacactctgtgaaacat

SEQ ID NO: 46307 - DNA, 76 bp, Homo sapiens
acggtggtgtctgactggacgactcagaggcggggatgggctttcacatcacactctgtgaaacatttacattttg

SEQ ID NO: 46308 - DNA, 78 bp, Homo sapiens
actggacgactcagaggcggggatgggctttcacatcacactctgtgaaacatttacattttgttccatgtgcattta

SEQ ID NO: 46309 - DNA, 78 bp, Homo sapiens
atgggctttcacatcacactctgtgaaacatttacattttgttccatgtgcatttattgcctattgctaaaaacgtca

SEQ ID NO: 46310 - DNA, 76 bp, Homo sapiens
ctttcacatcacactctgtgaaacatttacattttgttccatgtgcatttattgcctattgctaaaaacgtcaaaa

SEQ ID NO: 46311 - DNA, 69 bp, Homo sapiens
acatttacattttgttccatgtgcatttattgcctattgctaaaaacgtcaaaatttacttgtttaaaa

SEQ ID NO: 46312 - DNA, 67 bp, Homo sapiens
tgtgcatttattgcctattgctaaaaacgtcaaaatttacttgtttaaaaaagaaagtttggcgaaa

SEQ ID NO: 46313 - DNA, 64 bp, Homo sapiens
gcctattgctaaaaacgtcaaaatttacttgtttaaaaaagaaagtttggcgaaaagggagcag

SEQ ID NO: 46314 - DNA, 69 bp, Homo sapiens
aaaagggagcaggcctcggcaagggaccacagctccttaaaaaacagaactattcagggccctccacaa

SEQ ID NO: 46315 - DNA, 70 bp, Homo sapiens
aggcctcggcaagggaccacagctccttaaaaaacagaactattcagggccctccacaaaccacagccaa

SEQ ID NO: 46316 - DNA, 69 bp, Homo sapiens
acagctccttaaaaaacagaactattcagggccctccacaaaccacagccaagcctaaagccgcccaaa

SEQ ID NO: 46317 - DNA, 70 bp, Homo sapiens
aaaaacagaactattcagggccctccacaaaccacagccaagcctaaagccgcccaaacccacagtgctc

SEQ ID NO: 46318 - DNA, 71 bp, Homo sapiens
agaactattcagggccctccacaaaccacagccaagcctaaagccgcccaaacccacagtgctcccaggaa

SEQ ID NO: 46319 - DNA, 70 bp, Homo sapiens
agggccctccacaaaccacagccaagcctaaagccgcccaaacccacagtgctcccaggaaggcgcaaag

SEQ ID NO: 46320 - DNA, 70 bp, Homo sapiens
aaaccacagccaagcctaaagccgcccaaacccacagtgctcccaggaaggcgcaaaggaggccgactta

SEQ ID NO: 46321 - DNA, 72 bp, Homo sapiens
aagccgcccaaacccacagtgctcccaggaaggcgcaaaggaggccgacttactttgcacgcaggtggcgaa

SEQ ID NO: 46322 - DNA, 73 bp, Homo sapiens
acagtgctcccaggaaggcgcaaaggaggccgacttactttgcacgcaggtggcgaagcctgagtttttggtg

SEQ ID NO: 46323 - DNA, 71 bp, Homo sapiens
caaaggaggccgacttactttgcacgcaggtggcgaagcctgagtttttggtgtacggagacccatacttg

SEQ ID NO: 46324 - DNA, 74 bp, Homo sapiens
aggccgacttactttgcacgcaggtggcgaagcctgagtttttggtgtacggagacccatacttgttgatgcag

SEQ ID NO: 46325 - DNA, 74 bp, Homo sapiens
aggtggcgaagcctgagtttttggtgtacggagacccatacttgttgatgcagtctgcaggaagaaagggaatg

SEQ ID NO: 46326 - DNA, 78 bp, Homo sapiens
ttttggtgtacggagacccatacttgttgatgcagtctgcaggaagaaagggaatggatgtcagtcatccttacaaga

SEQ ID NO: 46327 - DNA, 81 bp, Homo sapiens
agacccatacttgttgatgcagtctgcaggaagaaagggaatggatgtcagtcatccttacaagaccggatggactgcaga

SEQ ID NO: 46328 - DNA, 83 bp, Homo sapiens
tacttgttgatgcagtctgcaggaagaaagggaatggatgtcagtcatccttacaagaccggatggactgcagagcctctgct

SEQ ID NO: 46329 - DNA, 82 bp, Homo sapiens
aagaaagggaatggatgtcagtcatccttacaagaccggatggactgcagagcctctgcttctgagacgctctggagaggca

SEQ ID NO: 46330 - DNA, 85 bp, Homo sapiens
atggatgtcagtcatccttacaagaccggatggactgcagagcctctgcttctgagacgctctggagaggcagttactctgctta

SEQ ID NO: 46331 - DNA, 81 bp, Homo sapiens
agtcatccttacaagaccggatggactgcagagcctctgcttctgagacgctctggagaggcagttactctgcttacctgg

SEQ ID NO: 46332 - DNA, 83 bp, Homo sapiens
ttacaagaccggatggactgcagagcctctgcttctgagacgctctggagaggcagttactctgcttacctggggtgctatca

SEQ ID NO: 46333 - DNA, 84 bp, Homo sapiens
atggactgcagagcctctgcttctgagacgctctggagaggcagttactctgcttacctggggtgctatcatcctccagaaaca

SEQ ID NO: 46334 - DNA, 81 bp, Homo sapiens
cctctgcttctgagacgctctggagaggcagttactctgcttacctggggtgctatcatcctccagaaacaatgccgctta

SEQ ID NO: 46335 - DNA, 81 bp, Homo sapiens
tgagacgctctggagaggcagttactctgcttacctggggtgctatcatcctccagaaacaatgccgcttagcttgtgtta

SEQ ID NO: 46336 - DNA, 77 bp, Homo sapiens
tggagaggcagttactctgcttacctggggtgctatcatcctccagaaacaatgccgcttagcttgtgttaataaaa

SEQ ID NO: 46337 - DNA, 74 bp, Homo sapiens
aggcagttactctgcttacctggggtgctatcatcctccagaaacaatgccgcttagcttgtgttaataaaaaa

SEQ ID NO: 46338 - DNA, 70 bp, Homo sapiens
ctccagaaacaatgccgcttagcttgtgttaataaaaaacatgttagccccaaccctgacaaacaggaaa

SEQ ID NO: 46339 - DNA, 68 bp, Homo sapiens
aaacaatgccgcttagcttgtgttaataaaaaacatgttagccccaaccctgacaaacaggaaaccac

SEQ ID NO: 46340 - DNA, 69 bp, Homo sapiens
ttagcttgtgttaataaaaaacatgttagccccaaccctgacaaacaggaaaccacctccaccaactca

SEQ ID NO: 46341 - DNA, 71 bp, Homo sapiens
aaaacatgttagccccaaccctgacaaacaggaaaccacctccaccaactcagcggagttgtgcacccaca

SEQ ID NO: 46342 - DNA, 72 bp, Homo sapiens
cccaaccctgacaaacaggaaaccacctccaccaactcagcggagttgtgcacccacagtcaagtgcgtaaa

SEQ ID NO: 46343 - DNA, 72 bp, Homo sapiens
aaacaggaaaccacctccaccaactcagcggagttgtgcacccacagtcaagtgcgtaaagcaccgcccgcc

SEQ ID NO: 46344 - DNA, 72 bp, Homo sapiens
accaactcagcggagttgtgcacccacagtcaagtgcgtaaagcaccgcccgccgtttcgagggggctcctc

SEQ ID NO: 46345 - DNA, 73 bp, Homo sapiens
gagttgtgcacccacagtcaagtgcgtaaagcaccgcccgccgtttcgagggggctcctcctgccatacggga

SEQ ID NO: 46346 - DNA, 71 bp, Homo sapiens
acccacagtcaagtgcgtaaagcaccgcccgccgtttcgagggggctcctcctgccatacgggagaatcac

SEQ ID NO: 46347 - DNA, 70 bp, Homo sapiens
agtcaagtgcgtaaagcaccgcccgccgtttcgagggggctcctcctgccatacgggagaatcaccggga

SEQ ID NO: 46348 - DNA, 71 bp, Homo sapiens
gtaaagcaccgcccgccgtttcgagggggctcctcctgccatacgggagaatcaccgggaatgctcagtaa

SEQ ID NO: 46349 - DNA, 70 bp, Homo sapiens
ccgtttcgagggggctcctcctgccatacgggagaatcaccgggaatgctcagtaagttcctgacggtac

SEQ ID NO: 46350 - DNA, 72 bp, Homo sapiens
ggggctcctcctgccatacgggagaatcaccgggaatgctcagtaagttcctgacggtactcgaaaagctaa

SEQ ID NO: 46351 - DNA, 71 bp, Homo sapiens
ctgccatacgggagaatcaccgggaatgctcagtaagttcctgacggtactcgaaaagctaaacttcattt

SEQ ID NO: 46352 - DNA, 70 bp, Homo sapiens
atacgggagaatcaccgggaatgctcagtaagttcctgacggtactcgaaaagctaaacttcattttcca

SEQ ID NO: 46353 - DNA, 69 bp, Homo sapiens
atcaccgggaatgctcagtaagttcctgacggtactcgaaaagctaaacttcattttccagtggacccc

SEQ ID NO: 46354 - DNA, 69 bp, Homo sapiens
atgctcagtaagttcctgacggtactcgaaaagctaaacttcattttccagtggacccccattgggaaa

SEQ ID NO: 46355 - DNA, 69 bp, Homo sapiens
ttcctgacggtactcgaaaagctaaacttcattttccagtggacccccattgggaaacgctgtgcttaa

SEQ ID NO: 46356 - DNA, 68 bp, Homo sapiens
ggtactcgaaaagctaaacttcattttccagtggacccccattgggaaacgctgtgcttaactggaaa

SEQ ID NO: 46357 - DNA, 70 bp, Homo sapiens
attttccagtggacccccattgggaaacgctgtgcttaactggaaagccactctgctttggagaaagccc

SEQ ID NO: 46358 - DNA, 75 bp, Homo sapiens
tggacccccattgggaaacgctgtgcttaactggaaagccactctgctttggagaaagcccctccatgctctctg

SEQ ID NO: 46359 - DNA, 78 bp, Homo sapiens
attgggaaacgctgtgcttaactggaaagccactctgctttggagaaagcccctccatgctctctggctggctgaaca

SEQ ID NO: 46360 - DNA, 83 bp, Homo sapiens
actggaaagccactctgctttggagaaagcccctccatgctctctggctggctgaacacagcttgacagcagacatcccgcta

SEQ ID NO: 46361 - DNA, 86 bp, Homo sapiens
catgctctctggctggctgaacacagcttgacagcagacatcccgctagggcggcggggggaggcgaggcctggcacatgcacatc

SEQ ID NO: 46362 - DNA, 84 bp, Homo sapiens
tctctggctggctgaacacagcttgacagcagacatcccgctagggcggcggggggaggcgaggcctggcacatgcacatccag

SEQ ID NO: 46363 - DNA, 78 bp, Homo sapiens
aacacagcttgacagcagacatcccgctagggcggcggggggaggcgaggcctggcacatgcacatccagggataacc

SEQ ID NO: 46364 - DNA, 77 bp, Homo sapiens
acagcagacatcccgctagggcggcggggggaggcgaggcctggcacatgcacatccagggataacccgaagcgtga

SEQ ID NO: 46365 - DNA, 73 bp, Homo sapiens
acatcccgctagggcggcggggggaggcgaggcctggcacatgcacatccagggataacccgaagcgtgaggt

SEQ ID NO: 46366 - DNA, 75 bp, Homo sapiens
tagggcggcggggggaggcgaggcctggcacatgcacatccagggataacccgaagcgtgaggttgtgcagaacg

SEQ ID NO: 46367 - DNA, 78 bp, Homo sapiens
gaggcgaggcctggcacatgcacatccagggataacccgaagcgtgaggttgtgcagaacggtgcggggcctctcgac

SEQ ID NO: 46368 - DNA, 76 bp, Homo sapiens
ctggcacatgcacatccagggataacccgaagcgtgaggttgtgcagaacggtgcggggcctctcgacctggccct

SEQ ID NO: 46369 - DNA, 75 bp, Homo sapiens
atgcacatccagggataacccgaagcgtgaggttgtgcagaacggtgcggggcctctcgacctggcccttcagtg

SEQ ID NO: 46370 - DNA, 71 bp, Homo sapiens
gataacccgaagcgtgaggttgtgcagaacggtgcggggcctctcgacctggcccttcagtgggttactgt

SEQ ID NO: 46371 - DNA, 73 bp, Homo sapiens
aagcgtgaggttgtgcagaacggtgcggggcctctcgacctggcccttcagtgggttactgttgcttatccag

SEQ ID NO: 46372 - DNA, 75 bp, Homo sapiens
ggtgcggggcctctcgacctggcccttcagtgggttactgttgcttatccaggcgcagaacggcacggatgaaca

SEQ ID NO: 46373 - DNA, 75 bp, Homo sapiens
ggcctctcgacctggcccttcagtgggttactgttgcttatccaggcgcagaacggcacggatgaacagcggaag

SEQ ID NO: 46374 - DNA, 76 bp, Homo sapiens
acctggcccttcagtgggttactgttgcttatccaggcgcagaacggcacggatgaacagcggaaggcctcctgca

SEQ ID NO: 46375 - DNA, 80 bp, Homo sapiens
ttcagtgggttactgttgcttatccaggcgcagaacggcacggatgaacagcggaaggcctcctgcaggtgtgctgtgga

SEQ ID NO: 46376 - DNA, 81 bp, Homo sapiens
tactgttgcttatccaggcgcagaacggcacggatgaacagcggaaggcctcctgcaggtgtgctgtggaccgctggccac

SEQ ID NO: 46377 - DNA, 78 bp, Homo sapiens
agaacggcacggatgaacagcggaaggcctcctgcaggtgtgctgtggaccgctggccaccccctgcttcagaactca

SEQ ID NO: 46378 - DNA, 77 bp, Homo sapiens
aaggcctcctgcaggtgtgctgtggaccgctggccaccccctgcttcagaactcagtcctcgctggtgcctgggctt

SEQ ID NO: 46379 - DNA, 78 bp, Homo sapiens
tgtggaccgctggccaccccctgcttcagaactcagtcctcgctggtgcctgggctttctgggccagtgccagaccca

SEQ ID NO: 46380 - DNA, 77 bp, Homo sapiens
tggccaccccctgcttcagaactcagtcctcgctggtgcctgggctttctgggccagtgccagacccactgtgtttg

SEQ ID NO: 46381 - DNA, 77 bp, Homo sapiens
agaactcagtcctcgctggtgcctgggctttctgggccagtgccagacccactgtgtttgttccagatatggaccca

SEQ ID NO: 46382 - DNA, 76 bp, Homo sapiens
tcctcgctggtgcctgggctttctgggccagtgccagacccactgtgtttgttccagatatggacccagggaagga

SEQ ID NO: 46383 - DNA, 72 bp, Homo sapiens
tgggctttctgggccagtgccagacccactgtgtttgttccagatatggacccagggaaggaccctttaaga

SEQ ID NO: 46384 - DNA, 72 bp, Homo sapiens
tgggccagtgccagacccactgtgtttgttccagatatggacccagggaaggaccctttaagaggacattta

SEQ ID NO: 46385 - DNA, 68 bp, Homo sapiens
ccagacccactgtgtttgttccagatatggacccagggaaggaccctttaagaggacatttactaaaa

SEQ ID NO: 46386 - DNA, 66 bp, Homo sapiens
acccagggaaggaccctttaagaggacatttactaaaatgcactttgcaacattaaaaagaagacc

SEQ ID NO: 46387 - DNA, 69 bp, Homo sapiens
gaaggaccctttaagaggacatttactaaaatgcactttgcaacattaaaaagaagaccctggaataca

SEQ ID NO: 46388 - DNA, 75 bp, Homo sapiens
tactaaaatgcactttgcaacattaaaaagaagaccctggaatacatttctctccttctaagtgaaatgctctca

SEQ ID NO: 46389 - DNA, 74 bp, Homo sapiens
actttgcaacattaaaaagaagaccctggaatacatttctctccttctaagtgaaatgctctcaaagagctcta

SEQ ID NO: 46390 - DNA, 75 bp, Homo sapiens
aagaagaccctggaatacatttctctccttctaagtgaaatgctctcaaagagctctaagatggtgtcagttaaa

SEQ ID NO: 46391 - DNA, 74 bp, Homo sapiens
aatacatttctctccttctaagtgaaatgctctcaaagagctctaagatggtgtcagttaaacgggctgacccg

SEQ ID NO: 46392 - DNA, 74 bp, Homo sapiens
ttctctccttctaagtgaaatgctctcaaagagctctaagatggtgtcagttaaacgggctgacccggggtctc

SEQ ID NO: 46393 - DNA, 73 bp, Homo sapiens
ctaagtgaaatgctctcaaagagctctaagatggtgtcagttaaacgggctgacccggggtctctgggtttca

SEQ ID NO: 46394 - DNA, 72 bp, Homo sapiens
ctctcaaagagctctaagatggtgtcagttaaacgggctgacccggggtctctgggtttcactttcttgctg

SEQ ID NO: 46395 - DNA, 70 bp, Homo sapiens
tctaagatggtgtcagttaaacgggctgacccggggtctctgggtttcactttcttgctgtcctcccttc

SEQ ID NO: 46396 - DNA, 68 bp, Homo sapiens
atggtgtcagttaaacgggctgacccggggtctctgggtttcactttcttgctgtcctcccttcccaa

SEQ ID NO: 46397 - DNA, 68 bp, Homo sapiens
acccggggtctctgggtttcactttcttgctgtcctcccttcccaagtgtacagtgggggtctccaga

SEQ ID NO: 46398 - DNA, 74 bp, Homo sapiens
tctgggtttcactttcttgctgtcctcccttcccaagtgtacagtgggggtctccagaggccgccccacatgca

SEQ ID NO: 46399 - DNA, 77 bp, Homo sapiens
actttcttgctgtcctcccttcccaagtgtacagtgggggtctccagaggccgccccacatgcaccagctgctctga

SEQ ID NO: 46400 - DNA, 80 bp, Homo sapiens
tgtcctcccttcccaagtgtacagtgggggtctccagaggccgccccacatgcaccagctgctctgatggctgagataac

SEQ ID NO: 46401 - DNA, 80 bp, Homo sapiens
gtgggggtctccagaggccgccccacatgcaccagctgctctgatggctgagataacgtctggcattcccgttcttcaaa

SEQ ID NO: 46402 - DNA, 80 bp, Homo sapiens
ccccacatgcaccagctgctctgatggctgagataacgtctggcattcccgttcttcaaattaaacagaaacactattca

SEQ ID NO: 46403 - DNA, 73 bp, Homo sapiens
tctgatggctgagataacgtctggcattcccgttcttcaaattaaacagaaacactattcagtgttttcggtt

SEQ ID NO: 46404 - DNA, 69 bp, Homo sapiens
ctgagataacgtctggcattcccgttcttcaaattaaacagaaacactattcagtgttttcggttttaa

SEQ ID NO: 46405 - DNA, 67 bp, Homo sapiens
acgtctggcattcccgttcttcaaattaaacagaaacactattcagtgttttcggttttaattaaga

SEQ ID NO: 46406 - DNA, 69 bp, Homo sapiens
ttaaacagaaacactattcagtgttttcggttttaattaagaatacggtaaatatcagtcaatacagcc

SEQ ID NO: 46407 - DNA, 73 bp, Homo sapiens
acactattcagtgttttcggttttaattaagaatacggtaaatatcagtcaatacagcccacatgaacatgga

SEQ ID NO: 46408 - DNA, 71 bp, Homo sapiens
attcagtgttttcggttttaattaagaatacggtaaatatcagtcaatacagcccacatgaacatggaccc

SEQ ID NO: 46409 - DNA, 69 bp, Homo sapiens
ttcggttttaattaagaatacggtaaatatcagtcaatacagcccacatgaacatggacccctttgggg

SEQ ID NO: 46410 - DNA, 74 bp, Homo sapiens
attaagaatacggtaaatatcagtcaatacagcccacatgaacatggacccctttggggtcctcaatgacttca

SEQ ID NO: 46411 - DNA, 79 bp, Homo sapiens
taaatatcagtcaatacagcccacatgaacatggacccctttggggtcctcaatgacttcagaagtgattagtgctgag

SEQ ID NO: 46412 - DNA, 76 bp, Homo sapiens
aatacagcccacatgaacatggacccctttggggtcctcaatgacttcagaagtgattagtgctgaggtcagaaaa

SEQ ID NO: 46413 - DNA, 74 bp, Homo sapiens
acatgaacatggacccctttggggtcctcaatgacttcagaagtgattagtgctgaggtcagaaaaccggagga

SEQ ID NO: 46414 - DNA, 71 bp, Homo sapiens
atggacccctttggggtcctcaatgacttcagaagtgattagtgctgaggtcagaaaaccggaggacaaaa

SEQ ID NO: 46415 - DNA, 75 bp, Homo sapiens
aatgacttcagaagtgattagtgctgaggtcagaaaaccggaggacaaaatcaattacacgtcctgacaaggagc

SEQ ID NO: 46416 - DNA, 79 bp, Homo sapiens
aggacaaaatcaattacacgtcctgacaaggagctgagcctggcatcaactcagagaaggggtttgcagataacagcat

SEQ ID NO: 46417 - DNA, 79 bp, Homo sapiens
aaaatcaattacacgtcctgacaaggagctgagcctggcatcaactcagagaaggggtttgcagataacagcattcacc

SEQ ID NO: 46418 - DNA, 78 bp, Homo sapiens
tggcatcaactcagagaaggggtttgcagataacagcattcacctgaggttccactaacacggaataaagctgtggta

SEQ ID NO: 46419 - DNA, 75 bp, Homo sapiens
tcagagaaggggtttgcagataacagcattcacctgaggttccactaacacggaataaagctgtggtataaaata

SEQ ID NO: 46420 - DNA, 74 bp, Homo sapiens
gggtttgcagataacagcattcacctgaggttccactaacacggaataaagctgtggtataaaataaagagaga

SEQ ID NO: 46421 - DNA, 72 bp, Homo sapiens
agataacagcattcacctgaggttccactaacacggaataaagctgtggtataaaataaagagagaaacttg

SEQ ID NO: 46422 - DNA, 71 bp, Homo sapiens
attcacctgaggttccactaacacggaataaagctgtggtataaaataaagagagaaacttgtgtttctga

SEQ ID NO: 46423 - DNA, 71 bp, Homo sapiens
aggttccactaacacggaataaagctgtggtataaaataaagagagaaacttgtgtttctgacctgcatgt

SEQ ID NO: 46424 - DNA, 72 bp, Homo sapiens
taacacggaataaagctgtggtataaaataaagagagaaacttgtgtttctgacctgcatgttccggacagt

SEQ ID NO: 46425 - DNA, 75 bp, Homo sapiens
taaagctgtggtataaaataaagagagaaacttgtgtttctgacctgcatgttccggacagttccacgtgcacca

SEQ ID NO: 46426 - DNA, 75 bp, Homo sapiens
aaataaagagagaaacttgtgtttctgacctgcatgttccggacagttccacgtgcaccatgtgattaagaatct

SEQ ID NO: 46427 - DNA, 76 bp, Homo sapiens
aagagagaaacttgtgtttctgacctgcatgttccggacagttccacgtgcaccatgtgattaagaatcttccttc

SEQ ID NO: 46428 - DNA, 77 bp, Homo sapiens
ctgcatgttccggacagttccacgtgcaccatgtgattaagaatcttccttccaagagttacgtggtgaggagattc

SEQ ID NO: 46429 - DNA, 77 bp, Homo sapiens
ggacagttccacgtgcaccatgtgattaagaatcttccttccaagagttacgtggtgaggagattcctccaacatga

SEQ ID NO: 46430 - DNA, 76 bp, Homo sapiens
gttccacgtgcaccatgtgattaagaatcttccttccaagagttacgtggtgaggagattcctccaacatgaaaca

SEQ ID NO: 46431 - DNA, 73 bp, Homo sapiens
accatgtgattaagaatcttccttccaagagttacgtggtgaggagattcctccaacatgaaacacgcacccc

SEQ ID NO: 46432 - DNA, 74 bp, Homo sapiens
agttacgtggtgaggagattcctccaacatgaaacacgcacccccaactatgcctctacgacaaccagagtaga

SEQ ID NO: 46433 - DNA, 74 bp, Homo sapiens
agattcctccaacatgaaacacgcacccccaactatgcctctacgacaaccagagtagagaagtaattgagact

SEQ ID NO: 46434 - DNA, 71 bp, Homo sapiens
aaacacgcacccccaactatgcctctacgacaaccagagtagagaagtaattgagacttacctaagtatct

SEQ ID NO: 46435 - DNA, 70 bp, Homo sapiens
aactatgcctctacgacaaccagagtagagaagtaattgagacttacctaagtatcttgggtaaaaataa

SEQ ID NO: 46436 - DNA, 71 bp, Homo sapiens
tctacgacaaccagagtagagaagtaattgagacttacctaagtatcttgggtaaaaataatcctgtggaa

SEQ ID NO: 46437 - DNA, 69 bp, Homo sapiens
caaccagagtagagaagtaattgagacttacctaagtatcttgggtaaaaataatcctgtggaaaaaga

SEQ ID NO: 46438 - DNA, 76 bp, Homo sapiens
aaaaagaaaaggcaagcattgaccggcacactacgagggtctctgaacaacataagcatcagctggttaatcagag

SEQ ID NO: 46439 - DNA, 77 bp, Homo sapiens
aaaagaaaaggcaagcattgaccggcacactacgagggtctctgaacaacataagcatcagctggttaatcagaggc

SEQ ID NO: 46440 - DNA, 80 bp, Homo sapiens
aaaaggcaagcattgaccggcacactacgagggtctctgaacaacataagcatcagctggttaatcagaggctgctctcg

SEQ ID NO: 46441 - DNA, 81 bp, Homo sapiens
attgaccggcacactacgagggtctctgaacaacataagcatcagctggttaatcagaggctgctctcggggcagccagag

SEQ ID NO: 46442 - DNA, 79 bp, Homo sapiens
acactacgagggtctctgaacaacataagcatcagctggttaatcagaggctgctctcggggcagccagagggccgccc

SEQ ID NO: 46443 - DNA, 77 bp, Homo sapiens
gggtctctgaacaacataagcatcagctggttaatcagaggctgctctcggggcagccagagggccgccccacccgg

SEQ ID NO: 46444 - DNA, 76 bp, Homo sapiens
acaacataagcatcagctggttaatcagaggctgctctcggggcagccagagggccgccccacccggggaactgag

SEQ ID NO: 46445 - DNA, 74 bp, Homo sapiens
atcagctggttaatcagaggctgctctcggggcagccagagggccgccccacccggggaactgaggggaagtga

SEQ ID NO: 46446 - DNA, 70 bp, Homo sapiens
ttaatcagaggctgctctcggggcagccagagggccgccccacccggggaactgaggggaagtgaccggg

SEQ ID NO: 46447 - DNA, 72 bp, Homo sapiens
tctcggggcagccagagggccgccccacccggggaactgaggggaagtgaccggggcacgactgctgtgaga

SEQ ID NO: 46448 - DNA, 70 bp, Homo sapiens
agccagagggccgccccacccggggaactgaggggaagtgaccggggcacgactgctgtgagaccaacaa

SEQ ID NO: 46449 - DNA, 69 bp, Homo sapiens
agggccgccccacccggggaactgaggggaagtgaccggggcacgactgctgtgagaccaacaagcaaa

SEQ ID NO: 46450 - DNA, 70 bp, Homo sapiens
acccggggaactgaggggaagtgaccggggcacgactgctgtgagaccaacaagcaaaggcagggccatt

SEQ ID NO: 46451 - DNA, 74 bp, Homo sapiens
aggggaagtgaccggggcacgactgctgtgagaccaacaagcaaaggcagggccatttccagctgcgtaggaag

SEQ ID NO: 46452 - DNA, 77 bp, Homo sapiens
agtgaccggggcacgactgctgtgagaccaacaagcaaaggcagggccatttccagctgcgtaggaagtgctaccag

SEQ ID NO: 46453 - DNA, 77 bp, Homo sapiens
acgactgctgtgagaccaacaagcaaaggcagggccatttccagctgcgtaggaagtgctaccaggtgtgtccaggg

SEQ ID NO: 46454 - DNA, 77 bp, Homo sapiens
tgtgagaccaacaagcaaaggcagggccatttccagctgcgtaggaagtgctaccaggtgtgtccaggggagaggcc

SEQ ID NO: 46455 - DNA, 75 bp, Homo sapiens
aacaagcaaaggcagggccatttccagctgcgtaggaagtgctaccaggtgtgtccaggggagaggcctgcccag

SEQ ID NO: 46456 - DNA, 76 bp, Homo sapiens
acaagcaaaggcagggccatttccagctgcgtaggaagtgctaccaggtgtgtccaggggagaggcctgcccagga

SEQ ID NO: 46457 - DNA, 75 bp, Homo sapiens
aaggcagggccatttccagctgcgtaggaagtgctaccaggtgtgtccaggggagaggcctgcccaggaggacaa

SEQ ID NO: 46458 - DNA, 76 bp, Homo sapiens
atttccagctgcgtaggaagtgctaccaggtgtgtccaggggagaggcctgcccaggaggacaagaatgcttccaa

SEQ ID NO: 46459 - DNA, 72 bp, Homo sapiens
gtaggaagtgctaccaggtgtgtccaggggagaggcctgcccaggaggacaagaatgcttccaagtaaaacc

SEQ ID NO: 46460 - DNA, 73 bp, Homo sapiens
tgctaccaggtgtgtccaggggagaggcctgcccaggaggacaagaatgcttccaagtaaaaccccactctta

SEQ ID NO: 46461 - DNA, 71 bp, Homo sapiens
caggtgtgtccaggggagaggcctgcccaggaggacaagaatgcttccaagtaaaaccccactcttagttc

SEQ ID NO: 46462 - DNA, 70 bp, Homo sapiens
tgtccaggggagaggcctgcccaggaggacaagaatgcttccaagtaaaaccccactcttagttccctgt

SEQ ID NO: 46463 - DNA, 70 bp, Homo sapiens
agaggcctgcccaggaggacaagaatgcttccaagtaaaaccccactcttagttccctgttgacataagg

SEQ ID NO: 46464 - DNA, 69 bp, Homo sapiens
ccaggaggacaagaatgcttccaagtaaaaccccactcttagttccctgttgacataagggtctctaaa

SEQ ID NO: 46465 - DNA, 66 bp, Homo sapiens
aagaatgcttccaagtaaaaccccactcttagttccctgttgacataagggtctctaaaacccaaa

SEQ ID NO: 46466 - DNA, 65 bp, Homo sapiens
ttccaagtaaaaccccactcttagttccctgttgacataagggtctctaaaacccaaagacctta

SEQ ID NO: 46467 - DNA, 64 bp, Homo sapiens
taaaaccccactcttagttccctgttgacataagggtctctaaaacccaaagaccttagttccc

SEQ ID NO: 46468 - DNA, 67 bp, Homo sapiens
ctcttagttccctgttgacataagggtctctaaaacccaaagaccttagttccctgttgacacaaag

SEQ ID NO: 46469 - DNA, 68 bp, Homo sapiens
cctgttgacataagggtctctaaaacccaaagaccttagttccctgttgacacaaaggtctctcaaaa

SEQ ID NO: 46470 - DNA, 64 bp, Homo sapiens
taaaacccaaagaccttagttccctgttgacacaaaggtctctcaaaaccccaaagacctttct

SEQ ID NO: 46471 - DNA, 69 bp, Homo sapiens
ttagttccctgttgacacaaaggtctctcaaaaccccaaagacctttcttttggcacacgggcattgat

SEQ ID NO: 46472 - DNA, 71 bp, Homo sapiens
gttgacacaaaggtctctcaaaaccccaaagacctttcttttggcacacgggcattgatttgcacttatag

SEQ ID NO: 46473 - DNA, 70 bp, Homo sapiens
acaaaggtctctcaaaaccccaaagacctttcttttggcacacgggcattgatttgcacttatagtattg

SEQ ID NO: 46474 - DNA, 68 bp, Homo sapiens
aaaaccccaaagacctttcttttggcacacgggcattgatttgcacttatagtattggtgaaacaaaa

SEQ ID NO: 46475 - DNA, 70 bp, Homo sapiens
aaagacctttcttttggcacacgggcattgatttgcacttatagtattggtgaaacaaaattggtactgg

SEQ ID NO: 46476 - DNA, 74 bp, Homo sapiens
ttcttttggcacacgggcattgatttgcacttatagtattggtgaaacaaaattggtactgggtgaggatggag

SEQ ID NO: 46477 - DNA, 75 bp, Homo sapiens
acacgggcattgatttgcacttatagtattggtgaaacaaaattggtactgggtgaggatggaggctgtaatgaa

SEQ ID NO: 46478 - DNA, 73 bp, Homo sapiens
tttgcacttatagtattggtgaaacaaaattggtactgggtgaggatggaggctgtaatgaagggtcttctta

SEQ ID NO: 46479 - DNA, 74 bp, Homo sapiens
aaacaaaattggtactgggtgaggatggaggctgtaatgaagggtcttcttatccatgaaagcgcactgacgag

SEQ ID NO: 46480 - DNA, 76 bp, Homo sapiens
aattggtactgggtgaggatggaggctgtaatgaagggtcttcttatccatgaaagcgcactgacgaggtccacat

SEQ ID NO: 46481 - DNA, 80 bp, Homo sapiens
aggatggaggctgtaatgaagggtcttcttatccatgaaagcgcactgacgaggtccacattcgacacaagtgagctgtc

SEQ ID NO: 46482 - DNA, 80 bp, Homo sapiens
ctgtaatgaagggtcttcttatccatgaaagcgcactgacgaggtccacattcgacacaagtgagctgtcgagtcctgga

SEQ ID NO: 46483 - DNA, 79 bp, Homo sapiens
atgaagggtcttcttatccatgaaagcgcactgacgaggtccacattcgacacaagtgagctgtcgagtcctggaacca

SEQ ID NO: 46484 - DNA, 81 bp, Homo sapiens
tcttatccatgaaagcgcactgacgaggtccacattcgacacaagtgagctgtcgagtcctggaaccacctgcctgtcact

SEQ ID NO: 46485 - DNA, 80 bp, Homo sapiens
ctgacgaggtccacattcgacacaagtgagctgtcgagtcctggaaccacctgcctgtcacttggccagcagaggccggc

SEQ ID NO: 46486 - DNA, 76 bp, Homo sapiens
acattcgacacaagtgagctgtcgagtcctggaaccacctgcctgtcacttggccagcagaggccggccggaaact

SEQ ID NO: 46487 - DNA, 76 bp, Homo sapiens
acaagtgagctgtcgagtcctggaaccacctgcctgtcacttggccagcagaggccggccggaaacttcttcagga

SEQ ID NO: 46488 - DNA, 73 bp, Homo sapiens
ctgtcgagtcctggaaccacctgcctgtcacttggccagcagaggccggccggaaacttcttcaggatccttt

SEQ ID NO: 46489 - DNA, 75 bp, Homo sapiens
aaccacctgcctgtcacttggccagcagaggccggccggaaacttcttcaggatccttttgccatggcccacaga

SEQ ID NO: 46490 - DNA, 77 bp, Homo sapiens
tgtcacttggccagcagaggccggccggaaacttcttcaggatccttttgccatggcccacagattctagggccaca

SEQ ID NO: 46491 - DNA, 71 bp, Homo sapiens
aggccggccggaaacttcttcaggatccttttgccatggcccacagattctagggccacagcctggttaaa

SEQ ID NO: 46492 - DNA, 75 bp, Homo sapiens
aaacttcttcaggatccttttgccatggcccacagattctagggccacagcctggttaaagcagcctccaatctc

SEQ ID NO: 46493 - DNA, 77 bp, Homo sapiens
gatccttttgccatggcccacagattctagggccacagcctggttaaagcagcctccaatctccagcttagggtcaa

SEQ ID NO: 46494 - DNA, 78 bp, Homo sapiens
ttttgccatggcccacagattctagggccacagcctggttaaagcagcctccaatctccagcttagggtcaaccatgc

SEQ ID NO: 46495 - DNA, 77 bp, Homo sapiens
cccacagattctagggccacagcctggttaaagcagcctccaatctccagcttagggtcaaccatgccagcagtttg

SEQ ID NO: 46496 - DNA, 76 bp, Homo sapiens
tggttaaagcagcctccaatctccagcttagggtcaaccatgccagcagtttggccctaaatgctctaaaccaaga

SEQ ID NO: 46497 - DNA, 76 bp, Homo sapiens
aaagcagcctccaatctccagcttagggtcaaccatgccagcagtttggccctaaatgctctaaaccaagagacca

SEQ ID NO: 46498 - DNA, 79 bp, Homo sapiens
ccaatctccagcttagggtcaaccatgccagcagtttggccctaaatgctctaaaccaagagaccacagtcatggcaga

SEQ ID NO: 46499 - DNA, 77 bp, Homo sapiens
cttagggtcaaccatgccagcagtttggccctaaatgctctaaaccaagagaccacagtcatggcagaatagtccca

SEQ ID NO: 46500 - DNA, 77 bp, Homo sapiens
agtttggccctaaatgctctaaaccaagagaccacagtcatggcagaatagtcccagcggcctctccatgctgggta

SEQ ID NO: 46501 - DNA, 81 bp, Homo sapiens
taaatgctctaaaccaagagaccacagtcatggcagaatagtcccagcggcctctccatgctgggtatgagtcagcatttt

SEQ ID NO: 46502 - DNA, 80 bp, Homo sapiens
taaaccaagagaccacagtcatggcagaatagtcccagcggcctctccatgctgggtatgagtcagcatttttacactat

SEQ ID NO: 46503 - DNA, 78 bp, Homo sapiens
cagaatagtcccagcggcctctccatgctgggtatgagtcagcatttttacactattttatgaaatcctcacaaataa

SEQ ID NO: 46504 - DNA, 77 bp, Homo sapiens
tagtcccagcggcctctccatgctgggtatgagtcagcatttttacactattttatgaaatcctcacaaataacacc

SEQ ID NO: 46505 - DNA, 75 bp, Homo sapiens
tctccatgctgggtatgagtcagcatttttacactattttatgaaatcctcacaaataacacccaggaaggtctt

SEQ ID NO: 46506 - DNA, 70 bp, Homo sapiens
gagtcagcatttttacactattttatgaaatcctcacaaataacacccaggaaggtctttttaatcccat

SEQ ID NO: 46507 - DNA, 71 bp, Homo sapiens
acactattttatgaaatcctcacaaataacacccaggaaggtctttttaatcccattatcaggaatgagga

SEQ ID NO: 46508 - DNA, 69 bp, Homo sapiens
ttttatgaaatcctcacaaataacacccaggaaggtctttttaatcccattatcaggaatgaggaaacc

SEQ ID NO: 46509 - DNA, 68 bp, Homo sapiens
acaaataacacccaggaaggtctttttaatcccattatcaggaatgaggaaacccggcttcaggatgg

SEQ ID NO: 46510 - DNA, 69 bp, Homo sapiens
taacacccaggaaggtctttttaatcccattatcaggaatgaggaaacccggcttcaggatggttgtgg

SEQ ID NO: 46511 - DNA, 69 bp, Homo sapiens
aaggtctttttaatcccattatcaggaatgaggaaacccggcttcaggatggttgtgggattcacctgg

SEQ ID NO: 46512 - DNA, 74 bp, Homo sapiens
ttaatcccattatcaggaatgaggaaacccggcttcaggatggttgtgggattcacctgggggcatgaaggtca

SEQ ID NO: 46513 - DNA, 76 bp, Homo sapiens
tatcaggaatgaggaaacccggcttcaggatggttgtgggattcacctgggggcatgaaggtcaggattagcaggc

SEQ ID NO: 46514 - DNA, 74 bp, Homo sapiens
aacccggcttcaggatggttgtgggattcacctgggggcatgaaggtcaggattagcaggcgctggtagcattt

SEQ ID NO: 46515 - DNA, 82 bp, Homo sapiens
ttcaggatggttgtgggattcacctgggggcatgaaggtcaggattagcaggcgctggtagcattttgcagagtagcagaca

SEQ ID NO: 46516 - DNA, 81 bp, Homo sapiens
ttgtgggattcacctgggggcatgaaggtcaggattagcaggcgctggtagcattttgcagagtagcagacagaggcggta

SEQ ID NO: 46517 - DNA, 79 bp, Homo sapiens
attcacctgggggcatgaaggtcaggattagcaggcgctggtagcattttgcagagtagcagacagaggcggtaggtac

SEQ ID NO: 46518 - DNA, 80 bp, Homo sapiens
aggattagcaggcgctggtagcattttgcagagtagcagacagaggcggtaggtacccagcgccgtctgcaacgcgcctc

SEQ ID NO: 46519 - DNA, 82 bp, Homo sapiens
aggcgctggtagcattttgcagagtagcagacagaggcggtaggtacccagcgccgtctgcaacgcgcctctggcttcatgc

SEQ ID NO: 46520 - DNA, 87 bp, Homo sapiens
tagcattttgcagagtagcagacagaggcggtaggtacccagcgccgtctgcaacgcgcctctggcttcatgcgctggctctgcatg

SEQ ID NO: 46521 - DNA, 81 bp, Homo sapiens
acagaggcggtaggtacccagcgccgtctgcaacgcgcctctggcttcatgcgctggctctgcatggcctttctgcctcct

SEQ ID NO: 46522 - DNA, 83 bp, Homo sapiens
ccgtctgcaacgcgcctctggcttcatgcgctggctctgcatggcctttctgcctccttcccacctctctcccacacttgctg

SEQ ID NO: 46523 - DNA, 82 bp, Homo sapiens
aacgcgcctctggcttcatgcgctggctctgcatggcctttctgcctccttcccacctctctcccacacttgctggccttgc

SEQ ID NO: 46524 - DNA, 81 bp, Homo sapiens
tggcttcatgcgctggctctgcatggcctttctgcctccttcccacctctctcccacacttgctggccttgccacaccttt

SEQ ID NO: 46525 - DNA, 74 bp, Homo sapiens
atggcctttctgcctccttcccacctctctcccacacttgctggccttgccacaccttttgtgggaagagcctg

SEQ ID NO: 46526 - DNA, 74 bp, Homo sapiens
tttctgcctccttcccacctctctcccacacttgctggccttgccacaccttttgtgggaagagcctggaggcc

SEQ ID NO: 46527 - DNA, 71 bp, Homo sapiens
ccttcccacctctctcccacacttgctggccttgccacaccttttgtgggaagagcctggaggccccgccc

SEQ ID NO: 46528 - DNA, 75 bp, Homo sapiens
tctctcccacacttgctggccttgccacaccttttgtgggaagagcctggaggccccgccccagccttgccaaca

SEQ ID NO: 46529 - DNA, 71 bp, Homo sapiens
acttgctggccttgccacaccttttgtgggaagagcctggaggccccgccccagccttgccaacaccctcc

SEQ ID NO: 46530 - DNA, 73 bp, Homo sapiens
ttgccacaccttttgtgggaagagcctggaggccccgccccagccttgccaacaccctcctgaggcctgcttg

SEQ ID NO: 46531 - DNA, 72 bp, Homo sapiens
ttttgtgggaagagcctggaggccccgccccagccttgccaacaccctcctgaggcctgcttggatgtgttt

SEQ ID NO: 46532 - DNA, 73 bp, Homo sapiens
ccgccccagccttgccaacaccctcctgaggcctgcttggatgtgttttcacaaagttgtgttctaggaaaga

SEQ ID NO: 46533 - DNA, 76 bp, Homo sapiens
cttgccaacaccctcctgaggcctgcttggatgtgttttcacaaagttgtgttctaggaaagatgggatgctctta

SEQ ID NO: 46534 - DNA, 70 bp, Homo sapiens
atgtgttttcacaaagttgtgttctaggaaagatgggatgctcttaaactcttactcccttaagagaaag

SEQ ID NO: 46535 - DNA, 72 bp, Homo sapiens
aaactcttactcccttaagagaaaggaagggtcagggtgagctggtgtgcagctcacgtgtctgttgggagg

SEQ ID NO: 46536 - DNA, 74 bp, Homo sapiens
cttaagagaaaggaagggtcagggtgagctggtgtgcagctcacgtgtctgttgggagggcggccgccctgaag

SEQ ID NO: 46537 - DNA, 74 bp, Homo sapiens
aaaggaagggtcagggtgagctggtgtgcagctcacgtgtctgttgggagggcggccgccctgaaggccaggag

SEQ ID NO: 46538 - DNA, 78 bp, Homo sapiens
agggtgagctggtgtgcagctcacgtgtctgttgggagggcggccgccctgaaggccaggagggctgcagacctggaa

SEQ ID NO: 46539 - DNA, 78 bp, Homo sapiens
ctggtgtgcagctcacgtgtctgttgggagggcggccgccctgaaggccaggagggctgcagacctggaacacacacc

SEQ ID NO: 46540 - DNA, 76 bp, Homo sapiens
acgtgtctgttgggagggcggccgccctgaaggccaggagggctgcagacctggaacacacaccctcatgcctgcc

SEQ ID NO: 46541 - DNA, 77 bp, Homo sapiens
tctgttgggagggcggccgccctgaaggccaggagggctgcagacctggaacacacaccctcatgcctgccctcatt

SEQ ID NO: 46542 - DNA, 78 bp, Homo sapiens
gccgccctgaaggccaggagggctgcagacctggaacacacaccctcatgcctgccctcatttctctcacttccaatt

SEQ ID NO: 46543 - DNA, 78 bp, Homo sapiens
aaggccaggagggctgcagacctggaacacacaccctcatgcctgccctcatttctctcacttccaattttagtcatg

SEQ ID NO: 46544 - DNA, 78 bp, Homo sapiens
agggctgcagacctggaacacacaccctcatgcctgccctcatttctctcacttccaattttagtcatgggttggcaa

SEQ ID NO: 46545 - DNA, 74 bp, Homo sapiens
acacacaccctcatgcctgccctcatttctctcacttccaattttagtcatgggttggcaaactccaagaaaag

SEQ ID NO: 46546 - DNA, 74 bp, Homo sapiens
cctgccctcatttctctcacttccaattttagtcatgggttggcaaactccaagaaaaggcaagaacagccata

SEQ ID NO: 46547 - DNA, 73 bp, Homo sapiens
atttctctcacttccaattttagtcatgggttggcaaactccaagaaaaggcaagaacagccataccaagtga

SEQ ID NO: 46548 - DNA, 74 bp, Homo sapiens
caagaaaaggcaagaacagccataccaagtgagccctggtggagtcctggagcaacacgaagtggcaccaggtt

SEQ ID NO: 46549 - DNA, 74 bp, Homo sapiens
aaaggcaagaacagccataccaagtgagccctggtggagtcctggagcaacacgaagtggcaccaggtttctag

SEQ ID NO: 46550 - DNA, 75 bp, Homo sapiens
acagccataccaagtgagccctggtggagtcctggagcaacacgaagtggcaccaggtttctaggcttggaagga

SEQ ID NO: 46551 - DNA, 73 bp, Homo sapiens
tggagtcctggagcaacacgaagtggcaccaggtttctaggcttggaaggagaagggaagtgatggggctttg

SEQ ID NO: 46552 - DNA, 73 bp, Homo sapiens
ctggagcaacacgaagtggcaccaggtttctaggcttggaaggagaagggaagtgatggggctttgtctcaaa

SEQ ID NO: 46553 - DNA, 73 bp, Homo sapiens
aagtggcaccaggtttctaggcttggaaggagaagggaagtgatggggctttgtctcaaagcaggaggctctg

SEQ ID NO: 46554 - DNA, 74 bp, Homo sapiens
aggtttctaggcttggaaggagaagggaagtgatggggctttgtctcaaagcaggaggctctggctctgaaata

SEQ ID NO: 46555 - DNA, 74 bp, Homo sapiens
taggcttggaaggagaagggaagtgatggggctttgtctcaaagcaggaggctctggctctgaaataaaagact

SEQ ID NO: 46556 - DNA, 76 bp, Homo sapiens
tgatggggctttgtctcaaagcaggaggctctggctctgaaataaaagacttgcgagggatgcaaaaggtgtcctt

SEQ ID NO: 46557 - DNA, 75 bp, Homo sapiens
ttgtctcaaagcaggaggctctggctctgaaataaaagacttgcgagggatgcaaaaggtgtcctttcaggttta

SEQ ID NO: 46558 - DNA, 73 bp, Homo sapiens
aaagcaggaggctctggctctgaaataaaagacttgcgagggatgcaaaaggtgtcctttcaggtttagaagc

SEQ ID NO: 46559 - DNA, 72 bp, Homo sapiens
tggctctgaaataaaagacttgcgagggatgcaaaaggtgtcctttcaggtttagaagccagggattgaaaa

SEQ ID NO: 46560 - DNA, 70 bp, Homo sapiens
agacttgcgagggatgcaaaaggtgtcctttcaggtttagaagccagggattgaaaacaactaagaacta

SEQ ID NO: 46561 - DNA, 70 bp, Homo sapiens
atgcaaaaggtgtcctttcaggtttagaagccagggattgaaaacaactaagaactagtgagcaaacggc

SEQ ID NO: 46562 - DNA, 71 bp, Homo sapiens
tcctttcaggtttagaagccagggattgaaaacaactaagaactagtgagcaaacggcctaactatacaca

SEQ ID NO: 46563 - DNA, 73 bp, Homo sapiens
agggattgaaaacaactaagaactagtgagcaaacggcctaactatacacaaatgcttgcattaccacagctt

SEQ ID NO: 46564 - DNA, 74 bp, Homo sapiens
aaaacaactaagaactagtgagcaaacggcctaactatacacaaatgcttgcattaccacagctttacagcaag

SEQ ID NO: 46565 - DNA, 75 bp, Homo sapiens
aactagtgagcaaacggcctaactatacacaaatgcttgcattaccacagctttacagcaagtgtgttctatttt

SEQ ID NO: 46566 - DNA, 78 bp, Homo sapiens
taactatacacaaatgcttgcattaccacagctttacagcaagtgtgttctatttttcaaaatcaagactagtcatac

SEQ ID NO: 46567 - DNA, 77 bp, Homo sapiens
caaatgcttgcattaccacagctttacagcaagtgtgttctatttttcaaaatcaagactagtcatactacttaatg

SEQ ID NO: 46568 - DNA, 78 bp, Homo sapiens
tgcattaccacagctttacagcaagtgtgttctatttttcaaaatcaagactagtcatactacttaatgtgtaatctg

SEQ ID NO: 46569 - DNA, 76 bp, Homo sapiens
cacagctttacagcaagtgtgttctatttttcaaaatcaagactagtcatactacttaatgtgtaatctgtattaa

SEQ ID NO: 46570 - DNA, 74 bp, Homo sapiens
cagcaagtgtgttctatttttcaaaatcaagactagtcatactacttaatgtgtaatctgtattaataccaagt

SEQ ID NO: 46571 - DNA, 73 bp, Homo sapiens
ctatttttcaaaatcaagactagtcatactacttaatgtgtaatctgtattaataccaagttttattgttgca

SEQ ID NO: 46572 - DNA, 73 bp, Homo sapiens
caaaatcaagactagtcatactacttaatgtgtaatctgtattaataccaagttttattgttgcaaaaaggca

SEQ ID NO: 46573 - DNA, 75 bp, Homo sapiens
gactagtcatactacttaatgtgtaatctgtattaataccaagttttattgttgcaaaaaggcattattcatgga

SEQ ID NO: 46574 - DNA, 73 bp, Homo sapiens
cttaatgtgtaatctgtattaataccaagttttattgttgcaaaaaggcattattcatggaaaaactatgcca

SEQ ID NO: 46575 - DNA, 74 bp, Homo sapiens
atctgtattaataccaagttttattgttgcaaaaaggcattattcatggaaaaactatgccaatctcctgtcag

SEQ ID NO: 46576 - DNA, 74 bp, Homo sapiens
aagttttattgttgcaaaaaggcattattcatggaaaaactatgccaatctcctgtcagttcgccacacctatg

SEQ ID NO: 46577 - DNA, 72 bp, Homo sapiens
aaaaaggcattattcatggaaaaactatgccaatctcctgtcagttcgccacacctatgggaatggggtttc

SEQ ID NO: 46578 - DNA, 74 bp, Homo sapiens
attattcatggaaaaactatgccaatctcctgtcagttcgccacacctatgggaatggggtttctgaaaccaca

SEQ ID NO: 46579 - DNA, 75 bp, Homo sapiens
tatgccaatctcctgtcagttcgccacacctatgggaatggggtttctgaaaccacagggttatagccctgggca

SEQ ID NO: 46580 - DNA, 72 bp, Homo sapiens
tcagttcgccacacctatgggaatggggtttctgaaaccacagggttatagccctgggcactgtatcctaat

SEQ ID NO: 46581 - DNA, 71 bp, Homo sapiens
acacctatgggaatggggtttctgaaaccacagggttatagccctgggcactgtatcctaatttgcatgtt

SEQ ID NO: 46582 - DNA, 76 bp, Homo sapiens
tttctgaaaccacagggttatagccctgggcactgtatcctaatttgcatgtttgattatttgagacagtaatgga

SEQ ID NO: 46583 - DNA, 76 bp, Homo sapiens
aaccacagggttatagccctgggcactgtatcctaatttgcatgtttgattatttgagacagtaatggaggcagaa

SEQ ID NO: 46584 - DNA, 81 bp, Homo sapiens
ttatagccctgggcactgtatcctaatttgcatgtttgattatttgagacagtaatggaggcagaaagcatatgctaattc

SEQ ID NO: 46585 - DNA, 79 bp, Homo sapiens
ctgtatcctaatttgcatgtttgattatttgagacagtaatggaggcagaaagcatatgctaattccaccggcaaacta

SEQ ID NO: 46586 - DNA, 77 bp, Homo sapiens
tcctaatttgcatgtttgattatttgagacagtaatggaggcagaaagcatatgctaattccaccggcaaactaggg

SEQ ID NO: 46587 - DNA, 75 bp, Homo sapiens
ttgattatttgagacagtaatggaggcagaaagcatatgctaattccaccggcaaactaggggaaagatggttaa

SEQ ID NO: 46588 - DNA, 74 bp, Homo sapiens
tatttgagacagtaatggaggcagaaagcatatgctaattccaccggcaaactaggggaaagatggttaaacca

SEQ ID NO: 46589 - DNA, 74 bp, Homo sapiens
aatggaggcagaaagcatatgctaattccaccggcaaactaggggaaagatggttaaaccatgagcaagagaaa

SEQ ID NO: 46590 - DNA, 74 bp, Homo sapiens
aagcatatgctaattccaccggcaaactaggggaaagatggttaaaccatgagcaagagaaaagctaagatgaa

SEQ ID NO: 46591 - DNA, 73 bp, Homo sapiens
tatgctaattccaccggcaaactaggggaaagatggttaaaccatgagcaagagaaaagctaagatgaataaa

SEQ ID NO: 46592 - DNA, 68 bp, Homo sapiens
accggcaaactaggggaaagatggttaaaccatgagcaagagaaaagctaagatgaataaacctaaaa

SEQ ID NO: 46593 - DNA, 72 bp, Homo sapiens
gggaaagatggttaaaccatgagcaagagaaaagctaagatgaataaacctaaaaacgctatacactcctga

SEQ ID NO: 46594 - DNA, 73 bp, Homo sapiens
agatggttaaaccatgagcaagagaaaagctaagatgaataaacctaaaaacgctatacactcctgagagaaa

SEQ ID NO: 46595 - DNA, 72 bp, Homo sapiens
aaagaaaaagagacatttcacattttcctgagaacattctggtacacactcccaagaaagaaagacatttca

SEQ ID NO: 46596 - DNA, 72 bp, Homo sapiens
aaaagagacatttcacattttcctgagaacattctggtacacactcccaagaaagaaagacatttcacgttg

SEQ ID NO: 46597 - DNA, 74 bp, Homo sapiens
tttcacattttcctgagaacattctggtacacactcccaagaaagaaagacatttcacgttgtcctgagaacat

SEQ ID NO: 46598 - DNA, 74 bp, Homo sapiens
agaacattctggtacacactcccaagaaagaaagacatttcacgttgtcctgagaacattctggtatacactcc

SEQ ID NO: 46599 - DNA, 76 bp, Homo sapiens
attctggtacacactcccaagaaagaaagacatttcacgttgtcctgagaacattctggtatacactcctgagata

SEQ ID NO: 46600 - DNA, 76 bp, Homo sapiens
tcccaagaaagaaagacatttcacgttgtcctgagaacattctggtatacactcctgagataaagacatttcacat

SEQ ID NO: 46601 - DNA, 76 bp, Homo sapiens
aagaaagaaagacatttcacgttgtcctgagaacattctggtatacactcctgagataaagacatttcacattgtc

SEQ ID NO: 46602 - DNA, 78 bp, Homo sapiens
aaagacatttcacgttgtcctgagaacattctggtatacactcctgagataaagacatttcacattgtcctgagaaca

SEQ ID NO: 46603 - DNA, 79 bp, Homo sapiens
atttcacgttgtcctgagaacattctggtatacactcctgagataaagacatttcacattgtcctgagaacattctagc

SEQ ID NO: 46604 - DNA, 81 bp, Homo sapiens
tgtcctgagaacattctggtatacactcctgagataaagacatttcacattgtcctgagaacattctagccaaagatgtaa

SEQ ID NO: 46605 - DNA, 80 bp, Homo sapiens
tgagaacattctggtatacactcctgagataaagacatttcacattgtcctgagaacattctagccaaagatgtaagacc

SEQ ID NO: 46606 - DNA, 78 bp, Homo sapiens
aacattctggtatacactcctgagataaagacatttcacattgtcctgagaacattctagccaaagatgtaagaccca

SEQ ID NO: 46607 - DNA, 78 bp, Homo sapiens
tatacactcctgagataaagacatttcacattgtcctgagaacattctagccaaagatgtaagacccagaaatggctt

SEQ ID NO: 46608 - DNA, 77 bp, Homo sapiens
atacactcctgagataaagacatttcacattgtcctgagaacattctagccaaagatgtaagacccagaaatggctt

SEQ ID NO: 46609 - DNA, 76 bp, Homo sapiens
acattgtcctgagaacattctagccaaagatgtaagacccagaaatggctttgagtaaaggcacccagataagctc

SEQ ID NO: 46610 - DNA, 75 bp, Homo sapiens
taagacccagaaatggctttgagtaaaggcacccagataagctccctgacctgcagaaccaaacacagagcactt

SEQ ID NO: 46611 - DNA, 75 bp, Homo sapiens
aaatggctttgagtaaaggcacccagataagctccctgacctgcagaaccaaacacagagcactttgtcctcaaa

SEQ ID NO: 46612 - DNA, 74 bp, Homo sapiens
tttgagtaaaggcacccagataagctccctgacctgcagaaccaaacacagagcactttgtcctcaaaaccctc

SEQ ID NO: 46613 - DNA, 72 bp, Homo sapiens
acccagataagctccctgacctgcagaaccaaacacagagcactttgtcctcaaaaccctcccacccctgtc

SEQ ID NO: 46614 - DNA, 75 bp, Homo sapiens
tccctgacctgcagaaccaaacacagagcactttgtcctcaaaaccctcccacccctgtctgcactactgcttgt

SEQ ID NO: 46615 - DNA, 77 bp, Homo sapiens
tgcagaaccaaacacagagcactttgtcctcaaaaccctcccacccctgtctgcactactgcttgttcaggtccata

SEQ ID NO: 46616 - DNA, 73 bp, Homo sapiens
accaaacacagagcactttgtcctcaaaaccctcccacccctgtctgcactactgcttgttcaggtccataaa

SEQ ID NO: 46617 - DNA, 71 bp, Homo sapiens
actttgtcctcaaaaccctcccacccctgtctgcactactgcttgttcaggtccataaaccttggcctgaa

SEQ ID NO: 46618 - DNA, 82 bp, Homo sapiens
cacccctgtctgcactactgcttgttcaggtccataaaccttggcctgaagccctgcattagccatatctccagagcagcac

SEQ ID NO: 46619 - DNA, 82 bp, Homo sapiens
ctgtctgcactactgcttgttcaggtccataaaccttggcctgaagccctgcattagccatatctccagagcagcaccccca

SEQ ID NO: 46620 - DNA, 79 bp, Homo sapiens
tactgcttgttcaggtccataaaccttggcctgaagccctgcattagccatatctccagagcagcacccccaggagtcc

SEQ ID NO: 46621 - DNA, 79 bp, Homo sapiens
aggtccataaaccttggcctgaagccctgcattagccatatctccagagcagcacccccaggagtccccatggagcaga

SEQ ID NO: 46622 - DNA, 79 bp, Homo sapiens
aaaccttggcctgaagccctgcattagccatatctccagagcagcacccccaggagtccccatggagcagaggccacca

SEQ ID NO: 46623 - DNA, 80 bp, Homo sapiens
gccctgcattagccatatctccagagcagcacccccaggagtccccatggagcagaggccaccactcaggaggccggaat

SEQ ID NO: 46624 - DNA, 78 bp, Homo sapiens
ttagccatatctccagagcagcacccccaggagtccccatggagcagaggccaccactcaggaggccggaatttagaa

SEQ ID NO: 46625 - DNA, 72 bp, Homo sapiens
acccccaggagtccccatggagcagaggccaccactcaggaggccggaatttagaaccaggagctccttatg

SEQ ID NO: 46626 - DNA, 76 bp, Homo sapiens
agtccccatggagcagaggccaccactcaggaggccggaatttagaaccaggagctccttatgtacacactgactc

SEQ ID NO: 46627 - DNA, 76 bp, Homo sapiens
agcagaggccaccactcaggaggccggaatttagaaccaggagctccttatgtacacactgactctctttcttcta

SEQ ID NO: 46628 - DNA, 72 bp, Homo sapiens
accactcaggaggccggaatttagaaccaggagctccttatgtacacactgactctctttcttctaaaccta

SEQ ID NO: 46629 - DNA, 72 bp, Homo sapiens
aggccggaatttagaaccaggagctccttatgtacacactgactctctttcttctaaacctaggaagagcaa

SEQ ID NO: 46630 - DNA, 73 bp, Homo sapiens
aggagctccttatgtacacactgactctctttcttctaaacctaggaagagcaagacctatggtaatgggttg

SEQ ID NO: 46631 - DNA, 72 bp, Homo sapiens
tgactctctttcttctaaacctaggaagagcaagacctatggtaatgggttggcgtgctggggttaggtgag

SEQ ID NO: 46632 - DNA, 71 bp, Homo sapiens
tttcttctaaacctaggaagagcaagacctatggtaatgggttggcgtgctggggttaggtgagggcaaca

SEQ ID NO: 46633 - DNA, 69 bp, Homo sapiens
aaacctaggaagagcaagacctatggtaatgggttggcgtgctggggttaggtgagggcaacaggggga

SEQ ID NO: 46634 - DNA, 71 bp, Homo sapiens
agagcaagacctatggtaatgggttggcgtgctggggttaggtgagggcaacagggggaagaagctgggat

SEQ ID NO: 46635 - DNA, 72 bp, Homo sapiens
ttggcgtgctggggttaggtgagggcaacagggggaagaagctgggattcccaggctggaaatggcgccatt

SEQ ID NO: 46636 - DNA, 71 bp, Homo sapiens
ggttaggtgagggcaacagggggaagaagctgggattcccaggctggaaatggcgccatttggcccctgga

SEQ ID NO: 46637 - DNA, 69 bp, Homo sapiens
agggcaacagggggaagaagctgggattcccaggctggaaatggcgccatttggcccctggaaatcctt

SEQ ID NO: 46638 - DNA, 68 bp, Homo sapiens
gggaagaagctgggattcccaggctggaaatggcgccatttggcccctggaaatcctttccccgggga

SEQ ID NO: 46639 - DNA, 70 bp, Homo sapiens
tgggattcccaggctggaaatggcgccatttggcccctggaaatcctttccccggggatctgcttctgtt

SEQ ID NO: 46640 - DNA, 69 bp, Homo sapiens
aggctggaaatggcgccatttggcccctggaaatcctttccccggggatctgcttctgttttatttgaa

SEQ ID NO: 46641 - DNA, 70 bp, Homo sapiens
aaatggcgccatttggcccctggaaatcctttccccggggatctgcttctgttttatttgaacagctaca

SEQ ID NO: 46642 - DNA, 69 bp, Homo sapiens
tttggcccctggaaatcctttccccggggatctgcttctgttttatttgaacagctacagataaaaata

SEQ ID NO: 46643 - DNA, 73 bp, Homo sapiens
cccggggatctgcttctgttttatttgaacagctacagataaaaataagtgagcaaaccccaagccactgcac

SEQ ID NO: 46644 - DNA, 77 bp, Homo sapiens
atctgcttctgttttatttgaacagctacagataaaaataagtgagcaaaccccaagccactgcactgttagctgaa

SEQ ID NO: 46645 - DNA, 77 bp, Homo sapiens
tgttttatttgaacagctacagataaaaataagtgagcaaaccccaagccactgcactgttagctgaagcttcaaga

SEQ ID NO: 46646 - DNA, 75 bp, Homo sapiens
aacagctacagataaaaataagtgagcaaaccccaagccactgcactgttagctgaagcttcaagaggaaaaaga

SEQ ID NO: 46647 - DNA, 74 bp, Homo sapiens
ataaaaataagtgagcaaaccccaagccactgcactgttagctgaagcttcaagaggaaaaagacaacatctac

SEQ ID NO: 46648 - DNA, 78 bp, Homo sapiens
taagtgagcaaaccccaagccactgcactgttagctgaagcttcaagaggaaaaagacaacatctacctgcccagcac

SEQ ID NO: 46649 - DNA, 81 bp, Homo sapiens
caagccactgcactgttagctgaagcttcaagaggaaaaagacaacatctacctgcccagcaccgagcctggtgctgactg

SEQ ID NO: 46650 - DNA, 79 bp, Homo sapiens
actgcactgttagctgaagcttcaagaggaaaaagacaacatctacctgcccagcaccgagcctggtgctgactgtccc

SEQ ID NO: 46651 - DNA, 78 bp, Homo sapiens
ttagctgaagcttcaagaggaaaaagacaacatctacctgcccagcaccgagcctggtgctgactgtcccccagaggc

SEQ ID NO: 46652 - DNA, 78 bp, Homo sapiens
aagaggaaaaagacaacatctacctgcccagcaccgagcctggtgctgactgtcccccagaggcctcatgagccgtca

SEQ ID NO: 46653 - DNA, 77 bp, Homo sapiens
aaaaagacaacatctacctgcccagcaccgagcctggtgctgactgtcccccagaggcctcatgagccgtcaccaaa

SEQ ID NO: 46654 - DNA, 83 bp, Homo sapiens
atctacctgcccagcaccgagcctggtgctgactgtcccccagaggcctcatgagccgtcaccaaacacatggatggatgaca

SEQ ID NO: 46655 - DNA, 85 bp, Homo sapiens
caccgagcctggtgctgactgtcccccagaggcctcatgagccgtcaccaaacacatggatggatgacagatggacagtggatga

SEQ ID NO: 46656 - DNA, 86 bp, Homo sapiens
tggtgctgactgtcccccagaggcctcatgagccgtcaccaaacacatggatggatgacagatggacagtggatgagtgcgtgaaa

SEQ ID NO: 46657 - DNA, 83 bp, Homo sapiens
actgtcccccagaggcctcatgagccgtcaccaaacacatggatggatgacagatggacagtggatgagtgcgtgaaagaatg

SEQ ID NO: 46658 - DNA, 84 bp, Homo sapiens
aggcctcatgagccgtcaccaaacacatggatggatgacagatggacagtggatgagtgcgtgaaagaatggatgggtgaataa

SEQ ID NO: 46659 - DNA, 84 bp, Homo sapiens
atgagccgtcaccaaacacatggatggatgacagatggacagtggatgagtgcgtgaaagaatggatgggtgaataaatgagtg

SEQ ID NO: 46660 - DNA, 84 bp, Homo sapiens
accaaacacatggatggatgacagatggacagtggatgagtgcgtgaaagaatggatgggtgaataaatgagtggatgggcaga

SEQ ID NO: 46661 - DNA, 90 bp, Homo sapiens
atggatggatgacagatggacagtggatgagtgcgtgaaagaatggatgggtgaataaatgagtggatgggcagatggatgcatgaatga

SEQ ID NO: 46662 - DNA, 86 bp, Homo sapiens
acagatggacagtggatgagtgcgtgaaagaatggatgggtgaataaatgagtggatgggcagatggatgcatgaatgagtgggtg

SEQ ID NO: 46663 - DNA, 90 bp, Homo sapiens
gaatggatggatgagtgaatcggtggatagattagtgagtaggatggatgagtgagcagacagatgcatggatggataagtgagtggatg

SEQ ID NO: 46664 - DNA, 88 bp, Homo sapiens
atgagtgaatcggtggatagattagtgagtaggatggatgagtgagcagacagatgcatggatggataagtgagtggatgggtgaata

SEQ ID NO: 46665 - DNA, 85 bp, Homo sapiens
aatcggtggatagattagtgagtaggatggatgagtgagcagacagatgcatggatggataagtgagtggatgggtgaataacca

SEQ ID NO: 46666 - DNA, 89 bp, Homo sapiens
atagattagtgagtaggatggatgagtgagcagacagatgcatggatggataagtgagtggatgggtgaataaccagatgaatgaatga

SEQ ID NO: 46667 - DNA, 82 bp, Homo sapiens
ggtggatgaaagaatgaatgagtgggtggatgagtaaatgaatggagatggatggataaatgaatgaggatggacggatgac

SEQ ID NO: 46668 - DNA, 81 bp, Homo sapiens
aaagaatgaatgagtgggtggatgagtaaatgaatggagatggatggataaatgaatgaggatggacggatgactgagtgg

SEQ ID NO: 46669 - DNA, 80 bp, Homo sapiens
agtgggtggatgagtaaatgaatggagatggatggataaatgaatgaggatggacggatgactgagtgggtaaatgaata

SEQ ID NO: 46670 - DNA, 82 bp, Homo sapiens
tgagtaaatgaatggagatggatggataaatgaatgaggatggacggatgactgagtgggtaaatgaataaatgcgtagata

SEQ ID NO: 46671 - DNA, 81 bp, Homo sapiens
aaatgaatggagatggatggataaatgaatgaggatggacggatgactgagtgggtaaatgaataaatgcgtagatagatg

SEQ ID NO: 46672 - DNA, 81 bp, Homo sapiens
atggatggataaatgaatgaggatggacggatgactgagtgggtaaatgaataaatgcgtagatagatgggtgagtggatg

SEQ ID NO: 46673 - DNA, 86 bp, Homo sapiens
gatgaatgaatgaaagaatgagtgagtgggtagatgagtgagtacatgaatggatgagtgggtggataggtgaatggatggacaga

SEQ ID NO: 46674 - DNA, 85 bp, Homo sapiens
aatgaaagaatgagtgagtgggtagatgagtgagtacatgaatggatgagtgggtggataggtgaatggatggacagatgaatga

SEQ ID NO: 46675 - DNA, 80 bp, Homo sapiens
agtgggtgggtgaatggatgagtgaatgggtgggtgagtgagtggatagatgagtgagtgggtgaatgggtgactggatg

SEQ ID NO: 46676 - DNA, 84 bp, Homo sapiens
aatggatgagtgaatgggtgggtgagtgagtggatagatgagtgagtgggtgaatgggtgactggatggatggagatggatgaa

SEQ ID NO: 46677 - DNA, 83 bp, Homo sapiens
tgaatgggtgggtgagtgagtggatagatgagtgagtgggtgaatgggtgactggatggatggagatggatgaataaatgaag

SEQ ID NO: 46678 - DNA, 84 bp, Homo sapiens
ggtgagtgagtggatagatgagtgagtgggtgaatgggtgactggatggatggagatggatgaataaatgaaggaatgagtgga

SEQ ID NO: 46679 - DNA, 85 bp, Homo sapiens
gtgagtggatagatgagtgagtgggtgaatgggtgactggatggatggagatggatgaataaatgaaggaatgagtggatggatg

SEQ ID NO: 46680 - DNA, 86 bp, Homo sapiens
atggatggatgagcgagtgcatggatagttgaatgaatgagtgggtggatgggtgaatgaatgaatcagtgggcaagtgcaagggc

SEQ ID NO: 46681 - DNA, 81 bp, Homo sapiens
aatgaatgagtgggtggatgggtgaatgaatgaatcagtgggcaagtgcaagggcctgcagttttcactcccacagagcac

SEQ ID NO: 46682 - DNA, 83 bp, Homo sapiens
tgggtggatgggtgaatgaatgaatcagtgggcaagtgcaagggcctgcagttttcactcccacagagcactgaatgctcagt

SEQ ID NO: 46683 - DNA, 82 bp, Homo sapiens
gtgaatgaatgaatcagtgggcaagtgcaagggcctgcagttttcactcccacagagcactgaatgctcagtttcacttaaa

SEQ ID NO: 46684 - DNA, 83 bp, Homo sapiens
atgaatcagtgggcaagtgcaagggcctgcagttttcactcccacagagcactgaatgctcagtttcacttaaatcatagata

SEQ ID NO: 46685 - DNA, 81 bp, Homo sapiens
gcaagtgcaagggcctgcagttttcactcccacagagcactgaatgctcagtttcacttaaatcatagataagtacttgga

SEQ ID NO: 46686 - DNA, 77 bp, Homo sapiens
aagggcctgcagttttcactcccacagagcactgaatgctcagtttcacttaaatcatagataagtacttggaagaa

SEQ ID NO: 46687 - DNA, 75 bp, Homo sapiens
agttttcactcccacagagcactgaatgctcagtttcacttaaatcatagataagtacttggaagaaaagtcaaa

SEQ ID NO: 46688 - DNA, 78 bp, Homo sapiens
actcccacagagcactgaatgctcagtttcacttaaatcatagataagtacttggaagaaaagtcaaaatcaatgctc

SEQ ID NO: 46689 - DNA, 76 bp, Homo sapiens
tgaatgctcagtttcacttaaatcatagataagtacttggaagaaaagtcaaaatcaatgctcccagtctgtttct

SEQ ID NO: 46690 - DNA, 72 bp, Homo sapiens
aatcatagataagtacttggaagaaaagtcaaaatcaatgctcccagtctgtttcttttaataatatggaag

SEQ ID NO: 46691 - DNA, 71 bp, Homo sapiens
aagtacttggaagaaaagtcaaaatcaatgctcccagtctgtttcttttaataatatggaagtgtttgtgc

SEQ ID NO: 46692 - DNA, 72 bp, Homo sapiens
ggaagaaaagtcaaaatcaatgctcccagtctgtttcttttaataatatggaagtgtttgtgctgtaattcc

SEQ ID NO: 46693 - DNA, 74 bp, Homo sapiens
gtcaaaatcaatgctcccagtctgtttcttttaataatatggaagtgtttgtgctgtaattcctcaagtttaca

SEQ ID NO: 46694 - DNA, 70 bp, Homo sapiens
aatgctcccagtctgtttcttttaataatatggaagtgtttgtgctgtaattcctcaagtttacaaaccc

SEQ ID NO: 46695 - DNA, 68 bp, Homo sapiens
ctgtttcttttaataatatggaagtgtttgtgctgtaattcctcaagtttacaaacccccacgtgatt

SEQ ID NO: 46696 - DNA, 67 bp, Homo sapiens
ttaataatatggaagtgtttgtgctgtaattcctcaagtttacaaacccccacgtgattttaaaact

SEQ ID NO: 46697 - DNA, 67 bp, Homo sapiens
gaagtgtttgtgctgtaattcctcaagtttacaaacccccacgtgattttaaaacttacatccttgt

SEQ ID NO: 46698 - DNA, 69 bp, Homo sapiens
tgctgtaattcctcaagtttacaaacccccacgtgattttaaaacttacatccttgttattaactgaca

SEQ ID NO: 46699 - DNA, 69 bp, Homo sapiens
attcctcaagtttacaaacccccacgtgattttaaaacttacatccttgttattaactgacatctgcca

SEQ ID NO: 46700 - DNA, 68 bp, Homo sapiens
ttacaaacccccacgtgattttaaaacttacatccttgttattaactgacatctgccaaacccactct

SEQ ID NO: 46701 - DNA, 71 bp, Homo sapiens
acgtgattttaaaacttacatccttgttattaactgacatctgccaaacccactcttctaggtggcaagcg

SEQ ID NO: 46702 - DNA, 73 bp, Homo sapiens
tttaaaacttacatccttgttattaactgacatctgccaaacccactcttctaggtggcaagcgtggtgccca

SEQ ID NO: 46703 - DNA, 79 bp, Homo sapiens
acatccttgttattaactgacatctgccaaacccactcttctaggtggcaagcgtggtgcccactgcacggaggatgca

SEQ ID NO: 46704 - DNA, 80 bp, Homo sapiens
tattaactgacatctgccaaacccactcttctaggtggcaagcgtggtgcccactgcacggaggatgcagccattaggtc

SEQ ID NO: 46705 - DNA, 77 bp, Homo sapiens
tgccaaacccactcttctaggtggcaagcgtggtgcccactgcacggaggatgcagccattaggtctctcggaggtt

SEQ ID NO: 46706 - DNA, 79 bp, Homo sapiens
ctaggtggcaagcgtggtgcccactgcacggaggatgcagccattaggtctctcggaggtttgtgtgctttgctgttcc

SEQ ID NO: 46707 - DNA, 76 bp, Homo sapiens
actgcacggaggatgcagccattaggtctctcggaggtttgtgtgctttgctgttcccggcagggacgacttggag

SEQ ID NO: 46708 - DNA, 76 bp, Homo sapiens
aggatgcagccattaggtctctcggaggtttgtgtgctttgctgttcccggcagggacgacttggagggcaacagc

SEQ ID NO: 46709 - DNA, 72 bp, Homo sapiens
attaggtctctcggaggtttgtgtgctttgctgttcccggcagggacgacttggagggcaacagcctcctgg

SEQ ID NO: 46710 - DNA, 74 bp, Homo sapiens
ttgtgtgctttgctgttcccggcagggacgacttggagggcaacagcctcctggtcagtgcagggccccgtccc

SEQ ID NO: 46711 - DNA, 75 bp, Homo sapiens
tgctgttcccggcagggacgacttggagggcaacagcctcctggtcagtgcagggccccgtccctgggtgaagca

SEQ ID NO: 46712 - DNA, 74 bp, Homo sapiens
agggacgacttggagggcaacagcctcctggtcagtgcagggccccgtccctgggtgaagcagggcaggtgctc

SEQ ID NO: 46713 - DNA, 76 bp, Homo sapiens
acttggagggcaacagcctcctggtcagtgcagggccccgtccctgggtgaagcagggcaggtgctcggcctgtgc

SEQ ID NO: 46714 - DNA, 76 bp, Homo sapiens
aacagcctcctggtcagtgcagggccccgtccctgggtgaagcagggcaggtgctcggcctgtgctcccgaggctc

SEQ ID NO: 46715 - DNA, 80 bp, Homo sapiens
tcagtgcagggccccgtccctgggtgaagcagggcaggtgctcggcctgtgctcccgaggctctggcgcaactgtgagtg

SEQ ID NO: 46716 - DNA, 76 bp, Homo sapiens
agggccccgtccctgggtgaagcagggcaggtgctcggcctgtgctcccgaggctctggcgcaactgtgagtggcc

SEQ ID NO: 46717 - DNA, 84 bp, Homo sapiens
cctgggtgaagcagggcaggtgctcggcctgtgctcccgaggctctggcgcaactgtgagtggcccaggatggccatgaatgca

SEQ ID NO: 46718 - DNA, 83 bp, Homo sapiens
agggcaggtgctcggcctgtgctcccgaggctctggcgcaactgtgagtggcccaggatggccatgaatgcagcccaacataa

SEQ ID NO: 46719 - DNA, 81 bp, Homo sapiens
tcggcctgtgctcccgaggctctggcgcaactgtgagtggcccaggatggccatgaatgcagcccaacataaattcgtaaa

SEQ ID NO: 46720 - DNA, 73 bp, Homo sapiens
ctttcttaaaacatgagctttaggcacagaccttctttttagctcatcagctactgttagtgttaattttatg

SEQ ID NO: 46721 - DNA, 70 bp, Homo sapiens
gccaaaagattggacgtccccgtgctgggggttccggggctggtcgaggctgggagccccgtctgcagaa

SEQ ID NO: 46722 - DNA, 69 bp, Homo sapiens
aagattggacgtccccgtgctgggggttccggggctggtcgaggctgggagccccgtctgcagaaggtc

SEQ ID NO: 46723 - DNA, 72 bp, Homo sapiens
gttccggggctggtcgaggctgggagccccgtctgcagaaggtcccggtgtgaacagtggagccggtgcctc

SEQ ID NO: 46724 - DNA, 75 bp, Homo sapiens
tggtcgaggctgggagccccgtctgcagaaggtcccggtgtgaacagtggagccggtgcctcctctgacgcctcc

SEQ ID NO: 46725 - DNA, 74 bp, Homo sapiens
aggctgggagccccgtctgcagaaggtcccggtgtgaacagtggagccggtgcctcctctgacgcctccctgac

SEQ ID NO: 46726 - DNA, 72 bp, Homo sapiens
agaaggtcccggtgtgaacagtggagccggtgcctcctctgacgcctccctgactgtgcccgttgcccttcg

SEQ ID NO: 46727 - DNA, 75 bp, Homo sapiens
tgaacagtggagccggtgcctcctctgacgcctccctgactgtgcccgttgcccttcggtttcgtaagcatggag

SEQ ID NO: 46728 - DNA, 73 bp, Homo sapiens
agtggagccggtgcctcctctgacgcctccctgactgtgcccgttgcccttcggtttcgtaagcatggaggaa

SEQ ID NO: 46729 - DNA, 72 bp, Homo sapiens
cctcctctgacgcctccctgactgtgcccgttgcccttcggtttcgtaagcatggaggaaactgaacctgaa

SEQ ID NO: 46730 - DNA, 73 bp, Homo sapiens
acgcctccctgactgtgcccgttgcccttcggtttcgtaagcatggaggaaactgaacctgaagcagcttgga

SEQ ID NO: 46731 - DNA, 76 bp, Homo sapiens
ctgactgtgcccgttgcccttcggtttcgtaagcatggaggaaactgaacctgaagcagcttggagggagctgagc

SEQ ID NO: 46732 - DNA, 74 bp, Homo sapiens
cgttgcccttcggtttcgtaagcatggaggaaactgaacctgaagcagcttggagggagctgagccccaggaca

SEQ ID NO: 46733 - DNA, 76 bp, Homo sapiens
tcggtttcgtaagcatggaggaaactgaacctgaagcagcttggagggagctgagccccaggacaggagcctggtc

SEQ ID NO: 46734 - DNA, 78 bp, Homo sapiens
ttcgtaagcatggaggaaactgaacctgaagcagcttggagggagctgagccccaggacaggagcctggtctggctgg

SEQ ID NO: 46735 - DNA, 76 bp, Homo sapiens
atggaggaaactgaacctgaagcagcttggagggagctgagccccaggacaggagcctggtctggctggggtctaa

SEQ ID NO: 46736 - DNA, 76 bp, Homo sapiens
ctgaagcagcttggagggagctgagccccaggacaggagcctggtctggctggggtctaacatgaggccccaaatt

SEQ ID NO: 46737 - DNA, 72 bp, Homo sapiens
agggagctgagccccaggacaggagcctggtctggctggggtctaacatgaggccccaaatttgttataaaa

SEQ ID NO: 46738 - DNA, 73 bp, Homo sapiens
agctgagccccaggacaggagcctggtctggctggggtctaacatgaggccccaaatttgttataaaactaca

SEQ ID NO: 46739 - DNA, 74 bp, Homo sapiens
agcctggtctggctggggtctaacatgaggccccaaatttgttataaaactacagaaagtgtctgatgagtaga

SEQ ID NO: 46740 - DNA, 74 bp, Homo sapiens
tggggtctaacatgaggccccaaatttgttataaaactacagaaagtgtctgatgagtagatgccacctccgga

SEQ ID NO: 46741 - DNA, 74 bp, Homo sapiens
tctaacatgaggccccaaatttgttataaaactacagaaagtgtctgatgagtagatgccacctccggaccctg

SEQ ID NO: 46742 - DNA, 83 bp, Homo sapiens
actacagaaagtgtctgatgagtagatgccacctccggaccctggcatccgcctctgctgcctttgctctgctcaggagggca

SEQ ID NO: 46743 - DNA, 84 bp, Homo sapiens
tgatgagtagatgccacctccggaccctggcatccgcctctgctgcctttgctctgctcaggagggcagtgggtgccggcagaa

SEQ ID NO: 46744 - DNA, 83 bp, Homo sapiens
tagatgccacctccggaccctggcatccgcctctgctgcctttgctctgctcaggagggcagtgggtgccggcagaatccatg

SEQ ID NO: 46745 - DNA, 80 bp, Homo sapiens
ctccggaccctggcatccgcctctgctgcctttgctctgctcaggagggcagtgggtgccggcagaatccatgggaattg

SEQ ID NO: 46746 - DNA, 84 bp, Homo sapiens
catccgcctctgctgcctttgctctgctcaggagggcagtgggtgccggcagaatccatgggaattggtgcagtgtcacaaaga

SEQ ID NO: 46747 - DNA, 82 bp, Homo sapiens
tgctgcctttgctctgctcaggagggcagtgggtgccggcagaatccatgggaattggtgcagtgtcacaaagacccaagtc

SEQ ID NO: 46748 - DNA, 79 bp, Homo sapiens
tttgctctgctcaggagggcagtgggtgccggcagaatccatgggaattggtgcagtgtcacaaagacccaagtccacc

SEQ ID NO: 46749 - DNA, 74 bp, Homo sapiens
aggagggcagtgggtgccggcagaatccatgggaattggtgcagtgtcacaaagacccaagtccacctccgccc

SEQ ID NO: 46750 - DNA, 75 bp, Homo sapiens
agtgggtgccggcagaatccatgggaattggtgcagtgtcacaaagacccaagtccacctccgcccctgccctgc

SEQ ID NO: 46751 - DNA, 74 bp, Homo sapiens
agaatccatgggaattggtgcagtgtcacaaagacccaagtccacctccgcccctgccctgcccaccaccagac

SEQ ID NO: 46752 - DNA, 72 bp, Homo sapiens
atgggaattggtgcagtgtcacaaagacccaagtccacctccgcccctgccctgcccaccaccagacccagg

SEQ ID NO: 46753 - DNA, 74 bp, Homo sapiens
tgcagtgtcacaaagacccaagtccacctccgcccctgccctgcccaccaccagacccaggtctcccccgctca

SEQ ID NO: 46754 - DNA, 71 bp, Homo sapiens
tccacctccgcccctgccctgcccaccaccagacccaggtctcccccgctcaaagccacccacagggcaaa

SEQ ID NO: 46755 - DNA, 72 bp, Homo sapiens
cccctgccctgcccaccaccagacccaggtctcccccgctcaaagccacccacagggcaaaggtcaagcatg

SEQ ID NO: 46756 - DNA, 75 bp, Homo sapiens
agacccaggtctcccccgctcaaagccacccacagggcaaaggtcaagcatggcagggagctgcacacagggttc

SEQ ID NO: 46757 - DNA, 75 bp, Homo sapiens
aggtctcccccgctcaaagccacccacagggcaaaggtcaagcatggcagggagctgcacacagggttcccagga

SEQ ID NO: 46758 - DNA, 76 bp, Homo sapiens
tcaaagccacccacagggcaaaggtcaagcatggcagggagctgcacacagggttcccaggatgggtcggcctcgg

SEQ ID NO: 46759 - DNA, 75 bp, Homo sapiens
aaaggtcaagcatggcagggagctgcacacagggttcccaggatgggtcggcctcggggaccaggctgtagcctg

SEQ ID NO: 46760 - DNA, 76 bp, Homo sapiens
aagcatggcagggagctgcacacagggttcccaggatgggtcggcctcggggaccaggctgtagcctggccaccca

SEQ ID NO: 46761 - DNA, 74 bp, Homo sapiens
ctgcacacagggttcccaggatgggtcggcctcggggaccaggctgtagcctggccacccatgcggcaacccta

SEQ ID NO: 46762 - DNA, 72 bp, Homo sapiens
agggttcccaggatgggtcggcctcggggaccaggctgtagcctggccacccatgcggcaaccctaccagca

SEQ ID NO: 46763 - DNA, 76 bp, Homo sapiens
tcggcctcggggaccaggctgtagcctggccacccatgcggcaaccctaccagcagggcactgcggttctcacgcc

SEQ ID NO: 46764 - DNA, 74 bp, Homo sapiens
ggaccaggctgtagcctggccacccatgcggcaaccctaccagcagggcactgcggttctcacgccccaacccc

SEQ ID NO: 46765 - DNA, 72 bp, Homo sapiens
ctggccacccatgcggcaaccctaccagcagggcactgcggttctcacgccccaacccccaaatgaccttta

SEQ ID NO: 46766 - DNA, 71 bp, Homo sapiens
atgcggcaaccctaccagcagggcactgcggttctcacgccccaacccccaaatgacctttaacctggtga

SEQ ID NO: 46767 - DNA, 69 bp, Homo sapiens
aaccctaccagcagggcactgcggttctcacgccccaacccccaaatgacctttaacctggtgacaggc

SEQ ID NO: 46768 - DNA, 70 bp, Homo sapiens
agggcactgcggttctcacgccccaacccccaaatgacctttaacctggtgacaggcttcctcacccaga

SEQ ID NO: 46769 - DNA, 72 bp, Homo sapiens
gttctcacgccccaacccccaaatgacctttaacctggtgacaggcttcctcacccagagctgtggttcaga

SEQ ID NO: 46770 - DNA, 70 bp, Homo sapiens
cccaacccccaaatgacctttaacctggtgacaggcttcctcacccagagctgtggttcagaacaaggtg

SEQ ID NO: 46771 - DNA, 71 bp, Homo sapiens
aaatgacctttaacctggtgacaggcttcctcacccagagctgtggttcagaacaaggtggggtgacctcc

SEQ ID NO: 46772 - DNA, 72 bp, Homo sapiens
acctttaacctggtgacaggcttcctcacccagagctgtggttcagaacaaggtggggtgacctccccatgc

SEQ ID NO: 46773 - DNA, 77 bp, Homo sapiens
tggtgacaggcttcctcacccagagctgtggttcagaacaaggtggggtgacctccccatgccaccgcaggaatcag

SEQ ID NO: 46774 - DNA, 77 bp, Homo sapiens
cttcctcacccagagctgtggttcagaacaaggtggggtgacctccccatgccaccgcaggaatcaggcagcaccca

SEQ ID NO: 46775 - DNA, 77 bp, Homo sapiens
ttcagaacaaggtggggtgacctccccatgccaccgcaggaatcaggcagcacccagcacgtgaagagaccctccaa

SEQ ID NO: 46776 - DNA, 73 bp, Homo sapiens
cccatgccaccgcaggaatcaggcagcacccagcacgtgaagagaccctccaaggggccggggggactcttcc

SEQ ID NO: 46777 - DNA, 70 bp, Homo sapiens
accgcaggaatcaggcagcacccagcacgtgaagagaccctccaaggggccggggggactcttcccctag

SEQ ID NO: 46778 - DNA, 72 bp, Homo sapiens
aatcaggcagcacccagcacgtgaagagaccctccaaggggccggggggactcttcccctaggcctgctctg

SEQ ID NO: 46779 - DNA, 67 bp, Homo sapiens
acccagcacgtgaagagaccctccaaggggccggggggactcttcccctaggcctgctctggggccc

SEQ ID NO: 46780 - DNA, 72 bp, Homo sapiens
gggggactcttcccctaggcctgctctggggcccctgcctacctgcctgcagcttggtgagggtttccagtg

SEQ ID NO: 46781 - DNA, 76 bp, Homo sapiens
tcccctaggcctgctctggggcccctgcctacctgcctgcagcttggtgagggtttccagtggtctctcgatccaa

SEQ ID NO: 46782 - DNA, 76 bp, Homo sapiens
ctgctctggggcccctgcctacctgcctgcagcttggtgagggtttccagtggtctctcgatccaactagaccctg

SEQ ID NO: 46783 - DNA, 73 bp, Homo sapiens
gggcccctgcctacctgcctgcagcttggtgagggtttccagtggtctctcgatccaactagaccctgggagg

SEQ ID NO: 46784 - DNA, 74 bp, Homo sapiens
tacctgcctgcagcttggtgagggtttccagtggtctctcgatccaactagaccctgggagggcccattcactt

SEQ ID NO: 46785 - DNA, 69 bp, Homo sapiens
agcttggtgagggtttccagtggtctctcgatccaactagaccctgggagggcccattcactttttaaa

SEQ ID NO: 46786 - DNA, 68 bp, Homo sapiens
agtggtctctcgatccaactagaccctgggagggcccattcactttttaaaaatggccaaaacctcca

SEQ ID NO: 46787 - DNA, 71 bp, Homo sapiens
tctcgatccaactagaccctgggagggcccattcactttttaaaaatggccaaaacctccatgcggtgatg

SEQ ID NO: 46788 - DNA, 73 bp, Homo sapiens
ctttttaaaaatggccaaaacctccatgcggtgatggcacacaacacagtgcattaacaagacaggaaacact

SEQ ID NO: 46789 - DNA, 75 bp, Homo sapiens
aaaacctccatgcggtgatggcacacaacacagtgcattaacaagacaggaaacacttttgggcccaaagtgcac

SEQ ID NO: 46790 - DNA, 79 bp, Homo sapiens
atgcggtgatggcacacaacacagtgcattaacaagacaggaaacacttttgggcccaaagtgcactgaactggaagca

SEQ ID NO: 46791 - DNA, 75 bp, Homo sapiens
acagtgcattaacaagacaggaaacacttttgggcccaaagtgcactgaactggaagcacctcacgcagcctaaa

SEQ ID NO: 46792 - DNA, 72 bp, Homo sapiens
aacaagacaggaaacacttttgggcccaaagtgcactgaactggaagcacctcacgcagcctaaagtcagtt

SEQ ID NO: 46793 - DNA, 73 bp, Homo sapiens
ccaaagtgcactgaactggaagcacctcacgcagcctaaagtcagtttggaaggttccagaacatttcctaaa

SEQ ID NO: 46794 - DNA, 72 bp, Homo sapiens
actgaactggaagcacctcacgcagcctaaagtcagtttggaaggttccagaacatttcctaaacaccttca

SEQ ID NO: 46795 - DNA, 74 bp, Homo sapiens
aagcacctcacgcagcctaaagtcagtttggaaggttccagaacatttcctaaacaccttcatctctgaataca

SEQ ID NO: 46796 - DNA, 71 bp, Homo sapiens
acgcagcctaaagtcagtttggaaggttccagaacatttcctaaacaccttcatctctgaatacactttaa

SEQ ID NO: 46797 - DNA, 70 bp, Homo sapiens
taaagtcagtttggaaggttccagaacatttcctaaacaccttcatctctgaatacactttaactccttg

SEQ ID NO: 46798 - DNA, 71 bp, Homo sapiens
ttggaaggttccagaacatttcctaaacaccttcatctctgaatacactttaactccttgggtcccagcaa

SEQ ID NO: 46799 - DNA, 72 bp, Homo sapiens
aacatttcctaaacaccttcatctctgaatacactttaactccttgggtcccagcaaggtctctgcctggtg

SEQ ID NO: 46800 - DNA, 73 bp, Homo sapiens
ttcctaaacaccttcatctctgaatacactttaactccttgggtcccagcaaggtctctgcctggtggtgagg

SEQ ID NO: 46801 - DNA, 74 bp, Homo sapiens
ccttcatctctgaatacactttaactccttgggtcccagcaaggtctctgcctggtggtgaggggcagccaggg

SEQ ID NO: 46802 - DNA, 71 bp, Homo sapiens
ttaactccttgggtcccagcaaggtctctgcctggtggtgaggggcagccaggggattaagggcacggccc

SEQ ID NO: 46803 - DNA, 74 bp, Homo sapiens
aaggtctctgcctggtggtgaggggcagccaggggattaagggcacggcccgacctgacgctcactcatccttg

SEQ ID NO: 46804 - DNA, 77 bp, Homo sapiens
gggcagccaggggattaagggcacggcccgacctgacgctcactcatccttgggccacagtccccgcagagctgcag

SEQ ID NO: 46805 - DNA, 80 bp, Homo sapiens
acggcccgacctgacgctcactcatccttgggccacagtccccgcagagctgcagtgaggatcagaggtcagtgaacgtg

SEQ ID NO: 46806 - DNA, 84 bp, Homo sapiens
tgacgctcactcatccttgggccacagtccccgcagagctgcagtgaggatcagaggtcagtgaacgtggagaaccttctgcaa

SEQ ID NO: 46807 - DNA, 82 bp, Homo sapiens
ccgcagagctgcagtgaggatcagaggtcagtgaacgtggagaaccttctgcaaacacccgatgtcagtcctgcataaatct

SEQ ID NO: 46808 - DNA, 79 bp, Homo sapiens
agctgcagtgaggatcagaggtcagtgaacgtggagaaccttctgcaaacacccgatgtcagtcctgcataaatctttt

SEQ ID NO: 46809 - DNA, 76 bp, Homo sapiens
atcagaggtcagtgaacgtggagaaccttctgcaaacacccgatgtcagtcctgcataaatctttttgtgtgagtt

SEQ ID NO: 46810 - DNA, 79 bp, Homo sapiens
agtgaacgtggagaaccttctgcaaacacccgatgtcagtcctgcataaatctttttgtgtgagtttcatctgcattca

SEQ ID NO: 46811 - DNA, 80 bp, Homo sapiens
agaaccttctgcaaacacccgatgtcagtcctgcataaatctttttgtgtgagtttcatctgcattcatacagcaaatag

SEQ ID NO: 46812 - DNA, 80 bp, Homo sapiens
tgcaaacacccgatgtcagtcctgcataaatctttttgtgtgagtttcatctgcattcatacagcaaatagtggttattt

SEQ ID NO: 46813 - DNA, 79 bp, Homo sapiens
acccgatgtcagtcctgcataaatctttttgtgtgagtttcatctgcattcatacagcaaatagtggttatttttcaga

SEQ ID NO: 46814 - DNA, 81 bp, Homo sapiens
ctgcataaatctttttgtgtgagtttcatctgcattcatacagcaaatagtggttatttttcagagtgtgctaagaatgta

SEQ ID NO: 46815 - DNA, 80 bp, Homo sapiens
tctttttgtgtgagtttcatctgcattcatacagcaaatagtggttatttttcagagtgtgctaagaatgtattactctc

SEQ ID NO: 46816 - DNA, 80 bp, Homo sapiens
gtgagtttcatctgcattcatacagcaaatagtggttatttttcagagtgtgctaagaatgtattactctctttagcaaa

SEQ ID NO: 46817 - DNA, 80 bp, Homo sapiens
atctgcattcatacagcaaatagtggttatttttcagagtgtgctaagaatgtattactctctttagcaaataacagcca

SEQ ID NO: 46818 - DNA, 73 bp, Homo sapiens
gtggttatttttcagagtgtgctaagaatgtattactctctttagcaaataacagccataaattttgtttcca

SEQ ID NO: 46819 - DNA, 69 bp, Homo sapiens
attactctctttagcaaataacagccataaattttgtttccaaaaatctttatcttacttgacaagtgg

SEQ ID NO: 46820 - DNA, 73 bp, Homo sapiens
aaataacagccataaattttgtttccaaaaatctttatcttacttgacaagtgggtggagactgctgagcaca

SEQ ID NO: 46821 - DNA, 75 bp, Homo sapiens
caaaaatctttatcttacttgacaagtgggtggagactgctgagcacagggactctgtttatcaacaccataact

SEQ ID NO: 46822 - DNA, 78 bp, Homo sapiens
ttatcttacttgacaagtgggtggagactgctgagcacagggactctgtttatcaacaccataactttctctgatatt

SEQ ID NO: 46823 - DNA, 79 bp, Homo sapiens
tacttgacaagtgggtggagactgctgagcacagggactctgtttatcaacaccataactttctctgatattttccatg

SEQ ID NO: 46824 - DNA, 80 bp, Homo sapiens
tggagactgctgagcacagggactctgtttatcaacaccataactttctctgatattttccatgggaaatggtcacaaga

SEQ ID NO: 46825 - DNA, 78 bp, Homo sapiens
tgagcacagggactctgtttatcaacaccataactttctctgatattttccatgggaaatggtcacaagaattcacta

SEQ ID NO: 46826 - DNA, 74 bp, Homo sapiens
acagggactctgtttatcaacaccataactttctctgatattttccatgggaaatggtcacaagaattcactaa

SEQ ID NO: 46827 - DNA, 74 bp, Homo sapiens
ttatcaacaccataactttctctgatattttccatgggaaatggtcacaagaattcactaaccctttgaccata

SEQ ID NO: 46828 - DNA, 74 bp, Homo sapiens
ataactttctctgatattttccatgggaaatggtcacaagaattcactaaccctttgaccatagtgctgtcttc

SEQ ID NO: 46829 - DNA, 75 bp, Homo sapiens
tgatattttccatgggaaatggtcacaagaattcactaaccctttgaccatagtgctgtcttccaagaacttgac

SEQ ID NO: 46830 - DNA, 74 bp, Homo sapiens
tttccatgggaaatggtcacaagaattcactaaccctttgaccatagtgctgtcttccaagaacttgacttcta

SEQ ID NO: 46831 - DNA, 73 bp, Homo sapiens
aaatggtcacaagaattcactaaccctttgaccatagtgctgtcttccaagaacttgacttctatgagaaaac

SEQ ID NO: 46832 - DNA, 73 bp, Homo sapiens
aagaattcactaaccctttgaccatagtgctgtcttccaagaacttgacttctatgagaaaactcagagtaac

SEQ ID NO: 46833 - DNA, 74 bp, Homo sapiens
taaccctttgaccatagtgctgtcttccaagaacttgacttctatgagaaaactcagagtaacgcccacaggaa

SEQ ID NO: 46834 - DNA, 72 bp, Homo sapiens
agaacttgacttctatgagaaaactcagagtaacgcccacaggaactgcccttggggagccttcctttctca

SEQ ID NO: 46835 - DNA, 76 bp, Homo sapiens
ttctatgagaaaactcagagtaacgcccacaggaactgcccttggggagccttcctttctcagcatttgcagactc

SEQ ID NO: 46836 - DNA, 74 bp, Homo sapiens
aggaactgcccttggggagccttcctttctcagcatttgcagactctctgaagagccgccgtcttacagaccct

SEQ ID NO: 46837 - DNA, 80 bp, Homo sapiens
tttctcagcatttgcagactctctgaagagccgccgtcttacagacccttggcctggcagcccggctctattcatgttct

SEQ ID NO: 46838 - DNA, 78 bp, Homo sapiens
atttgcagactctctgaagagccgccgtcttacagacccttggcctggcagcccggctctattcatgttcttctagct

SEQ ID NO: 46839 - DNA, 76 bp, Homo sapiens
actctctgaagagccgccgtcttacagacccttggcctggcagcccggctctattcatgttcttctagcttgggaa

SEQ ID NO: 46840 - DNA, 75 bp, Homo sapiens
aagagccgccgtcttacagacccttggcctggcagcccggctctattcatgttcttctagcttgggaagtgcaaa

SEQ ID NO: 46841 - DNA, 74 bp, Homo sapiens
tcttacagacccttggcctggcagcccggctctattcatgttcttctagcttgggaagtgcaaaatcctttcct

SEQ ID NO: 46842 - DNA, 73 bp, Homo sapiens
ttggcctggcagcccggctctattcatgttcttctagcttgggaagtgcaaaatcctttccttccttccgaat

SEQ ID NO: 46843 - DNA, 71 bp, Homo sapiens
tattcatgttcttctagcttgggaagtgcaaaatcctttccttccttccgaattcgtttcctaagtcttca

SEQ ID NO: 46844 - DNA, 68 bp, Homo sapiens
gttcttctagcttgggaagtgcaaaatcctttccttccttccgaattcgtttcctaagtcttcacacc

SEQ ID NO: 46845 - DNA, 73 bp, Homo sapiens
tgggaagtgcaaaatcctttccttccttccgaattcgtttcctaagtcttcacacccgcagcagcctgctcta

SEQ ID NO: 46846 - DNA, 73 bp, Homo sapiens
aatcctttccttccttccgaattcgtttcctaagtcttcacacccgcagcagcctgctctagccctgagcaaa

SEQ ID NO: 46847 - DNA, 74 bp, Homo sapiens
ttccttccttccgaattcgtttcctaagtcttcacacccgcagcagcctgctctagccctgagcaaagtggaag

SEQ ID NO: 46848 - DNA, 79 bp, Homo sapiens
aattcgtttcctaagtcttcacacccgcagcagcctgctctagccctgagcaaagtggaagtgctgatcccactgccca

SEQ ID NO: 46849 - DNA, 82 bp, Homo sapiens
ttcctaagtcttcacacccgcagcagcctgctctagccctgagcaaagtggaagtgctgatcccactgcccacaggaggcag

SEQ ID NO: 46850 - DNA, 80 bp, Homo sapiens
ctctagccctgagcaaagtggaagtgctgatcccactgcccacaggaggcagtgcatggcccccagcccagaggacccca

SEQ ID NO: 46851 - DNA, 76 bp, Homo sapiens
actgcccacaggaggcagtgcatggcccccagcccagaggaccccaggctgacctggagggagacaggccccagga

SEQ ID NO: 46852 - DNA, 76 bp, Homo sapiens
acaggaggcagtgcatggcccccagcccagaggaccccaggctgacctggagggagacaggccccaggaaagcaca

SEQ ID NO: 46853 - DNA, 76 bp, Homo sapiens
agtgcatggcccccagcccagaggaccccaggctgacctggagggagacaggccccaggaaagcacagtcagtata

SEQ ID NO: 46854 - DNA, 77 bp, Homo sapiens
acctggagggagacaggccccaggaaagcacagtcagtatacccggcatgcccatctgcacccagggtcagcggtga

SEQ ID NO: 46855 - DNA, 80 bp, Homo sapiens
agacaggccccaggaaagcacagtcagtatacccggcatgcccatctgcacccagggtcagcggtgacaggtgcctctgc

SEQ ID NO: 46856 - DNA, 80 bp, Homo sapiens
caggaaagcacagtcagtatacccggcatgcccatctgcacccagggtcagcggtgacaggtgcctctgccctcctccaa

SEQ ID NO: 46857 - DNA, 82 bp, Homo sapiens
aagcacagtcagtatacccggcatgcccatctgcacccagggtcagcggtgacaggtgcctctgccctcctccaagctcaca

SEQ ID NO: 46858 - DNA, 78 bp, Homo sapiens
agtatacccggcatgcccatctgcacccagggtcagcggtgacaggtgcctctgccctcctccaagctcacacccagg

SEQ ID NO: 46859 - DNA, 78 bp, Homo sapiens
atgcccatctgcacccagggtcagcggtgacaggtgcctctgccctcctccaagctcacacccaggtgcgccctccct

SEQ ID NO: 46860 - DNA, 78 bp, Homo sapiens
ctgcacccagggtcagcggtgacaggtgcctctgccctcctccaagctcacacccaggtgcgccctcccttgctggga

SEQ ID NO: 46861 - DNA, 78 bp, Homo sapiens
tcagcggtgacaggtgcctctgccctcctccaagctcacacccaggtgcgccctcccttgctgggagccctcttcctg

SEQ ID NO: 46862 - DNA, 78 bp, Homo sapiens
cctcctccaagctcacacccaggtgcgccctcccttgctgggagccctcttcctgggagctcatcctggtgtgactgc

SEQ ID NO: 46863 - DNA, 77 bp, Homo sapiens
aagctcacacccaggtgcgccctcccttgctgggagccctcttcctgggagctcatcctggtgtgactgcccggtca

SEQ ID NO: 46864 - DNA, 77 bp, Homo sapiens
acccaggtgcgccctcccttgctgggagccctcttcctgggagctcatcctggtgtgactgcccggtcagatgtgga

SEQ ID NO: 46865 - DNA, 77 bp, Homo sapiens
ccctcccttgctgggagccctcttcctgggagctcatcctggtgtgactgcccggtcagatgtggatgctgggaaag

SEQ ID NO: 46866 - DNA, 81 bp, Homo sapiens
tgggagccctcttcctgggagctcatcctggtgtgactgcccggtcagatgtggatgctgggaaaggcctctgtagctgac

SEQ ID NO: 46867 - DNA, 86 bp, Homo sapiens
ctcttcctgggagctcatcctggtgtgactgcccggtcagatgtggatgctgggaaaggcctctgtagctgactgcacagctgtga

SEQ ID NO: 46868 - DNA, 89 bp, Homo sapiens
ctggtgtgactgcccggtcagatgtggatgctgggaaaggcctctgtagctgactgcacagctgtgagcaccctccatgcctcacagca

SEQ ID NO: 46869 - DNA, 85 bp, Homo sapiens
ccggtcagatgtggatgctgggaaaggcctctgtagctgactgcacagctgtgagcaccctccatgcctcacagcaccgacgtgg

SEQ ID NO: 46870 - DNA, 86 bp, Homo sapiens
atgtggatgctgggaaaggcctctgtagctgactgcacagctgtgagcaccctccatgcctcacagcaccgacgtggtgcctgacc

SEQ ID NO: 46871 - DNA, 81 bp, Homo sapiens
aaaggcctctgtagctgactgcacagctgtgagcaccctccatgcctcacagcaccgacgtggtgcctgacccggtgggta

SEQ ID NO: 46872 - DNA, 82 bp, Homo sapiens
tgtagctgactgcacagctgtgagcaccctccatgcctcacagcaccgacgtggtgcctgacccggtgggtaaccaagctct

SEQ ID NO: 46873 - DNA, 82 bp, Homo sapiens
tgcacagctgtgagcaccctccatgcctcacagcaccgacgtggtgcctgacccggtgggtaaccaagctcttctcacagaa

SEQ ID NO: 46874 - DNA, 78 bp, Homo sapiens
ctgtgagcaccctccatgcctcacagcaccgacgtggtgcctgacccggtgggtaaccaagctcttctcacagaagcc

SEQ ID NO: 46875 - DNA, 79 bp, Homo sapiens
catgcctcacagcaccgacgtggtgcctgacccggtgggtaaccaagctcttctcacagaagccccgagacacacatca

SEQ ID NO: 46876 - DNA, 76 bp, Homo sapiens
acagcaccgacgtggtgcctgacccggtgggtaaccaagctcttctcacagaagccccgagacacacatcagtgtc

SEQ ID NO: 46877 - DNA, 79 bp, Homo sapiens
ctgacccggtgggtaaccaagctcttctcacagaagccccgagacacacatcagtgtctctcatgggcttcatggcaaa

SEQ ID NO: 46878 - DNA, 82 bp, Homo sapiens
tgggtaaccaagctcttctcacagaagccccgagacacacatcagtgtctctcatgggcttcatggcaaacgagacagagga

SEQ ID NO: 46879 - DNA, 87 bp, Homo sapiens
acagaagccccgagacacacatcagtgtctctcatgggcttcatggcaaacgagacagaggagctcgagtggcttccagcagctgca

SEQ ID NO: 46880 - DNA, 85 bp, Homo sapiens
agacacacatcagtgtctctcatgggcttcatggcaaacgagacagaggagctcgagtggcttccagcagctgcacggcggtaac

SEQ ID NO: 46881 - DNA, 81 bp, Homo sapiens
ctcatgggcttcatggcaaacgagacagaggagctcgagtggcttccagcagctgcacggcggtaacgccgagactcgccc

SEQ ID NO: 46882 - DNA, 81 bp, Homo sapiens
acagaggagctcgagtggcttccagcagctgcacggcggtaacgccgagactcgccccgcatggcagtgacgccgagactc

SEQ ID NO: 46883 - DNA, 82 bp, Homo sapiens
ttccagcagctgcacggcggtaacgccgagactcgccccgcatggcagtgacgccgagactccccctgcatggaagtcatgc

SEQ ID NO: 46884 - DNA, 80 bp, Homo sapiens
cacggcggtaacgccgagactcgccccgcatggcagtgacgccgagactccccctgcatggaagtcatgctgagactcaa

SEQ ID NO: 46885 - DNA, 81 bp, Homo sapiens
ggtaacgccgagactcgccccgcatggcagtgacgccgagactccccctgcatggaagtcatgctgagactcaaccctgca

SEQ ID NO: 46886 - DNA, 84 bp, Homo sapiens
actcgccccgcatggcagtgacgccgagactccccctgcatggaagtcatgctgagactcaaccctgcacggcagtaatgctga

SEQ ID NO: 46887 - DNA, 86 bp, Homo sapiens
ccgcatggcagtgacgccgagactccccctgcatggaagtcatgctgagactcaaccctgcacggcagtaatgctgagactcactc

SEQ ID NO: 46888 - DNA, 83 bp, Homo sapiens
acgccgagactccccctgcatggaagtcatgctgagactcaaccctgcacggcagtaatgctgagactcactctgcccgtctc

SEQ ID NO: 46889 - DNA, 87 bp, Homo sapiens
atggaagtcatgctgagactcaaccctgcacggcagtaatgctgagactcactctgcccgtctctgccccaaacacagagcatgctc

SEQ ID NO: 46890 - DNA, 82 bp, Homo sapiens
cagtaatgctgagactcactctgcccgtctctgccccaaacacagagcatgctcccgacagcccccagcagggtgtcctgtg

SEQ ID NO: 46891 - DNA, 83 bp, Homo sapiens
tgagactcactctgcccgtctctgccccaaacacagagcatgctcccgacagcccccagcagggtgtcctgtggtgcacaaca

SEQ ID NO: 46892 - DNA, 85 bp, Homo sapiens
tctgcccgtctctgccccaaacacagagcatgctcccgacagcccccagcagggtgtcctgtggtgcacaacattcagcatgtga

SEQ ID NO: 46893 - DNA, 83 bp, Homo sapiens
aaacacagagcatgctcccgacagcccccagcagggtgtcctgtggtgcacaacattcagcatgtgagcgtggacgcagggaa

SEQ ID NO: 46894 - DNA, 83 bp, Homo sapiens
agcatgctcccgacagcccccagcagggtgtcctgtggtgcacaacattcagcatgtgagcgtggacgcagggaaggaacaga

SEQ ID NO: 46895 - DNA, 83 bp, Homo sapiens
cgacagcccccagcagggtgtcctgtggtgcacaacattcagcatgtgagcgtggacgcagggaaggaacagagctgcagccc

SEQ ID NO: 46896 - DNA, 86 bp, Homo sapiens
tcctgtggtgcacaacattcagcatgtgagcgtggacgcagggaaggaacagagctgcagcccccacaggccctgagccagcacag

SEQ ID NO: 46897 - DNA, 86 bp, Homo sapiens
acaacattcagcatgtgagcgtggacgcagggaaggaacagagctgcagcccccacaggccctgagccagcacaggctctcatcga

SEQ ID NO: 46898 - DNA, 84 bp, Homo sapiens
agcatgtgagcgtggacgcagggaaggaacagagctgcagcccccacaggccctgagccagcacaggctctcatcgaggaaggc

SEQ ID NO: 46899 - DNA, 79 bp, Homo sapiens
acgcagggaaggaacagagctgcagcccccacaggccctgagccagcacaggctctcatcgaggaaggcccgctgtctt

SEQ ID NO: 46900 - DNA, 80 bp, Homo sapiens
aaggaacagagctgcagcccccacaggccctgagccagcacaggctctcatcgaggaaggcccgctgtctttcagggcaa

SEQ ID NO: 46901 - DNA, 79 bp, Homo sapiens
tgcagcccccacaggccctgagccagcacaggctctcatcgaggaaggcccgctgtctttcagggcaagccccaccgag

SEQ ID NO: 46902 - DNA, 79 bp, Homo sapiens
acaggccctgagccagcacaggctctcatcgaggaaggcccgctgtctttcagggcaagccccaccgagggctgcctgc

SEQ ID NO: 46903 - DNA, 80 bp, Homo sapiens
agccagcacaggctctcatcgaggaaggcccgctgtctttcagggcaagccccaccgagggctgcctgctttgaagtgca

SEQ ID NO: 46904 - DNA, 79 bp, Homo sapiens
acaggctctcatcgaggaaggcccgctgtctttcagggcaagccccaccgagggctgcctgctttgaagtgcagagcag

SEQ ID NO: 46905 - DNA, 79 bp, Homo sapiens
aggcccgctgtctttcagggcaagccccaccgagggctgcctgctttgaagtgcagagcagtgactgtctctggccatt

SEQ ID NO: 46906 - DNA, 84 bp, Homo sapiens
tctttcagggcaagccccaccgagggctgcctgctttgaagtgcagagcagtgactgtctctggccatttggcagcatccttgc

SEQ ID NO: 46907 - DNA, 83 bp, Homo sapiens
cccaccgagggctgcctgctttgaagtgcagagcagtgactgtctctggccatttggcagcatccttgcgggccctgagagaa

SEQ ID NO: 46908 - DNA, 86 bp, Homo sapiens
ggctgcctgctttgaagtgcagagcagtgactgtctctggccatttggcagcatccttgcgggccctgagagaagccagtcaggaa

SEQ ID NO: 46909 - DNA, 81 bp, Homo sapiens
actgtctctggccatttggcagcatccttgcgggccctgagagaagccagtcaggaagccacacagctgttggatgggagg

SEQ ID NO: 46910 - DNA, 80 bp, Homo sapiens
ttgcgggccctgagagaagccagtcaggaagccacacagctgttggatgggagggatgctggccacaagaaacactacaa

SEQ ID NO: 46911 - DNA, 79 bp, Homo sapiens
agagaagccagtcaggaagccacacagctgttggatgggagggatgctggccacaagaaacactacaaggagagaggcc

SEQ ID NO: 46912 - DNA, 78 bp, Homo sapiens
agtcaggaagccacacagctgttggatgggagggatgctggccacaagaaacactacaaggagagaggcccaggacac

SEQ ID NO: 46913 - DNA, 79 bp, Homo sapiens
acacagctgttggatgggagggatgctggccacaagaaacactacaaggagagaggcccaggacacgccactgtttgca

SEQ ID NO: 46914 - DNA, 77 bp, Homo sapiens
ttggatgggagggatgctggccacaagaaacactacaaggagagaggcccaggacacgccactgtttgcacgtggtg

SEQ ID NO: 46915 - DNA, 76 bp, Homo sapiens
agggatgctggccacaagaaacactacaaggagagaggcccaggacacgccactgtttgcacgtggtgggcagaag

SEQ ID NO: 46916 - DNA, 74 bp, Homo sapiens
acaagaaacactacaaggagagaggcccaggacacgccactgtttgcacgtggtgggcagaagggagcctggga

SEQ ID NO: 46917 - DNA, 76 bp, Homo sapiens
tacaaggagagaggcccaggacacgccactgtttgcacgtggtgggcagaagggagcctgggaaagtgctgactaa

SEQ ID NO: 46918 - DNA, 76 bp, Homo sapiens
aggacacgccactgtttgcacgtggtgggcagaagggagcctgggaaagtgctgactaaagacaggccagtctgtg

SEQ ID NO: 46919 - DNA, 76 bp, Homo sapiens
actgtttgcacgtggtgggcagaagggagcctgggaaagtgctgactaaagacaggccagtctgtgggggagcaga

SEQ ID NO: 46920 - DNA, 73 bp, Homo sapiens
acgtggtgggcagaagggagcctgggaaagtgctgactaaagacaggccagtctgtgggggagcagagggcgg

SEQ ID NO: 46921 - DNA, 71 bp, Homo sapiens
tgggaaagtgctgactaaagacaggccagtctgtgggggagcagagggcggggaggaggaaggaagagggt

SEQ ID NO: 46922 - DNA, 71 bp, Homo sapiens
tgactaaagacaggccagtctgtgggggagcagagggcggggaggaggaaggaagagggttcctccgtgcc

SEQ ID NO: 46923 - DNA, 69 bp, Homo sapiens
aagacaggccagtctgtgggggagcagagggcggggaggaggaaggaagagggttcctccgtgcccacc

SEQ ID NO: 46924 - DNA, 67 bp, Homo sapiens
agtctgtgggggagcagagggcggggaggaggaaggaagagggttcctccgtgcccaccccagcccc

SEQ ID NO: 46925 - DNA, 72 bp, Homo sapiens
gaggaggaaggaagagggttcctccgtgcccaccccagccccggtggcatcgctgtcctgggagcagcctcg

SEQ ID NO: 46926 - DNA, 73 bp, Homo sapiens
aggaagagggttcctccgtgcccaccccagccccggtggcatcgctgtcctgggagcagcctcgtgcccgcaa

SEQ ID NO: 46927 - DNA, 78 bp, Homo sapiens
caccccagccccggtggcatcgctgtcctgggagcagcctcgtgcccgcaacagctgccgtggagaggaagtgggatg

SEQ ID NO: 46928 - DNA, 81 bp, Homo sapiens
cccggtggcatcgctgtcctgggagcagcctcgtgcccgcaacagctgccgtggagaggaagtgggatgtctcactgcaaa

SEQ ID NO: 46929 - DNA, 82 bp, Homo sapiens
atcgctgtcctgggagcagcctcgtgcccgcaacagctgccgtggagaggaagtgggatgtctcactgcaaatgctttggga

SEQ ID NO: 46930 - DNA, 79 bp, Homo sapiens
acagctgccgtggagaggaagtgggatgtctcactgcaaatgctttgggaaaaacaagacagtgtactttgtgatcata

SEQ ID NO: 46931 - DNA, 77 bp, Homo sapiens
gtggagaggaagtgggatgtctcactgcaaatgctttgggaaaaacaagacagtgtactttgtgatcatataaaaca

SEQ ID NO: 46932 - DNA, 76 bp, Homo sapiens
aagtgggatgtctcactgcaaatgctttgggaaaaacaagacagtgtactttgtgatcatataaaacagcaaaata

SEQ ID NO: 46933 - DNA, 75 bp, Homo sapiens
tcactgcaaatgctttgggaaaaacaagacagtgtactttgtgatcatataaaacagcaaaataaaatagtcgtg

SEQ ID NO: 46934 - DNA, 73 bp, Homo sapiens
atgctttgggaaaaacaagacagtgtactttgtgatcatataaaacagcaaaataaaatagtcgtgggcacag

SEQ ID NO: 46935 - DNA, 73 bp, Homo sapiens
aaaaacaagacagtgtactttgtgatcatataaaacagcaaaataaaatagtcgtgggcacagggccagtgat

SEQ ID NO: 46936 - DNA, 75 bp, Homo sapiens
atataaaacagcaaaataaaatagtcgtgggcacagggccagtgattctgcagttagagccgtgtggactcggtc

SEQ ID NO: 46937 - DNA, 73 bp, Homo sapiens
aaaataaaatagtcgtgggcacagggccagtgattctgcagttagagccgtgtggactcggtccccatctccg

SEQ ID NO: 46938 - DNA, 75 bp, Homo sapiens
aatagtcgtgggcacagggccagtgattctgcagttagagccgtgtggactcggtccccatctccggtgagggcg

SEQ ID NO: 46939 - DNA, 78 bp, Homo sapiens
acagggccagtgattctgcagttagagccgtgtggactcggtccccatctccggtgagggcgtctcctgcacacggca

SEQ ID NO: 46940 - DNA, 78 bp, Homo sapiens
attctgcagttagagccgtgtggactcggtccccatctccggtgagggcgtctcctgcacacggcacccatgcttcag

SEQ ID NO: 46941 - DNA, 77 bp, Homo sapiens
agttagagccgtgtggactcggtccccatctccggtgagggcgtctcctgcacacggcacccatgcttcaggtcgca

SEQ ID NO: 46942 - DNA, 79 bp, Homo sapiens
tgtggactcggtccccatctccggtgagggcgtctcctgcacacggcacccatgcttcaggtcgcacacacgtgccttg

SEQ ID NO: 46943 - DNA, 77 bp, Homo sapiens
tccccatctccggtgagggcgtctcctgcacacggcacccatgcttcaggtcgcacacacgtgccttggacccaagt

SEQ ID NO: 46944 - DNA, 76 bp, Homo sapiens
tccggtgagggcgtctcctgcacacggcacccatgcttcaggtcgcacacacgtgccttggacccaagttcacctt

SEQ ID NO: 46945 - DNA, 73 bp, Homo sapiens
acacggcacccatgcttcaggtcgcacacacgtgccttggacccaagttcacctttggaggtgtcaatccccc

SEQ ID NO: 46946 - DNA, 72 bp, Homo sapiens
acccatgcttcaggtcgcacacacgtgccttggacccaagttcacctttggaggtgtcaatccccccaagaa

SEQ ID NO: 46947 - DNA, 73 bp, Homo sapiens
tcgcacacacgtgccttggacccaagttcacctttggaggtgtcaatccccccaagaagatgtgctaaccttg

SEQ ID NO: 46948 - DNA, 70 bp, Homo sapiens
gtgccttggacccaagttcacctttggaggtgtcaatccccccaagaagatgtgctaaccttggagtttg

SEQ ID NO: 46949 - DNA, 68 bp, Homo sapiens
acccaagttcacctttggaggtgtcaatccccccaagaagatgtgctaaccttggagtttggggccta

SEQ ID NO: 46950 - DNA, 72 bp, Homo sapiens
ctttggaggtgtcaatccccccaagaagatgtgctaaccttggagtttggggcctaggcttccatcagagtc

SEQ ID NO: 46951 - DNA, 71 bp, Homo sapiens
aggtgtcaatccccccaagaagatgtgctaaccttggagtttggggcctaggcttccatcagagtcttccc

SEQ ID NO: 46952 - DNA, 73 bp, Homo sapiens
ccaagaagatgtgctaaccttggagtttggggcctaggcttccatcagagtcttccccacagaaagcgaactg

SEQ ID NO: 46953 - DNA, 77 bp, Homo sapiens
agtcttccccacagaaagcgaactgggactggtccctcaataagctaccggcctctgttcacagcagcacaggatga

SEQ ID NO: 46954 - DNA, 78 bp, Homo sapiens
acagaaagcgaactgggactggtccctcaataagctaccggcctctgttcacagcagcacaggatgaggatgcctggg

SEQ ID NO: 46955 - DNA, 80 bp, Homo sapiens
aactgggactggtccctcaataagctaccggcctctgttcacagcagcacaggatgaggatgcctgggtcttgccagcca

SEQ ID NO: 46956 - DNA, 83 bp, Homo sapiens
tccctcaataagctaccggcctctgttcacagcagcacaggatgaggatgcctgggtcttgccagccaccacgttctatgatc

SEQ ID NO: 46957 - DNA, 82 bp, Homo sapiens
agcagcacaggatgaggatgcctgggtcttgccagccaccacgttctatgatcccaggacaaacacgattgcaaagttcatg

SEQ ID NO: 46958 - DNA, 79 bp, Homo sapiens
aggatgaggatgcctgggtcttgccagccaccacgttctatgatcccaggacaaacacgattgcaaagttcatgtgtgt

SEQ ID NO: 46959 - DNA, 75 bp, Homo sapiens
cctgggtcttgccagccaccacgttctatgatcccaggacaaacacgattgcaaagttcatgtgtgttcccggct

SEQ ID NO: 46960 - DNA, 76 bp, Homo sapiens
ttgccagccaccacgttctatgatcccaggacaaacacgattgcaaagttcatgtgtgttcccggcttacaaatgg

SEQ ID NO: 46961 - DNA, 71 bp, Homo sapiens
acgttctatgatcccaggacaaacacgattgcaaagttcatgtgtgttcccggcttacaaatggggaggtt

SEQ ID NO: 46962 - DNA, 72 bp, Homo sapiens
tatgatcccaggacaaacacgattgcaaagttcatgtgtgttcccggcttacaaatggggaggtttatttac

SEQ ID NO: 46963 - DNA, 69 bp, Homo sapiens
aggacaaacacgattgcaaagttcatgtgtgttcccggcttacaaatggggaggtttatttacggcctc

SEQ ID NO: 46964 - DNA, 69 bp, Homo sapiens
attgcaaagttcatgtgtgttcccggcttacaaatggggaggtttatttacggcctctccggatccacg

SEQ ID NO: 46965 - DNA, 71 bp, Homo sapiens
ttcatgtgtgttcccggcttacaaatggggaggtttatttacggcctctccggatccacggggagctgctc

SEQ ID NO: 46966 - DNA, 69 bp, Homo sapiens
gttcccggcttacaaatggggaggtttatttacggcctctccggatccacggggagctgctccatggga

SEQ ID NO: 46967 - DNA, 72 bp, Homo sapiens
aaatggggaggtttatttacggcctctccggatccacggggagctgctccatgggacgctggacagctcagt

SEQ ID NO: 46968 - DNA, 82 bp, Homo sapiens
atccacggggagctgctccatgggacgctggacagctcagttcccttgaaaggatggctgcaccatcgagcatgactcaacc

SEQ ID NO: 46969 - DNA, 83 bp, Homo sapiens
agctgctccatgggacgctggacagctcagttcccttgaaaggatggctgcaccatcgagcatgactcaacccaaagatccaa

SEQ ID NO: 46970 - DNA, 81 bp, Homo sapiens
atgggacgctggacagctcagttcccttgaaaggatggctgcaccatcgagcatgactcaacccaaagatccaacgcgcag

SEQ ID NO: 46971 - DNA, 80 bp, Homo sapiens
ctggacagctcagttcccttgaaaggatggctgcaccatcgagcatgactcaacccaaagatccaacgcgcaggggcctg

SEQ ID NO: 46972 - DNA, 78 bp, Homo sapiens
agttcccttgaaaggatggctgcaccatcgagcatgactcaacccaaagatccaacgcgcaggggcctggcagggaca

SEQ ID NO: 46973 - DNA, 79 bp, Homo sapiens
accatcgagcatgactcaacccaaagatccaacgcgcaggggcctggcagggacagctgtgcttgggacgccggtgtgc

SEQ ID NO: 46974 - DNA, 79 bp, Homo sapiens
agcatgactcaacccaaagatccaacgcgcaggggcctggcagggacagctgtgcttgggacgccggtgtgccactgcc

SEQ ID NO: 46975 - DNA, 79 bp, Homo sapiens
tcaacccaaagatccaacgcgcaggggcctggcagggacagctgtgcttgggacgccggtgtgccactgccgcttctgc

SEQ ID NO: 46976 - DNA, 79 bp, Homo sapiens
atccaacgcgcaggggcctggcagggacagctgtgcttgggacgccggtgtgccactgccgcttctgcgccgggagtca

SEQ ID NO: 46977 - DNA, 77 bp, Homo sapiens
ggcctggcagggacagctgtgcttgggacgccggtgtgccactgccgcttctgcgccgggagtcacgccccggcctc

SEQ ID NO: 46978 - DNA, 75 bp, Homo sapiens
ctgtgcttgggacgccggtgtgccactgccgcttctgcgccgggagtcacgccccggcctctcccactgggctcc

SEQ ID NO: 46979 - DNA, 78 bp, Homo sapiens
actgccgcttctgcgccgggagtcacgccccggcctctcccactgggctcccagcctgagctctgcccagctggtgta

SEQ ID NO: 46980 - DNA, 78 bp, Homo sapiens
tctgcgccgggagtcacgccccggcctctcccactgggctcccagcctgagctctgcccagctggtgtaaggacagta

SEQ ID NO: 46981 - DNA, 75 bp, Homo sapiens
agtcacgccccggcctctcccactgggctcccagcctgagctctgcccagctggtgtaaggacagtaaaggcaac

SEQ ID NO: 46982 - DNA, 78 bp, Homo sapiens
cggcctctcccactgggctcccagcctgagctctgcccagctggtgtaaggacagtaaaggcaaccagatgccctgac

SEQ ID NO: 46983 - DNA, 80 bp, Homo sapiens
cactgggctcccagcctgagctctgcccagctggtgtaaggacagtaaaggcaaccagatgccctgactgcgaccaccac

SEQ ID NO: 46984 - DNA, 80 bp, Homo sapiens
ctctgcccagctggtgtaaggacagtaaaggcaaccagatgccctgactgcgaccaccaccaatagtcgccaagagtgca

SEQ ID NO: 46985 - DNA, 80 bp, Homo sapiens
ctggtgtaaggacagtaaaggcaaccagatgccctgactgcgaccaccaccaatagtcgccaagagtgcacgcaagcaga

SEQ ID NO: 46986 - DNA, 81 bp, Homo sapiens
taaggacagtaaaggcaaccagatgccctgactgcgaccaccaccaatagtcgccaagagtgcacgcaagcagaaatcaca

SEQ ID NO: 46987 - DNA, 84 bp, Homo sapiens
taaaggcaaccagatgccctgactgcgaccaccaccaatagtcgccaagagtgcacgcaagcagaaatcacagatgccctggca

SEQ ID NO: 46988 - DNA, 84 bp, Homo sapiens
actgcgaccaccaccaatagtcgccaagagtgcacgcaagcagaaatcacagatgccctggcagctgcctgagggacaggcttc

SEQ ID NO: 46989 - DNA, 82 bp, Homo sapiens
acgcaagcagaaatcacagatgccctggcagctgcctgagggacaggcttctcctccagctttatccaagttgagctggtct

SEQ ID NO: 46990 - DNA, 81 bp, Homo sapiens
aaatcacagatgccctggcagctgcctgagggacaggcttctcctccagctttatccaagttgagctggtcttcggccaga

SEQ ID NO: 46991 - DNA, 79 bp, Homo sapiens
atgccctggcagctgcctgagggacaggcttctcctccagctttatccaagttgagctggtcttcggccagacgaccaa

SEQ ID NO: 46992 - DNA, 78 bp, Homo sapiens
agctgcctgagggacaggcttctcctccagctttatccaagttgagctggtcttcggccagacgaccaagctcaggcc

SEQ ID NO: 46993 - DNA, 76 bp, Homo sapiens
ggacaggcttctcctccagctttatccaagttgagctggtcttcggccagacgaccaagctcaggccccaaattca

SEQ ID NO: 46994 - DNA, 74 bp, Homo sapiens
tctcctccagctttatccaagttgagctggtcttcggccagacgaccaagctcaggccccaaattcacctgggt

SEQ ID NO: 46995 - DNA, 75 bp, Homo sapiens
agctttatccaagttgagctggtcttcggccagacgaccaagctcaggccccaaattcacctgggttgctctgag

SEQ ID NO: 46996 - DNA, 77 bp, Homo sapiens
ttgagctggtcttcggccagacgaccaagctcaggccccaaattcacctgggttgctctgaggactggtgagactta

SEQ ID NO: 46997 - DNA, 75 bp, Homo sapiens
tcttcggccagacgaccaagctcaggccccaaattcacctgggttgctctgaggactggtgagacttaaaggtca

SEQ ID NO: 46998 - DNA, 73 bp, Homo sapiens
agacgaccaagctcaggccccaaattcacctgggttgctctgaggactggtgagacttaaaggtcacttggac

SEQ ID NO: 46999 - DNA, 73 bp, Homo sapiens
aaattcacctgggttgctctgaggactggtgagacttaaaggtcacttggactcctccagtggccgggacaca

SEQ ID NO: 47000 - DNA, 77 bp, Homo sapiens
gttgctctgaggactggtgagacttaaaggtcacttggactcctccagtggccgggacacatgtctctctagtggac

SEQ ID NO: 47001 - DNA, 75 bp, Homo sapiens
aggactggtgagacttaaaggtcacttggactcctccagtggccgggacacatgtctctctagtggactggttgc

SEQ ID NO: 47002 - DNA, 74 bp, Homo sapiens
aaaggtcacttggactcctccagtggccgggacacatgtctctctagtggactggttgccttccgtgttgtgag

SEQ ID NO: 47003 - DNA, 75 bp, Homo sapiens
agtggccgggacacatgtctctctagtggactggttgccttccgtgttgtgaggaccggccaggcctgcaggttg

SEQ ID NO: 47004 - DNA, 76 bp, Homo sapiens
acacatgtctctctagtggactggttgccttccgtgttgtgaggaccggccaggcctgcaggttggtgccttcctc

SEQ ID NO: 47005 - DNA, 79 bp, Homo sapiens
gttgccttccgtgttgtgaggaccggccaggcctgcaggttggtgccttcctctggcctcactgagcagcaacactcaa

SEQ ID NO: 47006 - DNA, 76 bp, Homo sapiens
aggaccggccaggcctgcaggttggtgccttcctctggcctcactgagcagcaacactcaagttcaaacacaaaac

SEQ ID NO: 47007 - DNA, 77 bp, Homo sapiens
aggcctgcaggttggtgccttcctctggcctcactgagcagcaacactcaagttcaaacacaaaaccaccatttatg

SEQ ID NO: 47008 - DNA, 76 bp, Homo sapiens
aggttggtgccttcctctggcctcactgagcagcaacactcaagttcaaacacaaaaccaccatttatggtggagc

SEQ ID NO: 47009 - DNA, 79 bp, Homo sapiens
cttcctctggcctcactgagcagcaacactcaagttcaaacacaaaaccaccatttatggtggagccatgggctctgta

SEQ ID NO: 47010 - DNA, 81 bp, Homo sapiens
actgagcagcaacactcaagttcaaacacaaaaccaccatttatggtggagccatgggctctgtagcccagcatgacgcac

SEQ ID NO: 47011 - DNA, 79 bp, Homo sapiens
aacactcaagttcaaacacaaaaccaccatttatggtggagccatgggctctgtagcccagcatgacgcacctggcaga

SEQ ID NO: 47012 - DNA, 78 bp, Homo sapiens
aagttcaaacacaaaaccaccatttatggtggagccatgggctctgtagcccagcatgacgcacctggcagaccatgt

SEQ ID NO: 47013 - DNA, 80 bp, Homo sapiens
acaaaaccaccatttatggtggagccatgggctctgtagcccagcatgacgcacctggcagaccatgttcacgagactaa

SEQ ID NO: 47014 - DNA, 85 bp, Homo sapiens
atttatggtggagccatgggctctgtagcccagcatgacgcacctggcagaccatgttcacgagactaatgctccgagccactga

SEQ ID NO: 47015 - DNA, 87 bp, Homo sapiens
tggagccatgggctctgtagcccagcatgacgcacctggcagaccatgttcacgagactaatgctccgagccactgacacacaccca

SEQ ID NO: 47016 - DNA, 83 bp, Homo sapiens
agcatgacgcacctggcagaccatgttcacgagactaatgctccgagccactgacacacacccagctccccgcagccgccctg

SEQ ID NO: 47017 - DNA, 80 bp, Homo sapiens
acctggcagaccatgttcacgagactaatgctccgagccactgacacacacccagctccccgcagccgccctgtgcttta

SEQ ID NO: 47018 - DNA, 81 bp, Homo sapiens
agaccatgttcacgagactaatgctccgagccactgacacacacccagctccccgcagccgccctgtgctttatgcgccca

SEQ ID NO: 47019 - DNA, 81 bp, Homo sapiens
acgagactaatgctccgagccactgacacacacccagctccccgcagccgccctgtgctttatgcgcccacaccagcacca

SEQ ID NO: 47020 - DNA, 83 bp, Homo sapiens
tgacacacacccagctccccgcagccgccctgtgctttatgcgcccacaccagcaccactcagccctcacatgggtgccagta

SEQ ID NO: 47021 - DNA, 83 bp, Homo sapiens
acccagctccccgcagccgccctgtgctttatgcgcccacaccagcaccactcagccctcacatgggtgccagtatgctcaca

SEQ ID NO: 47022 - DNA, 87 bp, Homo sapiens
cagccgccctgtgctttatgcgcccacaccagcaccactcagccctcacatgggtgccagtatgctcacagtcgcctgcacacagag

SEQ ID NO: 47023 - DNA, 90 bp, Homo sapiens
tgtgctttatgcgcccacaccagcaccactcagccctcacatgggtgccagtatgctcacagtcgcctgcacacagaggagcacacagtg

SEQ ID NO: 47024 - DNA, 88 bp, Homo sapiens
ttatgcgcccacaccagcaccactcagccctcacatgggtgccagtatgctcacagtcgcctgcacacagaggagcacacagtggggc

SEQ ID NO: 47025 - DNA, 83 bp, Homo sapiens
acaccagcaccactcagccctcacatgggtgccagtatgctcacagtcgcctgcacacagaggagcacacagtggggccgggg

SEQ ID NO: 47026 - DNA, 83 bp, Homo sapiens
actcagccctcacatgggtgccagtatgctcacagtcgcctgcacacagaggagcacacagtggggccgggggtgctgccgcg

SEQ ID NO: 47027 - DNA, 83 bp, Homo sapiens
acatgggtgccagtatgctcacagtcgcctgcacacagaggagcacacagtggggccgggggtgctgccgcgtcctgctctcc

SEQ ID NO: 47028 - DNA, 80 bp, Homo sapiens
agtatgctcacagtcgcctgcacacagaggagcacacagtggggccgggggtgctgccgcgtcctgctctcccccagtcc

SEQ ID NO: 47029 - DNA, 82 bp, Homo sapiens
tcacagtcgcctgcacacagaggagcacacagtggggccgggggtgctgccgcgtcctgctctcccccagtcccagcgagca

SEQ ID NO: 47030 - DNA, 77 bp, Homo sapiens
cacagaggagcacacagtggggccgggggtgctgccgcgtcctgctctcccccagtcccagcgagcacaggagttaa

SEQ ID NO: 47031 - DNA, 77 bp, Homo sapiens
cacacagtggggccgggggtgctgccgcgtcctgctctcccccagtcccagcgagcacaggagttaatgacagagtg

SEQ ID NO: 47032 - DNA, 82 bp, Homo sapiens
tgctgccgcgtcctgctctcccccagtcccagcgagcacaggagttaatgacagagtgtggggctcaaatgcccaggacaca

SEQ ID NO: 47033 - DNA, 79 bp, Homo sapiens
cgtcctgctctcccccagtcccagcgagcacaggagttaatgacagagtgtggggctcaaatgcccaggacacactgta

SEQ ID NO: 47034 - DNA, 79 bp, Homo sapiens
cccagtcccagcgagcacaggagttaatgacagagtgtggggctcaaatgcccaggacacactgtagccctccacagcc

SEQ ID NO: 47035 - DNA, 81 bp, Homo sapiens
tcccagcgagcacaggagttaatgacagagtgtggggctcaaatgcccaggacacactgtagccctccacagcctctcagg

SEQ ID NO: 47036 - DNA, 78 bp, Homo sapiens
acaggagttaatgacagagtgtggggctcaaatgcccaggacacactgtagccctccacagcctctcagggcctcagt

SEQ ID NO: 47037 - DNA, 80 bp, Homo sapiens
aatgacagagtgtggggctcaaatgcccaggacacactgtagccctccacagcctctcagggcctcagtttccacatctg

SEQ ID NO: 47038 - DNA, 83 bp, Homo sapiens
tcagtgacagctgttacacagttgtcatgaggatgtaacaacttcacacatggagaccccgagaacagcactctcaggaggac

SEQ ID NO: 47039 - DNA, 81 bp, Homo sapiens
agtgacagctgttacacagttgtcatgaggatgtaacaacttcacacatggagaccccgagaacagcactctcaggaggac

SEQ ID NO: 47040 - DNA, 79 bp, Homo sapiens
acagctgttacacagttgtcatgaggatgtaacaacttcacacatggagaccccgagaacagcactctcaggaggaccc

SEQ ID NO: 47041 - DNA, 80 bp, Homo sapiens
tacacagttgtcatgaggatgtaacaacttcacacatggagaccccgagaacagcactctcaggaggacccgtgcacgat

SEQ ID NO: 47042 - DNA, 80 bp, Homo sapiens
ttgtcatgaggatgtaacaacttcacacatggagaccccgagaacagcactctcaggaggacccgtgcacgattcatctt

SEQ ID NO: 47043 - DNA, 80 bp, Homo sapiens
atgaggatgtaacaacttcacacatggagaccccgagaacagcactctcaggaggacccgtgcacgattcatctttcaga

SEQ ID NO: 47044 - DNA, 79 bp, Homo sapiens
gatgtaacaacttcacacatggagaccccgagaacagcactctcaggaggacccgtgcacgattcatctttcagactaa

SEQ ID NO: 47045 - DNA, 78 bp, Homo sapiens
aacaacttcacacatggagaccccgagaacagcactctcaggaggacccgtgcacgattcatctttcagactaacaga

SEQ ID NO: 47046 - DNA, 81 bp, Homo sapiens
aacagcactctcaggaggacccgtgcacgattcatctttcagactaacagacgagctgagcgacggacgagctaagtgatg

SEQ ID NO: 47047 - DNA, 83 bp, Homo sapiens
tctcaggaggacccgtgcacgattcatctttcagactaacagacgagctgagcgacggacgagctaagtgatggatctgagaa

SEQ ID NO: 47048 - DNA, 77 bp, Homo sapiens
agactaacagacgagctgagcgacggacgagctaagtgatggatctgagaacgggagtgatcgggaagtgaacagtt

SEQ ID NO: 47049 - DNA, 84 bp, Homo sapiens
agctgagcgacggacgagctaagtgatggatctgagaacgggagtgatcgggaagtgaacagtttcatcatctgctgctgctat

SEQ ID NO: 47050 - DNA, 82 bp, Homo sapiens
acggacgagctaagtgatggatctgagaacgggagtgatcgggaagtgaacagtttcatcatctgctgctgctattcaattg

SEQ ID NO: 47051 - DNA, 83 bp, Homo sapiens
taagtgatggatctgagaacgggagtgatcgggaagtgaacagtttcatcatctgctgctgctattcaattgtcagggttgaa

SEQ ID NO: 47052 - DNA, 79 bp, Homo sapiens
atctgagaacgggagtgatcgggaagtgaacagtttcatcatctgctgctgctattcaattgtcagggttgaaataaac

SEQ ID NO: 47053 - DNA, 76 bp, Homo sapiens
aacgggagtgatcgggaagtgaacagtttcatcatctgctgctgctattcaattgtcagggttgaaataaacggaa

SEQ ID NO: 47054 - DNA, 78 bp, Homo sapiens
atcgggaagtgaacagtttcatcatctgctgctgctattcaattgtcagggttgaaataaacggaaagccagcctgcc

SEQ ID NO: 47055 - DNA, 78 bp, Homo sapiens
agtttcatcatctgctgctgctattcaattgtcagggttgaaataaacggaaagccagcctgcccgtaaacactgtca

SEQ ID NO: 47056 - DNA, 77 bp, Homo sapiens
atctgctgctgctattcaattgtcagggttgaaataaacggaaagccagcctgcccgtaaacactgtcatgtatttc

SEQ ID NO: 47057 - DNA, 72 bp, Homo sapiens
ctattcaattgtcagggttgaaataaacggaaagccagcctgcccgtaaacactgtcatgtatttcccacaa

SEQ ID NO: 47058 - DNA, 71 bp, Homo sapiens
aattgtcagggttgaaataaacggaaagccagcctgcccgtaaacactgtcatgtatttcccacaagtgta

SEQ ID NO: 47059 - DNA, 72 bp, Homo sapiens
aaagccagcctgcccgtaaacactgtcatgtatttcccacaagtgtaaaaaggaagtgaacagtatcttcca

SEQ ID NO: 47060 - DNA, 72 bp, Homo sapiens
agcctgcccgtaaacactgtcatgtatttcccacaagtgtaaaaaggaagtgaacagtatcttccaggtgtg

SEQ ID NO: 47061 - DNA, 74 bp, Homo sapiens
taaacactgtcatgtatttcccacaagtgtaaaaaggaagtgaacagtatcttccaggtgtggtggagacagtc

SEQ ID NO: 47062 - DNA, 73 bp, Homo sapiens
tatttcccacaagtgtaaaaaggaagtgaacagtatcttccaggtgtggtggagacagtccagacacacccaa

SEQ ID NO: 47063 - DNA, 72 bp, Homo sapiens
acaagtgtaaaaaggaagtgaacagtatcttccaggtgtggtggagacagtccagacacacccaaagcccac

SEQ ID NO: 47064 - DNA, 74 bp, Homo sapiens
taaaaaggaagtgaacagtatcttccaggtgtggtggagacagtccagacacacccaaagcccactgcgcctcc

SEQ ID NO: 47065 - DNA, 76 bp, Homo sapiens
aacagtatcttccaggtgtggtggagacagtccagacacacccaaagcccactgcgcctccctgagagctcccgcg

SEQ ID NO: 47066 - DNA, 76 bp, Homo sapiens
caggtgtggtggagacagtccagacacacccaaagcccactgcgcctccctgagagctcccgcgtccgggctgccc

SEQ ID NO: 47067 - DNA, 77 bp, Homo sapiens
tggtggagacagtccagacacacccaaagcccactgcgcctccctgagagctcccgcgtccgggctgccctcatttg

SEQ ID NO: 47068 - DNA, 78 bp, Homo sapiens
actgcgcctccctgagagctcccgcgtccgggctgccctcatttggagtgggcaggaatgccacaccgcagccctctc

SEQ ID NO: 47069 - DNA, 81 bp, Homo sapiens
ctccctgagagctcccgcgtccgggctgccctcatttggagtgggcaggaatgccacaccgcagccctctctgcttctgca

SEQ ID NO: 47070 - DNA, 78 bp, Homo sapiens
ccgcgtccgggctgccctcatttggagtgggcaggaatgccacaccgcagccctctctgcttctgcagggacggtcaa

SEQ ID NO: 47071 - DNA, 81 bp, Homo sapiens
ctgccctcatttggagtgggcaggaatgccacaccgcagccctctctgcttctgcagggacggtcaacttagcaattcaga

SEQ ID NO: 47072 - DNA, 78 bp, Homo sapiens
atttggagtgggcaggaatgccacaccgcagccctctctgcttctgcagggacggtcaacttagcaattcagaaaaga

SEQ ID NO: 47073 - DNA, 78 bp, Homo sapiens
caggaatgccacaccgcagccctctctgcttctgcagggacggtcaacttagcaattcagaaaagaaacaatgttgac

SEQ ID NO: 47074 - DNA, 78 bp, Homo sapiens
acaccgcagccctctctgcttctgcagggacggtcaacttagcaattcagaaaagaaacaatgttgactcagagagtg

SEQ ID NO: 47075 - DNA, 77 bp, Homo sapiens
cctctctgcttctgcagggacggtcaacttagcaattcagaaaagaaacaatgttgactcagagagtggccttactg

SEQ ID NO: 47076 - DNA, 77 bp, Homo sapiens
ttctgcagggacggtcaacttagcaattcagaaaagaaacaatgttgactcagagagtggccttactgtactgtgga

SEQ ID NO: 47077 - DNA, 74 bp, Homo sapiens
acggtcaacttagcaattcagaaaagaaacaatgttgactcagagagtggccttactgtactgtggacagttgg

SEQ ID NO: 47078 - DNA, 75 bp, Homo sapiens
aacttagcaattcagaaaagaaacaatgttgactcagagagtggccttactgtactgtggacagttggtcctgga

SEQ ID NO: 47079 - DNA, 77 bp, Homo sapiens
aaacaatgttgactcagagagtggccttactgtactgtggacagttggtcctggatgggagccagtcccagcctggc

SEQ ID NO: 47080 - DNA, 74 bp, Homo sapiens
actcagagagtggccttactgtactgtggacagttggtcctggatgggagccagtcccagcctggccgaacgtt

SEQ ID NO: 47081 - DNA, 71 bp, Homo sapiens
cttactgtactgtggacagttggtcctggatgggagccagtcccagcctggccgaacgtttggccttttta

SEQ ID NO: 47082 - DNA, 74 bp, Homo sapiens
acagttggtcctggatgggagccagtcccagcctggccgaacgtttggcctttttatgctgagaatccagccac

SEQ ID NO: 47083 - DNA, 76 bp, Homo sapiens
atgggagccagtcccagcctggccgaacgtttggcctttttatgctgagaatccagccactgcagtgaccggccca

SEQ ID NO: 47084 - DNA, 77 bp, Homo sapiens
agtcccagcctggccgaacgtttggcctttttatgctgagaatccagccactgcagtgaccggcccaggctctctga

SEQ ID NO: 47085 - DNA, 78 bp, Homo sapiens
ctggccgaacgtttggcctttttatgctgagaatccagccactgcagtgaccggcccaggctctctgagggctggctg

SEQ ID NO: 47086 - DNA, 79 bp, Homo sapiens
aatccagccactgcagtgaccggcccaggctctctgagggctggctgggtcaagctgtgtgttttccatggagccccaa

SEQ ID NO: 47087 - DNA, 77 bp, Homo sapiens
actgcagtgaccggcccaggctctctgagggctggctgggtcaagctgtgtgttttccatggagccccaagttccaa

SEQ ID NO: 47088 - DNA, 74 bp, Homo sapiens
gcccaggctctctgagggctggctgggtcaagctgtgtgttttccatggagccccaagttccaaggggaggtag

SEQ ID NO: 47089 - DNA, 74 bp, Homo sapiens
tctgagggctggctgggtcaagctgtgtgttttccatggagccccaagttccaaggggaggtagtcacaaaaca

SEQ ID NO: 47090 - DNA, 72 bp, Homo sapiens
tggctgggtcaagctgtgtgttttccatggagccccaagttccaaggggaggtagtcacaaaacagggtcta

SEQ ID NO: 47091 - DNA, 69 bp, Homo sapiens
aagctgtgtgttttccatggagccccaagttccaaggggaggtagtcacaaaacagggtctagcaggtt

SEQ ID NO: 47092 - DNA, 71 bp, Homo sapiens
ttttccatggagccccaagttccaaggggaggtagtcacaaaacagggtctagcaggtttgtggacagatg

SEQ ID NO: 47093 - DNA, 70 bp, Homo sapiens
agccccaagttccaaggggaggtagtcacaaaacagggtctagcaggtttgtggacagatgtggagaaaa

SEQ ID NO: 47094 - DNA, 70 bp, Homo sapiens
aagttccaaggggaggtagtcacaaaacagggtctagcaggtttgtggacagatgtggagaaaatgtatt

SEQ ID NO: 47095 - DNA, 76 bp, Homo sapiens
gtagtcacaaaacagggtctagcaggtttgtggacagatgtggagaaaatgtattttcttatcataggcactaaca

SEQ ID NO: 47096 - DNA, 74 bp, Homo sapiens
ggtctagcaggtttgtggacagatgtggagaaaatgtattttcttatcataggcactaacactggaaggaaaaa

SEQ ID NO: 47097 - DNA, 72 bp, Homo sapiens
gtttgtggacagatgtggagaaaatgtattttcttatcataggcactaacactggaaggaaaaaaatttcac

SEQ ID NO: 47098 - DNA, 72 bp, Homo sapiens
gatgtggagaaaatgtattttcttatcataggcactaacactggaaggaaaaaaatttcacctataatttga

SEQ ID NO: 47099 - DNA, 68 bp, Homo sapiens
gtattttcttatcataggcactaacactggaaggaaaaaaatttcacctataatttgaaaacggagcc

SEQ ID NO: 47100 - DNA, 69 bp, Homo sapiens
tcttatcataggcactaacactggaaggaaaaaaatttcacctataatttgaaaacggagccccagaaa

SEQ ID NO: 47101 - DNA, 65 bp, Homo sapiens
aggcactaacactggaaggaaaaaaatttcacctataatttgaaaacggagccccagaaaattag

SEQ ID NO: 47102 - DNA, 69 bp, Homo sapiens
tgaaaacggagccccagaaaattagtagaacattaacaaggcccaatgcactttactatttcttttgaa

SEQ ID NO: 47103 - DNA, 68 bp, Homo sapiens
cccagaaaattagtagaacattaacaaggcccaatgcactttactatttcttttgaatattatacttt

SEQ ID NO: 47104 - DNA, 71 bp, Homo sapiens
tagaacattaacaaggcccaatgcactttactatttcttttgaatattatacttttaatcaacacccgtca

SEQ ID NO: 47105 - DNA, 74 bp, Homo sapiens
taacaaggcccaatgcactttactatttcttttgaatattatacttttaatcaacacccgtcagtcagagcaga

SEQ ID NO: 47106 - DNA, 77 bp, Homo sapiens
aatgcactttactatttcttttgaatattatacttttaatcaacacccgtcagtcagagcagagagtgcctctgtca

SEQ ID NO: 47107 - DNA, 77 bp, Homo sapiens
ttactatttcttttgaatattatacttttaatcaacacccgtcagtcagagcagagagtgcctctgtcagagtgaaa

SEQ ID NO: 47108 - DNA, 79 bp, Homo sapiens
tttgaatattatacttttaatcaacacccgtcagtcagagcagagagtgcctctgtcagagtgaaaggcaaaactgata

SEQ ID NO: 47109 - DNA, 79 bp, Homo sapiens
tatacttttaatcaacacccgtcagtcagagcagagagtgcctctgtcagagtgaaaggcaaaactgatactgttctta

SEQ ID NO: 47110 - DNA, 79 bp, Homo sapiens
taatcaacacccgtcagtcagagcagagagtgcctctgtcagagtgaaaggcaaaactgatactgttcttaacttattc

SEQ ID NO: 47111 - DNA, 71 bp, Homo sapiens
tctgtcagagtgaaaggcaaaactgatactgttcttaacttattccacttccagctcccctttaaaattta

SEQ ID NO: 47112 - DNA, 67 bp, Homo sapiens
agagtgaaaggcaaaactgatactgttcttaacttattccacttccagctcccctttaaaatttatt

SEQ ID NO: 47113 - DNA, 64 bp, Homo sapiens
aaacttttaaaatgaacctttcacttggccagggtcaaaatttacaaggcgtacacaccaggtt

SEQ ID NO: 47114 - DNA, 69 bp, Homo sapiens
tttaaaatgaacctttcacttggccagggtcaaaatttacaaggcgtacacaccaggtttgcagtgaaa

SEQ ID NO: 47115 - DNA, 72 bp, Homo sapiens
tttcacttggccagggtcaaaatttacaaggcgtacacaccaggtttgcagtgaaatcactggaatataaaa

SEQ ID NO: 47116 - DNA, 71 bp, Homo sapiens
agggtcaaaatttacaaggcgtacacaccaggtttgcagtgaaatcactggaatataaaaaccatggaaga

SEQ ID NO: 47117 - DNA, 72 bp, Homo sapiens
aaaatttacaaggcgtacacaccaggtttgcagtgaaatcactggaatataaaaaccatggaagagtccaga

SEQ ID NO: 47118 - DNA, 77 bp, Homo sapiens
gtacacaccaggtttgcagtgaaatcactggaatataaaaaccatggaagagtccagagcatttccaacatcaaata

SEQ ID NO: 47119 - DNA, 74 bp, Homo sapiens
aggtttgcagtgaaatcactggaatataaaaaccatggaagagtccagagcatttccaacatcaaatacgaaac

SEQ ID NO: 47120 - DNA, 75 bp, Homo sapiens
tgcagtgaaatcactggaatataaaaaccatggaagagtccagagcatttccaacatcaaatacgaaacccttaa

SEQ ID NO: 47121 - DNA, 73 bp, Homo sapiens
tgaaatcactggaatataaaaaccatggaagagtccagagcatttccaacatcaaatacgaaacccttaaaca

SEQ ID NO: 47122 - DNA, 71 bp, Homo sapiens
aatcactggaatataaaaaccatggaagagtccagagcatttccaacatcaaatacgaaacccttaaacaa

SEQ ID NO: 47123 - DNA, 72 bp, Homo sapiens
tggaatataaaaaccatggaagagtccagagcatttccaacatcaaatacgaaacccttaaacaagcagctt

SEQ ID NO: 47124 - DNA, 74 bp, Homo sapiens
aaaccatggaagagtccagagcatttccaacatcaaatacgaaacccttaaacaagcagctttgcattggagaa

SEQ ID NO: 47125 - DNA, 75 bp, Homo sapiens
accatggaagagtccagagcatttccaacatcaaatacgaaacccttaaacaagcagctttgcattggagaaaca

SEQ ID NO: 47126 - DNA, 76 bp, Homo sapiens
aagagtccagagcatttccaacatcaaatacgaaacccttaaacaagcagctttgcattggagaaacagctctcag

SEQ ID NO: 47127 - DNA, 74 bp, Homo sapiens
agagcatttccaacatcaaatacgaaacccttaaacaagcagctttgcattggagaaacagctctcagttttaa

SEQ ID NO: 47128 - DNA, 72 bp, Homo sapiens
caacatcaaatacgaaacccttaaacaagcagctttgcattggagaaacagctctcagttttaaccttagaa

SEQ ID NO: 47129 - DNA, 69 bp, Homo sapiens
aaatacgaaacccttaaacaagcagctttgcattggagaaacagctctcagttttaaccttagaaaaca

SEQ ID NO: 47130 - DNA, 68 bp, Homo sapiens
aacccttaaacaagcagctttgcattggagaaacagctctcagttttaaccttagaaaacaggggaaa

SEQ ID NO: 47131 - DNA, 73 bp, Homo sapiens
aagcagctttgcattggagaaacagctctcagttttaaccttagaaaacaggggaaaatgaagcatgaggaaa

SEQ ID NO: 47132 - DNA, 72 bp, Homo sapiens
aaacagctctcagttttaaccttagaaaacaggggaaaatgaagcatgaggaaacctggatgcctgtcaatc

SEQ ID NO: 47133 - DNA, 79 bp, Homo sapiens
aaaatgaagcatgaggaaacctggatgcctgtcaatcgctctggggtaaagccataacctgggaagtgctcagcatgcc

SEQ ID NO: 47134 - DNA, 80 bp, Homo sapiens
atgaggaaacctggatgcctgtcaatcgctctggggtaaagccataacctgggaagtgctcagcatgccccagctagcaa

SEQ ID NO: 47135 - DNA, 79 bp, Homo sapiens
aacctggatgcctgtcaatcgctctggggtaaagccataacctgggaagtgctcagcatgccccagctagcaagcttaa

SEQ ID NO: 47136 - DNA, 77 bp, Homo sapiens
tgtcaatcgctctggggtaaagccataacctgggaagtgctcagcatgccccagctagcaagcttaacgccccttta

SEQ ID NO: 47137 - DNA, 76 bp, Homo sapiens
tctggggtaaagccataacctgggaagtgctcagcatgccccagctagcaagcttaacgcccctttactcagaatc

SEQ ID NO: 47138 - DNA, 77 bp, Homo sapiens
taaagccataacctgggaagtgctcagcatgccccagctagcaagcttaacgcccctttactcagaatctcaagaaa

SEQ ID NO: 47139 - DNA, 77 bp, Homo sapiens
aacctgggaagtgctcagcatgccccagctagcaagcttaacgcccctttactcagaatctcaagaaagaagccata

SEQ ID NO: 47140 - DNA, 79 bp, Homo sapiens
tcagcatgccccagctagcaagcttaacgcccctttactcagaatctcaagaaagaagccataagcacttgcttcctaa

SEQ ID NO: 47141 - DNA, 70 bp, Homo sapiens
aagcttaacgcccctttactcagaatctcaagaaagaagccataagcacttgcttcctaaaagagtgttt

SEQ ID NO: 47142 - DNA, 71 bp, Homo sapiens
cctttactcagaatctcaagaaagaagccataagcacttgcttcctaaaagagtgttttgttcctaaataa

SEQ ID NO: 47143 - DNA, 70 bp, Homo sapiens
agaatctcaagaaagaagccataagcacttgcttcctaaaagagtgttttgttcctaaataacaaaggga

SEQ ID NO: 47144 - DNA, 67 bp, Homo sapiens
aagaaagaagccataagcacttgcttcctaaaagagtgttttgttcctaaataacaaagggagacgt

SEQ ID NO: 47145 - DNA, 69 bp, Homo sapiens
taagcacttgcttcctaaaagagtgttttgttcctaaataacaaagggagacgttcagcgtttctcaaa

SEQ ID NO: 47146 - DNA, 65 bp, Homo sapiens
cttcctaaaagagtgttttgttcctaaataacaaagggagacgttcagcgtttctcaaaacgtct

SEQ ID NO: 47147 - DNA, 66 bp, Homo sapiens
gagtgttttgttcctaaataacaaagggagacgttcagcgtttctcaaaacgtctttaattagagt

SEQ ID NO: 47148 - DNA, 68 bp, Homo sapiens
tgttcctaaataacaaagggagacgttcagcgtttctcaaaacgtctttaattagagttttccacaga

SEQ ID NO: 47149 - DNA, 69 bp, Homo sapiens
aaataacaaagggagacgttcagcgtttctcaaaacgtctttaattagagttttccacagatgtgaagc

SEQ ID NO: 47150 - DNA, 74 bp, Homo sapiens
tttctcaaaacgtctttaattagagttttccacagatgtgaagctctccggctcgggtgagggtgtcgtgtgca

SEQ ID NO: 47151 - DNA, 72 bp, Homo sapiens
aaaacgtctttaattagagttttccacagatgtgaagctctccggctcgggtgagggtgtcgtgtgcagggc

SEQ ID NO: 47152 - DNA, 78 bp, Homo sapiens
ttaattagagttttccacagatgtgaagctctccggctcgggtgagggtgtcgtgtgcagggcctggcactcggctgc

SEQ ID NO: 47153 - DNA, 80 bp, Homo sapiens
ttttccacagatgtgaagctctccggctcgggtgagggtgtcgtgtgcagggcctggcactcggctgcctctgagaaagc

SEQ ID NO: 47154 - DNA, 77 bp, Homo sapiens
ggctcgggtgagggtgtcgtgtgcagggcctggcactcggctgcctctgagaaagccccggaggagcctggcaccaa

SEQ ID NO: 47155 - DNA, 81 bp, Homo sapiens
gtgagggtgtcgtgtgcagggcctggcactcggctgcctctgagaaagccccggaggagcctggcaccaagtgcctgcaga

SEQ ID NO: 47156 - DNA, 79 bp, Homo sapiens
tgcagggcctggcactcggctgcctctgagaaagccccggaggagcctggcaccaagtgcctgcagacgcccgggtgaa

SEQ ID NO: 47157 - DNA, 76 bp, Homo sapiens
ctggcactcggctgcctctgagaaagccccggaggagcctggcaccaagtgcctgcagacgcccgggtgaaaacaa

SEQ ID NO: 47158 - DNA, 80 bp, Homo sapiens
tgcctctgagaaagccccggaggagcctggcaccaagtgcctgcagacgcccgggtgaaaacaagcatctgcacaggtgc

SEQ ID NO: 47159 - DNA, 77 bp, Homo sapiens
aaagccccggaggagcctggcaccaagtgcctgcagacgcccgggtgaaaacaagcatctgcacaggtgcgggcaca

SEQ ID NO: 47160 - DNA, 78 bp, Homo sapiens
ccggaggagcctggcaccaagtgcctgcagacgcccgggtgaaaacaagcatctgcacaggtgcgggcacaggagagg

SEQ ID NO: 47161 - DNA, 81 bp, Homo sapiens
agtgcctgcagacgcccgggtgaaaacaagcatctgcacaggtgcgggcacaggagagggctgcggagccagcacggaaga

SEQ ID NO: 47162 - DNA, 78 bp, Homo sapiens
cccgggtgaaaacaagcatctgcacaggtgcgggcacaggagagggctgcggagccagcacggaagacggccctcaga

SEQ ID NO: 47163 - DNA, 78 bp, Homo sapiens
aaaacaagcatctgcacaggtgcgggcacaggagagggctgcggagccagcacggaagacggccctcagaggaggccg

SEQ ID NO: 47164 - DNA, 76 bp, Homo sapiens
atctgcacaggtgcgggcacaggagagggctgcggagccagcacggaagacggccctcagaggaggccgggccggg

SEQ ID NO: 47165 - DNA, 76 bp, Homo sapiens
tgcgggcacaggagagggctgcggagccagcacggaagacggccctcagaggaggccgggccggggtccacctgca

SEQ ID NO: 47166 - DNA, 75 bp, Homo sapiens
tgcggagccagcacggaagacggccctcagaggaggccgggccggggtccacctgcaggcctcaggatgggccca

SEQ ID NO: 47167 - DNA, 73 bp, Homo sapiens
gggtccacctgcaggcctcaggatgggcccaggaggaaaggccttggccacagggctccggcccctcaggcag

SEQ ID NO: 47168 - DNA, 74 bp, Homo sapiens
ctgcaggcctcaggatgggcccaggaggaaaggccttggccacagggctccggcccctcaggcagggggctctg

SEQ ID NO: 47169 - DNA, 71 bp, Homo sapiens
cctcaggatgggcccaggaggaaaggccttggccacagggctccggcccctcaggcagggggctctgggag

SEQ ID NO: 47170 - DNA, 70 bp, Homo sapiens
aggaggaaaggccttggccacagggctccggcccctcaggcagggggctctgggagtggagagaccctgg

SEQ ID NO: 47171 - DNA, 71 bp, Homo sapiens
aaggccttggccacagggctccggcccctcaggcagggggctctgggagtggagagaccctgggggtctga

SEQ ID NO: 47172 - DNA, 71 bp, Homo sapiens
ccacagggctccggcccctcaggcagggggctctgggagtggagagaccctgggggtctgaggaagctggg

SEQ ID NO: 47173 - DNA, 73 bp, Homo sapiens
ctccggcccctcaggcagggggctctgggagtggagagaccctgggggtctgaggaagctggggccacagagc

SEQ ID NO: 47174 - DNA, 72 bp, Homo sapiens
cagggggctctgggagtggagagaccctgggggtctgaggaagctggggccacagagccccgtgaccttgtg

SEQ ID NO: 47175 - DNA, 72 bp, Homo sapiens
tgggagtggagagaccctgggggtctgaggaagctggggccacagagccccgtgaccttgtgtcacttttta

SEQ ID NO: 47176 - DNA, 79 bp, Homo sapiens
gggtctgaggaagctggggccacagagccccgtgaccttgtgtcactttttagtgatcctgctgcagctgtcagtggtc

SEQ ID NO: 47177 - DNA, 78 bp, Homo sapiens
aagctggggccacagagccccgtgaccttgtgtcactttttagtgatcctgctgcagctgtcagtggtcttctgaccc

SEQ ID NO: 47178 - DNA, 78 bp, Homo sapiens
cacagagccccgtgaccttgtgtcactttttagtgatcctgctgcagctgtcagtggtcttctgaccccaaagttgta

SEQ ID NO: 47179 - DNA, 75 bp, Homo sapiens
ccttgtgtcactttttagtgatcctgctgcagctgtcagtggtcttctgaccccaaagttgtagaaagagaaaag

SEQ ID NO: 47180 - DNA, 76 bp, Homo sapiens
ctttttagtgatcctgctgcagctgtcagtggtcttctgaccccaaagttgtagaaagagaaaagtgtgtgagagg

SEQ ID NO: 47181 - DNA, 81 bp, Homo sapiens
atcctgctgcagctgtcagtggtcttctgaccccaaagttgtagaaagagaaaagtgtgtgagagggtgcacatgtgtctg

SEQ ID NO: 47182 - DNA, 93 bp, Homo sapiens
tgtgtatatgtgtctatttatgtgactgtgtgtacatgtgtgcatattatgcatgtgtgtacatgtctgtcagtgtatgactgtgtacgtatg

SEQ ID NO: 47183 - DNA, 92 bp, Homo sapiens
atatgtgtctatttatgtgactgtgtgtacatgtgtgcatattatgcatgtgtgtacatgtctgtcagtgtatgactgtgtacgtatgtcta

SEQ ID NO: 47184 - DNA, 92 bp, Homo sapiens
atttatgtgactgtgtgtacatgtgtgcatattatgcatgtgtgtacatgtctgtcagtgtatgactgtgtacgtatgtctatgtgaatgtg

SEQ ID NO: 47185 - DNA, 93 bp, Homo sapiens
atgtgtgtgcatgtctgtcagtgtgtgtgactgtgtgtttacatatgtctatgtgaatgtgtgcatgtgtacatgtctgctagtatgtgcctt

SEQ ID NO: 47186 - DNA, 93 bp, Homo sapiens
atgtctgtcagtgtgtgtgactgtgtgtttacatatgtctatgtgaatgtgtgcatgtgtacatgtctgctagtatgtgcctttgtgtgtgca

SEQ ID NO: 47187 - DNA, 94 bp, Homo sapiens
tgtcagtgtgtgtgactgtgtgtttacatatgtctatgtgaatgtgtgcatgtgtacatgtctgctagtatgtgcctttgtgtgtgcatgtctg

SEQ ID NO: 47188 - DNA, 92 bp, Homo sapiens
actgtgtgtttacatatgtctatgtgaatgtgtgcatgtgtacatgtctgctagtatgtgcctttgtgtgtgcatgtctgtgtgcctatgta

SEQ ID NO: 47189 - DNA, 96 bp, Homo sapiens
tgtttacatatgtctatgtgaatgtgtgcatgtgtacatgtctgctagtatgtgcctttgtgtgtgcatgtctgtgtgcctatgtatgcatgtctg

SEQ ID NO: 47190 - DNA, 98 bp, Homo sapiens
tatgtgaatgtgtgcatgtgtacatgtctgctagtatgtgcctttgtgtgtgcatgtctgtgtgcctatgtatgcatgtctgtgtgtgactatgtaca

SEQ ID NO: 47191 - DNA, 98 bp, Homo sapiens
tgtgcatgtgtacatgtctgctagtatgtgcctttgtgtgtgcatgtctgtgtgcctatgtatgcatgtctgtgtgtgactatgtacatctatgtgaa

SEQ ID NO: 47192 - DNA, 96 bp, Homo sapiens
tgtgtacatgtctgctagtatgtgcctttgtgtgtgcatgtctgtgtgcctatgtatgcatgtctgtgtgtgactatgtacatctatgtgaatgtg

SEQ ID NO: 47193 - DNA, 96 bp, Homo sapiens
ctagtatgtgcctttgtgtgtgcatgtctgtgtgcctatgtatgcatgtctgtgtgtgactatgtacatctatgtgaatgtgtgcatgtctgtgta

SEQ ID NO: 47194 - DNA, 95 bp, Homo sapiens
ctttgtgtgtgcatgtctgtgtgcctatgtatgcatgtctgtgtgtgactatgtacatctatgtgaatgtgtgcatgtctgtgtacgtctgctag

SEQ ID NO: 47195 - DNA, 96 bp, Homo sapiens
tgcatgtctgtgtgcctatgtatgcatgtctgtgtgtgactatgtacatctatgtgaatgtgtgcatgtctgtgtacgtctgctagtatgtgcctt

SEQ ID NO: 47196 - DNA, 94 bp, Homo sapiens
tctgtgtgcctatgtatgcatgtctgtgtgtgactatgtacatctatgtgaatgtgtgcatgtctgtgtacgtctgctagtatgtgcctttgtg

SEQ ID NO: 47197 - DNA, 96 bp, Homo sapiens
tatgtatgcatgtctgtgtgtgactatgtacatctatgtgaatgtgtgcatgtctgtgtacgtctgctagtatgtgcctttgtgtgtgcatgtctg

SEQ ID NO: 47198 - DNA, 94 bp, Homo sapiens
tgtctgtgtgtgactatgtacatctatgtgaatgtgtgcatgtctgtgtacgtctgctagtatgtgcctttgtgtgtgcatgtctgtgtgtgac

SEQ ID NO: 47199 - DNA, 92 bp, Homo sapiens
tatgtacatctatgtgaatgtgtgcatgtctgtgtacgtctgctagtatgtgcctttgtgtgtgcatgtctgtgtgtgactgtgtacgtatg

SEQ ID NO: 47200 - DNA, 91 bp, Homo sapiens
atctatgtgaatgtgtgcatgtctgtgtacgtctgctagtatgtgcctttgtgtgtgcatgtctgtgtgtgactgtgtacgtatgtgtaca

SEQ ID NO: 47201 - DNA, 90 bp, Homo sapiens
tctgtgtacgtctgctagtatgtgcctttgtgtgtgcatgtctgtgtgtgactgtgtacgtatgtgtacatgtctgtgtgtgcctatgta

SEQ ID NO: 47202 - DNA, 93 bp, Homo sapiens
tatgtgcctttgtgtgtgcatgtctgtgtgtgactgtgtacgtatgtgtacatgtctgtgtgtgcctatgtatgcatgtctgtgtgtttgtga

SEQ ID NO: 47203 - DNA, 93 bp, Homo sapiens
gtgcatgtctgtgtgtgactgtgtacgtatgtgtacatgtctgtgtgtgcctatgtatgcatgtctgtgtgtttgtgactgtatgtgtacatg

SEQ ID NO: 47204 - DNA, 91 bp, Homo sapiens
gtgtgtgactgtgtacgtatgtgtacatgtctgtgtgtgcctatgtatgcatgtctgtgtgtttgtgactgtatgtgtacatgtctgtgtg

SEQ ID NO: 47205 - DNA, 92 bp, Homo sapiens
tgtgtacgtatgtgtacatgtctgtgtgtgcctatgtatgcatgtctgtgtgtttgtgactgtatgtgtacatgtctgtgtgtgcctatgta

SEQ ID NO: 47206 - DNA, 96 bp, Homo sapiens
tatgtgtacatgtctgtgtgtgcctatgtatgcatgtctgtgtgtttgtgactgtatgtgtacatgtctgtgtgtgcctatgtatgcatgtctgtg

SEQ ID NO: 47207 - DNA, 95 bp, Homo sapiens
atgtctgtgtgtgcctatgtatgcatgtctgtgtgtttgtgactgtatgtgtacatgtctgtgtgtgcctatgtatgcatgtctgtgtgtgtgac

SEQ ID NO: 47208 - DNA, 95 bp, Homo sapiens
ctatgtatgcatgtctgtgtgtttgtgactgtatgtgtacatgtctgtgtgtgcctatgtatgcatgtctgtgtgtgtgactgtgtatgtacatc

SEQ ID NO: 47209 - DNA, 93 bp, Homo sapiens
atgtctgtgtgtttgtgactgtatgtgtacatgtctgtgtgtgcctatgtatgcatgtctgtgtgtgtgactgtgtatgtacatctatgtgaa

SEQ ID NO: 47210 - DNA, 96 bp, Homo sapiens
tgtttgtgactgtatgtgtacatgtctgtgtgtgcctatgtatgcatgtctgtgtgtgtgactgtgtatgtacatctatgtgaatgtgtgcatgta

SEQ ID NO: 47211 - DNA, 95 bp, Homo sapiens
atgtatgtgtacatgtctgttagtatgtgtgtgcgtgtcattatgcatgtgtgtacatgtctgtgactgtatgtatgtctatgtgaatgtgtgca

SEQ ID NO: 47212 - DNA, 95 bp, Homo sapiens
gtgcatgtatgtgtacatgtctgttagtatgtgtgtcattatgcatgtgtgtacatgactatgtaagtctatgtgaatgtgtgcatgtatgtgta

SEQ ID NO: 47213 - DNA, 93 bp, Homo sapiens
gtatgtgtacatgtctgttagtatgtgtgtcattatgcatgtgtgtacatgactatgtaagtctatgtgaatgtgtgcatgtatgtgtacatg

SEQ ID NO: 47214 - DNA, 96 bp, Homo sapiens
atgtatgtgtacatgtctgttagtatgtgtgtgcgtgtcatgcatgtgtgtacatgtctgtgtgactgtatgtctatatgaatgtgtgcatgtatg

SEQ ID NO: 47215 - DNA, 96 bp, Homo sapiens
gtacatgtctgttagtatgtgtgtgcgtgtcatgcatgtgtgtacatgtctgtgtgactgtatgtctatatgaatgtgtgcatgtatgtatacatg

SEQ ID NO: 47216 - DNA, 95 bp, Homo sapiens
ttagtatgtgtgtgcgtgtcatgcatgtgtgtacatgtctgtgtgactgtatgtctatatgaatgtgtgcatgtatgtatacatgtctgttagta

SEQ ID NO: 47217 - DNA, 92 bp, Homo sapiens
tgcatgtatgtatacatgtctgttagtatgtgtgccttgtatgtgcatgtctggacagtgtgtgactgtgtgtacgtatgtctatgtgaatg

SEQ ID NO: 47218 - DNA, 89 bp, Homo sapiens
gtatgtatacatgtctgttagtatgtgtgccttgtatgtgcatgtctggacagtgtgtgactgtgtgtacgtatgtctatgtgaatgtg

SEQ ID NO: 47219 - DNA, 91 bp, Homo sapiens
atgtctgttagtatgtgtgccttgtatgtgcatgtctggacagtgtgtgactgtgtgtacgtatgtctatgtgaatgtgtgcatgtatgtg

SEQ ID NO: 47220 - DNA, 95 bp, Homo sapiens
gtgtgcatgtctgtcagtgtgtggctgtgtgcttacatatgtctatgtgaatgtgtgcatgtatgtgtacatgtctgctagtatgtgcctttgtg

SEQ ID NO: 47221 - DNA, 95 bp, Homo sapiens
atgtctgtcagtgtgtggctgtgtgcttacatatgtctatgtgaatgtgtgcatgtatgtgtacatgtctgctagtatgtgcctttgtgtgtgca

SEQ ID NO: 47222 - DNA, 94 bp, Homo sapiens
tgtgcatgtctgtgtgtgtgactgtgtacgtatgtgtacatgtctgtgtgtgcctatgtatgcatgtctgtgtgactgtgtaggtacatctatg

SEQ ID NO: 47223 - DNA, 92 bp, Homo sapiens
tgtgtgtgtgactgtgtacgtatgtgtacatgtctgtgtgtgcctatgtatgcatgtctgtgtgactgtgtaggtacatctatgtgaatgtg

SEQ ID NO: 47224 - DNA, 94 bp, Homo sapiens
tgtgactgtgtacgtatgtgtacatgtctgtgtgtgcctatgtatgcatgtctgtgtgactgtgtaggtacatctatgtgaatgtgtgcatgta

SEQ ID NO: 47225 - DNA, 94 bp, Homo sapiens
tacgtatgtgtacatgtctgtgtgtgcctatgtatgcatgtctgtgtgactgtgtaggtacatctatgtgaatgtgtgcatgtatgtgtacatg

SEQ ID NO: 47226 - DNA, 97 bp, Homo sapiens
atgtatgtgtacatgtctgttagtatgtgtgtgcatgtcattatgcatgtgtacatgtctgtgtgactgtatgtctatgtgaatgtgtgcatgtatg

SEQ ID NO: 47227 - DNA, 98 bp, Homo sapiens
tgtgtacatgtctgttagtatgtgtgtgcatgtcattatgcatgtgtacatgtctgtgtgactgtatgtctatgtgaatgtgtgcatgtatgtataca

SEQ ID NO: 47228 - DNA, 89 bp, Homo sapiens
atgtatgtatacatgtctgttagtatgtgtgtgccttgtatgtgcatgtctggacagtgtgtgactgtgtgtacgtatgtctatgtgaa

SEQ ID NO: 47229 - DNA, 92 bp, Homo sapiens
tgtatacatgtctgttagtatgtgtgtgccttgtatgtgcatgtctggacagtgtgtgactgtgtgtacgtatgtctatgtgaatgtgtgca

SEQ ID NO: 47230 - DNA, 92 bp, Homo sapiens
tctgttagtatgtgtgtgccttgtatgtgcatgtctggacagtgtgtgactgtgtgtacgtatgtctatgtgaatgtgtgcatgtatgtgta

SEQ ID NO: 47231 - DNA, 91 bp, Homo sapiens
tgtgtgcctgtttatgtgtgtgcatgtctgtcagtgtgtgtgtgtacgtatatctatgtgaatgtgtgcatacgtatgtacatgtctgtta

SEQ ID NO: 47232 - DNA, 89 bp, Homo sapiens
gcctgtttatgtgtgtgcatgtctgtcagtgtgtgtgtgtacgtatatctatgtgaatgtgtgcatacgtatgtacatgtctgttagta

SEQ ID NO: 47233 - DNA, 88 bp, Homo sapiens
tgtgcatgtgtctaggtaggggtgtgtgtgtccctgcacacctgtatccatgagtcagcacctatctgtgctggtgtccatgtgtgaa

SEQ ID NO: 47234 - DNA, 85 bp, Homo sapiens
atgtgtctaggtaggggtgtgtgtgtccctgcacacctgtatccatgagtcagcacctatctgtgctggtgtccatgtgtgaatg

SEQ ID NO: 47235 - DNA, 85 bp, Homo sapiens
gtgtgcatgtgtctgtgtgtgggagtgtgctgcagcctctgtcaaggcagggcaggggaggtctcagcctggccatcaccttccc

SEQ ID NO: 47236 - DNA, 82 bp, Homo sapiens
tgtctgtgtgtgggagtgtgctgcagcctctgtcaaggcagggcaggggaggtctcagcctggccatcaccttccccaccag

SEQ ID NO: 47237 - DNA, 79 bp, Homo sapiens
tgggagtgtgctgcagcctctgtcaaggcagggcaggggaggtctcagcctggccatcaccttccccaccaggcgcccc

SEQ ID NO: 47238 - DNA, 76 bp, Homo sapiens
agcctctgtcaaggcagggcaggggaggtctcagcctggccatcaccttccccaccaggcgcccccacattgtaca

SEQ ID NO: 47239 - DNA, 73 bp, Homo sapiens
aaggcagggcaggggaggtctcagcctggccatcaccttccccaccaggcgcccccacattgtacagccctcc

SEQ ID NO: 47240 - DNA, 72 bp, Homo sapiens
aggggaggtctcagcctggccatcaccttccccaccaggcgcccccacattgtacagccctcccctccaaca

SEQ ID NO: 47241 - DNA, 73 bp, Homo sapiens
tctcagcctggccatcaccttccccaccaggcgcccccacattgtacagccctcccctccaacagggacctcc

SEQ ID NO: 47242 - DNA, 70 bp, Homo sapiens
tggccatcaccttccccaccaggcgcccccacattgtacagccctcccctccaacagggacctcccttta

SEQ ID NO: 47243 - DNA, 68 bp, Homo sapiens
atcaccttccccaccaggcgcccccacattgtacagccctcccctccaacagggacctccctttaggc

SEQ ID NO: 47244 - DNA, 68 bp, Homo sapiens
cttccccaccaggcgcccccacattgtacagccctcccctccaacagggacctccctttaggccatcc

SEQ ID NO: 47245 - DNA, 70 bp, Homo sapiens
ccaccaggcgcccccacattgtacagccctcccctccaacagggacctccctttaggccatcccaacatc

SEQ ID NO: 47246 - DNA, 72 bp, Homo sapiens
ccacattgtacagccctcccctccaacagggacctccctttaggccatcccaacatctgggcctgtgtccca

SEQ ID NO: 47247 - DNA, 72 bp, Homo sapiens
tcccctccaacagggacctccctttaggccatcccaacatctgggcctgtgtcccagccaagtggctgttcc

SEQ ID NO: 47248 - DNA, 73 bp, Homo sapiens
tccaacagggacctccctttaggccatcccaacatctgggcctgtgtcccagccaagtggctgttcccaagtg

SEQ ID NO: 47249 - DNA, 73 bp, Homo sapiens
acctccctttaggccatcccaacatctgggcctgtgtcccagccaagtggctgttcccaagtggggactcaga

SEQ ID NO: 47250 - DNA, 72 bp, Homo sapiens
tttaggccatcccaacatctgggcctgtgtcccagccaagtggctgttcccaagtggggactcagaggggtt

SEQ ID NO: 47251 - DNA, 72 bp, Homo sapiens
aacatctgggcctgtgtcccagccaagtggctgttcccaagtggggactcagaggggttttcatttccataa

SEQ ID NO: 47252 - DNA, 69 bp, Homo sapiens
ctgtgtcccagccaagtggctgttcccaagtggggactcagaggggttttcatttccataaagggtacc

SEQ ID NO: 47253 - DNA, 66 bp, Homo sapiens
agccaagtggctgttcccaagtggggactcagaggggttttcatttccataaagggtaccccttcc

SEQ ID NO: 47254 - DNA, 66 bp, Homo sapiens
ctgttcccaagtggggactcagaggggttttcatttccataaagggtaccccttccccagctgttc

SEQ ID NO: 47255 - DNA, 65 bp, Homo sapiens
agtggggactcagaggggttttcatttccataaagggtaccccttccccagctgttcccaaagaa

SEQ ID NO: 47256 - DNA, 66 bp, Homo sapiens
agaggggttttcatttccataaagggtaccccttccccagctgttcccaaagaatccacaaggtca

SEQ ID NO: 47257 - DNA, 66 bp, Homo sapiens
ttttcatttccataaagggtaccccttccccagctgttcccaaagaatccacaaggtcagggaaaa

SEQ ID NO: 47258 - DNA, 66 bp, Homo sapiens
ataaagggtaccccttccccagctgttcccaaagaatccacaaggtcagggaaaaggtgcttggag

SEQ ID NO: 47259 - DNA, 75 bp, Homo sapiens
ccttccccagctgttcccaaagaatccacaaggtcagggaaaaggtgcttggagggcacatgcagttcaggatga

SEQ ID NO: 47260 - DNA, 78 bp, Homo sapiens
tgttcccaaagaatccacaaggtcagggaaaaggtgcttggagggcacatgcagttcaggatgagccagcaagtttga

SEQ ID NO: 47261 - DNA, 75 bp, Homo sapiens
aaagaatccacaaggtcagggaaaaggtgcttggagggcacatgcagttcaggatgagccagcaagtttgaaaac

SEQ ID NO: 47262 - DNA, 77 bp, Homo sapiens
aaggtcagggaaaaggtgcttggagggcacatgcagttcaggatgagccagcaagtttgaaaacggatgcaccaaca

SEQ ID NO: 47263 - DNA, 80 bp, Homo sapiens
aaggtgcttggagggcacatgcagttcaggatgagccagcaagtttgaaaacggatgcaccaacatcccatgcggagaat

SEQ ID NO: 47264 - DNA, 82 bp, Homo sapiens
ttggagggcacatgcagttcaggatgagccagcaagtttgaaaacggatgcaccaacatcccatgcggagaattcctcacca

SEQ ID NO: 47265 - DNA, 82 bp, Homo sapiens
acatgcagttcaggatgagccagcaagtttgaaaacggatgcaccaacatcccatgcggagaattcctcaccaccagcagtg

SEQ ID NO: 47266 - DNA, 76 bp, Homo sapiens
aagtttgaaaacggatgcaccaacatcccatgcggagaattcctcaccaccagcagtggggagaagagagagactg

SEQ ID NO: 47267 - DNA, 80 bp, Homo sapiens
tgaaaacggatgcaccaacatcccatgcggagaattcctcaccaccagcagtggggagaagagagagactgggacagaga

SEQ ID NO: 47268 - DNA, 79 bp, Homo sapiens
accaacatcccatgcggagaattcctcaccaccagcagtggggagaagagagagactgggacagagagagaaacacaga

SEQ ID NO: 47269 - DNA, 76 bp, Homo sapiens
agaattcctcaccaccagcagtggggagaagagagagactgggacagagagagaaacacagagggagacaaagaaa

SEQ ID NO: 47270 - DNA, 75 bp, Homo sapiens
accaccagcagtggggagaagagagagactgggacagagagagaaacacagagggagacaaagaaagagatgggg

SEQ ID NO: 47271 - DNA, 73 bp, Homo sapiens
gagaagagagagactgggacagagagagaaacacagagggagacaaagaaagagatgggggaagggaaacctg

SEQ ID NO: 47272 - DNA, 72 bp, Homo sapiens
agagagactgggacagagagagaaacacagagggagacaaagaaagagatgggggaagggaaacctggcctc

SEQ ID NO: 47273 - DNA, 74 bp, Homo sapiens
aagaaagagatgggggaagggaaacctggcctcggagcacaggcctggccacatgtcgtgcaggtgcgggtaca

SEQ ID NO: 47274 - DNA, 78 bp, Homo sapiens
gaagggaaacctggcctcggagcacaggcctggccacatgtcgtgcaggtgcgggtacaggtgcaggttgctaatcca

SEQ ID NO: 47275 - DNA, 78 bp, Homo sapiens
aaacctggcctcggagcacaggcctggccacatgtcgtgcaggtgcgggtacaggtgcaggttgctaatccaggccaa

SEQ ID NO: 47276 - DNA, 76 bp, Homo sapiens
aggcctggccacatgtcgtgcaggtgcgggtacaggtgcaggttgctaatccaggccaaccctcagggaaggccac

SEQ ID NO: 47277 - DNA, 75 bp, Homo sapiens
tcgtgcaggtgcgggtacaggtgcaggttgctaatccaggccaaccctcagggaaggccaccagccctcggtgaa

SEQ ID NO: 47278 - DNA, 75 bp, Homo sapiens
tgcgggtacaggtgcaggttgctaatccaggccaaccctcagggaaggccaccagccctcggtgaatattgtgct

SEQ ID NO: 47279 - DNA, 76 bp, Homo sapiens
tacaggtgcaggttgctaatccaggccaaccctcagggaaggccaccagccctcggtgaatattgtgctttgtatc

SEQ ID NO: 47280 - DNA, 75 bp, Homo sapiens
ggttgctaatccaggccaaccctcagggaaggccaccagccctcggtgaatattgtgctttgtatctcagataaa

SEQ ID NO: 47281 - DNA, 77 bp, Homo sapiens
agggaaggccaccagccctcggtgaatattgtgctttgtatctcagataaagccaggtgatgggatcaggaaccaca

SEQ ID NO: 47282 - DNA, 79 bp, Homo sapiens
accagccctcggtgaatattgtgctttgtatctcagataaagccaggtgatgggatcaggaaccacagcctggatgatt

SEQ ID NO: 47283 - DNA, 78 bp, Homo sapiens
cctcggtgaatattgtgctttgtatctcagataaagccaggtgatgggatcaggaaccacagcctggatgattttccg

SEQ ID NO: 47284 - DNA, 80 bp, Homo sapiens
tattgtgctttgtatctcagataaagccaggtgatgggatcaggaaccacagcctggatgattttccggcaggcaggccg

SEQ ID NO: 47285 - DNA, 79 bp, Homo sapiens
tgtatctcagataaagccaggtgatgggatcaggaaccacagcctggatgattttccggcaggcaggccggggatcaaa

SEQ ID NO: 47286 - DNA, 77 bp, Homo sapiens
ataaagccaggtgatgggatcaggaaccacagcctggatgattttccggcaggcaggccggggatcaaagtgcacaa

SEQ ID NO: 47287 - DNA, 76 bp, Homo sapiens
atgggatcaggaaccacagcctggatgattttccggcaggcaggccggggatcaaagtgcacaaacaggctcccag

SEQ ID NO: 47288 - DNA, 75 bp, Homo sapiens
ctggatgattttccggcaggcaggccggggatcaaagtgcacaaacaggctcccaggcaggcaccggaggacctg

SEQ ID NO: 47289 - DNA, 74 bp, Homo sapiens
ttttccggcaggcaggccggggatcaaagtgcacaaacaggctcccaggcaggcaccggaggacctgggcagta

SEQ ID NO: 47290 - DNA, 76 bp, Homo sapiens
atcaaagtgcacaaacaggctcccaggcaggcaccggaggacctgggcagtagggctgggctgggataagtctcta

SEQ ID NO: 47291 - DNA, 75 bp, Homo sapiens
aaacaggctcccaggcaggcaccggaggacctgggcagtagggctgggctgggataagtctctagtctcggatca

SEQ ID NO: 47292 - DNA, 77 bp, Homo sapiens
ccaggcaggcaccggaggacctgggcagtagggctgggctgggataagtctctagtctcggatcatttctggaatca

SEQ ID NO: 47293 - DNA, 74 bp, Homo sapiens
aggcaccggaggacctgggcagtagggctgggctgggataagtctctagtctcggatcatttctggaatcaagg

SEQ ID NO: 47294 - DNA, 76 bp, Homo sapiens
acctgggcagtagggctgggctgggataagtctctagtctcggatcatttctggaatcaaggggtgattatggaga

SEQ ID NO: 47295 - DNA, 77 bp, Homo sapiens
agtagggctgggctgggataagtctctagtctcggatcatttctggaatcaaggggtgattatggagacctcagcag

SEQ ID NO: 47296 - DNA, 78 bp, Homo sapiens
tgggataagtctctagtctcggatcatttctggaatcaaggggtgattatggagacctcagcaggccctggaacctga

SEQ ID NO: 47297 - DNA, 77 bp, Homo sapiens
aagtctctagtctcggatcatttctggaatcaaggggtgattatggagacctcagcaggccctggaacctgatggcc

SEQ ID NO: 47298 - DNA, 77 bp, Homo sapiens
gatcatttctggaatcaaggggtgattatggagacctcagcaggccctggaacctgatggccttcgaggatttagta

SEQ ID NO: 47299 - DNA, 74 bp, Homo sapiens
tttctggaatcaaggggtgattatggagacctcagcaggccctggaacctgatggccttcgaggatttagtaaa

SEQ ID NO: 47300 - DNA, 73 bp, Homo sapiens
ttatggagacctcagcaggccctggaacctgatggccttcgaggatttagtaaaaagtcactgggcctgggaa

SEQ ID NO: 47301 - DNA, 73 bp, Homo sapiens
caggccctggaacctgatggccttcgaggatttagtaaaaagtcactgggcctgggaagctttagcagagaca

SEQ ID NO: 47302 - DNA, 73 bp, Homo sapiens
tggaacctgatggccttcgaggatttagtaaaaagtcactgggcctgggaagctttagcagagacactgtggg

SEQ ID NO: 47303 - DNA, 72 bp, Homo sapiens
atttagtaaaaagtcactgggcctgggaagctttagcagagacactgtggggagttacccagtcttctctga

SEQ ID NO: 47304 - DNA, 73 bp, Homo sapiens
taaaaagtcactgggcctgggaagctttagcagagacactgtggggagttacccagtcttctctgaattagaa

SEQ ID NO: 47305 - DNA, 73 bp, Homo sapiens
aagctttagcagagacactgtggggagttacccagtcttctctgaattagaaactcgggcaaggaacccagca

SEQ ID NO: 47306 - DNA, 72 bp, Homo sapiens
agacactgtggggagttacccagtcttctctgaattagaaactcgggcaaggaacccagcagggagaggcaa

SEQ ID NO: 47307 - DNA, 71 bp, Homo sapiens
gggagttacccagtcttctctgaattagaaactcgggcaaggaacccagcagggagaggcaaggccaggga

SEQ ID NO: 47308 - DNA, 72 bp, Homo sapiens
gtcttctctgaattagaaactcgggcaaggaacccagcagggagaggcaaggccagggagggagaacaacaa

SEQ ID NO: 47309 - DNA, 68 bp, Homo sapiens
aaactcgggcaaggaacccagcagggagaggcaaggccagggagggagaacaacaatataaaaaggaa

SEQ ID NO: 47310 - DNA, 68 bp, Homo sapiens
aaggaacccagcagggagaggcaaggccagggagggagaacaacaatataaaaaggaaaacaagataa

SEQ ID NO: 47311 - DNA, 68 bp, Homo sapiens
agggagaggcaaggccagggagggagaacaacaatataaaaaggaaaacaagataaggagaaggtctg

SEQ ID NO: 47312 - DNA, 67 bp, Homo sapiens
aaggccagggagggagaacaacaatataaaaaggaaaacaagataaggagaaggtctgggcggtgga

SEQ ID NO: 47313 - DNA, 70 bp, Homo sapiens
agggagaacaacaatataaaaaggaaaacaagataaggagaaggtctgggcggtggagagcaaggaggca

SEQ ID NO: 47314 - DNA, 70 bp, Homo sapiens
acaacaatataaaaaggaaaacaagataaggagaaggtctgggcggtggagagcaaggaggcatgtgggg

SEQ ID NO: 47315 - DNA, 71 bp, Homo sapiens
aaaggaaaacaagataaggagaaggtctgggcggtggagagcaaggaggcatgtgggggtggcccagcctg

SEQ ID NO: 47316 - DNA, 76 bp, Homo sapiens
gtggagagcaaggaggcatgtgggggtggcccagcctggaggaatgtcgggggaggggcacggctccagcagagag

SEQ ID NO: 47317 - DNA, 75 bp, Homo sapiens
agcaaggaggcatgtgggggtggcccagcctggaggaatgtcgggggaggggcacggctccagcagagagggctg

SEQ ID NO: 47318 - DNA, 72 bp, Homo sapiens
atgtgggggtggcccagcctggaggaatgtcgggggaggggcacggctccagcagagagggctggggaggtg

SEQ ID NO: 47319 - DNA, 72 bp, Homo sapiens
ccagcctggaggaatgtcgggggaggggcacggctccagcagagagggctggggaggtgggaggagtgtccc

SEQ ID NO: 47320 - DNA, 73 bp, Homo sapiens
aggaatgtcgggggaggggcacggctccagcagagagggctggggaggtgggaggagtgtcccttccagcaga

SEQ ID NO: 47321 - DNA, 73 bp, Homo sapiens
agcagagagggctggggaggtgggaggagtgtcccttccagcagaacagggcttgaaaccacaggtgtgtggg

SEQ ID NO: 47322 - DNA, 72 bp, Homo sapiens
ctggggaggtgggaggagtgtcccttccagcagaacagggcttgaaaccacaggtgtgtggggagggccaga

SEQ ID NO: 47323 - DNA, 73 bp, Homo sapiens
ggtgggaggagtgtcccttccagcagaacagggcttgaaaccacaggtgtgtggggagggccagagcctggga

SEQ ID NO: 47324 - DNA, 73 bp, Homo sapiens
agcagaacagggcttgaaaccacaggtgtgtggggagggccagagcctgggaggggtgctgggcttagtatcc

SEQ ID NO: 47325 - DNA, 74 bp, Homo sapiens
ggcttgaaaccacaggtgtgtggggagggccagagcctgggaggggtgctgggcttagtatccgcctgctggaa

SEQ ID NO: 47326 - DNA, 72 bp, Homo sapiens
ccacaggtgtgtggggagggccagagcctgggaggggtgctgggcttagtatccgcctgctggaaggtgggg

SEQ ID NO: 47327 - DNA, 77 bp, Homo sapiens
gagggccagagcctgggaggggtgctgggcttagtatccgcctgctggaaggtgggggtctgcagagcaggcacttc

SEQ ID NO: 47328 - DNA, 76 bp, Homo sapiens
agcctgggaggggtgctgggcttagtatccgcctgctggaaggtgggggtctgcagagcaggcacttccctcacaa

SEQ ID NO: 47329 - DNA, 78 bp, Homo sapiens
gggtgctgggcttagtatccgcctgctggaaggtgggggtctgcagagcaggcacttccctcacaaccaggaagcagc

SEQ ID NO: 47330 - DNA, 77 bp, Homo sapiens
cttagtatccgcctgctggaaggtgggggtctgcagagcaggcacttccctcacaaccaggaagcagccccagcttg

SEQ ID NO: 47331 - DNA, 77 bp, Homo sapiens
aggtgggggtctgcagagcaggcacttccctcacaaccaggaagcagccccagcttggggcagtgggacacgcttca

SEQ ID NO: 47332 - DNA, 78 bp, Homo sapiens
aggcacttccctcacaaccaggaagcagccccagcttggggcagtgggacacgcttcaggcaggtgagcaggtggcca

SEQ ID NO: 47333 - DNA, 80 bp, Homo sapiens
tcacaaccaggaagcagccccagcttggggcagtgggacacgcttcaggcaggtgagcaggtggccaggtgggcacagag

SEQ ID NO: 47334 - DNA, 81 bp, Homo sapiens
gggcagtgggacacgcttcaggcaggtgagcaggtggccaggtgggcacagaggttagcacacaagtgagcctggagcctg

SEQ ID NO: 47335 - DNA, 78 bp, Homo sapiens
acacgcttcaggcaggtgagcaggtggccaggtgggcacagaggttagcacacaagtgagcctggagcctgggagggg

SEQ ID NO: 47336 - DNA, 76 bp, Homo sapiens
aggtggccaggtgggcacagaggttagcacacaagtgagcctggagcctgggaggggtgccgggcttagtatctgc

SEQ ID NO: 47337 - DNA, 77 bp, Homo sapiens
aggtgggcacagaggttagcacacaagtgagcctggagcctgggaggggtgccgggcttagtatctgcctgctggaa

SEQ ID NO: 47338 - DNA, 79 bp, Homo sapiens
agaggttagcacacaagtgagcctggagcctgggaggggtgccgggcttagtatctgcctgctggaagggctgcacagc

SEQ ID NO: 47339 - DNA, 78 bp, Homo sapiens
acacaagtgagcctggagcctgggaggggtgccgggcttagtatctgcctgctggaagggctgcacagcgggtgcttc

SEQ ID NO: 47340 - DNA, 75 bp, Homo sapiens
tggagcctgggaggggtgccgggcttagtatctgcctgctggaagggctgcacagcgggtgcttccgggaagaag

SEQ ID NO: 47341 - DNA, 76 bp, Homo sapiens
ccgggcttagtatctgcctgctggaagggctgcacagcgggtgcttccgggaagaaggcgcaaccaggaagatgcc

SEQ ID NO: 47342 - DNA, 77 bp, Homo sapiens
gtatctgcctgctggaagggctgcacagcgggtgcttccgggaagaaggcgcaaccaggaagatgccccagcaaggg

SEQ ID NO: 47343 - DNA, 75 bp, Homo sapiens
aagggctgcacagcgggtgcttccgggaagaaggcgcaaccaggaagatgccccagcaaggggcagtgggacaca

SEQ ID NO: 47344 - DNA, 72 bp, Homo sapiens
acagcgggtgcttccgggaagaaggcgcaaccaggaagatgccccagcaaggggcagtgggacacacttcgg

SEQ ID NO: 47345 - DNA, 73 bp, Homo sapiens
ttccgggaagaaggcgcaaccaggaagatgccccagcaaggggcagtgggacacacttcgggcaggttagcag

SEQ ID NO: 47346 - DNA, 74 bp, Homo sapiens
aagaaggcgcaaccaggaagatgccccagcaaggggcagtgggacacacttcgggcaggttagcagtttagcag

SEQ ID NO: 47347 - DNA, 81 bp, Homo sapiens
gggcagtgggacacacttcgggcaggttagcagtttagcaggtggacatgaaggtgagcacactggagagctggctccagc

SEQ ID NO: 47348 - DNA, 80 bp, Homo sapiens
acacacttcgggcaggttagcagtttagcaggtggacatgaaggtgagcacactggagagctggctccagctgtcccttc

SEQ ID NO: 47349 - DNA, 80 bp, Homo sapiens
tagcaggtggacatgaaggtgagcacactggagagctggctccagctgtcccttccctccctcgtaggagcctgcccagg

SEQ ID NO: 47350 - DNA, 77 bp, Homo sapiens
acatgaaggtgagcacactggagagctggctccagctgtcccttccctccctcgtaggagcctgcccaggggaaaca

SEQ ID NO: 47351 - DNA, 74 bp, Homo sapiens
acactggagagctggctccagctgtcccttccctccctcgtaggagcctgcccaggggaaacagccagggctgg

SEQ ID NO: 47352 - DNA, 72 bp, Homo sapiens
agagctggctccagctgtcccttccctccctcgtaggagcctgcccaggggaaacagccagggctgggtagg

SEQ ID NO: 47353 - DNA, 70 bp, Homo sapiens
agctgtcccttccctccctcgtaggagcctgcccaggggaaacagccagggctgggtaggtgcgtgttaa

SEQ ID NO: 47354 - DNA, 68 bp, Homo sapiens
cttccctccctcgtaggagcctgcccaggggaaacagccagggctgggtaggtgcgtgttaactaacg

SEQ ID NO: 47355 - DNA, 71 bp, Homo sapiens
tcgtaggagcctgcccaggggaaacagccagggctgggtaggtgcgtgttaactaacggcggccaggcact

SEQ ID NO: 47356 - DNA, 70 bp, Homo sapiens
ccaggggaaacagccagggctgggtaggtgcgtgttaactaacggcggccaggcacttcccacatcctaa

SEQ ID NO: 47357 - DNA, 71 bp, Homo sapiens
aaacagccagggctgggtaggtgcgtgttaactaacggcggccaggcacttcccacatcctaaaatggcag

SEQ ID NO: 47358 - DNA, 70 bp, Homo sapiens
agggctgggtaggtgcgtgttaactaacggcggccaggcacttcccacatcctaaaatggcagggggctg

SEQ ID NO: 47359 - DNA, 69 bp, Homo sapiens
aggtgcgtgttaactaacggcggccaggcacttcccacatcctaaaatggcagggggctgggaccacct

SEQ ID NO: 47360 - DNA, 69 bp, Homo sapiens
taactaacggcggccaggcacttcccacatcctaaaatggcagggggctgggaccaccttccctacaac

SEQ ID NO: 47361 - DNA, 68 bp, Homo sapiens
aggcacttcccacatcctaaaatggcagggggctgggaccaccttccctacaaccacccgtggaggac

SEQ ID NO: 47362 - DNA, 71 bp, Homo sapiens
ttcccacatcctaaaatggcagggggctgggaccaccttccctacaaccacccgtggaggaccacacatca

SEQ ID NO: 47363 - DNA, 70 bp, Homo sapiens
cctaaaatggcagggggctgggaccaccttccctacaaccacccgtggaggaccacacatcaggatcctg

SEQ ID NO: 47364 - DNA, 71 bp, Homo sapiens
gggctgggaccaccttccctacaaccacccgtggaggaccacacatcaggatcctgggcctggggaggcca

SEQ ID NO: 47365 - DNA, 69 bp, Homo sapiens
accttccctacaaccacccgtggaggaccacacatcaggatcctgggcctggggaggccagggacccaa

SEQ ID NO: 47366 - DNA, 75 bp, Homo sapiens
ctacaaccacccgtggaggaccacacatcaggatcctgggcctggggaggccagggacccaaggatgctctgaca

SEQ ID NO: 47367 - DNA, 78 bp, Homo sapiens
acacatcaggatcctgggcctggggaggccagggacccaaggatgctctgacagtcaccatggccaggtcctggtcac

SEQ ID NO: 47368 - DNA, 77 bp, Homo sapiens
agggacccaaggatgctctgacagtcaccatggccaggtcctggtcacctcttgagctcaggccacagcccttttcc

SEQ ID NO: 47369 - DNA, 80 bp, Homo sapiens
acagtcaccatggccaggtcctggtcacctcttgagctcaggccacagcccttttcctcaatcagccgcactgcacaaaa

SEQ ID NO: 47370 - DNA, 78 bp, Homo sapiens
atggccaggtcctggtcacctcttgagctcaggccacagcccttttcctcaatcagccgcactgcacaaaatgtaaag

SEQ ID NO: 47371 - DNA, 81 bp, Homo sapiens
tggtcacctcttgagctcaggccacagcccttttcctcaatcagccgcactgcacaaaatgtaaagtgagcaacatttcaa

SEQ ID NO: 47372 - DNA, 80 bp, Homo sapiens
tcttgagctcaggccacagcccttttcctcaatcagccgcactgcacaaaatgtaaagtgagcaacatttcaaagacaag

SEQ ID NO: 47373 - DNA, 76 bp, Homo sapiens
aggccacagcccttttcctcaatcagccgcactgcacaaaatgtaaagtgagcaacatttcaaagacaaggagccc

SEQ ID NO: 47374 - DNA, 77 bp, Homo sapiens
ttttcctcaatcagccgcactgcacaaaatgtaaagtgagcaacatttcaaagacaaggagcccctggcctttgaca

SEQ ID NO: 47375 - DNA, 76 bp, Homo sapiens
aatcagccgcactgcacaaaatgtaaagtgagcaacatttcaaagacaaggagcccctggcctttgacagggagaa

SEQ ID NO: 47376 - DNA, 77 bp, Homo sapiens
tgcacaaaatgtaaagtgagcaacatttcaaagacaaggagcccctggcctttgacagggagaagttcatggatgat

SEQ ID NO: 47377 - DNA, 73 bp, Homo sapiens
aaatgtaaagtgagcaacatttcaaagacaaggagcccctggcctttgacagggagaagttcatggatgattt

SEQ ID NO: 47378 - DNA, 78 bp, Homo sapiens
agcaacatttcaaagacaaggagcccctggcctttgacagggagaagttcatggatgattttcatgcattagcaggaa

SEQ ID NO: 47379 - DNA, 78 bp, Homo sapiens
ttcaaagacaaggagcccctggcctttgacagggagaagttcatggatgattttcatgcattagcaggaagttgtgct

SEQ ID NO: 47380 - DNA, 77 bp, Homo sapiens
tttgacagggagaagttcatggatgattttcatgcattagcaggaagttgtgcttggacagtcccctcgggcctggg

SEQ ID NO: 47381 - DNA, 76 bp, Homo sapiens
agaagttcatggatgattttcatgcattagcaggaagttgtgcttggacagtcccctcgggcctggggtctcccaa

SEQ ID NO: 47382 - DNA, 78 bp, Homo sapiens
ttcatggatgattttcatgcattagcaggaagttgtgcttggacagtcccctcgggcctggggtctcccaagagtgtg

SEQ ID NO: 47383 - DNA, 76 bp, Homo sapiens
attttcatgcattagcaggaagttgtgcttggacagtcccctcgggcctggggtctcccaagagtgtggcagagga

SEQ ID NO: 47384 - DNA, 72 bp, Homo sapiens
acagtcccctcgggcctggggtctcccaagagtgtggcagaggatgcagtggagactagggtcctgggaggg

SEQ ID NO: 47385 - DNA, 76 bp, Homo sapiens
gcctggggtctcccaagagtgtggcagaggatgcagtggagactagggtcctgggaggggtgggcctggtgtgctg

SEQ ID NO: 47386 - DNA, 78 bp, Homo sapiens
tctcccaagagtgtggcagaggatgcagtggagactagggtcctgggaggggtgggcctggtgtgctggagccggctg

SEQ ID NO: 47387 - DNA, 77 bp, Homo sapiens
agtgtggcagaggatgcagtggagactagggtcctgggaggggtgggcctggtgtgctggagccggctgggactcaa

SEQ ID NO: 47388 - DNA, 77 bp, Homo sapiens
atgcagtggagactagggtcctgggaggggtgggcctggtgtgctggagccggctgggactcaagccagcctctgga

SEQ ID NO: 47389 - DNA, 74 bp, Homo sapiens
gtggagactagggtcctgggaggggtgggcctggtgtgctggagccggctgggactcaagccagcctctggacc

SEQ ID NO: 47390 - DNA, 74 bp, Homo sapiens
gggtcctgggaggggtgggcctggtgtgctggagccggctgggactcaagccagcctctggaccctgcccctgc

SEQ ID NO: 47391 - DNA, 75 bp, Homo sapiens
ggtgggcctggtgtgctggagccggctgggactcaagccagcctctggaccctgcccctgcccctgccccaacca

SEQ ID NO: 47392 - DNA, 76 bp, Homo sapiens
tggtgtgctggagccggctgggactcaagccagcctctggaccctgcccctgcccctgccccaaccaggctgtccc

SEQ ID NO: 47393 - DNA, 75 bp, Homo sapiens
agccggctgggactcaagccagcctctggaccctgcccctgcccctgccccaaccaggctgtccccagcatccac

SEQ ID NO: 47394 - DNA, 76 bp, Homo sapiens
tcaagccagcctctggaccctgcccctgcccctgccccaaccaggctgtccccagcatccacctgccggcaggaac

SEQ ID NO: 47395 - DNA, 72 bp, Homo sapiens
ctctggaccctgcccctgcccctgccccaaccaggctgtccccagcatccacctgccggcaggaaccggaaa

SEQ ID NO: 47396 - DNA, 74 bp, Homo sapiens
cctgccccaaccaggctgtccccagcatccacctgccggcaggaaccggaaacagaaacagaaacagacagcaa

SEQ ID NO: 47397 - DNA, 75 bp, Homo sapiens
cccagcatccacctgccggcaggaaccggaaacagaaacagaaacagacagcaagctaatggccagatccaaaaa

SEQ ID NO: 47398 - DNA, 74 bp, Homo sapiens
atccacctgccggcaggaaccggaaacagaaacagaaacagacagcaagctaatggccagatccaaaaaccaga

SEQ ID NO: 47399 - DNA, 70 bp, Homo sapiens
aggaaccggaaacagaaacagaaacagacagcaagctaatggccagatccaaaaaccagagggaaagcgg

SEQ ID NO: 47400 - DNA, 74 bp, Homo sapiens
aaacagaaacagacagcaagctaatggccagatccaaaaaccagagggaaagcgggttgttatcatttggcatg

SEQ ID NO: 47401 - DNA, 70 bp, Homo sapiens
atccaaaaaccagagggaaagcgggttgttatcatttggcatgggggctgggaaggagggcagaacgctg

SEQ ID NO: 47402 - DNA, 73 bp, Homo sapiens
agagggaaagcgggttgttatcatttggcatgggggctgggaaggagggcagaacgctgggaactgagatgac

SEQ ID NO: 47403 - DNA, 76 bp, Homo sapiens
gttgttatcatttggcatgggggctgggaaggagggcagaacgctgggaactgagatgacgctgaaaagaagccga

SEQ ID NO: 47404 - DNA, 78 bp, Homo sapiens
tatcatttggcatgggggctgggaaggagggcagaacgctgggaactgagatgacgctgaaaagaagccgacagaggc

SEQ ID NO: 47405 - DNA, 77 bp, Homo sapiens
gggctgggaaggagggcagaacgctgggaactgagatgacgctgaaaagaagccgacagaggctgctggggccaggc

SEQ ID NO: 47406 - DNA, 79 bp, Homo sapiens
aaggagggcagaacgctgggaactgagatgacgctgaaaagaagccgacagaggctgctggggccaggctgtgagagga

SEQ ID NO: 47407 - DNA, 79 bp, Homo sapiens
agaacgctgggaactgagatgacgctgaaaagaagccgacagaggctgctggggccaggctgtgagaggatgggaggga

SEQ ID NO: 47408 - DNA, 77 bp, Homo sapiens
aaagaagccgacagaggctgctggggccaggctgtgagaggatgggagggatgcctcccgggcaccaaagccactca

SEQ ID NO: 47409 - DNA, 81 bp, Homo sapiens
acagaggctgctggggccaggctgtgagaggatgggagggatgcctcccgggcaccaaagccactcagccacatgcaggag

SEQ ID NO: 47410 - DNA, 82 bp, Homo sapiens
gccaggctgtgagaggatgggagggatgcctcccgggcaccaaagccactcagccacatgcaggagggtgaggagatgaaca

SEQ ID NO: 47411 - DNA, 85 bp, Homo sapiens
tgagaggatgggagggatgcctcccgggcaccaaagccactcagccacatgcaggagggtgaggagatgaacatgccagcacaga

SEQ ID NO: 47412 - DNA, 84 bp, Homo sapiens
gagggatgcctcccgggcaccaaagccactcagccacatgcaggagggtgaggagatgaacatgccagcacagaaaccatgtga

SEQ ID NO: 47413 - DNA, 84 bp, Homo sapiens
atgcctcccgggcaccaaagccactcagccacatgcaggagggtgaggagatgaacatgccagcacagaaaccatgtgacgcaa

SEQ ID NO: 47414 - DNA, 84 bp, Homo sapiens
caaagccactcagccacatgcaggagggtgaggagatgaacatgccagcacagaaaccatgtgacgcaaccgcagttgtattaa

SEQ ID NO: 47415 - DNA, 84 bp, Homo sapiens
actcagccacatgcaggagggtgaggagatgaacatgccagcacagaaaccatgtgacgcaaccgcagttgtattaaagtgatg

SEQ ID NO: 47416 - DNA, 80 bp, Homo sapiens
caggagggtgaggagatgaacatgccagcacagaaaccatgtgacgcaaccgcagttgtattaaagtgatggggtcctga

SEQ ID NO: 47417 - DNA, 79 bp, Homo sapiens
aggagatgaacatgccagcacagaaaccatgtgacgcaaccgcagttgtattaaagtgatggggtcctgagtgctgttt

SEQ ID NO: 47418 - DNA, 77 bp, Homo sapiens
aacatgccagcacagaaaccatgtgacgcaaccgcagttgtattaaagtgatggggtcctgagtgctgttttcattt

SEQ ID NO: 47419 - DNA, 74 bp, Homo sapiens
acagaaaccatgtgacgcaaccgcagttgtattaaagtgatggggtcctgagtgctgttttcattttcttatct

SEQ ID NO: 47420 - DNA, 76 bp, Homo sapiens
accatgtgacgcaaccgcagttgtattaaagtgatggggtcctgagtgctgttttcattttcttatcttcatttca

SEQ ID NO: 47421 - DNA, 73 bp, Homo sapiens
cgcagttgtattaaagtgatggggtcctgagtgctgttttcattttcttatcttcatttcacacctttgtaaa

SEQ ID NO: 47422 - DNA, 71 bp, Homo sapiens
gtattaaagtgatggggtcctgagtgctgttttcattttcttatcttcatttcacacctttgtaaataaag

SEQ ID NO: 47423 - DNA, 71 bp, Homo sapiens
gtgatggggtcctgagtgctgttttcattttcttatcttcatttcacacctttgtaaataaagttattaaa

SEQ ID NO: 47424 - DNA, 65 bp, Homo sapiens
cattttcttatcttcatttcacacctttgtaaataaagttattaaattaaaattggaaaaccagg

SEQ ID NO: 47425 - DNA, 64 bp, Homo sapiens
cacacctttgtaaataaagttattaaattaaaattggaaaaccaggtaggggactgacttggga

SEQ ID NO: 47426 - DNA, 68 bp, Homo sapiens
aagttattaaattaaaattggaaaaccaggtaggggactgacttgggaagaacagcacagtacatcca

SEQ ID NO: 47427 - DNA, 74 bp, Homo sapiens
taaaattggaaaaccaggtaggggactgacttgggaagaacagcacagtacatccaggcagcgtccagtctgat

SEQ ID NO: 47428 - DNA, 76 bp, Homo sapiens
aaaaccaggtaggggactgacttgggaagaacagcacagtacatccaggcagcgtccagtctgattgacatgggcc

SEQ ID NO: 47429 - DNA, 81 bp, Homo sapiens
tacatccaggcagcgtccagtctgattgacatgggccctgcaggtcctggaggacagcgaggaggggctgcggccaggcct

SEQ ID NO: 47430 - DNA, 81 bp, Homo sapiens
agcgtccagtctgattgacatgggccctgcaggtcctggaggacagcgaggaggggctgcggccaggccttgcagggctgc

SEQ ID NO: 47431 - DNA, 81 bp, Homo sapiens
tctgattgacatgggccctgcaggtcctggaggacagcgaggaggggctgcggccaggccttgcagggctgcgcggagcgg

SEQ ID NO: 47432 - DNA, 76 bp, Homo sapiens
ccctgcaggtcctggaggacagcgaggaggggctgcggccaggccttgcagggctgcgcggagcgggtactgtggg

SEQ ID NO: 47433 - DNA, 74 bp, Homo sapiens
aggtcctggaggacagcgaggaggggctgcggccaggccttgcagggctgcgcggagcgggtactgtggggtgg

SEQ ID NO: 47434 - DNA, 73 bp, Homo sapiens
aggacagcgaggaggggctgcggccaggccttgcagggctgcgcggagcgggtactgtggggtgggggtgacc

SEQ ID NO: 47435 - DNA, 75 bp, Homo sapiens
ggctgcggccaggccttgcagggctgcgcggagcgggtactgtggggtgggggtgaccctgctgccctcaactcc

SEQ ID NO: 47436 - DNA, 76 bp, Homo sapiens
aggccttgcagggctgcgcggagcgggtactgtggggtgggggtgaccctgctgccctcaactcccatcaccagca

SEQ ID NO: 47437 - DNA, 76 bp, Homo sapiens
ttgcagggctgcgcggagcgggtactgtggggtgggggtgaccctgctgccctcaactcccatcaccagcacgccc

SEQ ID NO: 47438 - DNA, 75 bp, Homo sapiens
cggagcgggtactgtggggtgggggtgaccctgctgccctcaactcccatcaccagcacgccccatgccacagtc

SEQ ID NO: 47439 - DNA, 80 bp, Homo sapiens
tgtggggtgggggtgaccctgctgccctcaactcccatcaccagcacgccccatgccacagtccctgtgcacgcagaatg

SEQ ID NO: 47440 - DNA, 79 bp, Homo sapiens
aactcccatcaccagcacgccccatgccacagtccctgtgcacgcagaatgttccgggtgaggacgctgttggaggaca

SEQ ID NO: 47441 - DNA, 82 bp, Homo sapiens
atcaccagcacgccccatgccacagtccctgtgcacgcagaatgttccgggtgaggacgctgttggaggacactgcaccagc

SEQ ID NO: 47442 - DNA, 80 bp, Homo sapiens
ccatgccacagtccctgtgcacgcagaatgttccgggtgaggacgctgttggaggacactgcaccagccacacgaccaac

SEQ ID NO: 47443 - DNA, 77 bp, Homo sapiens
ccacagtccctgtgcacgcagaatgttccgggtgaggacgctgttggaggacactgcaccagccacacgaccaaccc

SEQ ID NO: 47444 - DNA, 79 bp, Homo sapiens
tgtgcacgcagaatgttccgggtgaggacgctgttggaggacactgcaccagccacacgaccaaccccacagctgggcg

SEQ ID NO: 47445 - DNA, 75 bp, Homo sapiens
aatgttccgggtgaggacgctgttggaggacactgcaccagccacacgaccaaccccacagctgggcggcgactc

SEQ ID NO: 47446 - DNA, 79 bp, Homo sapiens
tgaggacgctgttggaggacactgcaccagccacacgaccaaccccacagctgggcggcgactccgagcgaccagggca

SEQ ID NO: 47447 - DNA, 78 bp, Homo sapiens
ctgttggaggacactgcaccagccacacgaccaaccccacagctgggcggcgactccgagcgaccagggcacacaggc

SEQ ID NO: 47448 - DNA, 78 bp, Homo sapiens
acctgcctcagccagcagcacaggccaggattcatcattaaagaaacaggaaaacagagaggccggggagagcgacca

SEQ ID NO: 47449 - DNA, 78 bp, Homo sapiens
ctcagccagcagcacaggccaggattcatcattaaagaaacaggaaaacagagaggccggggagagcgaccaagctag

SEQ ID NO: 47450 - DNA, 76 bp, Homo sapiens
acaggccaggattcatcattaaagaaacaggaaaacagagaggccggggagagcgaccaagctaggctgagctgaa

SEQ ID NO: 47451 - DNA, 74 bp, Homo sapiens
aggattcatcattaaagaaacaggaaaacagagaggccggggagagcgaccaagctaggctgagctgaaggagg

SEQ ID NO: 47452 - DNA, 73 bp, Homo sapiens
aagaaacaggaaaacagagaggccggggagagcgaccaagctaggctgagctgaaggagggcacgggcctgtg

SEQ ID NO: 47453 - DNA, 74 bp, Homo sapiens
aggaaaacagagaggccggggagagcgaccaagctaggctgagctgaaggagggcacgggcctgtggggctgtg

SEQ ID NO: 47454 - DNA, 75 bp, Homo sapiens
agagaggccggggagagcgaccaagctaggctgagctgaaggagggcacgggcctgtggggctgtgggcagcccc

SEQ ID NO: 47455 - DNA, 75 bp, Homo sapiens
agagcgaccaagctaggctgagctgaaggagggcacgggcctgtggggctgtgggcagcccccgggcaacagccc

SEQ ID NO: 47456 - DNA, 76 bp, Homo sapiens
ctaggctgagctgaaggagggcacgggcctgtggggctgtgggcagcccccgggcaacagccccaggtgcgtcatc

SEQ ID NO: 47457 - DNA, 76 bp, Homo sapiens
ctgaaggagggcacgggcctgtggggctgtgggcagcccccgggcaacagccccaggtgcgtcatctctgcaggga

SEQ ID NO: 47458 - DNA, 81 bp, Homo sapiens
gcacgggcctgtggggctgtgggcagcccccgggcaacagccccaggtgcgtcatctctgcagggatgagctatgtccaca

SEQ ID NO: 47459 - DNA, 83 bp, Homo sapiens
tgtggggctgtgggcagcccccgggcaacagccccaggtgcgtcatctctgcagggatgagctatgtccacaagtgcacagtg

SEQ ID NO: 47460 - DNA, 88 bp, Homo sapiens
cgggcaacagccccaggtgcgtcatctctgcagggatgagctatgtccacaagtgcacagtggccatctgacagcctcagagctttca

SEQ ID NO: 47461 - DNA, 90 bp, Homo sapiens
ggtgcgtcatctctgcagggatgagctatgtccacaagtgcacagtggccatctgacagcctcagagctttcagaaaggcagatctaaga

SEQ ID NO: 47462 - DNA, 87 bp, Homo sapiens
tctgcagggatgagctatgtccacaagtgcacagtggccatctgacagcctcagagctttcagaaaggcagatctaagaggggtcaa

SEQ ID NO: 47463 - DNA, 84 bp, Homo sapiens
atgagctatgtccacaagtgcacagtggccatctgacagcctcagagctttcagaaaggcagatctaagaggggtcaagtcaac

SEQ ID NO: 47464 - DNA, 81 bp, Homo sapiens
gtgcacagtggccatctgacagcctcagagctttcagaaaggcagatctaagaggggtcaagtcaaccactagaaatgtaa

SEQ ID NO: 47465 - DNA, 79 bp, Homo sapiens
tggccatctgacagcctcagagctttcagaaaggcagatctaagaggggtcaagtcaaccactagaaatgtaagcggaa

SEQ ID NO: 47466 - DNA, 77 bp, Homo sapiens
atctgacagcctcagagctttcagaaaggcagatctaagaggggtcaagtcaaccactagaaatgtaagcggaaaca

SEQ ID NO: 47467 - DNA, 75 bp, Homo sapiens
ctcagagctttcagaaaggcagatctaagaggggtcaagtcaaccactagaaatgtaagcggaaacaggcctcca

SEQ ID NO: 47468 - DNA, 73 bp, Homo sapiens
agctttcagaaaggcagatctaagaggggtcaagtcaaccactagaaatgtaagcggaaacaggcctccatgg

SEQ ID NO: 47469 - DNA, 74 bp, Homo sapiens
tttcagaaaggcagatctaagaggggtcaagtcaaccactagaaatgtaagcggaaacaggcctccatggttca

SEQ ID NO: 47470 - DNA, 74 bp, Homo sapiens
aaggcagatctaagaggggtcaagtcaaccactagaaatgtaagcggaaacaggcctccatggttcatccagaa

SEQ ID NO: 47471 - DNA, 72 bp, Homo sapiens
taagaggggtcaagtcaaccactagaaatgtaagcggaaacaggcctccatggttcatccagaaccactctt

SEQ ID NO: 47472 - DNA, 74 bp, Homo sapiens
tcaaccactagaaatgtaagcggaaacaggcctccatggttcatccagaaccactctttcatcccgggtgacat

SEQ ID NO: 47473 - DNA, 72 bp, Homo sapiens
actagaaatgtaagcggaaacaggcctccatggttcatccagaaccactctttcatcccgggtgacatttat

SEQ ID NO: 47474 - DNA, 71 bp, Homo sapiens
ctccatggttcatccagaaccactctttcatcccgggtgacatttattccaccccaggagaattctttaaa

SEQ ID NO: 47475 - DNA, 67 bp, Homo sapiens
atcccgggtgacatttattccaccccaggagaattctttaaaaggaacattccagcagaacggaaaa

SEQ ID NO: 47476 - DNA, 69 bp, Homo sapiens
attccaccccaggagaattctttaaaaggaacattccagcagaacggaaaacttcgctatgaaatcacc

SEQ ID NO: 47477 - DNA, 70 bp, Homo sapiens
attccagcagaacggaaaacttcgctatgaaatcaccctgacttcagggcgggagggacgtcaacgggaa

SEQ ID NO: 47478 - DNA, 69 bp, Homo sapiens
agaacggaaaacttcgctatgaaatcaccctgacttcagggcgggagggacgtcaacgggaatccacac

SEQ ID NO: 47479 - DNA, 71 bp, Homo sapiens
ttcgctatgaaatcaccctgacttcagggcgggagggacgtcaacgggaatccacaccttctcggactttc

SEQ ID NO: 47480 - DNA, 67 bp, Homo sapiens
aaatcaccctgacttcagggcgggagggacgtcaacgggaatccacaccttctcggactttccaaag

SEQ ID NO: 47481 - DNA, 67 bp, Homo sapiens
acttcagggcgggagggacgtcaacgggaatccacaccttctcggactttccaaagtcacccgctcc

SEQ ID NO: 47482 - DNA, 69 bp, Homo sapiens
agggacgtcaacgggaatccacaccttctcggactttccaaagtcacccgctcccgagcccgcaggata

SEQ ID NO: 47483 - DNA, 72 bp, Homo sapiens
gtcaacgggaatccacaccttctcggactttccaaagtcacccgctcccgagcccgcaggatagagtggcca

SEQ ID NO: 47484 - DNA, 71 bp, Homo sapiens
aatccacaccttctcggactttccaaagtcacccgctcccgagcccgcaggatagagtggccaggccgtcc

SEQ ID NO: 47485 - DNA, 74 bp, Homo sapiens
ttccaaagtcacccgctcccgagcccgcaggatagagtggccaggccgtcctcacacggcggctcctgcgggag

SEQ ID NO: 47486 - DNA, 72 bp, Homo sapiens
acccgctcccgagcccgcaggatagagtggccaggccgtcctcacacggcggctcctgcgggaggcggcccc

SEQ ID NO: 47487 - DNA, 72 bp, Homo sapiens
cgcaggatagagtggccaggccgtcctcacacggcggctcctgcgggaggcggccccgggcgccccgccttc

SEQ ID NO: 47488 - DNA, 71 bp, Homo sapiens
atagagtggccaggccgtcctcacacggcggctcctgcgggaggcggccccgggcgccccgccttctccaa

SEQ ID NO: 47489 - DNA, 69 bp, Homo sapiens
ccgtcctcacacggcggctcctgcgggaggcggccccgggcgccccgccttctccaaggacattcctaa

SEQ ID NO: 47490 - DNA, 69 bp, Homo sapiens
ctcacacggcggctcctgcgggaggcggccccgggcgccccgccttctccaaggacattcctaaccgag

SEQ ID NO: 47491 - DNA, 67 bp, Homo sapiens
ggctcctgcgggaggcggccccgggcgccccgccttctccaaggacattcctaaccgaggtgccggg

SEQ ID NO: 47492 - DNA, 70 bp, Homo sapiens
cgccccgccttctccaaggacattcctaaccgaggtgccggggccagcaccgtcgggctcctgaaagcac

SEQ ID NO: 47493 - DNA, 72 bp, Homo sapiens
aaggacattcctaaccgaggtgccggggccagcaccgtcgggctcctgaaagcacccgctgcctccaggaga

SEQ ID NO: 47494 - DNA, 75 bp, Homo sapiens
ctaaccgaggtgccggggccagcaccgtcgggctcctgaaagcacccgctgcctccaggagagcacctggcagaa

SEQ ID NO: 47495 - DNA, 75 bp, Homo sapiens
gggccagcaccgtcgggctcctgaaagcacccgctgcctccaggagagcacctggcagaacggggccgcggagcc

SEQ ID NO: 47496 - DNA, 73 bp, Homo sapiens
accgtcgggctcctgaaagcacccgctgcctccaggagagcacctggcagaacggggccgcggagccgccctc

SEQ ID NO: 47497 - DNA, 76 bp, Homo sapiens
tcctgaaagcacccgctgcctccaggagagcacctggcagaacggggccgcggagccgccctcccctcccgcatgc

SEQ ID NO: 47498 - DNA, 74 bp, Homo sapiens
agcacccgctgcctccaggagagcacctggcagaacggggccgcggagccgccctcccctcccgcatgcggccc

SEQ ID NO: 47499 - DNA, 74 bp, Homo sapiens
caggagagcacctggcagaacggggccgcggagccgccctcccctcccgcatgcggccccgctcgattcctgga

SEQ ID NO: 47500 - DNA, 71 bp, Homo sapiens
acctggcagaacggggccgcggagccgccctcccctcccgcatgcggccccgctcgattcctggaatctta

SEQ ID NO: 47501 - DNA, 68 bp, Homo sapiens
agaacggggccgcggagccgccctcccctcccgcatgcggccccgctcgattcctggaatcttatttt

SEQ ID NO: 47502 - DNA, 75 bp, Homo sapiens
gagccgccctcccctcccgcatgcggccccgctcgattcctggaatcttatttttggacctgctgccgcaagcag

SEQ ID NO: 47503 - DNA, 73 bp, Homo sapiens
gctcgattcctggaatcttatttttggacctgctgccgcaagcagttcccgccctcggccctttcaattcctc

SEQ ID NO: 47504 - DNA, 70 bp, Homo sapiens
attcctggaatcttatttttggacctgctgccgcaagcagttcccgccctcggccctttcaattcctctt

SEQ ID NO: 47505 - DNA, 71 bp, Homo sapiens
acctgctgccgcaagcagttcccgccctcggccctttcaattcctctttcgggaggggactgctctccacc

SEQ ID NO: 47506 - DNA, 69 bp, Homo sapiens
ttcccgccctcggccctttcaattcctctttcgggaggggactgctctccacccctctcaggaggacga

SEQ ID NO: 47507 - DNA, 68 bp, Homo sapiens
cctttcaattcctctttcgggaggggactgctctccacccctctcaggaggacgaggcgcggcccggg

SEQ ID NO: 47508 - DNA, 72 bp, Homo sapiens
actgctctccacccctctcaggaggacgaggcgcggcccgggggttcctcacctccagcccagcagagggag

SEQ ID NO: 47509 - DNA, 69 bp, Homo sapiens
ccctctcaggaggacgaggcgcggcccgggggttcctcacctccagcccagcagagggagggccgcggg

SEQ ID NO: 47510 - DNA, 67 bp, Homo sapiens
acgaggcgcggcccgggggttcctcacctccagcccagcagagggagggccgcggggaagcggtttg

SEQ ID NO: 47511 - DNA, 65 bp, Homo sapiens
gcccgggggttcctcacctccagcccagcagagggagggccgcggggaagcggtttgggttttaa

SEQ ID NO: 47512 - DNA, 68 bp, Homo sapiens
ttcctcacctccagcccagcagagggagggccgcggggaagcggtttgggttttaaccattgtgtttc

SEQ ID NO: 47513 - DNA, 69 bp, Homo sapiens
cagcccagcagagggagggccgcggggaagcggtttgggttttaaccattgtgtttctctcgcactttg

SEQ ID NO: 47514 - DNA, 65 bp, Homo sapiens
agagggagggccgcggggaagcggtttgggttttaaccattgtgtttctctcgcactttggaaac

SEQ ID NO: 47515 - DNA, 65 bp, Homo sapiens
ggaagcggtttgggttttaaccattgtgtttctctcgcactttggaaacggactcccggcttccc

SEQ ID NO: 47516 - DNA, 68 bp, Homo sapiens
ttttaaccattgtgtttctctcgcactttggaaacggactcccggcttccccgcggggaggcgtctga

SEQ ID NO: 47517 - DNA, 70 bp, Homo sapiens
ttgtgtttctctcgcactttggaaacggactcccggcttccccgcggggaggcgtctgacagcgagcgtt

SEQ ID NO: 47518 - DNA, 73 bp, Homo sapiens
cccgcggggaggcgtctgacagcgagcgtttcccggacagccccgcagcgtctcaccggcctgcgcggggatc

SEQ ID NO: 47519 - DNA, 69 bp, Homo sapiens
acagcgagcgtttcccggacagccccgcagcgtctcaccggcctgcgcggggatcccggggtcgccggg

SEQ ID NO: 47520 - DNA, 68 bp, Homo sapiens
gtttcccggacagccccgcagcgtctcaccggcctgcgcggggatcccggggtcgccgggggatgggc

SEQ ID NO: 47521 - DNA, 67 bp, Homo sapiens
cccgcagcgtctcaccggcctgcgcggggatcccggggtcgccgggggatgggcgtgggggacgcgg

SEQ ID NO: 47522 - DNA, 65 bp, Homo sapiens
cgtctcaccggcctgcgcggggatcccggggtcgccgggggatgggcgtgggggacgcggggcgg

SEQ ID NO: 47523 - DNA, 65 bp, Homo sapiens
tgcgcggggatcccggggtcgccgggggatgggcgtgggggacgcggggcgggccggggctcctg

SEQ ID NO: 47524 - DNA, 63 bp, Homo sapiens
gggatcccggggtcgccgggggatgggcgtgggggacgcggggcgggccggggctcctgggac

SEQ ID NO: 47525 - DNA, 69 bp, Homo sapiens
atgggcgtgggggacgcggggcgggccggggctcctgggaccctgaggccaggcctcgccgcgcggagc

SEQ ID NO: 47526 - DNA, 71 bp, Homo sapiens
acgcggggcgggccggggctcctgggaccctgaggccaggcctcgccgcgcggagctggggggcggcagca

SEQ ID NO: 47527 - DNA, 75 bp, Homo sapiens
ggccggggctcctgggaccctgaggccaggcctcgccgcgcggagctggggggcggcagcagcgctgcctctcgg

SEQ ID NO: 47528 - DNA, 77 bp, Homo sapiens
tcctgggaccctgaggccaggcctcgccgcgcggagctggggggcggcagcagcgctgcctctcgggagcggttgga

SEQ ID NO: 47529 - DNA, 79 bp, Homo sapiens
tgaggccaggcctcgccgcgcggagctggggggcggcagcagcgctgcctctcgggagcggttggaggcgcgcgggcgc

SEQ ID NO: 47530 - DNA, 76 bp, Homo sapiens
aggcctcgccgcgcggagctggggggcggcagcagcgctgcctctcgggagcggttggaggcgcgcgggcgccagg

SEQ ID NO: 47531 - DNA, 74 bp, Homo sapiens
cgcgcggagctggggggcggcagcagcgctgcctctcgggagcggttggaggcgcgcgggcgccaggggttccc

SEQ ID NO: 47532 - DNA, 73 bp, Homo sapiens
gggcggcagcagcgctgcctctcgggagcggttggaggcgcgcgggcgccaggggttcccccgcatcccgccc

SEQ ID NO: 47533 - DNA, 69 bp, Homo sapiens
agcggttggaggcgcgcgggcgccaggggttcccccgcatcccgcccgccggctgctcaccgtctcggg

SEQ ID NO: 47534 - DNA, 69 bp, Homo sapiens
cgcgggcgccaggggttcccccgcatcccgcccgccggctgctcaccgtctcggggtcgttctcgaaca

SEQ ID NO: 47535 - DNA, 67 bp, Homo sapiens
aggggttcccccgcatcccgcccgccggctgctcaccgtctcggggtcgttctcgaacacctcccgc

SEQ ID NO: 47536 - DNA, 75 bp, Homo sapiens
tcccgcccgccggctgctcaccgtctcggggtcgttctcgaacacctcccgcgcctcctcgcggctgcacagctc

SEQ ID NO: 47537 - DNA, 77 bp, Homo sapiens
tgctcaccgtctcggggtcgttctcgaacacctcccgcgcctcctcgcggctgcacagctcctccacgcactccctc

SEQ ID NO: 47538 - DNA, 75 bp, Homo sapiens
ccgtctcggggtcgttctcgaacacctcccgcgcctcctcgcggctgcacagctcctccacgcactccctctcca

SEQ ID NO: 47539 - DNA, 78 bp, Homo sapiens
tcgttctcgaacacctcccgcgcctcctcgcggctgcacagctcctccacgcactccctctccaggtggccctgcttg

SEQ ID NO: 47540 - DNA, 77 bp, Homo sapiens
acctcccgcgcctcctcgcggctgcacagctcctccacgcactccctctccaggtggccctgcttggcctcctcgaa

SEQ ID NO: 47541 - DNA, 77 bp, Homo sapiens
cctcctcgcggctgcacagctcctccacgcactccctctccaggtggccctgcttggcctcctcgaagacctgaaag

SEQ ID NO: 47542 - DNA, 80 bp, Homo sapiens
tgcacagctcctccacgcactccctctccaggtggccctgcttggcctcctcgaagacctgaaaggcgcggcgctgcctg

SEQ ID NO: 47543 - DNA, 76 bp, Homo sapiens
agctcctccacgcactccctctccaggtggccctgcttggcctcctcgaagacctgaaaggcgcggcgctgcctgg

SEQ ID NO: 47544 - DNA, 74 bp, Homo sapiens
actccctctccaggtggccctgcttggcctcctcgaagacctgaaaggcgcggcgctgcctgggccgcaggaac

SEQ ID NO: 47545 - DNA, 76 bp, Homo sapiens
aggtggccctgcttggcctcctcgaagacctgaaaggcgcggcgctgcctgggccgcaggaactgcgtggcctcgc

SEQ ID NO: 47546 - DNA, 79 bp, Homo sapiens
tgcttggcctcctcgaagacctgaaaggcgcggcgctgcctgggccgcaggaactgcgtggcctcgcgcgccggcaaca

SEQ ID NO: 47547 - DNA, 80 bp, Homo sapiens
tcctcgaagacctgaaaggcgcggcgctgcctgggccgcaggaactgcgtggcctcgcgcgccggcaacagcgcggctgc

SEQ ID NO: 47548 - DNA, 77 bp, Homo sapiens
acctgaaaggcgcggcgctgcctgggccgcaggaactgcgtggcctcgcgcgccggcaacagcgcggctgcccggag

SEQ ID NO: 47549 - DNA, 77 bp, Homo sapiens
cgcggcgctgcctgggccgcaggaactgcgtggcctcgcgcgccggcaacagcgcggctgcccggagggagagaggg

SEQ ID NO: 47550 - DNA, 76 bp, Homo sapiens
tgggccgcaggaactgcgtggcctcgcgcgccggcaacagcgcggctgcccggagggagagagggggacgcgtcaa

SEQ ID NO: 47551 - DNA, 75 bp, Homo sapiens
aggaactgcgtggcctcgcgcgccggcaacagcgcggctgcccggagggagagagggggacgcgtcaagccgcgc

SEQ ID NO: 47552 - DNA, 74 bp, Homo sapiens
ctcgcgcgccggcaacagcgcggctgcccggagggagagagggggacgcgtcaagccgcgcccggagcctcctc

SEQ ID NO: 47553 - DNA, 71 bp, Homo sapiens
ccggcaacagcgcggctgcccggagggagagagggggacgcgtcaagccgcgcccggagcctcctcccgcc

SEQ ID NO: 47554 - DNA, 69 bp, Homo sapiens
agcgcggctgcccggagggagagagggggacgcgtcaagccgcgcccggagcctcctcccgccgcccgg

SEQ ID NO: 47555 - DNA, 65 bp, Homo sapiens
ccggagggagagagggggacgcgtcaagccgcgcccggagcctcctcccgccgcccggggacggg

SEQ ID NO: 47556 - DNA, 66 bp, Homo sapiens
agagagggggacgcgtcaagccgcgcccggagcctcctcccgccgcccggggacggggtctcgggc

SEQ ID NO: 47557 - DNA, 67 bp, Homo sapiens
tcaagccgcgcccggagcctcctcccgccgcccggggacggggtctcgggcccgcgggactcaccaa

SEQ ID NO: 47558 - DNA, 72 bp, Homo sapiens
tcctcccgccgcccggggacggggtctcgggcccgcgggactcaccaagcgcgcactccgcggccagcagca

SEQ ID NO: 47559 - DNA, 76 bp, Homo sapiens
agcagcagcagctgcggcgcgcggcgcagggcggcgggcccgggcgagagcgaaggggccatggcgggccggggac

SEQ ID NO: 47560 - DNA, 74 bp, Homo sapiens
agcagctgcggcgcgcggcgcagggcggcgggcccgggcgagagcgaaggggccatggcgggccggggacgcgc

SEQ ID NO: 47561 - DNA, 69 bp, Homo sapiens
caccatttagaacccagtgtagcttgagaatgttttatcagaaactaacaacccctctcaaaattgttt

SEQ ID NO: 47562 - DNA, 72 bp, Homo sapiens
agaacccagtgtagcttgagaatgttttatcagaaactaacaacccctctcaaaattgttttgcagcaaata

SEQ ID NO: 47563 - DNA, 72 bp, Homo sapiens
ttgagaatgttttatcagaaactaacaacccctctcaaaattgttttgcagcaaatactgacggacgtggaa

SEQ ID NO: 47564 - DNA, 70 bp, Homo sapiens
aatgttttatcagaaactaacaacccctctcaaaattgttttgcagcaaatactgacggacgtggaagtg

SEQ ID NO: 47565 - DNA, 69 bp, Homo sapiens
aaactaacaacccctctcaaaattgttttgcagcaaatactgacggacgtggaagtgtcgccccaggaa

SEQ ID NO: 47566 - DNA, 75 bp, Homo sapiens
cctctcaaaattgttttgcagcaaatactgacggacgtggaagtgtcgccccaggaaggctgcatcacaaaggta

SEQ ID NO: 47567 - DNA, 74 bp, Homo sapiens
aaaattgttttgcagcaaatactgacggacgtggaagtgtcgccccaggaaggctgcatcacaaaggtaggaga

SEQ ID NO: 47568 - DNA, 76 bp, Homo sapiens
agcaaatactgacggacgtggaagtgtcgccccaggaaggctgcatcacaaaggtaggagagctcgccctgcgccg

SEQ ID NO: 47569 - DNA, 79 bp, Homo sapiens
tactgacggacgtggaagtgtcgccccaggaaggctgcatcacaaaggtaggagagctcgccctgcgccgtctcagctc

SEQ ID NO: 47570 - DNA, 79 bp, Homo sapiens
tggaagtgtcgccccaggaaggctgcatcacaaaggtaggagagctcgccctgcgccgtctcagctccccagcgtcctc

SEQ ID NO: 47571 - DNA, 79 bp, Homo sapiens
ccaggaaggctgcatcacaaaggtaggagagctcgccctgcgccgtctcagctccccagcgtcctcggagctcctggcg

SEQ ID NO: 47572 - DNA, 78 bp, Homo sapiens
aaggctgcatcacaaaggtaggagagctcgccctgcgccgtctcagctccccagcgtcctcggagctcctggcggggc

SEQ ID NO: 47573 - DNA, 68 bp, Homo sapiens
taaaaataaaatgaaggggactgtggggacaagagtaactttattgaaaatactaatcctccatgtta

SEQ ID NO: 47574 - DNA, 70 bp, Homo sapiens
ataaaatgaaggggactgtggggacaagagtaactttattgaaaatactaatcctccatgttacttctga

SEQ ID NO: 47575 - DNA, 72 bp, Homo sapiens
actgtggggacaagagtaactttattgaaaatactaatcctccatgttacttctgactggccctgagtctgg

SEQ ID NO: 47576 - DNA, 72 bp, Homo sapiens
gggacaagagtaactttattgaaaatactaatcctccatgttacttctgactggccctgagtctgggaaggc

SEQ ID NO: 47577 - DNA, 73 bp, Homo sapiens
tttattgaaaatactaatcctccatgttacttctgactggccctgagtctgggaaggccgccaaagtgtctag

SEQ ID NO: 47578 - DNA, 75 bp, Homo sapiens
aatactaatcctccatgttacttctgactggccctgagtctgggaaggccgccaaagtgtctaggtgatgtatta

SEQ ID NO: 47579 - DNA, 76 bp, Homo sapiens
tccatgttacttctgactggccctgagtctgggaaggccgccaaagtgtctaggtgatgtattactctttatggta

SEQ ID NO: 47580 - DNA, 75 bp, Homo sapiens
ttacttctgactggccctgagtctgggaaggccgccaaagtgtctaggtgatgtattactctttatggtagaaca

SEQ ID NO: 47581 - DNA, 74 bp, Homo sapiens
cctgagtctgggaaggccgccaaagtgtctaggtgatgtattactctttatggtagaacacctattcattataa

SEQ ID NO: 47582 - DNA, 73 bp, Homo sapiens
tctgggaaggccgccaaagtgtctaggtgatgtattactctttatggtagaacacctattcattataaacttc

SEQ ID NO: 47583 - DNA, 70 bp, Homo sapiens
taggtgatgtattactctttatggtagaacacctattcattataaacttcccccaatacaacccctgttg

SEQ ID NO: 47584 - DNA, 70 bp, Homo sapiens
tattactctttatggtagaacacctattcattataaacttcccccaatacaacccctgttgttgcagaaa

SEQ ID NO: 47585 - DNA, 70 bp, Homo sapiens
tttatggtagaacacctattcattataaacttcccccaatacaacccctgttgttgcagaaatcttaggc

SEQ ID NO: 47586 - DNA, 72 bp, Homo sapiens
acacctattcattataaacttcccccaatacaacccctgttgttgcagaaatcttaggctgtgacaaccata

SEQ ID NO: 47587 - DNA, 76 bp, Homo sapiens
cccaatacaacccctgttgttgcagaaatcttaggctgtgacaaccatagctgcctacacattccttgtatcttgg

SEQ ID NO: 47588 - DNA, 74 bp, Homo sapiens
aacccctgttgttgcagaaatcttaggctgtgacaaccatagctgcctacacattccttgtatcttggggtaaa

SEQ ID NO: 47589 - DNA, 77 bp, Homo sapiens
ctgttgttgcagaaatcttaggctgtgacaaccatagctgcctacacattccttgtatcttggggtaaaagcacacg

SEQ ID NO: 47590 - DNA, 79 bp, Homo sapiens
ttgttgcagaaatcttaggctgtgacaaccatagctgcctacacattccttgtatcttggggtaaaagcacacgtgctc

SEQ ID NO: 47591 - DNA, 77 bp, Homo sapiens
agaaatcttaggctgtgacaaccatagctgcctacacattccttgtatcttggggtaaaagcacacgtgctctggaa

SEQ ID NO: 47592 - DNA, 76 bp, Homo sapiens
aaatcttaggctgtgacaaccatagctgcctacacattccttgtatcttggggtaaaagcacacgtgctctggaag

SEQ ID NO: 47593 - DNA, 78 bp, Homo sapiens
ttaggctgtgacaaccatagctgcctacacattccttgtatcttggggtaaaagcacacgtgctctggaaggaatgtg

SEQ ID NO: 47594 - DNA, 77 bp, Homo sapiens
ctgtgacaaccatagctgcctacacattccttgtatcttggggtaaaagcacacgtgctctggaaggaatgtgtagg

SEQ ID NO: 47595 - DNA, 76 bp, Homo sapiens
aaccatagctgcctacacattccttgtatcttggggtaaaagcacacgtgctctggaaggaatgtgtaggtggcta

SEQ ID NO: 47596 - DNA, 76 bp, Homo sapiens
atagctgcctacacattccttgtatcttggggtaaaagcacacgtgctctggaaggaatgtgtaggtggctatggg

SEQ ID NO: 47597 - DNA, 76 bp, Homo sapiens
tacacattccttgtatcttggggtaaaagcacacgtgctctggaaggaatgtgtaggtggctatgggtgcacaatt

SEQ ID NO: 47598 - DNA, 76 bp, Homo sapiens
acattccttgtatcttggggtaaaagcacacgtgctctggaaggaatgtgtaggtggctatgggtgcacaatttca

SEQ ID NO: 47599 - DNA, 75 bp, Homo sapiens
attccttgtatcttggggtaaaagcacacgtgctctggaaggaatgtgtaggtggctatgggtgcacaatttcag

SEQ ID NO: 47600 - DNA, 74 bp, Homo sapiens
acacgtgctctggaaggaatgtgtaggtggctatgggtgcacaatttcagggggttcgtgaactccagttaaga

SEQ ID NO: 47601 - DNA, 73 bp, Homo sapiens
tggaaggaatgtgtaggtggctatgggtgcacaatttcagggggttcgtgaactccagttaagacttgcccta

SEQ ID NO: 47602 - DNA, 72 bp, Homo sapiens
aatgtgtaggtggctatgggtgcacaatttcagggggttcgtgaactccagttaagacttgccctaattata

SEQ ID NO: 47603 - DNA, 70 bp, Homo sapiens
cacaatttcagggggttcgtgaactccagttaagacttgccctaattataccatgtaaataattcaataa

SEQ ID NO: 47604 - DNA, 71 bp, Homo sapiens
ggggttcgtgaactccagttaagacttgccctaattataccatgtaaataattcaataatgggcaattctg

SEQ ID NO: 47605 - DNA, 73 bp, Homo sapiens
cgtgaactccagttaagacttgccctaattataccatgtaaataattcaataatgggcaattctgtagtagaa

SEQ ID NO: 47606 - DNA, 71 bp, Homo sapiens
aagacttgccctaattataccatgtaaataattcaataatgggcaattctgtagtagaaattttattccca

SEQ ID NO: 47607 - DNA, 71 bp, Homo sapiens
gccctaattataccatgtaaataattcaataatgggcaattctgtagtagaaattttattcccacccataa

SEQ ID NO: 47608 - DNA, 72 bp, Homo sapiens
aattcaataatgggcaattctgtagtagaaattttattcccacccataaaatatatcactaaatagctgaaa

SEQ ID NO: 47609 - DNA, 70 bp, Homo sapiens
attctgtagtagaaattttattcccacccataaaatatatcactaaatagctgaaaaatttacatattat

SEQ ID NO: 47610 - DNA, 68 bp, Homo sapiens
gaaattttattcccacccataaaatatatcactaaatagctgaaaaatttacatattattttaaaaca

SEQ ID NO: 47611 - DNA, 69 bp, Homo sapiens
ttcccacccataaaatatatcactaaatagctgaaaaatttacatattattttaaaacatagacttaaa

SEQ ID NO: 47612 - DNA, 72 bp, Homo sapiens
tatatcactaaatagctgaaaaatttacatattattttaaaacatagacttaaaaaatcatattagcttctc

SEQ ID NO: 47613 - DNA, 70 bp, Homo sapiens
aatagctgaaaaatttacatattattttaaaacatagacttaaaaaatcatattagcttctccttagcaa

SEQ ID NO: 47614 - DNA, 70 bp, Homo sapiens
ctgaaaaatttacatattattttaaaacatagacttaaaaaatcatattagcttctccttagcaaaatgc

SEQ ID NO: 47615 - DNA, 69 bp, Homo sapiens
attattttaaaacatagacttaaaaaatcatattagcttctccttagcaaaatgcttttgttttatgta

SEQ ID NO: 47616 - DNA, 71 bp, Homo sapiens
aacatagacttaaaaaatcatattagcttctccttagcaaaatgcttttgttttatgtatttacaagaata

SEQ ID NO: 47617 - DNA, 73 bp, Homo sapiens
taaaaaatcatattagcttctccttagcaaaatgcttttgttttatgtatttacaagaatatactgtacttca

SEQ ID NO: 47618 - DNA, 74 bp, Homo sapiens
catattagcttctccttagcaaaatgcttttgttttatgtatttacaagaatatactgtacttcaggtacacaa

SEQ ID NO: 47619 - DNA, 75 bp, Homo sapiens
aatgcttttgttttatgtatttacaagaatatactgtacttcaggtacacaattcactcaagccagcctgagaag

SEQ ID NO: 47620 - DNA, 83 bp, Homo sapiens
ttacaagaatatactgtacttcaggtacacaattcactcaagccagcctgagaaggccttggatgcagatcaatgctccaata

SEQ ID NO: 47621 - DNA, 80 bp, Homo sapiens
aatatactgtacttcaggtacacaattcactcaagccagcctgagaaggccttggatgcagatcaatgctccaataaagt

SEQ ID NO: 47622 - DNA, 84 bp, Homo sapiens
tacttcaggtacacaattcactcaagccagcctgagaaggccttggatgcagatcaatgctccaataaagttcattatcagctc

SEQ ID NO: 47623 - DNA, 84 bp, Homo sapiens
tacacaattcactcaagccagcctgagaaggccttggatgcagatcaatgctccaataaagttcattatcagctcctcctgcct

SEQ ID NO: 47624 - DNA, 84 bp, Homo sapiens
agccagcctgagaaggccttggatgcagatcaatgctccaataaagttcattatcagctcctcctgccttgtgacaggatgatt

SEQ ID NO: 47625 - DNA, 82 bp, Homo sapiens
agaaggccttggatgcagatcaatgctccaataaagttcattatcagctcctcctgccttgtgacaggatgatttgatttta

SEQ ID NO: 47626 - DNA, 81 bp, Homo sapiens
ccttggatgcagatcaatgctccaataaagttcattatcagctcctcctgccttgtgacaggatgatttgattttacaaaa

SEQ ID NO: 47627 - DNA, 76 bp, Homo sapiens
atcaatgctccaataaagttcattatcagctcctcctgccttgtgacaggatgatttgattttacaaaagtccctt

SEQ ID NO: 47628 - DNA, 73 bp, Homo sapiens
aataaagttcattatcagctcctcctgccttgtgacaggatgatttgattttacaaaagtccctttgaaaaca

SEQ ID NO: 47629 - DNA, 74 bp, Homo sapiens
ttcattatcagctcctcctgccttgtgacaggatgatttgattttacaaaagtccctttgaaaacaagagtaaa

SEQ ID NO: 47630 - DNA, 73 bp, Homo sapiens
ctcctgccttgtgacaggatgatttgattttacaaaagtccctttgaaaacaagagtaaacgcagacagcttc

SEQ ID NO: 47631 - DNA, 73 bp, Homo sapiens
ttgtgacaggatgatttgattttacaaaagtccctttgaaaacaagagtaaacgcagacagcttctagagaaa

SEQ ID NO: 47632 - DNA, 72 bp, Homo sapiens
attttacaaaagtccctttgaaaacaagagtaaacgcagacagcttctagagaaaagtctggtgaagcagca

SEQ ID NO: 47633 - DNA, 75 bp, Homo sapiens
cctttgaaaacaagagtaaacgcagacagcttctagagaaaagtctggtgaagcagcagttgataatagattttc

SEQ ID NO: 47634 - DNA, 74 bp, Homo sapiens
aaaacaagagtaaacgcagacagcttctagagaaaagtctggtgaagcagcagttgataatagattttctttta

SEQ ID NO: 47635 - DNA, 75 bp, Homo sapiens
acagcttctagagaaaagtctggtgaagcagcagttgataatagattttcttttagtgatgaaattaatcttgtt

SEQ ID NO: 47636 - DNA, 75 bp, Homo sapiens
aagtctggtgaagcagcagttgataatagattttcttttagtgatgaaattaatcttgttttggtaatctacagc

SEQ ID NO: 47637 - DNA, 74 bp, Homo sapiens
gaagcagcagttgataatagattttcttttagtgatgaaattaatcttgttttggtaatctacagcctgttagg

SEQ ID NO: 47638 - DNA, 73 bp, Homo sapiens
tgataatagattttcttttagtgatgaaattaatcttgttttggtaatctacagcctgttagggataggtgga

SEQ ID NO: 47639 - DNA, 71 bp, Homo sapiens
ttttcttttagtgatgaaattaatcttgttttggtaatctacagcctgttagggataggtggagggatgaa

SEQ ID NO: 47640 - DNA, 72 bp, Homo sapiens
tagtgatgaaattaatcttgttttggtaatctacagcctgttagggataggtggagggatgaagtccttaaa

SEQ ID NO: 47641 - DNA, 68 bp, Homo sapiens
attaatcttgttttggtaatctacagcctgttagggataggtggagggatgaagtccttaaaactaaa

SEQ ID NO: 47642 - DNA, 69 bp, Homo sapiens
ttttggtaatctacagcctgttagggataggtggagggatgaagtccttaaaactaaattgttcctcta

SEQ ID NO: 47643 - DNA, 69 bp, Homo sapiens
aatctacagcctgttagggataggtggagggatgaagtccttaaaactaaattgttcctctacgaatct

SEQ ID NO: 47644 - DNA, 70 bp, Homo sapiens
ctgttagggataggtggagggatgaagtccttaaaactaaattgttcctctacgaatcttcgacctgagc

SEQ ID NO: 47645 - DNA, 72 bp, Homo sapiens
ggtggagggatgaagtccttaaaactaaattgttcctctacgaatcttcgacctgagcctgcggagagagta

SEQ ID NO: 47646 - DNA, 70 bp, Homo sapiens
aagtccttaaaactaaattgttcctctacgaatcttcgacctgagcctgcggagagagtagccccaaatc

SEQ ID NO: 47647 - DNA, 75 bp, Homo sapiens
ttaaaactaaattgttcctctacgaatcttcgacctgagcctgcggagagagtagccccaaatccatctctctgc

SEQ ID NO: 47648 - DNA, 77 bp, Homo sapiens
tcctctacgaatcttcgacctgagcctgcggagagagtagccccaaatccatctctctgctgaaaggtcgcctgttt

SEQ ID NO: 47649 - DNA, 77 bp, Homo sapiens
tacgaatcttcgacctgagcctgcggagagagtagccccaaatccatctctctgctgaaaggtcgcctgttttggta

SEQ ID NO: 47650 - DNA, 78 bp, Homo sapiens
tgagcctgcggagagagtagccccaaatccatctctctgctgaaaggtcgcctgttttggtaggtgtgaggacattcc

SEQ ID NO: 47651 - DNA, 73 bp, Homo sapiens
agtagccccaaatccatctctctgctgaaaggtcgcctgttttggtaggtgtgaggacattccgaaacacggc

SEQ ID NO: 47652 - DNA, 78 bp, Homo sapiens
atctctctgctgaaaggtcgcctgttttggtaggtgtgaggacattccgaaacacggccatccacattctgatacatc

SEQ ID NO: 47653 - DNA, 79 bp, Homo sapiens
tctgctgaaaggtcgcctgttttggtaggtgtgaggacattccgaaacacggccatccacattctgatacatctgaatg

SEQ ID NO: 47654 - DNA, 76 bp, Homo sapiens
ggtcgcctgttttggtaggtgtgaggacattccgaaacacggccatccacattctgatacatctgaatgtgggaaa

SEQ ID NO: 47655 - DNA, 76 bp, Homo sapiens
aatttaccaatttcctttgtaaagctttataaagtcctggctgctacataccgcttcttctgcatctgccagctga

SEQ ID NO: 47656 - DNA, 77 bp, Homo sapiens
tttcctttgtaaagctttataaagtcctggctgctacataccgcttcttctgcatctgccagctgacatcctaaaaa

SEQ ID NO: 47657 - DNA, 77 bp, Homo sapiens
tttataaagtcctggctgctacataccgcttcttctgcatctgccagctgacatcctaaaaacgaagtcaaattagg

SEQ ID NO: 47658 - DNA, 76 bp, Homo sapiens
aaagtcctggctgctacataccgcttcttctgcatctgccagctgacatcctaaaaacgaagtcaaattagggaag

SEQ ID NO: 47659 - DNA, 75 bp, Homo sapiens
tacataccgcttcttctgcatctgccagctgacatcctaaaaacgaagtcaaattagggaaggatggccgtttcc

SEQ ID NO: 47660 - DNA, 75 bp, Homo sapiens
tcttctgcatctgccagctgacatcctaaaaacgaagtcaaattagggaaggatggccgtttccttgagtcaaaa

SEQ ID NO: 47661 - DNA, 72 bp, Homo sapiens
atctgccagctgacatcctaaaaacgaagtcaaattagggaaggatggccgtttccttgagtcaaaagccca

SEQ ID NO: 47662 - DNA, 71 bp, Homo sapiens
acatcctaaaaacgaagtcaaattagggaaggatggccgtttccttgagtcaaaagcccagcaggattgca

SEQ ID NO: 47663 - DNA, 71 bp, Homo sapiens
taaaaacgaagtcaaattagggaaggatggccgtttccttgagtcaaaagcccagcaggattgcattataa

SEQ ID NO: 47664 - DNA, 74 bp, Homo sapiens
agtcaaattagggaaggatggccgtttccttgagtcaaaagcccagcaggattgcattataatgtatctgtaaa

SEQ ID NO: 47665 - DNA, 75 bp, Homo sapiens
aaggatggccgtttccttgagtcaaaagcccagcaggattgcattataatgtatctgtaaaagcaatagaacaag

SEQ ID NO: 47666 - DNA, 78 bp, Homo sapiens
tttccttgagtcaaaagcccagcaggattgcattataatgtatctgtaaaagcaatagaacaaggaacaagatgaaga

SEQ ID NO: 47667 - DNA, 75 bp, Homo sapiens
actgtacctttctgatttcaaccaaattacagtctgacttgaacttacatttcttctgtagcataaaatggctga

SEQ ID NO: 47668 - DNA, 75 bp, Homo sapiens
ctttctgatttcaaccaaattacagtctgacttgaacttacatttcttctgtagcataaaatggctgatccattt

SEQ ID NO: 47669 - DNA, 74 bp, Homo sapiens
caaccaaattacagtctgacttgaacttacatttcttctgtagcataaaatggctgatccattttaaatccatt

SEQ ID NO: 47670 - DNA, 76 bp, Homo sapiens
cagtctgacttgaacttacatttcttctgtagcataaaatggctgatccattttaaatccattttgaatcagtttg

SEQ ID NO: 47671 - DNA, 75 bp, Homo sapiens
acttacatttcttctgtagcataaaatggctgatccattttaaatccattttgaatcagtttgtagaagttagca

SEQ ID NO: 47672 - DNA, 76 bp, Homo sapiens
tcttctgtagcataaaatggctgatccattttaaatccattttgaatcagtttgtagaagttagcatcaaccggaa

SEQ ID NO: 47673 - DNA, 73 bp, Homo sapiens
ataaaatggctgatccattttaaatccattttgaatcagtttgtagaagttagcatcaaccggaatgccaggg

SEQ ID NO: 47674 - DNA, 75 bp, Homo sapiens
tgatccattttaaatccattttgaatcagtttgtagaagttagcatcaaccggaatgccagggtaaggattcaca

SEQ ID NO: 47675 - DNA, 74 bp, Homo sapiens
taaatccattttgaatcagtttgtagaagttagcatcaaccggaatgccagggtaaggattcacacctgaggaa

SEQ ID NO: 47676 - DNA, 73 bp, Homo sapiens
ttttgaatcagtttgtagaagttagcatcaaccggaatgccagggtaaggattcacacctgaggaaaacatta

SEQ ID NO: 47677 - DNA, 74 bp, Homo sapiens
agtttgtagaagttagcatcaaccggaatgccagggtaaggattcacacctgaggaaaacattagacaattgca

SEQ ID NO: 47678 - DNA, 77 bp, Homo sapiens
aagttagcatcaaccggaatgccagggtaaggattcacacctgaggaaaacattagacaattgcagccattcatcca

SEQ ID NO: 47679 - DNA, 76 bp, Homo sapiens
aggatgcaaagccaggagccaagggaggccagcagctgcccaacttaccaagtgagaagatttcccacagtaatat

SEQ ID NO: 47680 - DNA, 75 bp, Homo sapiens
aaagccaggagccaagggaggccagcagctgcccaacttaccaagtgagaagatttcccacagtaatattccata

SEQ ID NO: 47681 - DNA, 79 bp, Homo sapiens
gggaggccagcagctgcccaacttaccaagtgagaagatttcccacagtaatattccatatgaccagacatcactctta

SEQ ID NO: 47682 - DNA, 79 bp, Homo sapiens
cagctgcccaacttaccaagtgagaagatttcccacagtaatattccatatgaccagacatcactcttaatggtgtaga

SEQ ID NO: 47683 - DNA, 78 bp, Homo sapiens
aacttaccaagtgagaagatttcccacagtaatattccatatgaccagacatcactcttaatggtgtagatgccttca

SEQ ID NO: 47684 - DNA, 78 bp, Homo sapiens
agtgagaagatttcccacagtaatattccatatgaccagacatcactcttaatggtgtagatgccttcaaacaggctt

SEQ ID NO: 47685 - DNA, 76 bp, Homo sapiens
agatttcccacagtaatattccatatgaccagacatcactcttaatggtgtagatgccttcaaacaggctttcggg

SEQ ID NO: 47686 - DNA, 77 bp, Homo sapiens
taatattccatatgaccagacatcactcttaatggtgtagatgccttcaaacaggctttcgggggccatccatttta

SEQ ID NO: 47687 - DNA, 77 bp, Homo sapiens
atatgaccagacatcactcttaatggtgtagatgccttcaaacaggctttcgggggccatccattttacaggcagac

SEQ ID NO: 47688 - DNA, 74 bp, Homo sapiens
atcactcttaatggtgtagatgccttcaaacaggctttcgggggccatccattttacaggcagacgggcctgtg

SEQ ID NO: 47689 - DNA, 72 bp, Homo sapiens
ttaatggtgtagatgccttcaaacaggctttcgggggccatccattttacaggcagacgggcctgtggaaaa

SEQ ID NO: 47690 - DNA, 72 bp, Homo sapiens
tagatgccttcaaacaggctttcgggggccatccattttacaggcagacgggcctgtggaaaacccagagga

SEQ ID NO: 47691 - DNA, 70 bp, Homo sapiens
aaacaggctttcgggggccatccattttacaggcagacgggcctgtggaaaacccagaggagataagatg

SEQ ID NO: 47692 - DNA, 73 bp, Homo sapiens
acaacacaaaatagccgtataaaaataagtaggaaatagcagcctcacattgcccctgacaacatagttggaa

SEQ ID NO: 47693 - DNA, 77 bp, Homo sapiens
aaatagccgtataaaaataagtaggaaatagcagcctcacattgcccctgacaacatagttggaatcactcatgata

SEQ ID NO: 47694 - DNA, 80 bp, Homo sapiens
aaataagtaggaaatagcagcctcacattgcccctgacaacatagttggaatcactcatgatatctcgagccaatccaaa

SEQ ID NO: 47695 - DNA, 84 bp, Homo sapiens
taggaaatagcagcctcacattgcccctgacaacatagttggaatcactcatgatatctcgagccaatccaaagtcacatatct

SEQ ID NO: 47696 - DNA, 82 bp, Homo sapiens
agcctcacattgcccctgacaacatagttggaatcactcatgatatctcgagccaatccaaagtcacatatcttcaccactt

SEQ ID NO: 47697 - DNA, 79 bp, Homo sapiens
attgcccctgacaacatagttggaatcactcatgatatctcgagccaatccaaagtcacatatcttcaccactttcccg

SEQ ID NO: 47698 - DNA, 79 bp, Homo sapiens
acaacatagttggaatcactcatgatatctcgagccaatccaaagtcacatatcttcaccactttcccgtgggtgacaa

SEQ ID NO: 47699 - DNA, 79 bp, Homo sapiens
ttggaatcactcatgatatctcgagccaatccaaagtcacatatcttcaccactttcccgtgggtgacaagcacgttcc

SEQ ID NO: 47700 - DNA, 77 bp, Homo sapiens
atgatatctcgagccaatccaaagtcacatatcttcaccactttcccgtgggtgacaagcacgttcctggcggccag

SEQ ID NO: 47701 - DNA, 75 bp, Homo sapiens
ccaatccaaagtcacatatcttcaccactttcccgtgggtgacaagcacgttcctggcggccaggtctctgtgaa

SEQ ID NO: 47702 - DNA, 77 bp, Homo sapiens
agtcacatatcttcaccactttcccgtgggtgacaagcacgttcctggcggccaggtctctgtgaacacactgtcaa

SEQ ID NO: 47703 - DNA, 77 bp, Homo sapiens
atatcttcaccactttcccgtgggtgacaagcacgttcctggcggccaggtctctgtgaacacactgtcaagaatga

SEQ ID NO: 47704 - DNA, 77 bp, Homo sapiens
tttcccgtgggtgacaagcacgttcctggcggccaggtctctgtgaacacactgtcaagaatgacaccagagtgtta

SEQ ID NO: 47705 - DNA, 66 bp, Homo sapiens
ttggtttgttttttctttaaaaggagcataccgacttaaattccagaaattccattcctttggcaa

SEQ ID NO: 47706 - DNA, 72 bp, Homo sapiens
ttttctttaaaaggagcataccgacttaaattccagaaattccattcctttggcaacttgatatgcaaagca

SEQ ID NO: 47707 - DNA, 72 bp, Homo sapiens
tttaaaaggagcataccgacttaaattccagaaattccattcctttggcaacttgatatgcaaagcaaagaa

SEQ ID NO: 47708 - DNA, 75 bp, Homo sapiens
cataccgacttaaattccagaaattccattcctttggcaacttgatatgcaaagcaaagaagatcttcaaatgta

SEQ ID NO: 47709 - DNA, 76 bp, Homo sapiens
aaattccagaaattccattcctttggcaacttgatatgcaaagcaaagaagatcttcaaatgtaagcacattcaag

SEQ ID NO: 47710 - DNA, 76 bp, Homo sapiens
aaattccattcctttggcaacttgatatgcaaagcaaagaagatcttcaaatgtaagcacattcaagtcctcctct

SEQ ID NO: 47711 - DNA, 77 bp, Homo sapiens
tttggcaacttgatatgcaaagcaaagaagatcttcaaatgtaagcacattcaagtcctcctcttcttccagccttt

SEQ ID NO: 47712 - DNA, 73 bp, Homo sapiens
atatgcaaagcaaagaagatcttcaaatgtaagcacattcaagtcctcctcttcttccagccttttttggttt

SEQ ID NO: 47713 - DNA, 73 bp, Homo sapiens
caaagaagatcttcaaatgtaagcacattcaagtcctcctcttcttccagccttttttggttttcatattcaa

SEQ ID NO: 47714 - DNA, 75 bp, Homo sapiens
tcttcaaatgtaagcacattcaagtcctcctcttcttccagccttttttggttttcatattcaatttcatctgta

SEQ ID NO: 47715 - DNA, 72 bp, Homo sapiens
aatgtaagcacattcaagtcctcctcttcttccagccttttttggttttcatattcaatttcatctgtaaaa

SEQ ID NO: 47716 - DNA, 72 bp, Homo sapiens
aagtcctcctcttcttccagccttttttggttttcatattcaatttcatctgtaaaatagagccagtcttca

SEQ ID NO: 47717 - DNA, 72 bp, Homo sapiens
cttcttccagccttttttggttttcatattcaatttcatctgtaaaatagagccagtcttcacttttgccaa

SEQ ID NO: 47718 - DNA, 71 bp, Homo sapiens
aaacttttgcattcatttccattttaaagtgctactacttagaataaaatattaccttcagagtgaaatga

SEQ ID NO: 47719 - DNA, 74 bp, Homo sapiens
gcattcatttccattttaaagtgctactacttagaataaaatattaccttcagagtgaaatgaattcccatgaa

SEQ ID NO: 47720 - DNA, 73 bp, Homo sapiens
ccattttaaagtgctactacttagaataaaatattaccttcagagtgaaatgaattcccatgaagccctgaga

SEQ ID NO: 47721 - DNA, 74 bp, Homo sapiens
aaagtgctactacttagaataaaatattaccttcagagtgaaatgaattcccatgaagccctgagatttgatcc

SEQ ID NO: 47722 - DNA, 74 bp, Homo sapiens
agaataaaatattaccttcagagtgaaatgaattcccatgaagccctgagatttgatccgagtccgggtgtatc

SEQ ID NO: 47723 - DNA, 74 bp, Homo sapiens
aaatattaccttcagagtgaaatgaattcccatgaagccctgagatttgatccgagtccgggtgtatctgaact

SEQ ID NO: 47724 - DNA, 77 bp, Homo sapiens
ttcagagtgaaatgaattcccatgaagccctgagatttgatccgagtccgggtgtatctgaacttctcttgaaccag

SEQ ID NO: 47725 - DNA, 76 bp, Homo sapiens
aattcccatgaagccctgagatttgatccgagtccgggtgtatctgaacttctcttgaaccaggcatgctattaaa

SEQ ID NO: 47726 - DNA, 72 bp, Homo sapiens
aagccctgagatttgatccgagtccgggtgtatctgaacttctcttgaaccaggcatgctattaaaaaattt

SEQ ID NO: 47727 - DNA, 72 bp, Homo sapiens
ctgagatttgatccgagtccgggtgtatctgaacttctcttgaaccaggcatgctattaaaaaattttgttt

SEQ ID NO: 47728 - DNA, 70 bp, Homo sapiens
atccgagtccgggtgtatctgaacttctcttgaaccaggcatgctattaaaaaattttgttttttcatta

SEQ ID NO: 47729 - DNA, 70 bp, Homo sapiens
gggtgtatctgaacttctcttgaaccaggcatgctattaaaaaattttgttttttcattatttacattat

SEQ ID NO: 47730 - DNA, 79 bp, Homo sapiens
aaattaggcacagtgagataaatatgattcgagtggaaccaggactcacatcgatctcattctttggtttctgaactca

SEQ ID NO: 47731 - DNA, 78 bp, Homo sapiens
agtgagataaatatgattcgagtggaaccaggactcacatcgatctcattctttggtttctgaactcagcccactttc

SEQ ID NO: 47732 - DNA, 78 bp, Homo sapiens
taaatatgattcgagtggaaccaggactcacatcgatctcattctttggtttctgaactcagcccactttccctcaca

SEQ ID NO: 47733 - DNA, 77 bp, Homo sapiens
agtggaaccaggactcacatcgatctcattctttggtttctgaactcagcccactttccctcacataatacagatct

SEQ ID NO: 47734 - DNA, 77 bp, Homo sapiens
actcacatcgatctcattctttggtttctgaactcagcccactttccctcacataatacagatcttcccgagagtcc

SEQ ID NO: 47735 - DNA, 75 bp, Homo sapiens
tcgatctcattctttggtttctgaactcagcccactttccctcacataatacagatcttcccgagagtcccgtaa

SEQ ID NO: 47736 - DNA, 72 bp, Homo sapiens
tttggtttctgaactcagcccactttccctcacataatacagatcttcccgagagtcccgtaagcgtttcac

SEQ ID NO: 47737 - DNA, 71 bp, Homo sapiens
aactcagcccactttccctcacataatacagatcttcccgagagtcccgtaagcgtttcaccatccttctt

SEQ ID NO: 47738 - DNA, 69 bp, Homo sapiens
agcccactttccctcacataatacagatcttcccgagagtcccgtaagcgtttcaccatccttcttttt

SEQ ID NO: 47739 - DNA, 69 bp, Homo sapiens
acataatacagatcttcccgagagtcccgtaagcgtttcaccatccttcttttttccagtttgcctttg

SEQ ID NO: 47740 - DNA, 68 bp, Homo sapiens
atacagatcttcccgagagtcccgtaagcgtttcaccatccttcttttttccagtttgcctttgtaaa

SEQ ID NO: 47741 - DNA, 66 bp, Homo sapiens
agagtcccgtaagcgtttcaccatccttcttttttccagtttgcctttgtaaagctcatttctttt

SEQ ID NO: 47742 - DNA, 72 bp, Homo sapiens
cctacgttctatgatgtgtaattacgaaaccctgacccagcctcttacctggaatttggatgtgattggaaa

SEQ ID NO: 47743 - DNA, 72 bp, Homo sapiens
tatgatgtgtaattacgaaaccctgacccagcctcttacctggaatttggatgtgattggaaagtggggtaa

SEQ ID NO: 47744 - DNA, 67 bp, Homo sapiens
gtaattacgaaaccctgacccagcctcttacctggaatttggatgtgattggaaagtggggtaaaaa

SEQ ID NO: 47745 - DNA, 71 bp, Homo sapiens
tgacccagcctcttacctggaatttggatgtgattggaaagtggggtaaaaactgaaattgtgttccttga

SEQ ID NO: 47746 - DNA, 69 bp, Homo sapiens
ctcttacctggaatttggatgtgattggaaagtggggtaaaaactgaaattgtgttccttgaaaatctc

SEQ ID NO: 47747 - DNA, 69 bp, Homo sapiens
aatttggatgtgattggaaagtggggtaaaaactgaaattgtgttccttgaaaatctctgtccaagtcc

SEQ ID NO: 47748 - DNA, 69 bp, Homo sapiens
tgattggaaagtggggtaaaaactgaaattgtgttccttgaaaatctctgtccaagtcctgtgaaattt

SEQ ID NO: 47749 - DNA, 67 bp, Homo sapiens
ggaaagtggggtaaaaactgaaattgtgttccttgaaaatctctgtccaagtcctgtgaaatttttc

SEQ ID NO: 47750 - DNA, 69 bp, Homo sapiens
aaactgaaattgtgttccttgaaaatctctgtccaagtcctgtgaaatttttctcttttacttcttaga

SEQ ID NO: 47751 - DNA, 73 bp, Homo sapiens
gtgttccttgaaaatctctgtccaagtcctgtgaaatttttctcttttacttcttagatagttgagaagatca

SEQ ID NO: 47752 - DNA, 76 bp, Homo sapiens
tgaaaatctctgtccaagtcctgtgaaatttttctcttttacttcttagatagttgagaagatcaccatagcaaca

SEQ ID NO: 47753 - DNA, 76 bp, Homo sapiens
tctgtccaagtcctgtgaaatttttctcttttacttcttagatagttgagaagatcaccatagcaacagtattcaa

SEQ ID NO: 47754 - DNA, 73 bp, Homo sapiens
cctgtgaaatttttctcttttacttcttagatagttgagaagatcaccatagcaacagtattcaaaaatcaag

SEQ ID NO: 47755 - DNA, 75 bp, Homo sapiens
tctcttttacttcttagatagttgagaagatcaccatagcaacagtattcaaaaatcaagtaaattggtcctgaa

SEQ ID NO: 47756 - DNA, 75 bp, Homo sapiens
cttcttagatagttgagaagatcaccatagcaacagtattcaaaaatcaagtaaattggtcctgaaatagttaca

SEQ ID NO: 47757 - DNA, 75 bp, Homo sapiens
agatagttgagaagatcaccatagcaacagtattcaaaaatcaagtaaattggtcctgaaatagttacagtttca

SEQ ID NO: 47758 - DNA, 75 bp, Homo sapiens
gaagatcaccatagcaacagtattcaaaaatcaagtaaattggtcctgaaatagttacagtttcaattataggca

SEQ ID NO: 47759 - DNA, 73 bp, Homo sapiens
aagctacagtctttttgatgaggtgattttcgtggaagtgggttacctgacagtgtgcacgcccccagcaggt

SEQ ID NO: 47760 - DNA, 74 bp, Homo sapiens
ctttttgatgaggtgattttcgtggaagtgggttacctgacagtgtgcacgcccccagcaggttcacaatattc

SEQ ID NO: 47761 - DNA, 75 bp, Homo sapiens
atgaggtgattttcgtggaagtgggttacctgacagtgtgcacgcccccagcaggttcacaatattctcgtggct

SEQ ID NO: 47762 - DNA, 74 bp, Homo sapiens
attttcgtggaagtgggttacctgacagtgtgcacgcccccagcaggttcacaatattctcgtggcttcccagc

SEQ ID NO: 47763 - DNA, 77 bp, Homo sapiens
aagtgggttacctgacagtgtgcacgcccccagcaggttcacaatattctcgtggcttcccagctgggtcatcatct

SEQ ID NO: 47764 - DNA, 83 bp, Homo sapiens
cctgacagtgtgcacgcccccagcaggttcacaatattctcgtggcttcccagctgggtcatcatcttgagttctgacatgag

SEQ ID NO: 47765 - DNA, 80 bp, Homo sapiens
acgcccccagcaggttcacaatattctcgtggcttcccagctgggtcatcatcttgagttctgacatgagtgcctctctt

SEQ ID NO: 47766 - DNA, 84 bp, Homo sapiens
aggttcacaatattctcgtggcttcccagctgggtcatcatcttgagttctgacatgagtgcctctctttcagagctgtctgct

SEQ ID NO: 47767 - DNA, 83 bp, Homo sapiens
acaatattctcgtggcttcccagctgggtcatcatcttgagttctgacatgagtgcctctctttcagagctgtctgctttttc

SEQ ID NO: 47768 - DNA, 82 bp, Homo sapiens
cttcccagctgggtcatcatcttgagttctgacatgagtgcctctctttcagagctgtctgctttttctgtcaaagaaagga

SEQ ID NO: 47769 - DNA, 82 bp, Homo sapiens
tgggtcatcatcttgagttctgacatgagtgcctctctttcagagctgtctgctttttctgtcaaagaaaggagcattaaaa

SEQ ID NO: 47770 - DNA, 79 bp, Homo sapiens
atcttgagttctgacatgagtgcctctctttcagagctgtctgctttttctgtcaaagaaaggagcattaaaaatgtaa

SEQ ID NO: 47771 - DNA, 78 bp, Homo sapiens
ttctgacatgagtgcctctctttcagagctgtctgctttttctgtcaaagaaaggagcattaaaaatgtaaaactcaa

SEQ ID NO: 47772 - DNA, 71 bp, Homo sapiens
ctctaaaaataaaacaacacaaatgtaagaaagaacttctgcctgtggcaactgtatccccaaatatcaaa

SEQ ID NO: 47773 - DNA, 71 bp, Homo sapiens
aaaacaacacaaatgtaagaaagaacttctgcctgtggcaactgtatccccaaatatcaaagcctataaaa

SEQ ID NO: 47774 - DNA, 71 bp, Homo sapiens
aacacaaatgtaagaaagaacttctgcctgtggcaactgtatccccaaatatcaaagcctataaaaactaa

SEQ ID NO: 47775 - DNA, 73 bp, Homo sapiens
taagaaagaacttctgcctgtggcaactgtatccccaaatatcaaagcctataaaaactaaataggcctggca

SEQ ID NO: 47776 - DNA, 70 bp, Homo sapiens
taaaaataaacaaagagagaagtggaagaagaggtggagttttgtatttatgacttgaattttgtattca

SEQ ID NO: 47777 - DNA, 71 bp, Homo sapiens
aacaaagagagaagtggaagaagaggtggagttttgtatttatgacttgaattttgtattcatgactgggt

SEQ ID NO: 47778 - DNA, 72 bp, Homo sapiens
agagaagtggaagaagaggtggagttttgtatttatgacttgaattttgtattcatgactgggttgacaccc

SEQ ID NO: 47779 - DNA, 72 bp, Homo sapiens
gaggtggagttttgtatttatgacttgaattttgtattcatgactgggttgacaccccaatccactccattt

SEQ ID NO: 47780 - DNA, 73 bp, Homo sapiens
atttatgacttgaattttgtattcatgactgggttgacaccccaatccactccatttttagccttgaaacatg

SEQ ID NO: 47781 - DNA, 72 bp, Homo sapiens
aattttgtattcatgactgggttgacaccccaatccactccatttttagccttgaaacatggcaaacagtaa

SEQ ID NO: 47782 - DNA, 72 bp, Homo sapiens
attcatgactgggttgacaccccaatccactccatttttagccttgaaacatggcaaacagtaaccattaaa

SEQ ID NO: 47783 - DNA, 70 bp, Homo sapiens
gttgacaccccaatccactccatttttagccttgaaacatggcaaacagtaaccattaaaaggatggaaa

SEQ ID NO: 47784 - DNA, 69 bp, Homo sapiens
aatccactccatttttagccttgaaacatggcaaacagtaaccattaaaaggatggaaaagagaagaag

SEQ ID NO: 47785 - DNA, 69 bp, Homo sapiens
atttttagccttgaaacatggcaaacagtaaccattaaaaggatggaaaagagaagaaggcatgggtgg

SEQ ID NO: 47786 - DNA, 72 bp, Homo sapiens
ttgaaacatggcaaacagtaaccattaaaaggatggaaaagagaagaaggcatgggtgggaaactgtgcctc

SEQ ID NO: 47787 - DNA, 67 bp, Homo sapiens
aaacagtaaccattaaaaggatggaaaagagaagaaggcatgggtgggaaactgtgcctcccatttt

SEQ ID NO: 47788 - DNA, 71 bp, Homo sapiens
taaccattaaaaggatggaaaagagaagaaggcatgggtgggaaactgtgcctcccatttttgtgcatctt

SEQ ID NO: 47789 - DNA, 73 bp, Homo sapiens
aaggatggaaaagagaagaaggcatgggtgggaaactgtgcctcccatttttgtgcatctttgttgctgtcct

SEQ ID NO: 47790 - DNA, 75 bp, Homo sapiens
agaagaaggcatgggtgggaaactgtgcctcccatttttgtgcatctttgttgctgtccttccactatactgtac

SEQ ID NO: 47791 - DNA, 75 bp, Homo sapiens
tgggtgggaaactgtgcctcccatttttgtgcatctttgttgctgtccttccactatactgtacctttcagcatt

SEQ ID NO: 47792 - DNA, 76 bp, Homo sapiens
aactgtgcctcccatttttgtgcatctttgttgctgtccttccactatactgtacctttcagcattttgacggcaa

SEQ ID NO: 47793 - DNA, 77 bp, Homo sapiens
ccatttttgtgcatctttgttgctgtccttccactatactgtacctttcagcattttgacggcaacctggattgaga

SEQ ID NO: 47794 - DNA, 77 bp, Homo sapiens
tgcatctttgttgctgtccttccactatactgtacctttcagcattttgacggcaacctggattgagactcctgttt

SEQ ID NO: 47795 - DNA, 76 bp, Homo sapiens
ttgttgctgtccttccactatactgtacctttcagcattttgacggcaacctggattgagactcctgttttgctaa

SEQ ID NO: 47796 - DNA, 75 bp, Homo sapiens
tccttccactatactgtacctttcagcattttgacggcaacctggattgagactcctgttttgctaattccataa

SEQ ID NO: 47797 - DNA, 75 bp, Homo sapiens
atactgtacctttcagcattttgacggcaacctggattgagactcctgttttgctaattccataagctgttgcgt

SEQ ID NO: 47798 - DNA, 77 bp, Homo sapiens
tttcagcattttgacggcaacctggattgagactcctgttttgctaattccataagctgttgcgttcatcacttttc

SEQ ID NO: 47799 - DNA, 76 bp, Homo sapiens
ttgacggcaacctggattgagactcctgttttgctaattccataagctgttgcgttcatcacttttccaaaagcac

SEQ ID NO: 47800 - DNA, 75 bp, Homo sapiens
attgagactcctgttttgctaattccataagctgttgcgttcatcacttttccaaaagcacctgatcctagtacc

SEQ ID NO: 47801 - DNA, 73 bp, Homo sapiens
actcctgttttgctaattccataagctgttgcgttcatcacttttccaaaagcacctgatcctagtaccttcc

SEQ ID NO: 47802 - DNA, 75 bp, Homo sapiens
taattccataagctgttgcgttcatcacttttccaaaagcacctgatcctagtaccttccctgcaaagacaaatg

SEQ ID NO: 47803 - DNA, 75 bp, Homo sapiens
ataagctgttgcgttcatcacttttccaaaagcacctgatcctagtaccttccctgcaaagacaaatggtgagta

SEQ ID NO: 47804 - DNA, 74 bp, Homo sapiens
tcatcacttttccaaaagcacctgatcctagtaccttccctgcaaagacaaatggtgagtacgtgcattttaaa

SEQ ID NO: 47805 - DNA, 71 bp, Homo sapiens
acctgatcctagtaccttccctgcaaagacaaatggtgagtacgtgcattttaaagattttccaatggaaa

SEQ ID NO: 47806 - DNA, 74 bp, Homo sapiens
aaatggtgagtacgtgcattttaaagattttccaatggaaaagaaatgctgcagaaacatttggcacattccat

SEQ ID NO: 47807 - DNA, 74 bp, Homo sapiens
agtacgtgcattttaaagattttccaatggaaaagaaatgctgcagaaacatttggcacattccattcttacca

SEQ ID NO: 47808 - DNA, 74 bp, Homo sapiens
ttccaatggaaaagaaatgctgcagaaacatttggcacattccattcttaccaaactctaaattttctcttgga

SEQ ID NO: 47809 - DNA, 71 bp, Homo sapiens
aaaagaaatgctgcagaaacatttggcacattccattcttaccaaactctaaattttctcttggaaactcc

SEQ ID NO: 47810 - DNA, 75 bp, Homo sapiens
tgcagaaacatttggcacattccattcttaccaaactctaaattttctcttggaaactcccatttgagatcatat

SEQ ID NO: 47811 - DNA, 75 bp, Homo sapiens
catttggcacattccattcttaccaaactctaaattttctcttggaaactcccatttgagatcatattcatattc

SEQ ID NO: 47812 - DNA, 74 bp, Homo sapiens
cattcttaccaaactctaaattttctcttggaaactcccatttgagatcatattcatattctctgaaatcaacg

SEQ ID NO: 47813 - DNA, 74 bp, Homo sapiens
caaactctaaattttctcttggaaactcccatttgagatcatattcatattctctgaaatcaacgtagaagtac

SEQ ID NO: 47814 - DNA, 78 bp, Homo sapiens
attttctcttggaaactcccatttgagatcatattcatattctctgaaatcaacgtagaagtactcattatctgagga

SEQ ID NO: 47815 - DNA, 80 bp, Homo sapiens
tcttggaaactcccatttgagatcatattcatattctctgaaatcaacgtagaagtactcattatctgaggagccggtca

SEQ ID NO: 47816 - DNA, 79 bp, Homo sapiens
atattcatattctctgaaatcaacgtagaagtactcattatctgaggagccggtcacctgtaccatctgtagctggctt

SEQ ID NO: 47817 - DNA, 79 bp, Homo sapiens
tctctgaaatcaacgtagaagtactcattatctgaggagccggtcacctgtaccatctgtagctggctttcatacctaa

SEQ ID NO: 47818 - DNA, 75 bp, Homo sapiens
aaatcaacgtagaagtactcattatctgaggagccggtcacctgtaccatctgtagctggctttcatacctaaat

SEQ ID NO: 47819 - DNA, 79 bp, Homo sapiens
aagtactcattatctgaggagccggtcacctgtaccatctgtagctggctttcatacctaaattgcttcagagatgaaa

SEQ ID NO: 47820 - DNA, 80 bp, Homo sapiens
agccggtcacctgtaccatctgtagctggctttcatacctaaattgcttcagagatgaaatgatgagtcagttaggaata

SEQ ID NO: 47821 - DNA, 83 bp, Homo sapiens
tgtagctggctttcatacctaaattgcttcagagatgaaatgatgagtcagttaggaataggcagttctgcagatagaggaaa

SEQ ID NO: 47822 - DNA, 80 bp, Homo sapiens
atacctaaattgcttcagagatgaaatgatgagtcagttaggaataggcagttctgcagatagaggaaagaataatgaat

SEQ ID NO: 47823 - DNA, 79 bp, Homo sapiens
aaattgcttcagagatgaaatgatgagtcagttaggaataggcagttctgcagatagaggaaagaataatgaattttta

SEQ ID NO: 47824 - DNA, 74 bp, Homo sapiens
atgatgagtcagttaggaataggcagttctgcagatagaggaaagaataatgaatttttacctttgcttttacc

SEQ ID NO: 47825 - DNA, 69 bp, Homo sapiens
gttaggaataggcagttctgcagatagaggaaagaataatgaatttttacctttgcttttacctttttg

SEQ ID NO: 47826 - DNA, 71 bp, Homo sapiens
ggcagttctgcagatagaggaaagaataatgaatttttacctttgcttttacctttttgtacttgtgacaa

SEQ ID NO: 47827 - DNA, 70 bp, Homo sapiens
gcagatagaggaaagaataatgaatttttacctttgcttttacctttttgtacttgtgacaaattagcag

SEQ ID NO: 47828 - DNA, 65 bp, Homo sapiens
gaataatgaatttttacctttgcttttacctttttgtacttgtgacaaattagcagggttaaaac

SEQ ID NO: 47829 - DNA, 66 bp, Homo sapiens
ttttacctttgcttttacctttttgtacttgtgacaaattagcagggttaaaacgacaatgaagag

SEQ ID NO: 47830 - DNA, 68 bp, Homo sapiens
cctttgcttttacctttttgtacttgtgacaaattagcagggttaaaacgacaatgaagaggagacaa

SEQ ID NO: 47831 - DNA, 73 bp, Homo sapiens
ttttgtacttgtgacaaattagcagggttaaaacgacaatgaagaggagacaaacaccaattgttgcatagaa

SEQ ID NO: 47832 - DNA, 76 bp, Homo sapiens
tacttgtgacaaattagcagggttaaaacgacaatgaagaggagacaaacaccaattgttgcatagaatgagatgt

SEQ ID NO: 47833 - DNA, 75 bp, Homo sapiens
aaattagcagggttaaaacgacaatgaagaggagacaaacaccaattgttgcatagaatgagatgttgtcttgga

SEQ ID NO: 47834 - DNA, 75 bp, Homo sapiens
ggttaaaacgacaatgaagaggagacaaacaccaattgttgcatagaatgagatgttgtcttggatgaaagggaa

SEQ ID NO: 47835 - DNA, 77 bp, Homo sapiens
tgaagaggagacaaacaccaattgttgcatagaatgagatgttgtcttggatgaaagggaaggggcctgcaacaaaa

SEQ ID NO: 47836 - DNA, 77 bp, Homo sapiens
agacaaacaccaattgttgcatagaatgagatgttgtcttggatgaaagggaaggggcctgcaacaaaagagtgtca

SEQ ID NO: 47837 - DNA, 79 bp, Homo sapiens
aattgttgcatagaatgagatgttgtcttggatgaaagggaaggggcctgcaacaaaagagtgtcactcagcgatgaaa

SEQ ID NO: 47838 - DNA, 78 bp, Homo sapiens
atagaatgagatgttgtcttggatgaaagggaaggggcctgcaacaaaagagtgtcactcagcgatgaaacagaattc

SEQ ID NO: 47839 - DNA, 78 bp, Homo sapiens
ttgtcttggatgaaagggaaggggcctgcaacaaaagagtgtcactcagcgatgaaacagaattcctgtgtgacatta

SEQ ID NO: 47840 - DNA, 79 bp, Homo sapiens
ggggcctgcaacaaaagagtgtcactcagcgatgaaacagaattcctgtgtgacattataaatagtggacaactcatta

SEQ ID NO: 47841 - DNA, 81 bp, Homo sapiens
agtgtcactcagcgatgaaacagaattcctgtgtgacattataaatagtggacaactcattataatctctcacatcctgtt

SEQ ID NO: 47842 - DNA, 80 bp, Homo sapiens
agcgatgaaacagaattcctgtgtgacattataaatagtggacaactcattataatctctcacatcctgtttcagtaata

SEQ ID NO: 47843 - DNA, 78 bp, Homo sapiens
aacagaattcctgtgtgacattataaatagtggacaactcattataatctctcacatcctgtttcagtaataatcatt

SEQ ID NO: 47844 - DNA, 79 bp, Homo sapiens
ctgtgtgacattataaatagtggacaactcattataatctctcacatcctgtttcagtaataatcattttcagtcctaa

SEQ ID NO: 47845 - DNA, 77 bp, Homo sapiens
aatagtggacaactcattataatctctcacatcctgtttcagtaataatcattttcagtcctaacaaccactctaca

SEQ ID NO: 47846 - DNA, 78 bp, Homo sapiens
caactcattataatctctcacatcctgtttcagtaataatcattttcagtcctaacaaccactctacatatactctac

SEQ ID NO: 47847 - DNA, 76 bp, Homo sapiens
attataatctctcacatcctgtttcagtaataatcattttcagtcctaacaaccactctacatatactctactccc

SEQ ID NO: 47848 - DNA, 76 bp, Homo sapiens
acatcctgtttcagtaataatcattttcagtcctaacaaccactctacatatactctactccccacagacaatcag

SEQ ID NO: 47849 - DNA, 77 bp, Homo sapiens
tttcagtaataatcattttcagtcctaacaaccactctacatatactctactccccacagacaatcaggcaatgtcc

SEQ ID NO: 47850 - DNA, 76 bp, Homo sapiens
taatcattttcagtcctaacaaccactctacatatactctactccccacagacaatcaggcaatgtccctgtaaag

SEQ ID NO: 47851 - DNA, 75 bp, Homo sapiens
agtcctaacaaccactctacatatactctactccccacagacaatcaggcaatgtccctgtaaaggatacatttc

SEQ ID NO: 47852 - DNA, 74 bp, Homo sapiens
actctacatatactctactccccacagacaatcaggcaatgtccctgtaaaggatacatttcctccctagaaaa

SEQ ID NO: 47853 - DNA, 74 bp, Homo sapiens
tactctactccccacagacaatcaggcaatgtccctgtaaaggatacatttcctccctagaaaattgcggatta

SEQ ID NO: 47854 - DNA, 75 bp, Homo sapiens
ccacagacaatcaggcaatgtccctgtaaaggatacatttcctccctagaaaattgcggattattctcaatccat

SEQ ID NO: 47855 - DNA, 73 bp, Homo sapiens
aatcaggcaatgtccctgtaaaggatacatttcctccctagaaaattgcggattattctcaatccattcttta

SEQ ID NO: 47856 - DNA, 69 bp, Homo sapiens
gtccctgtaaaggatacatttcctccctagaaaattgcggattattctcaatccattctttaaaaccat

SEQ ID NO: 47857 - DNA, 69 bp, Homo sapiens
ggatacatttcctccctagaaaattgcggattattctcaatccattctttaaaaccatttactagggta

SEQ ID NO: 47858 - DNA, 67 bp, Homo sapiens
cctccctagaaaattgcggattattctcaatccattctttaaaaccatttactagggtaaatttaca

SEQ ID NO: 47859 - DNA, 67 bp, Homo sapiens
ctagaaaattgcggattattctcaatccattctttaaaaccatttactagggtaaatttacaagaat

SEQ ID NO: 47860 - DNA, 70 bp, Homo sapiens
gcggattattctcaatccattctttaaaaccatttactagggtaaatttacaagaattacatctggtcca

SEQ ID NO: 47861 - DNA, 71 bp, Homo sapiens
ctcaatccattctttaaaaccatttactagggtaaatttacaagaattacatctggtccaggcacgatggc

SEQ ID NO: 47862 - DNA, 72 bp, Homo sapiens
ttctagtggggaattcctgatggtggaatatcacaagaacaactgttgtacctggagagtttaaaaggatcg

SEQ ID NO: 47863 - DNA, 76 bp, Homo sapiens
aattcctgatggtggaatatcacaagaacaactgttgtacctggagagtttaaaaggatcgtctcacaagatgtgc

SEQ ID NO: 47864 - DNA, 75 bp, Homo sapiens
gaatatcacaagaacaactgttgtacctggagagtttaaaaggatcgtctcacaagatgtgccaagggaattgta

SEQ ID NO: 47865 - DNA, 77 bp, Homo sapiens
acaagaacaactgttgtacctggagagtttaaaaggatcgtctcacaagatgtgccaagggaattgtatgcacagca

SEQ ID NO: 47866 - DNA, 77 bp, Homo sapiens
aactgttgtacctggagagtttaaaaggatcgtctcacaagatgtgccaagggaattgtatgcacagcacttgacca

SEQ ID NO: 47867 - DNA, 74 bp, Homo sapiens
agagtttaaaaggatcgtctcacaagatgtgccaagggaattgtatgcacagcacttgaccaggaaccctttta

SEQ ID NO: 47868 - DNA, 77 bp, Homo sapiens
ttaaaaggatcgtctcacaagatgtgccaagggaattgtatgcacagcacttgaccaggaacccttttatggcttca

SEQ ID NO: 47869 - DNA, 80 bp, Homo sapiens
tctcacaagatgtgccaagggaattgtatgcacagcacttgaccaggaacccttttatggcttcactcatgtttagagta

SEQ ID NO: 47870 - DNA, 79 bp, Homo sapiens
atgtgccaagggaattgtatgcacagcacttgaccaggaacccttttatggcttcactcatgtttagagtactgctcga

SEQ ID NO: 47871 - DNA, 78 bp, Homo sapiens
aattgtatgcacagcacttgaccaggaacccttttatggcttcactcatgtttagagtactgctcgacacccactgtc

SEQ ID NO: 47872 - DNA, 74 bp, Homo sapiens
agcacttgaccaggaacccttttatggcttcactcatgtttagagtactgctcgacacccactgtccaaacact

SEQ ID NO: 47873 - DNA, 73 bp, Homo sapiens
ttgaccaggaacccttttatggcttcactcatgtttagagtactgctcgacacccactgtccaaacacttttc

SEQ ID NO: 47874 - DNA, 74 bp, Homo sapiens
ttttatggcttcactcatgtttagagtactgctcgacacccactgtccaaacacttttctgttagcctttctat

SEQ ID NO: 47875 - DNA, 75 bp, Homo sapiens
tcactcatgtttagagtactgctcgacacccactgtccaaacacttttctgttagcctttctattccagactcct

SEQ ID NO: 47876 - DNA, 73 bp, Homo sapiens
atgtttagagtactgctcgacacccactgtccaaacacttttctgttagcctttctattccagactccttctg

SEQ ID NO: 47877 - DNA, 79 bp, Homo sapiens
tactgctcgacacccactgtccaaacacttttctgttagcctttctattccagactccttctgtgatctcttctgtgca

SEQ ID NO: 47878 - DNA, 76 bp, Homo sapiens
cccactgtccaaacacttttctgttagcctttctattccagactccttctgtgatctcttctgtgcagctgaaaaa

SEQ ID NO: 47879 - DNA, 73 bp, Homo sapiens
ccaaacacttttctgttagcctttctattccagactccttctgtgatctcttctgtgcagctgaaaaaaaaaa

SEQ ID NO: 47880 - DNA, 76 bp, Homo sapiens
tctgttagcctttctattccagactccttctgtgatctcttctgtgcagctgaaaaaaaaaatagcaaagaattta

SEQ ID NO: 47881 - DNA, 76 bp, Homo sapiens
ctttctattccagactccttctgtgatctcttctgtgcagctgaaaaaaaaaatagcaaagaatttagacaggtga

SEQ ID NO: 47882 - DNA, 74 bp, Homo sapiens
agagttttatgttcttccattataagaggcatcaatgtccttattacttgggagacttgtctgaacacttcttc

SEQ ID NO: 47883 - DNA, 76 bp, Homo sapiens
tatgttcttccattataagaggcatcaatgtccttattacttgggagacttgtctgaacacttcttccaggtccaa

SEQ ID NO: 47884 - DNA, 75 bp, Homo sapiens
attataagaggcatcaatgtccttattacttgggagacttgtctgaacacttcttccaggtccaagatggtaatg

SEQ ID NO: 47885 - DNA, 74 bp, Homo sapiens
atcaatgtccttattacttgggagacttgtctgaacacttcttccaggtccaagatggtaatgggtatccatcc

SEQ ID NO: 47886 - DNA, 73 bp, Homo sapiens
ttattacttgggagacttgtctgaacacttcttccaggtccaagatggtaatgggtatccatccgagaaacag
